United States Patent Application Publication US 2014/0004565 A1 - sequence listing, part 82

SEQ ID NO: 2014592 - RNA, 19 nt, Artificial Sequence
  Description of Artificial Sequence: Synthetic oligonucleotide
ccuauuccaaagggccuua

SEQ ID NO: 2014593 - RNA, 19 nt, Artificial Sequence
  Description of Artificial Sequence: Synthetic oligonucleotide
cucgagacugagggacuau

SEQ ID NO: 2014594 - RNA, 19 nt, Artificial Sequence
  Description of Artificial Sequence: Synthetic oligonucleotide
ggguagagcugaggcuaaa

SEQ ID NO: 2014595 - RNA, 19 nt, Artificial Sequence
  Description of Artificial Sequence: Synthetic oligonucleotide
ccucgagacugagggacua

SEQ ID NO: 2014596 - RNA, 19 nt, Artificial Sequence
  Description of Artificial Sequence: Synthetic oligonucleotide
ccagcuggugaccccuccu

SEQ ID NO: 2014597 - RNA, 19 nt, Artificial Sequence
  Description of Artificial Sequence: Synthetic oligonucleotide
cccuauuccaaagggccuu

SEQ ID NO: 2014598 - RNA, 19 nt, Artificial Sequence
  Description of Artificial Sequence: Synthetic oligonucleotide
cccucgagacugagggacu

SEQ ID NO: 2014599 - RNA, 19 nt, Artificial Sequence
  Description of Artificial Sequence: Synthetic oligonucleotide
cuggugcgcucacccugau

SEQ ID NO: 2014600 - RNA, 19 nt, Artificial Sequence
  Description of Artificial Sequence: Synthetic oligonucleotide
gagcuucggcgaagccuuu

SEQ ID NO: 2014601 - RNA, 19 nt, Artificial Sequence
  Description of Artificial Sequence: Synthetic oligonucleotide
cgaugguguuugaccagau

SEQ ID NO: 2014602 - RNA, 19 nt, Artificial Sequence
  Description of Artificial Sequence: Synthetic oligonucleotide
cgcccucgagacugaggga

SEQ ID NO: 2014603 - RNA, 19 nt, Artificial Sequence
  Description of Artificial Sequence: Synthetic oligonucleotide
gcgaagccuuugccacacu

SEQ ID NO: 2014604 - RNA, 19 nt, Artificial Sequence
  Description of Artificial Sequence: Synthetic oligonucleotide
ccccgcccucgagacugag

SEQ ID NO: 2014605 - RNA, 19 nt, Artificial Sequence
  Description of Artificial Sequence: Synthetic oligonucleotide
ggugcccacgcuggugcuu

SEQ ID NO: 2014606 - RNA, 19 nt, Artificial Sequence
  Description of Artificial Sequence: Synthetic oligonucleotide
gcccacgcuggugcuugau

SEQ ID NO: 2014607 - RNA, 19 nt, Artificial Sequence
  Description of Artificial Sequence: Synthetic oligonucleotide
auuacaaugauaaauacuc

SEQ ID NO: 2014608 - RNA, 19 nt, Artificial Sequence
  Description of Artificial Sequence: Synthetic oligonucleotide
ugauaaauacucacgaacg

SEQ ID NO: 2014609 - RNA, 19 nt, Artificial Sequence
  Description of Artificial Sequence: Synthetic oligonucleotide
ugacacauuaguuaaauag

SEQ ID NO: 2014610 - RNA, 19 nt, Artificial Sequence
  Description of Artificial Sequence: Synthetic oligonucleotide
aaaccaacucuuuaagagc

SEQ ID NO: 2014611 - RNA, 19 nt, Artificial Sequence
  Description of Artificial Sequence: Synthetic oligonucleotide
aguaaucuuuucuuuaagc

SEQ ID NO: 2014612 - RNA, 19 nt, Artificial Sequence
  Description of Artificial Sequence: Synthetic oligonucleotide
aaauaguucagcugucugg

SEQ ID NO: 2014613 - RNA, 19 nt, Artificial Sequence
  Description of Artificial Sequence: Synthetic oligonucleotide
uuuaagacuuuucugagga

SEQ ID NO: 2014614 - RNA, 19 nt, Artificial Sequence
  Description of Artificial Sequence: Synthetic oligonucleotide
uugaauuucucuuuaacug

SEQ ID NO: 2014615 - RNA, 19 nt, Artificial Sequence
  Description of Artificial Sequence: Synthetic oligonucleotide
uggggaugaauuaugaagg

SEQ ID NO: 2014616 - RNA, 19 nt, Artificial Sequence
  Description of Artificial Sequence: Synthetic oligonucleotide
aguuaaauaguucagcugu

SEQ ID NO: 2014617 - RNA, 19 nt, Artificial Sequence
  Description of Artificial Sequence: Synthetic oligonucleotide
uuaaacaguacaauuacaa

SEQ ID NO: 2014618 - RNA, 19 nt, Artificial Sequence
  Description of Artificial Sequence: Synthetic oligonucleotide
uuuguuuaaaauuucuaga

SEQ ID NO: 2014619 - RNA, 19 nt, Artificial Sequence
  Description of Artificial Sequence: Synthetic oligonucleotide
uuuauuagcucuuugcugu

SEQ ID NO: 2014620 - RNA, 19 nt, Artificial Sequence
  Description of Artificial Sequence: Synthetic oligonucleotide
uuugauuuaaacaguacaa

SEQ ID NO: 2014621 - RNA, 19 nt, Artificial Sequence
  Description of Artificial Sequence: Synthetic oligonucleotide
uacccuauuacuauccacg

SEQ ID NO: 2014622 - RNA, 19 nt, Artificial Sequence
  Description of Artificial Sequence: Synthetic oligonucleotide
uuaagagccaucaaguuuc

SEQ ID NO: 2014623 - RNA, 19 nt, Artificial Sequence
  Description of Artificial Sequence: Synthetic oligonucleotide
ggcauuuugauuuaaacag

SEQ ID NO: 2014624 - RNA, 19 nt, Artificial Sequence
  Description of Artificial Sequence: Synthetic oligonucleotide
aaauuucuagaauugcuga

SEQ ID NO: 2014625 - RNA, 19 nt, Artificial Sequence
  Description of Artificial Sequence: Synthetic oligonucleotide
ucuucuuagaagcauuugc

SEQ ID NO: 2014626 - RNA, 19 nt, Artificial Sequence
  Description of Artificial Sequence: Synthetic oligonucleotide
acauuaguuaaauaguuca

SEQ ID NO: 2014627 - RNA, 19 nt, Artificial Sequence
  Description of Artificial Sequence: Synthetic oligonucleotide
aauaguucagcugucuggg

SEQ ID NO: 2014628 - RNA, 19 nt, Artificial Sequence
  Description of Artificial Sequence: Synthetic oligonucleotide
uguaguaaagccaguuccg

SEQ ID NO: 2014629 - RNA, 19 nt, Artificial Sequence
  Description of Artificial Sequence: Synthetic oligonucleotide
cagaaucucaauuuggugc

SEQ ID NO: 2014630 - RNA, 19 nt, Artificial Sequence
  Description of Artificial Sequence: Synthetic oligonucleotide
aguaugggugcuuuaagac

SEQ ID NO: 2014631 - RNA, 19 nt, Artificial Sequence
  Description of Artificial Sequence: Synthetic oligonucleotide
uuaguuaaauaguucagcu

SEQ ID NO: 2014632 - RNA, 19 nt, Artificial Sequence
  Description of Artificial Sequence: Synthetic oligonucleotide
ucuuaaagaaggcaagucu

SEQ ID NO: 2014633 - RNA, 19 nt, Artificial Sequence
  Description of Artificial Sequence: Synthetic oligonucleotide
auaaauacucacgaacgcc

SEQ ID NO: 2014634 - RNA, 19 nt, Artificial Sequence
  Description of Artificial Sequence: Synthetic oligonucleotide
uuugcaaauauucuucagu

SEQ ID NO: 2014635 - RNA, 19 nt, Artificial Sequence
  Description of Artificial Sequence: Synthetic oligonucleotide
ugcuuuaagacuuuucuga

SEQ ID NO: 2014636 - RNA, 19 nt, Artificial Sequence
  Description of Artificial Sequence: Synthetic oligonucleotide
aacaguacaauuacaauga

SEQ ID NO: 2014637 - RNA, 19 nt, Artificial Sequence
  Description of Artificial Sequence: Synthetic oligonucleotide
agagacaguacccuauuac

SEQ ID NO: 2014638 - RNA, 19 nt, Artificial Sequence
  Description of Artificial Sequence: Synthetic oligonucleotide
caucaaguuucuuauaggc

SEQ ID NO: 2014639 - RNA, 19 nt, Artificial Sequence
  Description of Artificial Sequence: Synthetic oligonucleotide
uguuguaguaaucuuuucu

SEQ ID NO: 2014640 - RNA, 19 nt, Artificial Sequence
  Description of Artificial Sequence: Synthetic oligonucleotide
aaauccauccccuucggga

SEQ ID NO: 2014641 - RNA, 19 nt, Artificial Sequence
  Description of Artificial Sequence: Synthetic oligonucleotide
aauccacuuccucauuagc

SEQ ID NO: 2014642 - RNA, 19 nt, Artificial Sequence
  Description of Artificial Sequence: Synthetic oligonucleotide
gaagcauuugcuuuaccag

SEQ ID NO: 2014643 - RNA, 19 nt, Artificial Sequence
  Description of Artificial Sequence: Synthetic oligonucleotide
ugucagaaucucaauuugg

SEQ ID NO: 2014644 - RNA, 19 nt, Artificial Sequence
  Description of Artificial Sequence: Synthetic oligonucleotide
uaaauacucacgaacgccu

SEQ ID NO: 2014645 - RNA, 19 nt, Artificial Sequence
  Description of Artificial Sequence: Synthetic oligonucleotide
uacaaugauaaauacucac

SEQ ID NO: 2014646 - RNA, 19 nt, Artificial Sequence
  Description of Artificial Sequence: Synthetic oligonucleotide
uuggaugcuacucuuaccu

SEQ ID NO: 2014647 - RNA, 19 nt, Artificial Sequence
  Description of Artificial Sequence: Synthetic oligonucleotide
uuaugaaggacauccaagu

SEQ ID NO: 2014648 - RNA, 19 nt, Artificial Sequence
  Description of Artificial Sequence: Synthetic oligonucleotide
ugaugcucaaaauccaucc

SEQ ID NO: 2014649 - RNA, 19 nt, Artificial Sequence
  Description of Artificial Sequence: Synthetic oligonucleotide
acucacgaacgccugaugc

SEQ ID NO: 2014650 - RNA, 19 nt, Artificial Sequence
  Description of Artificial Sequence: Synthetic oligonucleotide
aauuaugaaggacauccaa

SEQ ID NO: 2014651 - RNA, 19 nt, Artificial Sequence
  Description of Artificial Sequence: Synthetic oligonucleotide
uucuuuaagcaguugaggu

SEQ ID NO: 2014652 - RNA, 19 nt, Artificial Sequence
  Description of Artificial Sequence: Synthetic oligonucleotide
cuggggaugaauuaugaag

SEQ ID NO: 2014653 - RNA, 19 nt, Artificial Sequence
  Description of Artificial Sequence: Synthetic oligonucleotide
uuuagaggacagaugcccg

SEQ ID NO: 2014654 - RNA, 19 nt, Artificial Sequence
  Description of Artificial Sequence: Synthetic oligonucleotide
ugacauguucuucacuggg

SEQ ID NO: 2014655 - RNA, 19 nt, Artificial Sequence
  Description of Artificial Sequence: Synthetic oligonucleotide
auuacuauccacgugaaau

SEQ ID NO: 2014656 - RNA, 19 nt, Artificial Sequence
  Description of Artificial Sequence: Synthetic oligonucleotide
ucagucauugauucuguag

SEQ ID NO: 2014657 - RNA, 19 nt, Artificial Sequence
  Description of Artificial Sequence: Synthetic oligonucleotide
auuagcucuuugcugugcc

SEQ ID NO: 2014658 - RNA, 19 nt, Artificial Sequence
  Description of Artificial Sequence: Synthetic oligonucleotide
uuucuuuaagcaguugagg

SEQ ID NO: 2014659 - RNA, 19 nt, Artificial Sequence
  Description of Artificial Sequence: Synthetic oligonucleotide
acaaugauaaauacucacg

SEQ ID NO: 2014660 - RNA, 19 nt, Artificial Sequence
  Description of Artificial Sequence: Synthetic oligonucleotide
uuaccaggcauuuugauuu

SEQ ID NO: 2014661 - RNA, 19 nt, Artificial Sequence
  Description of Artificial Sequence: Synthetic oligonucleotide
cucuuuaagagccaucaag

SEQ ID NO: 2014662 - RNA, 19 nt, Artificial Sequence
  Description of Artificial Sequence: Synthetic oligonucleotide
uaagacuuuucugaggaag

SEQ ID NO: 2014663 - RNA, 19 nt, Artificial Sequence
  Description of Artificial Sequence: Synthetic oligonucleotide
ugcuuuaggcucugaaucg

SEQ ID NO: 2014664 - RNA, 19 nt, Artificial Sequence
  Description of Artificial Sequence: Synthetic oligonucleotide
ucuagaauugcugauucca

SEQ ID NO: 2014665 - RNA, 19 nt, Artificial Sequence
  Description of Artificial Sequence: Synthetic oligonucleotide
agaauugcugauuccauca

SEQ ID NO: 2014666 - RNA, 19 nt, Artificial Sequence
  Description of Artificial Sequence: Synthetic oligonucleotide
ucuuuaagcaguugaggug

SEQ ID NO: 2014667 - RNA, 19 nt, Artificial Sequence
  Description of Artificial Sequence: Synthetic oligonucleotide
uuuaagagccaucaaguuu

SEQ ID NO: 2014668 - RNA, 19 nt, Artificial Sequence
  Description of Artificial Sequence: Synthetic oligonucleotide
aaguaugggugcuuuaaga

SEQ ID NO: 2014669 - RNA, 19 nt, Artificial Sequence
  Description of Artificial Sequence: Synthetic oligonucleotide
ucgguuaauacauuuugcu

SEQ ID NO: 2014670 - RNA, 19 nt, Artificial Sequence
  Description of Artificial Sequence: Synthetic oligonucleotide
ugauuuaaacaguacaauu

SEQ ID NO: 2014671 - RNA, 19 nt, Artificial Sequence
  Description of Artificial Sequence: Synthetic oligonucleotide
uucucuuuaacuguugaga

SEQ ID NO: 2014672 - RNA, 19 nt, Artificial Sequence
  Description of Artificial Sequence: Synthetic oligonucleotide
accuguuuucgguuaauac

SEQ ID NO: 2014673 - RNA, 19 nt, Artificial Sequence
  Description of Artificial Sequence: Synthetic oligonucleotide
cauuaguuaaauaguucag

SEQ ID NO: 2014674 - RNA, 19 nt, Artificial Sequence
  Description of Artificial Sequence: Synthetic oligonucleotide
aauuucuagaauugcugau

SEQ ID NO: 2014675 - RNA, 19 nt, Artificial Sequence
  Description of Artificial Sequence: Synthetic oligonucleotide
uucgguuaauacauuuugc

SEQ ID NO: 2014676 - RNA, 19 nt, Artificial Sequence
  Description of Artificial Sequence: Synthetic oligonucleotide
uuucuagaauugcugauuc

SEQ ID NO: 2014677 - RNA, 19 nt, Artificial Sequence
  Description of Artificial Sequence: Synthetic oligonucleotide
cuuuaagacuuuucugagg

SEQ ID NO: 2014678 - RNA, 19 nt, Artificial Sequence
  Description of Artificial Sequence: Synthetic oligonucleotide
cuuuagaggacagaugccc

SEQ ID NO: 2014679 - RNA, 19 nt, Artificial Sequence
  Description of Artificial Sequence: Synthetic oligonucleotide
aaaauccauccccuucggg

SEQ ID NO: 2014680 - RNA, 19 nt, Artificial Sequence
  Description of Artificial Sequence: Synthetic oligonucleotide
uaguuaaauaguucagcug

SEQ ID NO: 2014681 - RNA, 19 nt, Artificial Sequence
  Description of Artificial Sequence: Synthetic oligonucleotide
agaaucucaauuuggugcu

SEQ ID NO: 2014682 - RNA, 19 nt, Artificial Sequence
  Description of Artificial Sequence: Synthetic oligonucleotide
aggaaguucuggaagagac

SEQ ID NO: 2014683 - RNA, 19 nt, Artificial Sequence
  Description of Artificial Sequence: Synthetic oligonucleotide
ucugaaucgucucagucau

SEQ ID NO: 2014684 - RNA, 19 nt, Artificial Sequence
  Description of Artificial Sequence: Synthetic oligonucleotide
aaauauucuucagucgucu

SEQ ID NO: 2014685 - RNA, 19 nt, Artificial Sequence
  Description of Artificial Sequence: Synthetic oligonucleotide
ugaaucgucucagucauug

SEQ ID NO: 2014686 - RNA, 19 nt, Artificial Sequence
  Description of Artificial Sequence: Synthetic oligonucleotide
uuacaaugauaaauacuca

SEQ ID NO: 2014687 - RNA, 19 nt, Artificial Sequence
  Description of Artificial Sequence: Synthetic oligonucleotide
uggaauuacugccaaaauu

SEQ ID NO: 2014688 - RNA, 19 nt, Artificial Sequence
  Description of Artificial Sequence: Synthetic oligonucleotide
uaccucauuugucagaauc

SEQ ID NO: 2014689 - RNA, 19 nt, Artificial Sequence
  Description of Artificial Sequence: Synthetic oligonucleotide
aaucgucucagucauugau

SEQ ID NO: 2014690 - RNA, 19 nt, Artificial Sequence
  Description of Artificial Sequence: Synthetic oligonucleotide
ucuucagucgucuuuggaa

SEQ ID NO: 2014691 - RNA, 19 nt, Artificial Sequence
  Description of Artificial Sequence: Synthetic oligonucleotide
uguaguaaucuuuucuuua

SEQ ID NO: 2014692 - RNA, 19 nt, Artificial Sequence
  Description of Artificial Sequence: Synthetic oligonucleotide
uguugagauuucuucuuag

SEQ ID NO: 2014693 - RNA, 19 nt, Artificial Sequence
  Description of Artificial Sequence: Synthetic oligonucleotide
auuaugaaggacauccaag

SEQ ID NO: 2014694 - RNA, 19 nt, Artificial Sequence
  Description of Artificial Sequence: Synthetic oligonucleotide
uaguaaucuuuucuuuaag

SEQ ID NO: 2014695 - RNA, 19 nt, Artificial Sequence
  Description of Artificial Sequence: Synthetic oligonucleotide
ucagaaucucaauuuggug

SEQ ID NO: 2014696 - RNA, 19 nt, Artificial Sequence
  Description of Artificial Sequence: Synthetic oligonucleotide
uaguucagcugucugggag

SEQ ID NO: 2014697 - RNA, 19 nt, Artificial Sequence
  Description of Artificial Sequence: Synthetic oligonucleotide
ucuacuauuuugucuauuu

SEQ ID NO: 2014698 - RNA, 19 nt, Artificial Sequence
  Description of Artificial Sequence: Synthetic oligonucleotide
ugaggugauacugaauuug

SEQ ID NO: 2014699 - RNA, 19 nt, Artificial Sequence
  Description of Artificial Sequence: Synthetic oligonucleotide
agucauugauucuguaguc

SEQ ID NO: 2014700 - RNA, 19 nt, Artificial Sequence
  Description of Artificial Sequence: Synthetic oligonucleotide
uaagcaguugaggugauac

SEQ ID NO: 2014701 - RNA, 19 nt, Artificial Sequence
  Description of Artificial Sequence: Synthetic oligonucleotide
cuucagucgucuuuggaag

SEQ ID NO: 2014702 - RNA, 19 nt, Artificial Sequence
  Description of Artificial Sequence: Synthetic oligonucleotide
uacucuuaccuguuuucgg

SEQ ID NO: 2014703 - RNA, 19 nt, Artificial Sequence
  Description of Artificial Sequence: Synthetic oligonucleotide
ucucuuuaacuguugagau

SEQ ID NO: 2014704 - RNA, 19 nt, Artificial Sequence
  Description of Artificial Sequence: Synthetic oligonucleotide
uaaacaguacaauuacaau

SEQ ID NO: 2014705 - RNA, 19 nt, Artificial Sequence
  Description of Artificial Sequence: Synthetic oligonucleotide
caaugauaaauacucacga

SEQ ID NO: 2014706 - RNA, 19 nt, Artificial Sequence
  Description of Artificial Sequence: Synthetic oligonucleotide
ugucuauuucuuccuguag

SEQ ID NO: 2014707 - RNA, 19 nt, Artificial Sequence
  Description of Artificial Sequence: Synthetic oligonucleotide
uuaaagaaggcaagucuua

SEQ ID NO: 2014708 - RNA, 19 nt, Artificial Sequence
  Description of Artificial Sequence: Synthetic oligonucleotide
acgccugaugcucaaaauc

SEQ ID NO: 2014709 - RNA, 19 nt, Artificial Sequence
  Description of Artificial Sequence: Synthetic oligonucleotide
auacauuuugcuucuccug

SEQ ID NO: 2014710 - RNA, 19 nt, Artificial Sequence
  Description of Artificial Sequence: Synthetic oligonucleotide
uuauaggcuucuugaauga

SEQ ID NO: 2014711 - RNA, 19 nt, Artificial Sequence
  Description of Artificial Sequence: Synthetic oligonucleotide
gaaguaugggugcuuuaag

SEQ ID NO: 2014712 - RNA, 19 nt, Artificial Sequence
  Description of Artificial Sequence: Synthetic oligonucleotide
ucgucuuuggaagaggcug

SEQ ID NO: 2014713 - RNA, 19 nt, Artificial Sequence
  Description of Artificial Sequence: Synthetic oligonucleotide
ugugccguuuccauuuuca

SEQ ID NO: 2014714 - RNA, 19 nt, Artificial Sequence
  Description of Artificial Sequence: Synthetic oligonucleotide
acucaucgcaguugacucc

SEQ ID NO: 2014715 - RNA, 19 nt, Artificial Sequence
  Description of Artificial Sequence: Synthetic oligonucleotide
aucgcaguugacucccggc

SEQ ID NO: 2014716 - RNA, 19 nt, Artificial Sequence
  Description of Artificial Sequence: Synthetic oligonucleotide
aauacucacgaacgccuga

SEQ ID NO: 2014717 - RNA, 19 nt, Artificial Sequence
  Description of Artificial Sequence: Synthetic oligonucleotide
aauccauccccuucgggau

SEQ ID NO: 2014718 - RNA, 19 nt, Artificial Sequence
  Description of Artificial Sequence: Synthetic oligonucleotide
uuuaccaggcauuuugauu

SEQ ID NO: 2014719 - RNA, 19 nt, Artificial Sequence
  Description of Artificial Sequence: Synthetic oligonucleotide
acaguacccuauuacuauc

SEQ ID NO: 2014720 - RNA, 19 nt, Artificial Sequence
  Description of Artificial Sequence: Synthetic oligonucleotide
auccacgugaaauuucucu

SEQ ID NO: 2014721 - RNA, 19 nt, Artificial Sequence
  Description of Artificial Sequence: Synthetic oligonucleotide
caggcauuuugauuuaaac

SEQ ID NO: 2014722 - RNA, 19 nt, Artificial Sequence
  Description of Artificial Sequence: Synthetic oligonucleotide
cacauuaguuaaauaguuc

SEQ ID NO: 2014723 - RNA, 19 nt, Artificial Sequence
  Description of Artificial Sequence: Synthetic oligonucleotide
uuaaauaguucagcugucu

SEQ ID NO: 2014724 - RNA, 19 nt, Artificial Sequence
  Description of Artificial Sequence: Synthetic oligonucleotide
uguuccacacuguuguagu

SEQ ID NO: 2014725 - RNA, 19 nt, Artificial Sequence
  Description of Artificial Sequence: Synthetic oligonucleotide
uuuucgguuaauacauuuu

SEQ ID NO: 2014726 - RNA, 19 nt, Artificial Sequence
  Description of Artificial Sequence: Synthetic oligonucleotide
uuuggaugcuacucuuacc

SEQ ID NO: 2014727 - RNA, 19 nt, Artificial Sequence
  Description of Artificial Sequence: Synthetic oligonucleotide
gcugacauguucuucacug

SEQ ID NO: 2014728 - RNA, 19 nt, Artificial Sequence
  Description of Artificial Sequence: Synthetic oligonucleotide
aguuccgcuuuauuagcuc

SEQ ID NO: 2014729 - RNA, 19 nt, Artificial Sequence
  Description of Artificial Sequence: Synthetic oligonucleotide
acucuuaccuguuuucggu

SEQ ID NO: 2014730 - RNA, 19 nt, Artificial Sequence
  Description of Artificial Sequence: Synthetic oligonucleotide
cuuuaagcaguugagguga

SEQ ID NO: 2014731 - RNA, 19 nt, Artificial Sequence
  Description of Artificial Sequence: Synthetic oligonucleotide
ucuaccucauuugucagaa

SEQ ID NO: 2014732 - RNA, 19 nt, Artificial Sequence
  Description of Artificial Sequence: Synthetic oligonucleotide
uuagcucuuugcugugccg

SEQ ID NO: 2014733 - RNA, 19 nt, Artificial Sequence
  Description of Artificial Sequence: Synthetic oligonucleotide
gccaucaaguuucuuauag

SEQ ID NO: 2014734 - RNA, 19 nt, Artificial Sequence
  Description of Artificial Sequence: Synthetic oligonucleotide
ucgucucagucauugauuc

SEQ ID NO: 2014735 - RNA, 19 nt, Artificial Sequence
  Description of Artificial Sequence: Synthetic oligonucleotide
agcaguugaggugauacug

SEQ ID NO: 2014736 - RNA, 19 nt, Artificial Sequence
  Description of Artificial Sequence: Synthetic oligonucleotide
ugccguuuccauuuucagc

SEQ ID NO: 2014737 - RNA, 19 nt, Artificial Sequence
  Description of Artificial Sequence: Synthetic oligonucleotide
ucacuggggaugaauuaug

SEQ ID NO: 2014738 - RNA, 19 nt, Artificial Sequence
  Description of Artificial Sequence: Synthetic oligonucleotide
ugaaguaugggugcuuuaa

SEQ ID NO: 2014739 - RNA, 19 nt, Artificial Sequence
  Description of Artificial Sequence: Synthetic oligonucleotide
ucgcaguugacucccggcc

SEQ ID NO: 2014740 - RNA, 19 nt, Artificial Sequence
  Description of Artificial Sequence: Synthetic oligonucleotide
uuacuauccacgugaaauu

SEQ ID NO: 2014741 - RNA, 19 nt, Artificial Sequence
  Description of Artificial Sequence: Synthetic oligonucleotide
cuacucuuaccuguuuucg

SEQ ID NO: 2014742 - RNA, 19 nt, Artificial Sequence
  Description of Artificial Sequence: Synthetic oligonucleotide
ugauuccaucauauuuugc

SEQ ID NO: 2014743 - RNA, 19 nt, Artificial Sequence
  Description of Artificial Sequence: Synthetic oligonucleotide
uucuagaauugcugauucc

SEQ ID NO: 2014744 - RNA, 19 nt, Artificial Sequence
  Description of Artificial Sequence: Synthetic oligonucleotide
ucacuguuccacacuguug

SEQ ID NO: 2014745 - RNA, 19 nt, Artificial Sequence
  Description of Artificial Sequence: Synthetic oligonucleotide
caguacccuauuacuaucc

SEQ ID NO: 2014746 - RNA, 19 nt, Artificial Sequence
  Description of Artificial Sequence: Synthetic oligonucleotide
cugacauguucuucacugg

SEQ ID NO: 2014747 - RNA, 19 nt, Artificial Sequence
  Description of Artificial Sequence: Synthetic oligonucleotide
guaguaaucuuuucuuuaa

SEQ ID NO: 2014748 - RNA, 19 nt, Artificial Sequence
  Description of Artificial Sequence: Synthetic oligonucleotide
gacucccggccucagaaag

SEQ ID NO: 2014749 - RNA, 19 nt, Artificial Sequence
  Description of Artificial Sequence: Synthetic oligonucleotide
ucuucguuuugaauuucuc

SEQ ID NO: 2014750 - RNA, 19 nt, Artificial Sequence
  Description of Artificial Sequence: Synthetic oligonucleotide
ggaugaauuaugaaggaca

SEQ ID NO: 2014751 - RNA, 19 nt, Artificial Sequence
  Description of Artificial Sequence: Synthetic oligonucleotide
gugauacugaauuuguucu

SEQ ID NO: 2014752 - RNA, 19 nt, Artificial Sequence
  Description of Artificial Sequence: Synthetic oligonucleotide
cauuuugauuuaaacagua

SEQ ID NO: 2014753 - RNA, 19 nt, Artificial Sequence
  Description of Artificial Sequence: Synthetic oligonucleotide
uuggaauuacugccaaaau

SEQ ID NO: 2014754 - RNA, 19 nt, Artificial Sequence
  Description of Artificial Sequence: Synthetic oligonucleotide
uuugcugugccguuuccau

SEQ ID NO: 2014755 - RNA, 19 nt, Artificial Sequence
  Description of Artificial Sequence: Synthetic oligonucleotide
guugaggugauacugaauu

SEQ ID NO: 2014756 - RNA, 19 nt, Artificial Sequence
  Description of Artificial Sequence: Synthetic oligonucleotide
gcuuuaagacuuuucugag

SEQ ID NO: 2014757 - RNA, 19 nt, Artificial Sequence
  Description of Artificial Sequence: Synthetic oligonucleotide
uucgggauccacccgucgc

SEQ ID NO: 2014758 - RNA, 19 nt, Artificial Sequence
  Description of Artificial Sequence: Synthetic oligonucleotide
cacucaucgcaguugacuc

SEQ ID NO: 2014759 - RNA, 19 nt, Artificial Sequence
  Description of Artificial Sequence: Synthetic oligonucleotide
guaaguuaaaauggaacaa

SEQ ID NO: 2014760 - RNA, 19 nt, Artificial Sequence
  Description of Artificial Sequence: Synthetic oligonucleotide
uguucuucacuggggauga

SEQ ID NO: 2014761 - RNA, 19 nt, Artificial Sequence
  Description of Artificial Sequence: Synthetic oligonucleotide
ccuauuacuauccacguga

SEQ ID NO: 2014762 - RNA, 19 nt, Artificial Sequence
  Description of Artificial Sequence: Synthetic oligonucleotide
gacacauuaguuaaauagu

SEQ ID NO: 2014763 - RNA, 19 nt, Artificial Sequence
  Description of Artificial Sequence: Synthetic oligonucleotide
uucagcagauuugacacau

SEQ ID NO: 2014764 - RNA, 19 nt, Artificial Sequence
  Description of Artificial Sequence: Synthetic oligonucleotide
ucagucgucuuuggaagag

SEQ ID NO: 2014765 - RNA, 19 nt, Artificial Sequence
  Description of Artificial Sequence: Synthetic oligonucleotide
ucgcuuaggcgcuuucucc

SEQ ID NO: 2014766 - RNA, 19 nt, Artificial Sequence
  Description of Artificial Sequence: Synthetic oligonucleotide
cuacuauuuugucuauuuc

SEQ ID NO: 2014767 - RNA, 19 nt, Artificial Sequence
  Description of Artificial Sequence: Synthetic oligonucleotide
gccaguuccgcuuuauuag

SEQ ID NO: 2014768 - RNA, 19 nt, Artificial Sequence
  Description of Artificial Sequence: Synthetic oligonucleotide
gaauuacugccaaaauuuc

SEQ ID NO: 2014769 - RNA, 19 nt, Artificial Sequence
  Description of Artificial Sequence: Synthetic oligonucleotide
cucugaaucgucucaguca

SEQ ID NO: 2014770 - RNA, 19 nt, Artificial Sequence
  Description of Artificial Sequence: Synthetic oligonucleotide
gagggacuuucacuguucc

SEQ ID NO: 2014771 - RNA, 19 nt, Artificial Sequence
  Description of Artificial Sequence: Synthetic oligonucleotide
uccacgugaaauuucucuu

SEQ ID NO: 2014772 - RNA, 19 nt, Artificial Sequence
  Description of Artificial Sequence: Synthetic oligonucleotide
uuagcucuucguuuugaau

SEQ ID NO: 2014773 - RNA, 19 nt, Artificial Sequence
  Description of Artificial Sequence: Synthetic oligonucleotide
gagacaguacccuauuacu

SEQ ID NO: 2014774 - RNA, 19 nt, Artificial Sequence
  Description of Artificial Sequence: Synthetic oligonucleotide
caaaauccauccccuucgg

SEQ ID NO: 2014775 - RNA, 19 nt, Artificial Sequence
  Description of Artificial Sequence: Synthetic oligonucleotide
auguucuucacuggggaug

SEQ ID NO: 2014776 - RNA, 19 nt, Artificial Sequence
  Description of Artificial Sequence: Synthetic oligonucleotide
uucuaccucauuugucaga

SEQ ID NO: 2014777 - RNA, 19 nt, Artificial Sequence
  Description of Artificial Sequence: Synthetic oligonucleotide
uuugcuuuaccaggcauuu

SEQ ID NO: 2014778 - RNA, 19 nt, Artificial Sequence
  Description of Artificial Sequence: Synthetic oligonucleotide
guaguaaagccaguuccgc

SEQ ID NO: 2014779 - RNA, 19 nt, Artificial Sequence
  Description of Artificial Sequence: Synthetic oligonucleotide
cugaugcucaaaauccauc

SEQ ID NO: 2014780 - RNA, 19 nt, Artificial Sequence
  Description of Artificial Sequence: Synthetic oligonucleotide
augcugacauguucuucac

SEQ ID NO: 2014781 - RNA, 19 nt, Artificial Sequence
  Description of Artificial Sequence: Synthetic oligonucleotide
cuucuaccucauuugucag

SEQ ID NO: 2014782 - RNA, 19 nt, Artificial Sequence
  Description of Artificial Sequence: Synthetic oligonucleotide
uucacuggggaugaauuau

SEQ ID NO: 2014783 - RNA, 19 nt, Artificial Sequence
  Description of Artificial Sequence: Synthetic oligonucleotide
aguacccuauuacuaucca

SEQ ID NO: 2014784 - RNA, 19 nt, Artificial Sequence
  Description of Artificial Sequence: Synthetic oligonucleotide
uucuugaaugaaugcugac

SEQ ID NO: 2014785 - RNA, 19 nt, Artificial Sequence
  Description of Artificial Sequence: Synthetic oligonucleotide
cuugaaugaaugcugacau

SEQ ID NO: 2014786 - RNA, 19 nt, Artificial Sequence
  Description of Artificial Sequence: Synthetic oligonucleotide
acuuucacuguuccacacu

SEQ ID NO: 2014787 - RNA, 19 nt, Artificial Sequence
  Description of Artificial Sequence: Synthetic oligonucleotide
agagagggagacucugucu

SEQ ID NO: 2014788 - RNA, 19 nt, Artificial Sequence
  Description of Artificial Sequence: Synthetic oligonucleotide
uauuacuauccacgugaaa

SEQ ID NO: 2014789 - RNA, 19 nt, Artificial Sequence
  Description of Artificial Sequence: Synthetic oligonucleotide
auccacccgucgcuuaggc

SEQ ID NO: 2014790 - RNA, 19 nt, Artificial Sequence
  Description of Artificial Sequence: Synthetic oligonucleotide
acuauccacgugaaauuuc

SEQ ID NO: 2014791 - RNA, 19 nt, Artificial Sequence
  Description of Artificial Sequence: Synthetic oligonucleotide
auuucuagaauugcugauu

SEQ ID NO: 2014792 - RNA, 19 nt, Artificial Sequence
  Description of Artificial Sequence: Synthetic oligonucleotide
ugauacugaauuuguucuu

SEQ ID NO: 2014793 - RNA, 19 nt, Artificial Sequence
  Description of Artificial Sequence: Synthetic oligonucleotide
uucagucgucuuuggaaga

SEQ ID NO: 2014794 - RNA, 19 nt, Artificial Sequence
  Description of Artificial Sequence: Synthetic oligonucleotide
uuaggcucugaaucgucuc

SEQ ID NO: 2014795 - RNA, 19 nt, Artificial Sequence
  Description of Artificial Sequence: Synthetic oligonucleotide
acacauuaguuaaauaguu

SEQ ID NO: 2014796 - RNA, 19 nt, Artificial Sequence
  Description of Artificial Sequence: Synthetic oligonucleotide
aagagacaguacccuauua

SEQ ID NO: 2014797 - RNA, 19 nt, Artificial Sequence
  Description of Artificial Sequence: Synthetic oligonucleotide
ucuuaccuguuuucgguua

SEQ ID NO: 2014798 - RNA, 19 nt, Artificial Sequence
  Description of Artificial Sequence: Synthetic oligonucleotide
uuagaagcauuugcuuuac

SEQ ID NO: 2014799 - RNA, 19 nt, Artificial Sequence
  Description of Artificial Sequence: Synthetic oligonucleotide
uuugaaguaugggugcuuu

SEQ ID NO: 2014800 - RNA, 19 nt, Artificial Sequence
  Description of Artificial Sequence: Synthetic oligonucleotide
acccuauuacuauccacgu

SEQ ID NO: 2014801 - RNA, 19 nt, Artificial Sequence
  Description of Artificial Sequence: Synthetic oligonucleotide
agcagauuugacacauuag

SEQ ID NO: 2014802 - RNA, 19 nt, Artificial Sequence
  Description of Artificial Sequence: Synthetic oligonucleotide
uggaugcuacucuuaccug

SEQ ID NO: 2014803 - RNA, 19 nt, Artificial Sequence
  Description of Artificial Sequence: Synthetic oligonucleotide
aggcaggagagccagccca

SEQ ID NO: 2014804 - RNA, 19 nt, Artificial Sequence
  Description of Artificial Sequence: Synthetic oligonucleotide
uccuguuccuuuagaggac

SEQ ID NO: 2014805 - RNA, 19 nt, Artificial Sequence
  Description of Artificial Sequence: Synthetic oligonucleotide
gacuuuucugaggaaguuc

SEQ ID NO: 2014806 - RNA, 19 nt, Artificial Sequence
  Description of Artificial Sequence: Synthetic oligonucleotide
ugcuacucuuaccuguuuu

SEQ ID NO: 2014807 - RNA, 19 nt, Artificial Sequence
  Description of Artificial Sequence: Synthetic oligonucleotide
agcucuucguuuugaauuu

SEQ ID NO: 2014808 - RNA, 19 nt, Artificial Sequence
  Description of Artificial Sequence: Synthetic oligonucleotide
guacccuauuacuauccac

SEQ ID NO: 2014809 - RNA, 19 nt, Artificial Sequence
  Description of Artificial Sequence: Synthetic oligonucleotide
cuguuuucgguuaauacau

SEQ ID NO: 2014810 - RNA, 19 nt, Artificial Sequence
  Description of Artificial Sequence: Synthetic oligonucleotide
caguaaucccagcacucag

SEQ ID NO: 2014811 - RNA, 19 nt, Artificial Sequence
  Description of Artificial Sequence: Synthetic oligonucleotide
ccaucaaguuucuuauagg

SEQ ID NO: 2014812 - RNA, 19 nt, Artificial Sequence
  Description of Artificial Sequence: Synthetic oligonucleotide
uugauucuguagucucuac

SEQ ID NO: 2014813 - RNA, 19 nt, Artificial Sequence
  Description of Artificial Sequence: Synthetic oligonucleotide
gucuuaaagaaggcaaguc

SEQ ID NO: 2014814 - RNA, 19 nt, Artificial Sequence
  Description of Artificial Sequence: Synthetic oligonucleotide
ccuguuuucgguuaauaca

SEQ ID NO: 2014815 - RNA, 19 nt, Artificial Sequence
  Description of Artificial Sequence: Synthetic oligonucleotide
gacaguacccuauuacuau

SEQ ID NO: 2014816 - RNA, 19 nt, Artificial Sequence
  Description of Artificial Sequence: Synthetic oligonucleotide
cucauuugucagaaucuca

SEQ ID NO: 2014817 - RNA, 19 nt, Artificial Sequence
  Description of Artificial Sequence: Synthetic oligonucleotide
gggacuuucacuguuccac

SEQ ID NO: 2014818 - RNA, 19 nt, Artificial Sequence
  Description of Artificial Sequence: Synthetic oligonucleotide
cuuuaggcucugaaucguc

SEQ ID NO: 2014819 - RNA, 19 nt, Artificial Sequence
  Description of Artificial Sequence: Synthetic oligonucleotide
uuccaaccucauucucugg

SEQ ID NO: 2014820 - RNA, 19 nt, Artificial Sequence
  Description of Artificial Sequence: Synthetic oligonucleotide
cagucauugauucuguagu

SEQ ID NO: 2014821 - RNA, 19 nt, Artificial Sequence
  Description of Artificial Sequence: Synthetic oligonucleotide
acaguaaguuaaaauggaa

SEQ ID NO: 2014822 - RNA, 19 nt, Artificial Sequence
  Description of Artificial Sequence: Synthetic oligonucleotide
ucgggauccacccgucgcu

SEQ ID NO: 2014823 - RNA, 19 nt, Artificial Sequence
  Description of Artificial Sequence: Synthetic oligonucleotide
agaaggcaagucuuacgau

SEQ ID NO: 2014824 - RNA, 19 nt, Artificial Sequence
  Description of Artificial Sequence: Synthetic oligonucleotide
uggaagagacaguacccua

SEQ ID NO: 2014825 - RNA, 19 nt, Artificial Sequence
  Description of Artificial Sequence: Synthetic oligonucleotide
guuaaauaguucagcuguc

SEQ ID NO: 2014826 - RNA, 19 nt, Artificial Sequence
  Description of Artificial Sequence: Synthetic oligonucleotide
ccacccgucgcuuaggcgc

SEQ ID NO: 2014827 - RNA, 19 nt, Artificial Sequence
  Description of Artificial Sequence: Synthetic oligonucleotide
uacucacgaacgccugaug

SEQ ID NO: 2014828 - RNA, 19 nt, Artificial Sequence
  Description of Artificial Sequence: Synthetic oligonucleotide
uccacccgucgcuuaggcg

SEQ ID NO: 2014829 - RNA, 19 nt, Artificial Sequence
  Description of Artificial Sequence: Synthetic oligonucleotide
uacuauccacgugaaauuu

SEQ ID NO: 2014830 - RNA, 19 nt, Artificial Sequence
  Description of Artificial Sequence: Synthetic oligonucleotide
ugcugacauguucuucacu

SEQ ID NO: 2014831 - RNA, 19 nt, Artificial Sequence
  Description of Artificial Sequence: Synthetic oligonucleotide
guaugggugcuuuaagacu

SEQ ID NO: 2014832 - RNA, 19 nt, Artificial Sequence
  Description of Artificial Sequence: Synthetic oligonucleotide
gaacgccugaugcucaaaa

SEQ ID NO: 2014833 - RNA, 19 nt, Artificial Sequence
  Description of Artificial Sequence: Synthetic oligonucleotide
gaagagcuuucugguuugg

SEQ ID NO: 2014834 - RNA, 19 nt, Artificial Sequence
  Description of Artificial Sequence: Synthetic oligonucleotide
gugccguuuccauuuucag

SEQ ID NO: 2014835 - RNA, 19 nt, Artificial Sequence
  Description of Artificial Sequence: Synthetic oligonucleotide
uuuaagcaguugaggugau

SEQ ID NO: 2014836 - RNA, 19 nt, Artificial Sequence
  Description of Artificial Sequence: Synthetic oligonucleotide
cucccggccucagaaagcg

SEQ ID NO: 2014837 - RNA, 19 nt, Artificial Sequence
  Description of Artificial Sequence: Synthetic oligonucleotide
cuauccacgugaaauuucu

SEQ ID NO: 2014838 - RNA, 19 nt, Artificial Sequence
  Description of Artificial Sequence: Synthetic oligonucleotide
aagagcuuucugguuugga

SEQ ID NO: 2014839 - RNA, 19 nt, Artificial Sequence
  Description of Artificial Sequence: Synthetic oligonucleotide
cagagagggagacucuguc

SEQ ID NO: 2014840 - RNA, 19 nt, Artificial Sequence
  Description of Artificial Sequence: Synthetic oligonucleotide
uauccacgugaaauuucuc

SEQ ID NO: 2014841 - RNA, 19 nt, Artificial Sequence
  Description of Artificial Sequence: Synthetic oligonucleotide
caauuuggugcuuuaggcu

SEQ ID NO: 2014842 - RNA, 19 nt, Artificial Sequence
  Description of Artificial Sequence: Synthetic oligonucleotide
uagcucuuugcugugccgu

SEQ ID NO: 2014843 - RNA, 19 nt, Artificial Sequence
  Description of Artificial Sequence: Synthetic oligonucleotide
uccuguaguaaagccaguu

SEQ ID NO: 2014844 - RNA, 19 nt, Artificial Sequence
  Description of Artificial Sequence: Synthetic oligonucleotide
cuguuguaguaaucuuuuc

SEQ ID NO: 2014845 - RNA, 19 nt, Artificial Sequence
  Description of Artificial Sequence: Synthetic oligonucleotide
cgccugaugcucaaaaucc

SEQ ID NO: 2014846 - RNA, 19 nt, Artificial Sequence
  Description of Artificial Sequence: Synthetic oligonucleotide
auaggcuucuugaaugaau

SEQ ID NO: 2014847 - RNA, 19 nt, Artificial Sequence
  Description of Artificial Sequence: Synthetic oligonucleotide
caucgcaguugacucccgg

SEQ ID NO: 2014848 - RNA, 19 nt, Artificial Sequence
  Description of Artificial Sequence: Synthetic oligonucleotide
auccauccccuucgggauc

SEQ ID NO: 2014849 - RNA, 19 nt, Artificial Sequence
  Description of Artificial Sequence: Synthetic oligonucleotide
uuucuccacucaucgcagu

SEQ ID NO: 2014850 - RNA, 19 nt, Artificial Sequence
  Description of Artificial Sequence: Synthetic oligonucleotide
auaguucagcugucuggga

SEQ ID NO: 2014851 - RNA, 19 nt, Artificial Sequence
  Description of Artificial Sequence: Synthetic oligonucleotide
gagcuuucugguuuggaau

SEQ ID NO: 2014852 - RNA, 19 nt, Artificial Sequence
  Description of Artificial Sequence: Synthetic oligonucleotide
gucgcuuaggcgcuuucuc

SEQ ID NO: 2014853 - RNA, 19 nt, Artificial Sequence
  Description of Artificial Sequence: Synthetic oligonucleotide
agacaguacccuauuacua

SEQ ID NO: 2014854 - RNA, 19 nt, Artificial Sequence
  Description of Artificial Sequence: Synthetic oligonucleotide
gaaucgucucagucauuga

SEQ ID NO: 2014855 - RNA, 19 nt, Artificial Sequence
  Description of Artificial Sequence: Synthetic oligonucleotide
gcuuuauuagcucuuugcu

SEQ ID NO: 2014856 - RNA, 19 nt, Artificial Sequence
  Description of Artificial Sequence: Synthetic oligonucleotide
ugucugggagggacuuuca

SEQ ID NO: 2014857 - RNA, 19 nt, Artificial Sequence
  Description of Artificial Sequence: Synthetic oligonucleotide
cuauuacuauccacgugaa

SEQ ID NO: 2014858 - RNA, 19 nt, Artificial Sequence
  Description of Artificial Sequence: Synthetic oligonucleotide
gacagaugcccggaaugac

SEQ ID NO: 2014859 - RNA, 19 nt, Artificial Sequence
  Description of Artificial Sequence: Synthetic oligonucleotide
cuucgggauccacccgucg

SEQ ID NO: 2014860 - RNA, 19 nt, Artificial Sequence
  Description of Artificial Sequence: Synthetic oligonucleotide
cacacuguuguaguaaucu

SEQ ID NO: 2014861 - RNA, 19 nt, Artificial Sequence
  Description of Artificial Sequence: Synthetic oligonucleotide
cacagagagggagacucug

SEQ ID NO: 2014862 - RNA, 19 nt, Artificial Sequence
  Description of Artificial Sequence: Synthetic oligonucleotide
cagcagauuugacacauua

SEQ ID NO: 2014863 - RNA, 19 nt, Artificial Sequence
  Description of Artificial Sequence: Synthetic oligonucleotide
auuuggugcuuuaggcucu

SEQ ID NO: 2014864 - RNA, 19 nt, Artificial Sequence
  Description of Artificial Sequence: Synthetic oligonucleotide
cucugucuuaaagaaggca

SEQ ID NO: 2014865 - RNA, 19 nt, Artificial Sequence
  Description of Artificial Sequence: Synthetic oligonucleotide
uuccgcuuuauuagcucuu

SEQ ID NO: 2014866 - RNA, 19 nt, Artificial Sequence
  Description of Artificial Sequence: Synthetic oligonucleotide
agggacuuucacuguucca

SEQ ID NO: 2014867 - RNA, 19 nt, Artificial Sequence
  Description of Artificial Sequence: Synthetic oligonucleotide
aggcucugaaucgucucag

SEQ ID NO: 2014868 - RNA, 19 nt, Artificial Sequence
  Description of Artificial Sequence: Synthetic oligonucleotide
gauccacccgucgcuuagg

SEQ ID NO: 2014869 - RNA, 19 nt, Artificial Sequence
  Description of Artificial Sequence: Synthetic oligonucleotide
gaggugauacugaauuugu

SEQ ID NO: 2014870 - RNA, 19 nt, Artificial Sequence
  Description of Artificial Sequence: Synthetic oligonucleotide
uuccuguaguaaagccagu

SEQ ID NO: 2014871 - RNA, 19 nt, Artificial Sequence
  Description of Artificial Sequence: Synthetic oligonucleotide
uuuggugcuuuaggcucug

SEQ ID NO: 2014872 - RNA, 19 nt, Artificial Sequence
  Description of Artificial Sequence: Synthetic oligonucleotide
cagucgucuuuggaagagg

SEQ ID NO: 2014873 - RNA, 19 nt, Artificial Sequence
  Description of Artificial Sequence: Synthetic oligonucleotide
cccggccucagaaagcgcg

SEQ ID NO: 2014874 - RNA, 19 nt, Artificial Sequence
  Description of Artificial Sequence: Synthetic oligonucleotide
auacucacgaacgccugau

SEQ ID NO: 2014875 - RNA, 19 nt, Artificial Sequence
  Description of Artificial Sequence: Synthetic oligonucleotide
guuccgcuuuauuagcucu

SEQ ID NO: 2014876 - RNA, 19 nt, Artificial Sequence
  Description of Artificial Sequence: Synthetic oligonucleotide
cuccacucaucgcaguuga

SEQ ID NO: 2014877 - RNA, 19 nt, Artificial Sequence
  Description of Artificial Sequence: Synthetic oligonucleotide
ggggaugaauuaugaagga

SEQ ID NO: 2014878 - RNA, 19 nt, Artificial Sequence
  Description of Artificial Sequence: Synthetic oligonucleotide
cuucacuggggaugaauua

SEQ ID NO: 2014879 - RNA, 19 nt, Artificial Sequence
  Description of Artificial Sequence: Synthetic oligonucleotide
cuuuaagagccaucaaguu

SEQ ID NO: 2014880 - RNA, 19 nt, Artificial Sequence
  Description of Artificial Sequence: Synthetic oligonucleotide
ggauccacccgucgcuuag

SEQ ID NO: 2014881 - RNA, 19 nt, Artificial Sequence
  Description of Artificial Sequence: Synthetic oligonucleotide
uaccuguuuucgguuaaua

SEQ ID NO: 2014882 - RNA, 19 nt, Artificial Sequence
  Description of Artificial Sequence: Synthetic oligonucleotide
cuuaccuguuuucgguuaa

SEQ ID NO: 2014883 - RNA, 19 nt, Artificial Sequence
  Description of Artificial Sequence: Synthetic oligonucleotide
gcucugaaucgucucaguc

SEQ ID NO: 2014884 - RNA, 19 nt, Artificial Sequence
  Description of Artificial Sequence: Synthetic oligonucleotide
ccggaaugacuuuuguuuc

SEQ ID NO: 2014885 - RNA, 19 nt, Artificial Sequence
  Description of Artificial Sequence: Synthetic oligonucleotide
agacuuuucugaggaaguu

SEQ ID NO: 2014886 - RNA, 19 nt, Artificial Sequence
  Description of Artificial Sequence: Synthetic oligonucleotide
uaaagccaguuccgcuuua

SEQ ID NO: 2014887 - RNA, 19 nt, Artificial Sequence
  Description of Artificial Sequence: Synthetic oligonucleotide
caguugaggugauacugaa

SEQ ID NO: 2014888 - RNA, 19 nt, Artificial Sequence
  Description of Artificial Sequence: Synthetic oligonucleotide
aucgucucagucauugauu

SEQ ID NO: 2014889 - RNA, 19 nt, Artificial Sequence
  Description of Artificial Sequence: Synthetic oligonucleotide
cuagaauugcugauuccau

SEQ ID NO: 2014890 - RNA, 19 nt, Artificial Sequence
  Description of Artificial Sequence: Synthetic oligonucleotide
cuauuucuuccuguaguaa

SEQ ID NO: 2014891 - RNA, 19 nt, Artificial Sequence
  Description of Artificial Sequence: Synthetic oligonucleotide
gaagagacaguacccuauu

SEQ ID NO: 2014892 - RNA, 19 nt, Artificial Sequence
  Description of Artificial Sequence: Synthetic oligonucleotide
ucagcagauuugacacauu

SEQ ID NO: 2014893 - RNA, 19 nt, Artificial Sequence
  Description of Artificial Sequence: Synthetic oligonucleotide
gguuuggaauuacugccaa

SEQ ID NO: 2014894 - RNA, 19 nt, Artificial Sequence
  Description of Artificial Sequence: Synthetic oligonucleotide
ggacuuucacuguuccaca

SEQ ID NO: 2014895 - RNA, 19 nt, Artificial Sequence
  Description of Artificial Sequence: Synthetic oligonucleotide
cauuagcucuucguuuuga

SEQ ID NO: 2014896 - RNA, 19 nt, Artificial Sequence
  Description of Artificial Sequence: Synthetic oligonucleotide
uaccaggcauuuugauuua

SEQ ID NO: 2014897 - RNA, 19 nt, Artificial Sequence
  Description of Artificial Sequence: Synthetic oligonucleotide
uuaagcaguugaggugaua

SEQ ID NO: 2014898 - RNA, 19 nt, Artificial Sequence
  Description of Artificial Sequence: Synthetic oligonucleotide
ugacucccggccucagaaa

SEQ ID NO: 2014899 - RNA, 19 nt, Artificial Sequence
  Description of Artificial Sequence: Synthetic oligonucleotide
uuaccuguuuucgguuaau

SEQ ID NO: 2014900 - RNA, 19 nt, Artificial Sequence
  Description of Artificial Sequence: Synthetic oligonucleotide
cagaagagcuuucugguuu

SEQ ID NO: 2014901 - RNA, 19 nt, Artificial Sequence
  Description of Artificial Sequence: Synthetic oligonucleotide
ccauuuucagcagauuuga

SEQ ID NO: 2014902 - RNA, 19 nt, Artificial Sequence
  Description of Artificial Sequence: Synthetic oligonucleotide
cucacgaacgccugaugcu

SEQ ID NO: 2014903 - RNA, 19 nt, Artificial Sequence
  Description of Artificial Sequence: Synthetic oligonucleotide
aguugaggugauacugaau

SEQ ID NO: 2014904 - RNA, 19 nt, Artificial Sequence
  Description of Artificial Sequence: Synthetic oligonucleotide
aggcgcuuucuccacucau

SEQ ID NO: 2014905 - RNA, 19 nt, Artificial Sequence
  Description of Artificial Sequence: Synthetic oligonucleotide
ggugcuuuaggcucugaau

SEQ ID NO: 2014906 - RNA, 19 nt, Artificial Sequence
  Description of Artificial Sequence: Synthetic oligonucleotide
agccaucaaguuucuuaua

SEQ ID NO: 2014907 - RNA, 19 nt, Artificial Sequence
  Description of Artificial Sequence: Synthetic oligonucleotide
cuuuaccaggcauuuugau

SEQ ID NO: 2014908 - RNA, 19 nt, Artificial Sequence
  Description of Artificial Sequence: Synthetic oligonucleotide
agcucuuugcugugccguu

SEQ ID NO: 2014909 - RNA, 19 nt, Artificial Sequence
  Description of Artificial Sequence: Synthetic oligonucleotide
cacgaacgccugaugcuca

SEQ ID NO: 2014910 - RNA, 19 nt, Artificial Sequence
  Description of Artificial Sequence: Synthetic oligonucleotide
gcugauuccaucauauuuu

SEQ ID NO: 2014911 - RNA, 19 nt, Artificial Sequence
  Description of Artificial Sequence: Synthetic oligonucleotide
accaacucuuuaagagcca

SEQ ID NO: 2014912 - RNA, 19 nt, Artificial Sequence
  Description of Artificial Sequence: Synthetic oligonucleotide
guugacucccggccucaga

SEQ ID NO: 2014913 - RNA, 19 nt, Artificial Sequence
  Description of Artificial Sequence: Synthetic oligonucleotide
acgaacgccugaugcucaa

SEQ ID NO: 2014914 - RNA, 19 nt, Artificial Sequence
  Description of Artificial Sequence: Synthetic oligonucleotide
aggugauacugaauuuguu

SEQ ID NO: 2014915 - RNA, 19 nt, Artificial Sequence
  Description of Artificial Sequence: Synthetic oligonucleotide
ucccggccucagaaagcgc

SEQ ID NO: 2014916 - RNA, 19 nt, Artificial Sequence
  Description of Artificial Sequence: Synthetic oligonucleotide
cccuauuacuauccacgug

SEQ ID NO: 2014917 - RNA, 19 nt, Artificial Sequence
  Description of Artificial Sequence: Synthetic oligonucleotide
cucuuuaacuguugagauu

SEQ ID NO: 2014918 - RNA, 19 nt, Artificial Sequence
  Description of Artificial Sequence: Synthetic oligonucleotide
aguugacucccggccucag

SEQ ID NO: 2014919 - RNA, 19 nt, Artificial Sequence
  Description of Artificial Sequence: Synthetic oligonucleotide
gcuuaggcgcuuucuccac

SEQ ID NO: 2014920 - RNA, 19 nt, Artificial Sequence
  Description of Artificial Sequence: Synthetic oligonucleotide
gcauuuugauuuaaacagu

SEQ ID NO: 2014921 - RNA, 19 nt, Artificial Sequence
  Description of Artificial Sequence: Synthetic oligonucleotide
guaaagccaguuccgcuuu

SEQ ID NO: 2014922 - RNA, 19 nt, Artificial Sequence
  Description of Artificial Sequence: Synthetic oligonucleotide
cccggaaugacuuuuguuu

SEQ ID NO: 2014923 - RNA, 19 nt, Artificial Sequence
  Description of Artificial Sequence: Synthetic oligonucleotide
cugugccguuuccauuuuc

SEQ ID NO: 2014924 - RNA, 19 nt, Artificial Sequence
  Description of Artificial Sequence: Synthetic oligonucleotide
acacagagagggagacucu

SEQ ID NO: 2014925 - RNA, 19 nt, Artificial Sequence
  Description of Artificial Sequence: Synthetic oligonucleotide
gcuuuaccaggcauuuuga

SEQ ID NO: 2014926 - RNA, 19 nt, Artificial Sequence
  Description of Artificial Sequence: Synthetic oligonucleotide
gcaguugacucccggccuc

SEQ ID NO: 2014927 - RNA, 19 nt, Artificial Sequence
  Description of Artificial Sequence: Synthetic oligonucleotide
caguuccgcuuuauuagcu

SEQ ID NO: 2014928 - RNA, 19 nt, Artificial Sequence
  Description of Artificial Sequence: Synthetic oligonucleotide
cagaugcccggaaugacuu

SEQ ID NO: 2014929 - RNA, 19 nt, Artificial Sequence
  Description of Artificial Sequence: Synthetic oligonucleotide
accaggcauuuugauuuaa

SEQ ID NO: 2014930 - RNA, 19 nt, Artificial Sequence
  Description of Artificial Sequence: Synthetic oligonucleotide
uugcuuuaccaggcauuuu

SEQ ID NO: 2014931 - RNA, 19 nt, Artificial Sequence
  Description of Artificial Sequence: Synthetic oligonucleotide
ggagggacuuucacuguuc

SEQ ID NO: 2014932 - RNA, 19 nt, Artificial Sequence
  Description of Artificial Sequence: Synthetic oligonucleotide
uucagcugucugggaggga

SEQ ID NO: 2014933 - RNA, 19 nt, Artificial Sequence
  Description of Artificial Sequence: Synthetic oligonucleotide
ggcgcuuucuccacucauc

SEQ ID NO: 2014934 - RNA, 19 nt, Artificial Sequence
  Description of Artificial Sequence: Synthetic oligonucleotide
ccguuuccauuuucagcag

SEQ ID NO: 2014935 - RNA, 19 nt, Artificial Sequence
  Description of Artificial Sequence: Synthetic oligonucleotide
ggaagagacaguacccuau

SEQ ID NO: 2014936 - RNA, 19 nt, Artificial Sequence
  Description of Artificial Sequence: Synthetic oligonucleotide
ccacacuguuguaguaauc

SEQ ID NO: 2014937 - RNA, 19 nt, Artificial Sequence
  Description of Artificial Sequence: Synthetic oligonucleotide
cuuaggcgcuuucuccacu

SEQ ID NO: 2014938 - RNA, 19 nt, Artificial Sequence
  Description of Artificial Sequence: Synthetic oligonucleotide
ggcaagucuuacgauucaa

SEQ ID NO: 2014939 - RNA, 19 nt, Artificial Sequence
  Description of Artificial Sequence: Synthetic oligonucleotide
guccuucagaagagcuuuc

SEQ ID NO: 2014940 - RNA, 19 nt, Artificial Sequence
  Description of Artificial Sequence: Synthetic oligonucleotide
ccaguaaucccagcacuca

SEQ ID NO: 2014941 - RNA, 19 nt, Artificial Sequence
  Description of Artificial Sequence: Synthetic oligonucleotide
cucuuaccuguuuucgguu

SEQ ID NO: 2014942 - RNA, 19 nt, Artificial Sequence
  Description of Artificial Sequence: Synthetic oligonucleotide
ccgcuuuauuagcucuuug

SEQ ID NO: 2014943 - RNA, 19 nt, Artificial Sequence
  Description of Artificial Sequence: Synthetic oligonucleotide
gucgucuuuggaagaggcu

SEQ ID NO: 2014944 - RNA, 19 nt, Artificial Sequence
  Description of Artificial Sequence: Synthetic oligonucleotide
cauccccuucgggauccac

SEQ ID NO: 2014945 - RNA, 19 nt, Artificial Sequence
  Description of Artificial Sequence: Synthetic oligonucleotide
cgcuuucuccacucaucgc

SEQ ID NO: 2014946 - RNA, 19 nt, Artificial Sequence
  Description of Artificial Sequence: Synthetic oligonucleotide
cgcuuaggcgcuuucucca

SEQ ID NO: 2014947 - RNA, 19 nt, Artificial Sequence
  Description of Artificial Sequence: Synthetic oligonucleotide
ggaaugacuuuuguuucuu

SEQ ID NO: 2014948 - RNA, 19 nt, Artificial Sequence
  Description of Artificial Sequence: Synthetic oligonucleotide
caguugacucccggccuca

SEQ ID NO: 2014949 - RNA, 19 nt, Artificial Sequence
  Description of Artificial Sequence: Synthetic oligonucleotide
gcuuucugguuuggaauua

SEQ ID NO: 2014950 - RNA, 19 nt, Artificial Sequence
  Description of Artificial Sequence: Synthetic oligonucleotide
ccuucgggauccacccguc

SEQ ID NO: 2014951 - RNA, 19 nt, Artificial Sequence
  Description of Artificial Sequence: Synthetic oligonucleotide
ccugaugcucaaaauccau

SEQ ID NO: 2014952 - RNA, 19 nt, Artificial Sequence
  Description of Artificial Sequence: Synthetic oligonucleotide
ccucuucuaccucauuugu

SEQ ID NO: 2014953 - RNA, 19 nt, Artificial Sequence
  Description of Artificial Sequence: Synthetic oligonucleotide
ggcucugaaucgucucagu

SEQ ID NO: 2014954 - RNA, 19 nt, Artificial Sequence
  Description of Artificial Sequence: Synthetic oligonucleotide
cucuacuauuuugucuauu

SEQ ID NO: 2014955 - RNA, 19 nt, Artificial Sequence
  Description of Artificial Sequence: Synthetic oligonucleotide
cgguuaauacauuuugcuu

SEQ ID NO: 2014956 - RNA, 19 nt, Artificial Sequence
  Description of Artificial Sequence: Synthetic oligonucleotide
ccccuucgggauccacccg

SEQ ID NO: 2014957 - RNA, 19 nt, Artificial Sequence
  Description of Artificial Sequence: Synthetic oligonucleotide
cacccgucgcuuaggcgcu

SEQ ID NO: 2014958 - RNA, 19 nt, Artificial Sequence
  Description of Artificial Sequence: Synthetic oligonucleotide
gcucaaaauccauccccuu

SEQ ID NO: 2014959 - RNA, 19 nt, Artificial Sequence
  Description of Artificial Sequence: Synthetic oligonucleotide
ccacgugaaauuucucuuu

SEQ ID NO: 2014960 - RNA, 19 nt, Artificial Sequence
  Description of Artificial Sequence: Synthetic oligonucleotide
cuaccucauuugucagaau

SEQ ID NO: 2014961 - RNA, 19 nt, Artificial Sequence
  Description of Artificial Sequence: Synthetic oligonucleotide
cggaaugacuuuuguuucu

SEQ ID NO: 2014962 - RNA, 19 nt, Artificial Sequence
  Description of Artificial Sequence: Synthetic oligonucleotide
gggauccacccgucgcuua

SEQ ID NO: 2014963 - RNA, 19 nt, Artificial Sequence
  Description of Artificial Sequence: Synthetic oligonucleotide
cccuucgggauccacccgu

SEQ ID NO: 2014964 - RNA, 19 nt, Artificial Sequence
  Description of Artificial Sequence: Synthetic oligonucleotide
gaaggacauccaaguccuu

SEQ ID NO: 2014965 - RNA, 19 nt, Artificial Sequence
  Description of Artificial Sequence: Synthetic oligonucleotide
cugaaucgucucagucauu

SEQ ID NO: 2014966 - RNA, 19 nt, Artificial Sequence
  Description of Artificial Sequence: Synthetic oligonucleotide
ccgucgcuuaggcgcuuuc

SEQ ID NO: 2014967 - RNA, 19 nt, Artificial Sequence
  Description of Artificial Sequence: Synthetic oligonucleotide
cgucucagucauugauucu

SEQ ID NO: 2014968 - RNA, 19 nt, Artificial Sequence
  Description of Artificial Sequence: Synthetic oligonucleotide
gcucuuugcugugccguuu

SEQ ID NO: 2014969 - RNA, 19 nt, Artificial Sequence
  Description of Artificial Sequence: Synthetic oligonucleotide
gcugugccguuuccauuuu

SEQ ID NO: 2014970 - RNA, 19 nt, Artificial Sequence
  Description of Artificial Sequence: Synthetic oligonucleotide
acccgucgcuuaggcgcuu

SEQ ID NO: 2014971 - RNA, 19 nt, Artificial Sequence
  Description of Artificial Sequence: Synthetic oligonucleotide
cgucgcuuaggcgcuuucu

SEQ ID NO: 2014972 - RNA, 19 nt, Artificial Sequence
  Description of Artificial Sequence: Synthetic oligonucleotide
cgaacgccugaugcucaaa

SEQ ID NO: 2014973 - RNA, 19 nt, Artificial Sequence
  Description of Artificial Sequence: Synthetic oligonucleotide
cccgucgcuuaggcgcuuu

SEQ ID NO: 2014974 - RNA, 19 nt, Artificial Sequence
  Description of Artificial Sequence: Synthetic oligonucleotide
ucugacaucagugagaucg

SEQ ID NO: 2014975 - RNA, 19 nt, Artificial Sequence
  Description of Artificial Sequence: Synthetic oligonucleotide
acuacaaauuuacauaugc

SEQ ID NO: 2014976 - RNA, 19 nt, Artificial Sequence
  Description of Artificial Sequence: Synthetic oligonucleotide
aguucauuuauguuuaucg

SEQ ID NO: 2014977 - RNA, 19 nt, Artificial Sequence
  Description of Artificial Sequence: Synthetic oligonucleotide
ucauaaacgaugauggccg

SEQ ID NO: 2014978 - RNA, 19 nt, Artificial Sequence
  Description of Artificial Sequence: Synthetic oligonucleotide
aaaagcuaggucaacagcc

SEQ ID NO: 2014979 - RNA, 19 nt, Artificial Sequence
  Description of Artificial Sequence: Synthetic oligonucleotide
aauuucuauaaacaguuca

SEQ ID NO: 2014980 - RNA, 19 nt, Artificial Sequence
  Description of Artificial Sequence: Synthetic oligonucleotide
aauggaaucggcguagucc

SEQ ID NO: 2014981 - RNA, 19 nt, Artificial Sequence
  Description of Artificial Sequence: Synthetic oligonucleotide
aaauuuacauaugcuaggc

SEQ ID NO: 2014982 - RNA, 19 nt, Artificial Sequence
  Description of Artificial Sequence: Synthetic oligonucleotide
uauuaauguauuuacauaa

SEQ ID NO: 2014983 - RNA, 19 nt, Artificial Sequence
  Description of Artificial Sequence: Synthetic oligonucleotide
uggaguacuaaacagaacu

SEQ ID NO: 2014984 - RNA, 19 nt, Artificial Sequence
  Description of Artificial Sequence: Synthetic oligonucleotide
auuuacauaugcuaggcag

SEQ ID NO: 2014985 - RNA, 19 nt, Artificial Sequence
  Description of Artificial Sequence: Synthetic oligonucleotide
aauggucucauaaauauag

SEQ ID NO: 2014986 - RNA, 19 nt, Artificial Sequence
  Description of Artificial Sequence: Synthetic oligonucleotide
gaagcugugagcuaagugc

SEQ ID NO: 2014987 - RNA, 19 nt, Artificial Sequence
  Description of Artificial Sequence: Synthetic oligonucleotide
ugauauucggaucaaaacu

SEQ ID NO: 2014988 - RNA, 19 nt, Artificial Sequence
  Description of Artificial Sequence: Synthetic oligonucleotide
uuugugaugucauaaacga

SEQ ID NO: 2014989 - RNA, 19 nt, Artificial Sequence
  Description of Artificial Sequence: Synthetic oligonucleotide
agugagaucgcauuuguuc

SEQ ID NO: 2014990 - RNA, 19 nt, Artificial Sequence
  Description of Artificial Sequence: Synthetic oligonucleotide
uaaauggaguacuaaacag

SEQ ID NO: 2014991 - RNA, 19 nt, Artificial Sequence
  Description of Artificial Sequence: Synthetic oligonucleotide
uuuguuaccaucuccaggu

SEQ ID NO: 2014992 - RNA, 19 nt, Artificial Sequence
  Description of Artificial Sequence: Synthetic oligonucleotide
aaugcacuuccacaccucc

SEQ ID NO: 2014993 - RNA, 19 nt, Artificial Sequence
  Description of Artificial Sequence: Synthetic oligonucleotide
agauuaggaauuuauggag

SEQ ID NO: 2014994 - RNA, 19 nt, Artificial Sequence
  Description of Artificial Sequence: Synthetic oligonucleotide
aguacaucggugccaaugc

SEQ ID NO: 2014995 - RNA, 19 nt, Artificial Sequence
  Description of Artificial Sequence: Synthetic oligonucleotide
auauagacuacaaauuuac

SEQ ID NO: 2014996 - RNA, 19 nt, Artificial Sequence
  Description of Artificial Sequence: Synthetic oligonucleotide
gauggcaugaauggaaucg

SEQ ID NO: 2014997 - RNA, 19 nt, Artificial Sequence
  Description of Artificial Sequence: Synthetic oligonucleotide
auggagcucauuuugguac

SEQ ID NO: 2014998 - RNA, 19 nt, Artificial Sequence
  Description of Artificial Sequence: Synthetic oligonucleotide
uuaagcaauggucucauaa

SEQ ID NO: 2014999 - RNA, 19 nt, Artificial Sequence
  Description of Artificial Sequence: Synthetic oligonucleotide
auaaacaguucauuuaugu

SEQ ID NO: 2015000 - RNA, 19 nt, Artificial Sequence
  Description of Artificial Sequence: Synthetic oligonucleotide
ugaccaacuggaaagucgg

SEQ ID NO: 2015001 - RNA, 19 nt, Artificial Sequence
  Description of Artificial Sequence: Synthetic oligonucleotide
uggauugauauucggauca

SEQ ID NO: 2015002 - RNA, 19 nt, Artificial Sequence
  Description of Artificial Sequence: Synthetic oligonucleotide
ugaagaagacuccagggca

SEQ ID NO: 2015003 - RNA, 19 nt, Artificial Sequence
  Description of Artificial Sequence: Synthetic oligonucleotide
gauauucggaucaaaacug

SEQ ID NO: 2015004 - RNA, 19 nt, Artificial Sequence
  Description of Artificial Sequence: Synthetic oligonucleotide
acauaugcuaggcagagca

SEQ ID NO: 2015005 - RNA, 19 nt, Artificial Sequence
  Description of Artificial Sequence: Synthetic oligonucleotide
aacacccaggaccaccugc

SEQ ID NO: 2015006 - RNA, 19 nt, Artificial Sequence
  Description of Artificial Sequence: Synthetic oligonucleotide
aguucucucacccaguucu

SEQ ID NO: 2015007 - RNA, 19 nt, Artificial Sequence
  Description of Artificial Sequence: Synthetic oligonucleotide
aagacuccagggcaugagc

SEQ ID NO: 2015008 - RNA, 19 nt, Artificial Sequence
  Description of Artificial Sequence: Synthetic oligonucleotide
uaugguuggauugauauuc

SEQ ID NO: 2015009 - RNA, 19 nt, Artificial Sequence
  Description of Artificial Sequence: Synthetic oligonucleotide
ugucuucggaguuugaagc

SEQ ID NO: 2015010 - RNA, 19 nt, Artificial Sequence
  Description of Artificial Sequence: Synthetic oligonucleotide
uccacaaaccgccauacga

SEQ ID NO: 2015011 - RNA, 19 nt, Artificial Sequence
  Description of Artificial Sequence: Synthetic oligonucleotide
ugagcuaagugcuccaugc

SEQ ID NO: 2015012 - RNA, 19 nt, Artificial Sequence
  Description of Artificial Sequence: Synthetic oligonucleotide
uuuacauaugcuaggcaga

SEQ ID NO: 2015013 - RNA, 19 nt, Artificial Sequence
  Description of Artificial Sequence: Synthetic oligonucleotide
uugauauucggaucaaaac

SEQ ID NO: 2015014 - RNA, 19 nt, Artificial Sequence
  Description of Artificial Sequence: Synthetic oligonucleotide
uagacuacaaauuuacaua

SEQ ID NO: 2015015 - RNA, 19 nt, Artificial Sequence
  Description of Artificial Sequence: Synthetic oligonucleotide
ucauuuugguacuggacag

SEQ ID NO: 2015016 - RNA, 19 nt, Artificial Sequence
  Description of Artificial Sequence: Synthetic oligonucleotide
cucgauaguacaucggugc

SEQ ID NO: 2015017 - RNA, 19 nt, Artificial Sequence
  Description of Artificial Sequence: Synthetic oligonucleotide
gaguuugaagcccuugccg

SEQ ID NO: 2015018 - RNA, 19 nt, Artificial Sequence
  Description of Artificial Sequence: Synthetic oligonucleotide
uguuaccaucuccaggugg

SEQ ID NO: 2015019 - RNA, 19 nt, Artificial Sequence
  Description of Artificial Sequence: Synthetic oligonucleotide
ucggcuaauuucuauaaac

SEQ ID NO: 2015020 - RNA, 19 nt, Artificial Sequence
  Description of Artificial Sequence: Synthetic oligonucleotide
aacucagaaguuauuaaug

SEQ ID NO: 2015021 - RNA, 19 nt, Artificial Sequence
  Description of Artificial Sequence: Synthetic oligonucleotide
aauuuacauaugcuaggca

SEQ ID NO: 2015022 - RNA, 19 nt, Artificial Sequence
  Description of Artificial Sequence: Synthetic oligonucleotide
cuuugcacaaggugaaugc

SEQ ID NO: 2015023 - RNA, 19 nt, Artificial Sequence
  Description of Artificial Sequence: Synthetic oligonucleotide
aggcacaagucuuuguuac

SEQ ID NO: 2015024 - RNA, 19 nt, Artificial Sequence
  Description of Artificial Sequence: Synthetic oligonucleotide
acucagaaguuauuaaugu

SEQ ID NO: 2015025 - RNA, 19 nt, Artificial Sequence
  Description of Artificial Sequence: Synthetic oligonucleotide
guucauuuauguuuaucgc

SEQ ID NO: 2015026 - RNA, 19 nt, Artificial Sequence
  Description of Artificial Sequence: Synthetic oligonucleotide
gauguggucccucuccacg

SEQ ID NO: 2015027 - RNA, 19 nt, Artificial Sequence
  Description of Artificial Sequence: Synthetic oligonucleotide
agacuacaaauuuacauau

SEQ ID NO: 2015028 - RNA, 19 nt, Artificial Sequence
  Description of Artificial Sequence: Synthetic oligonucleotide
aagucuuuguuaccaucuc

SEQ ID NO: 2015029 - RNA, 19 nt, Artificial Sequence
  Description of Artificial Sequence: Synthetic oligonucleotide
aauuuauggagcucauuuu

SEQ ID NO: 2015030 - RNA, 19 nt, Artificial Sequence
  Description of Artificial Sequence: Synthetic oligonucleotide
cuugauuugcccacacccg

SEQ ID NO: 2015031 - RNA, 19 nt, Artificial Sequence
  Description of Artificial Sequence: Synthetic oligonucleotide
aagacggaagcugugagcu

SEQ ID NO: 2015032 - RNA, 19 nt, Artificial Sequence
  Description of Artificial Sequence: Synthetic oligonucleotide
aaauggaguacuaaacaga

SEQ ID NO: 2015033 - RNA, 19 nt, Artificial Sequence
  Description of Artificial Sequence: Synthetic oligonucleotide
uggucucauaaauauagac

SEQ ID NO: 2015034 - RNA, 19 nt, Artificial Sequence
  Description of Artificial Sequence: Synthetic oligonucleotide
aauggaguacuaaacagaa

SEQ ID NO: 2015035 - RNA, 19 nt, Artificial Sequence
  Description of Artificial Sequence: Synthetic oligonucleotide
uaggucaacagccagugau

SEQ ID NO: 2015036 - RNA, 19 nt, Artificial Sequence
  Description of Artificial Sequence: Synthetic oligonucleotide
acagccagugauguggucc

SEQ ID NO: 2015037 - RNA, 19 nt, Artificial Sequence
  Description of Artificial Sequence: Synthetic oligonucleotide
cuuuguuaccaucuccagg

SEQ ID NO: 2015038 - RNA, 19 nt, Artificial Sequence
  Description of Artificial Sequence: Synthetic oligonucleotide
gucauaaacgaugauggcc

SEQ ID NO: 2015039 - RNA, 19 nt, Artificial Sequence
  Description of Artificial Sequence: Synthetic oligonucleotide
uaggaauuuauggagcuca

SEQ ID NO: 2015040 - RNA, 19 nt, Artificial Sequence
  Description of Artificial Sequence: Synthetic oligonucleotide
aaacgaugauggccgcugc

SEQ ID NO: 2015041 - RNA, 19 nt, Artificial Sequence
  Description of Artificial Sequence: Synthetic oligonucleotide
uauagacuacaaauuuaca

SEQ ID NO: 2015042 - RNA, 19 nt, Artificial Sequence
  Description of Artificial Sequence: Synthetic oligonucleotide
cauacgaugcuugauuugc

SEQ ID NO: 2015043 - RNA, 19 nt, Artificial Sequence
  Description of Artificial Sequence: Synthetic oligonucleotide
uccaugacuucucugacau

SEQ ID NO: 2015044 - RNA, 19 nt, Artificial Sequence
  Description of Artificial Sequence: Synthetic oligonucleotide
gcaacaacaaugcuagggg

SEQ ID NO: 2015045 - RNA, 19 nt, Artificial Sequence
  Description of Artificial Sequence: Synthetic oligonucleotide
uuacauaugcuaggcagag

SEQ ID NO: 2015046 - RNA, 19 nt, Artificial Sequence
  Description of Artificial Sequence: Synthetic oligonucleotide
gugagaucgcauuuguucc

SEQ ID NO: 2015047 - RNA, 19 nt, Artificial Sequence
  Description of Artificial Sequence: Synthetic oligonucleotide
acaagucuuuguuaccauc

SEQ ID NO: 2015048 - RNA, 19 nt, Artificial Sequence
  Description of Artificial Sequence: Synthetic oligonucleotide
cuuagcaucucucuccaug

SEQ ID NO: 2015049 - RNA, 19 nt, Artificial Sequence
  Description of Artificial Sequence: Synthetic oligonucleotide
ugaaugcacuuccacaccu

SEQ ID NO: 2015050 - RNA, 19 nt, Artificial Sequence
  Description of Artificial Sequence: Synthetic oligonucleotide
uaagcaauggucucauaaa

SEQ ID NO: 2015051 - RNA, 19 nt, Artificial Sequence
  Description of Artificial Sequence: Synthetic oligonucleotide
ucucauaaauauagacuac

SEQ ID NO: 2015052 - RNA, 19 nt, Artificial Sequence
  Description of Artificial Sequence: Synthetic oligonucleotide
ucggaguucucucacccag

SEQ ID NO: 2015053 - RNA, 19 nt, Artificial Sequence
  Description of Artificial Sequence: Synthetic oligonucleotide
aguacuaaacagaacucag

SEQ ID NO: 2015054 - RNA, 19 nt, Artificial Sequence
  Description of Artificial Sequence: Synthetic oligonucleotide
cagauuaggaauuuaugga

SEQ ID NO: 2015055 - RNA, 19 nt, Artificial Sequence
  Description of Artificial Sequence: Synthetic oligonucleotide
caccaaaauaccugggccc

SEQ ID NO: 2015056 - RNA, 19 nt, Artificial Sequence
  Description of Artificial Sequence: Synthetic oligonucleotide
auuuugguacuggacaguc

SEQ ID NO: 2015057 - RNA, 19 nt, Artificial Sequence
  Description of Artificial Sequence: Synthetic oligonucleotide
ugcgcuggucucuacaaag

SEQ ID NO: 2015058 - RNA, 19 nt, Artificial Sequence
  Description of Artificial Sequence: Synthetic oligonucleotide
ugcacuuccacaccuccug

SEQ ID NO: 2015059 - RNA, 19 nt, Artificial Sequence
  Description of Artificial Sequence: Synthetic oligonucleotide
ucuuuguuaccaucuccag

SEQ ID NO: 2015060 - RNA, 19 nt, Artificial Sequence
  Description of Artificial Sequence: Synthetic oligonucleotide
caaaagcuaggucaacagc

SEQ ID NO: 2015061 - RNA, 19 nt, Artificial Sequence
  Description of Artificial Sequence: Synthetic oligonucleotide
ucaaaacugucuuccacaa

SEQ ID NO: 2015062 - RNA, 19 nt, Artificial Sequence
  Description of Artificial Sequence: Synthetic oligonucleotide
auggaaucggcguaguccu

SEQ ID NO: 2015063 - RNA, 19 nt, Artificial Sequence
  Description of Artificial Sequence: Synthetic oligonucleotide
gaauuuauggagcucauuu

SEQ ID NO: 2015064 - RNA, 19 nt, Artificial Sequence
  Description of Artificial Sequence: Synthetic oligonucleotide
aguccuuagcaucucucuc

SEQ ID NO: 2015065 - RNA, 19 nt, Artificial Sequence
  Description of Artificial Sequence: Synthetic oligonucleotide
ucgauaguacaucggugcc

SEQ ID NO: 2015066 - RNA, 19 nt, Artificial Sequence
  Description of Artificial Sequence: Synthetic oligonucleotide
gacccucgauaguacaucg

SEQ ID NO: 2015067 - RNA, 19 nt, Artificial Sequence
  Description of Artificial Sequence: Synthetic oligonucleotide
uucggaucaaaacugucuu

SEQ ID NO: 2015068 - RNA, 19 nt, Artificial Sequence
  Description of Artificial Sequence: Synthetic oligonucleotide
auguggucccucuccacgc

SEQ ID NO: 2015069 - RNA, 19 nt, Artificial Sequence
  Description of Artificial Sequence: Synthetic oligonucleotide
agcuguaucccagauuagg

SEQ ID NO: 2015070 - RNA, 19 nt, Artificial Sequence
  Description of Artificial Sequence: Synthetic oligonucleotide
aaagucggcgggcacacau

SEQ ID NO: 2015071 - RNA, 19 nt, Artificial Sequence
  Description of Artificial Sequence: Synthetic oligonucleotide
ucggcgggcacacaugaag

SEQ ID NO: 2015072 - RNA, 19 nt, Artificial Sequence
  Description of Artificial Sequence: Synthetic oligonucleotide
uaaacgaugauggccgcug

SEQ ID NO: 2015073 - RNA, 19 nt, Artificial Sequence
  Description of Artificial Sequence: Synthetic oligonucleotide
uacgaugcuugauuugccc

SEQ ID NO: 2015074 - RNA, 19 nt, Artificial Sequence
  Description of Artificial Sequence: Synthetic oligonucleotide
ugucauaaacgaugauggc

SEQ ID NO: 2015075 - RNA, 19 nt, Artificial Sequence
  Description of Artificial Sequence: Synthetic oligonucleotide
gaagacggaagcugugagc

SEQ ID NO: 2015076 - RNA, 19 nt, Artificial Sequence
  Description of Artificial Sequence: Synthetic oligonucleotide
ucagugagaucgcauuugu

SEQ ID NO: 2015077 - RNA, 19 nt, Artificial Sequence
  Description of Artificial Sequence: Synthetic oligonucleotide
cugcagucuucucagagag

SEQ ID NO: 2015078 - RNA, 19 nt, Artificial Sequence
  Description of Artificial Sequence: Synthetic oligonucleotide
uacaucggugccaaugcac

SEQ ID NO: 2015079 - RNA, 19 nt, Artificial Sequence
  Description of Artificial Sequence: Synthetic oligonucleotide
uucuuuugugaugucauaa

SEQ ID NO: 2015080 - RNA, 19 nt, Artificial Sequence
  Description of Artificial Sequence: Synthetic oligonucleotide
aucggcguaguccuuagca

SEQ ID NO: 2015081 - RNA, 19 nt, Artificial Sequence
  Description of Artificial Sequence: Synthetic oligonucleotide
acaaaccgccauacgaugc

SEQ ID NO: 2015082 - RNA, 19 nt, Artificial Sequence
  Description of Artificial Sequence: Synthetic oligonucleotide
uugcacaaggugaaugcac

SEQ ID NO: 2015083 - RNA, 19 nt, Artificial Sequence
  Description of Artificial Sequence: Synthetic oligonucleotide
aaucggcguaguccuuagc

SEQ ID NO: 2015084 - RNA, 19 nt, Artificial Sequence
  Description of Artificial Sequence: Synthetic oligonucleotide
gugaccaacuggaaagucg

SEQ ID NO: 2015085 - RNA, 19 nt, Artificial Sequence
  Description of Artificial Sequence: Synthetic oligonucleotide
cugucuucggaguuugaag

SEQ ID NO: 2015086 - RNA, 19 nt, Artificial Sequence
  Description of Artificial Sequence: Synthetic oligonucleotide
ugguuggauugauauucgg

SEQ ID NO: 2015087 - RNA, 19 nt, Artificial Sequence
  Description of Artificial Sequence: Synthetic oligonucleotide
ugagaucgcauuuguuccc

SEQ ID NO: 2015088 - RNA, 19 nt, Artificial Sequence
  Description of Artificial Sequence: Synthetic oligonucleotide
gacuucucugacaucagug

SEQ ID NO: 2015089 - RNA, 19 nt, Artificial Sequence
  Description of Artificial Sequence: Synthetic oligonucleotide
ucccagauuaggaauuuau

SEQ ID NO: 2015090 - RNA, 19 nt, Artificial Sequence
  Description of Artificial Sequence: Synthetic oligonucleotide
uuuugcgcuggucucuaca

SEQ ID NO: 2015091 - RNA, 19 nt, Artificial Sequence
  Description of Artificial Sequence: Synthetic oligonucleotide
gaguacuaaacagaacuca

SEQ ID NO: 2015092 - RNA, 19 nt, Artificial Sequence
  Description of Artificial Sequence: Synthetic oligonucleotide
auugauauucggaucaaaa

SEQ ID NO: 2015093 - RNA, 19 nt, Artificial Sequence
  Description of Artificial Sequence: Synthetic oligonucleotide
aguuauuaauguauuuaca

SEQ ID NO: 2015094 - RNA, 19 nt, Artificial Sequence
  Description of Artificial Sequence: Synthetic oligonucleotide
ccugugaccaacuggaaag

SEQ ID NO: 2015095 - RNA, 19 nt, Artificial Sequence
  Description of Artificial Sequence: Synthetic oligonucleotide
aacagaacucagaaguuau

SEQ ID NO: 2015096 - RNA, 19 nt, Artificial Sequence
  Description of Artificial Sequence: Synthetic oligonucleotide
uauucggaucaaaacuguc

SEQ ID NO: 2015097 - RNA, 19 nt, Artificial Sequence
  Description of Artificial Sequence: Synthetic oligonucleotide
ugggucgucagcagcagcu

SEQ ID NO: 2015098 - RNA, 19 nt, Artificial Sequence
  Description of Artificial Sequence: Synthetic oligonucleotide
ucuucggcuaauuucuaua

SEQ ID NO: 2015099 - RNA, 19 nt, Artificial Sequence
  Description of Artificial Sequence: Synthetic oligonucleotide
gaucgcauuuguucccugc

SEQ ID NO: 2015100 - RNA, 19 nt, Artificial Sequence
  Description of Artificial Sequence: Synthetic oligonucleotide
aaagcuaggucaacagcca

SEQ ID NO: 2015101 - RNA, 19 nt, Artificial Sequence
  Description of Artificial Sequence: Synthetic oligonucleotide
uaguccuuagcaucucucu

SEQ ID NO: 2015102 - RNA, 19 nt, Artificial Sequence
  Description of Artificial Sequence: Synthetic oligonucleotide
ucuucggaguuugaagccc

SEQ ID NO: 2015103 - RNA, 19 nt, Artificial Sequence
  Description of Artificial Sequence: Synthetic oligonucleotide
ucucugacaucagugagau

SEQ ID NO: 2015104 - RNA, 19 nt, Artificial Sequence
  Description of Artificial Sequence: Synthetic oligonucleotide
aaaauaccugggcccaaaa

SEQ ID NO: 2015105 - RNA, 19 nt, Artificial Sequence
  Description of Artificial Sequence: Synthetic oligonucleotide
acaucggugccaaugcacg

SEQ ID NO: 2015106 - RNA, 19 nt, Artificial Sequence
  Description of Artificial Sequence: Synthetic oligonucleotide
auaugcuaggcagagcaca

SEQ ID NO: 2015107 - RNA, 19 nt, Artificial Sequence
  Description of Artificial Sequence: Synthetic oligonucleotide
uuccacaaaccgccauacg

SEQ ID NO: 2015108 - RNA, 19 nt, Artificial Sequence
  Description of Artificial Sequence: Synthetic oligonucleotide
aagcugugagcuaagugcu

SEQ ID NO: 2015109 - RNA, 19 nt, Artificial Sequence
  Description of Artificial Sequence: Synthetic oligonucleotide
uaugcuaggcagagcacau

SEQ ID NO: 2015110 - RNA, 19 nt, Artificial Sequence
  Description of Artificial Sequence: Synthetic oligonucleotide
acaucagugagaucgcauu

SEQ ID NO: 2015111 - RNA, 19 nt, Artificial Sequence
  Description of Artificial Sequence: Synthetic oligonucleotide
augaauggaaucggcguag

SEQ ID NO: 2015112 - RNA, 19 nt, Artificial Sequence
  Description of Artificial Sequence: Synthetic oligonucleotide
uuugcgcuggucucuacaa

SEQ ID NO: 2015113 - RNA, 19 nt, Artificial Sequence
  Description of Artificial Sequence: Synthetic oligonucleotide
ugcuaggcagagcacauuu

SEQ ID NO: 2015114 - RNA, 19 nt, Artificial Sequence
  Description of Artificial Sequence: Synthetic oligonucleotide
ugccccuaugguuggauug

SEQ ID NO: 2015115 - RNA, 19 nt, Artificial Sequence
  Description of Artificial Sequence: Synthetic oligonucleotide
uuuugguacuggacagucu

SEQ ID NO: 2015116 - RNA, 19 nt, Artificial Sequence
  Description of Artificial Sequence: Synthetic oligonucleotide
ucuuccacaaaccgccaua

SEQ ID NO: 2015117 - RNA, 19 nt, Artificial Sequence
  Description of Artificial Sequence: Synthetic oligonucleotide
uauggagcucauuuuggua

SEQ ID NO: 2015118 - RNA, 19 nt, Artificial Sequence
  Description of Artificial Sequence: Synthetic oligonucleotide
uggcaugaauggaaucggc

SEQ ID NO: 2015119 - RNA, 19 nt, Artificial Sequence
  Description of Artificial Sequence: Synthetic oligonucleotide
caacuggaaagucggcggg

SEQ ID NO: 2015120 - RNA, 19 nt, Artificial Sequence
  Description of Artificial Sequence: Synthetic oligonucleotide
ugacuucucugacaucagu

SEQ ID NO: 2015121 - RNA, 19 nt, Artificial Sequence
  Description of Artificial Sequence: Synthetic oligonucleotide
guuugaagcccuugccgcc

SEQ ID NO: 2015122 - RNA, 19 nt, Artificial Sequence
  Description of Artificial Sequence: Synthetic oligonucleotide
auacgaugcuugauuugcc

SEQ ID NO: 2015123 - RNA, 19 nt, Artificial Sequence
  Description of Artificial Sequence: Synthetic oligonucleotide
aacgaugauggccgcugcu

SEQ ID NO: 2015124 - RNA, 19 nt, Artificial Sequence
  Description of Artificial Sequence: Synthetic oligonucleotide
ugauggccgcugcugaccc

SEQ ID NO: 2015125 - RNA, 19 nt, Artificial Sequence
  Description of Artificial Sequence: Synthetic oligonucleotide
aagcccuugccgccagacg

SEQ ID NO: 2015126 - RNA, 19 nt, Artificial Sequence
  Description of Artificial Sequence: Synthetic oligonucleotide
cuugccgccagacggcggg

SEQ ID NO: 2015127 - RNA, 19 nt, Artificial Sequence
  Description of Artificial Sequence: Synthetic oligonucleotide
gauaguacaucggugccaa

SEQ ID NO: 2015128 - RNA, 19 nt, Artificial Sequence
  Description of Artificial Sequence: Synthetic oligonucleotide
gucuucggaguuugaagcc

SEQ ID NO: 2015129 - RNA, 19 nt, Artificial Sequence
  Description of Artificial Sequence: Synthetic oligonucleotide
uucggcuaauuucuauaaa

SEQ ID NO: 2015130 - RNA, 19 nt, Artificial Sequence
  Description of Artificial Sequence: Synthetic oligonucleotide
agucuucucagagagccca

SEQ ID NO: 2015131 - RNA, 19 nt, Artificial Sequence
  Description of Artificial Sequence: Synthetic oligonucleotide
uugugaugucauaaacgau

SEQ ID NO: 2015132 - RNA, 19 nt, Artificial Sequence
  Description of Artificial Sequence: Synthetic oligonucleotide
gacuacaaauuuacauaug

SEQ ID NO: 2015133 - RNA, 19 nt, Artificial Sequence
  Description of Artificial Sequence: Synthetic oligonucleotide
cagaggagacgccugcugc

SEQ ID NO: 2015134 - RNA, 19 nt, Artificial Sequence
  Description of Artificial Sequence: Synthetic oligonucleotide
guacuggacagucuugguc

SEQ ID NO: 2015135 - RNA, 19 nt, Artificial Sequence
  Description of Artificial Sequence: Synthetic oligonucleotide
augcuugauuugcccacac

SEQ ID NO: 2015136 - RNA, 19 nt, Artificial Sequence
  Description of Artificial Sequence: Synthetic oligonucleotide
cauaaacgaugauggccgc

SEQ ID NO: 2015137 - RNA, 19 nt, Artificial Sequence
  Description of Artificial Sequence: Synthetic oligonucleotide
uccgauggcugucuucgga

SEQ ID NO: 2015138 - RNA, 19 nt, Artificial Sequence
  Description of Artificial Sequence: Synthetic oligonucleotide
aucgcauuuguucccugca

SEQ ID NO: 2015139 - RNA, 19 nt, Artificial Sequence
  Description of Artificial Sequence: Synthetic oligonucleotide
aucagugagaucgcauuug

SEQ ID NO: 2015140 - RNA, 19 nt, Artificial Sequence
  Description of Artificial Sequence: Synthetic oligonucleotide
gaaucggcguaguccuuag

SEQ ID NO: 2015141 - RNA, 19 nt, Artificial Sequence
  Description of Artificial Sequence: Synthetic oligonucleotide
ccaacuggaaagucggcgg

SEQ ID NO: 2015142 - RNA, 19 nt, Artificial Sequence
  Description of Artificial Sequence: Synthetic oligonucleotide
gugccaaugcacggaaucg

SEQ ID NO: 2015143 - RNA, 19 nt, Artificial Sequence
  Description of Artificial Sequence: Synthetic oligonucleotide
gugaaugcacuuccacacc

SEQ ID NO: 2015144 - RNA, 19 nt, Artificial Sequence
  Description of Artificial Sequence: Synthetic oligonucleotide
gaagacggggcacagggcu

SEQ ID NO: 2015145 - RNA, 19 nt, Artificial Sequence
  Description of Artificial Sequence: Synthetic oligonucleotide
gagcuaagugcuccaugcc

SEQ ID NO: 2015146 - RNA, 19 nt, Artificial Sequence
  Description of Artificial Sequence: Synthetic oligonucleotide
ggcaugaauggaaucggcg

SEQ ID NO: 2015147 - RNA, 19 nt, Artificial Sequence
  Description of Artificial Sequence: Synthetic oligonucleotide
ugcacggaaucguucuugu

SEQ ID NO: 2015148 - RNA, 19 nt, Artificial Sequence
  Description of Artificial Sequence: Synthetic oligonucleotide
ggaguuugaagcccuugcc

SEQ ID NO: 2015149 - RNA, 19 nt, Artificial Sequence
  Description of Artificial Sequence: Synthetic oligonucleotide
cugacaucagugagaucgc

SEQ ID NO: 2015150 - RNA, 19 nt, Artificial Sequence
  Description of Artificial Sequence: Synthetic oligonucleotide
gaagacuccagggcaugag

SEQ ID NO: 2015151 - RNA, 19 nt, Artificial Sequence
  Description of Artificial Sequence: Synthetic oligonucleotide
augguuggauugauauucg

SEQ ID NO: 2015152 - RNA, 19 nt, Artificial Sequence
  Description of Artificial Sequence: Synthetic oligonucleotide
augcugucggaguucucuc

SEQ ID NO: 2015153 - RNA, 19 nt, Artificial Sequence
  Description of Artificial Sequence: Synthetic oligonucleotide
uggagcucauuuugguacu

SEQ ID NO: 2015154 - RNA, 19 nt, Artificial Sequence
  Description of Artificial Sequence: Synthetic oligonucleotide
uuguuaccaucuccaggug

SEQ ID NO: 2015155 - RNA, 19 nt, Artificial Sequence
  Description of Artificial Sequence: Synthetic oligonucleotide
uuaggaauuuauggagcuc

SEQ ID NO: 2015156 - RNA, 19 nt, Artificial Sequence
  Description of Artificial Sequence: Synthetic oligonucleotide
cauaugcuaggcagagcac

SEQ ID NO: 2015157 - RNA, 19 nt, Artificial Sequence
  Description of Artificial Sequence: Synthetic oligonucleotide
accaaaauaccugggccca

SEQ ID NO: 2015158 - RNA, 19 nt, Artificial Sequence
  Description of Artificial Sequence: Synthetic oligonucleotide
auauucggaucaaaacugu

SEQ ID NO: 2015159 - RNA, 19 nt, Artificial Sequence
  Description of Artificial Sequence: Synthetic oligonucleotide
gggcaagggaggaagacgg

SEQ ID NO: 2015160 - RNA, 19 nt, Artificial Sequence
  Description of Artificial Sequence: Synthetic oligonucleotide
auggaguacuaaacagaac

SEQ ID NO: 2015161 - RNA, 19 nt, Artificial Sequence
  Description of Artificial Sequence: Synthetic oligonucleotide
caucggugccaaugcacgg

SEQ ID NO: 2015162 - RNA, 19 nt, Artificial Sequence
  Description of Artificial Sequence: Synthetic oligonucleotide
cagccagugaugugguccc

SEQ ID NO: 2015163 - RNA, 19 nt, Artificial Sequence
  Description of Artificial Sequence: Synthetic oligonucleotide
ccaccaaaauaccugggcc

SEQ ID NO: 2015164 - RNA, 19 nt, Artificial Sequence
  Description of Artificial Sequence: Synthetic oligonucleotide
ucggaucaaaacugucuuc

SEQ ID NO: 2015165 - RNA, 19 nt, Artificial Sequence
  Description of Artificial Sequence: Synthetic oligonucleotide
cuuccacaaaccgccauac

SEQ ID NO: 2015166 - RNA, 19 nt, Artificial Sequence
  Description of Artificial Sequence: Synthetic oligonucleotide
uguggucccucuccacgcc

SEQ ID NO: 2015167 - RNA, 19 nt, Artificial Sequence
  Description of Artificial Sequence: Synthetic oligonucleotide
ggaagcugugagcuaagug

SEQ ID NO: 2015168 - RNA, 19 nt, Artificial Sequence
  Description of Artificial Sequence: Synthetic oligonucleotide
ggaagacggaagcugugag

SEQ ID NO: 2015169 - RNA, 19 nt, Artificial Sequence
  Description of Artificial Sequence: Synthetic oligonucleotide
auuugcccacacccguauc

SEQ ID NO: 2015170 - RNA, 19 nt, Artificial Sequence
  Description of Artificial Sequence: Synthetic oligonucleotide
uggaaagucggcgggcaca

SEQ ID NO: 2015171 - RNA, 19 nt, Artificial Sequence
  Description of Artificial Sequence: Synthetic oligonucleotide
guacuaaacagaacucaga

SEQ ID NO: 2015172 - RNA, 19 nt, Artificial Sequence
  Description of Artificial Sequence: Synthetic oligonucleotide
cuucggcuaauuucuauaa

SEQ ID NO: 2015173 - RNA, 19 nt, Artificial Sequence
  Description of Artificial Sequence: Synthetic oligonucleotide
uccguggauggaauucuuc

SEQ ID NO: 2015174 - RNA, 19 nt, Artificial Sequence
  Description of Artificial Sequence: Synthetic oligonucleotide
ucgcauuuguucccugcaa

SEQ ID NO: 2015175 - RNA, 19 nt, Artificial Sequence
  Description of Artificial Sequence: Synthetic oligonucleotide
agucggcgggcacacauga

SEQ ID NO: 2015176 - RNA, 19 nt, Artificial Sequence
  Description of Artificial Sequence: Synthetic oligonucleotide
ugauuugcccacacccgua

SEQ ID NO: 2015177 - RNA, 19 nt, Artificial Sequence
  Description of Artificial Sequence: Synthetic oligonucleotide
gugagcuaagugcuccaug

SEQ ID NO: 2015178 - RNA, 19 nt, Artificial Sequence
  Description of Artificial Sequence: Synthetic oligonucleotide
cuucgcuuuggcuccgaug

SEQ ID NO: 2015179 - RNA, 19 nt, Artificial Sequence
  Description of Artificial Sequence: Synthetic oligonucleotide
cagaggcaaggacuggccc

SEQ ID NO: 2015180 - RNA, 19 nt, Artificial Sequence
  Description of Artificial Sequence: Synthetic oligonucleotide
gcuccgauggcugucuucg

SEQ ID NO: 2015181 - RNA, 19 nt, Artificial Sequence
  Description of Artificial Sequence: Synthetic oligonucleotide
uggucucuacaaagauggc

SEQ ID NO: 2015182 - RNA, 19 nt, Artificial Sequence
  Description of Artificial Sequence: Synthetic oligonucleotide
ucuucucagagagcccagc

SEQ ID NO: 2015183 - RNA, 19 nt, Artificial Sequence
  Description of Artificial Sequence: Synthetic oligonucleotide
aggggcaagggaggaagac

SEQ ID NO: 2015184 - RNA, 19 nt, Artificial Sequence
  Description of Artificial Sequence: Synthetic oligonucleotide
uuggcauccguggauggaa

SEQ ID NO: 2015185 - RNA, 19 nt, Artificial Sequence
  Description of Artificial Sequence: Synthetic oligonucleotide
ggugccaaugcacggaauc

SEQ ID NO: 2015186 - RNA, 19 nt, Artificial Sequence
  Description of Artificial Sequence: Synthetic oligonucleotide
ucggcguaguccuuagcau

SEQ ID NO: 2015187 - RNA, 19 nt, Artificial Sequence
  Description of Artificial Sequence: Synthetic oligonucleotide
ugccaaugcacggaaucgu

SEQ ID NO: 2015188 - RNA, 19 nt, Artificial Sequence
  Description of Artificial Sequence: Synthetic oligonucleotide
uacauaugcuaggcagagc

SEQ ID NO: 2015189 - RNA, 19 nt, Artificial Sequence
  Description of Artificial Sequence: Synthetic oligonucleotide
ugacccucgauaguacauc

SEQ ID NO: 2015190 - RNA, 19 nt, Artificial Sequence
  Description of Artificial Sequence: Synthetic oligonucleotide
uguucccugcaauggcaac

SEQ ID NO: 2015191 - RNA, 19 nt, Artificial Sequence
  Description of Artificial Sequence: Synthetic oligonucleotide
ggcggguuggcauccgugg

SEQ ID NO: 2015192 - RNA, 19 nt, Artificial Sequence
  Description of Artificial Sequence: Synthetic oligonucleotide
ucucacccaguucuucaau

SEQ ID NO: 2015193 - RNA, 19 nt, Artificial Sequence
  Description of Artificial Sequence: Synthetic oligonucleotide
cccagauuaggaauuuaug

SEQ ID NO: 2015194 - RNA, 19 nt, Artificial Sequence
  Description of Artificial Sequence: Synthetic oligonucleotide
caugaauggaaucggcgua

SEQ ID NO: 2015195 - RNA, 19 nt, Artificial Sequence
  Description of Artificial Sequence: Synthetic oligonucleotide
gaggcacaagucuuuguua

SEQ ID NO: 2015196 - RNA, 19 nt, Artificial Sequence
  Description of Artificial Sequence: Synthetic oligonucleotide
gacggaagcugugagcuaa

SEQ ID NO: 2015197 - RNA, 19 nt, Artificial Sequence
  Description of Artificial Sequence: Synthetic oligonucleotide
ucggugccaaugcacggaa

SEQ ID NO: 2015198 - RNA, 19 nt, Artificial Sequence
  Description of Artificial Sequence: Synthetic oligonucleotide
caauguugaaaaugucucu

SEQ ID NO: 2015199 - RNA, 19 nt, Artificial Sequence
  Description of Artificial Sequence: Synthetic oligonucleotide
ugacaucagugagaucgca

SEQ ID NO: 2015200 - RNA, 19 nt, Artificial Sequence
  Description of Artificial Sequence: Synthetic oligonucleotide
ggucucauaaauauagacu

SEQ ID NO: 2015201 - RNA, 19 nt, Artificial Sequence
  Description of Artificial Sequence: Synthetic oligonucleotide
aggucaacagccagugaug

SEQ ID NO: 2015202 - RNA, 19 nt, Artificial Sequence
  Description of Artificial Sequence: Synthetic oligonucleotide
aaccgccauacgaugcuug

SEQ ID NO: 2015203 - RNA, 19 nt, Artificial Sequence
  Description of Artificial Sequence: Synthetic oligonucleotide
auaaacgaugauggccgcu

SEQ ID NO: 2015204 - RNA, 19 nt, Artificial Sequence
  Description of Artificial Sequence: Synthetic oligonucleotide
caaagauggcaugaaugga

SEQ ID NO: 2015205 - RNA, 19 nt, Artificial Sequence
  Description of Artificial Sequence: Synthetic oligonucleotide
gaggagacgccugcugcag

SEQ ID NO: 2015206 - RNA, 19 nt, Artificial Sequence
  Description of Artificial Sequence: Synthetic oligonucleotide
accgccauacgaugcuuga

SEQ ID NO: 2015207 - RNA, 19 nt, Artificial Sequence
  Description of Artificial Sequence: Synthetic oligonucleotide
cgggcacacaugaagacgg

SEQ ID NO: 2015208 - RNA, 19 nt, Artificial Sequence
  Description of Artificial Sequence: Synthetic oligonucleotide
ugaauggaaucggcguagu

SEQ ID NO: 2015209 - RNA, 19 nt, Artificial Sequence
  Description of Artificial Sequence: Synthetic oligonucleotide
cugcagaggagacgccugc

SEQ ID NO: 2015210 - RNA, 19 nt, Artificial Sequence
  Description of Artificial Sequence: Synthetic oligonucleotide
gguuggauugauauucgga

SEQ ID NO: 2015211 - RNA, 19 nt, Artificial Sequence
  Description of Artificial Sequence: Synthetic oligonucleotide
ggucucuacaaagauggca

SEQ ID NO: 2015212 - RNA, 19 nt, Artificial Sequence
  Description of Artificial Sequence: Synthetic oligonucleotide
ucggaguuugaagcccuug

SEQ ID NO: 2015213 - RNA, 19 nt, Artificial Sequence
  Description of Artificial Sequence: Synthetic oligonucleotide
acuggaaagucggcgggca

SEQ ID NO: 2015214 - RNA, 19 nt, Artificial Sequence
  Description of Artificial Sequence: Synthetic oligonucleotide
cuucucagagagcccagca

SEQ ID NO: 2015215 - RNA, 19 nt, Artificial Sequence
  Description of Artificial Sequence: Synthetic oligonucleotide
gaggaagacggaagcugug

SEQ ID NO: 2015216 - RNA, 19 nt, Artificial Sequence
  Description of Artificial Sequence: Synthetic oligonucleotide
caaugcacggaaucguucu

SEQ ID NO: 2015217 - RNA, 19 nt, Artificial Sequence
  Description of Artificial Sequence: Synthetic oligonucleotide
cagucuucucagagagccc

SEQ ID NO: 2015218 - RNA, 19 nt, Artificial Sequence
  Description of Artificial Sequence: Synthetic oligonucleotide
cacagggcuaaauggagua

SEQ ID NO: 2015219 - RNA, 19 nt, Artificial Sequence
  Description of Artificial Sequence: Synthetic oligonucleotide
ggaguacuaaacagaacuc

SEQ ID NO: 2015220 - RNA, 19 nt, Artificial Sequence
  Description of Artificial Sequence: Synthetic oligonucleotide
ggcacaagucuuuguuacc

SEQ ID NO: 2015221 - RNA, 19 nt, Artificial Sequence
  Description of Artificial Sequence: Synthetic oligonucleotide
acaugaagacggggcacag

SEQ ID NO: 2015222 - RNA, 19 nt, Artificial Sequence
  Description of Artificial Sequence: Synthetic oligonucleotide
gguuggcauccguggaugg

SEQ ID NO: 2015223 - RNA, 19 nt, Artificial Sequence
  Description of Artificial Sequence: Synthetic oligonucleotide
ggggcaagggaggaagacg

SEQ ID NO: 2015224 - RNA, 19 nt, Artificial Sequence
  Description of Artificial Sequence: Synthetic oligonucleotide
guaguccuuagcaucucuc

SEQ ID NO: 2015225 - RNA, 19 nt, Artificial Sequence
  Description of Artificial Sequence: Synthetic oligonucleotide
gaguucucucacccaguuc

SEQ ID NO: 2015226 - RNA, 19 nt, Artificial Sequence
  Description of Artificial Sequence: Synthetic oligonucleotide
cacaccuccugugaccaac

SEQ ID NO: 2015227 - RNA, 19 nt, Artificial Sequence
  Description of Artificial Sequence: Synthetic oligonucleotide
auggucucauaaauauaga

SEQ ID NO: 2015228 - RNA, 19 nt, Artificial Sequence
  Description of Artificial Sequence: Synthetic oligonucleotide
agaucgcauuuguucccug

SEQ ID NO: 2015229 - RNA, 19 nt, Artificial Sequence
  Description of Artificial Sequence: Synthetic oligonucleotide
guucccugcaauggcaaca

SEQ ID NO: 2015230 - RNA, 19 nt, Artificial Sequence
  Description of Artificial Sequence: Synthetic oligonucleotide
ggcacagggcuaaauggag

SEQ ID NO: 2015231 - RNA, 19 nt, Artificial Sequence
  Description of Artificial Sequence: Synthetic oligonucleotide
agacggcggguuggcaucc

SEQ ID NO: 2015232 - RNA, 19 nt, Artificial Sequence
  Description of Artificial Sequence: Synthetic oligonucleotide
gaaugcacuuccacaccuc

SEQ ID NO: 2015233 - RNA, 19 nt, Artificial Sequence
  Description of Artificial Sequence: Synthetic oligonucleotide
uggcugucuucggaguuug

SEQ ID NO: 2015234 - RNA, 19 nt, Artificial Sequence
  Description of Artificial Sequence: Synthetic oligonucleotide
ucuccaggugggaggcaga

SEQ ID NO: 2015235 - RNA, 19 nt, Artificial Sequence
  Description of Artificial Sequence: Synthetic oligonucleotide
aucggugccaaugcacgga

SEQ ID NO: 2015236 - RNA, 19 nt, Artificial Sequence
  Description of Artificial Sequence: Synthetic oligonucleotide
ggcacacaugaagacgggg

SEQ ID NO: 2015237 - RNA, 19 nt, Artificial Sequence
  Description of Artificial Sequence: Synthetic oligonucleotide
guacaucggugccaaugca

SEQ ID NO: 2015238 - RNA, 19 nt, Artificial Sequence
  Description of Artificial Sequence: Synthetic oligonucleotide
uuuggcuccgauggcuguc

SEQ ID NO: 2015239 - RNA, 19 nt, Artificial Sequence
  Description of Artificial Sequence: Synthetic oligonucleotide
uuaccaucuccagguggga

SEQ ID NO: 2015240 - RNA, 19 nt, Artificial Sequence
  Description of Artificial Sequence: Synthetic oligonucleotide
gcaugaauggaaucggcgu

SEQ ID NO: 2015241 - RNA, 19 nt, Artificial Sequence
  Description of Artificial Sequence: Synthetic oligonucleotide
aagucggcgggcacacaug

SEQ ID NO: 2015242 - RNA, 19 nt, Artificial Sequence
  Description of Artificial Sequence: Synthetic oligonucleotide
cagacggcggguuggcauc

SEQ ID NO: 2015243 - RNA, 19 nt, Artificial Sequence
  Description of Artificial Sequence: Synthetic oligonucleotide
gcacaagucuuuguuacca

SEQ ID NO: 2015244 - RNA, 19 nt, Artificial Sequence
  Description of Artificial Sequence: Synthetic oligonucleotide
agaagacuccagggcauga

SEQ ID NO: 2015245 - RNA, 19 nt, Artificial Sequence
  Description of Artificial Sequence: Synthetic oligonucleotide
ccucgauaguacaucggug

SEQ ID NO: 2015246 - RNA, 19 nt, Artificial Sequence
  Description of Artificial Sequence: Synthetic oligonucleotide
gcuguaucccagauuagga

SEQ ID NO: 2015247 - RNA, 19 nt, Artificial Sequence
  Description of Artificial Sequence: Synthetic oligonucleotide
uggcauccguggauggaau

SEQ ID NO: 2015248 - RNA, 19 nt, Artificial Sequence
  Description of Artificial Sequence: Synthetic oligonucleotide
acccucgauaguacaucgg

SEQ ID NO: 2015249 - RNA, 19 nt, Artificial Sequence
  Description of Artificial Sequence: Synthetic oligonucleotide
cacaugaagacggggcaca

SEQ ID NO: 2015250 - RNA, 19 nt, Artificial Sequence
  Description of Artificial Sequence: Synthetic oligonucleotide
uuggcuccgauggcugucu

SEQ ID NO: 2015251 - RNA, 19 nt, Artificial Sequence
  Description of Artificial Sequence: Synthetic oligonucleotide
gcgggcacacaugaagacg

SEQ ID NO: 2015252 - RNA, 19 nt, Artificial Sequence
  Description of Artificial Sequence: Synthetic oligonucleotide
cccugcaauggcaacaaca

SEQ ID NO: 2015253 - RNA, 19 nt, Artificial Sequence
  Description of Artificial Sequence: Synthetic oligonucleotide
ccgauggcugucuucggag

SEQ ID NO: 2015254 - RNA, 19 nt, Artificial Sequence
  Description of Artificial Sequence: Synthetic oligonucleotide
cuccgauggcugucuucgg

SEQ ID NO: 2015255 - RNA, 19 nt, Artificial Sequence
  Description of Artificial Sequence: Synthetic oligonucleotide
cuggaaagucggcgggcac

SEQ ID NO: 2015256 - RNA, 19 nt, Artificial Sequence
  Description of Artificial Sequence: Synthetic oligonucleotide
gaagaagacuccagggcau

SEQ ID NO: 2015257 - RNA, 19 nt, Artificial Sequence
  Description of Artificial Sequence: Synthetic oligonucleotide
cugggucgucagcagcagc

SEQ ID NO: 2015258 - RNA, 19 nt, Artificial Sequence
  Description of Artificial Sequence: Synthetic oligonucleotide
aaaccgccauacgaugcuu

SEQ ID NO: 2015259 - RNA, 19 nt, Artificial Sequence
  Description of Artificial Sequence: Synthetic oligonucleotide
uccacgccagagucugcac

SEQ ID NO: 2015260 - RNA, 19 nt, Artificial Sequence
  Description of Artificial Sequence: Synthetic oligonucleotide
ccauacgaugcuugauuug

SEQ ID NO: 2015261 - RNA, 19 nt, Artificial Sequence
  Description of Artificial Sequence: Synthetic oligonucleotide
gcugucggaguucucucac

SEQ ID NO: 2015262 - RNA, 19 nt, Artificial Sequence
  Description of Artificial Sequence: Synthetic oligonucleotide
ccaaugcacggaaucguuc

SEQ ID NO: 2015263 - RNA, 19 nt, Artificial Sequence
  Description of Artificial Sequence: Synthetic oligonucleotide
gugcuccaugccuuugcac

SEQ ID NO: 2015264 - RNA, 19 nt, Artificial Sequence
  Description of Artificial Sequence: Synthetic oligonucleotide
ucuccacgccagagucugc

SEQ ID NO: 2015265 - RNA, 19 nt, Artificial Sequence
  Description of Artificial Sequence: Synthetic oligonucleotide
uucggaguuugaagcccuu

SEQ ID NO: 2015266 - RNA, 19 nt, Artificial Sequence
  Description of Artificial Sequence: Synthetic oligonucleotide
aggagacgccugcugcagu

SEQ ID NO: 2015267 - RNA, 19 nt, Artificial Sequence
  Description of Artificial Sequence: Synthetic oligonucleotide
gucggaguucucucaccca

SEQ ID NO: 2015268 - RNA, 19 nt, Artificial Sequence
  Description of Artificial Sequence: Synthetic oligonucleotide
uggccgcugcugacccucg

SEQ ID NO: 2015269 - RNA, 19 nt, Artificial Sequence
  Description of Artificial Sequence: Synthetic oligonucleotide
cuccaugccuuugcacaag

SEQ ID NO: 2015270 - RNA, 19 nt, Artificial Sequence
  Description of Artificial Sequence: Synthetic oligonucleotide
cggcuaauuucuauaaaca

SEQ ID NO: 2015271 - RNA, 19 nt, Artificial Sequence
  Description of Artificial Sequence: Synthetic oligonucleotide
aggaauuuauggagcucau

SEQ ID NO: 2015272 - RNA, 19 nt, Artificial Sequence
  Description of Artificial Sequence: Synthetic oligonucleotide
ucccugcaauggcaacaac

SEQ ID NO: 2015273 - RNA, 19 nt, Artificial Sequence
  Description of Artificial Sequence: Synthetic oligonucleotide
cuacaaagauggcaugaau

SEQ ID NO: 2015274 - RNA, 19 nt, Artificial Sequence
  Description of Artificial Sequence: Synthetic oligonucleotide
caaaccgccauacgaugcu

SEQ ID NO: 2015275 - RNA, 19 nt, Artificial Sequence
  Description of Artificial Sequence: Synthetic oligonucleotide
ggaaagucggcgggcacac

SEQ ID NO: 2015276 - RNA, 19 nt, Artificial Sequence
  Description of Artificial Sequence: Synthetic oligonucleotide
cgaugcuugauuugcccac

SEQ ID NO: 2015277 - RNA, 19 nt, Artificial Sequence
  Description of Artificial Sequence: Synthetic oligonucleotide
gucccucuccacgccagag

SEQ ID NO: 2015278 - RNA, 19 nt, Artificial Sequence
  Description of Artificial Sequence: Synthetic oligonucleotide
cucucacccaguucuucaa

SEQ ID NO: 2015279 - RNA, 19 nt, Artificial Sequence
  Description of Artificial Sequence: Synthetic oligonucleotide
acgccugcugcagucuucu

SEQ ID NO: 2015280 - RNA, 19 nt, Artificial Sequence
  Description of Artificial Sequence: Synthetic oligonucleotide
gacaucagugagaucgcau

SEQ ID NO: 2015281 - RNA, 19 nt, Artificial Sequence
  Description of Artificial Sequence: Synthetic oligonucleotide
cuucggaguuugaagcccu

SEQ ID NO: 2015282 - RNA, 19 nt, Artificial Sequence
  Description of Artificial Sequence: Synthetic oligonucleotide
caucaguguggggcccugg

SEQ ID NO: 2015283 - RNA, 19 nt, Artificial Sequence
  Description of Artificial Sequence: Synthetic oligonucleotide
gagaucgcauuuguucccu

SEQ ID NO: 2015284 - RNA, 19 nt, Artificial Sequence
  Description of Artificial Sequence: Synthetic oligonucleotide
gcauccguggauggaauuc

SEQ ID NO: 2015285 - RNA, 19 nt, Artificial Sequence
  Description of Artificial Sequence: Synthetic oligonucleotide
augcacuuccacaccuccu

SEQ ID NO: 2015286 - RNA, 19 nt, Artificial Sequence
  Description of Artificial Sequence: Synthetic oligonucleotide
gcugacccucgauaguaca

SEQ ID NO: 2015287 - RNA, 19 nt, Artificial Sequence
  Description of Artificial Sequence: Synthetic oligonucleotide
augccccuaugguuggauu

SEQ ID NO: 2015288 - RNA, 19 nt, Artificial Sequence
  Description of Artificial Sequence: Synthetic oligonucleotide
ggaggcacaagucuuuguu

SEQ ID NO: 2015289 - RNA, 19 nt, Artificial Sequence
  Description of Artificial Sequence: Synthetic oligonucleotide
ggguuggcauccguggaug

SEQ ID NO: 2015290 - RNA, 19 nt, Artificial Sequence
  Description of Artificial Sequence: Synthetic oligonucleotide
caccuccugugaccaacug

SEQ ID NO: 2015291 - RNA, 19 nt, Artificial Sequence
  Description of Artificial Sequence: Synthetic oligonucleotide
cugcugacccucgauagua

SEQ ID NO: 2015292 - RNA, 19 nt, Artificial Sequence
  Description of Artificial Sequence: Synthetic oligonucleotide
cuaggucaacagccaguga

SEQ ID NO: 2015293 - RNA, 19 nt, Artificial Sequence
  Description of Artificial Sequence: Synthetic oligonucleotide
agacggaagcugugagcua

SEQ ID NO: 2015294 - RNA, 19 nt, Artificial Sequence
  Description of Artificial Sequence: Synthetic oligonucleotide
uggaaucggcguaguccuu

SEQ ID NO: 2015295 - RNA, 19 nt, Artificial Sequence
  Description of Artificial Sequence: Synthetic oligonucleotide
agacgccugcugcagucuu

SEQ ID NO: 2015296 - RNA, 19 nt, Artificial Sequence
  Description of Artificial Sequence: Synthetic oligonucleotide
auaguacaucggugccaau

SEQ ID NO: 2015297 - RNA, 19 nt, Artificial Sequence
  Description of Artificial Sequence: Synthetic oligonucleotide
cauuuauguuuaucgcauu

SEQ ID NO: 2015298 - RNA, 19 nt, Artificial Sequence
  Description of Artificial Sequence: Synthetic oligonucleotide
ggucgucagcagcagcuuc

SEQ ID NO: 2015299 - RNA, 19 nt, Artificial Sequence
  Description of Artificial Sequence: Synthetic oligonucleotide
cagggcuaaauggaguacu

SEQ ID NO: 2015300 - RNA, 19 nt, Artificial Sequence
  Description of Artificial Sequence: Synthetic oligonucleotide
agacggggcacagggcuaa

SEQ ID NO: 2015301 - RNA, 19 nt, Artificial Sequence
  Description of Artificial Sequence: Synthetic oligonucleotide
guggucccucuccacgcca

SEQ ID NO: 2015302 - RNA, 19 nt, Artificial Sequence
  Description of Artificial Sequence: Synthetic oligonucleotide
cugacccucgauaguacau

SEQ ID NO: 2015303 - RNA, 19 nt, Artificial Sequence
  Description of Artificial Sequence: Synthetic oligonucleotide
caucagugagaucgcauuu

SEQ ID NO: 2015304 - RNA, 19 nt, Artificial Sequence
  Description of Artificial Sequence: Synthetic oligonucleotide
ggaggaagacggaagcugu

SEQ ID NO: 2015305 - RNA, 19 nt, Artificial Sequence
  Description of Artificial Sequence: Synthetic oligonucleotide
gacggcggguuggcauccg

SEQ ID NO: 2015306 - RNA, 19 nt, Artificial Sequence
  Description of Artificial Sequence: Synthetic oligonucleotide
auucuucggcuaauuucua

SEQ ID NO: 2015307 - RNA, 19 nt, Artificial Sequence
  Description of Artificial Sequence: Synthetic oligonucleotide
gcaagggaggaagacggaa

SEQ ID NO: 2015308 - RNA, 19 nt, Artificial Sequence
  Description of Artificial Sequence: Synthetic oligonucleotide
caauggcaacaacaaugcu

SEQ ID NO: 2015309 - RNA, 19 nt, Artificial Sequence
  Description of Artificial Sequence: Synthetic oligonucleotide
acggcggguuggcauccgu

SEQ ID NO: 2015310 - RNA, 19 nt, Artificial Sequence
  Description of Artificial Sequence: Synthetic oligonucleotide
cucugacaucagugagauc

SEQ ID NO: 2015311 - RNA, 19 nt, Artificial Sequence
  Description of Artificial Sequence: Synthetic oligonucleotide
ggauugauauucggaucaa

SEQ ID NO: 2015312 - RNA, 19 nt, Artificial Sequence
  Description of Artificial Sequence: Synthetic oligonucleotide
cuaagugcuccaugccuuu

SEQ ID NO: 2015313 - RNA, 19 nt, Artificial Sequence
  Description of Artificial Sequence: Synthetic oligonucleotide
cuuuggcuccgauggcugu

SEQ ID NO: 2015314 - RNA, 19 nt, Artificial Sequence
  Description of Artificial Sequence: Synthetic oligonucleotide
cggcguaguccuuagcauc

SEQ ID NO: 2015315 - RNA, 19 nt, Artificial Sequence
  Description of Artificial Sequence: Synthetic oligonucleotide
ggcguaguccuuagcaucu

SEQ ID NO: 2015316 - RNA, 19 nt, Artificial Sequence
  Description of Artificial Sequence: Synthetic oligonucleotide
ggaaucggcguaguccuua

SEQ ID NO: 2015317 - RNA, 19 nt, Artificial Sequence
  Description of Artificial Sequence: Synthetic oligonucleotide
gaugccccuaugguuggau

SEQ ID NO: 2015318 - RNA, 19 nt, Artificial Sequence
  Description of Artificial Sequence: Synthetic oligonucleotide
ggcccugggucgucagcag

SEQ ID NO: 2015319 - RNA, 19 nt, Artificial Sequence
  Description of Artificial Sequence: Synthetic oligonucleotide
gaaagucggcgggcacaca

SEQ ID NO: 2015320 - RNA, 19 nt, Artificial Sequence
  Description of Artificial Sequence: Synthetic oligonucleotide
gggcuaaauggaguacuaa

SEQ ID NO: 2015321 - RNA, 19 nt, Artificial Sequence
  Description of Artificial Sequence: Synthetic oligonucleotide
augcuaggcagagcacauu

SEQ ID NO: 2015322 - RNA, 19 nt, Artificial Sequence
  Description of Artificial Sequence: Synthetic oligonucleotide
gcacggaaucguucuuguc

SEQ ID NO: 2015323 - RNA, 19 nt, Artificial Sequence
  Description of Artificial Sequence: Synthetic oligonucleotide
gcccuccugcaacacccag

SEQ ID NO: 2015324 - RNA, 19 nt, Artificial Sequence
  Description of Artificial Sequence: Synthetic oligonucleotide
cccucgauaguacaucggu

SEQ ID NO: 2015325 - RNA, 19 nt, Artificial Sequence
  Description of Artificial Sequence: Synthetic oligonucleotide
gccccuaugguuggauuga

SEQ ID NO: 2015326 - RNA, 19 nt, Artificial Sequence
  Description of Artificial Sequence: Synthetic oligonucleotide
auccguggauggaauucuu

SEQ ID NO: 2015327 - RNA, 19 nt, Artificial Sequence
  Description of Artificial Sequence: Synthetic oligonucleotide
uggcuccgauggcugucuu

SEQ ID NO: 2015328 - RNA, 19 nt, Artificial Sequence
  Description of Artificial Sequence: Synthetic oligonucleotide
gcggguuggcauccgugga

SEQ ID NO: 2015329 - RNA, 19 nt, Artificial Sequence
  Description of Artificial Sequence: Synthetic oligonucleotide
gcuaagugcuccaugccuu

SEQ ID NO: 2015330 - RNA, 19 nt, Artificial Sequence
  Description of Artificial Sequence: Synthetic oligonucleotide
gcgcuggucucuacaaaga

SEQ ID NO: 2015331 - RNA, 19 nt, Artificial Sequence
  Description of Artificial Sequence: Synthetic oligonucleotide
gccgccagacggcggguug

SEQ ID NO: 2015332 - RNA, 19 nt, Artificial Sequence
  Description of Artificial Sequence: Synthetic oligonucleotide
ccuugccgccagacggcgg

SEQ ID NO: 2015333 - RNA, 19 nt, Artificial Sequence
  Description of Artificial Sequence: Synthetic oligonucleotide
gauggccgcugcugacccu

SEQ ID NO: 2015334 - RNA, 19 nt, Artificial Sequence
  Description of Artificial Sequence: Synthetic oligonucleotide
ccaugacuucucugacauc

SEQ ID NO: 2015335 - RNA, 19 nt, Artificial Sequence
  Description of Artificial Sequence: Synthetic oligonucleotide
gcugcugacccucgauagu

SEQ ID NO: 2015336 - RNA, 19 nt, Artificial Sequence
  Description of Artificial Sequence: Synthetic oligonucleotide
cagugagaucgcauuuguu

SEQ ID NO: 2015337 - RNA, 19 nt, Artificial Sequence
  Description of Artificial Sequence: Synthetic oligonucleotide
ccugggucgucagcagcag

SEQ ID NO: 2015338 - RNA, 19 nt, Artificial Sequence
  Description of Artificial Sequence: Synthetic oligonucleotide
ggacagucuuggucauaaa

SEQ ID NO: 2015339 - RNA, 19 nt, Artificial Sequence
  Description of Artificial Sequence: Synthetic oligonucleotide
cgauaguacaucggugcca

SEQ ID NO: 2015340 - RNA, 19 nt, Artificial Sequence
  Description of Artificial Sequence: Synthetic oligonucleotide
gcccuugccgccagacggc

SEQ ID NO: 2015341 - RNA, 19 nt, Artificial Sequence
  Description of Artificial Sequence: Synthetic oligonucleotide
cccuugccgccagacggcg

SEQ ID NO: 2015342 - RNA, 19 nt, Artificial Sequence
  Description of Artificial Sequence: Synthetic oligonucleotide
ggcaagggaggaagacgga

SEQ ID NO: 2015343 - RNA, 19 nt, Artificial Sequence
  Description of Artificial Sequence: Synthetic oligonucleotide
cggaaucguucuuguccag

SEQ ID NO: 2015344 - RNA, 19 nt, Artificial Sequence
  Description of Artificial Sequence: Synthetic oligonucleotide
gcacagggcuaaauggagu

SEQ ID NO: 2015345 - RNA, 19 nt, Artificial Sequence
  Description of Artificial Sequence: Synthetic oligonucleotide
ccgccagacggcggguugg

SEQ ID NO: 2015346 - RNA, 19 nt, Artificial Sequence
  Description of Artificial Sequence: Synthetic oligonucleotide
ugccgccagacggcggguu

SEQ ID NO: 2015347 - RNA, 19 nt, Artificial Sequence
  Description of Artificial Sequence: Synthetic oligonucleotide
cuggacagucuuggucaua

SEQ ID NO: 2015348 - RNA, 19 nt, Artificial Sequence
  Description of Artificial Sequence: Synthetic oligonucleotide
guggggcccugggucguca

SEQ ID NO: 2015349 - RNA, 19 nt, Artificial Sequence
  Description of Artificial Sequence: Synthetic oligonucleotide
cccuaugguuggauugaua

SEQ ID NO: 2015350 - RNA, 19 nt, Artificial Sequence
  Description of Artificial Sequence: Synthetic oligonucleotide
gucggcgggcacacaugaa

SEQ ID NO: 2015351 - RNA, 19 nt, Artificial Sequence
  Description of Artificial Sequence: Synthetic oligonucleotide
gcguaguccuuagcaucuc

SEQ ID NO: 2015352 - RNA, 19 nt, Artificial Sequence
  Description of Artificial Sequence: Synthetic oligonucleotide
ggcauccguggauggaauu

SEQ ID NO: 2015353 - RNA, 19 nt, Artificial Sequence
  Description of Artificial Sequence: Synthetic oligonucleotide
cggcggguuggcauccgug

SEQ ID NO: 2015354 - RNA, 19 nt, Artificial Sequence
  Description of Artificial Sequence: Synthetic oligonucleotide
ccagacggcggguuggcau

SEQ ID NO: 2015355 - RNA, 19 nt, Artificial Sequence
  Description of Artificial Sequence: Synthetic oligonucleotide
gacggggcacagggcuaaa

SEQ ID NO: 2015356 - RNA, 19 nt, Artificial Sequence
  Description of Artificial Sequence: Synthetic oligonucleotide
ggcaaggacuggcccuccu

SEQ ID NO: 2015357 - RNA, 19 nt, Artificial Sequence
  Description of Artificial Sequence: Synthetic oligonucleotide
ccaaaauaccugggcccaa

SEQ ID NO: 2015358 - RNA, 19 nt, Artificial Sequence
  Description of Artificial Sequence: Synthetic oligonucleotide
ccaugccuuugcacaaggu

SEQ ID NO: 2015359 - RNA, 19 nt, Artificial Sequence
  Description of Artificial Sequence: Synthetic oligonucleotide
gcuaggcagagcacauuuu

SEQ ID NO: 2015360 - RNA, 19 nt, Artificial Sequence
  Description of Artificial Sequence: Synthetic oligonucleotide
cgccauacgaugcuugauu

SEQ ID NO: 2015361 - RNA, 19 nt, Artificial Sequence
  Description of Artificial Sequence: Synthetic oligonucleotide
guguggggcccugggucgu

SEQ ID NO: 2015362 - RNA, 19 nt, Artificial Sequence
  Description of Artificial Sequence: Synthetic oligonucleotide
ccucuccacgccagagucu

SEQ ID NO: 2015363 - RNA, 19 nt, Artificial Sequence
  Description of Artificial Sequence: Synthetic oligonucleotide
cgcuggucucuacaaagau

SEQ ID NO: 2015364 - RNA, 19 nt, Artificial Sequence
  Description of Artificial Sequence: Synthetic oligonucleotide
gccagacggcggguuggca

SEQ ID NO: 2015365 - RNA, 19 nt, Artificial Sequence
  Description of Artificial Sequence: Synthetic oligonucleotide
cgccagacggcggguuggc

SEQ ID NO: 2015366 - RNA, 19 nt, Artificial Sequence
  Description of Artificial Sequence: Synthetic oligonucleotide
gggucgucagcagcagcuu

SEQ ID NO: 2015367 - RNA, 19 nt, Artificial Sequence
  Description of Artificial Sequence: Synthetic oligonucleotide
cggaguucucucacccagu

SEQ ID NO: 2015368 - RNA, 19 nt, Artificial Sequence
  Description of Artificial Sequence: Synthetic oligonucleotide
ccuuagcaucucucuccau

SEQ ID NO: 2015369 - RNA, 19 nt, Artificial Sequence
  Description of Artificial Sequence: Synthetic oligonucleotide
cggguuggcauccguggau

SEQ ID NO: 2015370 - RNA, 19 nt, Artificial Sequence
  Description of Artificial Sequence: Synthetic oligonucleotide
ccgccauacgaugcuugau

SEQ ID NO: 2015371 - RNA, 19 nt, Artificial Sequence
  Description of Artificial Sequence: Synthetic oligonucleotide
ccccuaugguuggauugau

SEQ ID NO: 2015372 - RNA, 19 nt, Artificial Sequence
  Description of Artificial Sequence: Synthetic oligonucleotide
aacaauaugcucucgaauc

SEQ ID NO: 2015373 - RNA, 19 nt, Artificial Sequence
  Description of Artificial Sequence: Synthetic oligonucleotide
uacaauguucauuagauag

SEQ ID NO: 2015374 - RNA, 19 nt, Artificial Sequence
  Description of Artificial Sequence: Synthetic oligonucleotide
augaagaacguccaaauac

SEQ ID NO: 2015375 - RNA, 19 nt, Artificial Sequence
  Description of Artificial Sequence: Synthetic oligonucleotide
aaggcuuuuccauacauuc

SEQ ID NO: 2015376 - RNA, 19 nt, Artificial Sequence
  Description of Artificial Sequence: Synthetic oligonucleotide
uuuucauauacuacuaucc

SEQ ID NO: 2015377 - RNA, 19 nt, Artificial Sequence
  Description of Artificial Sequence: Synthetic oligonucleotide
auguucauuagauagauug

SEQ ID NO: 2015378 - RNA, 19 nt, Artificial Sequence
  Description of Artificial Sequence: Synthetic oligonucleotide
agauagauuguuuucauag

SEQ ID NO: 2015379 - RNA, 19 nt, Artificial Sequence
  Description of Artificial Sequence: Synthetic oligonucleotide
aaacauaguguuucucucc

SEQ ID NO: 2015380 - RNA, 19 nt, Artificial Sequence
  Description of Artificial Sequence: Synthetic oligonucleotide
ucauauacuacuaucccag

SEQ ID NO: 2015381 - RNA, 19 nt, Artificial Sequence
  Description of Artificial Sequence: Synthetic oligonucleotide
uacgaagguaugaagaacg

SEQ ID NO: 2015382 - RNA, 19 nt, Artificial Sequence
  Description of Artificial Sequence: Synthetic oligonucleotide
uuuucauggauuugaaggg

SEQ ID NO: 2015383 - RNA, 19 nt, Artificial Sequence
  Description of Artificial Sequence: Synthetic oligonucleotide
aaaugagacuccuacaaug

SEQ ID NO: 2015384 - RNA, 19 nt, Artificial Sequence
  Description of Artificial Sequence: Synthetic oligonucleotide
auuccugguacucauaugg

SEQ ID NO: 2015385 - RNA, 19 nt, Artificial Sequence
  Description of Artificial Sequence: Synthetic oligonucleotide
uuucaugaauauaacaggc

SEQ ID NO: 2015386 - RNA, 19 nt, Artificial Sequence
  Description of Artificial Sequence: Synthetic oligonucleotide
auagauuguuuucauaggg

SEQ ID NO: 2015387 - RNA, 19 nt, Artificial Sequence
  Description of Artificial Sequence: Synthetic oligonucleotide
  modified_base (14)..(14): a, c, u, g, unknown or other
aaauacuuucccanacugc

SEQ ID NO: 2015388 - RNA, 19 nt, Artificial Sequence
  Description of Artificial Sequence: Synthetic oligonucleotide
uauacuacuaucccaggag

SEQ ID NO: 2015389 - RNA, 19 nt, Artificial Sequence
  Description of Artificial Sequence: Synthetic oligonucleotide
agaacguccaaauacuuuc

SEQ ID NO: 2015390 - RNA, 19 nt, Artificial Sequence
  Description of Artificial Sequence: Synthetic oligonucleotide
cuuucaugaauauaacagg

SEQ ID NO: 2015391 - RNA, 19 nt, Artificial Sequence
  Description of Artificial Sequence: Synthetic oligonucleotide
guugaaauucauaaaaucc

SEQ ID NO: 2015392 - RNA, 19 nt, Artificial Sequence
  Description of Artificial Sequence: Synthetic oligonucleotide
cauaaaauccuuuaaucac

SEQ ID NO: 2015393 - RNA, 19 nt, Artificial Sequence
  Description of Artificial Sequence: Synthetic oligonucleotide
acugugaaagaccaauggc

SEQ ID NO: 2015394 - RNA, 19 nt, Artificial Sequence
  Description of Artificial Sequence: Synthetic oligonucleotide
aauguuuacaugaguaagg

SEQ ID NO: 2015395 - RNA, 19 nt, Artificial Sequence
  Description of Artificial Sequence: Synthetic oligonucleotide
gaagguaugaagaacgucc

SEQ ID NO: 2015396 - RNA, 19 nt, Artificial Sequence
  Description of Artificial Sequence: Synthetic oligonucleotide
ucagaaaugagacuccuac

SEQ ID NO: 2015397 - RNA, 19 nt, Artificial Sequence
  Description of Artificial Sequence: Synthetic oligonucleotide
augaguaaggcuucucucc

SEQ ID NO: 2015398 - RNA, 19 nt, Artificial Sequence
  Description of Artificial Sequence: Synthetic oligonucleotide
uucaugauuguuacaagcc

SEQ ID NO: 2015399 - RNA, 19 nt, Artificial Sequence
  Description of Artificial Sequence: Synthetic oligonucleotide
auuguuacaagcccuaugu

SEQ ID NO: 2015400 - RNA, 19 nt, Artificial Sequence
  Description of Artificial Sequence: Synthetic oligonucleotide
uccuuuaaucacaugagug

SEQ ID NO: 2015401 - RNA, 19 nt, Artificial Sequence
  Description of Artificial Sequence: Synthetic oligonucleotide
uagauuguuuucauagggg

SEQ ID NO: 2015402 - RNA, 19 nt, Artificial Sequence
  Description of Artificial Sequence: Synthetic oligonucleotide
  modified_base (6)..(6): a, c, u, g, unknown or other
ucccanacugcuuacaugc

SEQ ID NO: 2015403 - RNA, 19 nt, Artificial Sequence
  Description of Artificial Sequence: Synthetic oligonucleotide
gauagauuguuuucauagg

SEQ ID NO: 2015404 - RNA, 19 nt, Artificial Sequence
  Description of Artificial Sequence: Synthetic oligonucleotide
gguaagaaugaauacaugc

SEQ ID NO: 2015405 - RNA, 19 nt, Artificial Sequence
  Description of Artificial Sequence: Synthetic oligonucleotide
uguuacaagcccuauguug

SEQ ID NO: 2015406 - RNA, 19 nt, Artificial Sequence
  Description of Artificial Sequence: Synthetic oligonucleotide
aauucauaaaauccuuuaa

SEQ ID NO: 2015407 - RNA, 19 nt, Artificial Sequence
  Description of Artificial Sequence: Synthetic oligonucleotide
aacguccaaauacuuuccc

SEQ ID NO: 2015408 - RNA, 19 nt, Artificial Sequence
  Description of Artificial Sequence: Synthetic oligonucleotide
gacugugaaagaccaaugg

SEQ ID NO: 2015409 - RNA, 19 nt, Artificial Sequence
  Description of Artificial Sequence: Synthetic oligonucleotide
ucaugauuguuacaagccc

SEQ ID NO: 2015410 - RNA, 19 nt, Artificial Sequence
  Description of Artificial Sequence: Synthetic oligonucleotide
guuacaagcccuauguugg

SEQ ID NO: 2015411 - RNA, 19 nt, Artificial Sequence
  Description of Artificial Sequence: Synthetic oligonucleotide
gaauauaacaggcacugga

SEQ ID NO: 2015412 - RNA, 19 nt, Artificial Sequence
  Description of Artificial Sequence: Synthetic oligonucleotide
uucucaaggguaagaaagg

SEQ ID NO: 2015413 - RNA, 19 nt, Artificial Sequence
  Description of Artificial Sequence: Synthetic oligonucleotide
ugaagaacguccaaauacu

SEQ ID NO: 2015414 - RNA, 19 nt, Artificial Sequence
  Description of Artificial Sequence: Synthetic oligonucleotide
uacaguuggaccucugagg

SEQ ID NO: 2015415 - RNA, 19 nt, Artificial Sequence
  Description of Artificial Sequence: Synthetic oligonucleotide
aguuggaccucugaggugc

SEQ ID NO: 2015416 - RNA, 19 nt, Artificial Sequence
  Description of Artificial Sequence: Synthetic oligonucleotide
uuaaaaggcuuuuccauac

SEQ ID NO: 2015417 - RNA, 19 nt, Artificial Sequence
  Description of Artificial Sequence: Synthetic oligonucleotide
auguuuacaugaguaaggc

SEQ ID NO: 2015418 - RNA, 19 nt, Artificial Sequence
  Description of Artificial Sequence: Synthetic oligonucleotide
aaugcgaugcccacauugc

SEQ ID NO: 2015419 - RNA, 19 nt, Artificial Sequence
  Description of Artificial Sequence: Synthetic oligonucleotide
ucagaagcugagaggaacg

SEQ ID NO: 2015420 - RNA, 19 nt, Artificial Sequence
  Description of Artificial Sequence: Synthetic oligonucleotide
ugaaagaccaauggcauca

SEQ ID NO: 2015421 - RNA, 19 nt, Artificial Sequence
  Description of Artificial Sequence: Synthetic oligonucleotide
auagcugacugugaaagac

SEQ ID NO: 2015422 - RNA, 19 nt, Artificial Sequence
  Description of Artificial Sequence: Synthetic oligonucleotide
agaaaugagacuccuacaa

SEQ ID NO: 2015423 - RNA, 19 nt, Artificial Sequence
  Description of Artificial Sequence: Synthetic oligonucleotide
aacauaguguuucucucca

SEQ ID NO: 2015424 - RNA, 19 nt, Artificial Sequence
  Description of Artificial Sequence: Synthetic oligonucleotide
augguuucucuacaguugg

SEQ ID NO: 2015425 - RNA, 19 nt, Artificial Sequence
  Description of Artificial Sequence: Synthetic oligonucleotide
uuuacgaagguaugaagaa

SEQ ID NO: 2015426 - RNA, 19 nt, Artificial Sequence
  Description of Artificial Sequence: Synthetic oligonucleotide
auacuacuaucccaggagg

SEQ ID NO: 2015427 - RNA, 19 nt, Artificial Sequence
  Description of Artificial Sequence: Synthetic oligonucleotide
uucaugaauauaacaggca

SEQ ID NO: 2015428 - RNA, 19 nt, Artificial Sequence
  Description of Artificial Sequence: Synthetic oligonucleotide
gaaugcgaugcccacauug

SEQ ID NO: 2015429 - RNA, 19 nt, Artificial Sequence
  Description of Artificial Sequence: Synthetic oligonucleotide
auuaacaauaugcucucga

SEQ ID NO: 2015430 - RNA, 19 nt, Artificial Sequence
  Description of Artificial Sequence: Synthetic oligonucleotide
cauaaauaagguuucucuc

SEQ ID NO: 2015431 - RNA, 19 nt, Artificial Sequence
  Description of Artificial Sequence: Synthetic oligonucleotide
aaggacucagaauauguaa

SEQ ID NO: 2015432 - RNA, 19 nt, Artificial Sequence
  Description of Artificial Sequence: Synthetic oligonucleotide
auggaucagaagcugagag

SEQ ID NO: 2015433 - RNA, 19 nt, Artificial Sequence
  Description of Artificial Sequence: Synthetic oligonucleotide
guugugggaucacugaagg

SEQ ID NO: 2015434 - RNA, 19 nt, Artificial Sequence
  Description of Artificial Sequence: Synthetic oligonucleotide
ugugggaucacugaaggcu

SEQ ID NO: 2015435 - RNA, 19 nt, Artificial Sequence
  Description of Artificial Sequence: Synthetic oligonucleotide
cauauugaaugccauguug

SEQ ID NO: 2015436 - RNA, 19 nt, Artificial Sequence
  Description of Artificial Sequence: Synthetic oligonucleotide
auuagauagauuguuuuca

SEQ ID NO: 2015437 - RNA, 19 nt, Artificial Sequence
  Description of Artificial Sequence: Synthetic oligonucleotide
ucauggaucagaagcugag

SEQ ID NO: 2015438 - RNA, 19 nt, Artificial Sequence
  Description of Artificial Sequence: Synthetic oligonucleotide
ugugaaagaccaauggcau

SEQ ID NO: 2015439 - RNA, 19 nt, Artificial Sequence
  Description of Artificial Sequence: Synthetic oligonucleotide
uuuaaaaggcuuuuccaua

SEQ ID NO: 2015440 - RNA, 19 nt, Artificial Sequence
  Description of Artificial Sequence: Synthetic oligonucleotide
uguucauuagauagauugu

SEQ ID NO: 2015441 - RNA, 19 nt, Artificial Sequence
  Description of Artificial Sequence: Synthetic oligonucleotide
ucucgaaucuguugguggg

SEQ ID NO: 2015442 - RNA, 19 nt, Artificial Sequence
  Description of Artificial Sequence: Synthetic oligonucleotide
uguuuacgaagguaugaag

SEQ ID NO: 2015443 - RNA, 19 nt, Artificial Sequence
  Description of Artificial Sequence: Synthetic oligonucleotide
ugaggugcauagcugacug

SEQ ID NO: 2015444 - RNA, 19 nt, Artificial Sequence
  Description of Artificial Sequence: Synthetic oligonucleotide
  modified_base (17)..(17): a, c, u, g, unknown or other
uccaaauacuuucccanac

SEQ ID NO: 2015445 - RNA, 19 nt, Artificial Sequence
  Description of Artificial Sequence: Synthetic oligonucleotide
uaaucuuguucagaaauga

SEQ ID NO: 2015446 - RNA, 19 nt, Artificial Sequence
  Description of Artificial Sequence: Synthetic oligonucleotide
uggaucagaagcugagagg

SEQ ID NO: 2015447 - RNA, 19 nt, Artificial Sequence
  Description of Artificial Sequence: Synthetic oligonucleotide
cucauuaacaauaugcucu

SEQ ID NO: 2015448 - RNA, 19 nt, Artificial Sequence
  Description of Artificial Sequence: Synthetic oligonucleotide
uuaacaauaugcucucgaa

SEQ ID NO: 2015449 - RNA, 19 nt, Artificial Sequence
  Description of Artificial Sequence: Synthetic oligonucleotide
auaacaggcacuggaauag

SEQ ID NO: 2015450 - RNA, 19 nt, Artificial Sequence
  Description of Artificial Sequence: Synthetic oligonucleotide
uuaaucacaugagugcuca

SEQ ID NO: 2015451 - RNA, 19 nt, Artificial Sequence
  Description of Artificial Sequence: Synthetic oligonucleotide
gagaggaacgaaugaaggc

SEQ ID NO: 2015452 - RNA, 19 nt, Artificial Sequence
  Description of Artificial Sequence: Synthetic oligonucleotide
ugagugcucagauuucucc

SEQ ID NO: 2015453 - RNA, 19 nt, Artificial Sequence
  Description of Artificial Sequence: Synthetic oligonucleotide
  modified_base (15)..(15): a, c, u, g, unknown or other
caaauacuuucccanacug

SEQ ID NO: 2015454 - RNA, 19 nt, Artificial Sequence
  Description of Artificial Sequence: Synthetic oligonucleotide
cauacauaaggucugucuc

SEQ ID NO: 2015455 - RNA, 19 nt, Artificial Sequence
  Description of Artificial Sequence: Synthetic oligonucleotide
uuuucacacacacuguuuu

SEQ ID NO: 2015456 - RNA, 19 nt, Artificial Sequence
  Description of Artificial Sequence: Synthetic oligonucleotide
ucauuagauagauuguuuu

SEQ ID NO: 2015457 - RNA, 19 nt, Artificial Sequence
  Description of Artificial Sequence: Synthetic oligonucleotide
uccuacaauguucauuaga

SEQ ID NO: 2015458 - RNA, 19 nt, Artificial Sequence
  Description of Artificial Sequence: Synthetic oligonucleotide
ugagacuccuacaauguuc

SEQ ID NO: 2015459 - RNA, 19 nt, Artificial Sequence
  Description of Artificial Sequence: Synthetic oligonucleotide
ucagaauauguaaaauuuu

SEQ ID NO: 2015460 - RNA, 19 nt, Artificial Sequence
  Description of Artificial Sequence: Synthetic oligonucleotide
uauaacaggcacuggaaua

SEQ ID NO: 2015461 - RNA, 19 nt, Artificial Sequence
  Description of Artificial Sequence: Synthetic oligonucleotide
uaaaauccuuuaaucacau

SEQ ID NO: 2015462 - RNA, 19 nt, Artificial Sequence
  Description of Artificial Sequence: Synthetic oligonucleotide
aggugguaagaaugaauac

SEQ ID NO: 2015463 - RNA, 19 nt, Artificial Sequence
  Description of Artificial Sequence: Synthetic oligonucleotide
caauguuuacaugaguaag

SEQ ID NO: 2015464 - RNA, 19 nt, Artificial Sequence
  Description of Artificial Sequence: Synthetic oligonucleotide
aaugagacuccuacaaugu

SEQ ID NO: 2015465 - RNA, 19 nt, Artificial Sequence
  Description of Artificial Sequence: Synthetic oligonucleotide
cauuagauagauuguuuuc

SEQ ID NO: 2015466 - RNA, 19 nt, Artificial Sequence
  Description of Artificial Sequence: Synthetic oligonucleotide
gaggcaugcacucauuaac

SEQ ID NO: 2015467 - RNA, 19 nt, Artificial Sequence
  Description of Artificial Sequence: Synthetic oligonucleotide
cugugaaagaccaauggca

SEQ ID NO: 2015468 - RNA, 19 nt, Artificial Sequence
  Description of Artificial Sequence: Synthetic oligonucleotide
aauauaacaggcacuggaa

SEQ ID NO: 2015469 - RNA, 19 nt, Artificial Sequence
  Description of Artificial Sequence: Synthetic oligonucleotide
ucauuaacaauaugcucuc

SEQ ID NO: 2015470 - RNA, 19 nt, Artificial Sequence
  Description of Artificial Sequence: Synthetic oligonucleotide
gauuguuacaagcccuaug

SEQ ID NO: 2015471 - RNA, 19 nt, Artificial Sequence
  Description of Artificial Sequence: Synthetic oligonucleotide
agaggaacgaaugaaggcu

SEQ ID NO: 2015472 - RNA, 19 nt, Artificial Sequence
  Description of Artificial Sequence: Synthetic oligonucleotide
ugaguaaggcuucucucca

SEQ ID NO: 2015473 - RNA, 19 nt, Artificial Sequence
  Description of Artificial Sequence: Synthetic oligonucleotide
uacuacuaucccaggaggc

SEQ ID NO: 2015474 - RNA, 19 nt, Artificial Sequence
  Description of Artificial Sequence: Synthetic oligonucleotide
ucauguuuacgaagguaug

SEQ ID NO: 2015475 - RNA, 19 nt, Artificial Sequence
  Description of Artificial Sequence: Synthetic oligonucleotide
uaacaauaugcucucgaau

SEQ ID NO: 2015476 - RNA, 19 nt, Artificial Sequence
  Description of Artificial Sequence: Synthetic oligonucleotide
auauacuacuaucccagga

SEQ ID NO: 2015477 - RNA, 19 nt, Artificial Sequence
  Description of Artificial Sequence: Synthetic oligonucleotide
  modified_base (2)..(2): a, c, u, g, unknown or other
anacugcuuacaugcauaa

SEQ ID NO: 2015478 - RNA, 19 nt, Artificial Sequence
  Description of Artificial Sequence: Synthetic oligonucleotide
ccuuuaaucacaugagugc

SEQ ID NO: 2015479 - RNA, 19 nt, Artificial Sequence
  Description of Artificial Sequence: Synthetic oligonucleotide
acaauguuuacaugaguaa

SEQ ID NO: 2015480 - RNA, 19 nt, Artificial Sequence
  Description of Artificial Sequence: Synthetic oligonucleotide
cucucgaaucuguuggugg

SEQ ID NO: 2015481 - RNA, 19 nt, Artificial Sequence
  Description of Artificial Sequence: Synthetic oligonucleotide
uguugcagaaggugguaag

SEQ ID NO: 2015482 - RNA, 19 nt, Artificial Sequence
  Description of Artificial Sequence: Synthetic oligonucleotide
guuucucuacaguuggacc

SEQ ID NO: 2015483 - RNA, 19 nt, Artificial Sequence
  Description of Artificial Sequence: Synthetic oligonucleotide
uuagauagauuguuuucau

SEQ ID NO: 2015484 - RNA, 19 nt, Artificial Sequence
  Description of Artificial Sequence: Synthetic oligonucleotide
ucuacaguuggaccucuga

SEQ ID NO: 2015485 - RNA, 19 nt, Artificial Sequence
  Description of Artificial Sequence: Synthetic oligonucleotide
gcacucauuaacaauaugc

SEQ ID NO: 2015486 - RNA, 19 nt, Artificial Sequence
  Description of Artificial Sequence: Synthetic oligonucleotide
uguggagguauguggaaca

SEQ ID NO: 2015487 - RNA, 19 nt, Artificial Sequence
  Description of Artificial Sequence: Synthetic oligonucleotide
uuuaaucacaugagugcuc

SEQ ID NO: 2015488 - RNA, 19 nt, Artificial Sequence
  Description of Artificial Sequence: Synthetic oligonucleotide
aaagugaaugcgaugccca

SEQ ID NO: 2015489 - RNA, 19 nt, Artificial Sequence
  Description of Artificial Sequence: Synthetic oligonucleotide
ucauguugcagaagguggu

SEQ ID NO: 2015490 - RNA, 19 nt, Artificial Sequence
  Description of Artificial Sequence: Synthetic oligonucleotide
guuuacgaagguaugaaga

SEQ ID NO: 2015491 - RNA, 19 nt, Artificial Sequence
  Description of Artificial Sequence: Synthetic oligonucleotide
aaucacaugagugcucaga

SEQ ID NO: 2015492 - RNA, 19 nt, Artificial Sequence
  Description of Artificial Sequence: Synthetic oligonucleotide
ugacugugaaagaccaaug

SEQ ID NO: 2015493 - RNA, 19 nt, Artificial Sequence
  Description of Artificial Sequence: Synthetic oligonucleotide
uucaugauuguuccggguu

SEQ ID NO: 2015494 - RNA, 19 nt, Artificial Sequence
  Description of Artificial Sequence: Synthetic oligonucleotide
uaugaagaacguccaaaua

SEQ ID NO: 2015495 - RNA, 19 nt, Artificial Sequence
  Description of Artificial Sequence: Synthetic oligonucleotide
  modified_base (7)..(7): a, c, u, g, unknown or other
uucccanacugcuuacaug

SEQ ID NO: 2015496 - RNA, 19 nt, Artificial Sequence
  Description of Artificial Sequence: Synthetic oligonucleotide
aagaaugaauacaugcuuu

SEQ ID NO: 2015497 - RNA, 19 nt, Artificial Sequence
  Description of Artificial Sequence: Synthetic oligonucleotide
caugcacucauuaacaaua

SEQ ID NO: 2015498 - RNA, 19 nt, Artificial Sequence
  Description of Artificial Sequence: Synthetic oligonucleotide
uggauuugaagggacuuug

SEQ ID NO: 2015499 - RNA, 19 nt, Artificial Sequence
  Description of Artificial Sequence: Synthetic oligonucleotide
ugauuguuccggguugugg

SEQ ID NO: 2015500 - RNA, 19 nt, Artificial Sequence
  Description of Artificial Sequence: Synthetic oligonucleotide
cauauacuacuaucccagg

SEQ ID NO: 2015501 - RNA, 19 nt, Artificial Sequence
  Description of Artificial Sequence: Synthetic oligonucleotide
aagaccaauggcaucauuu

SEQ ID NO: 2015502 - RNA, 19 nt, Artificial Sequence
  Description of Artificial Sequence: Synthetic oligonucleotide
auauaacaggcacuggaau

SEQ ID NO: 2015503 - RNA, 19 nt, Artificial Sequence
  Description of Artificial Sequence: Synthetic oligonucleotide
ugguaagaaugaauacaug

SEQ ID NO: 2015504 - RNA, 19 nt, Artificial Sequence
  Description of Artificial Sequence: Synthetic oligonucleotide
cuggaaggauucucaaggg

SEQ ID NO: 2015505 - RNA, 19 nt, Artificial Sequence
  Description of Artificial Sequence: Synthetic oligonucleotide
uguuuacaugaguaaggcu

SEQ ID NO: 2015506 - RNA, 19 nt, Artificial Sequence
  Description of Artificial Sequence: Synthetic oligonucleotide
ugaauauaacaggcacugg

SEQ ID NO: 2015507 - RNA, 19 nt, Artificial Sequence
  Description of Artificial Sequence: Synthetic oligonucleotide
cuauguuggacuggcaaag

SEQ ID NO: 2015508 - RNA, 19 nt, Artificial Sequence
  Description of Artificial Sequence: Synthetic oligonucleotide
auaaucuuguucagaaaug

SEQ ID NO: 2015509 - RNA, 19 nt, Artificial Sequence
  Description of Artificial Sequence: Synthetic oligonucleotide
cucaaggguaagaaaggac

SEQ ID NO: 2015510 - RNA, 19 nt, Artificial Sequence
  Description of Artificial Sequence: Synthetic oligonucleotide
aauaugcucucgaaucugu

SEQ ID NO: 2015511 - RNA, 19 nt, Artificial Sequence
  Description of Artificial Sequence: Synthetic oligonucleotide
ugguuuucuuuucauggau

SEQ ID NO: 2015512 - RNA, 19 nt, Artificial Sequence
  Description of Artificial Sequence: Synthetic oligonucleotide
gaacgaaugaaggcuuucc

SEQ ID NO: 2015513 - RNA, 19 nt, Artificial Sequence
  Description of Artificial Sequence: Synthetic oligonucleotide
uguuggacuggcaaagguu

SEQ ID NO: 2015514 - RNA, 19 nt, Artificial Sequence
  Description of Artificial Sequence: Synthetic oligonucleotide
uacauaaauaagguuucuc

SEQ ID NO: 2015515 - RNA, 19 nt, Artificial Sequence
  Description of Artificial Sequence: Synthetic oligonucleotide
uauguuggacuggcaaagg

SEQ ID NO: 2015516 - RNA, 19 nt, Artificial Sequence
  Description of Artificial Sequence: Synthetic oligonucleotide
caugaguaaggcuucucuc

SEQ ID NO: 2015517 - RNA, 19 nt, Artificial Sequence
  Description of Artificial Sequence: Synthetic oligonucleotide
uucauguuuguggagguau

SEQ ID NO: 2015518 - RNA, 19 nt, Artificial Sequence
  Description of Artificial Sequence: Synthetic oligonucleotide
caaggguaagaaaggacuc

SEQ ID NO: 2015519 - RNA, 19 nt, Artificial Sequence
  Description of Artificial Sequence: Synthetic oligonucleotide
ugcacucauuaacaauaug

SEQ ID NO: 2015520 - RNA, 19 nt, Artificial Sequence
  Description of Artificial Sequence: Synthetic oligonucleotide
uacauaaggucugucucca

SEQ ID NO: 2015521 - RNA, 19 nt, Artificial Sequence
  Description of Artificial Sequence: Synthetic oligonucleotide
ugcgaugcccacauugcac

SEQ ID NO: 2015522 - RNA, 19 nt, Artificial Sequence
  Description of Artificial Sequence: Synthetic oligonucleotide
cauaaucuuguucagaaau

SEQ ID NO: 2015523 - RNA, 19 nt, Artificial Sequence
  Description of Artificial Sequence: Synthetic oligonucleotide
aagguaugaagaacgucca

SEQ ID NO: 2015524 - RNA, 19 nt, Artificial Sequence
  Description of Artificial Sequence: Synthetic oligonucleotide
uuacgaagguaugaagaac

SEQ ID NO: 2015525 - RNA, 19 nt, Artificial Sequence
  Description of Artificial Sequence: Synthetic oligonucleotide
ugcacacauacauaugguu

SEQ ID NO: 2015526 - RNA, 19 nt, Artificial Sequence
  Description of Artificial Sequence: Synthetic oligonucleotide
agcccuauguuggacuggc

SEQ ID NO: 2015527 - RNA, 19 nt, Artificial Sequence
  Description of Artificial Sequence: Synthetic oligonucleotide
ucauaaucuuguucagaaa

SEQ ID NO: 2015528 - RNA, 19 nt, Artificial Sequence
  Description of Artificial Sequence: Synthetic oligonucleotide
gagacuccuacaauguuca

SEQ ID NO: 2015529 - RNA, 19 nt, Artificial Sequence
  Description of Artificial Sequence: Synthetic oligonucleotide
aagcugagaggaacgaaug

SEQ ID NO: 2015530 - RNA, 19 nt, Artificial Sequence
  Description of Artificial Sequence: Synthetic oligonucleotide
agaaaggacucagaauaug

SEQ ID NO: 2015531 - RNA, 19 nt, Artificial Sequence
  Description of Artificial Sequence: Synthetic oligonucleotide
aggcuuuuccauacauucc

SEQ ID NO: 2015532 - RNA, 19 nt, Artificial Sequence
  Description of Artificial Sequence: Synthetic oligonucleotide
acaauguucauuagauaga

SEQ ID NO: 2015533 - RNA, 19 nt, Artificial Sequence
  Description of Artificial Sequence: Synthetic oligonucleotide
gauucucaaggguaagaaa

SEQ ID NO: 2015534 - RNA, 19 nt, Artificial Sequence
  Description of Artificial Sequence: Synthetic oligonucleotide
gcauagcugacugugaaag

SEQ ID NO: 2015535 - RNA, 19 nt, Artificial Sequence
  Description of Artificial Sequence: Synthetic oligonucleotide
acuaucccaggaggcaugc

SEQ ID NO: 2015536 - RNA, 19 nt, Artificial Sequence
  Description of Artificial Sequence: Synthetic oligonucleotide
ucuccauauugaaugccau

SEQ ID NO: 2015537 - RNA, 19 nt, Artificial Sequence
  Description of Artificial Sequence: Synthetic oligonucleotide
guaagaaugaauacaugcu

SEQ ID NO: 2015538 - RNA, 19 nt, Artificial Sequence
  Description of Artificial Sequence: Synthetic oligonucleotide
ggugguaagaaugaauaca

SEQ ID NO: 2015539 - RNA, 19 nt, Artificial Sequence
  Description of Artificial Sequence: Synthetic oligonucleotide
acguccaaauacuuuccca

SEQ ID NO: 2015540 - RNA, 19 nt, Artificial Sequence
  Description of Artificial Sequence: Synthetic oligonucleotide
ggaucagaagcugagagga

SEQ ID NO: 2015541 - RNA, 19 nt, Artificial Sequence
  Description of Artificial Sequence: Synthetic oligonucleotide
ugcagaaggugguaagaau

SEQ ID NO: 2015542 - RNA, 19 nt, Artificial Sequence
  Description of Artificial Sequence: Synthetic oligonucleotide
uagauagauuguuuucaua

SEQ ID NO: 2015543 - RNA, 19 nt, Artificial Sequence
  Description of Artificial Sequence: Synthetic oligonucleotide
aaaggacucagaauaugua

SEQ ID NO: 2015544 - RNA, 19 nt, Artificial Sequence
  Description of Artificial Sequence: Synthetic oligonucleotide
gaacguccaaauacuuucc

SEQ ID NO: 2015545 - RNA, 19 nt, Artificial Sequence
  Description of Artificial Sequence: Synthetic oligonucleotide
uacuaucccaggaggcaug

SEQ ID NO: 2015546 - RNA, 19 nt, Artificial Sequence
  Description of Artificial Sequence: Synthetic oligonucleotide
aggugcauagcugacugug

SEQ ID NO: 2015547 - RNA, 19 nt, Artificial Sequence
  Description of Artificial Sequence: Synthetic oligonucleotide
aagaaaggacucagaauau

SEQ ID NO: 2015548 - RNA, 19 nt, Artificial Sequence
  Description of Artificial Sequence: Synthetic oligonucleotide
gaaugccauguugaaauuc

SEQ ID NO: 2015549 - RNA, 19 nt, Artificial Sequence
  Description of Artificial Sequence: Synthetic oligonucleotide
agugugguuuucuuuucau

SEQ ID NO: 2015550 - RNA, 19 nt, Artificial Sequence
  Description of Artificial Sequence: Synthetic oligonucleotide
uuccugguacucauauggu

SEQ ID NO: 2015551 - RNA, 19 nt, Artificial Sequence
  Description of Artificial Sequence: Synthetic oligonucleotide
agcugagaggaacgaauga

SEQ ID NO: 2015552 - RNA, 19 nt, Artificial Sequence
  Description of Artificial Sequence: Synthetic oligonucleotide
caagcccuauguuggacug

SEQ ID NO: 2015553 - RNA, 19 nt, Artificial Sequence
  Description of Artificial Sequence: Synthetic oligonucleotide
aagaacguccaaauacuuu

SEQ ID NO: 2015554 - RNA, 19 nt, Artificial Sequence
  Description of Artificial Sequence: Synthetic oligonucleotide
uugugggaucacugaaggc

SEQ ID NO: 2015555 - RNA, 19 nt, Artificial Sequence
  Description of Artificial Sequence: Synthetic oligonucleotide
cauguuuacgaagguauga

SEQ ID NO: 2015556 - RNA, 19 nt, Artificial Sequence
  Description of Artificial Sequence: Synthetic oligonucleotide
cauuaacaauaugcucucg

SEQ ID NO: 2015557 - RNA, 19 nt, Artificial Sequence
  Description of Artificial Sequence: Synthetic oligonucleotide
guuuugccacaguugcuug

SEQ ID NO: 2015558 - RNA, 19 nt, Artificial Sequence
  Description of Artificial Sequence: Synthetic oligonucleotide
auuguuccggguuguggga

SEQ ID NO: 2015559 - RNA, 19 nt, Artificial Sequence
  Description of Artificial Sequence: Synthetic oligonucleotide
auguuuacgaagguaugaa

SEQ ID NO: 2015560 - RNA, 19 nt, Artificial Sequence
  Description of Artificial Sequence: Synthetic oligonucleotide
auugaaugccauguugaaa

SEQ ID NO: 2015561 - RNA, 19 nt, Artificial Sequence
  Description of Artificial Sequence: Synthetic oligonucleotide
uuguggagguauguggaac

SEQ ID NO: 2015562 - RNA, 19 nt, Artificial Sequence
  Description of Artificial Sequence: Synthetic oligonucleotide
caugauuguuacaagcccu

SEQ ID NO: 2015563 - RNA, 19 nt, Artificial Sequence
  Description of Artificial Sequence: Synthetic oligonucleotide
  modified_base (3)..(3): a, c, u, g, unknown or other
canacugcuuacaugcaua

SEQ ID NO: 2015564 - RNA, 19 nt, Artificial Sequence
  Description of Artificial Sequence: Synthetic oligonucleotide
caugaauauaacaggcacu

SEQ ID NO: 2015565 - RNA, 19 nt, Artificial Sequence
  Description of Artificial Sequence: Synthetic oligonucleotide
gaaucuguuggugggcuuc

SEQ ID NO: 2015566 - RNA, 19 nt, Artificial Sequence
  Description of Artificial Sequence: Synthetic oligonucleotide
ugcauagcugacugugaaa

SEQ ID NO: 2015567 - RNA, 19 nt, Artificial Sequence
  Description of Artificial Sequence: Synthetic oligonucleotide
caauaugcucucgaaucug

SEQ ID NO: 2015568 - RNA, 19 nt, Artificial Sequence
  Description of Artificial Sequence: Synthetic oligonucleotide
uaaucacaugagugcucag

SEQ ID NO: 2015569 - RNA, 19 nt, Artificial Sequence
  Description of Artificial Sequence: Synthetic oligonucleotide
guaugaagaacguccaaau

SEQ ID NO: 2015570 - RNA, 19 nt, Artificial Sequence
  Description of Artificial Sequence: Synthetic oligonucleotide
uggugugacuucucucaug

SEQ ID NO: 2015571 - RNA, 19 nt, Artificial Sequence
  Description of Artificial Sequence: Synthetic oligonucleotide
guaagaaaggacucagaau

SEQ ID NO: 2015572 - RNA, 19 nt, Artificial Sequence
  Description of Artificial Sequence: Synthetic oligonucleotide
ugacuucucucauguugca

SEQ ID NO: 2015573 - RNA, 19 nt, Artificial Sequence
  Description of Artificial Sequence: Synthetic oligonucleotide
ucgaaucuguuggugggcu

SEQ ID NO: 2015574 - RNA, 19 nt, Artificial Sequence
  Description of Artificial Sequence: Synthetic oligonucleotide
cauuccugguacucauaug

SEQ ID NO: 2015575 - RNA, 19 nt, Artificial Sequence
  Description of Artificial Sequence: Synthetic oligonucleotide
aagcccuauguuggacugg

SEQ ID NO: 2015576 - RNA, 19 nt, Artificial Sequence
  Description of Artificial Sequence: Synthetic oligonucleotide
cauacauuccugguacuca

SEQ ID NO: 2015577 - RNA, 19 nt, Artificial Sequence
  Description of Artificial Sequence: Synthetic oligonucleotide
cagaaaugagacuccuaca

SEQ ID NO: 2015578 - RNA, 19 nt, Artificial Sequence
  Description of Artificial Sequence: Synthetic oligonucleotide
gugaaagaccaauggcauc

SEQ ID NO: 2015579 - RNA, 19 nt, Artificial Sequence
  Description of Artificial Sequence: Synthetic oligonucleotide
gaaaugagacuccuacaau

SEQ ID NO: 2015580 - RNA, 19 nt, Artificial Sequence
  Description of Artificial Sequence: Synthetic oligonucleotide
ggaccucugaggugcauag

SEQ ID NO: 2015581 - RNA, 19 nt, Artificial Sequence
  Description of Artificial Sequence: Synthetic oligonucleotide
cacaugagugcucagauuu

SEQ ID NO: 2015582 - RNA, 19 nt, Artificial Sequence
  Description of Artificial Sequence: Synthetic oligonucleotide
cuuuaaucacaugagugcu

SEQ ID NO: 2015583 - RNA, 19 nt, Artificial Sequence
  Description of Artificial Sequence: Synthetic oligonucleotide
acaugagugcucagauuuc

SEQ ID NO: 2015584 - RNA, 19 nt, Artificial Sequence
  Description of Artificial Sequence: Synthetic oligonucleotide
ugguuucucuacaguugga

SEQ ID NO: 2015585 - RNA, 19 nt, Artificial Sequence
  Description of Artificial Sequence: Synthetic oligonucleotide
uccauacauuccugguacu

SEQ ID NO: 2015586 - RNA, 19 nt, Artificial Sequence
  Description of Artificial Sequence: Synthetic oligonucleotide
auagggguucuuucuggaa

SEQ ID NO: 2015587 - RNA, 19 nt, Artificial Sequence
  Description of Artificial Sequence: Synthetic oligonucleotide
aggcaugcacucauuaaca

SEQ ID NO: 2015588 - RNA, 19 nt, Artificial Sequence
  Description of Artificial Sequence: Synthetic oligonucleotide
ugaaugccauguugaaauu

SEQ ID NO: 2015589 - RNA, 19 nt, Artificial Sequence
  Description of Artificial Sequence: Synthetic oligonucleotide
uggagguauguggaacaug

SEQ ID NO: 2015590 - RNA, 19 nt, Artificial Sequence
  Description of Artificial Sequence: Synthetic oligonucleotide
gguugugggaucacugaag

SEQ ID NO: 2015591 - RNA, 19 nt, Artificial Sequence
  Description of Artificial Sequence: Synthetic oligonucleotide
cugcuuacaugcauaaagu

SEQ ID NO: 2015592 - RNA, 19 nt, Artificial Sequence
  Description of Artificial Sequence: Synthetic oligonucleotide
gguaugaagaacguccaaa

SEQ ID NO: 2015593 - RNA, 19 nt, Artificial Sequence
  Description of Artificial Sequence: Synthetic oligonucleotide
aauguucauuagauagauu

SEQ ID NO: 2015594 - RNA, 19 nt, Artificial Sequence
  Description of Artificial Sequence: Synthetic oligonucleotide
augagacuccuacaauguu

SEQ ID NO: 2015595 - RNA, 19 nt, Artificial Sequence
  Description of Artificial Sequence: Synthetic oligonucleotide
augagugcucagauuucuc

SEQ ID NO: 2015596 - RNA, 19 nt, Artificial Sequence
  Description of Artificial Sequence: Synthetic oligonucleotide
  modified_base (18)..(18): a, c, u, g, unknown or other
guccaaauacuuucccana

SEQ ID NO: 2015597 - RNA, 19 nt, Artificial Sequence
  Description of Artificial Sequence: Synthetic oligonucleotide
gagugcucagauuucuccu

SEQ ID NO: 2015598 - RNA, 19 nt, Artificial Sequence
  Description of Artificial Sequence: Synthetic oligonucleotide
ucacaugagugcucagauu

SEQ ID NO: 2015599 - RNA, 19 nt, Artificial Sequence
  Description of Artificial Sequence: Synthetic oligonucleotide
guacucauaugguuucucu

SEQ ID NO: 2015600 - RNA, 19 nt, Artificial Sequence
  Description of Artificial Sequence: Synthetic oligonucleotide
cucgaaucuguuggugggc

SEQ ID NO: 2015601 - RNA, 19 nt, Artificial Sequence
  Description of Artificial Sequence: Synthetic oligonucleotide
ggacucagaauauguaaaa

SEQ ID NO: 2015602 - RNA, 19 nt, Artificial Sequence
  Description of Artificial Sequence: Synthetic oligonucleotide
cauagcugacugugaaaga

SEQ ID NO: 2015603 - RNA, 19 nt, Artificial Sequence
  Description of Artificial Sequence: Synthetic oligonucleotide
ugauuguuacaagcccuau

SEQ ID NO: 2015604 - RNA, 19 nt, Artificial Sequence
  Description of Artificial Sequence: Synthetic oligonucleotide
ugcuugcauguauaagguu

SEQ ID NO: 2015605 - RNA, 19 nt, Artificial Sequence
  Description of Artificial Sequence: Synthetic oligonucleotide
cuacaauguucauuagaua

SEQ ID NO: 2015606 - RNA, 19 nt, Artificial Sequence
  Description of Artificial Sequence: Synthetic oligonucleotide
ccuacaauguucauuagau

SEQ ID NO: 2015607 - RNA, 19 nt, Artificial Sequence
  Description of Artificial Sequence: Synthetic oligonucleotide
gugcauagcugacugugaa

SEQ ID NO: 2015608 - RNA, 19 nt, Artificial Sequence
  Description of Artificial Sequence: Synthetic oligonucleotide
agguaugaagaacguccaa

SEQ ID NO: 2015609 - RNA, 19 nt, Artificial Sequence
  Description of Artificial Sequence: Synthetic oligonucleotide
agaaggugguaagaaugaa

SEQ ID NO: 2015610 - RNA, 19 nt, Artificial Sequence
  Description of Artificial Sequence: Synthetic oligonucleotide
cuuguucagaaaugagacu

SEQ ID NO: 2015611 - RNA, 19 nt, Artificial Sequence
  Description of Artificial Sequence: Synthetic oligonucleotide
augauuguuacaagcccua

SEQ ID NO: 2015612 - RNA, 19 nt, Artificial Sequence
  Description of Artificial Sequence: Synthetic oligonucleotide
acgaagguaugaagaacgu

SEQ ID NO: 2015613 - RNA, 19 nt, Artificial Sequence
  Description of Artificial Sequence: Synthetic oligonucleotide
agaagcugagaggaacgaa

SEQ ID NO: 2015614 - RNA, 19 nt, Artificial Sequence
  Description of Artificial Sequence: Synthetic oligonucleotide
uguuccggguugugggauc

SEQ ID NO: 2015615 - RNA, 19 nt, Artificial Sequence
  Description of Artificial Sequence: Synthetic oligonucleotide
gacucagaauauguaaaau

SEQ ID NO: 2015616 - RNA, 19 nt, Artificial Sequence
  Description of Artificial Sequence: Synthetic oligonucleotide
auggauuugaagggacuuu

SEQ ID NO: 2015617 - RNA, 19 nt, Artificial Sequence
  Description of Artificial Sequence: Synthetic oligonucleotide
ugcucagauuucuccuaau

SEQ ID NO: 2015618 - RNA, 19 nt, Artificial Sequence
  Description of Artificial Sequence: Synthetic oligonucleotide
gugaaugcgaugcccacau

SEQ ID NO: 2015619 - RNA, 19 nt, Artificial Sequence
  Description of Artificial Sequence: Synthetic oligonucleotide
ucucuacaguuggaccucu

SEQ ID NO: 2015620 - RNA, 19 nt, Artificial Sequence
  Description of Artificial Sequence: Synthetic oligonucleotide
caguuggaccucugaggug

SEQ ID NO: 2015621 - RNA, 19 nt, Artificial Sequence
  Description of Artificial Sequence: Synthetic oligonucleotide
cagugugguuuucuuuuca

SEQ ID NO: 2015622 - RNA, 19 nt, Artificial Sequence
  Description of Artificial Sequence: Synthetic oligonucleotide
ugggaucacugaaggcuuu

SEQ ID NO: 2015623 - RNA, 19 nt, Artificial Sequence
  Description of Artificial Sequence: Synthetic oligonucleotide
augauuguuccggguugug

SEQ ID NO: 2015624 - RNA, 19 nt, Artificial Sequence
  Description of Artificial Sequence: Synthetic oligonucleotide
caucauuuucacacacacu

SEQ ID NO: 2015625 - RNA, 19 nt, Artificial Sequence
  Description of Artificial Sequence: Synthetic oligonucleotide
gcugagaggaacgaaugaa

SEQ ID NO: 2015626 - RNA, 19 nt, Artificial Sequence
  Description of Artificial Sequence: Synthetic oligonucleotide
cucuacaguuggaccucug

SEQ ID NO: 2015627 - RNA, 19 nt, Artificial Sequence
  Description of Artificial Sequence: Synthetic oligonucleotide
uccggguugugggaucacu

SEQ ID NO: 2015628 - RNA, 19 nt, Artificial Sequence
  Description of Artificial Sequence: Synthetic oligonucleotide
uuguuccggguugugggau

SEQ ID NO: 2015629 - RNA, 19 nt, Artificial Sequence
  Description of Artificial Sequence: Synthetic oligonucleotide
gugcucagauuucuccuaa

SEQ ID NO: 2015630 - RNA, 19 nt, Artificial Sequence
  Description of Artificial Sequence: Synthetic oligonucleotide
ggaucacugaaggcuuucc

SEQ ID NO: 2015631 - RNA, 19 nt, Artificial Sequence
  Description of Artificial Sequence: Synthetic oligonucleotide
ggaggcaugcacucauuaa

SEQ ID NO: 2015632 - RNA, 19 nt, Artificial Sequence
  Description of Artificial Sequence: Synthetic oligonucleotide
  modified_base (12)..(12): a, c, u, g, unknown or other
auacuuucccanacugcuu

SEQ ID NO: 2015633 - RNA, 19 nt, Artificial Sequence
  Description of Artificial Sequence: Synthetic oligonucleotide
guucagaaaugagacuccu

SEQ ID NO: 2015634 - RNA, 19 nt, Artificial Sequence
  Description of Artificial Sequence: Synthetic oligonucleotide
gaagaacguccaaauacuu

SEQ ID NO: 2015635 - RNA, 19 nt, Artificial Sequence
  Description of Artificial Sequence: Synthetic oligonucleotide
gaccucugaggugcauagc

SEQ ID NO: 2015636 - RNA, 19 nt, Artificial Sequence
  Description of Artificial Sequence: Synthetic oligonucleotide
  modified_base (16)..(16): a, c, u, g, unknown or other
ccaaauacuuucccanacu

SEQ ID NO: 2015637 - RNA, 19 nt, Artificial Sequence
  Description of Artificial Sequence: Synthetic oligonucleotide
gacuccuacaauguucauu

SEQ ID NO: 2015638 - RNA, 19 nt, Artificial Sequence
  Description of Artificial Sequence: Synthetic oligonucleotide
gccacaguugcuugcaugu

SEQ ID NO: 2015639 - RNA, 19 nt, Artificial Sequence
  Description of Artificial Sequence: Synthetic oligonucleotide
ccuauguuggacuggcaaa

SEQ ID NO: 2015640 - RNA, 19 nt, Artificial Sequence
  Description of Artificial Sequence: Synthetic oligonucleotide
caugagugcucagauuucu

SEQ ID NO: 2015641 - RNA, 19 nt, Artificial Sequence
  Description of Artificial Sequence: Synthetic oligonucleotide
ugaaugcgaugcccacauu

SEQ ID NO: 2015642 - RNA, 19 nt, Artificial Sequence
  Description of Artificial Sequence: Synthetic oligonucleotide
cacacacacuguuuucaua

SEQ ID NO: 2015643 - RNA, 19 nt, Artificial Sequence
  Description of Artificial Sequence: Synthetic oligonucleotide
guuuacaaacauaguguuu

SEQ ID NO: 2015644 - RNA, 19 nt, Artificial Sequence
  Description of Artificial Sequence: Synthetic oligonucleotide
auaugcucucgaaucuguu

SEQ ID NO: 2015645 - RNA, 19 nt, Artificial Sequence
  Description of Artificial Sequence: Synthetic oligonucleotide
ggauuugaagggacuuuga

SEQ ID NO: 2015646 - RNA, 19 nt, Artificial Sequence
  Description of Artificial Sequence: Synthetic oligonucleotide
cacaguugcuugcauguau

SEQ ID NO: 2015647 - RNA, 19 nt, Artificial Sequence
  Description of Artificial Sequence: Synthetic oligonucleotide
agacuccuacaauguucau

SEQ ID NO: 2015648 - RNA, 19 nt, Artificial Sequence
  Description of Artificial Sequence: Synthetic oligonucleotide
ccauacauuccugguacuc

SEQ ID NO: 2015649 - RNA, 19 nt, Artificial Sequence
  Description of Artificial Sequence: Synthetic oligonucleotide
aggcacuggaauaggugaa

SEQ ID NO: 2015650 - RNA, 19 nt, Artificial Sequence
  Description of Artificial Sequence: Synthetic oligonucleotide
ccggguugugggaucacug

SEQ ID NO: 2015651 - RNA, 19 nt, Artificial Sequence
  Description of Artificial Sequence: Synthetic oligonucleotide
guuccggguugugggauca

SEQ ID NO: 2015652 - RNA, 19 nt, Artificial Sequence
  Description of Artificial Sequence: Synthetic oligonucleotide
aggucugucuccaguucau

SEQ ID NO: 2015653 - RNA, 19 nt, Artificial Sequence
  Description of Artificial Sequence: Synthetic oligonucleotide
cucucauguugcagaaggu

SEQ ID NO: 2015654 - RNA, 19 nt, Artificial Sequence
  Description of Artificial Sequence: Synthetic oligonucleotide
ggugcauagcugacuguga

SEQ ID NO: 2015655 - RNA, 19 nt, Artificial Sequence
  Description of Artificial Sequence: Synthetic oligonucleotide
gguuuugccacaguugcuu

SEQ ID NO: 2015656 - RNA, 19 nt, Artificial Sequence
  Description of Artificial Sequence: Synthetic oligonucleotide
cauguugcagaagguggua

SEQ ID NO: 2015657 - RNA, 19 nt, Artificial Sequence
  Description of Artificial Sequence: Synthetic oligonucleotide
cccuauguuggacuggcaa

SEQ ID NO: 2015658 - RNA, 19 nt, Artificial Sequence
  Description of Artificial Sequence: Synthetic oligonucleotide
gaggugcauagcugacugu

SEQ ID NO: 2015659 - RNA, 19 nt, Artificial Sequence
  Description of Artificial Sequence: Synthetic oligonucleotide
ccugguacucauaugguuu

SEQ ID NO: 2015660 - RNA, 19 nt, Artificial Sequence
  Description of Artificial Sequence: Synthetic oligonucleotide
ggguaagaaaggacucaga

SEQ ID NO: 2015661 - RNA, 19 nt, Artificial Sequence
  Description of Artificial Sequence: Synthetic oligonucleotide
gaaagaccaauggcaucau

SEQ ID NO: 2015662 - RNA, 19 nt, Artificial Sequence
  Description of Artificial Sequence: Synthetic oligonucleotide
cuacuaucccaggaggcau

SEQ ID NO: 2015663 - RNA, 19 nt, Artificial Sequence
  Description of Artificial Sequence: Synthetic oligonucleotide
cgaagguaugaagaacguc

SEQ ID NO: 2015664 - RNA, 19 nt, Artificial Sequence
  Description of Artificial Sequence: Synthetic oligonucleotide
gggaucacugaaggcuuuc

SEQ ID NO: 2015665 - RNA, 19 nt, Artificial Sequence
  Description of Artificial Sequence: Synthetic oligonucleotide
ugcccacauugcacacaua

SEQ ID NO: 2015666 - RNA, 19 nt, Artificial Sequence
  Description of Artificial Sequence: Synthetic oligonucleotide
uuggaccucugaggugcau

SEQ ID NO: 2015667 - RNA, 19 nt, Artificial Sequence
  Description of Artificial Sequence: Synthetic oligonucleotide
  modified_base (5)..(5): a, c, u, g, unknown or other
cccanacugcuuacaugca

SEQ ID NO: 2015668 - RNA, 19 nt, Artificial Sequence
  Description of Artificial Sequence: Synthetic oligonucleotide
gugggaucacugaaggcuu

SEQ ID NO: 2015669 - RNA, 19 nt, Artificial Sequence
  Description of Artificial Sequence: Synthetic oligonucleotide
uuccggguugugggaucac

SEQ ID NO: 2015670 - RNA, 19 nt, Artificial Sequence
  Description of Artificial Sequence: Synthetic oligonucleotide
  modified_base (4)..(4): a, c, u, g, unknown or other
ccanacugcuuacaugcau

SEQ ID NO: 2015671 - RNA, 19 nt, Artificial Sequence
  Description of Artificial Sequence: Synthetic oligonucleotide
guuggaccucugaggugca

SEQ ID NO: 2015672 - RNA, 19 nt, Artificial Sequence
  Description of Artificial Sequence: Synthetic oligonucleotide
cuaucccaggaggcaugca

SEQ ID NO: 2015673 - RNA, 19 nt, Artificial Sequence
  Description of Artificial Sequence: Synthetic oligonucleotide
ccauauugaaugccauguu

SEQ ID NO: 2015674 - RNA, 19 nt, Artificial Sequence
  Description of Artificial Sequence: Synthetic oligonucleotide
ccaggaggcaugcacucau

SEQ ID NO: 2015675 - RNA, 19 nt, Artificial Sequence
  Description of Artificial Sequence: Synthetic oligonucleotide
ggguucuuucuggaaggau

SEQ ID NO: 2015676 - RNA, 19 nt, Artificial Sequence
  Description of Artificial Sequence: Synthetic oligonucleotide
caggaggcaugcacucauu

SEQ ID NO: 2015677 - RNA, 19 nt, Artificial Sequence
  Description of Artificial Sequence: Synthetic oligonucleotide
cgaaucuguuggugggcuu

SEQ ID NO: 2015678 - RNA, 19 nt, Artificial Sequence
  Description of Artificial Sequence: Synthetic oligonucleotide
uaaaguuucaccuugaagc

SEQ ID NO: 2015679 - RNA, 19 nt, Artificial Sequence
  Description of Artificial Sequence: Synthetic oligonucleotide
agaacucuggaacaggucc

SEQ ID NO: 2015680 - RNA, 19 nt, Artificial Sequence
  Description of Artificial Sequence: Synthetic oligonucleotide
uuacaagaaauuuacuggg

SEQ ID NO: 2015681 - RNA, 19 nt, Artificial Sequence
  Description of Artificial Sequence: Synthetic oligonucleotide
aauuuacuggggcugcacc

SEQ ID NO: 2015682 - RNA, 19 nt, Artificial Sequence
  Description of Artificial Sequence: Synthetic oligonucleotide
uggauugacaggaugagcc

SEQ ID NO: 2015683 - RNA, 19 nt, Artificial Sequence
  Description of Artificial Sequence: Synthetic oligonucleotide
aacgaagccaucgaucucc

SEQ ID NO: 2015684 - RNA, 19 nt, Artificial Sequence
  Description of Artificial Sequence: Synthetic oligonucleotide
aguuuagcaaguuucauga

SEQ ID NO: 2015685 - RNA, 19 nt, Artificial Sequence
  Description of Artificial Sequence: Synthetic oligonucleotide
ucuucuggcagcuaaaugu

SEQ ID NO: 2015686 - RNA, 19 nt, Artificial Sequence
  Description of Artificial Sequence: Synthetic oligonucleotide
cuaaucucgccaaagagag

SEQ ID NO: 2015687 - RNA, 19 nt, Artificial Sequence
  Description of Artificial Sequence: Synthetic oligonucleotide
uucuggaucaucaggaacc

SEQ ID NO: 2015688 - RNA, 19 nt, Artificial Sequence
  Description of Artificial Sequence: Synthetic oligonucleotide
cacgauacgauccagcugg

SEQ ID NO: 2015689 - RNA, 19 nt, Artificial Sequence
  Description of Artificial Sequence: Synthetic oligonucleotide
uccuucaggagucucaccg

SEQ ID NO: 2015690 - RNA, 19 nt, Artificial Sequence
  Description of Artificial Sequence: Synthetic oligonucleotide
aaugaaugcauaccgcaug

SEQ ID NO: 2015691 - RNA, 19 nt, Artificial Sequence
  Description of Artificial Sequence: Synthetic oligonucleotide
ucuaaucucgccaaagaga

SEQ ID NO: 2015692 - RNA, 19 nt, Artificial Sequence
  Description of Artificial Sequence: Synthetic oligonucleotide
uuuagcaaguuucaugaga

SEQ ID NO: 2015693 - RNA, 19 nt, Artificial Sequence
  Description of Artificial Sequence: Synthetic oligonucleotide
uggaacacauuccugaaug

SEQ ID NO: 2015694 - RNA, 19 nt, Artificial Sequence
  Description of Artificial Sequence: Synthetic oligonucleotide
uucaucaaggcauagguuc

SEQ ID NO: 2015695 - RNA, 19 nt, Artificial Sequence
  Description of Artificial Sequence: Synthetic oligonucleotide
aguuucaugagacagucgu

SEQ ID NO: 2015696 - RNA, 19 nt, Artificial Sequence
  Description of Artificial Sequence: Synthetic oligonucleotide
aguagcuuacaauaccuuc

SEQ ID NO: 2015697 - RNA, 19 nt, Artificial Sequence
  Description of Artificial Sequence: Synthetic oligonucleotide
gaugacggcauacugcagg

SEQ ID NO: 2015698 - RNA, 19 nt, Artificial Sequence
  Description of Artificial Sequence: Synthetic oligonucleotide
augucauaaaguuucaccu

SEQ ID NO: 2015699 - RNA, 19 nt, Artificial Sequence
  Description of Artificial Sequence: Synthetic oligonucleotide
augaaugcauaccgcaugc

SEQ ID NO: 2015700 - RNA, 19 nt, Artificial Sequence
  Description of Artificial Sequence: Synthetic oligonucleotide
acugccuacgaucaccacc

SEQ ID NO: 2015701 - RNA, 19 nt, Artificial Sequence
  Description of Artificial Sequence: Synthetic oligonucleotide
aggaugagccacuacacac

SEQ ID NO: 2015702 - RNA, 19 nt, Artificial Sequence
  Description of Artificial Sequence: Synthetic oligonucleotide
uaagaugacucugucaucc

SEQ ID NO: 2015703 - RNA, 19 nt, Artificial Sequence
  Description of Artificial Sequence: Synthetic oligonucleotide
aucaggaaccuucauacag

SEQ ID NO: 2015704 - RNA, 19 nt, Artificial Sequence
  Description of Artificial Sequence: Synthetic oligonucleotide
agcauugaggugcauaguc

SEQ ID NO: 2015705 - RNA, 19 nt, Artificial Sequence
  Description of Artificial Sequence: Synthetic oligonucleotide
gacuagcucaaccaguggg

SEQ ID NO: 2015706 - RNA, 19 nt, Artificial Sequence
  Description of Artificial Sequence: Synthetic oligonucleotide
uucacgugugccaagccgg

SEQ ID NO: 2015707 - RNA, 19 nt, Artificial Sequence
  Description of Artificial Sequence: Synthetic oligonucleotide
agguccaaaagucuugagg

SEQ ID NO: 2015708 - RNA, 19 nt, Artificial Sequence
  Description of Artificial Sequence: Synthetic oligonucleotide
aaugaguccacugccuacg

SEQ ID NO: 2015709 - RNA, 19 nt, Artificial Sequence
  Description of Artificial Sequence: Synthetic oligonucleotide
cuucaguuuagcaaguuuc

SEQ ID NO: 2015710 - RNA, 19 nt, Artificial Sequence
  Description of Artificial Sequence: Synthetic oligonucleotide
uuucaugagacagucgucc

SEQ ID NO: 2015711 - RNA, 19 nt, Artificial Sequence
  Description of Artificial Sequence: Synthetic oligonucleotide
agacacuauuccuuccucc

SEQ ID NO: 2015712 - RNA, 19 nt, Artificial Sequence
  Description of Artificial Sequence: Synthetic oligonucleotide
ugauggaggcauuacaaga

SEQ ID NO: 2015713 - RNA, 19 nt, Artificial Sequence
  Description of Artificial Sequence: Synthetic oligonucleotide
uccugaaugugcauggcgc

SEQ ID NO: 2015714 - RNA, 19 nt, Artificial Sequence
  Description of Artificial Sequence: Synthetic oligonucleotide
uucaguuuagcaaguuuca

SEQ ID NO: 2015715 - RNA, 19 nt, Artificial Sequence
  Description of Artificial Sequence: Synthetic oligonucleotide
uggaacagguccaaaaguc

SEQ ID NO: 2015716 - RNA, 19 nt, Artificial Sequence
  Description of Artificial Sequence: Synthetic oligonucleotide
cauaauaugguggauugac

SEQ ID NO: 2015717 - RNA, 19 nt, Artificial Sequence
  Description of Artificial Sequence: Synthetic oligonucleotide
gaaugcauaccgcaugccc

SEQ ID NO: 2015718 - RNA, 19 nt, Artificial Sequence
  Description of Artificial Sequence: Synthetic oligonucleotide
agaaauuuacuggggcugc

SEQ ID NO: 2015719 - RNA, 19 nt, Artificial Sequence
  Description of Artificial Sequence: Synthetic oligonucleotide
gauacgauccagcugggca

SEQ ID NO: 2015720 - RNA, 19 nt, Artificial Sequence
  Description of Artificial Sequence: Synthetic oligonucleotide
agugggacauaauauggug

SEQ ID NO: 2015721 - RNA, 19 nt, Artificial Sequence
  Description of Artificial Sequence: Synthetic oligonucleotide
agggauuggaucaagagcu

SEQ ID NO: 2015722 - RNA, 19 nt, Artificial Sequence
  Description of Artificial Sequence: Synthetic oligonucleotide
uccugguuaacuuucucca

SEQ ID NO: 2015723 - RNA, 19 nt, Artificial Sequence
  Description of Artificial Sequence: Synthetic oligonucleotide
gacggcauacugcaggcgg

SEQ ID NO: 2015724 - RNA, 19 nt, Artificial Sequence
  Description of Artificial Sequence: Synthetic oligonucleotide
uagcuuacaauaccuucag

SEQ ID NO: 2015725 - RNA, 19 nt, Artificial Sequence
  Description of Artificial Sequence: Synthetic oligonucleotide
aaauuuacuggggcugcac

SEQ ID NO: 2015726 - RNA, 19 nt, Artificial Sequence
  Description of Artificial Sequence: Synthetic oligonucleotide
gagccuuugagagagccgg

SEQ ID NO: 2015727 - RNA, 19 nt, Artificial Sequence
  Description of Artificial Sequence: Synthetic oligonucleotide
guuaacuuucuccacugug

SEQ ID NO: 2015728 - RNA, 19 nt, Artificial Sequence
  Description of Artificial Sequence: Synthetic oligonucleotide
aaucucgccaaagagaguu

SEQ ID NO: 2015729 - RNA, 19 nt, Artificial Sequence
  Description of Artificial Sequence: Synthetic oligonucleotide
uccaaugaaugcauaccgc

SEQ ID NO: 2015730 - RNA, 19 nt, Artificial Sequence
  Description of Artificial Sequence: Synthetic oligonucleotide
accagugggacauaauaug

SEQ ID NO: 2015731 - RNA, 19 nt, Artificial Sequence
  Description of Artificial Sequence: Synthetic oligonucleotide
ugguggauugacaggauga

SEQ ID NO: 2015732 - RNA, 19 nt, Artificial Sequence
  Description of Artificial Sequence: Synthetic oligonucleotide
uccaaggguccaaugaaug

SEQ ID NO: 2015733 - RNA, 19 nt, Artificial Sequence
  Description of Artificial Sequence: Synthetic oligonucleotide
uugcucaaugucauaaagu

SEQ ID NO: 2015734 - RNA, 19 nt, Artificial Sequence
  Description of Artificial Sequence: Synthetic oligonucleotide
cugcaggcgguucagaacg

SEQ ID NO: 2015735 - RNA, 19 nt, Artificial Sequence
  Description of Artificial Sequence: Synthetic oligonucleotide
ggaaccuucauacagaugu

SEQ ID NO: 2015736 - RNA, 19 nt, Artificial Sequence
  Description of Artificial Sequence: Synthetic oligonucleotide
uuacaauaccuucagcauu

SEQ ID NO: 2015737 - RNA, 19 nt, Artificial Sequence
  Description of Artificial Sequence: Synthetic oligonucleotide
cuaggcuucucgaugcugc

SEQ ID NO: 2015738 - RNA, 19 nt, Artificial Sequence
  Description of Artificial Sequence: Synthetic oligonucleotide
cagggauuggaucaagagc

SEQ ID NO: 2015739 - RNA, 19 nt, Artificial Sequence
  Description of Artificial Sequence: Synthetic oligonucleotide
ucugcuagguuaccgcagc

SEQ ID NO: 2015740 - RNA, 19 nt, Artificial Sequence
  Description of Artificial Sequence: Synthetic oligonucleotide
uggaucaagagcuucuaau

SEQ ID NO: 2015741 - RNA, 19 nt, Artificial Sequence
  Description of Artificial Sequence: Synthetic oligonucleotide
aaugcauaccgcaugccca

SEQ ID NO: 2015742 - RNA, 19 nt, Artificial Sequence
  Description of Artificial Sequence: Synthetic oligonucleotide
uccaaaagucuugaggaca

SEQ ID NO: 2015743 - RNA, 19 nt, Artificial Sequence
  Description of Artificial Sequence: Synthetic oligonucleotide
auaugguggauugacagga

SEQ ID NO: 2015744 - RNA, 19 nt, Artificial Sequence
  Description of Artificial Sequence: Synthetic oligonucleotide
gguccaaaagucuugagga

SEQ ID NO: 2015745 - RNA, 19 nt, Artificial Sequence
  Description of Artificial Sequence: Synthetic oligonucleotide
caguuuagcaaguuucaug

SEQ ID NO: 2015746 - RNA, 19 nt, Artificial Sequence
  Description of Artificial Sequence: Synthetic oligonucleotide
ucauaaaguuucaccuuga

SEQ ID NO: 2015747 - RNA, 19 nt, Artificial Sequence
  Description of Artificial Sequence: Synthetic oligonucleotide
uucagaacgaagccaucga

SEQ ID NO: 2015748 - RNA, 19 nt, Artificial Sequence
  Description of Artificial Sequence: Synthetic oligonucleotide
ucaccuugaagccuccacu

SEQ ID NO: 2015749 - RNA, 19 nt, Artificial Sequence
  Description of Artificial Sequence: Synthetic oligonucleotide
cuucacgugugccaagccg

SEQ ID NO: 2015750 - RNA, 19 nt, Artificial Sequence
  Description of Artificial Sequence: Synthetic oligonucleotide
ucauccacgauacgaucca

SEQ ID NO: 2015751 - RNA, 19 nt, Artificial Sequence
  Description of Artificial Sequence: Synthetic oligonucleotide
gacgccauggcagauccgg

SEQ ID NO: 2015752 - RNA, 19 nt, Artificial Sequence
  Description of Artificial Sequence: Synthetic oligonucleotide
ucuccaaggguccaaugaa

SEQ ID NO: 2015753 - RNA, 19 nt, Artificial Sequence
  Description of Artificial Sequence: Synthetic oligonucleotide
acugcaggcgguucagaac

SEQ ID NO: 2015754 - RNA, 19 nt, Artificial Sequence
  Description of Artificial Sequence: Synthetic oligonucleotide
uggugcuucaguuuagcaa

SEQ ID NO: 2015755 - RNA, 19 nt, Artificial Sequence
  Description of Artificial Sequence: Synthetic oligonucleotide
uuccuaggcuucucgaugc

SEQ ID NO: 2015756 - RNA, 19 nt, Artificial Sequence
  Description of Artificial Sequence: Synthetic oligonucleotide
uuuuccagggcguuuguua

SEQ ID NO: 2015757 - RNA, 19 nt, Artificial Sequence
  Description of Artificial Sequence: Synthetic oligonucleotide
uguaucugucacaguagcu

SEQ ID NO: 2015758 - RNA, 19 nt, Artificial Sequence
  Description of Artificial Sequence: Synthetic oligonucleotide
agcuuacaauaccuucagc

SEQ ID NO: 2015759 - RNA, 19 nt, Artificial Sequence
  Description of Artificial Sequence: Synthetic oligonucleotide
cuguaucugucacaguagc

SEQ ID NO: 2015760 - RNA, 19 nt, Artificial Sequence
  Description of Artificial Sequence: Synthetic oligonucleotide
gacucugucauccacgaua

SEQ ID NO: 2015761 - RNA, 19 nt, Artificial Sequence
  Description of Artificial Sequence: Synthetic oligonucleotide
uuaccgcagccacugauga

SEQ ID NO: 2015762 - RNA, 19 nt, Artificial Sequence
  Description of Artificial Sequence: Synthetic oligonucleotide
caauccucuucaucaaggc

SEQ ID NO: 2015763 - RNA, 19 nt, Artificial Sequence
  Description of Artificial Sequence: Synthetic oligonucleotide
aguuucaccuugaagccuc

SEQ ID NO: 2015764 - RNA, 19 nt, Artificial Sequence
  Description of Artificial Sequence: Synthetic oligonucleotide
auuuacuggggcugcaccu

SEQ ID NO: 2015765 - RNA, 19 nt, Artificial Sequence
  Description of Artificial Sequence: Synthetic oligonucleotide
ggugcauagucuccaaggg

SEQ ID NO: 2015766 - RNA, 19 nt, Artificial Sequence
  Description of Artificial Sequence: Synthetic oligonucleotide
caagccgguaaacagcuug

SEQ ID NO: 2015767 - RNA, 19 nt, Artificial Sequence
  Description of Artificial Sequence: Synthetic oligonucleotide
acucugucauccacgauac

SEQ ID NO: 2015768 - RNA, 19 nt, Artificial Sequence
  Description of Artificial Sequence: Synthetic oligonucleotide
cauugaggugcauagucuc

SEQ ID NO: 2015769 - RNA, 19 nt, Artificial Sequence
  Description of Artificial Sequence: Synthetic oligonucleotide
gugauggaggcauuacaag

SEQ ID NO: 2015770 - RNA, 19 nt, Artificial Sequence
  Description of Artificial Sequence: Synthetic oligonucleotide
gaacacauuccugaaugug

SEQ ID NO: 2015771 - RNA, 19 nt, Artificial Sequence
  Description of Artificial Sequence: Synthetic oligonucleotide
aggagccuuugagagagcc

SEQ ID NO: 2015772 - RNA, 19 nt, Artificial Sequence
  Description of Artificial Sequence: Synthetic oligonucleotide
uucauuccaucacuguauc

SEQ ID NO: 2015773 - RNA, 19 nt, Artificial Sequence
  Description of Artificial Sequence: Synthetic oligonucleotide
acgaucaccaccccgccug

SEQ ID NO: 2015774 - RNA, 19 nt, Artificial Sequence
  Description of Artificial Sequence: Synthetic oligonucleotide
gaguccacugccuacgauc

SEQ ID NO: 2015775 - RNA, 19 nt, Artificial Sequence
  Description of Artificial Sequence: Synthetic oligonucleotide
uucaccuugaagccuccac

SEQ ID NO: 2015776 - RNA, 19 nt, Artificial Sequence
  Description of Artificial Sequence: Synthetic oligonucleotide
ugucacaguagcuuacaau

SEQ ID NO: 2015777 - RNA, 19 nt, Artificial Sequence
  Description of Artificial Sequence: Synthetic oligonucleotide
uagguuaccgcagccacug

SEQ ID NO: 2015778 - RNA, 19 nt, Artificial Sequence
  Description of Artificial Sequence: Synthetic oligonucleotide
uuacuggggcugcaccugg

SEQ ID NO: 2015779 - RNA, 19 nt, Artificial Sequence
  Description of Artificial Sequence: Synthetic oligonucleotide
ccgguaaacagcuuggaag

SEQ ID NO: 2015780 - RNA, 19 nt, Artificial Sequence
  Description of Artificial Sequence: Synthetic oligonucleotide
auacagauguccugguuaa

SEQ ID NO: 2015781 - RNA, 19 nt, Artificial Sequence
  Description of Artificial Sequence: Synthetic oligonucleotide
ucagaacgaagccaucgau

SEQ ID NO: 2015782 - RNA, 19 nt, Artificial Sequence
  Description of Artificial Sequence: Synthetic oligonucleotide
cugaugacggcauacugca

SEQ ID NO: 2015783 - RNA, 19 nt, Artificial Sequence
  Description of Artificial Sequence: Synthetic oligonucleotide
agcuccgaccaaugagucc

SEQ ID NO: 2015784 - RNA, 19 nt, Artificial Sequence
  Description of Artificial Sequence: Synthetic oligonucleotide
ucaugagacagucgucccu

SEQ ID NO: 2015785 - RNA, 19 nt, Artificial Sequence
  Description of Artificial Sequence: Synthetic oligonucleotide
caggccucgcugaugacgg

SEQ ID NO: 2015786 - RNA, 19 nt, Artificial Sequence
  Description of Artificial Sequence: Synthetic oligonucleotide
ugaggacacgcuucauucc

SEQ ID NO: 2015787 - RNA, 19 nt, Artificial Sequence
  Description of Artificial Sequence: Synthetic oligonucleotide
guagcuuacaauaccuuca

SEQ ID NO: 2015788 - RNA, 19 nt, Artificial Sequence
  Description of Artificial Sequence: Synthetic oligonucleotide
uaggagacacuauuccuuc

SEQ ID NO: 2015789 - RNA, 19 nt, Artificial Sequence
  Description of Artificial Sequence: Synthetic oligonucleotide
aagccgguaaacagcuugg

SEQ ID NO: 2015790 - RNA, 19 nt, Artificial Sequence
  Description of Artificial Sequence: Synthetic oligonucleotide
gguucucuggaacacauuc

SEQ ID NO: 2015791 - RNA, 19 nt, Artificial Sequence
  Description of Artificial Sequence: Synthetic oligonucleotide
accggggacugcccaaucc

SEQ ID NO: 2015792 - RNA, 19 nt, Artificial Sequence
  Description of Artificial Sequence: Synthetic oligonucleotide
cuuccuaggcuucucgaug

SEQ ID NO: 2015793 - RNA, 19 nt, Artificial Sequence
  Description of Artificial Sequence: Synthetic oligonucleotide
cagaacgaagccaucgauc

SEQ ID NO: 2015794 - RNA, 19 nt, Artificial Sequence
  Description of Artificial Sequence: Synthetic oligonucleotide
ucuacugcuucugcuaggu

SEQ ID NO: 2015795 - RNA, 19 nt, Artificial Sequence
  Description of Artificial Sequence: Synthetic oligonucleotide
ggaucaagagcuucuaauc

SEQ ID NO: 2015796 - RNA, 19 nt, Artificial Sequence
  Description of Artificial Sequence: Synthetic oligonucleotide
acaguagcuuacaauaccu

SEQ ID NO: 2015797 - RNA, 19 nt, Artificial Sequence
  Description of Artificial Sequence: Synthetic oligonucleotide
uuuccagggcguuuguuau

SEQ ID NO: 2015798 - RNA, 19 nt, Artificial Sequence
  Description of Artificial Sequence: Synthetic oligonucleotide
gugccaagccgguaaacag

SEQ ID NO: 2015799 - RNA, 19 nt, Artificial Sequence
  Description of Artificial Sequence: Synthetic oligonucleotide
acagauguccugguuaacu

SEQ ID NO: 2015800 - RNA, 19 nt, Artificial Sequence
  Description of Artificial Sequence: Synthetic oligonucleotide
uggaggcauuacaagaaau

SEQ ID NO: 2015801 - RNA, 19 nt, Artificial Sequence
  Description of Artificial Sequence: Synthetic oligonucleotide
uccacugccuacgaucacc

SEQ ID NO: 2015802 - RNA, 19 nt, Artificial Sequence
  Description of Artificial Sequence: Synthetic oligonucleotide
ugcuuaagaugacucuguc

SEQ ID NO: 2015803 - RNA, 19 nt, Artificial Sequence
  Description of Artificial Sequence: Synthetic oligonucleotide
gaggacacgcuucauucca

SEQ ID NO: 2015804 - RNA, 19 nt, Artificial Sequence
  Description of Artificial Sequence: Synthetic oligonucleotide
gauggaggcauuacaagaa

SEQ ID NO: 2015805 - RNA, 19 nt, Artificial Sequence
  Description of Artificial Sequence: Synthetic oligonucleotide
gucauccacgauacgaucc

SEQ ID NO: 2015806 - RNA, 19 nt, Artificial Sequence
  Description of Artificial Sequence: Synthetic oligonucleotide
uuuacuggggcugcaccug

SEQ ID NO: 2015807 - RNA, 19 nt, Artificial Sequence
  Description of Artificial Sequence: Synthetic oligonucleotide
ucgccaaagagaguuuccc

SEQ ID NO: 2015808 - RNA, 19 nt, Artificial Sequence
  Description of Artificial Sequence: Synthetic oligonucleotide
auacgauccagcugggcaa

SEQ ID NO: 2015809 - RNA, 19 nt, Artificial Sequence
  Description of Artificial Sequence: Synthetic oligonucleotide
ugcauggcgcccucuacug

SEQ ID NO: 2015810 - RNA, 19 nt, Artificial Sequence
  Description of Artificial Sequence: Synthetic oligonucleotide
augagacagucgucccucc

SEQ ID NO: 2015811 - RNA, 19 nt, Artificial Sequence
  Description of Artificial Sequence: Synthetic oligonucleotide
cacuacacacugcuucacg

SEQ ID NO: 2015812 - RNA, 19 nt, Artificial Sequence
  Description of Artificial Sequence: Synthetic oligonucleotide
agcugcuuaagaugacucu

SEQ ID NO: 2015813 - RNA, 19 nt, Artificial Sequence
  Description of Artificial Sequence: Synthetic oligonucleotide
agugauggaggcauuacaa

SEQ ID NO: 2015814 - RNA, 19 nt, Artificial Sequence
  Description of Artificial Sequence: Synthetic oligonucleotide
ccuacgaucaccaccccgc

SEQ ID NO: 2015815 - RNA, 19 nt, Artificial Sequence
  Description of Artificial Sequence: Synthetic oligonucleotide
cagggcguuuguuaucugc

SEQ ID NO: 2015816 - RNA, 19 nt, Artificial Sequence
  Description of Artificial Sequence: Synthetic oligonucleotide
gagugauggaggcauuaca

SEQ ID NO: 2015817 - RNA, 19 nt, Artificial Sequence
  Description of Artificial Sequence: Synthetic oligonucleotide
cuuggaaggcagcagacaa

SEQ ID NO: 2015818 - RNA, 19 nt, Artificial Sequence
  Description of Artificial Sequence: Synthetic oligonucleotide
aaguuucaccuugaagccu

SEQ ID NO: 2015819 - RNA, 19 nt, Artificial Sequence
  Description of Artificial Sequence: Synthetic oligonucleotide
ugcccagcccaucugacau

SEQ ID NO: 2015820 - RNA, 19 nt, Artificial Sequence
  Description of Artificial Sequence: Synthetic oligonucleotide
cuucuaaucucgccaaaga

SEQ ID NO: 2015821 - RNA, 19 nt, Artificial Sequence
  Description of Artificial Sequence: Synthetic oligonucleotide
auaauaugguggauugaca

SEQ ID NO: 2015822 - RNA, 19 nt, Artificial Sequence
  Description of Artificial Sequence: Synthetic oligonucleotide
cucgccaaagagaguuucc

SEQ ID NO: 2015823 - RNA, 19 nt, Artificial Sequence
  Description of Artificial Sequence: Synthetic oligonucleotide
uccagggcguuuguuaucu

SEQ ID NO: 2015824 - RNA, 19 nt, Artificial Sequence
  Description of Artificial Sequence: Synthetic oligonucleotide
agcucaaccagugggacau

SEQ ID NO: 2015825 - RNA, 19 nt, Artificial Sequence
  Description of Artificial Sequence: Synthetic oligonucleotide
guuaggagacacuauuccu

SEQ ID NO: 2015826 - RNA, 19 nt, Artificial Sequence
  Description of Artificial Sequence: Synthetic oligonucleotide
acacauuccugaaugugca

SEQ ID NO: 2015827 - RNA, 19 nt, Artificial Sequence
  Description of Artificial Sequence: Synthetic oligonucleotide
uacugcaggcgguucagaa

SEQ ID NO: 2015828 - RNA, 19 nt, Artificial Sequence
  Description of Artificial Sequence: Synthetic oligonucleotide
uagcaaguuucaugagaca

SEQ ID NO: 2015829 - RNA, 19 nt, Artificial Sequence
  Description of Artificial Sequence: Synthetic oligonucleotide
ugaaugugcauggcgcccu

SEQ ID NO: 2015830 - RNA, 19 nt, Artificial Sequence
  Description of Artificial Sequence: Synthetic oligonucleotide
cuuacaauaccuucagcau

SEQ ID NO: 2015831 - RNA, 19 nt, Artificial Sequence
  Description of Artificial Sequence: Synthetic oligonucleotide
ugaugacggcauacugcag

SEQ ID NO: 2015832 - RNA, 19 nt, Artificial Sequence
  Description of Artificial Sequence: Synthetic oligonucleotide
accgcagccacugaugagu

SEQ ID NO: 2015833 - RNA, 19 nt, Artificial Sequence
  Description of Artificial Sequence: Synthetic oligonucleotide
ugagacagucgucccucca

SEQ ID NO: 2015834 - RNA, 19 nt, Artificial Sequence
  Description of Artificial Sequence: Synthetic oligonucleotide
ucauacagauguccugguu

SEQ ID NO: 2015835 - RNA, 19 nt, Artificial Sequence
  Description of Artificial Sequence: Synthetic oligonucleotide
ugaaugcauaccgcaugcc

SEQ ID NO: 2015836 - RNA, 19 nt, Artificial Sequence
  Description of Artificial Sequence: Synthetic oligonucleotide
guaaacagcuuggaaggca

SEQ ID NO: 2015837 - RNA, 19 nt, Artificial Sequence
  Description of Artificial Sequence: Synthetic oligonucleotide
cauucuccaggccucgcug

SEQ ID NO: 2015838 - RNA, 19 nt, Artificial Sequence
  Description of Artificial Sequence: Synthetic oligonucleotide
ucaguuuagcaaguuucau

SEQ ID NO: 2015839 - RNA, 19 nt, Artificial Sequence
  Description of Artificial Sequence: Synthetic oligonucleotide
gagacacuauuccuuccuc

SEQ ID NO: 2015840 - RNA, 19 nt, Artificial Sequence
  Description of Artificial Sequence: Synthetic oligonucleotide
cauaccgcaugcccagccc

SEQ ID NO: 2015841 - RNA, 19 nt, Artificial Sequence
  Description of Artificial Sequence: Synthetic oligonucleotide
ugcuucacgugugccaagc

SEQ ID NO: 2015842 - RNA, 19 nt, Artificial Sequence
  Description of Artificial Sequence: Synthetic oligonucleotide
ugcugcacagggauuggau

SEQ ID NO: 2015843 - RNA, 19 nt, Artificial Sequence
  Description of Artificial Sequence: Synthetic oligonucleotide
auggaggcauuacaagaaa

SEQ ID NO: 2015844 - RNA, 19 nt, Artificial Sequence
  Description of Artificial Sequence: Synthetic oligonucleotide
aucugucacaguagcuuac

SEQ ID NO: 2015845 - RNA, 19 nt, Artificial Sequence
  Description of Artificial Sequence: Synthetic oligonucleotide
acuagcucaaccaguggga

SEQ ID NO: 2015846 - RNA, 19 nt, Artificial Sequence
  Description of Artificial Sequence: Synthetic oligonucleotide
ucuccuucaggagucucac

SEQ ID NO: 2015847 - RNA, 19 nt, Artificial Sequence
  Description of Artificial Sequence: Synthetic oligonucleotide
caugagacagucgucccuc

SEQ ID NO: 2015848 - RNA, 19 nt, Artificial Sequence
  Description of Artificial Sequence: Synthetic oligonucleotide
caaccagugggacauaaua

SEQ ID NO: 2015849 - RNA, 19 nt, Artificial Sequence
  Description of Artificial Sequence: Synthetic oligonucleotide
ucucgaugcugcacaggga

SEQ ID NO: 2015850 - RNA, 19 nt, Artificial Sequence
  Description of Artificial Sequence: Synthetic oligonucleotide
gugacaacugcugcucugc

SEQ ID NO: 2015851 - RNA, 19 nt, Artificial Sequence
  Description of Artificial Sequence: Synthetic oligonucleotide
caaggguccaaugaaugca

SEQ ID NO: 2015852 - RNA, 19 nt, Artificial Sequence
  Description of Artificial Sequence: Synthetic oligonucleotide
acacugcuucacgugugcc

SEQ ID NO: 2015853 - RNA, 19 nt, Artificial Sequence
  Description of Artificial Sequence: Synthetic oligonucleotide
uccucuucaucaaggcaua

SEQ ID NO: 2015854 - RNA, 19 nt, Artificial Sequence
  Description of Artificial Sequence: Synthetic oligonucleotide
cugaaugugcauggcgccc

SEQ ID NO: 2015855 - RNA, 19 nt, Artificial Sequence
  Description of Artificial Sequence: Synthetic oligonucleotide
ugcuagguuaccgcagcca

SEQ ID NO: 2015856 - RNA, 19 nt, Artificial Sequence
  Description of Artificial Sequence: Synthetic oligonucleotide
auaccgcaugcccagccca

SEQ ID NO: 2015857 - RNA, 19 nt, Artificial Sequence
  Description of Artificial Sequence: Synthetic oligonucleotide
gcuucugcuagguuaccgc

SEQ ID NO: 2015858 - RNA, 19 nt, Artificial Sequence
  Description of Artificial Sequence: Synthetic oligonucleotide
cuagcucaaccagugggac

SEQ ID NO: 2015859 - RNA, 19 nt, Artificial Sequence
  Description of Artificial Sequence: Synthetic oligonucleotide
cguuaggagacacuauucc

SEQ ID NO: 2015860 - RNA, 19 nt, Artificial Sequence
  Description of Artificial Sequence: Synthetic oligonucleotide
uaaucucgccaaagagagu

SEQ ID NO: 2015861 - RNA, 19 nt, Artificial Sequence
  Description of Artificial Sequence: Synthetic oligonucleotide
ccaaggguccaaugaaugc

SEQ ID NO: 2015862 - RNA, 19 nt, Artificial Sequence
  Description of Artificial Sequence: Synthetic oligonucleotide
cuucugcuagguuaccgca

SEQ ID NO: 2015863 - RNA, 19 nt, Artificial Sequence
  Description of Artificial Sequence: Synthetic oligonucleotide
caggcgguucagaacgaag

SEQ ID NO: 2015864 - RNA, 19 nt, Artificial Sequence
  Description of Artificial Sequence: Synthetic oligonucleotide
gcugcuuaagaugacucug

SEQ ID NO: 2015865 - RNA, 19 nt, Artificial Sequence
  Description of Artificial Sequence: Synthetic oligonucleotide
acagguccaaaagucuuga

SEQ ID NO: 2015866 - RNA, 19 nt, Artificial Sequence
  Description of Artificial Sequence: Synthetic oligonucleotide
cuucauuccaucacuguau

SEQ ID NO: 2015867 - RNA, 19 nt, Artificial Sequence
  Description of Artificial Sequence: Synthetic oligonucleotide
ucucaccggggacugccca

SEQ ID NO: 2015868 - RNA, 19 nt, Artificial Sequence
  Description of Artificial Sequence: Synthetic oligonucleotide
accuucauacagauguccu

SEQ ID NO: 2015869 - RNA, 19 nt, Artificial Sequence
  Description of Artificial Sequence: Synthetic oligonucleotide
ccaaugaaugcauaccgca

SEQ ID NO: 2015870 - RNA, 19 nt, Artificial Sequence
  Description of Artificial Sequence: Synthetic oligonucleotide
acgugugccaagccgguaa

SEQ ID NO: 2015871 - RNA, 19 nt, Artificial Sequence
  Description of Artificial Sequence: Synthetic oligonucleotide
acauaauaugguggauuga

SEQ ID NO: 2015872 - RNA, 19 nt, Artificial Sequence
  Description of Artificial Sequence: Synthetic oligonucleotide
aggcauuacaagaaauuua

SEQ ID NO: 2015873 - RNA, 19 nt, Artificial Sequence
  Description of Artificial Sequence: Synthetic oligonucleotide
guggauugacaggaugagc

SEQ ID NO: 2015874 - RNA, 19 nt, Artificial Sequence
  Description of Artificial Sequence: Synthetic oligonucleotide
aucauucuccaggccucgc

SEQ ID NO: 2015875 - RNA, 19 nt, Artificial Sequence
  Description of Artificial Sequence: Synthetic oligonucleotide
auugacaggaugagccacu

SEQ ID NO: 2015876 - RNA, 19 nt, Artificial Sequence
  Description of Artificial Sequence: Synthetic oligonucleotide
gcuagguuaccgcagccac

SEQ ID NO: 2015877 - RNA, 19 nt, Artificial Sequence
  Description of Artificial Sequence: Synthetic oligonucleotide
cuacgaucaccaccccgcc

SEQ ID NO: 2015878 - RNA, 19 nt, Artificial Sequence
  Description of Artificial Sequence: Synthetic oligonucleotide
ucacgugugccaagccggu

SEQ ID NO: 2015879 - RNA, 19 nt, Artificial Sequence
  Description of Artificial Sequence: Synthetic oligonucleotide
cagucgucccuccauuuuc

SEQ ID NO: 2015880 - RNA, 19 nt, Artificial Sequence
  Description of Artificial Sequence: Synthetic oligonucleotide
acacuauuccuuccuccau

SEQ ID NO: 2015881 - RNA, 19 nt, Artificial Sequence
  Description of Artificial Sequence: Synthetic oligonucleotide
caucauucuccaggccucg

SEQ ID NO: 2015882 - RNA, 19 nt, Artificial Sequence
  Description of Artificial Sequence: Synthetic oligonucleotide
ugacggcauacugcaggcg

SEQ ID NO: 2015883 - RNA, 19 nt, Artificial Sequence
  Description of Artificial Sequence: Synthetic oligonucleotide
gcuucuaaucucgccaaag

SEQ ID NO: 2015884 - RNA, 19 nt, Artificial Sequence
  Description of Artificial Sequence: Synthetic oligonucleotide
uaggcuucucgaugcugca

SEQ ID NO: 2015885 - RNA, 19 nt, Artificial Sequence
  Description of Artificial Sequence: Synthetic oligonucleotide
gcuuaagaugacucuguca

SEQ ID NO: 2015886 - RNA, 19 nt, Artificial Sequence
  Description of Artificial Sequence: Synthetic oligonucleotide
uacgaucaccaccccgccu

SEQ ID NO: 2015887 - RNA, 19 nt, Artificial Sequence
  Description of Artificial Sequence: Synthetic oligonucleotide
ugagagagccggacugcuc

SEQ ID NO: 2015888 - RNA, 19 nt, Artificial Sequence
  Description of Artificial Sequence: Synthetic oligonucleotide
uuaucugcuguugcucaau

SEQ ID NO: 2015889 - RNA, 19 nt, Artificial Sequence
  Description of Artificial Sequence: Synthetic oligonucleotide
gcagauccgggccuggcag

SEQ ID NO: 2015890 - RNA, 19 nt, Artificial Sequence
  Description of Artificial Sequence: Synthetic oligonucleotide
caugcccagcccaucugac

SEQ ID NO: 2015891 - RNA, 19 nt, Artificial Sequence
  Description of Artificial Sequence: Synthetic oligonucleotide
gggacuagcucaaccagug

SEQ ID NO: 2015892 - RNA, 19 nt, Artificial Sequence
  Description of Artificial Sequence: Synthetic oligonucleotide
ggcagcuaaauguucugga

SEQ ID NO: 2015893 - RNA, 19 nt, Artificial Sequence
  Description of Artificial Sequence: Synthetic oligonucleotide
aggagucucaccggggacu

SEQ ID NO: 2015894 - RNA, 19 nt, Artificial Sequence
  Description of Artificial Sequence: Synthetic oligonucleotide
cucgcugaugacggcauac

SEQ ID NO: 2015895 - RNA, 19 nt, Artificial Sequence
  Description of Artificial Sequence: Synthetic oligonucleotide
ugaggugcauagucuccaa

SEQ ID NO: 2015896 - RNA, 19 nt, Artificial Sequence
  Description of Artificial Sequence: Synthetic oligonucleotide
cuguugcucaaugucauaa

SEQ ID NO: 2015897 - RNA, 19 nt, Artificial Sequence
  Description of Artificial Sequence: Synthetic oligonucleotide
gaacgaagccaucgaucuc

SEQ ID NO: 2015898 - RNA, 19 nt, Artificial Sequence
  Description of Artificial Sequence: Synthetic oligonucleotide
uaccgcagccacugaugag

SEQ ID NO: 2015899 - RNA, 19 nt, Artificial Sequence
  Description of Artificial Sequence: Synthetic oligonucleotide
gcauagguucuguccauug

SEQ ID NO: 2015900 - RNA, 19 nt, Artificial Sequence
  Description of Artificial Sequence: Synthetic oligonucleotide
agggcguuuguuaucugcu

SEQ ID NO: 2015901 - RNA, 19 nt, Artificial Sequence
  Description of Artificial Sequence: Synthetic oligonucleotide
cauugcccagcuccgacca

SEQ ID NO: 2015902 - RNA, 19 nt, Artificial Sequence
  Description of Artificial Sequence: Synthetic oligonucleotide
acagucgucccuccauuuu

SEQ ID NO: 2015903 - RNA, 19 nt, Artificial Sequence
  Description of Artificial Sequence: Synthetic oligonucleotide
guuucaugagacagucguc

SEQ ID NO: 2015904 - RNA, 19 nt, Artificial Sequence
  Description of Artificial Sequence: Synthetic oligonucleotide
guaucugucacaguagcuu

SEQ ID NO: 2015905 - RNA, 19 nt, Artificial Sequence
  Description of Artificial Sequence: Synthetic oligonucleotide
ggacuagcucaaccagugg

SEQ ID NO: 2015906 - RNA, 19 nt, Artificial Sequence
  Description of Artificial Sequence: Synthetic oligonucleotide
augaguccacugccuacga

SEQ ID NO: 2015907 - RNA, 19 nt, Artificial Sequence
  Description of Artificial Sequence: Synthetic oligonucleotide
aaggagccuuugagagagc

SEQ ID NO: 2015908 - RNA, 19 nt, Artificial Sequence
  Description of Artificial Sequence: Synthetic oligonucleotide
cugguuaacuuucuccacu

SEQ ID NO: 2015909 - RNA, 19 nt, Artificial Sequence
  Description of Artificial Sequence: Synthetic oligonucleotide
ggccuggcagcacagcugc

SEQ ID NO: 2015910 - RNA, 19 nt, Artificial Sequence
  Description of Artificial Sequence: Synthetic oligonucleotide
ggauugacaggaugagcca

SEQ ID NO: 2015911 - RNA, 19 nt, Artificial Sequence
  Description of Artificial Sequence: Synthetic oligonucleotide
uccuaggcuucucgaugcu

SEQ ID NO: 2015912 - RNA, 19 nt, Artificial Sequence
  Description of Artificial Sequence: Synthetic oligonucleotide
agacagucgucccuccauu

SEQ ID NO: 2015913 - RNA, 19 nt, Artificial Sequence
  Description of Artificial Sequence: Synthetic oligonucleotide
cuccaggccucgcugauga

SEQ ID NO: 2015914 - RNA, 19 nt, Artificial Sequence
  Description of Artificial Sequence: Synthetic oligonucleotide
gcuccgaccaaugagucca

SEQ ID NO: 2015915 - RNA, 19 nt, Artificial Sequence
  Description of Artificial Sequence: Synthetic oligonucleotide
cugcuagguuaccgcagcc

SEQ ID NO: 2015916 - RNA, 19 nt, Artificial Sequence
  Description of Artificial Sequence: Synthetic oligonucleotide
cgaccaaugaguccacugc

SEQ ID NO: 2015917 - RNA, 19 nt, Artificial Sequence
  Description of Artificial Sequence: Synthetic oligonucleotide
ucgcugaugacggcauacu

SEQ ID NO: 2015918 - RNA, 19 nt, Artificial Sequence
  Description of Artificial Sequence: Synthetic oligonucleotide
caucaggaaccuucauaca

SEQ ID NO: 2015919 - RNA, 19 nt, Artificial Sequence
  Description of Artificial Sequence: Synthetic oligonucleotide
caucaaggcauagguucug

SEQ ID NO: 2015920 - RNA, 19 nt, Artificial Sequence
  Description of Artificial Sequence: Synthetic oligonucleotide
ugauguuuuccagggcguu

SEQ ID NO: 2015921 - RNA, 19 nt, Artificial Sequence
  Description of Artificial Sequence: Synthetic oligonucleotide
agggacuagcucaaccagu

SEQ ID NO: 2015922 - RNA, 19 nt, Artificial Sequence
  Description of Artificial Sequence: Synthetic oligonucleotide
gccaucgaucuccuucagg

SEQ ID NO: 2015923 - RNA, 19 nt, Artificial Sequence
  Description of Artificial Sequence: Synthetic oligonucleotide
cagauccgggccuggcagc

SEQ ID NO: 2015924 - RNA, 19 nt, Artificial Sequence
  Description of Artificial Sequence: Synthetic oligonucleotide
gguccaggucguuaggaga

SEQ ID NO: 2015925 - RNA, 19 nt, Artificial Sequence
  Description of Artificial Sequence: Synthetic oligonucleotide
gccuacgaucaccaccccg

SEQ ID NO: 2015926 - RNA, 19 nt, Artificial Sequence
  Description of Artificial Sequence: Synthetic oligonucleotide
guccauuguggcuggagcu

SEQ ID NO: 2015927 - RNA, 19 nt, Artificial Sequence
  Description of Artificial Sequence: Synthetic oligonucleotide
cuggugcuucaguuuagca

SEQ ID NO: 2015928 - RNA, 19 nt, Artificial Sequence
  Description of Artificial Sequence: Synthetic oligonucleotide
uuccagggcguuuguuauc

SEQ ID NO: 2015929 - RNA, 19 nt, Artificial Sequence
  Description of Artificial Sequence: Synthetic oligonucleotide
caaugaaugcauaccgcau

SEQ ID NO: 2015930 - RNA, 19 nt, Artificial Sequence
  Description of Artificial Sequence: Synthetic oligonucleotide
ggagccuuugagagagccg

SEQ ID NO: 2015931 - RNA, 19 nt, Artificial Sequence
  Description of Artificial Sequence: Synthetic oligonucleotide
agcuucuaaucucgccaaa

SEQ ID NO: 2015932 - RNA, 19 nt, Artificial Sequence
  Description of Artificial Sequence: Synthetic oligonucleotide
cucugucauccacgauacg

SEQ ID NO: 2015933 - RNA, 19 nt, Artificial Sequence
  Description of Artificial Sequence: Synthetic oligonucleotide
cccagcuccgaccaaugag

SEQ ID NO: 2015934 - RNA, 19 nt, Artificial Sequence
  Description of Artificial Sequence: Synthetic oligonucleotide
ccucuacugcuucugcuag

SEQ ID NO: 2015935 - RNA, 19 nt, Artificial Sequence
  Description of Artificial Sequence: Synthetic oligonucleotide
ucgaugcugcacagggauu

SEQ ID NO: 2015936 - RNA, 19 nt, Artificial Sequence
  Description of Artificial Sequence: Synthetic oligonucleotide
aggcauagguucuguccau

SEQ ID NO: 2015937 - RNA, 19 nt, Artificial Sequence
  Description of Artificial Sequence: Synthetic oligonucleotide
agucgucccuccauuuucu

SEQ ID NO: 2015938 - RNA, 19 nt, Artificial Sequence
  Description of Artificial Sequence: Synthetic oligonucleotide
agccacugaugagugacaa

SEQ ID NO: 2015939 - RNA, 19 nt, Artificial Sequence
  Description of Artificial Sequence: Synthetic oligonucleotide
aggccucgcugaugacggc

SEQ ID NO: 2015940 - RNA, 19 nt, Artificial Sequence
  Description of Artificial Sequence: Synthetic oligonucleotide
uacgauccagcugggcaaa

SEQ ID NO: 2015941 - RNA, 19 nt, Artificial Sequence
  Description of Artificial Sequence: Synthetic oligonucleotide
cugcuuaagaugacucugu

SEQ ID NO: 2015942 - RNA, 19 nt, Artificial Sequence
  Description of Artificial Sequence: Synthetic oligonucleotide
gaaugugcauggcgcccuc

SEQ ID NO: 2015943 - RNA, 19 nt, Artificial Sequence
  Description of Artificial Sequence: Synthetic oligonucleotide
caggagucucaccggggac

SEQ ID NO: 2015944 - RNA, 19 nt, Artificial Sequence
  Description of Artificial Sequence: Synthetic oligonucleotide
acgcuucauuccaucacug

SEQ ID NO: 2015945 - RNA, 19 nt, Artificial Sequence
  Description of Artificial Sequence: Synthetic oligonucleotide
ugacucugucauccacgau

SEQ ID NO: 2015946 - RNA, 19 nt, Artificial Sequence
  Description of Artificial Sequence: Synthetic oligonucleotide
cauccacgauacgauccag

SEQ ID NO: 2015947 - RNA, 19 nt, Artificial Sequence
  Description of Artificial Sequence: Synthetic oligonucleotide
gccacuacacacugcuuca

SEQ ID NO: 2015948 - RNA, 19 nt, Artificial Sequence
  Description of Artificial Sequence: Synthetic oligonucleotide
cauagguucuguccauugu

SEQ ID NO: 2015949 - RNA, 19 nt, Artificial Sequence
  Description of Artificial Sequence: Synthetic oligonucleotide
cugucauccacgauacgau

SEQ ID NO: 2015950 - RNA, 19 nt, Artificial Sequence
  Description of Artificial Sequence: Synthetic oligonucleotide
uaccgcaugcccagcccau

SEQ ID NO: 2015951 - RNA, 19 nt, Artificial Sequence
  Description of Artificial Sequence: Synthetic oligonucleotide
gcauaccgcaugcccagcc

SEQ ID NO: 2015952 - RNA, 19 nt, Artificial Sequence
  Description of Artificial Sequence: Synthetic oligonucleotide
cacgcuucauuccaucacu

SEQ ID NO: 2015953 - RNA, 19 nt, Artificial Sequence
  Description of Artificial Sequence: Synthetic oligonucleotide
gggcguuuguuaucugcug

SEQ ID NO: 2015954 - RNA, 19 nt, Artificial Sequence
  Description of Artificial Sequence: Synthetic oligonucleotide
ggagacacuauuccuuccu

SEQ ID NO: 2015955 - RNA, 19 nt, Artificial Sequence
  Description of Artificial Sequence: Synthetic oligonucleotide
ccgaccaaugaguccacug

SEQ ID NO: 2015956 - RNA, 19 nt, Artificial Sequence
  Description of Artificial Sequence: Synthetic oligonucleotide
ggauuggaucaagagcuuc

SEQ ID NO: 2015957 - RNA, 19 nt, Artificial Sequence
  Description of Artificial Sequence: Synthetic oligonucleotide
cauggcagauccgggccug

SEQ ID NO: 2015958 - RNA, 19 nt, Artificial Sequence
  Description of Artificial Sequence: Synthetic oligonucleotide
ugcuucaguuuagcaaguu

SEQ ID NO: 2015959 - RNA, 19 nt, Artificial Sequence
  Description of Artificial Sequence: Synthetic oligonucleotide
uugcccagcuccgaccaau

SEQ ID NO: 2015960 - RNA, 19 nt, Artificial Sequence
  Description of Artificial Sequence: Synthetic oligonucleotide
ugccuacgaucaccacccc

SEQ ID NO: 2015961 - RNA, 19 nt, Artificial Sequence
  Description of Artificial Sequence: Synthetic oligonucleotide
ugcauaccgcaugcccagc

SEQ ID NO: 2015962 - RNA, 19 nt, Artificial Sequence
  Description of Artificial Sequence: Synthetic oligonucleotide
caccuggugcuucaguuua

SEQ ID NO: 2015963 - RNA, 19 nt, Artificial Sequence
  Description of Artificial Sequence: Synthetic oligonucleotide
aggaaccuucauacagaug

SEQ ID NO: 2015964 - RNA, 19 nt, Artificial Sequence
  Description of Artificial Sequence: Synthetic oligonucleotide
caccaccccgccugcugcg

SEQ ID NO: 2015965 - RNA, 19 nt, Artificial Sequence
  Description of Artificial Sequence: Synthetic oligonucleotide
cauggcgcccucuacugcu

SEQ ID NO: 2015966 - RNA, 19 nt, Artificial Sequence
  Description of Artificial Sequence: Synthetic oligonucleotide
acgauacgauccagcuggg

SEQ ID NO: 2015967 - RNA, 19 nt, Artificial Sequence
  Description of Artificial Sequence: Synthetic oligonucleotide
cauagucuccaagggucca

SEQ ID NO: 2015968 - RNA, 19 nt, Artificial Sequence
  Description of Artificial Sequence: Synthetic oligonucleotide
ggaacacauuccugaaugu

SEQ ID NO: 2015969 - RNA, 19 nt, Artificial Sequence
  Description of Artificial Sequence: Synthetic oligonucleotide
agccgguaaacagcuugga

SEQ ID NO: 2015970 - RNA, 19 nt, Artificial Sequence
  Description of Artificial Sequence: Synthetic oligonucleotide
caccccgccugcugcgggg

SEQ ID NO: 2015971 - RNA, 19 nt, Artificial Sequence
  Description of Artificial Sequence: Synthetic oligonucleotide
caggaaccuucauacagau

SEQ ID NO: 2015972 - RNA, 19 nt, Artificial Sequence
  Description of Artificial Sequence: Synthetic oligonucleotide
acgccauggcagauccggg

SEQ ID NO: 2015973 - RNA, 19 nt, Artificial Sequence
  Description of Artificial Sequence: Synthetic oligonucleotide
ggacacgcuucauuccauc

SEQ ID NO: 2015974 - RNA, 19 nt, Artificial Sequence
  Description of Artificial Sequence: Synthetic oligonucleotide
gcuucacgugugccaagcc

SEQ ID NO: 2015975 - RNA, 19 nt, Artificial Sequence
  Description of Artificial Sequence: Synthetic oligonucleotide
ggcguuuguuaucugcugu

SEQ ID NO: 2015976 - RNA, 19 nt, Artificial Sequence
  Description of Artificial Sequence: Synthetic oligonucleotide
accuggugcuucaguuuag

SEQ ID NO: 2015977 - RNA, 19 nt, Artificial Sequence
  Description of Artificial Sequence: Synthetic oligonucleotide
uccgaccaaugaguccacu

SEQ ID NO: 2015978 - RNA, 19 nt, Artificial Sequence
  Description of Artificial Sequence: Synthetic oligonucleotide
acggcauacugcaggcggu

SEQ ID NO: 2015979 - RNA, 19 nt, Artificial Sequence
  Description of Artificial Sequence: Synthetic oligonucleotide
cuccgaccaaugaguccac

SEQ ID NO: 2015980 - RNA, 19 nt, Artificial Sequence
  Description of Artificial Sequence: Synthetic oligonucleotide
ccacgauacgauccagcug

SEQ ID NO: 2015981 - RNA, 19 nt, Artificial Sequence
  Description of Artificial Sequence: Synthetic oligonucleotide
cuagguuaccgcagccacu

SEQ ID NO: 2015982 - RNA, 19 nt, Artificial Sequence
  Description of Artificial Sequence: Synthetic oligonucleotide
cagguucucuggaacacau

SEQ ID NO: 2015983 - RNA, 19 nt, Artificial Sequence
  Description of Artificial Sequence: Synthetic oligonucleotide
cacugccuacgaucaccac

SEQ ID NO: 2015984 - RNA, 19 nt, Artificial Sequence
  Description of Artificial Sequence: Synthetic oligonucleotide
ggacauaauaugguggauu

SEQ ID NO: 2015985 - RNA, 19 nt, Artificial Sequence
  Description of Artificial Sequence: Synthetic oligonucleotide
cgaugcugcacagggauug

SEQ ID NO: 2015986 - RNA, 19 nt, Artificial Sequence
  Description of Artificial Sequence: Synthetic oligonucleotide
uggcgcccucuacugcuuc

SEQ ID NO: 2015987 - RNA, 19 nt, Artificial Sequence
  Description of Artificial Sequence: Synthetic oligonucleotide
cuccaaggguccaaugaau

SEQ ID NO: 2015988 - RNA, 19 nt, Artificial Sequence
  Description of Artificial Sequence: Synthetic oligonucleotide
ccaucugacaugaccaggu

SEQ ID NO: 2015989 - RNA, 19 nt, Artificial Sequence
  Description of Artificial Sequence: Synthetic oligonucleotide
gacagucgucccuccauuu

SEQ ID NO: 2015990 - RNA, 19 nt, Artificial Sequence
  Description of Artificial Sequence: Synthetic oligonucleotide
auugcccagcuccgaccaa

SEQ ID NO: 2015991 - RNA, 19 nt, Artificial Sequence
  Description of Artificial Sequence: Synthetic oligonucleotide
ggaggcauuacaagaaauu

SEQ ID NO: 2015992 - RNA, 19 nt, Artificial Sequence
  Description of Artificial Sequence: Synthetic oligonucleotide
agguuaccgcagccacuga

SEQ ID NO: 2015993 - RNA, 19 nt, Artificial Sequence
  Description of Artificial Sequence: Synthetic oligonucleotide
ggacugcccaauccucuuc

SEQ ID NO: 2015994 - RNA, 19 nt, Artificial Sequence
  Description of Artificial Sequence: Synthetic oligonucleotide
cguuuguuaucugcuguug

SEQ ID NO: 2015995 - RNA, 19 nt, Artificial Sequence
  Description of Artificial Sequence: Synthetic oligonucleotide
gugugccaagccgguaaac

SEQ ID NO: 2015996 - RNA, 19 nt, Artificial Sequence
  Description of Artificial Sequence: Synthetic oligonucleotide
acgaagccaucgaucuccu

SEQ ID NO: 2015997 - RNA, 19 nt, Artificial Sequence
  Description of Artificial Sequence: Synthetic oligonucleotide
gcauggcgcccucuacugc

SEQ ID NO: 2015998 - RNA, 19 nt, Artificial Sequence
  Description of Artificial Sequence: Synthetic oligonucleotide
gcacucaaggagccuuuga

SEQ ID NO: 2015999 - RNA, 19 nt, Artificial Sequence
  Description of Artificial Sequence: Synthetic oligonucleotide
gccuuugagagagccggac

SEQ ID NO: 2016000 - RNA, 19 nt, Artificial Sequence
  Description of Artificial Sequence: Synthetic oligonucleotide
guccacugccuacgaucac

SEQ ID NO: 2016001 - RNA, 19 nt, Artificial Sequence
  Description of Artificial Sequence: Synthetic oligonucleotide
aggacacgcuucauuccau

SEQ ID NO: 2016002 - RNA, 19 nt, Artificial Sequence
  Description of Artificial Sequence: Synthetic oligonucleotide
cuggaacacauuccugaau

SEQ ID NO: 2016003 - RNA, 19 nt, Artificial Sequence
  Description of Artificial Sequence: Synthetic oligonucleotide
gucucaccggggacugccc

SEQ ID NO: 2016004 - RNA, 19 nt, Artificial Sequence
  Description of Artificial Sequence: Synthetic oligonucleotide
caguagcuuacaauaccuu

SEQ ID NO: 2016005 - RNA, 19 nt, Artificial Sequence
  Description of Artificial Sequence: Synthetic oligonucleotide
gagucucaccggggacugc

SEQ ID NO: 2016006 - RNA, 19 nt, Artificial Sequence
  Description of Artificial Sequence: Synthetic oligonucleotide
gguuaccgcagccacugau

SEQ ID NO: 2016007 - RNA, 19 nt, Artificial Sequence
  Description of Artificial Sequence: Synthetic oligonucleotide
agccuuugagagagccgga

SEQ ID NO: 2016008 - RNA, 19 nt, Artificial Sequence
  Description of Artificial Sequence: Synthetic oligonucleotide
gcacagggauuggaucaag

SEQ ID NO: 2016009 - RNA, 19 nt, Artificial Sequence
  Description of Artificial Sequence: Synthetic oligonucleotide
ccuaggcuucucgaugcug

SEQ ID NO: 2016010 - RNA, 19 nt, Artificial Sequence
  Description of Artificial Sequence: Synthetic oligonucleotide
gccaagccgguaaacagcu

SEQ ID NO: 2016011 - RNA, 19 nt, Artificial Sequence
  Description of Artificial Sequence: Synthetic oligonucleotide
gauccgggccuggcagcac

SEQ ID NO: 2016012 - RNA, 19 nt, Artificial Sequence
  Description of Artificial Sequence: Synthetic oligonucleotide
ccgcagccacugaugagug

SEQ ID NO: 2016013 - RNA, 19 nt, Artificial Sequence
  Description of Artificial Sequence: Synthetic oligonucleotide
aucucgccaaagagaguuu

SEQ ID NO: 2016014 - RNA, 19 nt, Artificial Sequence
  Description of Artificial Sequence: Synthetic oligonucleotide
cacauuccugaaugugcau

SEQ ID NO: 2016015 - RNA, 19 nt, Artificial Sequence
  Description of Artificial Sequence: Synthetic oligonucleotide
gcuguugcucaaugucaua

SEQ ID NO: 2016016 - RNA, 19 nt, Artificial Sequence
  Description of Artificial Sequence: Synthetic oligonucleotide
caccggggacugcccaauc

SEQ ID NO: 2016017 - RNA, 19 nt, Artificial Sequence
  Description of Artificial Sequence: Synthetic oligonucleotide
ccacuacacacugcuucac

SEQ ID NO: 2016018 - RNA, 19 nt, Artificial Sequence
  Description of Artificial Sequence: Synthetic oligonucleotide
ggugagggacuagcucaac

SEQ ID NO: 2016019 - RNA, 19 nt, Artificial Sequence
  Description of Artificial Sequence: Synthetic oligonucleotide
ggcauacugcaggcgguuc

SEQ ID NO: 2016020 - RNA, 19 nt, Artificial Sequence
  Description of Artificial Sequence: Synthetic oligonucleotide
gcguuuguuaucugcuguu

SEQ ID NO: 2016021 - RNA, 19 nt, Artificial Sequence
  Description of Artificial Sequence: Synthetic oligonucleotide
cauuuucuucuggcagcua

SEQ ID NO: 2016022 - RNA, 19 nt, Artificial Sequence
  Description of Artificial Sequence: Synthetic oligonucleotide
cuauuccuuccuccaucau

SEQ ID NO: 2016023 - RNA, 19 nt, Artificial Sequence
  Description of Artificial Sequence: Synthetic oligonucleotide
ggggacgccauggcagauc

SEQ ID NO: 2016024 - RNA, 19 nt, Artificial Sequence
  Description of Artificial Sequence: Synthetic oligonucleotide
cgauacgauccagcugggc

SEQ ID NO: 2016025 - RNA, 19 nt, Artificial Sequence
  Description of Artificial Sequence: Synthetic oligonucleotide
ggggacugcccaauccucu

SEQ ID NO: 2016026 - RNA, 19 nt, Artificial Sequence
  Description of Artificial Sequence: Synthetic oligonucleotide
cgguucagaacgaagccau

SEQ ID NO: 2016027 - RNA, 19 nt, Artificial Sequence
  Description of Artificial Sequence: Synthetic oligonucleotide
cagcauugaggugcauagu

SEQ ID NO: 2016028 - RNA, 19 nt, Artificial Sequence
  Description of Artificial Sequence: Synthetic oligonucleotide
cgaucaccaccccgccugc

SEQ ID NO: 2016029 - RNA, 19 nt, Artificial Sequence
  Description of Artificial Sequence: Synthetic oligonucleotide
auggcgcccucuacugcuu

SEQ ID NO: 2016030 - RNA, 19 nt, Artificial Sequence
  Description of Artificial Sequence: Synthetic oligonucleotide
gcaccuggugcuucaguuu

SEQ ID NO: 2016031 - RNA, 19 nt, Artificial Sequence
  Description of Artificial Sequence: Synthetic oligonucleotide
gucgucccuccauuuucuu

SEQ ID NO: 2016032 - RNA, 19 nt, Artificial Sequence
  Description of Artificial Sequence: Synthetic oligonucleotide
ggucguuaggagacacuau

SEQ ID NO: 2016033 - RNA, 19 nt, Artificial Sequence
  Description of Artificial Sequence: Synthetic oligonucleotide
cucugcacucaaggagccu

SEQ ID NO: 2016034 - RNA, 19 nt, Artificial Sequence
  Description of Artificial Sequence: Synthetic oligonucleotide
ccggggacugcccaauccu

SEQ ID NO: 2016035 - RNA, 19 nt, Artificial Sequence
  Description of Artificial Sequence: Synthetic oligonucleotide
cacgugugccaagccggua

SEQ ID NO: 2016036 - RNA, 19 nt, Artificial Sequence
  Description of Artificial Sequence: Synthetic oligonucleotide
ggcauagguucuguccauu

SEQ ID NO: 2016037 - RNA, 19 nt, Artificial Sequence
  Description of Artificial Sequence: Synthetic oligonucleotide
cgcuucauuccaucacugu

SEQ ID NO: 2016038 - RNA, 19 nt, Artificial Sequence
  Description of Artificial Sequence: Synthetic oligonucleotide
gggauuggaucaagagcuu

SEQ ID NO: 2016039 - RNA, 19 nt, Artificial Sequence
  Description of Artificial Sequence: Synthetic oligonucleotide
cgugugccaagccgguaaa

SEQ ID NO: 2016040 - RNA, 19 nt, Artificial Sequence
  Description of Artificial Sequence: Synthetic oligonucleotide
gccucgcugaugacggcau

SEQ ID NO: 2016041 - RNA, 19 nt, Artificial Sequence
  Description of Artificial Sequence: Synthetic oligonucleotide
ccucgcugaugacggcaua

SEQ ID NO: 2016042 - RNA, 19 nt, Artificial Sequence
  Description of Artificial Sequence: Synthetic oligonucleotide
gcucaaccagugggacaua

SEQ ID NO: 2016043 - RNA, 19 nt, Artificial Sequence
  Description of Artificial Sequence: Synthetic oligonucleotide
ccaagccgguaaacagcuu

SEQ ID NO: 2016044 - RNA, 19 nt, Artificial Sequence
  Description of Artificial Sequence: Synthetic oligonucleotide
aagaacucuuacuaaaucc

SEQ ID NO: 2016045 - RNA, 19 nt, Artificial Sequence
  Description of Artificial Sequence: Synthetic oligonucleotide
uaugauuucugacugaagc

SEQ ID NO: 2016046 - RNA, 19 nt, Artificial Sequence
  Description of Artificial Sequence: Synthetic oligonucleotide
acaucucacauuuauaugg

SEQ ID NO: 2016047 - RNA, 19 nt, Artificial Sequence
  Description of Artificial Sequence: Synthetic oligonucleotide
aagccuuucccacaggugc

SEQ ID NO: 2016048 - RNA, 19 nt, Artificial Sequence
  Description of Artificial Sequence: Synthetic oligonucleotide
ucugaugaucuuuugaccg

SEQ ID NO: 2016049 - RNA, 19 nt, Artificial Sequence
  Description of Artificial Sequence: Synthetic oligonucleotide
aacacacaacuuuugaccg

SEQ ID NO: 2016050 - RNA, 19 nt, Artificial Sequence
  Description of Artificial Sequence: Synthetic oligonucleotide
aguuacauccauuucuacc

SEQ ID NO: 2016051 - RNA, 19 nt, Artificial Sequence
  Description of Artificial Sequence: Synthetic oligonucleotide
uuagaguuccaucugaagc

SEQ ID NO: 2016052 - RNA, 19 nt, Artificial Sequence
  Description of Artificial Sequence: Synthetic oligonucleotide
auuguccacauuuauaggg

SEQ ID NO: 2016053 - RNA, 19 nt, Artificial Sequence
  Description of Artificial Sequence: Synthetic oligonucleotide
guuacauccauuucuaccc

SEQ ID NO: 2016054 - RNA, 19 nt, Artificial Sequence
  Description of Artificial Sequence: Synthetic oligonucleotide
uucacuuggagauacaaac

SEQ ID NO: 2016055 - RNA, 19 nt, Artificial Sequence
  Description of Artificial Sequence: Synthetic oligonucleotide
ucugauuagacacauuccu

SEQ ID NO: 2016056 - RNA, 19 nt, Artificial Sequence
  Description of Artificial Sequence: Synthetic oligonucleotide
acaccucacaaauauaugg

SEQ ID NO: 2016057 - RNA, 19 nt, Artificial Sequence
  Description of Artificial Sequence: Synthetic oligonucleotide
acucuuacuaaauccuucc

SEQ ID NO: 2016058 - RNA, 19 nt, Artificial Sequence
  Description of Artificial Sequence: Synthetic oligonucleotide
aauccuuccgugcacaucu

SEQ ID NO: 2016059 - RNA, 19 nt, Artificial Sequence
  Description of Artificial Sequence: Synthetic oligonucleotide
uuuuacucugguauggacc

SEQ ID NO: 2016060 - RNA, 19 nt, Artificial Sequence
  Description of Artificial Sequence: Synthetic oligonucleotide
ucugguauggacccugugg

SEQ ID NO: 2016061 - RNA, 19 nt, Artificial Sequence
  Description of Artificial Sequence: Synthetic oligonucleotide
aauuugaagauuagaguuc

SEQ ID NO: 2016062 - RNA, 19 nt, Artificial Sequence
  Description of Artificial Sequence: Synthetic oligonucleotide
aagguaugauuucugacug

SEQ ID NO: 2016063 - RNA, 19 nt, Artificial Sequence
  Description of Artificial Sequence: Synthetic oligonucleotide
auuagacacauuccuauuc

SEQ ID NO: 2016064 - RNA, 19 nt, Artificial Sequence
  Description of Artificial Sequence: Synthetic oligonucleotide
accguauggaugcuuaugc

SEQ ID NO: 2016065 - RNA, 19 nt, Artificial Sequence
  Description of Artificial Sequence: Synthetic oligonucleotide
uuuacucugguauggaccc

SEQ ID NO: 2016066 - RNA, 19 nt, Artificial Sequence
  Description of Artificial Sequence: Synthetic oligonucleotide
uuaagaacccaucugugac

SEQ ID NO: 2016067 - RNA, 19 nt, Artificial Sequence
  Description of Artificial Sequence: Synthetic oligonucleotide
guuauagagagucucuucc

SEQ ID NO: 2016068 - RNA, 19 nt, Artificial Sequence
  Description of Artificial Sequence: Synthetic oligonucleotide
uaugcucucugacugaagc

SEQ ID NO: 2016069 - RNA, 19 nt, Artificial Sequence
  Description of Artificial Sequence: Synthetic oligonucleotide
uugcugauggccuugaaca

SEQ ID NO: 2016070 - RNA, 19 nt, Artificial Sequence
  Description of Artificial Sequence: Synthetic oligonucleotide
cuuacuaaauccuuccgug

SEQ ID NO: 2016071 - RNA, 19 nt, Artificial Sequence
  Description of Artificial Sequence: Synthetic oligonucleotide
gauguuaagaacccaucug

SEQ ID NO: 2016072 - RNA, 19 nt, Artificial Sequence
  Description of Artificial Sequence: Synthetic oligonucleotide
ugugaugugccugaaggcg

SEQ ID NO: 2016073 - RNA, 19 nt, Artificial Sequence
  Description of Artificial Sequence: Synthetic oligonucleotide
ugugcuuggagacaagaac

SEQ ID NO: 2016074 - RNA, 19 nt, Artificial Sequence
  Description of Artificial Sequence: Synthetic oligonucleotide
ucuuacuaaauccuuccgu

SEQ ID NO: 2016075 - RNA, 19 nt, Artificial Sequence
  Description of Artificial Sequence: Synthetic oligonucleotide
uuuucugcccgccacaccu

SEQ ID NO: 2016076 - RNA, 19 nt, Artificial Sequence
  Description of Artificial Sequence: Synthetic oligonucleotide
uuauaugguuuuacucugg

SEQ ID NO: 2016077 - RNA, 19 nt, Artificial Sequence
  Description of Artificial Sequence: Synthetic oligonucleotide
auguuaagaacccaucugu

SEQ ID NO: 2016078 - RNA, 19 nt, Artificial Sequence
  Description of Artificial Sequence: Synthetic oligonucleotide
aagugguuaccacaugcag

SEQ ID NO: 2016079 - RNA, 19 nt, Artificial Sequence
  Description of Artificial Sequence: Synthetic oligonucleotide
uuagacacauuccuauucu

SEQ ID NO: 2016080 - RNA, 19 nt, Artificial Sequence
  Description of Artificial Sequence: Synthetic oligonucleotide
gaagauuagaguuccaucu

SEQ ID NO: 2016081 - RNA, 19 nt, Artificial Sequence
  Description of Artificial Sequence: Synthetic oligonucleotide
uguagauaugcucucugac

SEQ ID NO: 2016082 - RNA, 19 nt, Artificial Sequence
  Description of Artificial Sequence: Synthetic oligonucleotide
uauauggucucucuccaga

SEQ ID NO: 2016083 - RNA, 19 nt, Artificial Sequence
  Description of Artificial Sequence: Synthetic oligonucleotide
cuugcagguagaaacuccg

SEQ ID NO: 2016084 - RNA, 19 nt, Artificial Sequence
  Description of Artificial Sequence: Synthetic oligonucleotide
uauaguuucuccucagcac

SEQ ID NO: 2016085 - RNA, 19 nt, Artificial Sequence
  Description of Artificial Sequence: Synthetic oligonucleotide
aacuuuugaccgaagcugg

SEQ ID NO: 2016086 - RNA, 19 nt, Artificial Sequence
  Description of Artificial Sequence: Synthetic oligonucleotide
auauaguuucuccucagca

SEQ ID NO: 2016087 - RNA, 19 nt, Artificial Sequence
  Description of Artificial Sequence: Synthetic oligonucleotide
uguuaagaacccaucugug

SEQ ID NO: 2016088 - RNA, 19 nt, Artificial Sequence
  Description of Artificial Sequence: Synthetic oligonucleotide
aaguccuggaaaugugggg

SEQ ID NO: 2016089 - RNA, 19 nt, Artificial Sequence
  Description of Artificial Sequence: Synthetic oligonucleotide
ugauuagacacauuccuau

SEQ ID NO: 2016090 - RNA, 19 nt, Artificial Sequence
  Description of Artificial Sequence: Synthetic oligonucleotide
uagagagucucuuccacag

SEQ ID NO: 2016091 - RNA, 19 nt, Artificial Sequence
  Description of Artificial Sequence: Synthetic oligonucleotide
acacaucucacauuuauau

SEQ ID NO: 2016092 - RNA, 19 nt, Artificial Sequence
  Description of Artificial Sequence: Synthetic oligonucleotide
uacuaaauccuuccgugca

SEQ ID NO: 2016093 - RNA, 19 nt, Artificial Sequence
  Description of Artificial Sequence: Synthetic oligonucleotide
agaguugaggccuugcuga

SEQ ID NO: 2016094 - RNA, 19 nt, Artificial Sequence
  Description of Artificial Sequence: Synthetic oligonucleotide
agcacggaugaucucauuc

SEQ ID NO: 2016095 - RNA, 19 nt, Artificial Sequence
  Description of Artificial Sequence: Synthetic oligonucleotide
acaacuuuugaccgaagcu

SEQ ID NO: 2016096 - RNA, 19 nt, Artificial Sequence
  Description of Artificial Sequence: Synthetic oligonucleotide
acuaaauccuuccgugcac

SEQ ID NO: 2016097 - RNA, 19 nt, Artificial Sequence
  Description of Artificial Sequence: Synthetic oligonucleotide
agugugugaaaucuuuucu

SEQ ID NO: 2016098 - RNA, 19 nt, Artificial Sequence
  Description of Artificial Sequence: Synthetic oligonucleotide
uuuugaccgaagcugguac

SEQ ID NO: 2016099 - RNA, 19 nt, Artificial Sequence
  Description of Artificial Sequence: Synthetic oligonucleotide
uauagagagucucuuccac

SEQ ID NO: 2016100 - RNA, 19 nt, Artificial Sequence
  Description of Artificial Sequence: Synthetic oligonucleotide
accucacaaauauaugguc

SEQ ID NO: 2016101 - RNA, 19 nt, Artificial Sequence
  Description of Artificial Sequence: Synthetic oligonucleotide
acaaauauauggucucucu

SEQ ID NO: 2016102 - RNA, 19 nt, Artificial Sequence
  Description of Artificial Sequence: Synthetic oligonucleotide
uggauauaguuucuccuca

SEQ ID NO: 2016103 - RNA, 19 nt, Artificial Sequence
  Description of Artificial Sequence: Synthetic oligonucleotide
uuacuaaauccuuccgugc

SEQ ID NO: 2016104 - RNA, 19 nt, Artificial Sequence
  Description of Artificial Sequence: Synthetic oligonucleotide
gauauaguuucuccucagc

SEQ ID NO: 2016105 - RNA, 19 nt, Artificial Sequence
  Description of Artificial Sequence: Synthetic oligonucleotide
agacacauuccuauucucc

SEQ ID NO: 2016106 - RNA, 19 nt, Artificial Sequence
  Description of Artificial Sequence: Synthetic oligonucleotide
auuagaguuccaucugaag

SEQ ID NO: 2016107 - RNA, 19 nt, Artificial Sequence
  Description of Artificial Sequence: Synthetic oligonucleotide
uucugaugaucuuuugacc

SEQ ID NO: 2016108 - RNA, 19 nt, Artificial Sequence
  Description of Artificial Sequence: Synthetic oligonucleotide
ugaucuuuugaccgggaac

SEQ ID NO: 2016109 - RNA, 19 nt, Artificial Sequence
  Description of Artificial Sequence: Synthetic oligonucleotide
gauacaaacucugauuaga

SEQ ID NO: 2016110 - RNA, 19 nt, Artificial Sequence
  Description of Artificial Sequence: Synthetic oligonucleotide
ugaagauuagaguuccauc

SEQ ID NO: 2016111 - RNA, 19 nt, Artificial Sequence
  Description of Artificial Sequence: Synthetic oligonucleotide
gaagguaugauuucugacu

SEQ ID NO: 2016112 - RNA, 19 nt, Artificial Sequence
  Description of Artificial Sequence: Synthetic oligonucleotide
uauaugguuuuacucuggu

SEQ ID NO: 2016113 - RNA, 19 nt, Artificial Sequence
  Description of Artificial Sequence: Synthetic oligonucleotide
cucucugaugagaaguugc

SEQ ID NO: 2016114 - RNA, 19 nt, Artificial Sequence
  Description of Artificial Sequence: Synthetic oligonucleotide
auacaaacucugauuagac

SEQ ID NO: 2016115 - RNA, 19 nt, Artificial Sequence
  Description of Artificial Sequence: Synthetic oligonucleotide
uugaagguaugauuucuga

SEQ ID NO: 2016116 - RNA, 19 nt, Artificial Sequence
  Description of Artificial Sequence: Synthetic oligonucleotide
uuauagagagucucuucca

SEQ ID NO: 2016117 - RNA, 19 nt, Artificial Sequence
  Description of Artificial Sequence: Synthetic oligonucleotide
agauacaaacucugauuag

SEQ ID NO: 2016118 - RNA, 19 nt, Artificial Sequence
  Description of Artificial Sequence: Synthetic oligonucleotide
ugguuuuacucugguaugg

SEQ ID NO: 2016119 - RNA, 19 nt, Artificial Sequence
  Description of Artificial Sequence: Synthetic oligonucleotide
acugaaagguuucucucug

SEQ ID NO: 2016120 - RNA, 19 nt, Artificial Sequence
  Description of Artificial Sequence: Synthetic oligonucleotide
cacaugcaggguuauagag

SEQ ID NO: 2016121 - RNA, 19 nt, Artificial Sequence
  Description of Artificial Sequence: Synthetic oligonucleotide
uacccuguuuacugaaagg

SEQ ID NO: 2016122 - RNA, 19 nt, Artificial Sequence
  Description of Artificial Sequence: Synthetic oligonucleotide
uggagauacaaacucugau

SEQ ID NO: 2016123 - RNA, 19 nt, Artificial Sequence
  Description of Artificial Sequence: Synthetic oligonucleotide
uuccacaggaacucgguga

SEQ ID NO: 2016124 - RNA, 19 nt, Artificial Sequence
  Description of Artificial Sequence: Synthetic oligonucleotide
uacaaacucugauuagaca

SEQ ID NO: 2016125 - RNA, 19 nt, Artificial Sequence
  Description of Artificial Sequence: Synthetic oligonucleotide
uuguccacauuuauagggu

SEQ ID NO: 2016126 - RNA, 19 nt, Artificial Sequence
  Description of Artificial Sequence: Synthetic oligonucleotide
gaaacuccgacugaagcac

SEQ ID NO: 2016127 - RNA, 19 nt, Artificial Sequence
  Description of Artificial Sequence: Synthetic oligonucleotide
uaguuucuccucagcacgg

SEQ ID NO: 2016128 - RNA, 19 nt, Artificial Sequence
  Description of Artificial Sequence: Synthetic oligonucleotide
agauuagaguuccaucuga

SEQ ID NO: 2016129 - RNA, 19 nt, Artificial Sequence
  Description of Artificial Sequence: Synthetic oligonucleotide
gaugaauuugaagauuaga

SEQ ID NO: 2016130 - RNA, 19 nt, Artificial Sequence
  Description of Artificial Sequence: Synthetic oligonucleotide
cagguagaaacuccgacug

SEQ ID NO: 2016131 - RNA, 19 nt, Artificial Sequence
  Description of Artificial Sequence: Synthetic oligonucleotide
ugacgagggucaaacuggg

SEQ ID NO: 2016132 - RNA, 19 nt, Artificial Sequence
  Description of Artificial Sequence: Synthetic oligonucleotide
aaaucuuuucugcccgcca

SEQ ID NO: 2016133 - RNA, 19 nt, Artificial Sequence
  Description of Artificial Sequence: Synthetic oligonucleotide
agaguuccaucugaagccc

SEQ ID NO: 2016134 - RNA, 19 nt, Artificial Sequence
  Description of Artificial Sequence: Synthetic oligonucleotide
uuacugaaagguuucucuc

SEQ ID NO: 2016135 - RNA, 19 nt, Artificial Sequence
  Description of Artificial Sequence: Synthetic oligonucleotide
ugcagguagaaacuccgac

SEQ ID NO: 2016136 - RNA, 19 nt, Artificial Sequence
  Description of Artificial Sequence: Synthetic oligonucleotide
uacugaaagguuucucucu

SEQ ID NO: 2016137 - RNA, 19 nt, Artificial Sequence
  Description of Artificial Sequence: Synthetic oligonucleotide
gauccucugaugugcuugg

SEQ ID NO: 2016138 - RNA, 19 nt, Artificial Sequence
  Description of Artificial Sequence: Synthetic oligonucleotide
aagaacccaucugugacug

SEQ ID NO: 2016139 - RNA, 19 nt, Artificial Sequence
  Description of Artificial Sequence: Synthetic oligonucleotide
ugaugugccugaaggcggg

SEQ ID NO: 2016140 - RNA, 19 nt, Artificial Sequence
  Description of Artificial Sequence: Synthetic oligonucleotide
ugguggauguuaagaaccc

SEQ ID NO: 2016141 - RNA, 19 nt, Artificial Sequence
  Description of Artificial Sequence: Synthetic oligonucleotide
aagguuucucucugaugag

SEQ ID NO: 2016142 - RNA, 19 nt, Artificial Sequence
  Description of Artificial Sequence: Synthetic oligonucleotide
cuugaacacacaacuuuug

SEQ ID NO: 2016143 - RNA, 19 nt, Artificial Sequence
  Description of Artificial Sequence: Synthetic oligonucleotide
cauuguccacauuuauagg

SEQ ID NO: 2016144 - RNA, 19 nt, Artificial Sequence
  Description of Artificial Sequence: Synthetic oligonucleotide
uuggagauacaaacucuga

SEQ ID NO: 2016145 - RNA, 19 nt, Artificial Sequence
  Description of Artificial Sequence: Synthetic oligonucleotide
gacucugguggcuuugaag

SEQ ID NO: 2016146 - RNA, 19 nt, Artificial Sequence
  Description of Artificial Sequence: Synthetic oligonucleotide
accacaugcaggguuauag

SEQ ID NO: 2016147 - RNA, 19 nt, Artificial Sequence
  Description of Artificial Sequence: Synthetic oligonucleotide
uuguagauaugcucucuga

SEQ ID NO: 2016148 - RNA, 19 nt, Artificial Sequence
  Description of Artificial Sequence: Synthetic oligonucleotide
cuggauauaguuucuccuc

SEQ ID NO: 2016149 - RNA, 19 nt, Artificial Sequence
  Description of Artificial Sequence: Synthetic oligonucleotide
gcugguaccguauggaugc

SEQ ID NO: 2016150 - RNA, 19 nt, Artificial Sequence
  Description of Artificial Sequence: Synthetic oligonucleotide
cucucaugggccaggagag

SEQ ID NO: 2016151 - RNA, 19 nt, Artificial Sequence
  Description of Artificial Sequence: Synthetic oligonucleotide
gugacgagggucaaacugg

SEQ ID NO: 2016152 - RNA, 19 nt, Artificial Sequence
  Description of Artificial Sequence: Synthetic oligonucleotide
guauggaugcuuaugcggc

SEQ ID NO: 2016153 - RNA, 19 nt, Artificial Sequence
  Description of Artificial Sequence: Synthetic oligonucleotide
caaauauauggucucucuc

SEQ ID NO: 2016154 - RNA, 19 nt, Artificial Sequence
  Description of Artificial Sequence: Synthetic oligonucleotide
augguuuuacucugguaug

SEQ ID NO: 2016155 - RNA, 19 nt, Artificial Sequence
  Description of Artificial Sequence: Synthetic oligonucleotide
aggugcugcauuugugugg

SEQ ID NO: 2016156 - RNA, 19 nt, Artificial Sequence
  Description of Artificial Sequence: Synthetic oligonucleotide
uaugcggcuguucccuggg

SEQ ID NO: 2016157 - RNA, 19 nt, Artificial Sequence
  Description of Artificial Sequence: Synthetic oligonucleotide
cucuuacuaaauccuuccg

SEQ ID NO: 2016158 - RNA, 19 nt, Artificial Sequence
  Description of Artificial Sequence: Synthetic oligonucleotide
cacaucucacauugguacg

SEQ ID NO: 2016159 - RNA, 19 nt, Artificial Sequence
  Description of Artificial Sequence: Synthetic oligonucleotide
uggugggcaugcaaaguag

SEQ ID NO: 2016160 - RNA, 19 nt, Artificial Sequence
  Description of Artificial Sequence: Synthetic oligonucleotide
guugaggccuugcugaaac

SEQ ID NO: 2016161 - RNA, 19 nt, Artificial Sequence
  Description of Artificial Sequence: Synthetic oligonucleotide
acaucucacauugguacgg

SEQ ID NO: 2016162 - RNA, 19 nt, Artificial Sequence
  Description of Artificial Sequence: Synthetic oligonucleotide
auagagagucucuuccaca

SEQ ID NO: 2016163 - RNA, 19 nt, Artificial Sequence
  Description of Artificial Sequence: Synthetic oligonucleotide
cuacccuguuuacugaaag

SEQ ID NO: 2016164 - RNA, 19 nt, Artificial Sequence
  Description of Artificial Sequence: Synthetic oligonucleotide
uggauguuaagaacccauc

SEQ ID NO: 2016165 - RNA, 19 nt, Artificial Sequence
  Description of Artificial Sequence: Synthetic oligonucleotide
acgagggucaaacugggaa

SEQ ID NO: 2016166 - RNA, 19 nt, Artificial Sequence
  Description of Artificial Sequence: Synthetic oligonucleotide
ggugacgagggucaaacug

SEQ ID NO: 2016167 - RNA, 19 nt, Artificial Sequence
  Description of Artificial Sequence: Synthetic oligonucleotide
uuaugcggcuguucccugg

SEQ ID NO: 2016168 - RNA, 19 nt, Artificial Sequence
  Description of Artificial Sequence: Synthetic oligonucleotide
aaugaagacucugguggcu

SEQ ID NO: 2016169 - RNA, 19 nt, Artificial Sequence
  Description of Artificial Sequence: Synthetic oligonucleotide
uuggagacaagaacucuua

SEQ ID NO: 2016170 - RNA, 19 nt, Artificial Sequence
  Description of Artificial Sequence: Synthetic oligonucleotide
ucuuuugaccgggaacucc

SEQ ID NO: 2016171 - RNA, 19 nt, Artificial Sequence
  Description of Artificial Sequence: Synthetic oligonucleotide
gaucuuuugaccgggaacu

SEQ ID NO: 2016172 - RNA, 19 nt, Artificial Sequence
  Description of Artificial Sequence: Synthetic oligonucleotide
ugcuuggagacaagaacuc

SEQ ID NO: 2016173 - RNA, 19 nt, Artificial Sequence
  Description of Artificial Sequence: Synthetic oligonucleotide
guugcugauggccuugaac

SEQ ID NO: 2016174 - RNA, 19 nt, Artificial Sequence
  Description of Artificial Sequence: Synthetic oligonucleotide
cuguuuacugaaagguuuc

SEQ ID NO: 2016175 - RNA, 19 nt, Artificial Sequence
  Description of Artificial Sequence: Synthetic oligonucleotide
uuacauccauuucuacccu

SEQ ID NO: 2016176 - RNA, 19 nt, Artificial Sequence
  Description of Artificial Sequence: Synthetic oligonucleotide
augcaaaguaggcacucug

SEQ ID NO: 2016177 - RNA, 19 nt, Artificial Sequence
  Description of Artificial Sequence: Synthetic oligonucleotide
guuuuacucugguauggac

SEQ ID NO: 2016178 - RNA, 19 nt, Artificial Sequence
  Description of Artificial Sequence: Synthetic oligonucleotide
aaacucugauuagacacau

SEQ ID NO: 2016179 - RNA, 19 nt, Artificial Sequence
  Description of Artificial Sequence: Synthetic oligonucleotide
uuucuacccuguuuacuga

SEQ ID NO: 2016180 - RNA, 19 nt, Artificial Sequence
  Description of Artificial Sequence: Synthetic oligonucleotide
cucauucacuuggagauac

SEQ ID NO: 2016181 - RNA, 19 nt, Artificial Sequence
  Description of Artificial Sequence: Synthetic oligonucleotide
cagugugugaaaucuuuuc

SEQ ID NO: 2016182 - RNA, 19 nt, Artificial Sequence
  Description of Artificial Sequence: Synthetic oligonucleotide
cucacauugguacgguuuc

SEQ ID NO: 2016183 - RNA, 19 nt, Artificial Sequence
  Description of Artificial Sequence: Synthetic oligonucleotide
acccuguuuacugaaaggu

SEQ ID NO: 2016184 - RNA, 19 nt, Artificial Sequence
  Description of Artificial Sequence: Synthetic oligonucleotide
gaaaucuuuucugcccgcc

SEQ ID NO: 2016185 - RNA, 19 nt, Artificial Sequence
  Description of Artificial Sequence: Synthetic oligonucleotide
uuugaagauuagaguucca

SEQ ID NO: 2016186 - RNA, 19 nt, Artificial Sequence
  Description of Artificial Sequence: Synthetic oligonucleotide
gguauggacccuguggugg

SEQ ID NO: 2016187 - RNA, 19 nt, Artificial Sequence
  Description of Artificial Sequence: Synthetic oligonucleotide
aacagugugugaaaucuuu

SEQ ID NO: 2016188 - RNA, 19 nt, Artificial Sequence
  Description of Artificial Sequence: Synthetic oligonucleotide
cugugaugugccugaaggc

SEQ ID NO: 2016189 - RNA, 19 nt, Artificial Sequence
  Description of Artificial Sequence: Synthetic oligonucleotide
uggagacaagaacucuuac

SEQ ID NO: 2016190 - RNA, 19 nt, Artificial Sequence
  Description of Artificial Sequence: Synthetic oligonucleotide
uuuugaccgggaacuccag

SEQ ID NO: 2016191 - RNA, 19 nt, Artificial Sequence
  Description of Artificial Sequence: Synthetic oligonucleotide
acacaccucacaaauauau

SEQ ID NO: 2016192 - RNA, 19 nt, Artificial Sequence
  Description of Artificial Sequence: Synthetic oligonucleotide
ugcacaucucacauuggua

SEQ ID NO: 2016193 - RNA, 19 nt, Artificial Sequence
  Description of Artificial Sequence: Synthetic oligonucleotide
cuuuugaccgggaacucca

SEQ ID NO: 2016194 - RNA, 19 nt, Artificial Sequence
  Description of Artificial Sequence: Synthetic oligonucleotide
agacaagaacucuuacuaa

SEQ ID NO: 2016195 - RNA, 19 nt, Artificial Sequence
  Description of Artificial Sequence: Synthetic oligonucleotide
ugggcaugcaaaguaggca

SEQ ID NO: 2016196 - RNA, 19 nt, Artificial Sequence
  Description of Artificial Sequence: Synthetic oligonucleotide
uauggaugcuuaugcggcu

SEQ ID NO: 2016197 - RNA, 19 nt, Artificial Sequence
  Description of Artificial Sequence: Synthetic oligonucleotide
cugaaggcgggaacucugg

SEQ ID NO: 2016198 - RNA, 19 nt, Artificial Sequence
  Description of Artificial Sequence: Synthetic oligonucleotide
cacaccucacaaauauaug

SEQ ID NO: 2016199 - RNA, 19 nt, Artificial Sequence
  Description of Artificial Sequence: Synthetic oligonucleotide
uugaccgggaacuccaguu

SEQ ID NO: 2016200 - RNA, 19 nt, Artificial Sequence
  Description of Artificial Sequence: Synthetic oligonucleotide
guagauaugcucucugacu

SEQ ID NO: 2016201 - RNA, 19 nt, Artificial Sequence
  Description of Artificial Sequence: Synthetic oligonucleotide
ugggaugcacuguugggaa

SEQ ID NO: 2016202 - RNA, 19 nt, Artificial Sequence
  Description of Artificial Sequence: Synthetic oligonucleotide
ucggugacgagggucaaac

SEQ ID NO: 2016203 - RNA, 19 nt, Artificial Sequence
  Description of Artificial Sequence: Synthetic oligonucleotide
ugaaggcgggaacucuggc

SEQ ID NO: 2016204 - RNA, 19 nt, Artificial Sequence
  Description of Artificial Sequence: Synthetic oligonucleotide
uguuuacugaaagguuucu

SEQ ID NO: 2016205 - RNA, 19 nt, Artificial Sequence
  Description of Artificial Sequence: Synthetic oligonucleotide
ucugaugugcuuggagaca

SEQ ID NO: 2016206 - RNA, 19 nt, Artificial Sequence
  Description of Artificial Sequence: Synthetic oligonucleotide
uuugaccgggaacuccagu

SEQ ID NO: 2016207 - RNA, 19 nt, Artificial Sequence
  Description of Artificial Sequence: Synthetic oligonucleotide
cguauggaugcuuaugcgg

SEQ ID NO: 2016208 - RNA, 19 nt, Artificial Sequence
  Description of Artificial Sequence: Synthetic oligonucleotide
uagacacauuccuauucuc

SEQ ID NO: 2016209 - RNA, 19 nt, Artificial Sequence
  Description of Artificial Sequence: Synthetic oligonucleotide
ugcuuaugcggcuguuccc

SEQ ID NO: 2016210 - RNA, 19 nt, Artificial Sequence
  Description of Artificial Sequence: Synthetic oligonucleotide
ggucaaacugggaacagug

SEQ ID NO: 2016211 - RNA, 19 nt, Artificial Sequence
  Description of Artificial Sequence: Synthetic oligonucleotide
uguggacccugugaugugc

SEQ ID NO: 2016212 - RNA, 19 nt, Artificial Sequence
  Description of Artificial Sequence: Synthetic oligonucleotide
uucuacccuguuuacugaa

SEQ ID NO: 2016213 - RNA, 19 nt, Artificial Sequence
  Description of Artificial Sequence: Synthetic oligonucleotide
uaccguauggaugcuuaug

SEQ ID NO: 2016214 - RNA, 19 nt, Artificial Sequence
  Description of Artificial Sequence: Synthetic oligonucleotide
caggaacucggugacgagg

SEQ ID NO: 2016215 - RNA, 19 nt, Artificial Sequence
  Description of Artificial Sequence: Synthetic oligonucleotide
uugcagguagaaacuccga

SEQ ID NO: 2016216 - RNA, 19 nt, Artificial Sequence
  Description of Artificial Sequence: Synthetic oligonucleotide
cacuguugggaaguccugg

SEQ ID NO: 2016217 - RNA, 19 nt, Artificial Sequence
  Description of Artificial Sequence: Synthetic oligonucleotide
cacggaugaucucauucac

SEQ ID NO: 2016218 - RNA, 19 nt, Artificial Sequence
  Description of Artificial Sequence: Synthetic oligonucleotide
caggguuauagagagucuc

SEQ ID NO: 2016219 - RNA, 19 nt, Artificial Sequence
  Description of Artificial Sequence: Synthetic oligonucleotide
acaagaacucuuacuaaau

SEQ ID NO: 2016220 - RNA, 19 nt, Artificial Sequence
  Description of Artificial Sequence: Synthetic oligonucleotide
gaccgggaacuccaguuac

SEQ ID NO: 2016221 - RNA, 19 nt, Artificial Sequence
  Description of Artificial Sequence: Synthetic oligonucleotide
ucauucacuuggagauaca

SEQ ID NO: 2016222 - RNA, 19 nt, Artificial Sequence
  Description of Artificial Sequence: Synthetic oligonucleotide
augaucuuuugaccgggaa

SEQ ID NO: 2016223 - RNA, 19 nt, Artificial Sequence
  Description of Artificial Sequence: Synthetic oligonucleotide
gauuagaguuccaucugaa

SEQ ID NO: 2016224 - RNA, 19 nt, Artificial Sequence
  Description of Artificial Sequence: Synthetic oligonucleotide
uguccacauuuauaggguu

SEQ ID NO: 2016225 - RNA, 19 nt, Artificial Sequence
  Description of Artificial Sequence: Synthetic oligonucleotide
aggagaguugaggccuugc

SEQ ID NO: 2016226 - RNA, 19 nt, Artificial Sequence
  Description of Artificial Sequence: Synthetic oligonucleotide
gaaguugcugauggccuug

SEQ ID NO: 2016227 - RNA, 19 nt, Artificial Sequence
  Description of Artificial Sequence: Synthetic oligonucleotide
acacacaacuuuugaccga

SEQ ID NO: 2016228 - RNA, 19 nt, Artificial Sequence
  Description of Artificial Sequence: Synthetic oligonucleotide
gguuauagagagucucuuc

SEQ ID NO: 2016229 - RNA, 19 nt, Artificial Sequence
  Description of Artificial Sequence: Synthetic oligonucleotide
ucuuuucugcccgccacac

SEQ ID NO: 2016230 - RNA, 19 nt, Artificial Sequence
  Description of Artificial Sequence: Synthetic oligonucleotide
auaugguuuuacucuggua

SEQ ID NO: 2016231 - RNA, 19 nt, Artificial Sequence
  Description of Artificial Sequence: Synthetic oligonucleotide
ugaccgggaacuccaguua

SEQ ID NO: 2016232 - RNA, 19 nt, Artificial Sequence
  Description of Artificial Sequence: Synthetic oligonucleotide
augcacuguugggaagucc

SEQ ID NO: 2016233 - RNA, 19 nt, Artificial Sequence
  Description of Artificial Sequence: Synthetic oligonucleotide
gagggucaaacugggaaca

SEQ ID NO: 2016234 - RNA, 19 nt, Artificial Sequence
  Description of Artificial Sequence: Synthetic oligonucleotide
cucugguggauguuaagaa

SEQ ID NO: 2016235 - RNA, 19 nt, Artificial Sequence
  Description of Artificial Sequence: Synthetic oligonucleotide
aacccgcugaugaauuuga

SEQ ID NO: 2016236 - RNA, 19 nt, Artificial Sequence
  Description of Artificial Sequence: Synthetic oligonucleotide
ucagcacggaugaucucau

SEQ ID NO: 2016237 - RNA, 19 nt, Artificial Sequence
  Description of Artificial Sequence: Synthetic oligonucleotide
agguaugauuucugacuga

SEQ ID NO: 2016238 - RNA, 19 nt, Artificial Sequence
  Description of Artificial Sequence: Synthetic oligonucleotide
gaugcuuaugcggcuguuc

SEQ ID NO: 2016239 - RNA, 19 nt, Artificial Sequence
  Description of Artificial Sequence: Synthetic oligonucleotide
uucccugggaugcacuguu

SEQ ID NO: 2016240 - RNA, 19 nt, Artificial Sequence
  Description of Artificial Sequence: Synthetic oligonucleotide
uaaauccuuccgugcacau

SEQ ID NO: 2016241 - RNA, 19 nt, Artificial Sequence
  Description of Artificial Sequence: Synthetic oligonucleotide
gaagcacuucccacacucc

SEQ ID NO: 2016242 - RNA, 19 nt, Artificial Sequence
  Description of Artificial Sequence: Synthetic oligonucleotide
aucuuuugaccgggaacuc

SEQ ID NO: 2016243 - RNA, 19 nt, Artificial Sequence
  Description of Artificial Sequence: Synthetic oligonucleotide
cugauuagacacauuccua

SEQ ID NO: 2016244 - RNA, 19 nt, Artificial Sequence
  Description of Artificial Sequence: Synthetic oligonucleotide
cucagcacggaugaucuca

SEQ ID NO: 2016245 - RNA, 19 nt, Artificial Sequence
  Description of Artificial Sequence: Synthetic oligonucleotide
agguagaaacuccgacuga

SEQ ID NO: 2016246 - RNA, 19 nt, Artificial Sequence
  Description of Artificial Sequence: Synthetic oligonucleotide
gaagacucugguggcuuug

SEQ ID NO: 2016247 - RNA, 19 nt, Artificial Sequence
  Description of Artificial Sequence: Synthetic oligonucleotide
uaggcacucuguguggacu

SEQ ID NO: 2016248 - RNA, 19 nt, Artificial Sequence
  Description of Artificial Sequence: Synthetic oligonucleotide
gugggcaugcaaaguaggc

SEQ ID NO: 2016249 - RNA, 19 nt, Artificial Sequence
  Description of Artificial Sequence: Synthetic oligonucleotide
ggugcugcauuuguguggc

SEQ ID NO: 2016250 - RNA, 19 nt, Artificial Sequence
  Description of Artificial Sequence: Synthetic oligonucleotide
uuucugcccgccacaccug

SEQ ID NO: 2016251 - RNA, 19 nt, Artificial Sequence
  Description of Artificial Sequence: Synthetic oligonucleotide
ggaacagugugugaaaucu

SEQ ID NO: 2016252 - RNA, 19 nt, Artificial Sequence
  Description of Artificial Sequence: Synthetic oligonucleotide
aggguuauagagagucucu

SEQ ID NO: 2016253 - RNA, 19 nt, Artificial Sequence
  Description of Artificial Sequence: Synthetic oligonucleotide
aucucacauuuauaugguu

SEQ ID NO: 2016254 - RNA, 19 nt, Artificial Sequence
  Description of Artificial Sequence: Synthetic oligonucleotide
gaacucggugacgaggguc

SEQ ID NO: 2016255 - RNA, 19 nt, Artificial Sequence
  Description of Artificial Sequence: Synthetic oligonucleotide
agcugguaccguauggaug

SEQ ID NO: 2016256 - RNA, 19 nt, Artificial Sequence
  Description of Artificial Sequence: Synthetic oligonucleotide
guugggaaguccuggaaau

SEQ ID NO: 2016257 - RNA, 19 nt, Artificial Sequence
  Description of Artificial Sequence: Synthetic oligonucleotide
cuuuucugcccgccacacc

SEQ ID NO: 2016258 - RNA, 19 nt, Artificial Sequence
  Description of Artificial Sequence: Synthetic oligonucleotide
gguggccuuguagauaugc

SEQ ID NO: 2016259 - RNA, 19 nt, Artificial Sequence
  Description of Artificial Sequence: Synthetic oligonucleotide
auucacuuggagauacaaa

SEQ ID NO: 2016260 - RNA, 19 nt, Artificial Sequence
  Description of Artificial Sequence: Synthetic oligonucleotide
ccgugcacaucucacauug

SEQ ID NO: 2016261 - RNA, 19 nt, Artificial Sequence
  Description of Artificial Sequence: Synthetic oligonucleotide
ccuugcagguagaaacucc

SEQ ID NO: 2016262 - RNA, 19 nt, Artificial Sequence
  Description of Artificial Sequence: Synthetic oligonucleotide
ggauguuaagaacccaucu

SEQ ID NO: 2016263 - RNA, 19 nt, Artificial Sequence
  Description of Artificial Sequence: Synthetic oligonucleotide
ugcggcuguucccugggau

SEQ ID NO: 2016264 - RNA, 19 nt, Artificial Sequence
  Description of Artificial Sequence: Synthetic oligonucleotide
ggauccucugaugugcuug

SEQ ID NO: 2016265 - RNA, 19 nt, Artificial Sequence
  Description of Artificial Sequence: Synthetic oligonucleotide
gagaaguugcugauggccu

SEQ ID NO: 2016266 - RNA, 19 nt, Artificial Sequence
  Description of Artificial Sequence: Synthetic oligonucleotide
gugcuuggagacaagaacu

SEQ ID NO: 2016267 - RNA, 19 nt, Artificial Sequence
  Description of Artificial Sequence: Synthetic oligonucleotide
gguaugauuucugacugaa

SEQ ID NO: 2016268 - RNA, 19 nt, Artificial Sequence
  Description of Artificial Sequence: Synthetic oligonucleotide
cuaaauccuuccgugcaca

SEQ ID NO: 2016269 - RNA, 19 nt, Artificial Sequence
  Description of Artificial Sequence: Synthetic oligonucleotide
acuccgacugaagcacuuc

SEQ ID NO: 2016270 - RNA, 19 nt, Artificial Sequence
  Description of Artificial Sequence: Synthetic oligonucleotide
gauuagacacauuccuauu

SEQ ID NO: 2016271 - RNA, 19 nt, Artificial Sequence
  Description of Artificial Sequence: Synthetic oligonucleotide
auggaugcuuaugcggcug

SEQ ID NO: 2016272 - RNA, 19 nt, Artificial Sequence
  Description of Artificial Sequence: Synthetic oligonucleotide
cuuaugcggcuguucccug

SEQ ID NO: 2016273 - RNA, 19 nt, Artificial Sequence
  Description of Artificial Sequence: Synthetic oligonucleotide
caccucacaaauauauggu

SEQ ID NO: 2016274 - RNA, 19 nt, Artificial Sequence
  Description of Artificial Sequence: Synthetic oligonucleotide
cauucacuuggagauacaa

SEQ ID NO: 2016275 - RNA, 19 nt, Artificial Sequence
  Description of Artificial Sequence: Synthetic oligonucleotide
ccguauggaugcuuaugcg

SEQ ID NO: 2016276 - RNA, 19 nt, Artificial Sequence
  Description of Artificial Sequence: Synthetic oligonucleotide
ggagauacaaacucugauu

SEQ ID NO: 2016277 - RNA, 19 nt, Artificial Sequence
  Description of Artificial Sequence: Synthetic oligonucleotide
cugguauggacccuguggu

SEQ ID NO: 2016278 - RNA, 19 nt, Artificial Sequence
  Description of Artificial Sequence: Synthetic oligonucleotide
gcacggaugaucucauuca

SEQ ID NO: 2016279 - RNA, 19 nt, Artificial Sequence
  Description of Artificial Sequence: Synthetic oligonucleotide
gguagaaacuccgacugaa

SEQ ID NO: 2016280 - RNA, 19 nt, Artificial Sequence
  Description of Artificial Sequence: Synthetic oligonucleotide
guuaccacaugcaggguua

SEQ ID NO: 2016281 - RNA, 19 nt, Artificial Sequence
  Description of Artificial Sequence: Synthetic oligonucleotide
cuucuguguggauccucug

SEQ ID NO: 2016282 - RNA, 19 nt, Artificial Sequence
  Description of Artificial Sequence: Synthetic oligonucleotide
cuccucagcacggaugauc

SEQ ID NO: 2016283 - RNA, 19 nt, Artificial Sequence
  Description of Artificial Sequence: Synthetic oligonucleotide
ugaacccgcugaugaauuu

SEQ ID NO: 2016284 - RNA, 19 nt, Artificial Sequence
  Description of Artificial Sequence: Synthetic oligonucleotide
aacuccaguuacauccauu

SEQ ID NO: 2016285 - RNA, 19 nt, Artificial Sequence
  Description of Artificial Sequence: Synthetic oligonucleotide
cauguggacccugugaugu

SEQ ID NO: 2016286 - RNA, 19 nt, Artificial Sequence
  Description of Artificial Sequence: Synthetic oligonucleotide
auguggacccugugaugug

SEQ ID NO: 2016287 - RNA, 19 nt, Artificial Sequence
  Description of Artificial Sequence: Synthetic oligonucleotide
agggucaaacugggaacag

SEQ ID NO: 2016288 - RNA, 19 nt, Artificial Sequence
  Description of Artificial Sequence: Synthetic oligonucleotide
cuggugggcaugcaaagua

SEQ ID NO: 2016289 - RNA, 19 nt, Artificial Sequence
  Description of Artificial Sequence: Synthetic oligonucleotide
gaugaucuuuugaccggga

SEQ ID NO: 2016290 - RNA, 19 nt, Artificial Sequence
  Description of Artificial Sequence: Synthetic oligonucleotide
cacacaucucacauuuaua

SEQ ID NO: 2016291 - RNA, 19 nt, Artificial Sequence
  Description of Artificial Sequence: Synthetic oligonucleotide
acggaugaucucauucacu

SEQ ID NO: 2016292 - RNA, 19 nt, Artificial Sequence
  Description of Artificial Sequence: Synthetic oligonucleotide
cacacaacuuuugaccgaa

SEQ ID NO: 2016293 - RNA, 19 nt, Artificial Sequence
  Description of Artificial Sequence: Synthetic oligonucleotide
gaugcacuguugggaaguc

SEQ ID NO: 2016294 - RNA, 19 nt, Artificial Sequence
  Description of Artificial Sequence: Synthetic oligonucleotide
augaagacucugguggcuu

SEQ ID NO: 2016295 - RNA, 19 nt, Artificial Sequence
  Description of Artificial Sequence: Synthetic oligonucleotide
ugguggcuuugaagguaug

SEQ ID NO: 2016296 - RNA, 19 nt, Artificial Sequence
  Description of Artificial Sequence: Synthetic oligonucleotide
gcagguagaaacuccgacu

SEQ ID NO: 2016297 - RNA, 19 nt, Artificial Sequence
  Description of Artificial Sequence: Synthetic oligonucleotide
ugaccgaagcugguaccgu

SEQ ID NO: 2016298 - RNA, 19 nt, Artificial Sequence
  Description of Artificial Sequence: Synthetic oligonucleotide
acuuuugaccgaagcuggu

SEQ ID NO: 2016299 - RNA, 19 nt, Artificial Sequence
  Description of Artificial Sequence: Synthetic oligonucleotide
aucucacauugguacgguu

SEQ ID NO: 2016300 - RNA, 19 nt, Artificial Sequence
  Description of Artificial Sequence: Synthetic oligonucleotide
cucugguauggacccugug

SEQ ID NO: 2016301 - RNA, 19 nt, Artificial Sequence
  Description of Artificial Sequence: Synthetic oligonucleotide
ucugcccgccacaccugga

SEQ ID NO: 2016302 - RNA, 19 nt, Artificial Sequence
  Description of Artificial Sequence: Synthetic oligonucleotide
gaccgaagcugguaccgua

SEQ ID NO: 2016303 - RNA, 19 nt, Artificial Sequence
  Description of Artificial Sequence: Synthetic oligonucleotide
uccgugcacaucucacauu

SEQ ID NO: 2016304 - RNA, 19 nt, Artificial Sequence
  Description of Artificial Sequence: Synthetic oligonucleotide
gggaaguccuggaaaugug

SEQ ID NO: 2016305 - RNA, 19 nt, Artificial Sequence
  Description of Artificial Sequence: Synthetic oligonucleotide
cgagggucaaacugggaac

SEQ ID NO: 2016306 - RNA, 19 nt, Artificial Sequence
  Description of Artificial Sequence: Synthetic oligonucleotide
gggaugcacuguugggaag

SEQ ID NO: 2016307 - RNA, 19 nt, Artificial Sequence
  Description of Artificial Sequence: Synthetic oligonucleotide
uuacucugguauggacccu

SEQ ID NO: 2016308 - RNA, 19 nt, Artificial Sequence
  Description of Artificial Sequence: Synthetic oligonucleotide
cucucucaugggccaggag

SEQ ID NO: 2016309 - RNA, 19 nt, Artificial Sequence
  Description of Artificial Sequence: Synthetic oligonucleotide
guggacccugugaugugcc

SEQ ID NO: 2016310 - RNA, 19 nt, Artificial Sequence
  Description of Artificial Sequence: Synthetic oligonucleotide
uuaccacaugcaggguuau

SEQ ID NO: 2016311 - RNA, 19 nt, Artificial Sequence
  Description of Artificial Sequence: Synthetic oligonucleotide
acaccuggauauaguuucu

SEQ ID NO: 2016312 - RNA, 19 nt, Artificial Sequence
  Description of Artificial Sequence: Synthetic oligonucleotide
cuuuugaccgaagcuggua

SEQ ID NO: 2016313 - RNA, 19 nt, Artificial Sequence
  Description of Artificial Sequence: Synthetic oligonucleotide
gcauguggacccugugaug

SEQ ID NO: 2016314 - RNA, 19 nt, Artificial Sequence
  Description of Artificial Sequence: Synthetic oligonucleotide
guuccaucugaagcccuuc

SEQ ID NO: 2016315 - RNA, 19 nt, Artificial Sequence
  Description of Artificial Sequence: Synthetic oligonucleotide
aacucugauuagacacauu

SEQ ID NO: 2016316 - RNA, 19 nt, Artificial Sequence
  Description of Artificial Sequence: Synthetic oligonucleotide
aguugcugauggccuugaa

SEQ ID NO: 2016317 - RNA, 19 nt, Artificial Sequence
  Description of Artificial Sequence: Synthetic oligonucleotide
ggccuuguagauaugcucu

SEQ ID NO: 2016318 - RNA, 19 nt, Artificial Sequence
  Description of Artificial Sequence: Synthetic oligonucleotide
gcggcuguucccugggaug

SEQ ID NO: 2016319 - RNA, 19 nt, Artificial Sequence
  Description of Artificial Sequence: Synthetic oligonucleotide
acacaacuuuugaccgaag

SEQ ID NO: 2016320 - RNA, 19 nt, Artificial Sequence
  Description of Artificial Sequence: Synthetic oligonucleotide
aguuccaucugaagcccuu

SEQ ID NO: 2016321 - RNA, 19 nt, Artificial Sequence
  Description of Artificial Sequence: Synthetic oligonucleotide
acucucucaugggccagga

SEQ ID NO: 2016322 - RNA, 19 nt, Artificial Sequence
  Description of Artificial Sequence: Synthetic oligonucleotide
ccuguuuacugaaagguuu

SEQ ID NO: 2016323 - RNA, 19 nt, Artificial Sequence
  Description of Artificial Sequence: Synthetic oligonucleotide
gccuugaacacacaacuuu

SEQ ID NO: 2016324 - RNA, 19 nt, Artificial Sequence
  Description of Artificial Sequence: Synthetic oligonucleotide
gguaccguauggaugcuua

SEQ ID NO: 2016325 - RNA, 19 nt, Artificial Sequence
  Description of Artificial Sequence: Synthetic oligonucleotide
ugcccgccacaccuggaua

SEQ ID NO: 2016326 - RNA, 19 nt, Artificial Sequence
  Description of Artificial Sequence: Synthetic oligonucleotide
cacacaccucacaaauaua

SEQ ID NO: 2016327 - RNA, 19 nt, Artificial Sequence
  Description of Artificial Sequence: Synthetic oligonucleotide
cauuccuauucuccucaua

SEQ ID NO: 2016328 - RNA, 19 nt, Artificial Sequence
  Description of Artificial Sequence: Synthetic oligonucleotide
ugguuaccacaugcagggu

SEQ ID NO: 2016329 - RNA, 19 nt, Artificial Sequence
  Description of Artificial Sequence: Synthetic oligonucleotide
gucaaacugggaacagugu

SEQ ID NO: 2016330 - RNA, 19 nt, Artificial Sequence
  Description of Artificial Sequence: Synthetic oligonucleotide
gguggauguuaagaaccca

SEQ ID NO: 2016331 - RNA, 19 nt, Artificial Sequence
  Description of Artificial Sequence: Synthetic oligonucleotide
ugguggccuuguagauaug

SEQ ID NO: 2016332 - RNA, 19 nt, Artificial Sequence
  Description of Artificial Sequence: Synthetic oligonucleotide
ggacccugugaugugccug

SEQ ID NO: 2016333 - RNA, 19 nt, Artificial Sequence
  Description of Artificial Sequence: Synthetic oligonucleotide
gguuaccacaugcaggguu

SEQ ID NO: 2016334 - RNA, 19 nt, Artificial Sequence
  Description of Artificial Sequence: Synthetic oligonucleotide
ggagaguugaggccuugcu

SEQ ID NO: 2016335 - RNA, 19 nt, Artificial Sequence
  Description of Artificial Sequence: Synthetic oligonucleotide
cauuuguguggcuucuguu

SEQ ID NO: 2016336 - RNA, 19 nt, Artificial Sequence
  Description of Artificial Sequence: Synthetic oligonucleotide
ccgacugaagcacuuccca

SEQ ID NO: 2016337 - RNA, 19 nt, Artificial Sequence
  Description of Artificial Sequence: Synthetic oligonucleotide
gaacuccaguuacauccau

SEQ ID NO: 2016338 - RNA, 19 nt, Artificial Sequence
  Description of Artificial Sequence: Synthetic oligonucleotide
gacgagggucaaacuggga

SEQ ID NO: 2016339 - RNA, 19 nt, Artificial Sequence
  Description of Artificial Sequence: Synthetic oligonucleotide
ugguaccguauggaugcuu

SEQ ID NO: 2016340 - RNA, 19 nt, Artificial Sequence
  Description of Artificial Sequence: Synthetic oligonucleotide
guuucuccucagcacggau

SEQ ID NO: 2016341 - RNA, 19 nt, Artificial Sequence
  Description of Artificial Sequence: Synthetic oligonucleotide
gaugugccugaaggcggga

SEQ ID NO: 2016342 - RNA, 19 nt, Artificial Sequence
  Description of Artificial Sequence: Synthetic oligonucleotide
ggaugcacuguugggaagu

SEQ ID NO: 2016343 - RNA, 19 nt, Artificial Sequence
  Description of Artificial Sequence: Synthetic oligonucleotide
augcggcuguucccuggga

SEQ ID NO: 2016344 - RNA, 19 nt, Artificial Sequence
  Description of Artificial Sequence: Synthetic oligonucleotide
uaccacaugcaggguuaua

SEQ ID NO: 2016345 - RNA, 19 nt, Artificial Sequence
  Description of Artificial Sequence: Synthetic oligonucleotide
gugaacucucugguggccu

SEQ ID NO: 2016346 - RNA, 19 nt, Artificial Sequence
  Description of Artificial Sequence: Synthetic oligonucleotide
gcuuaugcggcuguucccu

SEQ ID NO: 2016347 - RNA, 19 nt, Artificial Sequence
  Description of Artificial Sequence: Synthetic oligonucleotide
cacucuguguggacucucu

SEQ ID NO: 2016348 - RNA, 19 nt, Artificial Sequence
  Description of Artificial Sequence: Synthetic oligonucleotide
caggagaguugaggccuug

SEQ ID NO: 2016349 - RNA, 19 nt, Artificial Sequence
  Description of Artificial Sequence: Synthetic oligonucleotide
aucugugacugaagccuuu

SEQ ID NO: 2016350 - RNA, 19 nt, Artificial Sequence
  Description of Artificial Sequence: Synthetic oligonucleotide
ccuugaacacacaacuuuu

SEQ ID NO: 2016351 - RNA, 19 nt, Artificial Sequence
  Description of Artificial Sequence: Synthetic oligonucleotide
ccgaagcugguaccguaug

SEQ ID NO: 2016352 - RNA, 19 nt, Artificial Sequence
  Description of Artificial Sequence: Synthetic oligonucleotide
gugccugaaggcgggaacu

SEQ ID NO: 2016353 - RNA, 19 nt, Artificial Sequence
  Description of Artificial Sequence: Synthetic oligonucleotide
guaccguauggaugcuuau

SEQ ID NO: 2016354 - RNA, 19 nt, Artificial Sequence
  Description of Artificial Sequence: Synthetic oligonucleotide
gccuugcagguagaaacuc

SEQ ID NO: 2016355 - RNA, 19 nt, Artificial Sequence
  Description of Artificial Sequence: Synthetic oligonucleotide
ggacucucuggugggcaug

SEQ ID NO: 2016356 - RNA, 19 nt, Artificial Sequence
  Description of Artificial Sequence: Synthetic oligonucleotide
gaguuccaucugaagcccu

SEQ ID NO: 2016357 - RNA, 19 nt, Artificial Sequence
  Description of Artificial Sequence: Synthetic oligonucleotide
ucuccucagcacggaugau

SEQ ID NO: 2016358 - RNA, 19 nt, Artificial Sequence
  Description of Artificial Sequence: Synthetic oligonucleotide
cugugguggccuuguagau

SEQ ID NO: 2016359 - RNA, 19 nt, Artificial Sequence
  Description of Artificial Sequence: Synthetic oligonucleotide
gccacaccuggauauaguu

SEQ ID NO: 2016360 - RNA, 19 nt, Artificial Sequence
  Description of Artificial Sequence: Synthetic oligonucleotide
cucaugggccaggagaguu

SEQ ID NO: 2016361 - RNA, 19 nt, Artificial Sequence
  Description of Artificial Sequence: Synthetic oligonucleotide
ccgcauguggacccuguga

SEQ ID NO: 2016362 - RNA, 19 nt, Artificial Sequence
  Description of Artificial Sequence: Synthetic oligonucleotide
cuguucccugggaugcacu

SEQ ID NO: 2016363 - RNA, 19 nt, Artificial Sequence
  Description of Artificial Sequence: Synthetic oligonucleotide
guucccugggaugcacugu

SEQ ID NO: 2016364 - RNA, 19 nt, Artificial Sequence
  Description of Artificial Sequence: Synthetic oligonucleotide
ccgccacaccuggauauag

SEQ ID NO: 2016365 - RNA, 19 nt, Artificial Sequence
  Description of Artificial Sequence: Synthetic oligonucleotide
ggccuugcagguagaaacu

SEQ ID NO: 2016366 - RNA, 19 nt, Artificial Sequence
  Description of Artificial Sequence: Synthetic oligonucleotide
ggguuauagagagucucuu

SEQ ID NO: 2016367 - RNA, 19 nt, Artificial Sequence
  Description of Artificial Sequence: Synthetic oligonucleotide
acucggugacgagggucaa

SEQ ID NO: 2016368 - RNA, 19 nt, Artificial Sequence
  Description of Artificial Sequence: Synthetic oligonucleotide
ggcaugcaaaguaggcacu

SEQ ID NO: 2016369 - RNA, 19 nt, Artificial Sequence
  Description of Artificial Sequence: Synthetic oligonucleotide
cgggaacuccaguuacauc

SEQ ID NO: 2016370 - RNA, 19 nt, Artificial Sequence
  Description of Artificial Sequence: Synthetic oligonucleotide
gcacucuguguggacucuc

SEQ ID NO: 2016371 - RNA, 19 nt, Artificial Sequence
  Description of Artificial Sequence: Synthetic oligonucleotide
cccuguuuacugaaagguu

SEQ ID NO: 2016372 - RNA, 19 nt, Artificial Sequence
  Description of Artificial Sequence: Synthetic oligonucleotide
cugcccgccacaccuggau

SEQ ID NO: 2016373 - RNA, 19 nt, Artificial Sequence
  Description of Artificial Sequence: Synthetic oligonucleotide
acccugugguggccuugua

SEQ ID NO: 2016374 - RNA, 19 nt, Artificial Sequence
  Description of Artificial Sequence: Synthetic oligonucleotide
ccucagcacggaugaucuc

SEQ ID NO: 2016375 - RNA, 19 nt, Artificial Sequence
  Description of Artificial Sequence: Synthetic oligonucleotide
ggaacucggugacgagggu

SEQ ID NO: 2016376 - RNA, 19 nt, Artificial Sequence
  Description of Artificial Sequence: Synthetic oligonucleotide
gcaggguuauagagagucu

SEQ ID NO: 2016377 - RNA, 19 nt, Artificial Sequence
  Description of Artificial Sequence: Synthetic oligonucleotide
gcccgccacaccuggauau

SEQ ID NO: 2016378 - RNA, 19 nt, Artificial Sequence
  Description of Artificial Sequence: Synthetic oligonucleotide
cgcauguggacccugugau

SEQ ID NO: 2016379 - RNA, 19 nt, Artificial Sequence
  Description of Artificial Sequence: Synthetic oligonucleotide
ggcgggaacucuggcugaa

SEQ ID NO: 2016380 - RNA, 19 nt, Artificial Sequence
  Description of Artificial Sequence: Synthetic oligonucleotide
ggccuugaacacacaacuu

SEQ ID NO: 2016381 - RNA, 19 nt, Artificial Sequence
  Description of Artificial Sequence: Synthetic oligonucleotide
gccugaaggcgggaacucu

SEQ ID NO: 2016382 - RNA, 19 nt, Artificial Sequence
  Description of Artificial Sequence: Synthetic oligonucleotide
ggcacucuguguggacucu

SEQ ID NO: 2016383 - RNA, 19 nt, Artificial Sequence
  Description of Artificial Sequence: Synthetic oligonucleotide
cccacacaucucacauuua

SEQ ID NO: 2016384 - RNA, 19 nt, Artificial Sequence
  Description of Artificial Sequence: Synthetic oligonucleotide
cugguaccguauggaugcu

SEQ ID NO: 2016385 - RNA, 19 nt, Artificial Sequence
  Description of Artificial Sequence: Synthetic oligonucleotide
cagcacggaugaucucauu

SEQ ID NO: 2016386 - RNA, 19 nt, Artificial Sequence
  Description of Artificial Sequence: Synthetic oligonucleotide
ggaugcuuaugcggcuguu

SEQ ID NO: 2016387 - RNA, 19 nt, Artificial Sequence
  Description of Artificial Sequence: Synthetic oligonucleotide
cgccacaccuggauauagu

SEQ ID NO: 2016388 - RNA, 19 nt, Artificial Sequence
  Description of Artificial Sequence: Synthetic oligonucleotide
cccgccacaccuggauaua

SEQ ID NO: 2016389 - RNA, 19 nt, Artificial Sequence
  Description of Artificial Sequence: Synthetic oligonucleotide
cggugacgagggucaaacu

SEQ ID NO: 2016390 - RNA, 19 nt, Artificial Sequence
  Description of Artificial Sequence: Synthetic oligonucleotide
uuuauugcgaauaugaacc

SEQ ID NO: 2016391 - RNA, 19 nt, Artificial Sequence
  Description of Artificial Sequence: Synthetic oligonucleotide
uuuauuuugauauaacugc

SEQ ID NO: 2016392 - RNA, 19 nt, Artificial Sequence
  Description of Artificial Sequence: Synthetic oligonucleotide
auagauuucauacuucucc

SEQ ID NO: 2016393 - RNA, 19 nt, Artificial Sequence
  Description of Artificial Sequence: Synthetic oligonucleotide
acaauuuugcuuuucaagc

SEQ ID NO: 2016394 - RNA, 19 nt, Artificial Sequence
  Description of Artificial Sequence: Synthetic oligonucleotide
uaauuuauugcgaauauga

SEQ ID NO: 2016395 - RNA, 19 nt, Artificial Sequence
  Description of Artificial Sequence: Synthetic oligonucleotide
aaagaucauucuuagagag

SEQ ID NO: 2016396 - RNA, 19 nt, Artificial Sequence
  Description of Artificial Sequence: Synthetic oligonucleotide
cuuuaguucauucaaaccc

SEQ ID NO: 2016397 - RNA, 19 nt, Artificial Sequence
  Description of Artificial Sequence: Synthetic oligonucleotide
auuuugauauaacugcacc

SEQ ID NO: 2016398 - RNA, 19 nt, Artificial Sequence
  Description of Artificial Sequence: Synthetic oligonucleotide
auuuauugcgaauaugaac

SEQ ID NO: 2016399 - RNA, 19 nt, Artificial Sequence
  Description of Artificial Sequence: Synthetic oligonucleotide
uaagauauugcuuagcuuc

SEQ ID NO: 2016400 - RNA, 19 nt, Artificial Sequence
  Description of Artificial Sequence: Synthetic oligonucleotide
ugaugaaucacuuucaauc

SEQ ID NO: 2016401 - RNA, 19 nt, Artificial Sequence
  Description of Artificial Sequence: Synthetic oligonucleotide
uggguuuggauaaagauca

SEQ ID NO: 2016402 - RNA, 19 nt, Artificial Sequence
  Description of Artificial Sequence: Synthetic oligonucleotide
uuuaagauauugcuuagcu

SEQ ID NO: 2016403 - RNA, 19 nt, Artificial Sequence
  Description of Artificial Sequence: Synthetic oligonucleotide
ugaaucacuuucaaucugg

SEQ ID NO: 2016404 - RNA, 19 nt, Artificial Sequence
  Description of Artificial Sequence: Synthetic oligonucleotide
uaaggauuccagaugaaag

SEQ ID NO: 2016405 - RNA, 19 nt, Artificial Sequence
  Description of Artificial Sequence: Synthetic oligonucleotide
cuguuaguaauuuauugcg

SEQ ID NO: 2016406 - RNA, 19 nt, Artificial Sequence
  Description of Artificial Sequence: Synthetic oligonucleotide
aagaagguaagcaauccac

SEQ ID NO: 2016407 - RNA, 19 nt, Artificial Sequence
  Description of Artificial Sequence: Synthetic oligonucleotide
uguagaucauguauaagac

SEQ ID NO: 2016408 - RNA, 19 nt, Artificial Sequence
  Description of Artificial Sequence: Synthetic oligonucleotide
uauaacugcaccuccagcu

SEQ ID NO: 2016409 - RNA, 19 nt, Artificial Sequence
  Description of Artificial Sequence: Synthetic oligonucleotide
uucuaaggauuccagauga

SEQ ID NO: 2016410 - RNA, 19 nt, Artificial Sequence
  Description of Artificial Sequence: Synthetic oligonucleotide
uuuuaaagcacguggugcc

SEQ ID NO: 2016411 - RNA, 19 nt, Artificial Sequence
  Description of Artificial Sequence: Synthetic oligonucleotide
aagguuuccauugugggag

SEQ ID NO: 2016412 - RNA, 19 nt, Artificial Sequence
  Description of Artificial Sequence: Synthetic oligonucleotide
uuauuuugauauaacugca

SEQ ID NO: 2016413 - RNA, 19 nt, Artificial Sequence
  Description of Artificial Sequence: Synthetic oligonucleotide
uuuaguucauucaaacccu

SEQ ID NO: 2016414 - RNA, 19 nt, Artificial Sequence
  Description of Artificial Sequence: Synthetic oligonucleotide
auuauauguggguacauga

SEQ ID NO: 2016415 - RNA, 19 nt, Artificial Sequence
  Description of Artificial Sequence: Synthetic oligonucleotide
aucagauuucuuuuggguc

SEQ ID NO: 2016416 - RNA, 19 nt, Artificial Sequence
  Description of Artificial Sequence: Synthetic oligonucleotide
ucuccuuuaagauauugcu

SEQ ID NO: 2016417 - RNA, 19 nt, Artificial Sequence
  Description of Artificial Sequence: Synthetic oligonucleotide
aaggauuccagaugaaaga

SEQ ID NO: 2016418 - RNA, 19 nt, Artificial Sequence
  Description of Artificial Sequence: Synthetic oligonucleotide
uuucaagcugucuugaacu

SEQ ID NO: 2016419 - RNA, 19 nt, Artificial Sequence
  Description of Artificial Sequence: Synthetic oligonucleotide
aaauugaugacugguaaga

SEQ ID NO: 2016420 - RNA, 19 nt, Artificial Sequence
  Description of Artificial Sequence: Synthetic oligonucleotide
aauuccggagcuucuggac

SEQ ID NO: 2016421 - RNA, 19 nt, Artificial Sequence
  Description of Artificial Sequence: Synthetic oligonucleotide
ucuuuauaguucuucaccu

SEQ ID NO: 2016422 - RNA, 19 nt, Artificial Sequence
  Description of Artificial Sequence: Synthetic oligonucleotide
uuucacaacaucuuuuagu

SEQ ID NO: 2016423 - RNA, 19 nt, Artificial Sequence
  Description of Artificial Sequence: Synthetic oligonucleotide
uggaucucuugauuaaugg

SEQ ID NO: 2016424 - RNA, 19 nt, Artificial Sequence
  Description of Artificial Sequence: Synthetic oligonucleotide
cacaauuuugcuuuucaag

SEQ ID NO: 2016425 - RNA, 19 nt, Artificial Sequence
  Description of Artificial Sequence: Synthetic oligonucleotide
uuuugauauaacugcaccu

SEQ ID NO: 2016426 - RNA, 19 nt, Artificial Sequence
  Description of Artificial Sequence: Synthetic oligonucleotide
guagaaguguuccagccgg

SEQ ID NO: 2016427 - RNA, 19 nt, Artificial Sequence
  Description of Artificial Sequence: Synthetic oligonucleotide
ucauuuuaaagcacguggu

SEQ ID NO: 2016428 - RNA, 19 nt, Artificial Sequence
  Description of Artificial Sequence: Synthetic oligonucleotide
cucuuuauaguucuucacc

SEQ ID NO: 2016429 - RNA, 19 nt, Artificial Sequence
  Description of Artificial Sequence: Synthetic oligonucleotide
gucacuugcucacagacag

SEQ ID NO: 2016430 - RNA, 19 nt, Artificial Sequence
  Description of Artificial Sequence: Synthetic oligonucleotide
acaagguuuccauuguggg

SEQ ID NO: 2016431 - RNA, 19 nt, Artificial Sequence
  Description of Artificial Sequence: Synthetic oligonucleotide
uauauguggguacaugacu

SEQ ID NO: 2016432 - RNA, 19 nt, Artificial Sequence
  Description of Artificial Sequence: Synthetic oligonucleotide
aucucagcuacauuguauc

SEQ ID NO: 2016433 - RNA, 19 nt, Artificial Sequence
  Description of Artificial Sequence: Synthetic oligonucleotide
uccuuuaagauauugcuua

SEQ ID NO: 2016434 - RNA, 19 nt, Artificial Sequence
  Description of Artificial Sequence: Synthetic oligonucleotide
uaaagaucauucuuagaga

SEQ ID NO: 2016435 - RNA, 19 nt, Artificial Sequence
  Description of Artificial Sequence: Synthetic oligonucleotide
uuuacagucaucagucuuc

SEQ ID NO: 2016436 - RNA, 19 nt, Artificial Sequence
  Description of Artificial Sequence: Synthetic oligonucleotide
ucuaauuuccuuccuugca

SEQ ID NO: 2016437 - RNA, 19 nt, Artificial Sequence
  Description of Artificial Sequence: Synthetic oligonucleotide
uguauaagaccucaggcuu

SEQ ID NO: 2016438 - RNA, 19 nt, Artificial Sequence
  Description of Artificial Sequence: Synthetic oligonucleotide
gaucucuugauuaauggug

SEQ ID NO: 2016439 - RNA, 19 nt, Artificial Sequence
  Description of Artificial Sequence: Synthetic oligonucleotide
ucuugauuaauggugguca

SEQ ID NO: 2016440 - RNA, 19 nt, Artificial Sequence
  Description of Artificial Sequence: Synthetic oligonucleotide
aacuuuauugcagccuucg

SEQ ID NO: 2016441 - RNA, 19 nt, Artificial Sequence
  Description of Artificial Sequence: Synthetic oligonucleotide
ucuuuuaguugcugaaucc

SEQ ID NO: 2016442 - RNA, 19 nt, Artificial Sequence
  Description of Artificial Sequence: Synthetic oligonucleotide
gauuuaaucuucuggaucu

SEQ ID NO: 2016443 - RNA, 19 nt, Artificial Sequence
  Description of Artificial Sequence: Synthetic oligonucleotide
guucauucaaacccuuugg

SEQ ID NO: 2016444 - RNA, 19 nt, Artificial Sequence
  Description of Artificial Sequence: Synthetic oligonucleotide
agaauaaauugaugacugg

SEQ ID NO: 2016445 - RNA, 19 nt, Artificial Sequence
  Description of Artificial Sequence: Synthetic oligonucleotide
uuuggguuuggauaaagau

SEQ ID NO: 2016446 - RNA, 19 nt, Artificial Sequence
  Description of Artificial Sequence: Synthetic oligonucleotide
agcacugucguuuucuaag

SEQ ID NO: 2016447 - RNA, 19 nt, Artificial Sequence
  Description of Artificial Sequence: Synthetic oligonucleotide
uguuaguaauuuauugcga

SEQ ID NO: 2016448 - RNA, 19 nt, Artificial Sequence
  Description of Artificial Sequence: Synthetic oligonucleotide
auguauaagaccucaggcu

SEQ ID NO: 2016449 - RNA, 19 nt, Artificial Sequence
  Description of Artificial Sequence: Synthetic oligonucleotide
aaacccuuugguuuucuca

SEQ ID NO: 2016450 - RNA, 19 nt, Artificial Sequence
  Description of Artificial Sequence: Synthetic oligonucleotide
auauaacugcaccuccagc

SEQ ID NO: 2016451 - RNA, 19 nt, Artificial Sequence
  Description of Artificial Sequence: Synthetic oligonucleotide
uucuccuuuaagauauugc

SEQ ID NO: 2016452 - RNA, 19 nt, Artificial Sequence
  Description of Artificial Sequence: Synthetic oligonucleotide
auaaauugaugacugguaa

SEQ ID NO: 2016453 - RNA, 19 nt, Artificial Sequence
  Description of Artificial Sequence: Synthetic oligonucleotide
aguucauucaaacccuuug

SEQ ID NO: 2016454 - RNA, 19 nt, Artificial Sequence
  Description of Artificial Sequence: Synthetic oligonucleotide
aaugguggucacuugcuca

SEQ ID NO: 2016455 - RNA, 19 nt, Artificial Sequence
  Description of Artificial Sequence: Synthetic oligonucleotide
uugauauaacugcaccucc

SEQ ID NO: 2016456 - RNA, 19 nt, Artificial Sequence
  Description of Artificial Sequence: Synthetic oligonucleotide
uccagaugaaagaauaaau

SEQ ID NO: 2016457 - RNA, 19 nt, Artificial Sequence
  Description of Artificial Sequence: Synthetic oligonucleotide
cuaauuuccuuccuugcag

SEQ ID NO: 2016458 - RNA, 19 nt, Artificial Sequence
  Description of Artificial Sequence: Synthetic oligonucleotide
uuuuaguugcugaauccca

SEQ ID NO: 2016459 - RNA, 19 nt, Artificial Sequence
  Description of Artificial Sequence: Synthetic oligonucleotide
uuauauguggguacaugac

SEQ ID NO: 2016460 - RNA, 19 nt, Artificial Sequence
  Description of Artificial Sequence: Synthetic oligonucleotide
agaugaaagaauaaauuga

SEQ ID NO: 2016461 - RNA, 19 nt, Artificial Sequence
  Description of Artificial Sequence: Synthetic oligonucleotide
uuugauauaacugcaccuc

SEQ ID NO: 2016462 - RNA, 19 nt, Artificial Sequence
  Description of Artificial Sequence: Synthetic oligonucleotide
guaagcaauccacagaguc

SEQ ID NO: 2016463 - RNA, 19 nt, Artificial Sequence
  Description of Artificial Sequence: Synthetic oligonucleotide
acagucaucagucuucgga

SEQ ID NO: 2016464 - RNA, 19 nt, Artificial Sequence
  Description of Artificial Sequence: Synthetic oligonucleotide
agaucauucuuagagaggu

SEQ ID NO: 2016465 - RNA, 19 nt, Artificial Sequence
  Description of Artificial Sequence: Synthetic oligonucleotide
aguuucuuuaguucugaug

SEQ ID NO: 2016466 - RNA, 19 nt, Artificial Sequence
  Description of Artificial Sequence: Synthetic oligonucleotide
gcgaauaugaaccacaauc

SEQ ID NO: 2016467 - RNA, 19 nt, Artificial Sequence
  Description of Artificial Sequence: Synthetic oligonucleotide
aagaccucaggcuuugggu

SEQ ID NO: 2016468 - RNA, 19 nt, Artificial Sequence
  Description of Artificial Sequence: Synthetic oligonucleotide
uacaaagauuuccugggac

SEQ ID NO: 2016469 - RNA, 19 nt, Artificial Sequence
  Description of Artificial Sequence: Synthetic oligonucleotide
uagauuucauacuucucca

SEQ ID NO: 2016470 - RNA, 19 nt, Artificial Sequence
  Description of Artificial Sequence: Synthetic oligonucleotide
cuugcagagaauuccggag

SEQ ID NO: 2016471 - RNA, 19 nt, Artificial Sequence
  Description of Artificial Sequence: Synthetic oligonucleotide
cuuccuugcagcacugucg

SEQ ID NO: 2016472 - RNA, 19 nt, Artificial Sequence
  Description of Artificial Sequence: Synthetic oligonucleotide
aagguaagcaauccacaga

SEQ ID NO: 2016473 - RNA, 19 nt, Artificial Sequence
  Description of Artificial Sequence: Synthetic oligonucleotide
gacaagguuuccauugugg

SEQ ID NO: 2016474 - RNA, 19 nt, Artificial Sequence
  Description of Artificial Sequence: Synthetic oligonucleotide
uuugggucuaauuuccuuc

SEQ ID NO: 2016475 - RNA, 19 nt, Artificial Sequence
  Description of Artificial Sequence: Synthetic oligonucleotide
aguaauuuauugcgaauau

SEQ ID NO: 2016476 - RNA, 19 nt, Artificial Sequence
  Description of Artificial Sequence: Synthetic oligonucleotide
cugaaucccagauuuaauc

SEQ ID NO: 2016477 - RNA, 19 nt, Artificial Sequence
  Description of Artificial Sequence: Synthetic oligonucleotide
uucuuuugggucuaauuuc

SEQ ID NO: 2016478 - RNA, 19 nt, Artificial Sequence
  Description of Artificial Sequence: Synthetic oligonucleotide
guagaucauguauaagacc

SEQ ID NO: 2016479 - RNA, 19 nt, Artificial Sequence
  Description of Artificial Sequence: Synthetic oligonucleotide
aauaaauugaugacuggua

SEQ ID NO: 2016480 - RNA, 19 nt, Artificial Sequence
  Description of Artificial Sequence: Synthetic oligonucleotide
ucuuguauuuuauuuugau

SEQ ID NO: 2016481 - RNA, 19 nt, Artificial Sequence
  Description of Artificial Sequence: Synthetic oligonucleotide
ucucggaacauccuccucu

SEQ ID NO: 2016482 - RNA, 19 nt, Artificial Sequence
  Description of Artificial Sequence: Synthetic oligonucleotide
uguucauuuuaaagcacgu

SEQ ID NO: 2016483 - RNA, 19 nt, Artificial Sequence
  Description of Artificial Sequence: Synthetic oligonucleotide
caucauguagaaguguucc

SEQ ID NO: 2016484 - RNA, 19 nt, Artificial Sequence
  Description of Artificial Sequence: Synthetic oligonucleotide
cuuuuaguugcugaauccc

SEQ ID NO: 2016485 - RNA, 19 nt, Artificial Sequence
  Description of Artificial Sequence: Synthetic oligonucleotide
uugcagagaauuccggagc

SEQ ID NO: 2016486 - RNA, 19 nt, Artificial Sequence
  Description of Artificial Sequence: Synthetic oligonucleotide
aacccuuugguuuucucaa

SEQ ID NO: 2016487 - RNA, 19 nt, Artificial Sequence
  Description of Artificial Sequence: Synthetic oligonucleotide
ucaugguacuucuccagag

SEQ ID NO: 2016488 - RNA, 19 nt, Artificial Sequence
  Description of Artificial Sequence: Synthetic oligonucleotide
ucucuauagauuucauacu

SEQ ID NO: 2016489 - RNA, 19 nt, Artificial Sequence
  Description of Artificial Sequence: Synthetic oligonucleotide
cauucucggaacauccucc

SEQ ID NO: 2016490 - RNA, 19 nt, Artificial Sequence
  Description of Artificial Sequence: Synthetic oligonucleotide
uguugucuucucaaugcgc

SEQ ID NO: 2016491 - RNA, 19 nt, Artificial Sequence
  Description of Artificial Sequence: Synthetic oligonucleotide
ucugcguucacuggcauca

SEQ ID NO: 2016492 - RNA, 19 nt, Artificial Sequence
  Description of Artificial Sequence: Synthetic oligonucleotide
aacuucuuucagagaaacc

SEQ ID NO: 2016493 - RNA, 19 nt, Artificial Sequence
  Description of Artificial Sequence: Synthetic oligonucleotide
uucuugcagagaauuccgg

SEQ ID NO: 2016494 - RNA, 19 nt, Artificial Sequence
  Description of Artificial Sequence: Synthetic oligonucleotide
agaauuccggagcuucugg

SEQ ID NO: 2016495 - RNA, 19 nt, Artificial Sequence
  Description of Artificial Sequence: Synthetic oligonucleotide
cucccuguuaucugcaagg

SEQ ID NO: 2016496 - RNA, 19 nt, Artificial Sequence
  Description of Artificial Sequence: Synthetic oligonucleotide
aagaucauucuuagagagg

SEQ ID NO: 2016497 - RNA, 19 nt, Artificial Sequence
  Description of Artificial Sequence: Synthetic oligonucleotide
aucucuugauuaauggugg

SEQ ID NO: 2016498 - RNA, 19 nt, Artificial Sequence
  Description of Artificial Sequence: Synthetic oligonucleotide
guuaguaauuuauugcgaa

SEQ ID NO: 2016499 - RNA, 19 nt, Artificial Sequence
  Description of Artificial Sequence: Synthetic oligonucleotide
aauuuccuuccuugcagca

SEQ ID NO: 2016500 - RNA, 19 nt, Artificial Sequence
  Description of Artificial Sequence: Synthetic oligonucleotide
ggauaaagaucauucuuag

SEQ ID NO: 2016501 - RNA, 19 nt, Artificial Sequence
  Description of Artificial Sequence: Synthetic oligonucleotide
ccuguuaguaauuuauugc

SEQ ID NO: 2016502 - RNA, 19 nt, Artificial Sequence
  Description of Artificial Sequence: Synthetic oligonucleotide
ugaaccacaaucucagcua

SEQ ID NO: 2016503 - RNA, 19 nt, Artificial Sequence
  Description of Artificial Sequence: Synthetic oligonucleotide
uguauuuuauuuugauaua

SEQ ID NO: 2016504 - RNA, 19 nt, Artificial Sequence
  Description of Artificial Sequence: Synthetic oligonucleotide
aaugcgcucaugguacuuc

SEQ ID NO: 2016505 - RNA, 19 nt, Artificial Sequence
  Description of Artificial Sequence: Synthetic oligonucleotide
uccagagcacuuuucaagu

SEQ ID NO: 2016506 - RNA, 19 nt, Artificial Sequence
  Description of Artificial Sequence: Synthetic oligonucleotide
cauuuuaaagcacguggug

SEQ ID NO: 2016507 - RNA, 19 nt, Artificial Sequence
  Description of Artificial Sequence: Synthetic oligonucleotide
uugggucuaauuuccuucc

SEQ ID NO: 2016508 - RNA, 19 nt, Artificial Sequence
  Description of Artificial Sequence: Synthetic oligonucleotide
uauagauuucauacuucuc

SEQ ID NO: 2016509 - RNA, 19 nt, Artificial Sequence
  Description of Artificial Sequence: Synthetic oligonucleotide
uaguaauuuauugcgaaua

SEQ ID NO: 2016510 - RNA, 19 nt, Artificial Sequence
  Description of Artificial Sequence: Synthetic oligonucleotide
uggucacuugcucacagac

SEQ ID NO: 2016511 - RNA, 19 nt, Artificial Sequence
  Description of Artificial Sequence: Synthetic oligonucleotide
uuaguaauuuauugcgaau

SEQ ID NO: 2016512 - RNA, 19 nt, Artificial Sequence
  Description of Artificial Sequence: Synthetic oligonucleotide
uuacagucaucagucuucg

SEQ ID NO: 2016513 - RNA, 19 nt, Artificial Sequence
  Description of Artificial Sequence: Synthetic oligonucleotide
uuguaucuggggaaugaca

SEQ ID NO: 2016514 - RNA, 19 nt, Artificial Sequence
  Description of Artificial Sequence: Synthetic oligonucleotide
gaugaaucacuuucaaucu

SEQ ID NO: 2016515 - RNA, 19 nt, Artificial Sequence
  Description of Artificial Sequence: Synthetic oligonucleotide
ucucuuuauaguucuucac

SEQ ID NO: 2016516 - RNA, 19 nt, Artificial Sequence
  Description of Artificial Sequence: Synthetic oligonucleotide
aauuuauugcgaauaugaa

SEQ ID NO: 2016517 - RNA, 19 nt, Artificial Sequence
  Description of Artificial Sequence: Synthetic oligonucleotide
ucuucggagggaauuuucu

SEQ ID NO: 2016518 - RNA, 19 nt, Artificial Sequence
  Description of Artificial Sequence: Synthetic oligonucleotide
uuauugcgaauaugaacca

SEQ ID NO: 2016519 - RNA, 19 nt, Artificial Sequence
  Description of Artificial Sequence: Synthetic oligonucleotide
gucaucagucuucggaggg

SEQ ID NO: 2016520 - RNA, 19 nt, Artificial Sequence
  Description of Artificial Sequence: Synthetic oligonucleotide
cagucaucagucuucggag

SEQ ID NO: 2016521 - RNA, 19 nt, Artificial Sequence
  Description of Artificial Sequence: Synthetic oligonucleotide
aaagcacguggugccaagc

SEQ ID NO: 2016522 - RNA, 19 nt, Artificial Sequence
  Description of Artificial Sequence: Synthetic oligonucleotide
augaaucacuuucaaucug

SEQ ID NO: 2016523 - RNA, 19 nt, Artificial Sequence
  Description of Artificial Sequence: Synthetic oligonucleotide
uuaagauauugcuuagcuu

SEQ ID NO: 2016524 - RNA, 19 nt, Artificial Sequence
  Description of Artificial Sequence: Synthetic oligonucleotide
ggucuuguauuuuauuuug

SEQ ID NO: 2016525 - RNA, 19 nt, Artificial Sequence
  Description of Artificial Sequence: Synthetic oligonucleotide
auaacugcaccuccagcug

SEQ ID NO: 2016526 - RNA, 19 nt, Artificial Sequence
  Description of Artificial Sequence: Synthetic oligonucleotide
ugcagcacuccucuguugu

SEQ ID NO: 2016527 - RNA, 19 nt, Artificial Sequence
  Description of Artificial Sequence: Synthetic oligonucleotide
ucauucaaacccuuugguu

SEQ ID NO: 2016528 - RNA, 19 nt, Artificial Sequence
  Description of Artificial Sequence: Synthetic oligonucleotide
ugauuaaugguggucacuu

SEQ ID NO: 2016529 - RNA, 19 nt, Artificial Sequence
  Description of Artificial Sequence: Synthetic oligonucleotide
gaacuucuuucagagaaac

SEQ ID NO: 2016530 - RNA, 19 nt, Artificial Sequence
  Description of Artificial Sequence: Synthetic oligonucleotide
gaaguguuccagccggacc

SEQ ID NO: 2016531 - RNA, 19 nt, Artificial Sequence
  Description of Artificial Sequence: Synthetic oligonucleotide
gauuccagaugaaagaaua

SEQ ID NO: 2016532 - RNA, 19 nt, Artificial Sequence
  Description of Artificial Sequence: Synthetic oligonucleotide
gaaccacaaucucagcuac

SEQ ID NO: 2016533 - RNA, 19 nt, Artificial Sequence
  Description of Artificial Sequence: Synthetic oligonucleotide
guaauuuauugcgaauaug

SEQ ID NO: 2016534 - RNA, 19 nt, Artificial Sequence
  Description of Artificial Sequence: Synthetic oligonucleotide
cuuuaagauauugcuuagc

SEQ ID NO: 2016535 - RNA, 19 nt, Artificial Sequence
  Description of Artificial Sequence: Synthetic oligonucleotide
uuccuugcagcacugucgu

SEQ ID NO: 2016536 - RNA, 19 nt, Artificial Sequence
  Description of Artificial Sequence: Synthetic oligonucleotide
auacuucuccaucacuucu

SEQ ID NO: 2016537 - RNA, 19 nt, Artificial Sequence
  Description of Artificial Sequence: Synthetic oligonucleotide
uggguacaugacuucugcg

SEQ ID NO: 2016538 - RNA, 19 nt, Artificial Sequence
  Description of Artificial Sequence: Synthetic oligonucleotide
gaauaaauugaugacuggu

SEQ ID NO: 2016539 - RNA, 19 nt, Artificial Sequence
  Description of Artificial Sequence: Synthetic oligonucleotide
cuguugucuucucaaugcg

SEQ ID NO: 2016540 - RNA, 19 nt, Artificial Sequence
  Description of Artificial Sequence: Synthetic oligonucleotide
gaugacugguaagaagccc

SEQ ID NO: 2016541 - RNA, 19 nt, Artificial Sequence
  Description of Artificial Sequence: Synthetic oligonucleotide
ugacaagguuuccauugug

SEQ ID NO: 2016542 - RNA, 19 nt, Artificial Sequence
  Description of Artificial Sequence: Synthetic oligonucleotide
uccauuauauguggguaca

SEQ ID NO: 2016543 - RNA, 19 nt, Artificial Sequence
  Description of Artificial Sequence: Synthetic oligonucleotide
gauuaaugguggucacuug

SEQ ID NO: 2016544 - RNA, 19 nt, Artificial Sequence
  Description of Artificial Sequence: Synthetic oligonucleotide
uauaagaccucaggcuuug

SEQ ID NO: 2016545 - RNA, 19 nt, Artificial Sequence
  Description of Artificial Sequence: Synthetic oligonucleotide
uuuaaucuucuggaucucu

SEQ ID NO: 2016546 - RNA, 19 nt, Artificial Sequence
  Description of Artificial Sequence: Synthetic oligonucleotide
cagccuucgaucacugucc

SEQ ID NO: 2016547 - RNA, 19 nt, Artificial Sequence
  Description of Artificial Sequence: Synthetic oligonucleotide
cuugauuaaugguggucac

SEQ ID NO: 2016548 - RNA, 19 nt, Artificial Sequence
  Description of Artificial Sequence: Synthetic oligonucleotide
cuccauuauauguggguac

SEQ ID NO: 2016549 - RNA, 19 nt, Artificial Sequence
  Description of Artificial Sequence: Synthetic oligonucleotide
agcccuccauuauaugugg

SEQ ID NO: 2016550 - RNA, 19 nt, Artificial Sequence
  Description of Artificial Sequence: Synthetic oligonucleotide
aagauauugcuuagcuucu

SEQ ID NO: 2016551 - RNA, 19 nt, Artificial Sequence
  Description of Artificial Sequence: Synthetic oligonucleotide
auugcgaauaugaaccaca

SEQ ID NO: 2016552 - RNA, 19 nt, Artificial Sequence
  Description of Artificial Sequence: Synthetic oligonucleotide
ucacaacaucuuuuaguug

SEQ ID NO: 2016553 - RNA, 19 nt, Artificial Sequence
  Description of Artificial Sequence: Synthetic oligonucleotide
acugguaagaagcccucca

SEQ ID NO: 2016554 - RNA, 19 nt, Artificial Sequence
  Description of Artificial Sequence: Synthetic oligonucleotide
ggucuaauuuccuuccuug

SEQ ID NO: 2016555 - RNA, 19 nt, Artificial Sequence
  Description of Artificial Sequence: Synthetic oligonucleotide
auaguucuucaccuucucu

SEQ ID NO: 2016556 - RNA, 19 nt, Artificial Sequence
  Description of Artificial Sequence: Synthetic oligonucleotide
acugucguuuucuaaggau

SEQ ID NO: 2016557 - RNA, 19 nt, Artificial Sequence
  Description of Artificial Sequence: Synthetic oligonucleotide
aagcccuccauuauaugug

SEQ ID NO: 2016558 - RNA, 19 nt, Artificial Sequence
  Description of Artificial Sequence: Synthetic oligonucleotide
ugacuucugcguucacugg

SEQ ID NO: 2016559 - RNA, 19 nt, Artificial Sequence
  Description of Artificial Sequence: Synthetic oligonucleotide
uugcgaauaugaaccacaa

SEQ ID NO: 2016560 - RNA, 19 nt, Artificial Sequence
  Description of Artificial Sequence: Synthetic oligonucleotide
gacaagaagguaagcaauc

SEQ ID NO: 2016561 - RNA, 19 nt, Artificial Sequence
  Description of Artificial Sequence: Synthetic oligonucleotide
auuuuggugcagcacuccu

SEQ ID NO: 2016562 - RNA, 19 nt, Artificial Sequence
  Description of Artificial Sequence: Synthetic oligonucleotide
aggucuuguauuuuauuuu

SEQ ID NO: 2016563 - RNA, 19 nt, Artificial Sequence
  Description of Artificial Sequence: Synthetic oligonucleotide
uugcucacagacagcaccu

SEQ ID NO: 2016564 - RNA, 19 nt, Artificial Sequence
  Description of Artificial Sequence: Synthetic oligonucleotide
uuccggagcuucuggacag

SEQ ID NO: 2016565 - RNA, 19 nt, Artificial Sequence
  Description of Artificial Sequence: Synthetic oligonucleotide
cauuauauguggguacaug

SEQ ID NO: 2016566 - RNA, 19 nt, Artificial Sequence
  Description of Artificial Sequence: Synthetic oligonucleotide
aaucucagcuacauuguau

SEQ ID NO: 2016567 - RNA, 19 nt, Artificial Sequence
  Description of Artificial Sequence: Synthetic oligonucleotide
gaaaccacugacaacuuua

SEQ ID NO: 2016568 - RNA, 19 nt, Artificial Sequence
  Description of Artificial Sequence: Synthetic oligonucleotide
ugcaaggucuuguauuuua

SEQ ID NO: 2016569 - RNA, 19 nt, Artificial Sequence
  Description of Artificial Sequence: Synthetic oligonucleotide
acuauuuguaaagcucuca

SEQ ID NO: 2016570 - RNA, 19 nt, Artificial Sequence
  Description of Artificial Sequence: Synthetic oligonucleotide
aagcacguggugccaagcu

SEQ ID NO: 2016571 - RNA, 19 nt, Artificial Sequence
  Description of Artificial Sequence: Synthetic oligonucleotide
guggguacaugacuucugc

SEQ ID NO: 2016572 - RNA, 19 nt, Artificial Sequence
  Description of Artificial Sequence: Synthetic oligonucleotide
guugcugaaucccagauuu

SEQ ID NO: 2016573 - RNA, 19 nt, Artificial Sequence
  Description of Artificial Sequence: Synthetic oligonucleotide
ucguuuucuaaggauucca

SEQ ID NO: 2016574 - RNA, 19 nt, Artificial Sequence
  Description of Artificial Sequence: Synthetic oligonucleotide
cuauuuuggugcagcacuc

SEQ ID NO: 2016575 - RNA, 19 nt, Artificial Sequence
  Description of Artificial Sequence: Synthetic oligonucleotide
auuccggagcuucuggaca

SEQ ID NO: 2016576 - RNA, 19 nt, Artificial Sequence
  Description of Artificial Sequence: Synthetic oligonucleotide
ucucuucuauuuuggugca

SEQ ID NO: 2016577 - RNA, 19 nt, Artificial Sequence
  Description of Artificial Sequence: Synthetic oligonucleotide
uaaagcacguggugccaag

SEQ ID NO: 2016578 - RNA, 19 nt, Artificial Sequence
  Description of Artificial Sequence: Synthetic oligonucleotide
uaguugcugaaucccagau

SEQ ID NO: 2016579 - RNA, 19 nt, Artificial Sequence
  Description of Artificial Sequence: Synthetic oligonucleotide
uuucuuuaguucugaugaa

SEQ ID NO: 2016580 - RNA, 19 nt, Artificial Sequence
  Description of Artificial Sequence: Synthetic oligonucleotide
uauuuuggugcagcacucc

SEQ ID NO: 2016581 - RNA, 19 nt, Artificial Sequence
  Description of Artificial Sequence: Synthetic oligonucleotide
augacaagguuuccauugu

SEQ ID NO: 2016582 - RNA, 19 nt, Artificial Sequence
  Description of Artificial Sequence: Synthetic oligonucleotide
uucuuuaguucugaugaau

SEQ ID NO: 2016583 - RNA, 19 nt, Artificial Sequence
  Description of Artificial Sequence: Synthetic oligonucleotide
ugcugaaucccagauuuaa

SEQ ID NO: 2016584 - RNA, 19 nt, Artificial Sequence
  Description of Artificial Sequence: Synthetic oligonucleotide
uucuggaucucuugauuaa

SEQ ID NO: 2016585 - RNA, 19 nt, Artificial Sequence
  Description of Artificial Sequence: Synthetic oligonucleotide
uuuugggucuaauuuccuu

SEQ ID NO: 2016586 - RNA, 19 nt, Artificial Sequence
  Description of Artificial Sequence: Synthetic oligonucleotide
uguccgcuuguacugcccc

SEQ ID NO: 2016587 - RNA, 19 nt, Artificial Sequence
  Description of Artificial Sequence: Synthetic oligonucleotide
agaaguguuccagccggac

SEQ ID NO: 2016588 - RNA, 19 nt, Artificial Sequence
  Description of Artificial Sequence: Synthetic oligonucleotide
guaucuggggaaugacaag

SEQ ID NO: 2016589 - RNA, 19 nt, Artificial Sequence
  Description of Artificial Sequence: Synthetic oligonucleotide
aaccacugacaacuuuagu

SEQ ID NO: 2016590 - RNA, 19 nt, Artificial Sequence
  Description of Artificial Sequence: Synthetic oligonucleotide
caucacuucuugcagagaa

SEQ ID NO: 2016591 - RNA, 19 nt, Artificial Sequence
  Description of Artificial Sequence: Synthetic oligonucleotide
aagaagcccuccauuauau

SEQ ID NO: 2016592 - RNA, 19 nt, Artificial Sequence
  Description of Artificial Sequence: Synthetic oligonucleotide
uacaugacuucugcguuca

SEQ ID NO: 2016593 - RNA, 19 nt, Artificial Sequence
  Description of Artificial Sequence: Synthetic oligonucleotide
uucuauuuuggugcagcac

SEQ ID NO: 2016594 - RNA, 19 nt, Artificial Sequence
  Description of Artificial Sequence: Synthetic oligonucleotide
auuuaaucuucuggaucuc

SEQ ID NO: 2016595 - RNA, 19 nt, Artificial Sequence
  Description of Artificial Sequence: Synthetic oligonucleotide
ccagauuuaaucuucugga

SEQ ID NO: 2016596 - RNA, 19 nt, Artificial Sequence
  Description of Artificial Sequence: Synthetic oligonucleotide
uauugcgaauaugaaccac

SEQ ID NO: 2016597 - RNA, 19 nt, Artificial Sequence
  Description of Artificial Sequence: Synthetic oligonucleotide
agaguccacaauuuugcuu

SEQ ID NO: 2016598 - RNA, 19 nt, Artificial Sequence
  Description of Artificial Sequence: Synthetic oligonucleotide
augacugguaagaagcccu

SEQ ID NO: 2016599 - RNA, 19 nt, Artificial Sequence
  Description of Artificial Sequence: Synthetic oligonucleotide
cuggcaucauguagaagug

SEQ ID NO: 2016600 - RNA, 19 nt, Artificial Sequence
  Description of Artificial Sequence: Synthetic oligonucleotide
uccauugugggagucuccu

SEQ ID NO: 2016601 - RNA, 19 nt, Artificial Sequence
  Description of Artificial Sequence: Synthetic oligonucleotide
cagcugacaagaagguaag

SEQ ID NO: 2016602 - RNA, 19 nt, Artificial Sequence
  Description of Artificial Sequence: Synthetic oligonucleotide
ucuaaggauuccagaugaa

SEQ ID NO: 2016603 - RNA, 19 nt, Artificial Sequence
  Description of Artificial Sequence: Synthetic oligonucleotide
uguccaucggcuccuguua

SEQ ID NO: 2016604 - RNA, 19 nt, Artificial Sequence
  Description of Artificial Sequence: Synthetic oligonucleotide
auucucggaacauccuccu

SEQ ID NO: 2016605 - RNA, 19 nt, Artificial Sequence
  Description of Artificial Sequence: Synthetic oligonucleotide
ucucuugauuaaugguggu

SEQ ID NO: 2016606 - RNA, 19 nt, Artificial Sequence
  Description of Artificial Sequence: Synthetic oligonucleotide
aucggcuccuguuaguaau

SEQ ID NO: 2016607 - RNA, 19 nt, Artificial Sequence
  Description of Artificial Sequence: Synthetic oligonucleotide
uaucugcaaggucuuguau

SEQ ID NO: 2016608 - RNA, 19 nt, Artificial Sequence
  Description of Artificial Sequence: Synthetic oligonucleotide
gaauuccggagcuucugga

SEQ ID NO: 2016609 - RNA, 19 nt, Artificial Sequence
  Description of Artificial Sequence: Synthetic oligonucleotide
uuuccauugugggagucuc

SEQ ID NO: 2016610 - RNA, 19 nt, Artificial Sequence
  Description of Artificial Sequence: Synthetic oligonucleotide
agaucauguauaagaccuc

SEQ ID NO: 2016611 - RNA, 19 nt, Artificial Sequence
  Description of Artificial Sequence: Synthetic oligonucleotide
auauguggguacaugacuu

SEQ ID NO: 2016612 - RNA, 19 nt, Artificial Sequence
  Description of Artificial Sequence: Synthetic oligonucleotide
caagaagguaagcaaucca

SEQ ID NO: 2016613 - RNA, 19 nt, Artificial Sequence
  Description of Artificial Sequence: Synthetic oligonucleotide
aguucugaugaaucacuuu

SEQ ID NO: 2016614 - RNA, 19 nt, Artificial Sequence
  Description of Artificial Sequence: Synthetic oligonucleotide
cagagaaaccacugacaac

SEQ ID NO: 2016615 - RNA, 19 nt, Artificial Sequence
  Description of Artificial Sequence: Synthetic oligonucleotide
caggcuuuggguuuggaua

SEQ ID NO: 2016616 - RNA, 19 nt, Artificial Sequence
  Description of Artificial Sequence: Synthetic oligonucleotide
agccuucgaucacuguccg

SEQ ID NO: 2016617 - RNA, 19 nt, Artificial Sequence
  Description of Artificial Sequence: Synthetic oligonucleotide
uaaagcucucauguagauc

SEQ ID NO: 2016618 - RNA, 19 nt, Artificial Sequence
  Description of Artificial Sequence: Synthetic oligonucleotide
ugcagcacugucguuuucu

SEQ ID NO: 2016619 - RNA, 19 nt, Artificial Sequence
  Description of Artificial Sequence: Synthetic oligonucleotide
cuuuggguuuggauaaaga

SEQ ID NO: 2016620 - RNA, 19 nt, Artificial Sequence
  Description of Artificial Sequence: Synthetic oligonucleotide
acuuuauugcagccuucga

SEQ ID NO: 2016621 - RNA, 19 nt, Artificial Sequence
  Description of Artificial Sequence: Synthetic oligonucleotide
gaucacuguccgcuuguac

SEQ ID NO: 2016622 - RNA, 19 nt, Artificial Sequence
  Description of Artificial Sequence: Synthetic oligonucleotide
gagaauuccggagcuucug

SEQ ID NO: 2016623 - RNA, 19 nt, Artificial Sequence
  Description of Artificial Sequence: Synthetic oligonucleotide
ucugcagucuucucuucua

SEQ ID NO: 2016624 - RNA, 19 nt, Artificial Sequence
  Description of Artificial Sequence: Synthetic oligonucleotide
caagguuuccauuguggga

SEQ ID NO: 2016625 - RNA, 19 nt, Artificial Sequence
  Description of Artificial Sequence: Synthetic oligonucleotide
cacuauuuguaaagcucuc

SEQ ID NO: 2016626 - RNA, 19 nt, Artificial Sequence
  Description of Artificial Sequence: Synthetic oligonucleotide
gaccccauacacuauuugu

SEQ ID NO: 2016627 - RNA, 19 nt, Artificial Sequence
  Description of Artificial Sequence: Synthetic oligonucleotide
agcugacaagaagguaagc

SEQ ID NO: 2016628 - RNA, 19 nt, Artificial Sequence
  Description of Artificial Sequence: Synthetic oligonucleotide
cagagaauuccggagcuuc

SEQ ID NO: 2016629 - RNA, 19 nt, Artificial Sequence
  Description of Artificial Sequence: Synthetic oligonucleotide
cuucuggaucucuugauua

SEQ ID NO: 2016630 - RNA, 19 nt, Artificial Sequence
  Description of Artificial Sequence: Synthetic oligonucleotide
gguaagaagcccuccauua

SEQ ID NO: 2016631 - RNA, 19 nt, Artificial Sequence
  Description of Artificial Sequence: Synthetic oligonucleotide
uuccauugugggagucucc

SEQ ID NO: 2016632 - RNA, 19 nt, Artificial Sequence
  Description of Artificial Sequence: Synthetic oligonucleotide
uacagucaucagucuucgg

SEQ ID NO: 2016633 - RNA, 19 nt, Artificial Sequence
  Description of Artificial Sequence: Synthetic oligonucleotide
gcacugucguuuucuaagg

SEQ ID NO: 2016634 - RNA, 19 nt, Artificial Sequence
  Description of Artificial Sequence: Synthetic oligonucleotide
ugcgaauaugaaccacaau

SEQ ID NO: 2016635 - RNA, 19 nt, Artificial Sequence
  Description of Artificial Sequence: Synthetic oligonucleotide
agaagcccuccauuauaug

SEQ ID NO: 2016636 - RNA, 19 nt, Artificial Sequence
  Description of Artificial Sequence: Synthetic oligonucleotide
aucauguauaagaccucag

SEQ ID NO: 2016637 - RNA, 19 nt, Artificial Sequence
  Description of Artificial Sequence: Synthetic oligonucleotide
aguguuccagccggacccc

SEQ ID NO: 2016638 - RNA, 19 nt, Artificial Sequence
  Description of Artificial Sequence: Synthetic oligonucleotide
guacaugacuucugcguuc

SEQ ID NO: 2016639 - RNA, 19 nt, Artificial Sequence
  Description of Artificial Sequence: Synthetic oligonucleotide
ugcguucacuggcaucaug

SEQ ID NO: 2016640 - RNA, 19 nt, Artificial Sequence
  Description of Artificial Sequence: Synthetic oligonucleotide
cacugacaacuuuaguuca

SEQ ID NO: 2016641 - RNA, 19 nt, Artificial Sequence
  Description of Artificial Sequence: Synthetic oligonucleotide
agaaaccacugacaacuuu

SEQ ID NO: 2016642 - RNA, 19 nt, Artificial Sequence
  Description of Artificial Sequence: Synthetic oligonucleotide
ucucuggagaguccacaau

SEQ ID NO: 2016643 - RNA, 19 nt, Artificial Sequence
  Description of Artificial Sequence: Synthetic oligonucleotide
uuaaagcacguggugccaa

SEQ ID NO: 2016644 - RNA, 19 nt, Artificial Sequence
  Description of Artificial Sequence: Synthetic oligonucleotide
ucaagcugucuugaacuuc

SEQ ID NO: 2016645 - RNA, 19 nt, Artificial Sequence
  Description of Artificial Sequence: Synthetic oligonucleotide
gcugacaagaagguaagca

SEQ ID NO: 2016646 - RNA, 19 nt, Artificial Sequence
  Description of Artificial Sequence: Synthetic oligonucleotide
cucuugauuaauggugguc

SEQ ID NO: 2016647 - RNA, 19 nt, Artificial Sequence
  Description of Artificial Sequence: Synthetic oligonucleotide
uuguccaucggcuccuguu

SEQ ID NO: 2016648 - RNA, 19 nt, Artificial Sequence
  Description of Artificial Sequence: Synthetic oligonucleotide
ccuguuaucugcaaggucu

SEQ ID NO: 2016649 - RNA, 19 nt, Artificial Sequence
  Description of Artificial Sequence: Synthetic oligonucleotide
cuaaggauuccagaugaaa

SEQ ID NO: 2016650 - RNA, 19 nt, Artificial Sequence
  Description of Artificial Sequence: Synthetic oligonucleotide
ucaaugcgcucaugguacu

SEQ ID NO: 2016651 - RNA, 19 nt, Artificial Sequence
  Description of Artificial Sequence: Synthetic oligonucleotide
cacuugcucacagacagca

SEQ ID NO: 2016652 - RNA, 19 nt, Artificial Sequence
  Description of Artificial Sequence: Synthetic oligonucleotide
agccggaccccauacacua

SEQ ID NO: 2016653 - RNA, 19 nt, Artificial Sequence
  Description of Artificial Sequence: Synthetic oligonucleotide
uugucuucucaaugcgcuc

SEQ ID NO: 2016654 - RNA, 19 nt, Artificial Sequence
  Description of Artificial Sequence: Synthetic oligonucleotide
cuauuuguaaagcucucau

SEQ ID NO: 2016655 - RNA, 19 nt, Artificial Sequence
  Description of Artificial Sequence: Synthetic oligonucleotide
gguggucacuugcucacag

SEQ ID NO: 2016656 - RNA, 19 nt, Artificial Sequence
  Description of Artificial Sequence: Synthetic oligonucleotide
ccagcugacaagaagguaa

SEQ ID NO: 2016657 - RNA, 19 nt, Artificial Sequence
  Description of Artificial Sequence: Synthetic oligonucleotide
guccaucggcuccuguuag

SEQ ID NO: 2016658 - RNA, 19 nt, Artificial Sequence
  Description of Artificial Sequence: Synthetic oligonucleotide
cucaugguacuucuccaga

SEQ ID NO: 2016659 - RNA, 19 nt, Artificial Sequence
  Description of Artificial Sequence: Synthetic oligonucleotide
gcagccuucgaucacuguc

SEQ ID NO: 2016660 - RNA, 19 nt, Artificial Sequence
  Description of Artificial Sequence: Synthetic oligonucleotide
auuccagaugaaagaauaa

SEQ ID NO: 2016661 - RNA, 19 nt, Artificial Sequence
  Description of Artificial Sequence: Synthetic oligonucleotide
ucccuguuaucugcaaggu

SEQ ID NO: 2016662 - RNA, 19 nt, Artificial Sequence
  Description of Artificial Sequence: Synthetic oligonucleotide
augcgcucaugguacuucu

SEQ ID NO: 2016663 - RNA, 19 nt, Artificial Sequence
  Description of Artificial Sequence: Synthetic oligonucleotide
acaacaucuuuuaguugcu

SEQ ID NO: 2016664 - RNA, 19 nt, Artificial Sequence
  Description of Artificial Sequence: Synthetic oligonucleotide
ggugccaagcuucuccuuc

SEQ ID NO: 2016665 - RNA, 19 nt, Artificial Sequence
  Description of Artificial Sequence: Synthetic oligonucleotide
ucggaacauccuccucuug

SEQ ID NO: 2016666 - RNA, 19 nt, Artificial Sequence
  Description of Artificial Sequence: Synthetic oligonucleotide
ugcagucuucucuucuauu

SEQ ID NO: 2016667 - RNA, 19 nt, Artificial Sequence
  Description of Artificial Sequence: Synthetic oligonucleotide
caaacccuuugguuuucuc

SEQ ID NO: 2016668 - RNA, 19 nt, Artificial Sequence
  Description of Artificial Sequence: Synthetic oligonucleotide
acuugcucacagacagcac

SEQ ID NO: 2016669 - RNA, 19 nt, Artificial Sequence
  Description of Artificial Sequence: Synthetic oligonucleotide
acaugacuucugcguucac

SEQ ID NO: 2016670 - RNA, 19 nt, Artificial Sequence
  Description of Artificial Sequence: Synthetic oligonucleotide
acuucugcguucacuggca

SEQ ID NO: 2016671 - RNA, 19 nt, Artificial Sequence
  Description of Artificial Sequence: Synthetic oligonucleotide
cuguccgcuuguacugccc

SEQ ID NO: 2016672 - RNA, 19 nt, Artificial Sequence
  Description of Artificial Sequence: Synthetic oligonucleotide
uccaucggcuccuguuagu

SEQ ID NO: 2016673 - RNA, 19 nt, Artificial Sequence
  Description of Artificial Sequence: Synthetic oligonucleotide
agagaauuccggagcuucu

SEQ ID NO: 2016674 - RNA, 19 nt, Artificial Sequence
  Description of Artificial Sequence: Synthetic oligonucleotide
agcacguggugccaagcuu

SEQ ID NO: 2016675 - RNA, 19 nt, Artificial Sequence
  Description of Artificial Sequence: Synthetic oligonucleotide
auaagaccucaggcuuugg

SEQ ID NO: 2016676 - RNA, 19 nt, Artificial Sequence
  Description of Artificial Sequence: Synthetic oligonucleotide
ggguacaugacuucugcgu

SEQ ID NO: 2016677 - RNA, 19 nt, Artificial Sequence
  Description of Artificial Sequence: Synthetic oligonucleotide
guaaagcucucauguagau

SEQ ID NO: 2016678 - RNA, 19 nt, Artificial Sequence
  Description of Artificial Sequence: Synthetic oligonucleotide
ggaucucuugauuaauggu

SEQ ID NO: 2016679 - RNA, 19 nt, Artificial Sequence
  Description of Artificial Sequence: Synthetic oligonucleotide
ucggcuccuguuaguaauu

SEQ ID NO: 2016680 - RNA, 19 nt, Artificial Sequence
  Description of Artificial Sequence: Synthetic oligonucleotide
guaagaagcccuccauuau

SEQ ID NO: 2016681 - RNA, 19 nt, Artificial Sequence
  Description of Artificial Sequence: Synthetic oligonucleotide
aucuggggaaugacaaggu

SEQ ID NO: 2016682 - RNA, 19 nt, Artificial Sequence
  Description of Artificial Sequence: Synthetic oligonucleotide
ggaccccauacacuauuug

SEQ ID NO: 2016683 - RNA, 19 nt, Artificial Sequence
  Description of Artificial Sequence: Synthetic oligonucleotide
agguuuccauugugggagu

SEQ ID NO: 2016684 - RNA, 19 nt, Artificial Sequence
  Description of Artificial Sequence: Synthetic oligonucleotide
cagauuuaaucuucuggau

SEQ ID NO: 2016685 - RNA, 19 nt, Artificial Sequence
  Description of Artificial Sequence: Synthetic oligonucleotide
ugcgcucaugguacuucuc

SEQ ID NO: 2016686 - RNA, 19 nt, Artificial Sequence
  Description of Artificial Sequence: Synthetic oligonucleotide
cgaauaugaaccacaaucu

SEQ ID NO: 2016687 - RNA, 19 nt, Artificial Sequence
  Description of Artificial Sequence: Synthetic oligonucleotide
cacugucguuuucuaagga

SEQ ID NO: 2016688 - RNA, 19 nt, Artificial Sequence
  Description of Artificial Sequence: Synthetic oligonucleotide
cacuguccgcuuguacugc

SEQ ID NO: 2016689 - RNA, 19 nt, Artificial Sequence
  Description of Artificial Sequence: Synthetic oligonucleotide
ugcagccuucgaucacugu

SEQ ID NO: 2016690 - RNA, 19 nt, Artificial Sequence
  Description of Artificial Sequence: Synthetic oligonucleotide
ccagccggaccccauacac

SEQ ID NO: 2016691 - RNA, 19 nt, Artificial Sequence
  Description of Artificial Sequence: Synthetic oligonucleotide
gucuucggagggaauuuuc

SEQ ID NO: 2016692 - RNA, 19 nt, Artificial Sequence
  Description of Artificial Sequence: Synthetic oligonucleotide
aucacuucuugcagagaau

SEQ ID NO: 2016693 - RNA, 19 nt, Artificial Sequence
  Description of Artificial Sequence: Synthetic oligonucleotide
guggucacuugcucacaga

SEQ ID NO: 2016694 - RNA, 19 nt, Artificial Sequence
  Description of Artificial Sequence: Synthetic oligonucleotide
accucaggcuuuggguuug

SEQ ID NO: 2016695 - RNA, 19 nt, Artificial Sequence
  Description of Artificial Sequence: Synthetic oligonucleotide
cuuuugggucuaauuuccu

SEQ ID NO: 2016696 - RNA, 19 nt, Artificial Sequence
  Description of Artificial Sequence: Synthetic oligonucleotide
gcuuuucaagcugucuuga

SEQ ID NO: 2016697 - RNA, 19 nt, Artificial Sequence
  Description of Artificial Sequence: Synthetic oligonucleotide
caugacuucugcguucacu

SEQ ID NO: 2016698 - RNA, 19 nt, Artificial Sequence
  Description of Artificial Sequence: Synthetic oligonucleotide
caauccacagagucucuau

SEQ ID NO: 2016699 - RNA, 19 nt, Artificial Sequence
  Description of Artificial Sequence: Synthetic oligonucleotide
aagcucucauguagaucau

SEQ ID NO: 2016700 - RNA, 19 nt, Artificial Sequence
  Description of Artificial Sequence: Synthetic oligonucleotide
gcuccuguuaguaauuuau

SEQ ID NO: 2016701 - RNA, 19 nt, Artificial Sequence
  Description of Artificial Sequence: Synthetic oligonucleotide
gcacguggugccaagcuuc

SEQ ID NO: 2016702 - RNA, 19 nt, Artificial Sequence
  Description of Artificial Sequence: Synthetic oligonucleotide
gcucucauguagaucaugu

SEQ ID NO: 2016703 - RNA, 19 nt, Artificial Sequence
  Description of Artificial Sequence: Synthetic oligonucleotide
ggagggaauuuucuucagu

SEQ ID NO: 2016704 - RNA, 19 nt, Artificial Sequence
  Description of Artificial Sequence: Synthetic oligonucleotide
caucggcuccuguuaguaa

SEQ ID NO: 2016705 - RNA, 19 nt, Artificial Sequence
  Description of Artificial Sequence: Synthetic oligonucleotide
cuccuguuaguaauuuauu

SEQ ID NO: 2016706 - RNA, 19 nt, Artificial Sequence
  Description of Artificial Sequence: Synthetic oligonucleotide
ggucacuugcucacagaca

SEQ ID NO: 2016707 - RNA, 19 nt, Artificial Sequence
  Description of Artificial Sequence: Synthetic oligonucleotide
gugccaagcuucuccuucu

SEQ ID NO: 2016708 - RNA, 19 nt, Artificial Sequence
  Description of Artificial Sequence: Synthetic oligonucleotide
cuucggagggaauuuucuu

SEQ ID NO: 2016709 - RNA, 19 nt, Artificial Sequence
  Description of Artificial Sequence: Synthetic oligonucleotide
ccacaauuuugcuuuucaa

SEQ ID NO: 2016710 - RNA, 19 nt, Artificial Sequence
  Description of Artificial Sequence: Synthetic oligonucleotide
agcaauccacagagucucu

SEQ ID NO: 2016711 - RNA, 19 nt, Artificial Sequence
  Description of Artificial Sequence: Synthetic oligonucleotide
gaccucaggcuuuggguuu

SEQ ID NO: 2016712 - RNA, 19 nt, Artificial Sequence
  Description of Artificial Sequence: Synthetic oligonucleotide
guauaagaccucaggcuuu

SEQ ID NO: 2016713 - RNA, 19 nt, Artificial Sequence
  Description of Artificial Sequence: Synthetic oligonucleotide
cugguaagaagcccuccau

SEQ ID NO: 2016714 - RNA, 19 nt, Artificial Sequence
  Description of Artificial Sequence: Synthetic oligonucleotide
acguggugccaagcuucuc

SEQ ID NO: 2016715 - RNA, 19 nt, Artificial Sequence
  Description of Artificial Sequence: Synthetic oligonucleotide
ccuucgaucacuguccgcu

SEQ ID NO: 2016716 - RNA, 19 nt, Artificial Sequence
  Description of Artificial Sequence: Synthetic oligonucleotide
cggaacauccuccucuuga

SEQ ID NO: 2016717 - RNA, 19 nt, Artificial Sequence
  Description of Artificial Sequence: Synthetic oligonucleotide
cccuguuaucugcaagguc

SEQ ID NO: 2016718 - RNA, 19 nt, Artificial Sequence
  Description of Artificial Sequence: Synthetic oligonucleotide
uccggagcuucuggacagu

SEQ ID NO: 2016719 - RNA, 19 nt, Artificial Sequence
  Description of Artificial Sequence: Synthetic oligonucleotide
ggcaucauguagaaguguu

SEQ ID NO: 2016720 - RNA, 19 nt, Artificial Sequence
  Description of Artificial Sequence: Synthetic oligonucleotide
gcguucacuggcaucaugu

SEQ ID NO: 2016721 - RNA, 19 nt, Artificial Sequence
  Description of Artificial Sequence: Synthetic oligonucleotide
gcccuccauuauauguggg

SEQ ID NO: 2016722 - RNA, 19 nt, Artificial Sequence
  Description of Artificial Sequence: Synthetic oligonucleotide
ccaguccucucgcuucuug

SEQ ID NO: 2016723 - RNA, 19 nt, Artificial Sequence
  Description of Artificial Sequence: Synthetic oligonucleotide
aucagucuucggagggaau

SEQ ID NO: 2016724 - RNA, 19 nt, Artificial Sequence
  Description of Artificial Sequence: Synthetic oligonucleotide
gguuuggauaaagaucauu

SEQ ID NO: 2016725 - RNA, 19 nt, Artificial Sequence
  Description of Artificial Sequence: Synthetic oligonucleotide
ccuccauuauaugugggua

SEQ ID NO: 2016726 - RNA, 19 nt, Artificial Sequence
  Description of Artificial Sequence: Synthetic oligonucleotide
gaucauucuuagagagguu

SEQ ID NO: 2016727 - RNA, 19 nt, Artificial Sequence
  Description of Artificial Sequence: Synthetic oligonucleotide
cacuccucuguugucuucu

SEQ ID NO: 2016728 - RNA, 19 nt, Artificial Sequence
  Description of Artificial Sequence: Synthetic oligonucleotide
ccauugugggagucuccuc

SEQ ID NO: 2016729 - RNA, 19 nt, Artificial Sequence
  Description of Artificial Sequence: Synthetic oligonucleotide
cucggaacauccuccucuu

SEQ ID NO: 2016730 - RNA, 19 nt, Artificial Sequence
  Description of Artificial Sequence: Synthetic oligonucleotide
gccuucgaucacuguccgc

SEQ ID NO: 2016731 - RNA, 19 nt, Artificial Sequence
  Description of Artificial Sequence: Synthetic oligonucleotide
cacguggugccaagcuucu

SEQ ID NO: 2016732 - RNA, 19 nt, Artificial Sequence
  Description of Artificial Sequence: Synthetic oligonucleotide
ggauuccagaugaaagaau

SEQ ID NO: 2016733 - RNA, 19 nt, Artificial Sequence
  Description of Artificial Sequence: Synthetic oligonucleotide
gggucuaauuuccuuccuu

SEQ ID NO: 2016734 - RNA, 19 nt, Artificial Sequence
  Description of Artificial Sequence: Synthetic oligonucleotide
cagcacuccucuguugucu

SEQ ID NO: 2016735 - RNA, 19 nt, Artificial Sequence
  Description of Artificial Sequence: Synthetic oligonucleotide
gagaaaccacugacaacuu

SEQ ID NO: 2016736 - RNA, 19 nt, Artificial Sequence
  Description of Artificial Sequence: Synthetic oligonucleotide
cugcagucuucucuucuau

SEQ ID NO: 2016737 - RNA, 19 nt, Artificial Sequence
  Description of Artificial Sequence: Synthetic oligonucleotide
cccuccauuauaugugggu

SEQ ID NO: 2016738 - RNA, 19 nt, Artificial Sequence
  Description of Artificial Sequence: Synthetic oligonucleotide
gcaauccacagagucucua

SEQ ID NO: 2016739 - RNA, 19 nt, Artificial Sequence
  Description of Artificial Sequence: Synthetic oligonucleotide
cagccggaccccauacacu

SEQ ID NO: 2016740 - RNA, 19 nt, Artificial Sequence
  Description of Artificial Sequence: Synthetic oligonucleotide
gguaagcaauccacagagu

SEQ ID NO: 2016741 - RNA, 19 nt, Artificial Sequence
  Description of Artificial Sequence: Synthetic oligonucleotide
cuucgaucacuguccgcuu

SEQ ID NO: 2016742 - RNA, 19 nt, Artificial Sequence
  Description of Artificial Sequence: Synthetic oligonucleotide
ccuccucuugagcucugca

SEQ ID NO: 2016743 - RNA, 19 nt, Artificial Sequence
  Description of Artificial Sequence: Synthetic oligonucleotide
cguucacuggcaucaugua

SEQ ID NO: 2016744 - RNA, 19 nt, Artificial Sequence
  Description of Artificial Sequence: Synthetic oligonucleotide
caaugcgcucaugguacuu

SEQ ID NO: 2016745 - RNA, 19 nt, Artificial Sequence
  Description of Artificial Sequence: Synthetic oligonucleotide
ccagagcacuuuucaaguu

SEQ ID NO: 2016746 - RNA, 19 nt, Artificial Sequence
  Description of Artificial Sequence: Synthetic oligonucleotide
cugcaaggucuuguauuuu

SEQ ID NO: 2016747 - RNA, 19 nt, Artificial Sequence
  Description of Artificial Sequence: Synthetic oligonucleotide
ccauuauauguggguacau

SEQ ID NO: 2016748 - RNA, 19 nt, Artificial Sequence
  Description of Artificial Sequence: Synthetic oligonucleotide
ccggaccccauacacuauu

SEQ ID NO: 2016749 - RNA, 19 nt, Artificial Sequence
  Description of Artificial Sequence: Synthetic oligonucleotide
cgaucacuguccgcuugua

SEQ ID NO: 2016750 - RNA, 19 nt, Artificial Sequence
  Description of Artificial Sequence: Synthetic oligonucleotide
gccggaccccauacacuau

SEQ ID NO: 2016751 - RNA, 19 nt, Artificial Sequence
  Description of Artificial Sequence: Synthetic oligonucleotide
cggcuccuguuaguaauuu

SEQ ID NO: 2016752 - RNA, 19 nt, Artificial Sequence
  Description of Artificial Sequence: Synthetic oligonucleotide
auuaauauuuccuugaccc

SEQ ID NO: 2016753 - RNA, 19 nt, Artificial Sequence
  Description of Artificial Sequence: Synthetic oligonucleotide
gaaauugggauucugacag

SEQ ID NO: 2016754 - RNA, 19 nt, Artificial Sequence
  Description of Artificial Sequence: Synthetic oligonucleotide
uuaucuauuacucagcaua

SEQ ID NO: 2016755 - RNA, 19 nt, Artificial Sequence
  Description of Artificial Sequence: Synthetic oligonucleotide
uauacaauugaaauuggga

SEQ ID NO: 2016756 - RNA, 19 nt, Artificial Sequence
  Description of Artificial Sequence: Synthetic oligonucleotide
uuuucuagcauuuaacuuc

SEQ ID NO: 2016757 - RNA, 19 nt, Artificial Sequence
  Description of Artificial Sequence: Synthetic oligonucleotide
ugaaaugucagugugggag

SEQ ID NO: 2016758 - RNA, 19 nt, Artificial Sequence
  Description of Artificial Sequence: Synthetic oligonucleotide
uauuacucagcauauucgg

SEQ ID NO: 2016759 - RNA, 19 nt, Artificial Sequence
  Description of Artificial Sequence: Synthetic oligonucleotide
agugcuagggaccaaacuc

SEQ ID NO: 2016760 - RNA, 19 nt, Artificial Sequence
  Description of Artificial Sequence: Synthetic oligonucleotide
augucaacugugcugagcc

SEQ ID NO: 2016761 - RNA, 19 nt, Artificial Sequence
  Description of Artificial Sequence: Synthetic oligonucleotide
aauaucagauacauaauug

SEQ ID NO: 2016762 - RNA, 19 nt, Artificial Sequence
  Description of Artificial Sequence: Synthetic oligonucleotide
aaucagauaugcugccacc

SEQ ID NO: 2016763 - RNA, 19 nt, Artificial Sequence
  Description of Artificial Sequence: Synthetic oligonucleotide
uuacucagcauauucgggg

SEQ ID NO: 2016764 - RNA, 19 nt, Artificial Sequence
  Description of Artificial Sequence: Synthetic oligonucleotide
aagauuuagccagacaauc

SEQ ID NO: 2016765 - RNA, 19 nt, Artificial Sequence
  Description of Artificial Sequence: Synthetic oligonucleotide
uaaguauuuauucuuuccu

SEQ ID NO: 2016766 - RNA, 19 nt, Artificial Sequence
  Description of Artificial Sequence: Synthetic oligonucleotide
agaaaauaagauuuagcca

SEQ ID NO: 2016767 - RNA, 19 nt, Artificial Sequence
  Description of Artificial Sequence: Synthetic oligonucleotide
auugacugguacuugagag

SEQ ID NO: 2016768 - RNA, 19 nt, Artificial Sequence
  Description of Artificial Sequence: Synthetic oligonucleotide
ucuauuacucagcauauuc

SEQ ID NO: 2016769 - RNA, 19 nt, Artificial Sequence
  Description of Artificial Sequence: Synthetic oligonucleotide
cacauuaucuauuacucag

SEQ ID NO: 2016770 - RNA, 19 nt, Artificial Sequence
  Description of Artificial Sequence: Synthetic oligonucleotide
acaauugaaauugggauuc

SEQ ID NO: 2016771 - RNA, 19 nt, Artificial Sequence
  Description of Artificial Sequence: Synthetic oligonucleotide
cuauuacucagcauauucg

SEQ ID NO: 2016772 - RNA, 19 nt, Artificial Sequence
  Description of Artificial Sequence: Synthetic oligonucleotide
auacaauugaaauugggau

SEQ ID NO: 2016773 - RNA, 19 nt, Artificial Sequence
  Description of Artificial Sequence: Synthetic oligonucleotide
uuauuucagggaaggaagg

SEQ ID NO: 2016774 - RNA, 19 nt, Artificial Sequence
  Description of Artificial Sequence: Synthetic oligonucleotide
gauguuaucaguuaucagu

SEQ ID NO: 2016775 - RNA, 19 nt, Artificial Sequence
  Description of Artificial Sequence: Synthetic oligonucleotide
ugcaguaaucuccuugugg

SEQ ID NO: 2016776 - RNA, 19 nt, Artificial Sequence
  Description of Artificial Sequence: Synthetic oligonucleotide
acaaagaacagaucuaagu

SEQ ID NO: 2016777 - RNA, 19 nt, Artificial Sequence
  Description of Artificial Sequence: Synthetic oligonucleotide
uuuacuuggguacagccaa

SEQ ID NO: 2016778 - RNA, 19 nt, Artificial Sequence
  Description of Artificial Sequence: Synthetic oligonucleotide
uucuauagcuuccucuggg

SEQ ID NO: 2016779 - RNA, 19 nt, Artificial Sequence
  Description of Artificial Sequence: Synthetic oligonucleotide
aaugcacguagacacacug

SEQ ID NO: 2016780 - RNA, 19 nt, Artificial Sequence
  Description of Artificial Sequence: Synthetic oligonucleotide
ucuucguucauggugauca

SEQ ID NO: 2016781 - RNA, 19 nt, Artificial Sequence
  Description of Artificial Sequence: Synthetic oligonucleotide
uguuauggugccauuacac

SEQ ID NO: 2016782 - RNA, 19 nt, Artificial Sequence
  Description of Artificial Sequence: Synthetic oligonucleotide
cauuuaacuucuguuaugg

SEQ ID NO: 2016783 - RNA, 19 nt, Artificial Sequence
  Description of Artificial Sequence: Synthetic oligonucleotide
uuaucaguauucuuugcug

SEQ ID NO: 2016784 - RNA, 19 nt, Artificial Sequence
  Description of Artificial Sequence: Synthetic oligonucleotide
ucuugucucguacucuucg

SEQ ID NO: 2016785 - RNA, 19 nt, Artificial Sequence
  Description of Artificial Sequence: Synthetic oligonucleotide
agcacgguggagucgaugc

SEQ ID NO: 2016786 - RNA, 19 nt, Artificial Sequence
  Description of Artificial Sequence: Synthetic oligonucleotide
agaucuaaguauuuauucu

SEQ ID NO: 2016787 - RNA, 19 nt, Artificial Sequence
  Description of Artificial Sequence: Synthetic oligonucleotide
uccaguaccagccggcgcg

SEQ ID NO: 2016788 - RNA, 19 nt, Artificial Sequence
  Description of Artificial Sequence: Synthetic oligonucleotide
aauaagauuuagccagaca

SEQ ID NO: 2016789 - RNA, 19 nt, Artificial Sequence
  Description of Artificial Sequence: Synthetic oligonucleotide
uugaaauugggauucugac

SEQ ID NO: 2016790 - RNA, 19 nt, Artificial Sequence
  Description of Artificial Sequence: Synthetic oligonucleotide
ucguucauggugaucaccc

SEQ ID NO: 2016791 - RNA, 19 nt, Artificial Sequence
  Description of Artificial Sequence: Synthetic oligonucleotide
aaacucguagccuuauaca

SEQ ID NO: 2016792 - RNA, 19 nt, Artificial Sequence
  Description of Artificial Sequence: Synthetic oligonucleotide
ugcacguagacacacuggc

SEQ ID NO: 2016793 - RNA, 19 nt, Artificial Sequence
  Description of Artificial Sequence: Synthetic oligonucleotide
uuuggaagugcuagggacc

SEQ ID NO: 2016794 - RNA, 19 nt, Artificial Sequence
  Description of Artificial Sequence: Synthetic oligonucleotide
ugaaauugggauucugaca

SEQ ID NO: 2016795 - RNA, 19 nt, Artificial Sequence
  Description of Artificial Sequence: Synthetic oligonucleotide
aacucguagccuuauacau

SEQ ID NO: 2016796 - RNA, 19 nt, Artificial Sequence
  Description of Artificial Sequence: Synthetic oligonucleotide
aguuaucaguauucuuugc

SEQ ID NO: 2016797 - RNA, 19 nt, Artificial Sequence
  Description of Artificial Sequence: Synthetic oligonucleotide
uacucuucguucaugguga

SEQ ID NO: 2016798 - RNA, 19 nt, Artificial Sequence
  Description of Artificial Sequence: Synthetic oligonucleotide
cucguagccuuauacaugc

SEQ ID NO: 2016799 - RNA, 19 nt, Artificial Sequence
  Description of Artificial Sequence: Synthetic oligonucleotide
agccuuacaaugcacguag

SEQ ID NO: 2016800 - RNA, 19 nt, Artificial Sequence
  Description of Artificial Sequence: Synthetic oligonucleotide
uaauauuuccuugacccug

SEQ ID NO: 2016801 - RNA, 19 nt, Artificial Sequence
  Description of Artificial Sequence: Synthetic oligonucleotide
cuagggaccaaacucguag

SEQ ID NO: 2016802 - RNA, 19 nt, Artificial Sequence
  Description of Artificial Sequence: Synthetic oligonucleotide
uuucuagcauuuaacuucu

SEQ ID NO: 2016803 - RNA, 19 nt, Artificial Sequence
  Description of Artificial Sequence: Synthetic oligonucleotide
ucuagcauuuaacuucugu

SEQ ID NO: 2016804 - RNA, 19 nt, Artificial Sequence
  Description of Artificial Sequence: Synthetic oligonucleotide
cagaucuaaguauuuauuc

SEQ ID NO: 2016805 - RNA, 19 nt, Artificial Sequence
  Description of Artificial Sequence: Synthetic oligonucleotide
ugccaaguuauacaauuga

SEQ ID NO: 2016806 - RNA, 19 nt, Artificial Sequence
  Description of Artificial Sequence: Synthetic oligonucleotide
ugccauuacacaaaauauc

SEQ ID NO: 2016807 - RNA, 19 nt, Artificial Sequence
  Description of Artificial Sequence: Synthetic oligonucleotide
ucguacucuucguucaugg

SEQ ID NO: 2016808 - RNA, 19 nt, Artificial Sequence
  Description of Artificial Sequence: Synthetic oligonucleotide
acauaauugauuucuguua

SEQ ID NO: 2016809 - RNA, 19 nt, Artificial Sequence
  Description of Artificial Sequence: Synthetic oligonucleotide
cauagucuugaaaugucag

SEQ ID NO: 2016810 - RNA, 19 nt, Artificial Sequence
  Description of Artificial Sequence: Synthetic oligonucleotide
gaugcggugguaccagucg

SEQ ID NO: 2016811 - RNA, 19 nt, Artificial Sequence
  Description of Artificial Sequence: Synthetic oligonucleotide
uugagagcaaacuggacuc

SEQ ID NO: 2016812 - RNA, 19 nt, Artificial Sequence
  Description of Artificial Sequence: Synthetic oligonucleotide
ucuguuauggugccauuac

SEQ ID NO: 2016813 - RNA, 19 nt, Artificial Sequence
  Description of Artificial Sequence: Synthetic oligonucleotide
acuugcagcugguuaggcc

SEQ ID NO: 2016814 - RNA, 19 nt, Artificial Sequence
  Description of Artificial Sequence: Synthetic oligonucleotide
acuucauagucuugaaaug

SEQ ID NO: 2016815 - RNA, 19 nt, Artificial Sequence
  Description of Artificial Sequence: Synthetic oligonucleotide
cacguagacacacuggccc

SEQ ID NO: 2016816 - RNA, 19 nt, Artificial Sequence
  Description of Artificial Sequence: Synthetic oligonucleotide
uuauggugccauuacacaa

SEQ ID NO: 2016817 - RNA, 19 nt, Artificial Sequence
  Description of Artificial Sequence: Synthetic oligonucleotide
auacauaauugauuucugu

SEQ ID NO: 2016818 - RNA, 19 nt, Artificial Sequence
  Description of Artificial Sequence: Synthetic oligonucleotide
uacaauugaaauugggauu

SEQ ID NO: 2016819 - RNA, 19 nt, Artificial Sequence
  Description of Artificial Sequence: Synthetic oligonucleotide
uguugcacaggaaucuugu

SEQ ID NO: 2016820 - RNA, 19 nt, Artificial Sequence
  Description of Artificial Sequence: Synthetic oligonucleotide
gaaucagauaugcugccac

SEQ ID NO: 2016821 - RNA, 19 nt, Artificial Sequence
  Description of Artificial Sequence: Synthetic oligonucleotide
caaacucguagccuuauac

SEQ ID NO: 2016822 - RNA, 19 nt, Artificial Sequence
  Description of Artificial Sequence: Synthetic oligonucleotide
ucuaaguauuuauucuuuc

SEQ ID NO: 2016823 - RNA, 19 nt, Artificial Sequence
  Description of Artificial Sequence: Synthetic oligonucleotide
uaagauuuagccagacaau

SEQ ID NO: 2016824 - RNA, 19 nt, Artificial Sequence
  Description of Artificial Sequence: Synthetic oligonucleotide
agggaccaaacucguagcc

SEQ ID NO: 2016825 - RNA, 19 nt, Artificial Sequence
  Description of Artificial Sequence: Synthetic oligonucleotide
uguguguccggauuuuggc

SEQ ID NO: 2016826 - RNA, 19 nt, Artificial Sequence
  Description of Artificial Sequence: Synthetic oligonucleotide
uaucuauuacucagcauau

SEQ ID NO: 2016827 - RNA, 19 nt, Artificial Sequence
  Description of Artificial Sequence: Synthetic oligonucleotide
gacuucauagucuugaaau

SEQ ID NO: 2016828 - RNA, 19 nt, Artificial Sequence
  Description of Artificial Sequence: Synthetic oligonucleotide
guacucuucguucauggug

SEQ ID NO: 2016829 - RNA, 19 nt, Artificial Sequence
  Description of Artificial Sequence: Synthetic oligonucleotide
uuaggccugauggagaugu

SEQ ID NO: 2016830 - RNA, 19 nt, Artificial Sequence
  Description of Artificial Sequence: Synthetic oligonucleotide
ugacugguacuugagagca

SEQ ID NO: 2016831 - RNA, 19 nt, Artificial Sequence
  Description of Artificial Sequence: Synthetic oligonucleotide
ucuauagcuuccucugggc

SEQ ID NO: 2016832 - RNA, 19 nt, Artificial Sequence
  Description of Artificial Sequence: Synthetic oligonucleotide
acaaugcacguagacacac

SEQ ID NO: 2016833 - RNA, 19 nt, Artificial Sequence
  Description of Artificial Sequence: Synthetic oligonucleotide
uguguccggauuuuggcga

SEQ ID NO: 2016834 - RNA, 19 nt, Artificial Sequence
  Description of Artificial Sequence: Synthetic oligonucleotide
aauugaaauugggauucug

SEQ ID NO: 2016835 - RNA, 19 nt, Artificial Sequence
  Description of Artificial Sequence: Synthetic oligonucleotide
gucuugaaaugucagugug

SEQ ID NO: 2016836 - RNA, 19 nt, Artificial Sequence
  Description of Artificial Sequence: Synthetic oligonucleotide
uagccagacaaucuuguuc

SEQ ID NO: 2016837 - RNA, 19 nt, Artificial Sequence
  Description of Artificial Sequence: Synthetic oligonucleotide
gagauguuaucaguuauca

SEQ ID NO: 2016838 - RNA, 19 nt, Artificial Sequence
  Description of Artificial Sequence: Synthetic oligonucleotide
auggugaucaccccgcgca

SEQ ID NO: 2016839 - RNA, 19 nt, Artificial Sequence
  Description of Artificial Sequence: Synthetic oligonucleotide
ccugaaucagauaugcugc

SEQ ID NO: 2016840 - RNA, 19 nt, Artificial Sequence
  Description of Artificial Sequence: Synthetic oligonucleotide
uugacccugucgaagaaaa

SEQ ID NO: 2016841 - RNA, 19 nt, Artificial Sequence
  Description of Artificial Sequence: Synthetic oligonucleotide
uauacaugcuggcaagcau

SEQ ID NO: 2016842 - RNA, 19 nt, Artificial Sequence
  Description of Artificial Sequence: Synthetic oligonucleotide
agauguuaucaguuaucag

SEQ ID NO: 2016843 - RNA, 19 nt, Artificial Sequence
  Description of Artificial Sequence: Synthetic oligonucleotide
caguuaucaguauucuuug

SEQ ID NO: 2016844 - RNA, 19 nt, Artificial Sequence
  Description of Artificial Sequence: Synthetic oligonucleotide
ucgaagaaaauaagauuua

SEQ ID NO: 2016845 - RNA, 19 nt, Artificial Sequence
  Description of Artificial Sequence: Synthetic oligonucleotide
ugugggagauguuaucagu

SEQ ID NO: 2016846 - RNA, 19 nt, Artificial Sequence
  Description of Artificial Sequence: Synthetic oligonucleotide
uucgcgguguugcacagga

SEQ ID NO: 2016847 - RNA, 19 nt, Artificial Sequence
  Description of Artificial Sequence: Synthetic oligonucleotide
uuauacaugcuggcaagca

SEQ ID NO: 2016848 - RNA, 19 nt, Artificial Sequence
  Description of Artificial Sequence: Synthetic oligonucleotide
aacuugcagcugguuaggc

SEQ ID NO: 2016849 - RNA, 19 nt, Artificial Sequence
  Description of Artificial Sequence: Synthetic oligonucleotide
gaaaugucagugugggaga

SEQ ID NO: 2016850 - RNA, 19 nt, Artificial Sequence
  Description of Artificial Sequence: Synthetic oligonucleotide
guuauggugccauuacaca

SEQ ID NO: 2016851 - RNA, 19 nt, Artificial Sequence
  Description of Artificial Sequence: Synthetic oligonucleotide
guguguccggauuuuggcg

SEQ ID NO: 2016852 - RNA, 19 nt, Artificial Sequence
  Description of Artificial Sequence: Synthetic oligonucleotide
ggugccauuacacaaaaua

SEQ ID NO: 2016853 - RNA, 19 nt, Artificial Sequence
  Description of Artificial Sequence: Synthetic oligonucleotide
augcggugguaccagucgc

SEQ ID NO: 2016854 - RNA, 19 nt, Artificial Sequence
  Description of Artificial Sequence: Synthetic oligonucleotide
ugcaccugaaucagauaug

SEQ ID NO: 2016855 - RNA, 19 nt, Artificial Sequence
  Description of Artificial Sequence: Synthetic oligonucleotide
cuucuauagcuuccucugg

SEQ ID NO: 2016856 - RNA, 19 nt, Artificial Sequence
  Description of Artificial Sequence: Synthetic oligonucleotide
cugauggagaugugugucc

SEQ ID NO: 2016857 - RNA, 19 nt, Artificial Sequence
  Description of Artificial Sequence: Synthetic oligonucleotide
auaugcugccaccauugug

SEQ ID NO: 2016858 - RNA, 19 nt, Artificial Sequence
  Description of Artificial Sequence: Synthetic oligonucleotide
gugcuagggaccaaacucg

SEQ ID NO: 2016859 - RNA, 19 nt, Artificial Sequence
  Description of Artificial Sequence: Synthetic oligonucleotide
cuuacaaugcacguagaca

SEQ ID NO: 2016860 - RNA, 19 nt, Artificial Sequence
  Description of Artificial Sequence: Synthetic oligonucleotide
aauugggauucugacagua

SEQ ID NO: 2016861 - RNA, 19 nt, Artificial Sequence
  Description of Artificial Sequence: Synthetic oligonucleotide
ucagugugggagauguuau

SEQ ID NO: 2016862 - RNA, 19 nt, Artificial Sequence
  Description of Artificial Sequence: Synthetic oligonucleotide
auauucgggguguuguccu

SEQ ID NO: 2016863 - RNA, 19 nt, Artificial Sequence
  Description of Artificial Sequence: Synthetic oligonucleotide
ugcggugguaccagucgcg

SEQ ID NO: 2016864 - RNA, 19 nt, Artificial Sequence
  Description of Artificial Sequence: Synthetic oligonucleotide
gauggagauguguguccgg

SEQ ID NO: 2016865 - RNA, 19 nt, Artificial Sequence
  Description of Artificial Sequence: Synthetic oligonucleotide
uagccuuauacaugcuggc

SEQ ID NO: 2016866 - RNA, 19 nt, Artificial Sequence
  Description of Artificial Sequence: Synthetic oligonucleotide
agugugggagauguuauca

SEQ ID NO: 2016867 - RNA, 19 nt, Artificial Sequence
  Description of Artificial Sequence: Synthetic oligonucleotide
uccuugacccugucgaaga

SEQ ID NO: 2016868 - RNA, 19 nt, Artificial Sequence
  Description of Artificial Sequence: Synthetic oligonucleotide
auuaucuauuacucagcau

SEQ ID NO: 2016869 - RNA, 19 nt, Artificial Sequence
  Description of Artificial Sequence: Synthetic oligonucleotide
acugccgcggaacacggug

SEQ ID NO: 2016870 - RNA, 19 nt, Artificial Sequence
  Description of Artificial Sequence: Synthetic oligonucleotide
aucgcccagccuuacaaug

SEQ ID NO: 2016871 - RNA, 19 nt, Artificial Sequence
  Description of Artificial Sequence: Synthetic oligonucleotide
caucugacaguguuauuuc

SEQ ID NO: 2016872 - RNA, 19 nt, Artificial Sequence
  Description of Artificial Sequence: Synthetic oligonucleotide
ugucaacugugcugagccg

SEQ ID NO: 2016873 - RNA, 19 nt, Artificial Sequence
  Description of Artificial Sequence: Synthetic oligonucleotide
aguugugcaccugaaucag

SEQ ID NO: 2016874 - RNA, 19 nt, Artificial Sequence
  Description of Artificial Sequence: Synthetic oligonucleotide
cuggcaagcauuuugccaa

SEQ ID NO: 2016875 - RNA, 19 nt, Artificial Sequence
  Description of Artificial Sequence: Synthetic oligonucleotide
uagggaccaaacucguagc

SEQ ID NO: 2016876 - RNA, 19 nt, Artificial Sequence
  Description of Artificial Sequence: Synthetic oligonucleotide
agccguagcugcucaacuc

SEQ ID NO: 2016877 - RNA, 19 nt, Artificial Sequence
  Description of Artificial Sequence: Synthetic oligonucleotide
uuacuuggguacagccaag

SEQ ID NO: 2016878 - RNA, 19 nt, Artificial Sequence
  Description of Artificial Sequence: Synthetic oligonucleotide
auaauugauuucuguuaaa

SEQ ID NO: 2016879 - RNA, 19 nt, Artificial Sequence
  Description of Artificial Sequence: Synthetic oligonucleotide
ggcuuaagccccuuugucc

SEQ ID NO: 2016880 - RNA, 19 nt, Artificial Sequence
  Description of Artificial Sequence: Synthetic oligonucleotide
cuuauacaugcuggcaagc

SEQ ID NO: 2016881 - RNA, 19 nt, Artificial Sequence
  Description of Artificial Sequence: Synthetic oligonucleotide
agcauauucgggguguugu

SEQ ID NO: 2016882 - RNA, 19 nt, Artificial Sequence
  Description of Artificial Sequence: Synthetic oligonucleotide
ucgcccagccuuacaaugc

SEQ ID NO: 2016883 - RNA, 19 nt, Artificial Sequence
  Description of Artificial Sequence: Synthetic oligonucleotide
auuuagccagacaaucuug

SEQ ID NO: 2016884 - RNA, 19 nt, Artificial Sequence
  Description of Artificial Sequence: Synthetic oligonucleotide
gaacuugcagcugguuagg

SEQ ID NO: 2016885 - RNA, 19 nt, Artificial Sequence
  Description of Artificial Sequence: Synthetic oligonucleotide
uuggaagugcuagggacca

SEQ ID NO: 2016886 - RNA, 19 nt, Artificial Sequence
  Description of Artificial Sequence: Synthetic oligonucleotide
agauuuagccagacaaucu

SEQ ID NO: 2016887 - RNA, 19 nt, Artificial Sequence
  Description of Artificial Sequence: Synthetic oligonucleotide
uggcgauagcuucuauagc

SEQ ID NO: 2016888 - RNA, 19 nt, Artificial Sequence
  Description of Artificial Sequence: Synthetic oligonucleotide
gaucaccccgcgcacauuc

SEQ ID NO: 2016889 - RNA, 19 nt, Artificial Sequence
  Description of Artificial Sequence: Synthetic oligonucleotide
uguuaucaguuaucaguau

SEQ ID NO: 2016890 - RNA, 19 nt, Artificial Sequence
  Description of Artificial Sequence: Synthetic oligonucleotide
gagaacuugcagcugguua

SEQ ID NO: 2016891 - RNA, 19 nt, Artificial Sequence
  Description of Artificial Sequence: Synthetic oligonucleotide
auguuaucaguuaucagua

SEQ ID NO: 2016892 - RNA, 19 nt, Artificial Sequence
  Description of Artificial Sequence: Synthetic oligonucleotide
caguguuauuucagggaag

SEQ ID NO: 2016893 - RNA, 19 nt, Artificial Sequence
  Description of Artificial Sequence: Synthetic oligonucleotide
agcaaacuggacuccucug

SEQ ID NO: 2016894 - RNA, 19 nt, Artificial Sequence
  Description of Artificial Sequence: Synthetic oligonucleotide
uccuucgcgguguugcaca

SEQ ID NO: 2016895 - RNA, 19 nt, Artificial Sequence
  Description of Artificial Sequence: Synthetic oligonucleotide
gauuuagccagacaaucuu

SEQ ID NO: 2016896 - RNA, 19 nt, Artificial Sequence
  Description of Artificial Sequence: Synthetic oligonucleotide
ggcacauuaucuauuacuc

SEQ ID NO: 2016897 - RNA, 19 nt, Artificial Sequence
  Description of Artificial Sequence: Synthetic oligonucleotide
uagacacacuggcccauug

SEQ ID NO: 2016898 - RNA, 19 nt, Artificial Sequence
  Description of Artificial Sequence: Synthetic oligonucleotide
guguuguccuggcuuaagc

SEQ ID NO: 2016899 - RNA, 19 nt, Artificial Sequence
  Description of Artificial Sequence: Synthetic oligonucleotide
cacacugccgcggaacacg

SEQ ID NO: 2016900 - RNA, 19 nt, Artificial Sequence
  Description of Artificial Sequence: Synthetic oligonucleotide
gagucgaugcggugguacc

SEQ ID NO: 2016901 - RNA, 19 nt, Artificial Sequence
  Description of Artificial Sequence: Synthetic oligonucleotide
aucagauaugcugccacca

SEQ ID NO: 2016902 - RNA, 19 nt, Artificial Sequence
  Description of Artificial Sequence: Synthetic oligonucleotide
uuccucugggcuccaguug

SEQ ID NO: 2016903 - RNA, 19 nt, Artificial Sequence
  Description of Artificial Sequence: Synthetic oligonucleotide
gaacacgguguagagcagc

SEQ ID NO: 2016904 - RNA, 19 nt, Artificial Sequence
  Description of Artificial Sequence: Synthetic oligonucleotide
cugucgaagaaaauaagau

SEQ ID NO: 2016905 - RNA, 19 nt, Artificial Sequence
  Description of Artificial Sequence: Synthetic oligonucleotide
ugcuagggaccaaacucgu

SEQ ID NO: 2016906 - RNA, 19 nt, Artificial Sequence
  Description of Artificial Sequence: Synthetic oligonucleotide
ggugguaccagucgcggug

SEQ ID NO: 2016907 - RNA, 19 nt, Artificial Sequence
  Description of Artificial Sequence: Synthetic oligonucleotide
uuggccaagguggggaccc

SEQ ID NO: 2016908 - RNA, 19 nt, Artificial Sequence
  Description of Artificial Sequence: Synthetic oligonucleotide
gacgccgccaucccgcccc

SEQ ID NO: 2016909 - RNA, 19 nt, Artificial Sequence
  Description of Artificial Sequence: Synthetic oligonucleotide
aaaugucagugugggagau

SEQ ID NO: 2016910 - RNA, 19 nt, Artificial Sequence
  Description of Artificial Sequence: Synthetic oligonucleotide
gacaaucuuguucucugua

SEQ ID NO: 2016911 - RNA, 19 nt, Artificial Sequence
  Description of Artificial Sequence: Synthetic oligonucleotide
cuugcagcugguuaggccu

SEQ ID NO: 2016912 - RNA, 19 nt, Artificial Sequence
  Description of Artificial Sequence: Synthetic oligonucleotide
ccaguugugcaccugaauc

SEQ ID NO: 2016913 - RNA, 19 nt, Artificial Sequence
  Description of Artificial Sequence: Synthetic oligonucleotide
ccuuauacaugcuggcaag

SEQ ID NO: 2016914 - RNA, 19 nt, Artificial Sequence
  Description of Artificial Sequence: Synthetic oligonucleotide
caugucaacugugcugagc

SEQ ID NO: 2016915 - RNA, 19 nt, Artificial Sequence
  Description of Artificial Sequence: Synthetic oligonucleotide
ggaaucuugucucguacuc

SEQ ID NO: 2016916 - RNA, 19 nt, Artificial Sequence
  Description of Artificial Sequence: Synthetic oligonucleotide
cuuccauuccuucgcggug

SEQ ID NO: 2016917 - RNA, 19 nt, Artificial Sequence
  Description of Artificial Sequence: Synthetic oligonucleotide
uggcccauugacugguacu

SEQ ID NO: 2016918 - RNA, 19 nt, Artificial Sequence
  Description of Artificial Sequence: Synthetic oligonucleotide
acagaucuaaguauuuauu

SEQ ID NO: 2016919 - RNA, 19 nt, Artificial Sequence
  Description of Artificial Sequence: Synthetic oligonucleotide
uucuguuauggugccauua

SEQ ID NO: 2016920 - RNA, 19 nt, Artificial Sequence
  Description of Artificial Sequence: Synthetic oligonucleotide
ggcgauagcuucuauagcu

SEQ ID NO: 2016921 - RNA, 19 nt, Artificial Sequence
  Description of Artificial Sequence: Synthetic oligonucleotide
cacgguggagucgaugcgg

SEQ ID NO: 2016922 - RNA, 19 nt, Artificial Sequence
  Description of Artificial Sequence: Synthetic oligonucleotide
cuagcauuuaacuucuguu

SEQ ID NO: 2016923 - RNA, 19 nt, Artificial Sequence
  Description of Artificial Sequence: Synthetic oligonucleotide
uuuccuugacccugucgaa

SEQ ID NO: 2016924 - RNA, 19 nt, Artificial Sequence
  Description of Artificial Sequence: Synthetic oligonucleotide
gacccugucgaagaaaaua

SEQ ID NO: 2016925 - RNA, 19 nt, Artificial Sequence
  Description of Artificial Sequence: Synthetic oligonucleotide
uugucucguacucuucguu

SEQ ID NO: 2016926 - RNA, 19 nt, Artificial Sequence
  Description of Artificial Sequence: Synthetic oligonucleotide
gaggcacauuaucuauuac

SEQ ID NO: 2016927 - RNA, 19 nt, Artificial Sequence
  Description of Artificial Sequence: Synthetic oligonucleotide
caagguggggaccccaguc

SEQ ID NO: 2016928 - RNA, 19 nt, Artificial Sequence
  Description of Artificial Sequence: Synthetic oligonucleotide
uauucgggguguuguccug

SEQ ID NO: 2016929 - RNA, 19 nt, Artificial Sequence
  Description of Artificial Sequence: Synthetic oligonucleotide
uggcaagcauuuugccaag

SEQ ID NO: 2016930 - RNA, 19 nt, Artificial Sequence
  Description of Artificial Sequence: Synthetic oligonucleotide
acucguagccuuauacaug

SEQ ID NO: 2016931 - RNA, 19 nt, Artificial Sequence
  Description of Artificial Sequence: Synthetic oligonucleotide
acguagacacacuggccca

SEQ ID NO: 2016932 - RNA, 19 nt, Artificial Sequence
  Description of Artificial Sequence: Synthetic oligonucleotide
gugcaccugaaucagauau

SEQ ID NO: 2016933 - RNA, 19 nt, Artificial Sequence
  Description of Artificial Sequence: Synthetic oligonucleotide
cauugacugguacuugaga

SEQ ID NO: 2016934 - RNA, 19 nt, Artificial Sequence
  Description of Artificial Sequence: Synthetic oligonucleotide
cauggugaucaccccgcgc

SEQ ID NO: 2016935 - RNA, 19 nt, Artificial Sequence
  Description of Artificial Sequence: Synthetic oligonucleotide
augcacguagacacacugg

SEQ ID NO: 2016936 - RNA, 19 nt, Artificial Sequence
  Description of Artificial Sequence: Synthetic oligonucleotide
ugcgcccagccucucacac

SEQ ID NO: 2016937 - RNA, 19 nt, Artificial Sequence
  Description of Artificial Sequence: Synthetic oligonucleotide
uguggagguuggccaaggu

SEQ ID NO: 2016938 - RNA, 19 nt, Artificial Sequence
  Description of Artificial Sequence: Synthetic oligonucleotide
uacuuggguacagccaagu

SEQ ID NO: 2016939 - RNA, 19 nt, Artificial Sequence
  Description of Artificial Sequence: Synthetic oligonucleotide
cccagccuuacaaugcacg

SEQ ID NO: 2016940 - RNA, 19 nt, Artificial Sequence
  Description of Artificial Sequence: Synthetic oligonucleotide
caccccgcgcacauucucg

SEQ ID NO: 2016941 - RNA, 19 nt, Artificial Sequence
  Description of Artificial Sequence: Synthetic oligonucleotide
auggagauguguguccgga

SEQ ID NO: 2016942 - RNA, 19 nt, Artificial Sequence
  Description of Artificial Sequence: Synthetic oligonucleotide
acaggaaucuugucucgua

SEQ ID NO: 2016943 - RNA, 19 nt, Artificial Sequence
  Description of Artificial Sequence: Synthetic oligonucleotide
ucuguggagguuggccaag

SEQ ID NO: 2016944 - RNA, 19 nt, Artificial Sequence
  Description of Artificial Sequence: Synthetic oligonucleotide
gaagugcuagggaccaaac

SEQ ID NO: 2016945 - RNA, 19 nt, Artificial Sequence
  Description of Artificial Sequence: Synthetic oligonucleotide
ucuggaucgcccagccuua

SEQ ID NO: 2016946 - RNA, 19 nt, Artificial Sequence
  Description of Artificial Sequence: Synthetic oligonucleotide
agccaucugacaguguuau

SEQ ID NO: 2016947 - RNA, 19 nt, Artificial Sequence
  Description of Artificial Sequence: Synthetic oligonucleotide
ugagccguagcugcucaac

SEQ ID NO: 2016948 - RNA, 19 nt, Artificial Sequence
  Description of Artificial Sequence: Synthetic oligonucleotide
ccuuacaaugcacguagac

SEQ ID NO: 2016949 - RNA, 19 nt, Artificial Sequence
  Description of Artificial Sequence: Synthetic oligonucleotide
aguaccagccggcgcguca

SEQ ID NO: 2016950 - RNA, 19 nt, Artificial Sequence
  Description of Artificial Sequence: Synthetic oligonucleotide
ucucguacucuucguucau

SEQ ID NO: 2016951 - RNA, 19 nt, Artificial Sequence
  Description of Artificial Sequence: Synthetic oligonucleotide
uccagccacgcggacgccg

SEQ ID NO: 2016952 - RNA, 19 nt, Artificial Sequence
  Description of Artificial Sequence: Synthetic oligonucleotide
uggacuccucuguggaggu

SEQ ID NO: 2016953 - RNA, 19 nt, Artificial Sequence
  Description of Artificial Sequence: Synthetic oligonucleotide
gccguagcugcucaacucc

SEQ ID NO: 2016954 - RNA, 19 nt, Artificial Sequence
  Description of Artificial Sequence: Synthetic oligonucleotide
guagccaucugacaguguu

SEQ ID NO: 2016955 - RNA, 19 nt, Artificial Sequence
  Description of Artificial Sequence: Synthetic oligonucleotide
cuguuauggugccauuaca

SEQ ID NO: 2016956 - RNA, 19 nt, Artificial Sequence
  Description of Artificial Sequence: Synthetic oligonucleotide
agcggcgagccgccggccc

SEQ ID NO: 2016957 - RNA, 19 nt, Artificial Sequence
  Description of Artificial Sequence: Synthetic oligonucleotide
agccucucacacugccgcg

SEQ ID NO: 2016958 - RNA, 19 nt, Artificial Sequence
  Description of Artificial Sequence: Synthetic oligonucleotide
uccggauuuuggcgauagc

SEQ ID NO: 2016959 - RNA, 19 nt, Artificial Sequence
  Description of Artificial Sequence: Synthetic oligonucleotide
agcgucggguagaagagca

SEQ ID NO: 2016960 - RNA, 19 nt, Artificial Sequence
  Description of Artificial Sequence: Synthetic oligonucleotide
gucagugugggagauguua

SEQ ID NO: 2016961 - RNA, 19 nt, Artificial Sequence
  Description of Artificial Sequence: Synthetic oligonucleotide
guccggauuuuggcgauag

SEQ ID NO: 2016962 - RNA, 19 nt, Artificial Sequence
  Description of Artificial Sequence: Synthetic oligonucleotide
uguggcacuucuggaucgc

SEQ ID NO: 2016963 - RNA, 19 nt, Artificial Sequence
  Description of Artificial Sequence: Synthetic oligonucleotide
uuuuggcgauagcuucuau

SEQ ID NO: 2016964 - RNA, 19 nt, Artificial Sequence
  Description of Artificial Sequence: Synthetic oligonucleotide
ugugcaccugaaucagaua

SEQ ID NO: 2016965 - RNA, 19 nt, Artificial Sequence
  Description of Artificial Sequence: Synthetic oligonucleotide
cuucguucauggugaucac

SEQ ID NO: 2016966 - RNA, 19 nt, Artificial Sequence
  Description of Artificial Sequence: Synthetic oligonucleotide
agccccuuuguccuuuaaa

SEQ ID NO: 2016967 - RNA, 19 nt, Artificial Sequence
  Description of Artificial Sequence: Synthetic oligonucleotide
ucgcggugcgcccagccuc

SEQ ID NO: 2016968 - RNA, 19 nt, Artificial Sequence
  Description of Artificial Sequence: Synthetic oligonucleotide
cagugugggagauguuauc

SEQ ID NO: 2016969 - RNA, 19 nt, Artificial Sequence
  Description of Artificial Sequence: Synthetic oligonucleotide
acuuggguacagccaaguu

SEQ ID NO: 2016970 - RNA, 19 nt, Artificial Sequence
  Description of Artificial Sequence: Synthetic oligonucleotide
cggaacacgguguagagca

SEQ ID NO: 2016971 - RNA, 19 nt, Artificial Sequence
  Description of Artificial Sequence: Synthetic oligonucleotide
aucuugucucguacucuuc

SEQ ID NO: 2016972 - RNA, 19 nt, Artificial Sequence
  Description of Artificial Sequence: Synthetic oligonucleotide
uggaucgcccagccuuaca

SEQ ID NO: 2016973 - RNA, 19 nt, Artificial Sequence
  Description of Artificial Sequence: Synthetic oligonucleotide
gggauucugacaguaacaa

SEQ ID NO: 2016974 - RNA, 19 nt, Artificial Sequence
  Description of Artificial Sequence: Synthetic oligonucleotide
gccuuauacaugcuggcaa

SEQ ID NO: 2016975 - RNA, 19 nt, Artificial Sequence
  Description of Artificial Sequence: Synthetic oligonucleotide
uggagauguguguccggau

SEQ ID NO: 2016976 - RNA, 19 nt, Artificial Sequence
  Description of Artificial Sequence: Synthetic oligonucleotide
ugacccugucgaagaaaau

SEQ ID NO: 2016977 - RNA, 19 nt, Artificial Sequence
  Description of Artificial Sequence: Synthetic oligonucleotide
ccauugacugguacuugag

SEQ ID NO: 2016978 - RNA, 19 nt, Artificial Sequence
  Description of Artificial Sequence: Synthetic oligonucleotide
acuccugcuugcuuccauu

SEQ ID NO: 2016979 - RNA, 19 nt, Artificial Sequence
  Description of Artificial Sequence: Synthetic oligonucleotide
ggaggcacauuaucuauua

SEQ ID NO: 2016980 - RNA, 19 nt, Artificial Sequence
  Description of Artificial Sequence: Synthetic oligonucleotide
caccccgccaggcgcagcg

SEQ ID NO: 2016981 - RNA, 19 nt, Artificial Sequence
  Description of Artificial Sequence: Synthetic oligonucleotide
aggccugauggagaugugu

SEQ ID NO: 2016982 - RNA, 19 nt, Artificial Sequence
  Description of Artificial Sequence: Synthetic oligonucleotide
gagauguguguccggauuu

SEQ ID NO: 2016983 - RNA, 19 nt, Artificial Sequence
  Description of Artificial Sequence: Synthetic oligonucleotide
agccggcgcgucaugcucc

SEQ ID NO: 2016984 - RNA, 19 nt, Artificial Sequence
  Description of Artificial Sequence: Synthetic oligonucleotide
ccuuuucuagcauuuaacu

SEQ ID NO: 2016985 - RNA, 19 nt, Artificial Sequence
  Description of Artificial Sequence: Synthetic oligonucleotide
cuggcccauugacugguac

SEQ ID NO: 2016986 - RNA, 19 nt, Artificial Sequence
  Description of Artificial Sequence: Synthetic oligonucleotide
gcuuaagccccuuuguccu

SEQ ID NO: 2016987 - RNA, 19 nt, Artificial Sequence
  Description of Artificial Sequence: Synthetic oligonucleotide
auuuuggcgauagcuucua

SEQ ID NO: 2016988 - RNA, 19 nt, Artificial Sequence
  Description of Artificial Sequence: Synthetic oligonucleotide
uaggccugauggagaugug

SEQ ID NO: 2016989 - RNA, 19 nt, Artificial Sequence
  Description of Artificial Sequence: Synthetic oligonucleotide
acacugccgcggaacacgg

SEQ ID NO: 2016990 - RNA, 19 nt, Artificial Sequence
  Description of Artificial Sequence: Synthetic oligonucleotide
cagcgcgcccagcagcacg

SEQ ID NO: 2016991 - RNA, 19 nt, Artificial Sequence
  Description of Artificial Sequence: Synthetic oligonucleotide
uuaagccccuuuguccuuu

SEQ ID NO: 2016992 - RNA, 19 nt, Artificial Sequence
  Description of Artificial Sequence: Synthetic oligonucleotide
cucguacucuucguucaug

SEQ ID NO: 2016993 - RNA, 19 nt, Artificial Sequence
  Description of Artificial Sequence: Synthetic oligonucleotide
ggccugauggagaugugug

SEQ ID NO: 2016994 - RNA, 19 nt, Artificial Sequence
  Description of Artificial Sequence: Synthetic oligonucleotide
ggaucgcccagccuuacaa

SEQ ID NO: 2016995 - RNA, 19 nt, Artificial Sequence
  Description of Artificial Sequence: Synthetic oligonucleotide
guccaguaccagccggcgc

SEQ ID NO: 2016996 - RNA, 19 nt, Artificial Sequence
  Description of Artificial Sequence: Synthetic oligonucleotide
aucuauuacucagcauauu

SEQ ID NO: 2016997 - RNA, 19 nt, Artificial Sequence
  Description of Artificial Sequence: Synthetic oligonucleotide
uuccuucgcgguguugcac

SEQ ID NO: 2016998 - RNA, 19 nt, Artificial Sequence
  Description of Artificial Sequence: Synthetic oligonucleotide
gugguaccagucgcggugc

SEQ ID NO: 2016999 - RNA, 19 nt, Artificial Sequence
  Description of Artificial Sequence: Synthetic oligonucleotide
ucgaugcggugguaccagu

SEQ ID NO: 2017000 - RNA, 19 nt, Artificial Sequence
  Description of Artificial Sequence: Synthetic oligonucleotide
ccugauggagauguguguc

SEQ ID NO: 2017001 - RNA, 19 nt, Artificial Sequence
  Description of Artificial Sequence: Synthetic oligonucleotide
uaccagucgcggugcgccc

SEQ ID NO: 2017002 - RNA, 19 nt, Artificial Sequence
  Description of Artificial Sequence: Synthetic oligonucleotide
ucacacugccgcggaacac

SEQ ID NO: 2017003 - RNA, 19 nt, Artificial Sequence
  Description of Artificial Sequence: Synthetic oligonucleotide
caugcuccgcagcggcagc

SEQ ID NO: 2017004 - RNA, 19 nt, Artificial Sequence
  Description of Artificial Sequence: Synthetic oligonucleotide
gucaacugugcugagccgu

SEQ ID NO: 2017005 - RNA, 19 nt, Artificial Sequence
  Description of Artificial Sequence: Synthetic oligonucleotide
ggagucgaugcggugguac

SEQ ID NO: 2017006 - RNA, 19 nt, Artificial Sequence
  Description of Artificial Sequence: Synthetic oligonucleotide
guuggccaagguggggacc

SEQ ID NO: 2017007 - RNA, 19 nt, Artificial Sequence
  Description of Artificial Sequence: Synthetic oligonucleotide
accccgcgcacauucucgu

SEQ ID NO: 2017008 - RNA, 19 nt, Artificial Sequence
  Description of Artificial Sequence: Synthetic oligonucleotide
gcacgguggagucgaugcg

SEQ ID NO: 2017009 - RNA, 19 nt, Artificial Sequence
  Description of Artificial Sequence: Synthetic oligonucleotide
aagccccuuuguccuuuaa

SEQ ID NO: 2017010 - RNA, 19 nt, Artificial Sequence
  Description of Artificial Sequence: Synthetic oligonucleotide
ugccgcggaacacggugua

SEQ ID NO: 2017011 - RNA, 19 nt, Artificial Sequence
  Description of Artificial Sequence: Synthetic oligonucleotide
cccagucaugucaacugug

SEQ ID NO: 2017012 - RNA, 19 nt, Artificial Sequence
  Description of Artificial Sequence: Synthetic oligonucleotide
gagccguagcugcucaacu

SEQ ID NO: 2017013 - RNA, 19 nt, Artificial Sequence
  Description of Artificial Sequence: Synthetic oligonucleotide
caucccgccccaccccgcc

SEQ ID NO: 2017014 - RNA, 19 nt, Artificial Sequence
  Description of Artificial Sequence: Synthetic oligonucleotide
caacugugcugagccguag

SEQ ID NO: 2017015 - RNA, 19 nt, Artificial Sequence
  Description of Artificial Sequence: Synthetic oligonucleotide
gcauauucgggguguuguc

SEQ ID NO: 2017016 - RNA, 19 nt, Artificial Sequence
  Description of Artificial Sequence: Synthetic oligonucleotide
ggugcgcccagccucucac

SEQ ID NO: 2017017 - RNA, 19 nt, Artificial Sequence
  Description of Artificial Sequence: Synthetic oligonucleotide
gaaggcaaaggaggcacau

SEQ ID NO: 2017018 - RNA, 19 nt, Artificial Sequence
  Description of Artificial Sequence: Synthetic oligonucleotide
cuucgcgguguugcacagg

SEQ ID NO: 2017019 - RNA, 19 nt, Artificial Sequence
  Description of Artificial Sequence: Synthetic oligonucleotide
cuugucucguacucuucgu

SEQ ID NO: 2017020 - RNA, 19 nt, Artificial Sequence
  Description of Artificial Sequence: Synthetic oligonucleotide
cuggcuuaagccccuuugu

SEQ ID NO: 2017021 - RNA, 19 nt, Artificial Sequence
  Description of Artificial Sequence: Synthetic oligonucleotide
ugcugagccguagcugcuc

SEQ ID NO: 2017022 - RNA, 19 nt, Artificial Sequence
  Description of Artificial Sequence: Synthetic oligonucleotide
cgauagcuucuauagcuuc

SEQ ID NO: 2017023 - RNA, 19 nt, Artificial Sequence
  Description of Artificial Sequence: Synthetic oligonucleotide
guugugcaccugaaucaga

SEQ ID NO: 2017024 - RNA, 19 nt, Artificial Sequence
  Description of Artificial Sequence: Synthetic oligonucleotide
cagcauauucgggguguug

SEQ ID NO: 2017025 - RNA, 19 nt, Artificial Sequence
  Description of Artificial Sequence: Synthetic oligonucleotide
cccauugacugguacuuga

SEQ ID NO: 2017026 - RNA, 19 nt, Artificial Sequence
  Description of Artificial Sequence: Synthetic oligonucleotide
ggaagugcuagggaccaaa

SEQ ID NO: 2017027 - RNA, 19 nt, Artificial Sequence
  Description of Artificial Sequence: Synthetic oligonucleotide
cgcgucaugcuccgcagcg

SEQ ID NO: 2017028 - RNA, 19 nt, Artificial Sequence
  Description of Artificial Sequence: Synthetic oligonucleotide
ggcgcgucaugcuccgcag

SEQ ID NO: 2017029 - RNA, 19 nt, Artificial Sequence
  Description of Artificial Sequence: Synthetic oligonucleotide
gggagauguuaucaguuau

SEQ ID NO: 2017030 - RNA, 19 nt, Artificial Sequence
  Description of Artificial Sequence: Synthetic oligonucleotide
gcacguagacacacuggcc

SEQ ID NO: 2017031 - RNA, 19 nt, Artificial Sequence
  Description of Artificial Sequence: Synthetic oligonucleotide
uaagccccuuuguccuuua

SEQ ID NO: 2017032 - RNA, 19 nt, Artificial Sequence
  Description of Artificial Sequence: Synthetic oligonucleotide
gccucucacacugccgcgg

SEQ ID NO: 2017033 - RNA, 19 nt, Artificial Sequence
  Description of Artificial Sequence: Synthetic oligonucleotide
gaucgcccagccuuacaau

SEQ ID NO: 2017034 - RNA, 19 nt, Artificial Sequence
  Description of Artificial Sequence: Synthetic oligonucleotide
ggaccaaacucguagccuu

SEQ ID NO: 2017035 - RNA, 19 nt, Artificial Sequence
  Description of Artificial Sequence: Synthetic oligonucleotide
gcggugguaccagucgcgg

SEQ ID NO: 2017036 - RNA, 19 nt, Artificial Sequence
  Description of Artificial Sequence: Synthetic oligonucleotide
cucuucguucauggugauc

SEQ ID NO: 2017037 - RNA, 19 nt, Artificial Sequence
  Description of Artificial Sequence: Synthetic oligonucleotide
cguucauggugaucacccc

SEQ ID NO: 2017038 - RNA, 19 nt, Artificial Sequence
  Description of Artificial Sequence: Synthetic oligonucleotide
uaccagccggcgcgucaug

SEQ ID NO: 2017039 - RNA, 19 nt, Artificial Sequence
  Description of Artificial Sequence: Synthetic oligonucleotide
cgucggguagaagagcacc

SEQ ID NO: 2017040 - RNA, 19 nt, Artificial Sequence
  Description of Artificial Sequence: Synthetic oligonucleotide
ggaacacgguguagagcag

SEQ ID NO: 2017041 - RNA, 19 nt, Artificial Sequence
  Description of Artificial Sequence: Synthetic oligonucleotide
uggguacagccaaguucuu

SEQ ID NO: 2017042 - RNA, 19 nt, Artificial Sequence
  Description of Artificial Sequence: Synthetic oligonucleotide
ggagauguguguccggauu

SEQ ID NO: 2017043 - RNA, 19 nt, Artificial Sequence
  Description of Artificial Sequence: Synthetic oligonucleotide
gaccaaacucguagccuua

SEQ ID NO: 2017044 - RNA, 19 nt, Artificial Sequence
  Description of Artificial Sequence: Synthetic oligonucleotide
ucgcgguguugcacaggaa

SEQ ID NO: 2017045 - RNA, 19 nt, Artificial Sequence
  Description of Artificial Sequence: Synthetic oligonucleotide
caaugcacguagacacacu

SEQ ID NO: 2017046 - RNA, 19 nt, Artificial Sequence
  Description of Artificial Sequence: Synthetic oligonucleotide
gcgguguugcacaggaauc

SEQ ID NO: 2017047 - RNA, 19 nt, Artificial Sequence
  Description of Artificial Sequence: Synthetic oligonucleotide
gguaccagucgcggugcgc

SEQ ID NO: 2017048 - RNA, 19 nt, Artificial Sequence
  Description of Artificial Sequence: Synthetic oligonucleotide
gugaucaccccgcgcacau

SEQ ID NO: 2017049 - RNA, 19 nt, Artificial Sequence
  Description of Artificial Sequence: Synthetic oligonucleotide
gcggaacacgguguagagc

SEQ ID NO: 2017050 - RNA, 19 nt, Artificial Sequence
  Description of Artificial Sequence: Synthetic oligonucleotide
gcugagccguagcugcuca

SEQ ID NO: 2017051 - RNA, 19 nt, Artificial Sequence
  Description of Artificial Sequence: Synthetic oligonucleotide
ccagccacgcggacgccgc

SEQ ID NO: 2017052 - RNA, 19 nt, Artificial Sequence
  Description of Artificial Sequence: Synthetic oligonucleotide
gggguguuguccuggcuua

SEQ ID NO: 2017053 - RNA, 19 nt, Artificial Sequence
  Description of Artificial Sequence: Synthetic oligonucleotide
accagucgcggugcgccca

SEQ ID NO: 2017054 - RNA, 19 nt, Artificial Sequence
  Description of Artificial Sequence: Synthetic oligonucleotide
cagcacgguggagucgaug

SEQ ID NO: 2017055 - RNA, 19 nt, Artificial Sequence
  Description of Artificial Sequence: Synthetic oligonucleotide
ccuucgcgguguugcacag

SEQ ID NO: 2017056 - RNA, 19 nt, Artificial Sequence
  Description of Artificial Sequence: Synthetic oligonucleotide
uguccggauuuuggcgaua

SEQ ID NO: 2017057 - RNA, 19 nt, Artificial Sequence
  Description of Artificial Sequence: Synthetic oligonucleotide
cuggaucgcccagccuuac

SEQ ID NO: 2017058 - RNA, 19 nt, Artificial Sequence
  Description of Artificial Sequence: Synthetic oligonucleotide
caccugaaucagauaugcu

SEQ ID NO: 2017059 - RNA, 19 nt, Artificial Sequence
  Description of Artificial Sequence: Synthetic oligonucleotide
gcgucaugcuccgcagcgg

SEQ ID NO: 2017060 - RNA, 19 nt, Artificial Sequence
  Description of Artificial Sequence: Synthetic oligonucleotide
aucaccccgcgcacauucu

SEQ ID NO: 2017061 - RNA, 19 nt, Artificial Sequence
  Description of Artificial Sequence: Synthetic oligonucleotide
uggccaagguggggacccc

SEQ ID NO: 2017062 - RNA, 19 nt, Artificial Sequence
  Description of Artificial Sequence: Synthetic oligonucleotide
caauugaaauugggauucu

SEQ ID NO: 2017063 - RNA, 19 nt, Artificial Sequence
  Description of Artificial Sequence: Synthetic oligonucleotide
ggugaucaccccgcgcaca

SEQ ID NO: 2017064 - RNA, 19 nt, Artificial Sequence
  Description of Artificial Sequence: Synthetic oligonucleotide
gccgccaucccgccccacc

SEQ ID NO: 2017065 - RNA, 19 nt, Artificial Sequence
  Description of Artificial Sequence: Synthetic oligonucleotide
gucaugcuccgcagcggca

SEQ ID NO: 2017066 - RNA, 19 nt, Artificial Sequence
  Description of Artificial Sequence: Synthetic oligonucleotide
cgguguagagcagcgucgg

SEQ ID NO: 2017067 - RNA, 19 nt, Artificial Sequence
  Description of Artificial Sequence: Synthetic oligonucleotide
cacaggaaucuugucucgu

SEQ ID NO: 2017068 - RNA, 19 nt, Artificial Sequence
  Description of Artificial Sequence: Synthetic oligonucleotide
gccccaccccgccaggcgc

SEQ ID NO: 2017069 - RNA, 19 nt, Artificial Sequence
  Description of Artificial Sequence: Synthetic oligonucleotide
ugaucaccccgcgcacauu

SEQ ID NO: 2017070 - RNA, 19 nt, Artificial Sequence
  Description of Artificial Sequence: Synthetic oligonucleotide
gcccauugacugguacuug

SEQ ID NO: 2017071 - RNA, 19 nt, Artificial Sequence
  Description of Artificial Sequence: Synthetic oligonucleotide
ccgccaucccgccccaccc

SEQ ID NO: 2017072 - RNA, 19 nt, Artificial Sequence
  Description of Artificial Sequence: Synthetic oligonucleotide
ccagccuuacaaugcacgu

SEQ ID NO: 2017073 - RNA, 19 nt, Artificial Sequence
  Description of Artificial Sequence: Synthetic oligonucleotide
cgaugcggugguaccaguc

SEQ ID NO: 2017074 - RNA, 19 nt, Artificial Sequence
  Description of Artificial Sequence: Synthetic oligonucleotide
cagccacgcggacgccgcc

SEQ ID NO: 2017075 - RNA, 19 nt, Artificial Sequence
  Description of Artificial Sequence: Synthetic oligonucleotide
cguccaguaccagccggcg

SEQ ID NO: 2017076 - RNA, 19 nt, Artificial Sequence
  Description of Artificial Sequence: Synthetic oligonucleotide
cugagccguagcugcucaa

SEQ ID NO: 2017077 - RNA, 19 nt, Artificial Sequence
  Description of Artificial Sequence: Synthetic oligonucleotide
gugcgcccagccucucaca

SEQ ID NO: 2017078 - RNA, 19 nt, Artificial Sequence
  Description of Artificial Sequence: Synthetic oligonucleotide
uggagucgaugcgguggua

SEQ ID NO: 2017079 - RNA, 19 nt, Artificial Sequence
  Description of Artificial Sequence: Synthetic oligonucleotide
cuuaagccccuuuguccuu

SEQ ID NO: 2017080 - RNA, 19 nt, Artificial Sequence
  Description of Artificial Sequence: Synthetic oligonucleotide
cugccgcggaacacggugu

SEQ ID NO: 2017081 - RNA, 19 nt, Artificial Sequence
  Description of Artificial Sequence: Synthetic oligonucleotide
gcgcgucaugcuccgcagc

SEQ ID NO: 2017082 - RNA, 19 nt, Artificial Sequence
  Description of Artificial Sequence: Synthetic oligonucleotide
gucgcggugcgcccagccu

SEQ ID NO: 2017083 - RNA, 19 nt, Artificial Sequence
  Description of Artificial Sequence: Synthetic oligonucleotide
cuucuggaucgcccagccu

SEQ ID NO: 2017084 - RNA, 19 nt, Artificial Sequence
  Description of Artificial Sequence: Synthetic oligonucleotide
ggcccauugacugguacuu

SEQ ID NO: 2017085 - RNA, 19 nt, Artificial Sequence
  Description of Artificial Sequence: Synthetic oligonucleotide
gccgcggaacacgguguag

SEQ ID NO: 2017086 - RNA, 19 nt, Artificial Sequence
  Description of Artificial Sequence: Synthetic oligonucleotide
guaccagccggcgcgucau

SEQ ID NO: 2017087 - RNA, 19 nt, Artificial Sequence
  Description of Artificial Sequence: Synthetic oligonucleotide
gccuuacaaugcacguaga

SEQ ID NO: 2017088 - RNA, 19 nt, Artificial Sequence
  Description of Artificial Sequence: Synthetic oligonucleotide
ggacgccgccaucccgccc

SEQ ID NO: 2017089 - RNA, 19 nt, Artificial Sequence
  Description of Artificial Sequence: Synthetic oligonucleotide
ccgcggaacacgguguaga

SEQ ID NO: 2017090 - RNA, 19 nt, Artificial Sequence
  Description of Artificial Sequence: Synthetic oligonucleotide
gguguugcacaggaaucuu

SEQ ID NO: 2017091 - RNA, 19 nt, Artificial Sequence
  Description of Artificial Sequence: Synthetic oligonucleotide
ccgcgcacauucucgucca

SEQ ID NO: 2017092 - RNA, 19 nt, Artificial Sequence
  Description of Artificial Sequence: Synthetic oligonucleotide
gcgucggguagaagagcac

SEQ ID NO: 2017093 - RNA, 19 nt, Artificial Sequence
  Description of Artificial Sequence: Synthetic oligonucleotide
guagacacacuggcccauu

SEQ ID NO: 2017094 - RNA, 19 nt, Artificial Sequence
  Description of Artificial Sequence: Synthetic oligonucleotide
gcuagggaccaaacucgua

SEQ ID NO: 2017095 - RNA, 19 nt, Artificial Sequence
  Description of Artificial Sequence: Synthetic oligonucleotide
ccaaacucguagccuuaua

SEQ ID NO: 2017096 - RNA, 19 nt, Artificial Sequence
  Description of Artificial Sequence: Synthetic oligonucleotide
gcgauagcuucuauagcuu

SEQ ID NO: 2017097 - RNA, 19 nt, Artificial Sequence
  Description of Artificial Sequence: Synthetic oligonucleotide
cagcggcgagccgccggcc

SEQ ID NO: 2017098 - RNA, 19 nt, Artificial Sequence
  Description of Artificial Sequence: Synthetic oligonucleotide
cagucgcggugcgcccagc

SEQ ID NO: 2017099 - RNA, 19 nt, Artificial Sequence
  Description of Artificial Sequence: Synthetic oligonucleotide
cgcgguguugcacaggaau

SEQ ID NO: 2017100 - RNA, 19 nt, Artificial Sequence
  Description of Artificial Sequence: Synthetic oligonucleotide
ccauuccuucgcgguguug

SEQ ID NO: 2017101 - RNA, 19 nt, Artificial Sequence
  Description of Artificial Sequence: Synthetic oligonucleotide
ggguguuguccuggcuuaa

SEQ ID NO: 2017102 - RNA, 19 nt, Artificial Sequence
  Description of Artificial Sequence: Synthetic oligonucleotide
cgccccaccccgccaggcg

SEQ ID NO: 2017103 - RNA, 19 nt, Artificial Sequence
  Description of Artificial Sequence: Synthetic oligonucleotide
cucuugcaguaaucuccuu

SEQ ID NO: 2017104 - RNA, 19 nt, Artificial Sequence
  Description of Artificial Sequence: Synthetic oligonucleotide
cguacucuucguucauggu

SEQ ID NO: 2017105 - RNA, 19 nt, Artificial Sequence
  Description of Artificial Sequence: Synthetic oligonucleotide
cgguguugcacaggaaucu

SEQ ID NO: 2017106 - RNA, 19 nt, Artificial Sequence
  Description of Artificial Sequence: Synthetic oligonucleotide
gcgcacauucucguccagu

SEQ ID NO: 2017107 - RNA, 19 nt, Artificial Sequence
  Description of Artificial Sequence: Synthetic oligonucleotide
cacugccgcggaacacggu

SEQ ID NO: 2017108 - RNA, 19 nt, Artificial Sequence
  Description of Artificial Sequence: Synthetic oligonucleotide
cggcgcgucaugcuccgca

SEQ ID NO: 2017109 - RNA, 19 nt, Artificial Sequence
  Description of Artificial Sequence: Synthetic oligonucleotide
cgcgcacauucucguccag

SEQ ID NO: 2017110 - RNA, 19 nt, Artificial Sequence
  Description of Artificial Sequence: Synthetic oligonucleotide
ccaagguggggaccccagu

SEQ ID NO: 2017111 - RNA, 19 nt, Artificial Sequence
  Description of Artificial Sequence: Synthetic oligonucleotide
ggccggccuccagccacgc

SEQ ID NO: 2017112 - RNA, 19 nt, Artificial Sequence
  Description of Artificial Sequence: Synthetic oligonucleotide
gccaucugacaguguuauu

SEQ ID NO: 2017113 - RNA, 19 nt, Artificial Sequence
  Description of Artificial Sequence: Synthetic oligonucleotide
ccccaccccgccaggcgca

SEQ ID NO: 2017114 - RNA, 19 nt, Artificial Sequence
  Description of Artificial Sequence: Synthetic oligonucleotide
ccgccccaccccgccaggc

SEQ ID NO: 2017115 - RNA, 19 nt, Artificial Sequence
  Description of Artificial Sequence: Synthetic oligonucleotide
cccaccccgccaggcgcag

SEQ ID NO: 2017116 - RNA, 19 nt, Artificial Sequence
  Description of Artificial Sequence: Synthetic oligonucleotide
cguagacacacuggcccau

SEQ ID NO: 2017117 - RNA, 19 nt, Artificial Sequence
  Description of Artificial Sequence: Synthetic oligonucleotide
ccaguaccagccggcgcgu

SEQ ID NO: 2017118 - RNA, 19 nt, Artificial Sequence
  Description of Artificial Sequence: Synthetic oligonucleotide
ccggcgcgucaugcuccgc

SEQ ID NO: 2017119 - RNA, 19 nt, Artificial Sequence
  Description of Artificial Sequence: Synthetic oligonucleotide
cgcggugcgcccagccucu

SEQ ID NO: 2017120 - RNA, 19 nt, Artificial Sequence
  Description of Artificial Sequence: Synthetic oligonucleotide
cggugcgcccagccucuca

SEQ ID NO: 2017121 - RNA, 19 nt, Artificial Sequence
  Description of Artificial Sequence: Synthetic oligonucleotide
  modified_base (10)..(10): a, c, u, g, unknown or other
cuaaacaugnucauugagc

SEQ ID NO: 2017122 - RNA, 19 nt, Artificial Sequence
  Description of Artificial Sequence: Synthetic oligonucleotide
uuauguuaaagucuaaaca

SEQ ID NO: 2017123 - RNA, 19 nt, Artificial Sequence
  Description of Artificial Sequence: Synthetic oligonucleotide
uagucgaaagccuugaugg

SEQ ID NO: 2017124 - RNA, 19 nt, Artificial Sequence
  Description of Artificial Sequence: Synthetic oligonucleotide
aacucauggucauugggcc

SEQ ID NO: 2017125 - RNA, 19 nt, Artificial Sequence
  Description of Artificial Sequence: Synthetic oligonucleotide
auagaagauauccagggag

SEQ ID NO: 2017126 - RNA, 19 nt, Artificial Sequence
  Description of Artificial Sequence: Synthetic oligonucleotide
  modified_base (9)..(9): a, c, u, g, unknown or other
uaaacaugnucauugagcu

SEQ ID NO: 2017127 - RNA, 19 nt, Artificial Sequence
  Description of Artificial Sequence: Synthetic oligonucleotide
uuuuaauuugagcuuaugu

SEQ ID NO: 2017128 - RNA, 19 nt, Artificial Sequence
  Description of Artificial Sequence: Synthetic oligonucleotide
  modified_base (19)..(19): a, c, u, g, unknown or other
uguuaaagucuaaacaugn

SEQ ID NO: 2017129 - RNA, 19 nt, Artificial Sequence
  Description of Artificial Sequence: Synthetic oligonucleotide
ucugggagaaaccugaaug

SEQ ID NO: 2017130 - RNA, 19 nt, Artificial Sequence
  Description of Artificial Sequence: Synthetic oligonucleotide
  modified_base (3)..(3): a, c, u, g, unknown or other
ugnucauugagcuaagaac

SEQ ID NO: 2017131 - RNA, 19 nt, Artificial Sequence
  Description of Artificial Sequence: Synthetic oligonucleotide
ucuauagagcucaacauac

SEQ ID NO: 2017132 - RNA, 19 nt, Artificial Sequence
  Description of Artificial Sequence: Synthetic oligonucleotide
aaucuuacuccguacuuuc

SEQ ID NO: 2017133 - RNA, 19 nt, Artificial Sequence
  Description of Artificial Sequence: Synthetic oligonucleotide
uagaucauagaagauaucc

SEQ ID NO: 2017134 - RNA, 19 nt, Artificial Sequence
  Description of Artificial Sequence: Synthetic oligonucleotide
uaugcuuucucauagucga

SEQ ID NO: 2017135 - RNA, 19 nt, Artificial Sequence
  Description of Artificial Sequence: Synthetic oligonucleotide
uuaauuugagcuuauguua

SEQ ID NO: 2017136 - RNA, 19 nt, Artificial Sequence
  Description of Artificial Sequence: Synthetic oligonucleotide
  modified_base (17)..(17): a, c, u, g, unknown or other
uuaaagucuaaacaugnuc

SEQ ID NO: 2017137 - RNA, 19 nt, Artificial Sequence
  Description of Artificial Sequence: Synthetic oligonucleotide
  modified_base (7)..(7): a, c, u, g, unknown or other
aacaugnucauugagcuaa

SEQ ID NO: 2017138 - RNA, 19 nt, Artificial Sequence
  Description of Artificial Sequence: Synthetic oligonucleotide
ucaagaaagagauccagga

SEQ ID NO: 2017139 - RNA, 19 nt, Artificial Sequence
  Description of Artificial Sequence: Synthetic oligonucleotide
uagaagauauccagggagg

SEQ ID NO: 2017140 - RNA, 19 nt, Artificial Sequence
  Description of Artificial Sequence: Synthetic oligonucleotide
uuucucauagucgaaagcc

SEQ ID NO: 2017141 - RNA, 19 nt, Artificial Sequence
  Description of Artificial Sequence: Synthetic oligonucleotide
ucaacauacaggcugggga

SEQ ID NO: 2017142 - RNA, 19 nt, Artificial Sequence
  Description of Artificial Sequence: Synthetic oligonucleotide
cuuauguuaaagucuaaac

SEQ ID NO: 2017143 - RNA, 19 nt, Artificial Sequence
  Description of Artificial Sequence: Synthetic oligonucleotide
  modified_base (11)..(11): a, c, u, g, unknown or other
ucuaaacaugnucauugag

SEQ ID NO: 2017144 - RNA, 19 nt, Artificial Sequence
  Description of Artificial Sequence: Synthetic oligonucleotide
ugagcuaagaacaguguca

SEQ ID NO: 2017145 - RNA, 19 nt, Artificial Sequence
  Description of Artificial Sequence: Synthetic oligonucleotide
  modified_base (2)..(2): a, c, u, g, unknown or other
gnucauugagcuaagaaca

SEQ ID NO: 2017146 - RNA, 19 nt, Artificial Sequence
  Description of Artificial Sequence: Synthetic oligonucleotide
ucaaaguaucauacgagug

SEQ ID NO: 2017147 - RNA, 19 nt, Artificial Sequence
  Description of Artificial Sequence: Synthetic oligonucleotide
uggucuauagagcucaaca

SEQ ID NO: 2017148 - RNA, 19 nt, Artificial Sequence
  Description of Artificial Sequence: Synthetic oligonucleotide
aacugcuacgguuguacac

SEQ ID NO: 2017149 - RNA, 19 nt, Artificial Sequence
  Description of Artificial Sequence: Synthetic oligonucleotide
aauacugugacugggcugu

SEQ ID NO: 2017150 - RNA, 19 nt, Artificial Sequence
  Description of Artificial Sequence: Synthetic oligonucleotide
uugggaaucugaaagcccc

SEQ ID NO: 2017151 - RNA, 19 nt, Artificial Sequence
  Description of Artificial Sequence: Synthetic oligonucleotide
aagaugggguaacugcuac

SEQ ID NO: 2017152 - RNA, 19 nt, Artificial Sequence
  Description of Artificial Sequence: Synthetic oligonucleotide
aaaacaauugguucugguu

SEQ ID NO: 2017153 - RNA, 19 nt, Artificial Sequence
  Description of Artificial Sequence: Synthetic oligonucleotide
uaugaguugagagaagagc

SEQ ID NO: 2017154 - RNA, 19 nt, Artificial Sequence
  Description of Artificial Sequence: Synthetic oligonucleotide
uuaugcaccaacagcgucc

SEQ ID NO: 2017155 - RNA, 19 nt, Artificial Sequence
  Description of Artificial Sequence: Synthetic oligonucleotide
uaucauacgaguguaugag

SEQ ID NO: 2017156 - RNA, 19 nt, Artificial Sequence
  Description of Artificial Sequence: Synthetic oligonucleotide
uaauuugagcuuauguuaa

SEQ ID NO: 2017157 - RNA, 19 nt, Artificial Sequence
  Description of Artificial Sequence: Synthetic oligonucleotide
accuuaugcaccaacagcg

SEQ ID NO: 2017158 - RNA, 19 nt, Artificial Sequence
  Description of Artificial Sequence: Synthetic oligonucleotide
uaagacagggaugaaaaca

SEQ ID NO: 2017159 - RNA, 19 nt, Artificial Sequence
  Description of Artificial Sequence: Synthetic oligonucleotide
gagauccaggagcagaugg

SEQ ID NO: 2017160 - RNA, 19 nt, Artificial Sequence
  Description of Artificial Sequence: Synthetic oligonucleotide
uuagcaauacugugacugg

SEQ ID NO: 2017161 - RNA, 19 nt, Artificial Sequence
  Description of Artificial Sequence: Synthetic oligonucleotide
agugucaaaguaucauacg

SEQ ID NO: 2017162 - RNA, 19 nt, Artificial Sequence
  Description of Artificial Sequence: Synthetic oligonucleotide
acugcuacgguuguacacc

SEQ ID NO: 2017163 - RNA, 19 nt, Artificial Sequence
  Description of Artificial Sequence: Synthetic oligonucleotide
  modified_base (13)..(13): a, c, u, g, unknown or other
agucuaaacaugnucauug

SEQ ID NO: 2017164 - RNA, 19 nt, Artificial Sequence
  Description of Artificial Sequence: Synthetic oligonucleotide
cauugagcuaagaacagug

SEQ ID NO: 2017165 - RNA, 19 nt, Artificial Sequence
  Description of Artificial Sequence: Synthetic oligonucleotide
acuccguacuuucuguacc

SEQ ID NO: 2017166 - RNA, 19 nt, Artificial Sequence
  Description of Artificial Sequence: Synthetic oligonucleotide
accagugugaccgaucccc

SEQ ID NO: 2017167 - RNA, 19 nt, Artificial Sequence
  Description of Artificial Sequence: Synthetic oligonucleotide
gagcucaacauacaggcug

SEQ ID NO: 2017168 - RNA, 19 nt, Artificial Sequence
  Description of Artificial Sequence: Synthetic oligonucleotide
agaacagugucaaaguauc

SEQ ID NO: 2017169 - RNA, 19 nt, Artificial Sequence
  Description of Artificial Sequence: Synthetic oligonucleotide
cuuguuguccgaauugagc

SEQ ID NO: 2017170 - RNA, 19 nt, Artificial Sequence
  Description of Artificial Sequence: Synthetic oligonucleotide
gaugggguaacugcuacgg

SEQ ID NO: 2017171 - RNA, 19 nt, Artificial Sequence
  Description of Artificial Sequence: Synthetic oligonucleotide
gguaccuucgcuaugacag

SEQ ID NO: 2017172 - RNA, 19 nt, Artificial Sequence
  Description of Artificial Sequence: Synthetic oligonucleotide
gaauugagcuguccgaggc

SEQ ID NO: 2017173 - RNA, 19 nt, Artificial Sequence
  Description of Artificial Sequence: Synthetic oligonucleotide
uguaugaguugagagaaga

SEQ ID NO: 2017174 - RNA, 19 nt, Artificial Sequence
  Description of Artificial Sequence: Synthetic oligonucleotide
  modified_base (15)..(15): a, c, u, g, unknown or other
aaagucuaaacaugnucau

SEQ ID NO: 2017175 - RNA, 19 nt, Artificial Sequence
  Description of Artificial Sequence: Synthetic oligonucleotide
gaagccuguggauaggccc

SEQ ID NO: 2017176 - RNA, 19 nt, Artificial Sequence
  Description of Artificial Sequence: Synthetic oligonucleotide
uguaugcuuucucauaguc

SEQ ID NO: 2017177 - RNA, 19 nt, Artificial Sequence
  Description of Artificial Sequence: Synthetic oligonucleotide
auagucgaaagccuugaug

SEQ ID NO: 2017178 - RNA, 19 nt, Artificial Sequence
  Description of Artificial Sequence: Synthetic oligonucleotide
ugggagucagccuaggaug

SEQ ID NO: 2017179 - RNA, 19 nt, Artificial Sequence
  Description of Artificial Sequence: Synthetic oligonucleotide
aauggcagcggggugacag

SEQ ID NO: 2017180 - RNA, 19 nt, Artificial Sequence
  Description of Artificial Sequence: Synthetic oligonucleotide
ucuuacuccguacuuucug

SEQ ID NO: 2017181 - RNA, 19 nt, Artificial Sequence
  Description of Artificial Sequence: Synthetic oligonucleotide
ugagagaagagcugggagu

SEQ ID NO: 2017182 - RNA, 19 nt, Artificial Sequence
  Description of Artificial Sequence: Synthetic oligonucleotide
cagggaugaaaacaauugg

SEQ ID NO: 2017183 - RNA, 19 nt, Artificial Sequence
  Description of Artificial Sequence: Synthetic oligonucleotide
uugagcuaagaacaguguc

SEQ ID NO: 2017184 - RNA, 19 nt, Artificial Sequence
  Description of Artificial Sequence: Synthetic oligonucleotide
agacaugacaauggcagcg

SEQ ID NO: 2017185 - RNA, 19 nt, Artificial Sequence
  Description of Artificial Sequence: Synthetic oligonucleotide
ucauacgaguguaugaguu

SEQ ID NO: 2017186 - RNA, 19 nt, Artificial Sequence
  Description of Artificial Sequence: Synthetic oligonucleotide
  modified_base (4)..(4): a, c, u, g, unknown or other
augnucauugagcuaagaa

SEQ ID NO: 2017187 - RNA, 19 nt, Artificial Sequence
  Description of Artificial Sequence: Synthetic oligonucleotide
cagugucaaaguaucauac

SEQ ID NO: 2017188 - RNA, 19 nt, Artificial Sequence
  Description of Artificial Sequence: Synthetic oligonucleotide
uguggauaggcccgugucc

SEQ ID NO: 2017189 - RNA, 19 nt, Artificial Sequence
  Description of Artificial Sequence: Synthetic oligonucleotide
aguguaugaguugagagaa

SEQ ID NO: 2017190 - RNA, 19 nt, Artificial Sequence
  Description of Artificial Sequence: Synthetic oligonucleotide
gcuaugacaggccacaccc

SEQ ID NO: 2017191 - RNA, 19 nt, Artificial Sequence
  Description of Artificial Sequence: Synthetic oligonucleotide
gaguguaugaguugagaga

SEQ ID NO: 2017192 - RNA, 19 nt, Artificial Sequence
  Description of Artificial Sequence: Synthetic oligonucleotide
agugugaccgauccccagg

SEQ ID NO: 2017193 - RNA, 19 nt, Artificial Sequence
  Description of Artificial Sequence: Synthetic oligonucleotide
gugucaaaguaucauacga

SEQ ID NO: 2017194 - RNA, 19 nt, Artificial Sequence
  Description of Artificial Sequence: Synthetic oligonucleotide
aguaucauacgaguguaug

SEQ ID NO: 2017195 - RNA, 19 nt, Artificial Sequence
  Description of Artificial Sequence: Synthetic oligonucleotide
uacugccucaucugcacgg

SEQ ID NO: 2017196 - RNA, 19 nt, Artificial Sequence
  Description of Artificial Sequence: Synthetic oligonucleotide
agucugcccagguacugcc

SEQ ID NO: 2017197 - RNA, 19 nt, Artificial Sequence
  Description of Artificial Sequence: Synthetic oligonucleotide
aaaguaucauacgagugua

SEQ ID NO: 2017198 - RNA, 19 nt, Artificial Sequence
  Description of Artificial Sequence: Synthetic oligonucleotide
cuuucucauagucgaaagc

SEQ ID NO: 2017199 - RNA, 19 nt, Artificial Sequence
  Description of Artificial Sequence: Synthetic oligonucleotide
cucagaagccuguggauag

SEQ ID NO: 2017200 - RNA, 19 nt, Artificial Sequence
  Description of Artificial Sequence: Synthetic oligonucleotide
acaccuuaugcaccaacag

SEQ ID NO: 2017201 - RNA, 19 nt, Artificial Sequence
  Description of Artificial Sequence: Synthetic oligonucleotide
ugaccgauccccagguucc

SEQ ID NO: 2017202 - RNA, 19 nt, Artificial Sequence
  Description of Artificial Sequence: Synthetic oligonucleotide
accaacagcguccuggagu

SEQ ID NO: 2017203 - RNA, 19 nt, Artificial Sequence
  Description of Artificial Sequence: Synthetic oligonucleotide
uacgguuguacacccacac

SEQ ID NO: 2017204 - RNA, 19 nt, Artificial Sequence
  Description of Artificial Sequence: Synthetic oligonucleotide
caugacaauggcagcgggg

SEQ ID NO: 2017205 - RNA, 19 nt, Artificial Sequence
  Description of Artificial Sequence: Synthetic oligonucleotide
gagcaguucccucccaggg

SEQ ID NO: 2017206 - RNA, 19 nt, Artificial Sequence
  Description of Artificial Sequence: Synthetic oligonucleotide
aauugagcuguccgaggca

SEQ ID NO: 2017207 - RNA, 19 nt, Artificial Sequence
  Description of Artificial Sequence: Synthetic oligonucleotide
aaguuuggcagcugcugga

SEQ ID NO: 2017208 - RNA, 19 nt, Artificial Sequence
  Description of Artificial Sequence: Synthetic oligonucleotide
caccuuaugcaccaacagc

SEQ ID NO: 2017209 - RNA, 19 nt, Artificial Sequence
  Description of Artificial Sequence: Synthetic oligonucleotide
ugcacggugaagcccgucc

SEQ ID NO: 2017210 - RNA, 19 nt, Artificial Sequence
  Description of Artificial Sequence: Synthetic oligonucleotide
ugccagucugcccagguac

SEQ ID NO: 2017211 - RNA, 19 nt, Artificial Sequence
  Description of Artificial Sequence: Synthetic oligonucleotide
aacaccuuaugcaccaaca

SEQ ID NO: 2017212 - RNA, 19 nt, Artificial Sequence
  Description of Artificial Sequence: Synthetic oligonucleotide
ugucccugcagcccuuagg

SEQ ID NO: 2017213 - RNA, 19 nt, Artificial Sequence
  Description of Artificial Sequence: Synthetic oligonucleotide
ugcugcaugaacucauggu

SEQ ID NO: 2017214 - RNA, 19 nt, Artificial Sequence
  Description of Artificial Sequence: Synthetic oligonucleotide
uccgaauugagcuguccga

SEQ ID NO: 2017215 - RNA, 19 nt, Artificial Sequence
  Description of Artificial Sequence: Synthetic oligonucleotide
uagcaauacugugacuggg

SEQ ID NO: 2017216 - RNA, 19 nt, Artificial Sequence
  Description of Artificial Sequence: Synthetic oligonucleotide
ugacucuccacaucuggga

SEQ ID NO: 2017217 - RNA, 19 nt, Artificial Sequence
  Description of Artificial Sequence: Synthetic oligonucleotide
uguuguccgaauugagcug

SEQ ID NO: 2017218 - RNA, 19 nt, Artificial Sequence
  Description of Artificial Sequence: Synthetic oligonucleotide
guaucauacgaguguauga

SEQ ID NO: 2017219 - RNA, 19 nt, Artificial Sequence
  Description of Artificial Sequence: Synthetic oligonucleotide
gaaaccagggaacaccuua

SEQ ID NO: 2017220 - RNA, 19 nt, Artificial Sequence
  Description of Artificial Sequence: Synthetic oligonucleotide
cauacgaguguaugaguug

SEQ ID NO: 2017221 - RNA, 19 nt, Artificial Sequence
  Description of Artificial Sequence: Synthetic oligonucleotide
agaaagagauccaggagca

SEQ ID NO: 2017222 - RNA, 19 nt, Artificial Sequence
  Description of Artificial Sequence: Synthetic oligonucleotide
acucauggucauugggccg

SEQ ID NO: 2017223 - RNA, 19 nt, Artificial Sequence
  Description of Artificial Sequence: Synthetic oligonucleotide
  modified_base (14)..(14): a, c, u, g, unknown or other
aagucuaaacaugnucauu

SEQ ID NO: 2017224 - RNA, 19 nt, Artificial Sequence
  Description of Artificial Sequence: Synthetic oligonucleotide
aagaaguugggaaucugaa

SEQ ID NO: 2017225 - RNA, 19 nt, Artificial Sequence
  Description of Artificial Sequence: Synthetic oligonucleotide
uaggaugguaccuucgcua

SEQ ID NO: 2017226 - RNA, 19 nt, Artificial Sequence
  Description of Artificial Sequence: Synthetic oligonucleotide
uucgcuaugacaggccaca

SEQ ID NO: 2017227 - RNA, 19 nt, Artificial Sequence
  Description of Artificial Sequence: Synthetic oligonucleotide
gaugguaccuucgcuauga

SEQ ID NO: 2017228 - RNA, 19 nt, Artificial Sequence
  Description of Artificial Sequence: Synthetic oligonucleotide
agccaaucuuacuccguac

SEQ ID NO: 2017229 - RNA, 19 nt, Artificial Sequence
  Description of Artificial Sequence: Synthetic oligonucleotide
gaagaaguugggaaucuga

SEQ ID NO: 2017230 - RNA, 19 nt, Artificial Sequence
  Description of Artificial Sequence: Synthetic oligonucleotide
guaacugcuacgguuguac

SEQ ID NO: 2017231 - RNA, 19 nt, Artificial Sequence
  Description of Artificial Sequence: Synthetic oligonucleotide
uccacuucccucgucagcu

SEQ ID NO: 2017232 - RNA, 19 nt, Artificial Sequence
  Description of Artificial Sequence: Synthetic oligonucleotide
agaugggguaacugcuacg

SEQ ID NO: 2017233 - RNA, 19 nt, Artificial Sequence
  Description of Artificial Sequence: Synthetic oligonucleotide
acagugucaaaguaucaua

SEQ ID NO: 2017234 - RNA, 19 nt, Artificial Sequence
  Description of Artificial Sequence: Synthetic oligonucleotide
cuggguuagcaauacugug

SEQ ID NO: 2017235 - RNA, 19 nt, Artificial Sequence
  Description of Artificial Sequence: Synthetic oligonucleotide
auccacuucccucgucagc

SEQ ID NO: 2017236 - RNA, 19 nt, Artificial Sequence
  Description of Artificial Sequence: Synthetic oligonucleotide
aaccagggaacaccuuaug

SEQ ID NO: 2017237 - RNA, 19 nt, Artificial Sequence
  Description of Artificial Sequence: Synthetic oligonucleotide
cacagccaaucuuacuccg

SEQ ID NO: 2017238 - RNA, 19 nt, Artificial Sequence
  Description of Artificial Sequence: Synthetic oligonucleotide
uaugacaggccacacccuu

SEQ ID NO: 2017239 - RNA, 19 nt, Artificial Sequence
  Description of Artificial Sequence: Synthetic oligonucleotide
ugccucaucugcacgguga

SEQ ID NO: 2017240 - RNA, 19 nt, Artificial Sequence
  Description of Artificial Sequence: Synthetic oligonucleotide
augacaauggcagcggggu

SEQ ID NO: 2017241 - RNA, 19 nt, Artificial Sequence
  Description of Artificial Sequence: Synthetic oligonucleotide
auacgaguguaugaguuga

SEQ ID NO: 2017242 - RNA, 19 nt, Artificial Sequence
  Description of Artificial Sequence: Synthetic oligonucleotide
acacaguagagccucccca

SEQ ID NO: 2017243 - RNA, 19 nt, Artificial Sequence
  Description of Artificial Sequence: Synthetic oligonucleotide
gucgaaagccuugauggag

SEQ ID NO: 2017244 - RNA, 19 nt, Artificial Sequence
  Description of Artificial Sequence: Synthetic oligonucleotide
gucaaaguaucauacgagu

SEQ ID NO: 2017245 - RNA, 19 nt, Artificial Sequence
  Description of Artificial Sequence: Synthetic oligonucleotide
  modified_base (8)..(8): a, c, u, g, unknown or other
aaacaugnucauugagcua

SEQ ID NO: 2017246 - RNA, 19 nt, Artificial Sequence
  Description of Artificial Sequence: Synthetic oligonucleotide
aucauacgaguguaugagu

SEQ ID NO: 2017247 - RNA, 19 nt, Artificial Sequence
  Description of Artificial Sequence: Synthetic oligonucleotide
uagagccuccccacucucg

SEQ ID NO: 2017248 - RNA, 19 nt, Artificial Sequence
  Description of Artificial Sequence: Synthetic oligonucleotide
acgguuguacacccacacg

SEQ ID NO: 2017249 - RNA, 19 nt, Artificial Sequence
  Description of Artificial Sequence: Synthetic oligonucleotide
agggaacaccuuaugcacc

SEQ ID NO: 2017250 - RNA, 19 nt, Artificial Sequence
  Description of Artificial Sequence: Synthetic oligonucleotide
uacgaguguaugaguugag

SEQ ID NO: 2017251 - RNA, 19 nt, Artificial Sequence
  Description of Artificial Sequence: Synthetic oligonucleotide
agguagaucauagaagaua

SEQ ID NO: 2017252 - RNA, 19 nt, Artificial Sequence
  Description of Artificial Sequence: Synthetic oligonucleotide
uacuccguacuuucuguac

SEQ ID NO: 2017253 - RNA, 19 nt, Artificial Sequence
  Description of Artificial Sequence: Synthetic oligonucleotide
cucccaguaugccaccacg

SEQ ID NO: 2017254 - RNA, 19 nt, Artificial Sequence
  Description of Artificial Sequence: Synthetic oligonucleotide
uaggcccguguccuaaaag

SEQ ID NO: 2017255 - RNA, 19 nt, Artificial Sequence
  Description of Artificial Sequence: Synthetic oligonucleotide
cugggagaaaccugaauga

SEQ ID NO: 2017256 - RNA, 19 nt, Artificial Sequence
  Description of Artificial Sequence: Synthetic oligonucleotide
caauacugugacugggcug

SEQ ID NO: 2017257 - RNA, 19 nt, Artificial Sequence
  Description of Artificial Sequence: Synthetic oligonucleotide
ugggguaacugcuacgguu

SEQ ID NO: 2017258 - RNA, 19 nt, Artificial Sequence
  Description of Artificial Sequence: Synthetic oligonucleotide
uggggugcugagcugacuc

SEQ ID NO: 2017259 - RNA, 19 nt, Artificial Sequence
  Description of Artificial Sequence: Synthetic oligonucleotide
guaagacagggaugaaaac

SEQ ID NO: 2017260 - RNA, 19 nt, Artificial Sequence
  Description of Artificial Sequence: Synthetic oligonucleotide
gucuauagagcucaacaua

SEQ ID NO: 2017261 - RNA, 19 nt, Artificial Sequence
  Description of Artificial Sequence: Synthetic oligonucleotide
cuuaugcaccaacagcguc

SEQ ID NO: 2017262 - RNA, 19 nt, Artificial Sequence
  Description of Artificial Sequence: Synthetic oligonucleotide
cuccacaucugggagaaac

SEQ ID NO: 2017263 - RNA, 19 nt, Artificial Sequence
  Description of Artificial Sequence: Synthetic oligonucleotide
gaacaccuuaugcaccaac

SEQ ID NO: 2017264 - RNA, 19 nt, Artificial Sequence
  Description of Artificial Sequence: Synthetic oligonucleotide
agcucaacauacaggcugg

SEQ ID NO: 2017265 - RNA, 19 nt, Artificial Sequence
  Description of Artificial Sequence: Synthetic oligonucleotide
ggagaaaccagggaacacc

SEQ ID NO: 2017266 - RNA, 19 nt, Artificial Sequence
  Description of Artificial Sequence: Synthetic oligonucleotide
cacaguagagccuccccac

SEQ ID NO: 2017267 - RNA, 19 nt, Artificial Sequence
  Description of Artificial Sequence: Synthetic oligonucleotide
guaccuucgcuaugacagg

SEQ ID NO: 2017268 - RNA, 19 nt, Artificial Sequence
  Description of Artificial Sequence: Synthetic oligonucleotide
ugcaugaacucauggucau

SEQ ID NO: 2017269 - RNA, 19 nt, Artificial Sequence
  Description of Artificial Sequence: Synthetic oligonucleotide
ugugacugggcugucccug

SEQ ID NO: 2017270 - RNA, 19 nt, Artificial Sequence
  Description of Artificial Sequence: Synthetic oligonucleotide
cucauggucauugggccgc

SEQ ID NO: 2017271 - RNA, 19 nt, Artificial Sequence
  Description of Artificial Sequence: Synthetic oligonucleotide
uguggcggacuugaugaag

SEQ ID NO: 2017272 - RNA, 19 nt, Artificial Sequence
  Description of Artificial Sequence: Synthetic oligonucleotide
uguacacccacacgccauc

SEQ ID NO: 2017273 - RNA, 19 nt, Artificial Sequence
  Description of Artificial Sequence: Synthetic oligonucleotide
  modified_base (12)..(12): a, c, u, g, unknown or other
gucuaaacaugnucauuga

SEQ ID NO: 2017274 - RNA, 19 nt, Artificial Sequence
  Description of Artificial Sequence: Synthetic oligonucleotide
cagguacugccucaucugc

SEQ ID NO: 2017275 - RNA, 19 nt, Artificial Sequence
  Description of Artificial Sequence: Synthetic oligonucleotide
ucauugggccgcugcaggc

SEQ ID NO: 2017276 - RNA, 19 nt, Artificial Sequence
  Description of Artificial Sequence: Synthetic oligonucleotide
gcugacucuccacaucugg

SEQ ID NO: 2017277 - RNA, 19 nt, Artificial Sequence
  Description of Artificial Sequence: Synthetic oligonucleotide
agucagccuaggaugguac

SEQ ID NO: 2017278 - RNA, 19 nt, Artificial Sequence
  Description of Artificial Sequence: Synthetic oligonucleotide
uuguacacccacacgccau

SEQ ID NO: 2017279 - RNA, 19 nt, Artificial Sequence
  Description of Artificial Sequence: Synthetic oligonucleotide
aagcccaucucaagaaaga

SEQ ID NO: 2017280 - RNA, 19 nt, Artificial Sequence
  Description of Artificial Sequence: Synthetic oligonucleotide
gccacagccaaucuuacuc

SEQ ID NO: 2017281 - RNA, 19 nt, Artificial Sequence
  Description of Artificial Sequence: Synthetic oligonucleotide
cuuaggaagcccaucucaa

SEQ ID NO: 2017282 - RNA, 19 nt, Artificial Sequence
  Description of Artificial Sequence: Synthetic oligonucleotide
gagcuuauguuaaagucua

SEQ ID NO: 2017283 - RNA, 19 nt, Artificial Sequence
  Description of Artificial Sequence: Synthetic oligonucleotide
aggaugguaccuucgcuau

SEQ ID NO: 2017284 - RNA, 19 nt, Artificial Sequence
  Description of Artificial Sequence: Synthetic oligonucleotide
cauagaagauauccaggga

SEQ ID NO: 2017285 - RNA, 19 nt, Artificial Sequence
  Description of Artificial Sequence: Synthetic oligonucleotide
gacaauggcagcgggguga

SEQ ID NO: 2017286 - RNA, 19 nt, Artificial Sequence
  Description of Artificial Sequence: Synthetic oligonucleotide
agucgaaagccuugaugga

SEQ ID NO: 2017287 - RNA, 19 nt, Artificial Sequence
  Description of Artificial Sequence: Synthetic oligonucleotide
ugguaccuucgcuaugaca

SEQ ID NO: 2017288 - RNA, 19 nt, Artificial Sequence
  Description of Artificial Sequence: Synthetic oligonucleotide
uaacugcuacgguuguaca

SEQ ID NO: 2017289 - RNA, 19 nt, Artificial Sequence
  Description of Artificial Sequence: Synthetic oligonucleotide
ggcaguaagacagggauga

SEQ ID NO: 2017290 - RNA, 19 nt, Artificial Sequence
  Description of Artificial Sequence: Synthetic oligonucleotide
agccuaggaugguaccuuc

SEQ ID NO: 2017291 - RNA, 19 nt, Artificial Sequence
  Description of Artificial Sequence: Synthetic oligonucleotide
gugaccgauccccagguuc

SEQ ID NO: 2017292 - RNA, 19 nt, Artificial Sequence
  Description of Artificial Sequence: Synthetic oligonucleotide
auugagcuaagaacagugu

SEQ ID NO: 2017293 - RNA, 19 nt, Artificial Sequence
  Description of Artificial Sequence: Synthetic oligonucleotide
uaccuucgcuaugacaggc

SEQ ID NO: 2017294 - RNA, 19 nt, Artificial Sequence
  Description of Artificial Sequence: Synthetic oligonucleotide
ugacaauggcagcggggug

SEQ ID NO: 2017295 - RNA, 19 nt, Artificial Sequence
  Description of Artificial Sequence: Synthetic oligonucleotide
gucccugcagcccuuagga

SEQ ID NO: 2017296 - RNA, 19 nt, Artificial Sequence
  Description of Artificial Sequence: Synthetic oligonucleotide
ccacgcaccagugugaccg

SEQ ID NO: 2017297 - RNA, 19 nt, Artificial Sequence
  Description of Artificial Sequence: Synthetic oligonucleotide
aaaccagggaacaccuuau

SEQ ID NO: 2017298 - RNA, 19 nt, Artificial Sequence
  Description of Artificial Sequence: Synthetic oligonucleotide
ucgucuucuccucccagua

SEQ ID NO: 2017299 - RNA, 19 nt, Artificial Sequence
  Description of Artificial Sequence: Synthetic oligonucleotide
guuguacacccacacgcca

SEQ ID NO: 2017300 - RNA, 19 nt, Artificial Sequence
  Description of Artificial Sequence: Synthetic oligonucleotide
augguaccuucgcuaugac

SEQ ID NO: 2017301 - RNA, 19 nt, Artificial Sequence
  Description of Artificial Sequence: Synthetic oligonucleotide
agagccuccccacucucgu

SEQ ID NO: 2017302 - RNA, 19 nt, Artificial Sequence
  Description of Artificial Sequence: Synthetic oligonucleotide
gccacacccuucuuguugg

SEQ ID NO: 2017303 - RNA, 19 nt, Artificial Sequence
  Description of Artificial Sequence: Synthetic oligonucleotide
cugcuacgguuguacaccc

SEQ ID NO: 2017304 - RNA, 19 nt, Artificial Sequence
  Description of Artificial Sequence: Synthetic oligonucleotide
uggaacaccugcugccagu

SEQ ID NO: 2017305 - RNA, 19 nt, Artificial Sequence
  Description of Artificial Sequence: Synthetic oligonucleotide
cgaguguaugaguugagag

SEQ ID NO: 2017306 - RNA, 19 nt, Artificial Sequence
  Description of Artificial Sequence: Synthetic oligonucleotide
uuacuccguacuuucugua

SEQ ID NO: 2017307 - RNA, 19 nt, Artificial Sequence
  Description of Artificial Sequence: Synthetic oligonucleotide
cucgucagcuggaugccac

SEQ ID NO: 2017308 - RNA, 19 nt, Artificial Sequence
  Description of Artificial Sequence: Synthetic oligonucleotide
aguaugccaccacgcacca

SEQ ID NO: 2017309 - RNA, 19 nt, Artificial Sequence
  Description of Artificial Sequence: Synthetic oligonucleotide
cuguccgaggcaaaagcca

SEQ ID NO: 2017310 - RNA, 19 nt, Artificial Sequence
  Description of Artificial Sequence: Synthetic oligonucleotide
accuucgcuaugacaggcc

SEQ ID NO: 2017311 - RNA, 19 nt, Artificial Sequence
  Description of Artificial Sequence: Synthetic oligonucleotide
uacacccacacgccaucca

SEQ ID NO: 2017312 - RNA, 19 nt, Artificial Sequence
  Description of Artificial Sequence: Synthetic oligonucleotide
agggcucuuggacacagua

SEQ ID NO: 2017313 - RNA, 19 nt, Artificial Sequence
  Description of Artificial Sequence: Synthetic oligonucleotide
acaguagagccuccccacu

SEQ ID NO: 2017314 - RNA, 19 nt, Artificial Sequence
  Description of Artificial Sequence: Synthetic oligonucleotide
cgguuguacacccacacgc

SEQ ID NO: 2017315 - RNA, 19 nt, Artificial Sequence
  Description of Artificial Sequence: Synthetic oligonucleotide
cuguggauaggcccguguc

SEQ ID NO: 2017316 - RNA, 19 nt, Artificial Sequence
  Description of Artificial Sequence: Synthetic oligonucleotide
auugggccgcugcaggcug

SEQ ID NO: 2017317 - RNA, 19 nt, Artificial Sequence
  Description of Artificial Sequence: Synthetic oligonucleotide
cuucgcuaugacaggccac

SEQ ID NO: 2017318 - RNA, 19 nt, Artificial Sequence
  Description of Artificial Sequence: Synthetic oligonucleotide
uguccgaauugagcugucc

SEQ ID NO: 2017319 - RNA, 19 nt, Artificial Sequence
  Description of Artificial Sequence: Synthetic oligonucleotide
uggcuucucagaagccugu

SEQ ID NO: 2017320 - RNA, 19 nt, Artificial Sequence
  Description of Artificial Sequence: Synthetic oligonucleotide
cauccacuucccucgucag

SEQ ID NO: 2017321 - RNA, 19 nt, Artificial Sequence
  Description of Artificial Sequence: Synthetic oligonucleotide
auggcagcggggugacagg

SEQ ID NO: 2017322 - RNA, 19 nt, Artificial Sequence
  Description of Artificial Sequence: Synthetic oligonucleotide
cgaggcaaaagccauuccc

SEQ ID NO: 2017323 - RNA, 19 nt, Artificial Sequence
  Description of Artificial Sequence: Synthetic oligonucleotide
accacgcaccagugugacc

SEQ ID NO: 2017324 - RNA, 19 nt, Artificial Sequence
  Description of Artificial Sequence: Synthetic oligonucleotide
uggagaaaccagggaacac

SEQ ID NO: 2017325 - RNA, 19 nt, Artificial Sequence
  Description of Artificial Sequence: Synthetic oligonucleotide
aucugggagaaaccugaau

SEQ ID NO: 2017326 - RNA, 19 nt, Artificial Sequence
  Description of Artificial Sequence: Synthetic oligonucleotide
uggaguccggguuguccag

SEQ ID NO: 2017327 - RNA, 19 nt, Artificial Sequence
  Description of Artificial Sequence: Synthetic oligonucleotide
gcuacgguuguacacccac

SEQ ID NO: 2017328 - RNA, 19 nt, Artificial Sequence
  Description of Artificial Sequence: Synthetic oligonucleotide
uccguacuuucuguaccag

SEQ ID NO: 2017329 - RNA, 19 nt, Artificial Sequence
  Description of Artificial Sequence: Synthetic oligonucleotide
acaauugguucugguucag

SEQ ID NO: 2017330 - RNA, 19 nt, Artificial Sequence
  Description of Artificial Sequence: Synthetic oligonucleotide
gccaccacgcaccagugug

SEQ ID NO: 2017331 - RNA, 19 nt, Artificial Sequence
  Description of Artificial Sequence: Synthetic oligonucleotide
gaguccggguuguccagug

SEQ ID NO: 2017332 - RNA, 19 nt, Artificial Sequence
  Description of Artificial Sequence: Synthetic oligonucleotide
gaacagugucaaaguauca

SEQ ID NO: 2017333 - RNA, 19 nt, Artificial Sequence
  Description of Artificial Sequence: Synthetic oligonucleotide
agauauccagggagggcuc

SEQ ID NO: 2017334 - RNA, 19 nt, Artificial Sequence
  Description of Artificial Sequence: Synthetic oligonucleotide
ccuaggaugguaccuucgc

SEQ ID NO: 2017335 - RNA, 19 nt, Artificial Sequence
  Description of Artificial Sequence: Synthetic oligonucleotide
gggguaacugcuacgguug

SEQ ID NO: 2017336 - RNA, 19 nt, Artificial Sequence
  Description of Artificial Sequence: Synthetic oligonucleotide
aggggcuucggcaggcugg

SEQ ID NO: 2017337 - RNA, 19 nt, Artificial Sequence
  Description of Artificial Sequence: Synthetic oligonucleotide
gggagucagccuaggaugg

SEQ ID NO: 2017338 - RNA, 19 nt, Artificial Sequence
  Description of Artificial Sequence: Synthetic oligonucleotide
ugacucuuguuguccgaau

SEQ ID NO: 2017339 - RNA, 19 nt, Artificial Sequence
  Description of Artificial Sequence: Synthetic oligonucleotide
gguucagccucuagcaggc

SEQ ID NO: 2017340 - RNA, 19 nt, Artificial Sequence
  Description of Artificial Sequence: Synthetic oligonucleotide
cuuacuccguacuuucugu

SEQ ID NO: 2017341 - RNA, 19 nt, Artificial Sequence
  Description of Artificial Sequence: Synthetic oligonucleotide
ccaacagcguccuggaguc

SEQ ID NO: 2017342 - RNA, 19 nt, Artificial Sequence
  Description of Artificial Sequence: Synthetic oligonucleotide
cuggggauggggugcugag

SEQ ID NO: 2017343 - RNA, 19 nt, Artificial Sequence
  Description of Artificial Sequence: Synthetic oligonucleotide
cuccguacuuucuguacca

SEQ ID NO: 2017344 - RNA, 19 nt, Artificial Sequence
  Description of Artificial Sequence: Synthetic oligonucleotide
gagaaaccagggaacaccu

SEQ ID NO: 2017345 - RNA, 19 nt, Artificial Sequence
  Description of Artificial Sequence: Synthetic oligonucleotide
ugccacagccaaucuuacu

SEQ ID NO: 2017346 - RNA, 19 nt, Artificial Sequence
  Description of Artificial Sequence: Synthetic oligonucleotide
augacaggccacacccuuc

SEQ ID NO: 2017347 - RNA, 19 nt, Artificial Sequence
  Description of Artificial Sequence: Synthetic oligonucleotide
gaagcccguccauggcugc

SEQ ID NO: 2017348 - RNA, 19 nt, Artificial Sequence
  Description of Artificial Sequence: Synthetic oligonucleotide
gagcuguccgaggcaaaag

SEQ ID NO: 2017349 - RNA, 19 nt, Artificial Sequence
  Description of Artificial Sequence: Synthetic oligonucleotide
ucgucagcuggaugccaca

SEQ ID NO: 2017350 - RNA, 19 nt, Artificial Sequence
  Description of Artificial Sequence: Synthetic oligonucleotide
guuuggcagcugcuggaac

SEQ ID NO: 2017351 - RNA, 19 nt, Artificial Sequence
  Description of Artificial Sequence: Synthetic oligonucleotide
augggguaacugcuacggu

SEQ ID NO: 2017352 - RNA, 19 nt, Artificial Sequence
  Description of Artificial Sequence: Synthetic oligonucleotide
cagugugaccgauccccag

SEQ ID NO: 2017353 - RNA, 19 nt, Artificial Sequence
  Description of Artificial Sequence: Synthetic oligonucleotide
ugcuacgguuguacaccca

SEQ ID NO: 2017354 - RNA, 19 nt, Artificial Sequence
  Description of Artificial Sequence: Synthetic oligonucleotide
guguaugaguugagagaag

SEQ ID NO: 2017355 - RNA, 19 nt, Artificial Sequence
  Description of Artificial Sequence: Synthetic oligonucleotide
cuucuccucccaguaugcc

SEQ ID NO: 2017356 - RNA, 19 nt, Artificial Sequence
  Description of Artificial Sequence: Synthetic oligonucleotide
gaagaugggguaacugcua

SEQ ID NO: 2017357 - RNA, 19 nt, Artificial Sequence
  Description of Artificial Sequence: Synthetic oligonucleotide
  modified_base (6)..(6): a, c, u, g, unknown or other
acaugnucauugagcuaag

SEQ ID NO: 2017358 - RNA, 19 nt, Artificial Sequence
  Description of Artificial Sequence: Synthetic oligonucleotide
gcuuauguuaaagucuaaa

SEQ ID NO: 2017359 - RNA, 19 nt, Artificial Sequence
  Description of Artificial Sequence: Synthetic oligonucleotide
guggcggacuugaugaaga

SEQ ID NO: 2017360 - RNA, 19 nt, Artificial Sequence
  Description of Artificial Sequence: Synthetic oligonucleotide
guagaucauagaagauauc

SEQ ID NO: 2017361 - RNA, 19 nt, Artificial Sequence
  Description of Artificial Sequence: Synthetic oligonucleotide
ggugaagcccguccauggc

SEQ ID NO: 2017362 - RNA, 19 nt, Artificial Sequence
  Description of Artificial Sequence: Synthetic oligonucleotide
cacacgccauccacuuccc

SEQ ID NO: 2017363 - RNA, 19 nt, Artificial Sequence
  Description of Artificial Sequence: Synthetic oligonucleotide
  modified_base (18)..(18): a, c, u, g, unknown or other
guuaaagucuaaacaugnu

SEQ ID NO: 2017364 - RNA, 19 nt, Artificial Sequence
  Description of Artificial Sequence: Synthetic oligonucleotide
gcuguccgaggcaaaagcc

SEQ ID NO: 2017365 - RNA, 19 nt, Artificial Sequence
  Description of Artificial Sequence: Synthetic oligonucleotide
guuguccgaauugagcugu

SEQ ID NO: 2017366 - RNA, 19 nt, Artificial Sequence
  Description of Artificial Sequence: Synthetic oligonucleotide
ggucuauagagcucaacau

SEQ ID NO: 2017367 - RNA, 19 nt, Artificial Sequence
  Description of Artificial Sequence: Synthetic oligonucleotide
auaggcccguguccuaaaa

SEQ ID NO: 2017368 - RNA, 19 nt, Artificial Sequence
  Description of Artificial Sequence: Synthetic oligonucleotide
ccaguaugccaccacgcac

SEQ ID NO: 2017369 - RNA, 19 nt, Artificial Sequence
  Description of Artificial Sequence: Synthetic oligonucleotide
cagucugcccagguacugc

SEQ ID NO: 2017370 - RNA, 19 nt, Artificial Sequence
  Description of Artificial Sequence: Synthetic oligonucleotide
ccuuaggaagcccaucuca

SEQ ID NO: 2017371 - RNA, 19 nt, Artificial Sequence
  Description of Artificial Sequence: Synthetic oligonucleotide
gcccguguccuaaaagggg

SEQ ID NO: 2017372 - RNA, 19 nt, Artificial Sequence
  Description of Artificial Sequence: Synthetic oligonucleotide
uggggauggggugcugagc

SEQ ID NO: 2017373 - RNA, 19 nt, Artificial Sequence
  Description of Artificial Sequence: Synthetic oligonucleotide
ugccaccacgcaccagugu

SEQ ID NO: 2017374 - RNA, 19 nt, Artificial Sequence
  Description of Artificial Sequence: Synthetic oligonucleotide
cuacgguuguacacccaca

SEQ ID NO: 2017375 - RNA, 19 nt, Artificial Sequence
  Description of Artificial Sequence: Synthetic oligonucleotide
gacucuuguuguccgaauu

SEQ ID NO: 2017376 - RNA, 19 nt, Artificial Sequence
  Description of Artificial Sequence: Synthetic oligonucleotide
agcuaagaacagugucaaa

SEQ ID NO: 2017377 - RNA, 19 nt, Artificial Sequence
  Description of Artificial Sequence: Synthetic oligonucleotide
uccccugagguagaucaua

SEQ ID NO: 2017378 - RNA, 19 nt, Artificial Sequence
  Description of Artificial Sequence: Synthetic oligonucleotide
cuggucuauagagcucaac

SEQ ID NO: 2017379 - RNA, 19 nt, Artificial Sequence
  Description of Artificial Sequence: Synthetic oligonucleotide
ccgaauugagcuguccgag

SEQ ID NO: 2017380 - RNA, 19 nt, Artificial Sequence
  Description of Artificial Sequence: Synthetic oligonucleotide
ccguacuuucuguaccagc

SEQ ID NO: 2017381 - RNA, 19 nt, Artificial Sequence
  Description of Artificial Sequence: Synthetic oligonucleotide
uggcggacuugaugaagau

SEQ ID NO: 2017382 - RNA, 19 nt, Artificial Sequence
  Description of Artificial Sequence: Synthetic oligonucleotide
uuguccgaauugagcuguc

SEQ ID NO: 2017383 - RNA, 19 nt, Artificial Sequence
  Description of Artificial Sequence: Synthetic oligonucleotide
ccagaagaaguugggaauc

SEQ ID NO: 2017384 - RNA, 19 nt, Artificial Sequence
  Description of Artificial Sequence: Synthetic oligonucleotide
agguacugccucaucugca

SEQ ID NO: 2017385 - RNA, 19 nt, Artificial Sequence
  Description of Artificial Sequence: Synthetic oligonucleotide
acagccaaucuuacuccgu

SEQ ID NO: 2017386 - RNA, 19 nt, Artificial Sequence
  Description of Artificial Sequence: Synthetic oligonucleotide
guacacccacacgccaucc

SEQ ID NO: 2017387 - RNA, 19 nt, Artificial Sequence
  Description of Artificial Sequence: Synthetic oligonucleotide
gauaggcccguguccuaaa

SEQ ID NO: 2017388 - RNA, 19 nt, Artificial Sequence
  Description of Artificial Sequence: Synthetic oligonucleotide
aguccggguuguccagugu

SEQ ID NO: 2017389 - RNA, 19 nt, Artificial Sequence
  Description of Artificial Sequence: Synthetic oligonucleotide
cucuccacaucugggagaa

SEQ ID NO: 2017390 - RNA, 19 nt, Artificial Sequence
  Description of Artificial Sequence: Synthetic oligonucleotide
acugccucaucugcacggu

SEQ ID NO: 2017391 - RNA, 19 nt, Artificial Sequence
  Description of Artificial Sequence: Synthetic oligonucleotide
  modified_base (5)..(5): a, c, u, g, unknown or other
caugnucauugagcuaaga

SEQ ID NO: 2017392 - RNA, 19 nt, Artificial Sequence
  Description of Artificial Sequence: Synthetic oligonucleotide
ugugaccgauccccagguu

SEQ ID NO: 2017393 - RNA, 19 nt, Artificial Sequence
  Description of Artificial Sequence: Synthetic oligonucleotide
ucccugcagcccuuaggaa

SEQ ID NO: 2017394 - RNA, 19 nt, Artificial Sequence
  Description of Artificial Sequence: Synthetic oligonucleotide
cugggagucagccuaggau

SEQ ID NO: 2017395 - RNA, 19 nt, Artificial Sequence
  Description of Artificial Sequence: Synthetic oligonucleotide
ccuucuuguugggaagggg

SEQ ID NO: 2017396 - RNA, 19 nt, Artificial Sequence
  Description of Artificial Sequence: Synthetic oligonucleotide
ucugcacggugaagcccgu

SEQ ID NO: 2017397 - RNA, 19 nt, Artificial Sequence
  Description of Artificial Sequence: Synthetic oligonucleotide
cuaggaugguaccuucgcu

SEQ ID NO: 2017398 - RNA, 19 nt, Artificial Sequence
  Description of Artificial Sequence: Synthetic oligonucleotide
ggagggcucuuggacacag

SEQ ID NO: 2017399 - RNA, 19 nt, Artificial Sequence
  Description of Artificial Sequence: Synthetic oligonucleotide
caccagugugaccgauccc

SEQ ID NO: 2017400 - RNA, 19 nt, Artificial Sequence
  Description of Artificial Sequence: Synthetic oligonucleotide
agcggggugacaggaggca

SEQ ID NO: 2017401 - RNA, 19 nt, Artificial Sequence
  Description of Artificial Sequence: Synthetic oligonucleotide
ugcaggcuguaugcuuucu

SEQ ID NO: 2017402 - RNA, 19 nt, Artificial Sequence
  Description of Artificial Sequence: Synthetic oligonucleotide
cagccaaucuuacuccgua

SEQ ID NO: 2017403 - RNA, 19 nt, Artificial Sequence
  Description of Artificial Sequence: Synthetic oligonucleotide
ggaagcccaucucaagaaa

SEQ ID NO: 2017404 - RNA, 19 nt, Artificial Sequence
  Description of Artificial Sequence: Synthetic oligonucleotide
gcaauacugugacugggcu

SEQ ID NO: 2017405 - RNA, 19 nt, Artificial Sequence
  Description of Artificial Sequence: Synthetic oligonucleotide
caccacgcaccagugugac

SEQ ID NO: 2017406 - RNA, 19 nt, Artificial Sequence
  Description of Artificial Sequence: Synthetic oligonucleotide
agacagggaugaaaacaau

SEQ ID NO: 2017407 - RNA, 19 nt, Artificial Sequence
  Description of Artificial Sequence: Synthetic oligonucleotide
guggauaggcccguguccu

SEQ ID NO: 2017408 - RNA, 19 nt, Artificial Sequence
  Description of Artificial Sequence: Synthetic oligonucleotide
gggaugaaaacaauugguu

SEQ ID NO: 2017409 - RNA, 19 nt, Artificial Sequence
  Description of Artificial Sequence: Synthetic oligonucleotide
aagcccguccauggcugcu

SEQ ID NO: 2017410 - RNA, 19 nt, Artificial Sequence
  Description of Artificial Sequence: Synthetic oligonucleotide
gccuaggaugguaccuucg

SEQ ID NO: 2017411 - RNA, 19 nt, Artificial Sequence
  Description of Artificial Sequence: Synthetic oligonucleotide
ggcggacuugaugaagaug

SEQ ID NO: 2017412 - RNA, 19 nt, Artificial Sequence
  Description of Artificial Sequence: Synthetic oligonucleotide
caccaacagcguccuggag

SEQ ID NO: 2017413 - RNA, 19 nt, Artificial Sequence
  Description of Artificial Sequence: Synthetic oligonucleotide
gagucagccuaggauggua

SEQ ID NO: 2017414 - RNA, 19 nt, Artificial Sequence
  Description of Artificial Sequence: Synthetic oligonucleotide
cggugaagcccguccaugg

SEQ ID NO: 2017415 - RNA, 19 nt, Artificial Sequence
  Description of Artificial Sequence: Synthetic oligonucleotide
gccaaucuuacuccguacu

SEQ ID NO: 2017416 - RNA, 19 nt, Artificial Sequence
  Description of Artificial Sequence: Synthetic oligonucleotide
uggauaggcccguguccua

SEQ ID NO: 2017417 - RNA, 19 nt, Artificial Sequence
  Description of Artificial Sequence: Synthetic oligonucleotide
ucgcuaugacaggccacac

SEQ ID NO: 2017418 - RNA, 19 nt, Artificial Sequence
  Description of Artificial Sequence: Synthetic oligonucleotide
ggccgcugcaggcuguaug

SEQ ID NO: 2017419 - RNA, 19 nt, Artificial Sequence
  Description of Artificial Sequence: Synthetic oligonucleotide
auacugugacugggcuguc

SEQ ID NO: 2017420 - RNA, 19 nt, Artificial Sequence
  Description of Artificial Sequence: Synthetic oligonucleotide
ggacacaguagagccuccc

SEQ ID NO: 2017421 - RNA, 19 nt, Artificial Sequence
  Description of Artificial Sequence: Synthetic oligonucleotide
gcuucggcaggcuggggca

SEQ ID NO: 2017422 - RNA, 19 nt, Artificial Sequence
  Description of Artificial Sequence: Synthetic oligonucleotide
gguccuggguuagcaauac

SEQ ID NO: 2017423 - RNA, 19 nt, Artificial Sequence
  Description of Artificial Sequence: Synthetic oligonucleotide
cugacucuuguuguccgaa

SEQ ID NO: 2017424 - RNA, 19 nt, Artificial Sequence
  Description of Artificial Sequence: Synthetic oligonucleotide
caguucccucccagggaug

SEQ ID NO: 2017425 - RNA, 19 nt, Artificial Sequence
  Description of Artificial Sequence: Synthetic oligonucleotide
ccucuagcaggcuggcuuc

SEQ ID NO: 2017426 - RNA, 19 nt, Artificial Sequence
  Description of Artificial Sequence: Synthetic oligonucleotide
agcugacucuccacaucug

SEQ ID NO: 2017427 - RNA, 19 nt, Artificial Sequence
  Description of Artificial Sequence: Synthetic oligonucleotide
gcccaucucaagaaagaga

SEQ ID NO: 2017428 - RNA, 19 nt, Artificial Sequence
  Description of Artificial Sequence: Synthetic oligonucleotide
ccaucucaagaaagagauc

SEQ ID NO: 2017429 - RNA, 19 nt, Artificial Sequence
  Description of Artificial Sequence: Synthetic oligonucleotide
caaucuuacuccguacuuu

SEQ ID NO: 2017430 - RNA, 19 nt, Artificial Sequence
  Description of Artificial Sequence: Synthetic oligonucleotide
gcaccaacagcguccugga

SEQ ID NO: 2017431 - RNA, 19 nt, Artificial Sequence
  Description of Artificial Sequence: Synthetic oligonucleotide
cuguaugcuuucucauagu

SEQ ID NO: 2017432 - RNA, 19 nt, Artificial Sequence
  Description of Artificial Sequence: Synthetic oligonucleotide
cucgucuucuccucccagu

SEQ ID NO: 2017433 - RNA, 19 nt, Artificial Sequence
  Description of Artificial Sequence: Synthetic oligonucleotide
gagccuccccacucucguc

SEQ ID NO: 2017434 - RNA, 19 nt, Artificial Sequence
  Description of Artificial Sequence: Synthetic oligonucleotide
agcuuauguuaaagucuaa

SEQ ID NO: 2017435 - RNA, 19 nt, Artificial Sequence
  Description of Artificial Sequence: Synthetic oligonucleotide
ccuucgcuaugacaggcca

SEQ ID NO: 2017436 - RNA, 19 nt, Artificial Sequence
  Description of Artificial Sequence: Synthetic oligonucleotide
cuaugacaggccacacccu

SEQ ID NO: 2017437 - RNA, 19 nt, Artificial Sequence
  Description of Artificial Sequence: Synthetic oligonucleotide
gcccuuaggaagcccaucu

SEQ ID NO: 2017438 - RNA, 19 nt, Artificial Sequence
  Description of Artificial Sequence: Synthetic oligonucleotide
cugcagcccuuaggaagcc

SEQ ID NO: 2017439 - RNA, 19 nt, Artificial Sequence
  Description of Artificial Sequence: Synthetic oligonucleotide
guaugccaccacgcaccag

SEQ ID NO: 2017440 - RNA, 19 nt, Artificial Sequence
  Description of Artificial Sequence: Synthetic oligonucleotide
gcagcccuuaggaagccca

SEQ ID NO: 2017441 - RNA, 19 nt, Artificial Sequence
  Description of Artificial Sequence: Synthetic oligonucleotide
cgcuaugacaggccacacc

SEQ ID NO: 2017442 - RNA, 19 nt, Artificial Sequence
  Description of Artificial Sequence: Synthetic oligonucleotide
accggcugaagggcccgag

SEQ ID NO: 2017443 - RNA, 19 nt, Artificial Sequence
  Description of Artificial Sequence: Synthetic oligonucleotide
agaaaccagggaacaccuu

SEQ ID NO: 2017444 - RNA, 19 nt, Artificial Sequence
  Description of Artificial Sequence: Synthetic oligonucleotide
cagccucuagcaggcuggc

SEQ ID NO: 2017445 - RNA, 19 nt, Artificial Sequence
  Description of Artificial Sequence: Synthetic oligonucleotide
cacacccuucuuguuggga

SEQ ID NO: 2017446 - RNA, 19 nt, Artificial Sequence
  Description of Artificial Sequence: Synthetic oligonucleotide
gcugacucuuguuguccga

SEQ ID NO: 2017447 - RNA, 19 nt, Artificial Sequence
  Description of Artificial Sequence: Synthetic oligonucleotide
cagcguccuggaguccggg

SEQ ID NO: 2017448 - RNA, 19 nt, Artificial Sequence
  Description of Artificial Sequence: Synthetic oligonucleotide
auauccagggagggcucuu

SEQ ID NO: 2017449 - RNA, 19 nt, Artificial Sequence
  Description of Artificial Sequence: Synthetic oligonucleotide
augcuuucucauagucgaa

SEQ ID NO: 2017450 - RNA, 19 nt, Artificial Sequence
  Description of Artificial Sequence: Synthetic oligonucleotide
ccccacucucgucuucucc

SEQ ID NO: 2017451 - RNA, 19 nt, Artificial Sequence
  Description of Artificial Sequence: Synthetic oligonucleotide
gcacggugaagcccgucca

SEQ ID NO: 2017452 - RNA, 19 nt, Artificial Sequence
  Description of Artificial Sequence: Synthetic oligonucleotide
guguggcggacuugaugaa

SEQ ID NO: 2017453 - RNA, 19 nt, Artificial Sequence
  Description of Artificial Sequence: Synthetic oligonucleotide
caacagcguccuggagucc

SEQ ID NO: 2017454 - RNA, 19 nt, Artificial Sequence
  Description of Artificial Sequence: Synthetic oligonucleotide
guuguccaguguggcggac

SEQ ID NO: 2017455 - RNA, 19 nt, Artificial Sequence
  Description of Artificial Sequence: Synthetic oligonucleotide
gccccucccuggucuauag

SEQ ID NO: 2017456 - RNA, 19 nt, Artificial Sequence
  Description of Artificial Sequence: Synthetic oligonucleotide
uucggcaggcuggggcaaa

SEQ ID NO: 2017457 - RNA, 19 nt, Artificial Sequence
  Description of Artificial Sequence: Synthetic oligonucleotide
cauagucgaaagccuugau

SEQ ID NO: 2017458 - RNA, 19 nt, Artificial Sequence
  Description of Artificial Sequence: Synthetic oligonucleotide
ccgaggcaaaagccauucc

SEQ ID NO: 2017459 - RNA, 19 nt, Artificial Sequence
  Description of Artificial Sequence: Synthetic oligonucleotide
ggaugccccucccuggucu

SEQ ID NO: 2017460 - RNA, 19 nt, Artificial Sequence
  Description of Artificial Sequence: Synthetic oligonucleotide
ggaccggcugaagggcccg

SEQ ID NO: 2017461 - RNA, 19 nt, Artificial Sequence
  Description of Artificial Sequence: Synthetic oligonucleotide
gccucuagcaggcuggcuu

SEQ ID NO: 2017462 - RNA, 19 nt, Artificial Sequence
  Description of Artificial Sequence: Synthetic oligonucleotide
ccggcugaagggcccgagg

SEQ ID NO: 2017463 - RNA, 19 nt, Artificial Sequence
  Description of Artificial Sequence: Synthetic oligonucleotide
gaccgauccccagguucca

SEQ ID NO: 2017464 - RNA, 19 nt, Artificial Sequence
  Description of Artificial Sequence: Synthetic oligonucleotide
aggccacacccuucuuguu

SEQ ID NO: 2017465 - RNA, 19 nt, Artificial Sequence
  Description of Artificial Sequence: Synthetic oligonucleotide
ggauaggcccguguccuaa

SEQ ID NO: 2017466 - RNA, 19 nt, Artificial Sequence
  Description of Artificial Sequence: Synthetic oligonucleotide
gguuagcaauacugugacu

SEQ ID NO: 2017467 - RNA, 19 nt, Artificial Sequence
  Description of Artificial Sequence: Synthetic oligonucleotide
augcaccaacagcguccug

SEQ ID NO: 2017468 - RNA, 19 nt, Artificial Sequence
  Description of Artificial Sequence: Synthetic oligonucleotide
gggaccggcugaagggccc

SEQ ID NO: 2017469 - RNA, 19 nt, Artificial Sequence
  Description of Artificial Sequence: Synthetic oligonucleotide
ggggaccggcugaagggcc

SEQ ID NO: 2017470 - RNA, 19 nt, Artificial Sequence
  Description of Artificial Sequence: Synthetic oligonucleotide
cacgcaccagugugaccga

SEQ ID NO: 2017471 - RNA, 19 nt, Artificial Sequence
  Description of Artificial Sequence: Synthetic oligonucleotide
ccuuaugcaccaacagcgu

SEQ ID NO: 2017472 - RNA, 19 nt, Artificial Sequence
  Description of Artificial Sequence: Synthetic oligonucleotide
ccagucugcccagguacug

SEQ ID NO: 2017473 - RNA, 19 nt, Artificial Sequence
  Description of Artificial Sequence: Synthetic oligonucleotide
cauugggccgcugcaggcu

SEQ ID NO: 2017474 - RNA, 19 nt, Artificial Sequence
  Description of Artificial Sequence: Synthetic oligonucleotide
ucuccacaucugggagaaa

SEQ ID NO: 2017475 - RNA, 19 nt, Artificial Sequence
  Description of Artificial Sequence: Synthetic oligonucleotide
guccuggguuagcaauacu

SEQ ID NO: 2017476 - RNA, 19 nt, Artificial Sequence
  Description of Artificial Sequence: Synthetic oligonucleotide
gguaacugcuacgguugua

SEQ ID NO: 2017477 - RNA, 19 nt, Artificial Sequence
  Description of Artificial Sequence: Synthetic oligonucleotide
cugugacugggcugucccu

SEQ ID NO: 2017478 - RNA, 19 nt, Artificial Sequence
  Description of Artificial Sequence: Synthetic oligonucleotide
cccugagguagaucauaga

SEQ ID NO: 2017479 - RNA, 19 nt, Artificial Sequence
  Description of Artificial Sequence: Synthetic oligonucleotide
ccucaucugcacggugaag

SEQ ID NO: 2017480 - RNA, 19 nt, Artificial Sequence
  Description of Artificial Sequence: Synthetic oligonucleotide
ccaccacgcaccaguguga

SEQ ID NO: 2017481 - RNA, 19 nt, Artificial Sequence
  Description of Artificial Sequence: Synthetic oligonucleotide
ccacaucugggagaaaccu

SEQ ID NO: 2017482 - RNA, 19 nt, Artificial Sequence
  Description of Artificial Sequence: Synthetic oligonucleotide
acgcaccagugugaccgau

SEQ ID NO: 2017483 - RNA, 19 nt, Artificial Sequence
  Description of Artificial Sequence: Synthetic oligonucleotide
ggguaacugcuacgguugu

SEQ ID NO: 2017484 - RNA, 19 nt, Artificial Sequence
  Description of Artificial Sequence: Synthetic oligonucleotide
ccgauccccagguuccaga

SEQ ID NO: 2017485 - RNA, 19 nt, Artificial Sequence
  Description of Artificial Sequence: Synthetic oligonucleotide
ggguccuggguuagcaaua

SEQ ID NO: 2017486 - RNA, 19 nt, Artificial Sequence
  Description of Artificial Sequence: Synthetic oligonucleotide
ccaaucuuacuccguacuu

SEQ ID NO: 2017487 - RNA, 19 nt, Artificial Sequence
  Description of Artificial Sequence: Synthetic oligonucleotide
gggaugccccucccugguc

SEQ ID NO: 2017488 - RNA, 19 nt, Artificial Sequence
  Description of Artificial Sequence: Synthetic oligonucleotide
cugcacggugaagcccguc

SEQ ID NO: 2017489 - RNA, 19 nt, Artificial Sequence
  Description of Artificial Sequence: Synthetic oligonucleotide
gccauccacuucccucguc

SEQ ID NO: 2017490 - RNA, 19 nt, Artificial Sequence
  Description of Artificial Sequence: Synthetic oligonucleotide
ggcccgaggguccuggguu

SEQ ID NO: 2017491 - RNA, 19 nt, Artificial Sequence
  Description of Artificial Sequence: Synthetic oligonucleotide
cagcccuuaggaagcccau

SEQ ID NO: 2017492 - RNA, 19 nt, Artificial Sequence
  Description of Artificial Sequence: Synthetic oligonucleotide
gcaguaagacagggaugaa

SEQ ID NO: 2017493 - RNA, 19 nt, Artificial Sequence
  Description of Artificial Sequence: Synthetic oligonucleotide
gacaggccacacccuucuu

SEQ ID NO: 2017494 - RNA, 19 nt, Artificial Sequence
  Description of Artificial Sequence: Synthetic oligonucleotide
gagggcucuuggacacagu

SEQ ID NO: 2017495 - RNA, 19 nt, Artificial Sequence
  Description of Artificial Sequence: Synthetic oligonucleotide
cuucccucgucagcuggau

SEQ ID NO: 2017496 - RNA, 19 nt, Artificial Sequence
  Description of Artificial Sequence: Synthetic oligonucleotide
cccgaggguccuggguuag

SEQ ID NO: 2017497 - RNA, 19 nt, Artificial Sequence
  Description of Artificial Sequence: Synthetic oligonucleotide
gcccagguacugccucauc

SEQ ID NO: 2017498 - RNA, 19 nt, Artificial Sequence
  Description of Artificial Sequence: Synthetic oligonucleotide
ggagucagccuaggauggu

SEQ ID NO: 2017499 - RNA, 19 nt, Artificial Sequence
  Description of Artificial Sequence: Synthetic oligonucleotide
ccuguggauaggcccgugu

SEQ ID NO: 2017500 - RNA, 19 nt, Artificial Sequence
  Description of Artificial Sequence: Synthetic oligonucleotide
gcccgaggguccuggguua

SEQ ID NO: 2017501 - RNA, 19 nt, Artificial Sequence
  Description of Artificial Sequence: Synthetic oligonucleotide
ccuggucuauagagcucaa

SEQ ID NO: 2017502 - RNA, 19 nt, Artificial Sequence
  Description of Artificial Sequence: Synthetic oligonucleotide
caauggcagcggggugaca

SEQ ID NO: 2017503 - RNA, 19 nt, Artificial Sequence
  Description of Artificial Sequence: Synthetic oligonucleotide
ccgaggguccuggguuagc

SEQ ID NO: 2017504 - RNA, 19 nt, Artificial Sequence
  Description of Artificial Sequence: Synthetic oligonucleotide
gggcccgaggguccugggu

SEQ ID NO: 2017505 - RNA, 19 nt, Artificial Sequence
  Description of Artificial Sequence: Synthetic oligonucleotide
gcaugaacucauggucauu

SEQ ID NO: 2017506 - RNA, 19 nt, Artificial Sequence
  Description of Artificial Sequence: Synthetic oligonucleotide
ccccucccuggucuauaga

SEQ ID NO: 2017507 - RNA, 19 nt, Artificial Sequence
  Description of Artificial Sequence: Synthetic oligonucleotide
cccguccauggcugcugca

SEQ ID NO: 2017508 - RNA, 19 nt, Artificial Sequence
  Description of Artificial Sequence: Synthetic oligonucleotide
ccccaggggccagauaauu

SEQ ID NO: 2017509 - RNA, 19 nt, Artificial Sequence
  Description of Artificial Sequence: Synthetic oligonucleotide
gggccgcugcaggcuguau

SEQ ID NO: 2017510 - RNA, 19 nt, Artificial Sequence
  Description of Artificial Sequence: Synthetic oligonucleotide
cuaucuuccagucagaacg

SEQ ID NO: 2017511 - RNA, 19 nt, Artificial Sequence
  Description of Artificial Sequence: Synthetic oligonucleotide
aguagugaaguacuggagc

SEQ ID NO: 2017512 - RNA, 19 nt, Artificial Sequence
  Description of Artificial Sequence: Synthetic oligonucleotide
aaacagcggagccacagcc

SEQ ID NO: 2017513 - RNA, 19 nt, Artificial Sequence
  Description of Artificial Sequence: Synthetic oligonucleotide
aagaaugcguccuucugac

SEQ ID NO: 2017514 - RNA, 19 nt, Artificial Sequence
  Description of Artificial Sequence: Synthetic oligonucleotide
aacgaaaggauggauggcc

SEQ ID NO: 2017515 - RNA, 19 nt, Artificial Sequence
  Description of Artificial Sequence: Synthetic oligonucleotide
uacugaaccucccagaagc

SEQ ID NO: 2017516 - RNA, 19 nt, Artificial Sequence
  Description of Artificial Sequence: Synthetic oligonucleotide
ucuugaucuguccaaagcc

SEQ ID NO: 2017517 - RNA, 19 nt, Artificial Sequence
  Description of Artificial Sequence: Synthetic oligonucleotide
aauagggucuuauugucug

SEQ ID NO: 2017518 - RNA, 19 nt, Artificial Sequence
  Description of Artificial Sequence: Synthetic oligonucleotide
agagaguggcagcagaucc

SEQ ID NO: 2017519 - RNA, 19 nt, Artificial Sequence
  Description of Artificial Sequence: Synthetic oligonucleotide
ucauuauugccucucguag

SEQ ID NO: 2017520 - RNA, 19 nt, Artificial Sequence
  Description of Artificial Sequence: Synthetic oligonucleotide
agcgaggucaaauaggguc

SEQ ID NO: 2017521 - RNA, 19 nt, Artificial Sequence
  Description of Artificial Sequence: Synthetic oligonucleotide
gaaggugugguacaccugg

SEQ ID NO: 2017522 - RNA, 19 nt, Artificial Sequence
  Description of Artificial Sequence: Synthetic oligonucleotide
uugggaauguaguagaaca

SEQ ID NO: 2017523 - RNA, 19 nt, Artificial Sequence
  Description of Artificial Sequence: Synthetic oligonucleotide
auuauugccucucguaggg

SEQ ID NO: 2017524 - RNA, 19 nt, Artificial Sequence
  Description of Artificial Sequence: Synthetic oligonucleotide
aagaucuuggcaucaaaca

SEQ ID NO: 2017525 - RNA, 19 nt, Artificial Sequence
  Description of Artificial Sequence: Synthetic oligonucleotide
aaaggggcgucucaggguc

SEQ ID NO: 2017526 - RNA, 19 nt, Artificial Sequence
  Description of Artificial Sequence: Synthetic oligonucleotide
aucaauugcagggaagugc

SEQ ID NO: 2017527 - RNA, 19 nt, Artificial Sequence
  Description of Artificial Sequence: Synthetic oligonucleotide
aaggaguaagcaaucaggg

SEQ ID NO: 2017528 - RNA, 19 nt, Artificial Sequence
  Description of Artificial Sequence: Synthetic oligonucleotide
gucaaauagggucuuauug

SEQ ID NO: 2017529 - RNA, 19 nt, Artificial Sequence
  Description of Artificial Sequence: Synthetic oligonucleotide
aaugcguccuucugacacc

SEQ ID NO: 2017530 - RNA, 19 nt, Artificial Sequence
  Description of Artificial Sequence: Synthetic oligonucleotide
cuuccagucagaacgaaag

SEQ ID NO: 2017531 - RNA, 19 nt, Artificial Sequence
  Description of Artificial Sequence: Synthetic oligonucleotide
agagugaagccuuuaauga

SEQ ID NO: 2017532 - RNA, 19 nt, Artificial Sequence
  Description of Artificial Sequence: Synthetic oligonucleotide
uguaguagaacagcgaggu

SEQ ID NO: 2017533 - RNA, 19 nt, Artificial Sequence
  Description of Artificial Sequence: Synthetic oligonucleotide
aaagacaccagagucccag

SEQ ID NO: 2017534 - RNA, 19 nt, Artificial Sequence
  Description of Artificial Sequence: Synthetic oligonucleotide
uucuugaucuguccaaagc

SEQ ID NO: 2017535 - RNA, 19 nt, Artificial Sequence
  Description of Artificial Sequence: Synthetic oligonucleotide
aaugagcaaagacaccaga

SEQ ID NO: 2017536 - RNA, 19 nt, Artificial Sequence
  Description of Artificial Sequence: Synthetic oligonucleotide
agaguagugaaguacugga

SEQ ID NO: 2017537 - RNA, 19 nt, Artificial Sequence
  Description of Artificial Sequence: Synthetic oligonucleotide
aagccuuuaaugacagggc

SEQ ID NO: 2017538 - RNA, 19 nt, Artificial Sequence
  Description of Artificial Sequence: Synthetic oligonucleotide
gaaugcguccuucugacac

SEQ ID NO: 2017539 - RNA, 19 nt, Artificial Sequence
  Description of Artificial Sequence: Synthetic oligonucleotide
ucccgcaucagcuucagug

SEQ ID NO: 2017540 - RNA, 19 nt, Artificial Sequence
  Description of Artificial Sequence: Synthetic oligonucleotide
aaucccagcagguucuuga

SEQ ID NO: 2017541 - RNA, 19 nt, Artificial Sequence
  Description of Artificial Sequence: Synthetic oligonucleotide
cagagugaagccuuuaaug

SEQ ID NO: 2017542 - RNA, 19 nt, Artificial Sequence
  Description of Artificial Sequence: Synthetic oligonucleotide
ggagaugaaguccaguagg

SEQ ID NO: 2017543 - RNA, 19 nt, Artificial Sequence
  Description of Artificial Sequence: Synthetic oligonucleotide
caggaugccguacugaacc

SEQ ID NO: 2017544 - RNA, 19 nt, Artificial Sequence
  Description of Artificial Sequence: Synthetic oligonucleotide
guagugaaguacuggagcc

SEQ ID NO: 2017545 - RNA, 19 nt, Artificial Sequence
  Description of Artificial Sequence: Synthetic oligonucleotide
uagucuaugcagcugacau

SEQ ID NO: 2017546 - RNA, 19 nt, Artificial Sequence
  Description of Artificial Sequence: Synthetic oligonucleotide
ucucguagggcaucaauug

SEQ ID NO: 2017547 - RNA, 19 nt, Artificial Sequence
  Description of Artificial Sequence: Synthetic oligonucleotide
uccagaguagugaaguacu

SEQ ID NO: 2017548 - RNA, 19 nt, Artificial Sequence
  Description of Artificial Sequence: Synthetic oligonucleotide
ugggaauguaguagaacag

SEQ ID NO: 2017549 - RNA, 19 nt, Artificial Sequence
  Description of Artificial Sequence: Synthetic oligonucleotide
agucagaacgaaaggaugg

SEQ ID NO: 2017550 - RNA, 19 nt, Artificial Sequence
  Description of Artificial Sequence: Synthetic oligonucleotide
cuuggcaucaaacagcgga

SEQ ID NO: 2017551 - RNA, 19 nt, Artificial Sequence
  Description of Artificial Sequence: Synthetic oligonucleotide
accacgguguagucuaugc

SEQ ID NO: 2017552 - RNA, 19 nt, Artificial Sequence
  Description of Artificial Sequence: Synthetic oligonucleotide
augcgugcacuccaggacc

SEQ ID NO: 2017553 - RNA, 19 nt, Artificial Sequence
  Description of Artificial Sequence: Synthetic oligonucleotide
uuggcaucaaacagcggag

SEQ ID NO: 2017554 - RNA, 19 nt, Artificial Sequence
  Description of Artificial Sequence: Synthetic oligonucleotide
ugaaccucccagaagcaca

SEQ ID NO: 2017555 - RNA, 19 nt, Artificial Sequence
  Description of Artificial Sequence: Synthetic oligonucleotide
ugcaggagaaugagcaaag

SEQ ID NO: 2017556 - RNA, 19 nt, Artificial Sequence
  Description of Artificial Sequence: Synthetic oligonucleotide
gucuaugcagcugacaugc

SEQ ID NO: 2017557 - RNA, 19 nt, Artificial Sequence
  Description of Artificial Sequence: Synthetic oligonucleotide
cacgguguagucuaugcag

SEQ ID NO: 2017558 - RNA, 19 nt, Artificial Sequence
  Description of Artificial Sequence: Synthetic oligonucleotide
uuccagucagaacgaaagg

SEQ ID NO: 2017559 - RNA, 19 nt, Artificial Sequence
  Description of Artificial Sequence: Synthetic oligonucleotide
gagcaaagacaccagaguc

SEQ ID NO: 2017560 - RNA, 19 nt, Artificial Sequence
  Description of Artificial Sequence: Synthetic oligonucleotide
cuggacagagucuucgagg

SEQ ID NO: 2017561 - RNA, 19 nt, Artificial Sequence
  Description of Artificial Sequence: Synthetic oligonucleotide
gaugacggcagccagugca

SEQ ID NO: 2017562 - RNA, 19 nt, Artificial Sequence
  Description of Artificial Sequence: Synthetic oligonucleotide
uccaguaggaaccccaaau

SEQ ID NO: 2017563 - RNA, 19 nt, Artificial Sequence
  Description of Artificial Sequence: Synthetic oligonucleotide
aggagguacuccuucccgc

SEQ ID NO: 2017564 - RNA, 19 nt, Artificial Sequence
  Description of Artificial Sequence: Synthetic oligonucleotide
acagcgaggucaaauaggg

SEQ ID NO: 2017565 - RNA, 19 nt, Artificial Sequence
  Description of Artificial Sequence: Synthetic oligonucleotide
ucguagggcaucaauugca

SEQ ID NO: 2017566 - RNA, 19 nt, Artificial Sequence
  Description of Artificial Sequence: Synthetic oligonucleotide
uggacagagucuucgaggu

SEQ ID NO: 2017567 - RNA, 19 nt, Artificial Sequence
  Description of Artificial Sequence: Synthetic oligonucleotide
cagugugcgaagcacaggc

SEQ ID NO: 2017568 - RNA, 19 nt, Artificial Sequence
  Description of Artificial Sequence: Synthetic oligonucleotide
ugcagacuugggaauguag

SEQ ID NO: 2017569 - RNA, 19 nt, Artificial Sequence
  Description of Artificial Sequence: Synthetic oligonucleotide
uccagucagaacgaaagga

SEQ ID NO: 2017570 - RNA, 19 nt, Artificial Sequence
  Description of Artificial Sequence: Synthetic oligonucleotide
gagugaagccuuuaaugac

SEQ ID NO: 2017571 - RNA, 19 nt, Artificial Sequence
  Description of Artificial Sequence: Synthetic oligonucleotide
uccaggaccgcgcagcgug

SEQ ID NO: 2017572 - RNA, 19 nt, Artificial Sequence
  Description of Artificial Sequence: Synthetic oligonucleotide
ggaauguaguagaacagcg

SEQ ID NO: 2017573 - RNA, 19 nt, Artificial Sequence
  Description of Artificial Sequence: Synthetic oligonucleotide
uauugccucucguagggca

SEQ ID NO: 2017574 - RNA, 19 nt, Artificial Sequence
  Description of Artificial Sequence: Synthetic oligonucleotide
ucuguccaaagccaauggu

SEQ ID NO: 2017575 - RNA, 19 nt, Artificial Sequence
  Description of Artificial Sequence: Synthetic oligonucleotide
ucgcugauguggaggaagg

SEQ ID NO: 2017576 - RNA, 19 nt, Artificial Sequence
  Description of Artificial Sequence: Synthetic oligonucleotide
ugugcgaagcacaggcacc

SEQ ID NO: 2017577 - RNA, 19 nt, Artificial Sequence
  Description of Artificial Sequence: Synthetic oligonucleotide
aaguacuggagccccuuca

SEQ ID NO: 2017578 - RNA, 19 nt, Artificial Sequence
  Description of Artificial Sequence: Synthetic oligonucleotide
acaagaaugcguccuucug

SEQ ID NO: 2017579 - RNA, 19 nt, Artificial Sequence
  Description of Artificial Sequence: Synthetic oligonucleotide
cacaaagugcaggagaaug

SEQ ID NO: 2017580 - RNA, 19 nt, Artificial Sequence
  Description of Artificial Sequence: Synthetic oligonucleotide
caaaggagaccaccaaggc

SEQ ID NO: 2017581 - RNA, 19 nt, Artificial Sequence
  Description of Artificial Sequence: Synthetic oligonucleotide
ugcaaucccagcagguucu

SEQ ID NO: 2017582 - RNA, 19 nt, Artificial Sequence
  Description of Artificial Sequence: Synthetic oligonucleotide
uuauugucuguggucacug

SEQ ID NO: 2017583 - RNA, 19 nt, Artificial Sequence
  Description of Artificial Sequence: Synthetic oligonucleotide
agccuuuaaugacagggca

SEQ ID NO: 2017584 - RNA, 19 nt, Artificial Sequence
  Description of Artificial Sequence: Synthetic oligonucleotide
acaaccacgguguagucua

SEQ ID NO: 2017585 - RNA, 19 nt, Artificial Sequence
  Description of Artificial Sequence: Synthetic oligonucleotide
gacuugggaauguaguaga

SEQ ID NO: 2017586 - RNA, 19 nt, Artificial Sequence
  Description of Artificial Sequence: Synthetic oligonucleotide
aaucagggcugcaaaggag

SEQ ID NO: 2017587 - RNA, 19 nt, Artificial Sequence
  Description of Artificial Sequence: Synthetic oligonucleotide
uaggggugcuuccagugcc

SEQ ID NO: 2017588 - RNA, 19 nt, Artificial Sequence
  Description of Artificial Sequence: Synthetic oligonucleotide
ggugugguacaccuggagg

SEQ ID NO: 2017589 - RNA, 19 nt, Artificial Sequence
  Description of Artificial Sequence: Synthetic oligonucleotide
aaaggauggauggccuguc

SEQ ID NO: 2017590 - RNA, 19 nt, Artificial Sequence
  Description of Artificial Sequence: Synthetic oligonucleotide
agagucuucgaggucggcg

SEQ ID NO: 2017591 - RNA, 19 nt, Artificial Sequence
  Description of Artificial Sequence: Synthetic oligonucleotide
auacgcugcaaucccagca

SEQ ID NO: 2017592 - RNA, 19 nt, Artificial Sequence
  Description of Artificial Sequence: Synthetic oligonucleotide
caaagugcaggagaaugag

SEQ ID NO: 2017593 - RNA, 19 nt, Artificial Sequence
  Description of Artificial Sequence: Synthetic oligonucleotide
cagucagaacgaaaggaug

SEQ ID NO: 2017594 - RNA, 19 nt, Artificial Sequence
  Description of Artificial Sequence: Synthetic oligonucleotide
gaugccguacugaaccucc

SEQ ID NO: 2017595 - RNA, 19 nt, Artificial Sequence
  Description of Artificial Sequence: Synthetic oligonucleotide
agaacagcgaggucaaaua

SEQ ID NO: 2017596 - RNA, 19 nt, Artificial Sequence
  Description of Artificial Sequence: Synthetic oligonucleotide
uccuccagaguagugaagu

SEQ ID NO: 2017597 - RNA, 19 nt, Artificial Sequence
  Description of Artificial Sequence: Synthetic oligonucleotide
agggucuuauugucugugg

SEQ ID NO: 2017598 - RNA, 19 nt, Artificial Sequence
  Description of Artificial Sequence: Synthetic oligonucleotide
agggugacaccccguuucc

SEQ ID NO: 2017599 - RNA, 19 nt, Artificial Sequence
  Description of Artificial Sequence: Synthetic oligonucleotide
acgguguagucuaugcagc

SEQ ID NO: 2017600 - RNA, 19 nt, Artificial Sequence
  Description of Artificial Sequence: Synthetic oligonucleotide
gcaaaggagaccaccaagg

SEQ ID NO: 2017601 - RNA, 19 nt, Artificial Sequence
  Description of Artificial Sequence: Synthetic oligonucleotide
gucaccucgaaggaguaag

SEQ ID NO: 2017602 - RNA, 19 nt, Artificial Sequence
  Description of Artificial Sequence: Synthetic oligonucleotide
cagaguagugaaguacugg

SEQ ID NO: 2017603 - RNA, 19 nt, Artificial Sequence
  Description of Artificial Sequence: Synthetic oligonucleotide
ugacaccugggucuugggc

SEQ ID NO: 2017604 - RNA, 19 nt, Artificial Sequence
  Description of Artificial Sequence: Synthetic oligonucleotide
ugcgugcacuccaggaccg

SEQ ID NO: 2017605 - RNA, 19 nt, Artificial Sequence
  Description of Artificial Sequence: Synthetic oligonucleotide
cagaagcacagcaggaaug

SEQ ID NO: 2017606 - RNA, 19 nt, Artificial Sequence
  Description of Artificial Sequence: Synthetic oligonucleotide
ggaguaagcaaucagggcu

SEQ ID NO: 2017607 - RNA, 19 nt, Artificial Sequence
  Description of Artificial Sequence: Synthetic oligonucleotide
uucgaggucggcguggggc

SEQ ID NO: 2017608 - RNA, 19 nt, Artificial Sequence
  Description of Artificial Sequence: Synthetic oligonucleotide
gucacugagagggugggcc

SEQ ID NO: 2017609 - RNA, 19 nt, Artificial Sequence
  Description of Artificial Sequence: Synthetic oligonucleotide
agucuaugcagcugacaug

SEQ ID NO: 2017610 - RNA, 19 nt, Artificial Sequence
  Description of Artificial Sequence: Synthetic oligonucleotide
aggucagcagccaacagug

SEQ ID NO: 2017611 - RNA, 19 nt, Artificial Sequence
  Description of Artificial Sequence: Synthetic oligonucleotide
gugugguacaccuggagga

SEQ ID NO: 2017612 - RNA, 19 nt, Artificial Sequence
  Description of Artificial Sequence: Synthetic oligonucleotide
caucaaacagcggagccac

SEQ ID NO: 2017613 - RNA, 19 nt, Artificial Sequence
  Description of Artificial Sequence: Synthetic oligonucleotide
cucguagggcaucaauugc

SEQ ID NO: 2017614 - RNA, 19 nt, Artificial Sequence
  Description of Artificial Sequence: Synthetic oligonucleotide
ucacugagucccacaacca

SEQ ID NO: 2017615 - RNA, 19 nt, Artificial Sequence
  Description of Artificial Sequence: Synthetic oligonucleotide
aguaagcaaucagggcugc

SEQ ID NO: 2017616 - RNA, 19 nt, Artificial Sequence
  Description of Artificial Sequence: Synthetic oligonucleotide
ugucacagagaguggcagc

SEQ ID NO: 2017617 - RNA, 19 nt, Artificial Sequence
  Description of Artificial Sequence: Synthetic oligonucleotide
ucuaugcagcugacaugcg

SEQ ID NO: 2017618 - RNA, 19 nt, Artificial Sequence
  Description of Artificial Sequence: Synthetic oligonucleotide
gaauguaguagaacagcga

SEQ ID NO: 2017619 - RNA, 19 nt, Artificial Sequence
  Description of Artificial Sequence: Synthetic oligonucleotide
guguagucuaugcagcuga

SEQ ID NO: 2017620 - RNA, 19 nt, Artificial Sequence
  Description of Artificial Sequence: Synthetic oligonucleotide
gguucauuauugccucucg

SEQ ID NO: 2017621 - RNA, 19 nt, Artificial Sequence
  Description of Artificial Sequence: Synthetic oligonucleotide
ugacaugcgugcacuccag

SEQ ID NO: 2017622 - RNA, 19 nt, Artificial Sequence
  Description of Artificial Sequence: Synthetic oligonucleotide
cuguaggcauuucucggcc

SEQ ID NO: 2017623 - RNA, 19 nt, Artificial Sequence
  Description of Artificial Sequence: Synthetic oligonucleotide
gugacaccccguuuccugg

SEQ ID NO: 2017624 - RNA, 19 nt, Artificial Sequence
  Description of Artificial Sequence: Synthetic oligonucleotide
gauacgcugcaaucccagc

SEQ ID NO: 2017625 - RNA, 19 nt, Artificial Sequence
  Description of Artificial Sequence: Synthetic oligonucleotide
aggacggcgucgcccaccc

SEQ ID NO: 2017626 - RNA, 19 nt, Artificial Sequence
  Description of Artificial Sequence: Synthetic oligonucleotide
ucaccucgaaggaguaagc

SEQ ID NO: 2017627 - RNA, 19 nt, Artificial Sequence
  Description of Artificial Sequence: Synthetic oligonucleotide
guagggcaucaauugcagg

SEQ ID NO: 2017628 - RNA, 19 nt, Artificial Sequence
  Description of Artificial Sequence: Synthetic oligonucleotide
cagaguguccugaagaucu

SEQ ID NO: 2017629 - RNA, 19 nt, Artificial Sequence
  Description of Artificial Sequence: Synthetic oligonucleotide
gacagggcaggagaugaag

SEQ ID NO: 2017630 - RNA, 19 nt, Artificial Sequence
  Description of Artificial Sequence: Synthetic oligonucleotide
uguagucuaugcagcugac

SEQ ID NO: 2017631 - RNA, 19 nt, Artificial Sequence
  Description of Artificial Sequence: Synthetic oligonucleotide
ucuuauugucuguggucac

SEQ ID NO: 2017632 - RNA, 19 nt, Artificial Sequence
  Description of Artificial Sequence: Synthetic oligonucleotide
caagaaugcguccuucuga

SEQ ID NO: 2017633 - RNA, 19 nt, Artificial Sequence
  Description of Artificial Sequence: Synthetic oligonucleotide
acaugcgugcacuccagga

SEQ ID NO: 2017634 - RNA, 19 nt, Artificial Sequence
  Description of Artificial Sequence: Synthetic oligonucleotide
augaugacggcagccagug

SEQ ID NO: 2017635 - RNA, 19 nt, Artificial Sequence
  Description of Artificial Sequence: Synthetic oligonucleotide
gacuugagcagggaggauc

SEQ ID NO: 2017636 - RNA, 19 nt, Artificial Sequence
  Description of Artificial Sequence: Synthetic oligonucleotide
uagugaaguacuggagccc

SEQ ID NO: 2017637 - RNA, 19 nt, Artificial Sequence
  Description of Artificial Sequence: Synthetic oligonucleotide
gaaccucccagaagcacag

SEQ ID NO: 2017638 - RNA, 19 nt, Artificial Sequence
  Description of Artificial Sequence: Synthetic oligonucleotide
aaguccaguaggaacccca

SEQ ID NO: 2017639 - RNA, 19 nt, Artificial Sequence
  Description of Artificial Sequence: Synthetic oligonucleotide
gacggcgucgcccacccug

SEQ ID NO: 2017640 - RNA, 19 nt, Artificial Sequence
  Description of Artificial Sequence: Synthetic oligonucleotide
ccuuuaaugacagggcagg

SEQ ID NO: 2017641 - RNA, 19 nt, Artificial Sequence
  Description of Artificial Sequence: Synthetic oligonucleotide
cacaaaggggcgucucagg

SEQ ID NO: 2017642 - RNA, 19 nt, Artificial Sequence
  Description of Artificial Sequence: Synthetic oligonucleotide
guacuggagccccuucagg

SEQ ID NO: 2017643 - RNA, 19 nt, Artificial Sequence
  Description of Artificial Sequence: Synthetic oligonucleotide
gacaugcgugcacuccagg

SEQ ID NO: 2017644 - RNA, 19 nt, Artificial Sequence
  Description of Artificial Sequence: Synthetic oligonucleotide
gucggcguggggcugaggc

SEQ ID NO: 2017645 - RNA, 19 nt, Artificial Sequence
  Description of Artificial Sequence: Synthetic oligonucleotide
agguacuccuucccgcauc

SEQ ID NO: 2017646 - RNA, 19 nt, Artificial Sequence
  Description of Artificial Sequence: Synthetic oligonucleotide
accucgaaggaguaagcaa

SEQ ID NO: 2017647 - RNA, 19 nt, Artificial Sequence
  Description of Artificial Sequence: Synthetic oligonucleotide
augucacagagaguggcag

SEQ ID NO: 2017648 - RNA, 19 nt, Artificial Sequence
  Description of Artificial Sequence: Synthetic oligonucleotide
gugaagccuuuaaugacag

SEQ ID NO: 2017649 - RNA, 19 nt, Artificial Sequence
  Description of Artificial Sequence: Synthetic oligonucleotide
acccuggucucgcugaugu

SEQ ID NO: 2017650 - RNA, 19 nt, Artificial Sequence
  Description of Artificial Sequence: Synthetic oligonucleotide
guacugaaccucccagaag

SEQ ID NO: 2017651 - RNA, 19 nt, Artificial Sequence
  Description of Artificial Sequence: Synthetic oligonucleotide
cuccagaguagugaaguac

SEQ ID NO: 2017652 - RNA, 19 nt, Artificial Sequence
  Description of Artificial Sequence: Synthetic oligonucleotide
uugggccuagccacaaagu

SEQ ID NO: 2017653 - RNA, 19 nt, Artificial Sequence
  Description of Artificial Sequence: Synthetic oligonucleotide
gggaauguaguagaacagc

SEQ ID NO: 2017654 - RNA, 19 nt, Artificial Sequence
  Description of Artificial Sequence: Synthetic oligonucleotide
gagaaugagcaaagacacc

SEQ ID NO: 2017655 - RNA, 19 nt, Artificial Sequence
  Description of Artificial Sequence: Synthetic oligonucleotide
ucucacacgccagaguguc

SEQ ID NO: 2017656 - RNA, 19 nt, Artificial Sequence
  Description of Artificial Sequence: Synthetic oligonucleotide
ucgaaggaguaagcaauca

SEQ ID NO: 2017657 - RNA, 19 nt, Artificial Sequence
  Description of Artificial Sequence: Synthetic oligonucleotide
ucuuggcaucaaacagcgg

SEQ ID NO: 2017658 - RNA, 19 nt, Artificial Sequence
  Description of Artificial Sequence: Synthetic oligonucleotide
gaacgaaaggauggauggc

SEQ ID NO: 2017659 - RNA, 19 nt, Artificial Sequence
  Description of Artificial Sequence: Synthetic oligonucleotide
uauugucuguggucacuga

SEQ ID NO: 2017660 - RNA, 19 nt, Artificial Sequence
  Description of Artificial Sequence: Synthetic oligonucleotide
caaacagcggagccacagc

SEQ ID NO: 2017661 - RNA, 19 nt, Artificial Sequence
  Description of Artificial Sequence: Synthetic oligonucleotide
agcuucacacaaaggggcg

SEQ ID NO: 2017662 - RNA, 19 nt, Artificial Sequence
  Description of Artificial Sequence: Synthetic oligonucleotide
ggaggaagaacugccgggg

SEQ ID NO: 2017663 - RNA, 19 nt, Artificial Sequence
  Description of Artificial Sequence: Synthetic oligonucleotide
ucuucgaggucggcguggg

SEQ ID NO: 2017664 - RNA, 19 nt, Artificial Sequence
  Description of Artificial Sequence: Synthetic oligonucleotide
acaggagggagccccucag

SEQ ID NO: 2017665 - RNA, 19 nt, Artificial Sequence
  Description of Artificial Sequence: Synthetic oligonucleotide
uccugaagaucuuggcauc

SEQ ID NO: 2017666 - RNA, 19 nt, Artificial Sequence
  Description of Artificial Sequence: Synthetic oligonucleotide
cugcaggccaacgaaggcc

SEQ ID NO: 2017667 - RNA, 19 nt, Artificial Sequence
  Description of Artificial Sequence: Synthetic oligonucleotide
guaggggugcuuccagugc

SEQ ID NO: 2017668 - RNA, 19 nt, Artificial Sequence
  Description of Artificial Sequence: Synthetic oligonucleotide
agguucuugaucuguccaa

SEQ ID NO: 2017669 - RNA, 19 nt, Artificial Sequence
  Description of Artificial Sequence: Synthetic oligonucleotide
ugcacuccaggaccgcgca

SEQ ID NO: 2017670 - RNA, 19 nt, Artificial Sequence
  Description of Artificial Sequence: Synthetic oligonucleotide
agcucacugagucccacaa

SEQ ID NO: 2017671 - RNA, 19 nt, Artificial Sequence
  Description of Artificial Sequence: Synthetic oligonucleotide
aggcauugcgagcuguggu

SEQ ID NO: 2017672 - RNA, 19 nt, Artificial Sequence
  Description of Artificial Sequence: Synthetic oligonucleotide
gggucuugggccuagccac

SEQ ID NO: 2017673 - RNA, 19 nt, Artificial Sequence
  Description of Artificial Sequence: Synthetic oligonucleotide
ugaugguggcagagugaag

SEQ ID NO: 2017674 - RNA, 19 nt, Artificial Sequence
  Description of Artificial Sequence: Synthetic oligonucleotide
ggugggcccgcacaggagg

SEQ ID NO: 2017675 - RNA, 19 nt, Artificial Sequence
  Description of Artificial Sequence: Synthetic oligonucleotide
caggagaugaaguccagua

SEQ ID NO: 2017676 - RNA, 19 nt, Artificial Sequence
  Description of Artificial Sequence: Synthetic oligonucleotide
acgcugcaaucccagcagg

SEQ ID NO: 2017677 - RNA, 19 nt, Artificial Sequence
  Description of Artificial Sequence: Synthetic oligonucleotide
ucagaacgaaaggauggau

SEQ ID NO: 2017678 - RNA, 19 nt, Artificial Sequence
  Description of Artificial Sequence: Synthetic oligonucleotide
gccaacgaaggccagggug

SEQ ID NO: 2017679 - RNA, 19 nt, Artificial Sequence
  Description of Artificial Sequence: Synthetic oligonucleotide
cagauccagccucucacac

SEQ ID NO: 2017680 - RNA, 19 nt, Artificial Sequence
  Description of Artificial Sequence: Synthetic oligonucleotide
gguaggggugcuuccagug

SEQ ID NO: 2017681 - RNA, 19 nt, Artificial Sequence
  Description of Artificial Sequence: Synthetic oligonucleotide
ggcauugcgagcuguggug

SEQ ID NO: 2017682 - RNA, 19 nt, Artificial Sequence
  Description of Artificial Sequence: Synthetic oligonucleotide
ggucuuauugucugugguc

SEQ ID NO: 2017683 - RNA, 19 nt, Artificial Sequence
  Description of Artificial Sequence: Synthetic oligonucleotide
guggucacugagagggugg

SEQ ID NO: 2017684 - RNA, 19 nt, Artificial Sequence
  Description of Artificial Sequence: Synthetic oligonucleotide
ugccguacugaaccuccca

SEQ ID NO: 2017685 - RNA, 19 nt, Artificial Sequence
  Description of Artificial Sequence: Synthetic oligonucleotide
ugugguacaccuggaggaa

SEQ ID NO: 2017686 - RNA, 19 nt, Artificial Sequence
  Description of Artificial Sequence: Synthetic oligonucleotide
gagcagggaggauccuggg

SEQ ID NO: 2017687 - RNA, 19 nt, Artificial Sequence
  Description of Artificial Sequence: Synthetic oligonucleotide
caacagugugcgaagcaca

SEQ ID NO: 2017688 - RNA, 19 nt, Artificial Sequence
  Description of Artificial Sequence: Synthetic oligonucleotide
ggggauacgcugcaauccc

SEQ ID NO: 2017689 - RNA, 19 nt, Artificial Sequence
  Description of Artificial Sequence: Synthetic oligonucleotide
guccugaagaucuuggcau

SEQ ID NO: 2017690 - RNA, 19 nt, Artificial Sequence
  Description of Artificial Sequence: Synthetic oligonucleotide
gucuguggucacugagagg

SEQ ID NO: 2017691 - RNA, 19 nt, Artificial Sequence
  Description of Artificial Sequence: Synthetic oligonucleotide
agcugacaugcgugcacuc

SEQ ID NO: 2017692 - RNA, 19 nt, Artificial Sequence
  Description of Artificial Sequence: Synthetic oligonucleotide
cauuucucggccuccucca

SEQ ID NO: 2017693 - RNA, 19 nt, Artificial Sequence
  Description of Artificial Sequence: Synthetic oligonucleotide
uuauugccucucguagggc

SEQ ID NO: 2017694 - RNA, 19 nt, Artificial Sequence
  Description of Artificial Sequence: Synthetic oligonucleotide
agcggagccacagccauga

SEQ ID NO: 2017695 - RNA, 19 nt, Artificial Sequence
  Description of Artificial Sequence: Synthetic oligonucleotide
gagucuucgaggucggcgu

SEQ ID NO: 2017696 - RNA, 19 nt, Artificial Sequence
  Description of Artificial Sequence: Synthetic oligonucleotide
caucaauugcagggaagug

SEQ ID NO: 2017697 - RNA, 19 nt, Artificial Sequence
  Description of Artificial Sequence: Synthetic oligonucleotide
uguggaggaagguguggua

SEQ ID NO: 2017698 - RNA, 19 nt, Artificial Sequence
  Description of Artificial Sequence: Synthetic oligonucleotide
aaccucccagaagcacagc

SEQ ID NO: 2017699 - RNA, 19 nt, Artificial Sequence
  Description of Artificial Sequence: Synthetic oligonucleotide
cagccaacagugugcgaag

SEQ ID NO: 2017700 - RNA, 19 nt, Artificial Sequence
  Description of Artificial Sequence: Synthetic oligonucleotide
aacagcggagccacagcca

SEQ ID NO: 2017701 - RNA, 19 nt, Artificial Sequence
  Description of Artificial Sequence: Synthetic oligonucleotide
gugguaggggugcuuccag

SEQ ID NO: 2017702 - RNA, 19 nt, Artificial Sequence
  Description of Artificial Sequence: Synthetic oligonucleotide
gaccgcgcagcgugguagg

SEQ ID NO: 2017703 - RNA, 19 nt, Artificial Sequence
  Description of Artificial Sequence: Synthetic oligonucleotide
cugacaugcgugcacucca

SEQ ID NO: 2017704 - RNA, 19 nt, Artificial Sequence
  Description of Artificial Sequence: Synthetic oligonucleotide
aggucaaauagggucuuau

SEQ ID NO: 2017705 - RNA, 19 nt, Artificial Sequence
  Description of Artificial Sequence: Synthetic oligonucleotide
gacggcagccagugcagac

SEQ ID NO: 2017706 - RNA, 19 nt, Artificial Sequence
  Description of Artificial Sequence: Synthetic oligonucleotide
ugguuccugcuguaggcau

SEQ ID NO: 2017707 - RNA, 19 nt, Artificial Sequence
  Description of Artificial Sequence: Synthetic oligonucleotide
agaaugcguccuucugaca

SEQ ID NO: 2017708 - RNA, 19 nt, Artificial Sequence
  Description of Artificial Sequence: Synthetic oligonucleotide
aaccacgguguagucuaug

SEQ ID NO: 2017709 - RNA, 19 nt, Artificial Sequence
  Description of Artificial Sequence: Synthetic oligonucleotide
ugguaggggugcuuccagu

SEQ ID NO: 2017710 - RNA, 19 nt, Artificial Sequence
  Description of Artificial Sequence: Synthetic oligonucleotide
gucagaacgaaaggaugga

SEQ ID NO: 2017711 - RNA, 19 nt, Artificial Sequence
  Description of Artificial Sequence: Synthetic oligonucleotide
cugaaccucccagaagcac

SEQ ID NO: 2017712 - RNA, 19 nt, Artificial Sequence
  Description of Artificial Sequence: Synthetic oligonucleotide
aggaugccguacugaaccu

SEQ ID NO: 2017713 - RNA, 19 nt, Artificial Sequence
  Description of Artificial Sequence: Synthetic oligonucleotide
gaaaggauggauggccugu

SEQ ID NO: 2017714 - RNA, 19 nt, Artificial Sequence
  Description of Artificial Sequence: Synthetic oligonucleotide
agucuucgaggucggcgug

SEQ ID NO: 2017715 - RNA, 19 nt, Artificial Sequence
  Description of Artificial Sequence: Synthetic oligonucleotide
aggacaagaaugcguccuu

SEQ ID NO: 2017716 - RNA, 19 nt, Artificial Sequence
  Description of Artificial Sequence: Synthetic oligonucleotide
ugaugacggcagccagugc

SEQ ID NO: 2017717 - RNA, 19 nt, Artificial Sequence
  Description of Artificial Sequence: Synthetic oligonucleotide
ugacaccccguuuccugga

SEQ ID NO: 2017718 - RNA, 19 nt, Artificial Sequence
  Description of Artificial Sequence: Synthetic oligonucleotide
acagagucuucgaggucgg

SEQ ID NO: 2017719 - RNA, 19 nt, Artificial Sequence
  Description of Artificial Sequence: Synthetic oligonucleotide
gcuaucuuccagucagaac

SEQ ID NO: 2017720 - RNA, 19 nt, Artificial Sequence
  Description of Artificial Sequence: Synthetic oligonucleotide
gccuuuaaugacagggcag

SEQ ID NO: 2017721 - RNA, 19 nt, Artificial Sequence
  Description of Artificial Sequence: Synthetic oligonucleotide
cauugcgagcuguggugac

SEQ ID NO: 2017722 - RNA, 19 nt, Artificial Sequence
  Description of Artificial Sequence: Synthetic oligonucleotide
cugacaccugggucuuggg

SEQ ID NO: 2017723 - RNA, 19 nt, Artificial Sequence
  Description of Artificial Sequence: Synthetic oligonucleotide
cagcccacggcugagcuuc

SEQ ID NO: 2017724 - RNA, 19 nt, Artificial Sequence
  Description of Artificial Sequence: Synthetic oligonucleotide
acgaaaggauggauggccu

SEQ ID NO: 2017725 - RNA, 19 nt, Artificial Sequence
  Description of Artificial Sequence: Synthetic oligonucleotide
ucggcguggggcugaggcc

SEQ ID NO: 2017726 - RNA, 19 nt, Artificial Sequence
  Description of Artificial Sequence: Synthetic oligonucleotide
ggauacgcugcaaucccag

SEQ ID NO: 2017727 - RNA, 19 nt, Artificial Sequence
  Description of Artificial Sequence: Synthetic oligonucleotide
gccguacugaaccucccag

SEQ ID NO: 2017728 - RNA, 19 nt, Artificial Sequence
  Description of Artificial Sequence: Synthetic oligonucleotide
cccgcaucagcuucagugc

SEQ ID NO: 2017729 - RNA, 19 nt, Artificial Sequence
  Description of Artificial Sequence: Synthetic oligonucleotide
cuccuccagaguagugaag

SEQ ID NO: 2017730 - RNA, 19 nt, Artificial Sequence
  Description of Artificial Sequence: Synthetic oligonucleotide
ugaaguacuggagccccuu

SEQ ID NO: 2017731 - RNA, 19 nt, Artificial Sequence
  Description of Artificial Sequence: Synthetic oligonucleotide
uggucucgcugauguggag

SEQ ID NO: 2017732 - RNA, 19 nt, Artificial Sequence
  Description of Artificial Sequence: Synthetic oligonucleotide
gucuucgaggucggcgugg

SEQ ID NO: 2017733 - RNA, 19 nt, Artificial Sequence
  Description of Artificial Sequence: Synthetic oligonucleotide
ccuagccacaaagugcagg

SEQ ID NO: 2017734 - RNA, 19 nt, Artificial Sequence
  Description of Artificial Sequence: Synthetic oligonucleotide
guucauuauugccucucgu

SEQ ID NO: 2017735 - RNA, 19 nt, Artificial Sequence
  Description of Artificial Sequence: Synthetic oligonucleotide
gggccuagccacaaagugc

SEQ ID NO: 2017736 - RNA, 19 nt, Artificial Sequence
  Description of Artificial Sequence: Synthetic oligonucleotide
acgccagaguguccugaag

SEQ ID NO: 2017737 - RNA, 19 nt, Artificial Sequence
  Description of Artificial Sequence: Synthetic oligonucleotide
ugcagcugacaugcgugca

SEQ ID NO: 2017738 - RNA, 19 nt, Artificial Sequence
  Description of Artificial Sequence: Synthetic oligonucleotide
augccguacugaaccuccc

SEQ ID NO: 2017739 - RNA, 19 nt, Artificial Sequence
  Description of Artificial Sequence: Synthetic oligonucleotide
cucacacgccagagugucc

SEQ ID NO: 2017740 - RNA, 19 nt, Artificial Sequence
  Description of Artificial Sequence: Synthetic oligonucleotide
cagugcagacuugggaaug

SEQ ID NO: 2017741 - RNA, 19 nt, Artificial Sequence
  Description of Artificial Sequence: Synthetic oligonucleotide
guaguagaacagcgagguc

SEQ ID NO: 2017742 - RNA, 19 nt, Artificial Sequence
  Description of Artificial Sequence: Synthetic oligonucleotide
auugcgagcuguggugaca

SEQ ID NO: 2017743 - RNA, 19 nt, Artificial Sequence
  Description of Artificial Sequence: Synthetic oligonucleotide
gagggagccccucagcuau

SEQ ID NO: 2017744 - RNA, 19 nt, Artificial Sequence
  Description of Artificial Sequence: Synthetic oligonucleotide
gugcaggagaaugagcaaa

SEQ ID NO: 2017745 - RNA, 19 nt, Artificial Sequence
  Description of Artificial Sequence: Synthetic oligonucleotide
cacugagagggugggcccg

SEQ ID NO: 2017746 - RNA, 19 nt, Artificial Sequence
  Description of Artificial Sequence: Synthetic oligonucleotide
ccaacgaaggccaggguga

SEQ ID NO: 2017747 - RNA, 19 nt, Artificial Sequence
  Description of Artificial Sequence: Synthetic oligonucleotide
acagagaguggcagcagau

SEQ ID NO: 2017748 - RNA, 19 nt, Artificial Sequence
  Description of Artificial Sequence: Synthetic oligonucleotide
cugaggcccugguuccugc

SEQ ID NO: 2017749 - RNA, 19 nt, Artificial Sequence
  Description of Artificial Sequence: Synthetic oligonucleotide
aaggugugguacaccugga

SEQ ID NO: 2017750 - RNA, 19 nt, Artificial Sequence
  Description of Artificial Sequence: Synthetic oligonucleotide
guagucuaugcagcugaca

SEQ ID NO: 2017751 - RNA, 19 nt, Artificial Sequence
  Description of Artificial Sequence: Synthetic oligonucleotide
cuggucucgcugaugugga

SEQ ID NO: 2017752 - RNA, 19 nt, Artificial Sequence
  Description of Artificial Sequence: Synthetic oligonucleotide
cuuuaaugacagggcagga

SEQ ID NO: 2017753 - RNA, 19 nt, Artificial Sequence
  Description of Artificial Sequence: Synthetic oligonucleotide
cagagaguggcagcagauc

SEQ ID NO: 2017754 - RNA, 19 nt, Artificial Sequence
  Description of Artificial Sequence: Synthetic oligonucleotide
gguacuccuucccgcauca

SEQ ID NO: 2017755 - RNA, 19 nt, Artificial Sequence
  Description of Artificial Sequence: Synthetic oligonucleotide
caggccaacgaaggccagg

SEQ ID NO: 2017756 - RNA, 19 nt, Artificial Sequence
  Description of Artificial Sequence: Synthetic oligonucleotide
ucuugggccuagccacaaa

SEQ ID NO: 2017757 - RNA, 19 nt, Artificial Sequence
  Description of Artificial Sequence: Synthetic oligonucleotide
ccaacagugugcgaagcac

SEQ ID NO: 2017758 - RNA, 19 nt, Artificial Sequence
  Description of Artificial Sequence: Synthetic oligonucleotide
aaggggcgucucagggucg

SEQ ID NO: 2017759 - RNA, 19 nt, Artificial Sequence
  Description of Artificial Sequence: Synthetic oligonucleotide
ccagaguagugaaguacug

SEQ ID NO: 2017760 - RNA, 19 nt, Artificial Sequence
  Description of Artificial Sequence: Synthetic oligonucleotide
ccacggcugagcuucacac

SEQ ID NO: 2017761 - RNA, 19 nt, Artificial Sequence
  Description of Artificial Sequence: Synthetic oligonucleotide
guacaccuggaggaagaac

SEQ ID NO: 2017762 - RNA, 19 nt, Artificial Sequence
  Description of Artificial Sequence: Synthetic oligonucleotide
cagccaugaugaugacggc

SEQ ID NO: 2017763 - RNA, 19 nt, Artificial Sequence
  Description of Artificial Sequence: Synthetic oligonucleotide
ggcgucucagggucgggag

SEQ ID NO: 2017764 - RNA, 19 nt, Artificial Sequence
  Description of Artificial Sequence: Synthetic oligonucleotide
acugaaccucccagaagca

SEQ ID NO: 2017765 - RNA, 19 nt, Artificial Sequence
  Description of Artificial Sequence: Synthetic oligonucleotide
cuaugcagcugacaugcgu

SEQ ID NO: 2017766 - RNA, 19 nt, Artificial Sequence
  Description of Artificial Sequence: Synthetic oligonucleotide
acuugggaauguaguagaa

SEQ ID NO: 2017767 - RNA, 19 nt, Artificial Sequence
  Description of Artificial Sequence: Synthetic oligonucleotide
gcaggacaagaaugcgucc

SEQ ID NO: 2017768 - RNA, 19 nt, Artificial Sequence
  Description of Artificial Sequence: Synthetic oligonucleotide
gucgggaggagguacuccu

SEQ ID NO: 2017769 - RNA, 19 nt, Artificial Sequence
  Description of Artificial Sequence: Synthetic oligonucleotide
augcguccuucugacaccu

SEQ ID NO: 2017770 - RNA, 19 nt, Artificial Sequence
  Description of Artificial Sequence: Synthetic oligonucleotide
gcagcugacaugcgugcac

SEQ ID NO: 2017771 - RNA, 19 nt, Artificial Sequence
  Description of Artificial Sequence: Synthetic oligonucleotide
agugugcgaagcacaggca

SEQ ID NO: 2017772 - RNA, 19 nt, Artificial Sequence
  Description of Artificial Sequence: Synthetic oligonucleotide
gcuguggugacaguccaca

SEQ ID NO: 2017773 - RNA, 19 nt, Artificial Sequence
  Description of Artificial Sequence: Synthetic oligonucleotide
cccgguucauuauugccuc

SEQ ID NO: 2017774 - RNA, 19 nt, Artificial Sequence
  Description of Artificial Sequence: Synthetic oligonucleotide
aggggcgucucagggucgg

SEQ ID NO: 2017775 - RNA, 19 nt, Artificial Sequence
  Description of Artificial Sequence: Synthetic oligonucleotide
ggcagagugaagccuuuaa

SEQ ID NO: 2017776 - RNA, 19 nt, Artificial Sequence
  Description of Artificial Sequence: Synthetic oligonucleotide
cagggucgggaggagguac

SEQ ID NO: 2017777 - RNA, 19 nt, Artificial Sequence
  Description of Artificial Sequence: Synthetic oligonucleotide
caccucgaaggaguaagca

SEQ ID NO: 2017778 - RNA, 19 nt, Artificial Sequence
  Description of Artificial Sequence: Synthetic oligonucleotide
auugccucucguagggcau

SEQ ID NO: 2017779 - RNA, 19 nt, Artificial Sequence
  Description of Artificial Sequence: Synthetic oligonucleotide
cacggcugagcuucacaca

SEQ ID NO: 2017780 - RNA, 19 nt, Artificial Sequence
  Description of Artificial Sequence: Synthetic oligonucleotide
ggcaccugcaggccaacga

SEQ ID NO: 2017781 - RNA, 19 nt, Artificial Sequence
  Description of Artificial Sequence: Synthetic oligonucleotide
ugccucucguagggcauca

SEQ ID NO: 2017782 - RNA, 19 nt, Artificial Sequence
  Description of Artificial Sequence: Synthetic oligonucleotide
acacgccagaguguccuga

SEQ ID NO: 2017783 - RNA, 19 nt, Artificial Sequence
  Description of Artificial Sequence: Synthetic oligonucleotide
ucgggaggagguacuccuu

SEQ ID NO: 2017784 - RNA, 19 nt, Artificial Sequence
  Description of Artificial Sequence: Synthetic oligonucleotide
gaccaccaaggcauugcga

SEQ ID NO: 2017785 - RNA, 19 nt, Artificial Sequence
  Description of Artificial Sequence: Synthetic oligonucleotide
gugcacuccaggaccgcgc

SEQ ID NO: 2017786 - RNA, 19 nt, Artificial Sequence
  Description of Artificial Sequence: Synthetic oligonucleotide
gcgucucagggucgggagg

SEQ ID NO: 2017787 - RNA, 19 nt, Artificial Sequence
  Description of Artificial Sequence: Synthetic oligonucleotide
ugcguccuucugacaccug

SEQ ID NO: 2017788 - RNA, 19 nt, Artificial Sequence
  Description of Artificial Sequence: Synthetic oligonucleotide
cuucgaggucggcgugggg

SEQ ID NO: 2017789 - RNA, 19 nt, Artificial Sequence
  Description of Artificial Sequence: Synthetic oligonucleotide
acggcgucgcccacccugg

SEQ ID NO: 2017790 - RNA, 19 nt, Artificial Sequence
  Description of Artificial Sequence: Synthetic oligonucleotide
ggaccgcgcagcgugguag

SEQ ID NO: 2017791 - RNA, 19 nt, Artificial Sequence
  Description of Artificial Sequence: Synthetic oligonucleotide
caggacaagaaugcguccu

SEQ ID NO: 2017792 - RNA, 19 nt, Artificial Sequence
  Description of Artificial Sequence: Synthetic oligonucleotide
caaaggggcgucucagggu

SEQ ID NO: 2017793 - RNA, 19 nt, Artificial Sequence
  Description of Artificial Sequence: Synthetic oligonucleotide
caccaaggcauugcgagcu

SEQ ID NO: 2017794 - RNA, 19 nt, Artificial Sequence
  Description of Artificial Sequence: Synthetic oligonucleotide
ggaggauccugggcucugg

SEQ ID NO: 2017795 - RNA, 19 nt, Artificial Sequence
  Description of Artificial Sequence: Synthetic oligonucleotide
guccuucugacaccugggu

SEQ ID NO: 2017796 - RNA, 19 nt, Artificial Sequence
  Description of Artificial Sequence: Synthetic oligonucleotide
aggcauuucucggccuccu

SEQ ID NO: 2017797 - RNA, 19 nt, Artificial Sequence
  Description of Artificial Sequence: Synthetic oligonucleotide
caaagacaccagaguccca

SEQ ID NO: 2017798 - RNA, 19 nt, Artificial Sequence
  Description of Artificial Sequence: Synthetic oligonucleotide
uucccgcaucagcuucagu

SEQ ID NO: 2017799 - RNA, 19 nt, Artificial Sequence
  Description of Artificial Sequence: Synthetic oligonucleotide
aggcaccugcaggccaacg

SEQ ID NO: 2017800 - RNA, 19 nt, Artificial Sequence
  Description of Artificial Sequence: Synthetic oligonucleotide
cacacgccagaguguccug

SEQ ID NO: 2017801 - RNA, 19 nt, Artificial Sequence
  Description of Artificial Sequence: Synthetic oligonucleotide
guaagcaaucagggcugca

SEQ ID NO: 2017802 - RNA, 19 nt, Artificial Sequence
  Description of Artificial Sequence: Synthetic oligonucleotide
ccagccucucacacgccag

SEQ ID NO: 2017803 - RNA, 19 nt, Artificial Sequence
  Description of Artificial Sequence: Synthetic oligonucleotide
ccucgaaggaguaagcaau

SEQ ID NO: 2017804 - RNA, 19 nt, Artificial Sequence
  Description of Artificial Sequence: Synthetic oligonucleotide
gcaccugcaggccaacgaa

SEQ ID NO: 2017805 - RNA, 19 nt, Artificial Sequence
  Description of Artificial Sequence: Synthetic oligonucleotide
ucagggucgggaggaggua

SEQ ID NO: 2017806 - RNA, 19 nt, Artificial Sequence
  Description of Artificial Sequence: Synthetic oligonucleotide
agggaggauccugggcucu

SEQ ID NO: 2017807 - RNA, 19 nt, Artificial Sequence
  Description of Artificial Sequence: Synthetic oligonucleotide
acaggcaccugcaggccaa

SEQ ID NO: 2017808 - RNA, 19 nt, Artificial Sequence
  Description of Artificial Sequence: Synthetic oligonucleotide
cgaaaggauggauggccug

SEQ ID NO: 2017809 - RNA, 19 nt, Artificial Sequence
  Description of Artificial Sequence: Synthetic oligonucleotide
ugcgagcuguggugacagu

SEQ ID NO: 2017810 - RNA, 19 nt, Artificial Sequence
  Description of Artificial Sequence: Synthetic oligonucleotide
agcagccaacagugugcga

SEQ ID NO: 2017811 - RNA, 19 nt, Artificial Sequence
  Description of Artificial Sequence: Synthetic oligonucleotide
cugaagaucuuggcaucaa

SEQ ID NO: 2017812 - RNA, 19 nt, Artificial Sequence
  Description of Artificial Sequence: Synthetic oligonucleotide
ccccuucaggucagcagcc

SEQ ID NO: 2017813 - RNA, 19 nt, Artificial Sequence
  Description of Artificial Sequence: Synthetic oligonucleotide
gcagagugaagccuuuaau

SEQ ID NO: 2017814 - RNA, 19 nt, Artificial Sequence
  Description of Artificial Sequence: Synthetic oligonucleotide
ccagucagaacgaaaggau

SEQ ID NO: 2017815 - RNA, 19 nt, Artificial Sequence
  Description of Artificial Sequence: Synthetic oligonucleotide
ccccguuuccuggaagucc

SEQ ID NO: 2017816 - RNA, 19 nt, Artificial Sequence
  Description of Artificial Sequence: Synthetic oligonucleotide
cagcuaucuuccagucaga

SEQ ID NO: 2017817 - RNA, 19 nt, Artificial Sequence
  Description of Artificial Sequence: Synthetic oligonucleotide
caggacggcgucgcccacc

SEQ ID NO: 2017818 - RNA, 19 nt, Artificial Sequence
  Description of Artificial Sequence: Synthetic oligonucleotide
gcgagcuguggugacaguc

SEQ ID NO: 2017819 - RNA, 19 nt, Artificial Sequence
  Description of Artificial Sequence: Synthetic oligonucleotide
ggagaccaccaaggcauug

SEQ ID NO: 2017820 - RNA, 19 nt, Artificial Sequence
  Description of Artificial Sequence: Synthetic oligonucleotide
ggggugcuuccagugcccg

SEQ ID NO: 2017821 - RNA, 19 nt, Artificial Sequence
  Description of Artificial Sequence: Synthetic oligonucleotide
cacgccagaguguccugaa

SEQ ID NO: 2017822 - RNA, 19 nt, Artificial Sequence
  Description of Artificial Sequence: Synthetic oligonucleotide
gcauugcgagcugugguga

SEQ ID NO: 2017823 - RNA, 19 nt, Artificial Sequence
  Description of Artificial Sequence: Synthetic oligonucleotide
gucgcccacccuggucucg

SEQ ID NO: 2017824 - RNA, 19 nt, Artificial Sequence
  Description of Artificial Sequence: Synthetic oligonucleotide
ggucaaauagggucuuauu

SEQ ID NO: 2017825 - RNA, 19 nt, Artificial Sequence
  Description of Artificial Sequence: Synthetic oligonucleotide
agggucgggaggagguacu

SEQ ID NO: 2017826 - RNA, 19 nt, Artificial Sequence
  Description of Artificial Sequence: Synthetic oligonucleotide
cagagucuucgaggucggc

SEQ ID NO: 2017827 - RNA, 19 nt, Artificial Sequence
  Description of Artificial Sequence: Synthetic oligonucleotide
guacuccuucccgcaucag

SEQ ID NO: 2017828 - RNA, 19 nt, Artificial Sequence
  Description of Artificial Sequence: Synthetic oligonucleotide
gccugucaccucgaaggag

SEQ ID NO: 2017829 - RNA, 19 nt, Artificial Sequence
  Description of Artificial Sequence: Synthetic oligonucleotide
cucucacacgccagagugu

SEQ ID NO: 2017830 - RNA, 19 nt, Artificial Sequence
  Description of Artificial Sequence: Synthetic oligonucleotide
ugggcccgcacaggaggga

SEQ ID NO: 2017831 - RNA, 19 nt, Artificial Sequence
  Description of Artificial Sequence: Synthetic oligonucleotide
gcgaggucaaauagggucu

SEQ ID NO: 2017832 - RNA, 19 nt, Artificial Sequence
  Description of Artificial Sequence: Synthetic oligonucleotide
cugucaccucgaaggagua

SEQ ID NO: 2017833 - RNA, 19 nt, Artificial Sequence
  Description of Artificial Sequence: Synthetic oligonucleotide
agaguguccugaagaucuu

SEQ ID NO: 2017834 - RNA, 19 nt, Artificial Sequence
  Description of Artificial Sequence: Synthetic oligonucleotide
ggaugccguacugaaccuc

SEQ ID NO: 2017835 - RNA, 19 nt, Artificial Sequence
  Description of Artificial Sequence: Synthetic oligonucleotide
agacuugagcagggaggau

SEQ ID NO: 2017836 - RNA, 19 nt, Artificial Sequence
  Description of Artificial Sequence: Synthetic oligonucleotide
ccguacugaaccucccaga

SEQ ID NO: 2017837 - RNA, 19 nt, Artificial Sequence
  Description of Artificial Sequence: Synthetic oligonucleotide
gaggucggcguggggcuga

SEQ ID NO: 2017838 - RNA, 19 nt, Artificial Sequence
  Description of Artificial Sequence: Synthetic oligonucleotide
gggauacgcugcaauccca

SEQ ID NO: 2017839 - RNA, 19 nt, Artificial Sequence
  Description of Artificial Sequence: Synthetic oligonucleotide
ccaggaccgcgcagcgugg

SEQ ID NO: 2017840 - RNA, 19 nt, Artificial Sequence
  Description of Artificial Sequence: Synthetic oligonucleotide
agggagccccucagcuauc

SEQ ID NO: 2017841 - RNA, 19 nt, Artificial Sequence
  Description of Artificial Sequence: Synthetic oligonucleotide
aggaccgcgcagcguggua

SEQ ID NO: 2017842 - RNA, 19 nt, Artificial Sequence
  Description of Artificial Sequence: Synthetic oligonucleotide
gcgucgcccacccuggucu

SEQ ID NO: 2017843 - RNA, 19 nt, Artificial Sequence
  Description of Artificial Sequence: Synthetic oligonucleotide
gggcccgcacaggagggag

SEQ ID NO: 2017844 - RNA, 19 nt, Artificial Sequence
  Description of Artificial Sequence: Synthetic oligonucleotide
gucuugggccuagccacaa

SEQ ID NO: 2017845 - RNA, 19 nt, Artificial Sequence
  Description of Artificial Sequence: Synthetic oligonucleotide
cgugcacuccaggaccgcg

SEQ ID NO: 2017846 - RNA, 19 nt, Artificial Sequence
  Description of Artificial Sequence: Synthetic oligonucleotide
cccacccuggucucgcuga

SEQ ID NO: 2017847 - RNA, 19 nt, Artificial Sequence
  Description of Artificial Sequence: Synthetic oligonucleotide
cccguuuccuggaaguccu

SEQ ID NO: 2017848 - RNA, 19 nt, Artificial Sequence
  Description of Artificial Sequence: Synthetic oligonucleotide
cccaggacggcgucgccca

SEQ ID NO: 2017849 - RNA, 19 nt, Artificial Sequence
  Description of Artificial Sequence: Synthetic oligonucleotide
cagcgaggucaaauagggu

SEQ ID NO: 2017850 - RNA, 19 nt, Artificial Sequence
  Description of Artificial Sequence: Synthetic oligonucleotide
gugcagacuugggaaugua

SEQ ID NO: 2017851 - RNA, 19 nt, Artificial Sequence
  Description of Artificial Sequence: Synthetic oligonucleotide
ggucuugggccuagccaca

SEQ ID NO: 2017852 - RNA, 19 nt, Artificial Sequence
  Description of Artificial Sequence: Synthetic oligonucleotide
cgguucauuauugccucuc

SEQ ID NO: 2017853 - RNA, 19 nt, Artificial Sequence
  Description of Artificial Sequence: Synthetic oligonucleotide
aggagaccaccaaggcauu

SEQ ID NO: 2017854 - RNA, 19 nt, Artificial Sequence
  Description of Artificial Sequence: Synthetic oligonucleotide
ccacaaccacgguguaguc

SEQ ID NO: 2017855 - RNA, 19 nt, Artificial Sequence
  Description of Artificial Sequence: Synthetic oligonucleotide
ggcgucgcccacccugguc

SEQ ID NO: 2017856 - RNA, 19 nt, Artificial Sequence
  Description of Artificial Sequence: Synthetic oligonucleotide
gcccugguuccugcuguag

SEQ ID NO: 2017857 - RNA, 19 nt, Artificial Sequence
  Description of Artificial Sequence: Synthetic oligonucleotide
caggcaccugcaggccaac

SEQ ID NO: 2017858 - RNA, 19 nt, Artificial Sequence
  Description of Artificial Sequence: Synthetic oligonucleotide
caaagccaauggugauggu

SEQ ID NO: 2017859 - RNA, 19 nt, Artificial Sequence
  Description of Artificial Sequence: Synthetic oligonucleotide
gcaggccaacgaaggccag

SEQ ID NO: 2017860 - RNA, 19 nt, Artificial Sequence
  Description of Artificial Sequence: Synthetic oligonucleotide
gccuagccacaaagugcag

SEQ ID NO: 2017861 - RNA, 19 nt, Artificial Sequence
  Description of Artificial Sequence: Synthetic oligonucleotide
cccacggcugagcuucaca

SEQ ID NO: 2017862 - RNA, 19 nt, Artificial Sequence
  Description of Artificial Sequence: Synthetic oligonucleotide
gggucgggaggagguacuc

SEQ ID NO: 2017863 - RNA, 19 nt, Artificial Sequence
  Description of Artificial Sequence: Synthetic oligonucleotide
gccucucacacgccagagu

SEQ ID NO: 2017864 - RNA, 19 nt, Artificial Sequence
  Description of Artificial Sequence: Synthetic oligonucleotide
cagugcccgguucauuauu

SEQ ID NO: 2017865 - RNA, 19 nt, Artificial Sequence
  Description of Artificial Sequence: Synthetic oligonucleotide
ggggcgucucagggucggg

SEQ ID NO: 2017866 - RNA, 19 nt, Artificial Sequence
  Description of Artificial Sequence: Synthetic oligonucleotide
ccguuuccuggaaguccuc

SEQ ID NO: 2017867 - RNA, 19 nt, Artificial Sequence
  Description of Artificial Sequence: Synthetic oligonucleotide
ggauggccugucaccucga

SEQ ID NO: 2017868 - RNA, 19 nt, Artificial Sequence
  Description of Artificial Sequence: Synthetic oligonucleotide
caaccacgguguagucuau

SEQ ID NO: 2017869 - RNA, 19 nt, Artificial Sequence
  Description of Artificial Sequence: Synthetic oligonucleotide
gcgugcacuccaggaccgc

SEQ ID NO: 2017870 - RNA, 19 nt, Artificial Sequence
  Description of Artificial Sequence: Synthetic oligonucleotide
ccucucguagggcaucaau

SEQ ID NO: 2017871 - RNA, 19 nt, Artificial Sequence
  Description of Artificial Sequence: Synthetic oligonucleotide
gcacaggagggagccccuc

SEQ ID NO: 2017872 - RNA, 19 nt, Artificial Sequence
  Description of Artificial Sequence: Synthetic oligonucleotide
ggucggcguggggcugagg

SEQ ID NO: 2017873 - RNA, 19 nt, Artificial Sequence
  Description of Artificial Sequence: Synthetic oligonucleotide
cgguguagucuaugcagcu

SEQ ID NO: 2017874 - RNA, 19 nt, Artificial Sequence
  Description of Artificial Sequence: Synthetic oligonucleotide
ggucagcagccaacagugu

SEQ ID NO: 2017875 - RNA, 19 nt, Artificial Sequence
  Description of Artificial Sequence: Synthetic oligonucleotide
gggagccccucagcuaucu

SEQ ID NO: 2017876 - RNA, 19 nt, Artificial Sequence
  Description of Artificial Sequence: Synthetic oligonucleotide
gccccaggacggcgucgcc

SEQ ID NO: 2017877 - RNA, 19 nt, Artificial Sequence
  Description of Artificial Sequence: Synthetic oligonucleotide
ccaaggcauugcgagcugu

SEQ ID NO: 2017878 - RNA, 19 nt, Artificial Sequence
  Description of Artificial Sequence: Synthetic oligonucleotide
gcgcagcgugguaggggug

SEQ ID NO: 2017879 - RNA, 19 nt, Artificial Sequence
  Description of Artificial Sequence: Synthetic oligonucleotide
ccaggacggcgucgcccac

SEQ ID NO: 2017880 - RNA, 19 nt, Artificial Sequence
  Description of Artificial Sequence: Synthetic oligonucleotide
caggaccgcgcagcguggu

SEQ ID NO: 2017881 - RNA, 19 nt, Artificial Sequence
  Description of Artificial Sequence: Synthetic oligonucleotide
cgucgcccacccuggucuc

SEQ ID NO: 2017882 - RNA, 19 nt, Artificial Sequence
  Description of Artificial Sequence: Synthetic oligonucleotide
gcccacggcugagcuucac

SEQ ID NO: 2017883 - RNA, 19 nt, Artificial Sequence
  Description of Artificial Sequence: Synthetic oligonucleotide
ccacaaagugcaggagaau

SEQ ID NO: 2017884 - RNA, 19 nt, Artificial Sequence
  Description of Artificial Sequence: Synthetic oligonucleotide
cggcugagcuucacacaaa

SEQ ID NO: 2017885 - RNA, 19 nt, Artificial Sequence
  Description of Artificial Sequence: Synthetic oligonucleotide
gccucucguagggcaucaa

SEQ ID NO: 2017886 - RNA, 19 nt, Artificial Sequence
  Description of Artificial Sequence: Synthetic oligonucleotide
gcaaucccagcagguucuu

SEQ ID NO: 2017887 - RNA, 19 nt, Artificial Sequence
  Description of Artificial Sequence: Synthetic oligonucleotide
ggccagggugacaccccgu

SEQ ID NO: 2017888 - RNA, 19 nt, Artificial Sequence
  Description of Artificial Sequence: Synthetic oligonucleotide
ccagcccacggcugagcuu

SEQ ID NO: 2017889 - RNA, 19 nt, Artificial Sequence
  Description of Artificial Sequence: Synthetic oligonucleotide
ggacggcgucgcccacccu

SEQ ID NO: 2017890 - RNA, 19 nt, Artificial Sequence
  Description of Artificial Sequence: Synthetic oligonucleotide
gcggagccacagccaugau

SEQ ID NO: 2017891 - RNA, 19 nt, Artificial Sequence
  Description of Artificial Sequence: Synthetic oligonucleotide
cggcgucgcccacccuggu

SEQ ID NO: 2017892 - RNA, 19 nt, Artificial Sequence
  Description of Artificial Sequence: Synthetic oligonucleotide
aauucugucauauucaucu

SEQ ID NO: 2017893 - RNA, 19 nt, Artificial Sequence
  Description of Artificial Sequence: Synthetic oligonucleotide
acuuuuaucaguuugucca

SEQ ID NO: 2017894 - RNA, 19 nt, Artificial Sequence
  Description of Artificial Sequence: Synthetic oligonucleotide
uuugguaucuuguuugugg

SEQ ID NO: 2017895 - RNA, 19 nt, Artificial Sequence
  Description of Artificial Sequence: Synthetic oligonucleotide
uguaucuccaaacuugucc

SEQ ID NO: 2017896 - RNA, 19 nt, Artificial Sequence
  Description of Artificial Sequence: Synthetic oligonucleotide
gagagagagagacagagag

SEQ ID NO: 2017897 - RNA, 19 nt, Artificial Sequence
  Description of Artificial Sequence: Synthetic oligonucleotide
uuguuuguggaacugcugg

SEQ ID NO: 2017898 - RNA, 19 nt, Artificial Sequence
  Description of Artificial Sequence: Synthetic oligonucleotide
uuuauugccaccuucaguu

SEQ ID NO: 2017899 - RNA, 19 nt, Artificial Sequence
  Description of Artificial Sequence: Synthetic oligonucleotide
ucuucaaguucuuuaaugc

SEQ ID NO: 2017900 - RNA, 19 nt, Artificial Sequence
  Description of Artificial Sequence: Synthetic oligonucleotide
uuuagcaaggucuucaagu

SEQ ID NO: 2017901 - RNA, 19 nt, Artificial Sequence
  Description of Artificial Sequence: Synthetic oligonucleotide
gagacagaguauuucaaag

SEQ ID NO: 2017902 - RNA, 19 nt, Artificial Sequence
  Description of Artificial Sequence: Synthetic oligonucleotide
gacagacagagacagacag

SEQ ID NO: 2017903 - RNA, 19 nt, Artificial Sequence
  Description of Artificial Sequence: Synthetic oligonucleotide
agacagaguauuucaaagg

SEQ ID NO: 2017904 - RNA, 19 nt, Artificial Sequence
  Description of Artificial Sequence: Synthetic oligonucleotide
aguucuuuaaugccuucac

SEQ ID NO: 2017905 - RNA, 19 nt, Artificial Sequence
  Description of Artificial Sequence: Synthetic oligonucleotide
cagagagacagacagacag

SEQ ID NO: 2017906 - RNA, 19 nt, Artificial Sequence
  Description of Artificial Sequence: Synthetic oligonucleotide
gagagagacagagagacag

SEQ ID NO: 2017907 - RNA, 19 nt, Artificial Sequence
  Description of Artificial Sequence: Synthetic oligonucleotide
ugcuggaugguguuggugg

SEQ ID NO: 2017908 - RNA, 19 nt, Artificial Sequence
  Description of Artificial Sequence: Synthetic oligonucleotide
uuuaacuuuugccuucucu

SEQ ID NO: 2017909 - RNA, 19 nt, Artificial Sequence
  Description of Artificial Sequence: Synthetic oligonucleotide
cuugugaagguucuggaag

SEQ ID NO: 2017910 - RNA, 19 nt, Artificial Sequence
  Description of Artificial Sequence: Synthetic oligonucleotide
uaucaguuuguccagucca

SEQ ID NO: 2017911 - RNA, 19 nt, Artificial Sequence
  Description of Artificial Sequence: Synthetic oligonucleotide
augucagccaccugaauuc

SEQ ID NO: 2017912 - RNA, 19 nt, Artificial Sequence
  Description of Artificial Sequence: Synthetic oligonucleotide
uuguggaacugcuggaugg

SEQ ID NO: 2017913 - RNA, 19 nt, Artificial Sequence
  Description of Artificial Sequence: Synthetic oligonucleotide
acagacuuuuaucaguuug

SEQ ID NO: 2017914 - RNA, 19 nt, Artificial Sequence
  Description of Artificial Sequence: Synthetic oligonucleotide
ugaagguucuggaaguuga

SEQ ID NO: 2017915 - RNA, 19 nt, Artificial Sequence
  Description of Artificial Sequence: Synthetic oligonucleotide
gagagagagacagagagac

SEQ ID NO: 2017916 - RNA, 19 nt, Artificial Sequence
  Description of Artificial Sequence: Synthetic oligonucleotide
aauguguccuccauuaugu

SEQ ID NO: 2017917 - RNA, 19 nt, Artificial Sequence
  Description of Artificial Sequence: Synthetic oligonucleotide
uccuuugguaucuuguuug

SEQ ID NO: 2017918 - RNA, 19 nt, Artificial Sequence
  Description of Artificial Sequence: Synthetic oligonucleotide
aaguugaguugucuccugg

SEQ ID NO: 2017919 - RNA, 19 nt, Artificial Sequence
  Description of Artificial Sequence: Synthetic oligonucleotide
gagagagagagagacagag

SEQ ID NO: 2017920 - RNA, 19 nt, Artificial Sequence
  Description of Artificial Sequence: Synthetic oligonucleotide
uugguggaggcuuuugagg

SEQ ID NO: 2017921 - RNA, 19 nt, Artificial Sequence
  Description of Artificial Sequence: Synthetic oligonucleotide
uccaaacuuguccuuuagg

SEQ ID NO: 2017922 - RNA, 19 nt, Artificial Sequence
  Description of Artificial Sequence: Synthetic oligonucleotide
gaauguguccuccauuaug

SEQ ID NO: 2017923 - RNA, 19 nt, Artificial Sequence
  Description of Artificial Sequence: Synthetic oligonucleotide
cuguguaucuccaaacuug

SEQ ID NO: 2017924 - RNA, 19 nt, Artificial Sequence
  Description of Artificial Sequence: Synthetic oligonucleotide
uccuugaucuguuugugug

SEQ ID NO: 2017925 - RNA, 19 nt, Artificial Sequence
  Description of Artificial Sequence: Synthetic oligonucleotide
uuuuauugccaccuucagu

SEQ ID NO: 2017926 - RNA, 19 nt, Artificial Sequence
  Description of Artificial Sequence: Synthetic oligonucleotide
uggaaguugaguugucucc

SEQ ID NO: 2017927 - RNA, 19 nt, Artificial Sequence
  Description of Artificial Sequence: Synthetic oligonucleotide
uuaucaguuuguccagucc

SEQ ID NO: 2017928 - RNA, 19 nt, Artificial Sequence
  Description of Artificial Sequence: Synthetic oligonucleotide
uuuugaggagucuggagac

SEQ ID NO: 2017929 - RNA, 19 nt, Artificial Sequence
  Description of Artificial Sequence: Synthetic oligonucleotide
uaugucagccaccugaauu

SEQ ID NO: 2017930 - RNA, 19 nt, Artificial Sequence
  Description of Artificial Sequence: Synthetic oligonucleotide
acagagacagaguauuuca

SEQ ID NO: 2017931 - RNA, 19 nt, Artificial Sequence
  Description of Artificial Sequence: Synthetic oligonucleotide
gacagacuuuccuucauug

SEQ ID NO: 2017932 - RNA, 19 nt, Artificial Sequence
  Description of Artificial Sequence: Synthetic oligonucleotide
ccaaacuuguccuuuaggg

SEQ ID NO: 2017933 - RNA, 19 nt, Artificial Sequence
  Description of Artificial Sequence: Synthetic oligonucleotide
uuuuagcaaggucuucaag

SEQ ID NO: 2017934 - RNA, 19 nt, Artificial Sequence
  Description of Artificial Sequence: Synthetic oligonucleotide
ucuggagacauccuugauc

SEQ ID NO: 2017935 - RNA, 19 nt, Artificial Sequence
  Description of Artificial Sequence: Synthetic oligonucleotide
gacuuuuaucaguuugucc

SEQ ID NO: 2017936 - RNA, 19 nt, Artificial Sequence
  Description of Artificial Sequence: Synthetic oligonucleotide
cauuaugucagccaccuga

SEQ ID NO: 2017937 - RNA, 19 nt, Artificial Sequence
  Description of Artificial Sequence: Synthetic oligonucleotide
cagagagacagagagacag

SEQ ID NO: 2017938 - RNA, 19 nt, Artificial Sequence
  Description of Artificial Sequence: Synthetic oligonucleotide
ugaguugucuccuggguga

SEQ ID NO: 2017939 - RNA, 19 nt, Artificial Sequence
  Description of Artificial Sequence: Synthetic oligonucleotide
uucacagacuuuuaucagu

SEQ ID NO: 2017940 - RNA, 19 nt, Artificial Sequence
  Description of Artificial Sequence: Synthetic oligonucleotide
ucuuguuuguggaacugcu

SEQ ID NO: 2017941 - RNA, 19 nt, Artificial Sequence
  Description of Artificial Sequence: Synthetic oligonucleotide
aaggucuucaaguucuuua

SEQ ID NO: 2017942 - RNA, 19 nt, Artificial Sequence
  Description of Artificial Sequence: Synthetic oligonucleotide
aucuugugggaaugugucc

SEQ ID NO: 2017943 - RNA, 19 nt, Artificial Sequence
  Description of Artificial Sequence: Synthetic oligonucleotide
aacugcuggaugguguugg

SEQ ID NO: 2017944 - RNA, 19 nt, Artificial Sequence
  Description of Artificial Sequence: Synthetic oligonucleotide
aguugaguugucuccuggg

SEQ ID NO: 2017945 - RNA, 19 nt, Artificial Sequence
  Description of Artificial Sequence: Synthetic oligonucleotide
uuugugugcugccuuguga

SEQ ID NO: 2017946 - RNA, 19 nt, Artificial Sequence
  Description of Artificial Sequence: Synthetic oligonucleotide
cuuuuaucaguuuguccag

SEQ ID NO: 2017947 - RNA, 19 nt, Artificial Sequence
  Description of Artificial Sequence: Synthetic oligonucleotide
ugguggaggcuuuugagga

SEQ ID NO: 2017948 - RNA, 19 nt, Artificial Sequence
  Description of Artificial Sequence: Synthetic oligonucleotide
cagacagagacagacagac

SEQ ID NO: 2017949 - RNA, 19 nt, Artificial Sequence
  Description of Artificial Sequence: Synthetic oligonucleotide
cuuuugaggagucuggaga

SEQ ID NO: 2017950 - RNA, 19 nt, Artificial Sequence
  Description of Artificial Sequence: Synthetic oligonucleotide
ugaucuguuugugugcugc

SEQ ID NO: 2017951 - RNA, 19 nt, Artificial Sequence
  Description of Artificial Sequence: Synthetic oligonucleotide
cagaguauuucaaagguaa

SEQ ID NO: 2017952 - RNA, 19 nt, Artificial Sequence
  Description of Artificial Sequence: Synthetic oligonucleotide
uugguaucuuguuugugga

SEQ ID NO: 2017953 - RNA, 19 nt, Artificial Sequence
  Description of Artificial Sequence: Synthetic oligonucleotide
uuaaugccuucacagacuu

SEQ ID NO: 2017954 - RNA, 19 nt, Artificial Sequence
  Description of Artificial Sequence: Synthetic oligonucleotide
cuucacagacuuuuaucag

SEQ ID NO: 2017955 - RNA, 19 nt, Artificial Sequence
  Description of Artificial Sequence: Synthetic oligonucleotide
caucuugugggaauguguc

SEQ ID NO: 2017956 - RNA, 19 nt, Artificial Sequence
  Description of Artificial Sequence: Synthetic oligonucleotide
uuuaucaguuuguccaguc

SEQ ID NO: 2017957 - RNA, 19 nt, Artificial Sequence
  Description of Artificial Sequence: Synthetic oligonucleotide
guugguggaggcuuuugag

SEQ ID NO: 2017958 - RNA, 19 nt, Artificial Sequence
  Description of Artificial Sequence: Synthetic oligonucleotide
gacagaguauuucaaaggu

SEQ ID NO: 2017959 - RNA, 19 nt, Artificial Sequence
  Description of Artificial Sequence: Synthetic oligonucleotide
ucuugugggaauguguccu

SEQ ID NO: 2017960 - RNA, 19 nt, Artificial Sequence
  Description of Artificial Sequence: Synthetic oligonucleotide
uguccaguccagcaucuug

SEQ ID NO: 2017961 - RNA, 19 nt, Artificial Sequence
  Description of Artificial Sequence: Synthetic oligonucleotide
uugugaagguucuggaagu

SEQ ID NO: 2017962 - RNA, 19 nt, Artificial Sequence
  Description of Artificial Sequence: Synthetic oligonucleotide
ucagccaccugaauucugu

SEQ ID NO: 2017963 - RNA, 19 nt, Artificial Sequence
  Description of Artificial Sequence: Synthetic oligonucleotide
uccauuaugucagccaccu

SEQ ID NO: 2017964 - RNA, 19 nt, Artificial Sequence
  Description of Artificial Sequence: Synthetic oligonucleotide
uguugguggaggcuuuuga

SEQ ID NO: 2017965 - RNA, 19 nt, Artificial Sequence
  Description of Artificial Sequence: Synthetic oligonucleotide
gacagacagagacagagua

SEQ ID NO: 2017966 - RNA, 19 nt, Artificial Sequence
  Description of Artificial Sequence: Synthetic oligonucleotide
ucacagacuuuuaucaguu

SEQ ID NO: 2017967 - RNA, 19 nt, Artificial Sequence
  Description of Artificial Sequence: Synthetic oligonucleotide
agacuuuuaucaguuuguc

SEQ ID NO: 2017968 - RNA, 19 nt, Artificial Sequence
  Description of Artificial Sequence: Synthetic oligonucleotide
ugccuugugaagguucugg

SEQ ID NO: 2017969 - RNA, 19 nt, Artificial Sequence
  Description of Artificial Sequence: Synthetic oligonucleotide
gaggagucuggagacaucc

SEQ ID NO: 2017970 - RNA, 19 nt, Artificial Sequence
  Description of Artificial Sequence: Synthetic oligonucleotide
aaguucuuuaaugccuuca

SEQ ID NO: 2017971 - RNA, 19 nt, Artificial Sequence
  Description of Artificial Sequence: Synthetic oligonucleotide
guguccuccauuaugucag

SEQ ID NO: 2017972 - RNA, 19 nt, Artificial Sequence
  Description of Artificial Sequence: Synthetic oligonucleotide
uguuuguggaacugcugga

SEQ ID NO: 2017973 - RNA, 19 nt, Artificial Sequence
  Description of Artificial Sequence: Synthetic oligonucleotide
ccugaauucugucauauuc

SEQ ID NO: 2017974 - RNA, 19 nt, Artificial Sequence
  Description of Artificial Sequence: Synthetic oligonucleotide
uugugugcugccuugugaa

SEQ ID NO: 2017975 - RNA, 19 nt, Artificial Sequence
  Description of Artificial Sequence: Synthetic oligonucleotide
uccuccauuaugucagcca

SEQ ID NO: 2017976 - RNA, 19 nt, Artificial Sequence
  Description of Artificial Sequence: Synthetic oligonucleotide
agguucuggaaguugaguu

SEQ ID NO: 2017977 - RNA, 19 nt, Artificial Sequence
  Description of Artificial Sequence: Synthetic oligonucleotide
uuuguccaguccagcaucu

SEQ ID NO: 2017978 - RNA, 19 nt, Artificial Sequence
  Description of Artificial Sequence: Synthetic oligonucleotide
gaggcuuuugaggagucug

SEQ ID NO: 2017979 - RNA, 19 nt, Artificial Sequence
  Description of Artificial Sequence: Synthetic oligonucleotide
acagacuuuccuucauuga

SEQ ID NO: 2017980 - RNA, 19 nt, Artificial Sequence
  Description of Artificial Sequence: Synthetic oligonucleotide
cuuguuuguggaacugcug

SEQ ID NO: 2017981 - RNA, 19 nt, Artificial Sequence
  Description of Artificial Sequence: Synthetic oligonucleotide
cuggaaguugaguugucuc

SEQ ID NO: 2017982 - RNA, 19 nt, Artificial Sequence
  Description of Artificial Sequence: Synthetic oligonucleotide
gaaguugaguugucuccug

SEQ ID NO: 2017983 - RNA, 19 nt, Artificial Sequence
  Description of Artificial Sequence: Synthetic oligonucleotide
cuggagacauccuugaucu

SEQ ID NO: 2017984 - RNA, 19 nt, Artificial Sequence
  Description of Artificial Sequence: Synthetic oligonucleotide
ugugcugccuugugaaggu

SEQ ID NO: 2017985 - RNA, 19 nt, Artificial Sequence
  Description of Artificial Sequence: Synthetic oligonucleotide
gacagagacagaguauuuc

SEQ ID NO: 2017986 - RNA, 19 nt, Artificial Sequence
  Description of Artificial Sequence: Synthetic oligonucleotide
gaguauuucaaagguaaua

SEQ ID NO: 2017987 - RNA, 19 nt, Artificial Sequence
  Description of Artificial Sequence: Synthetic oligonucleotide
guuuguccaguccagcauc

SEQ ID NO: 2017988 - RNA, 19 nt, Artificial Sequence
  Description of Artificial Sequence: Synthetic oligonucleotide
ucuguuugugugcugccuu

SEQ ID NO: 2017989 - RNA, 19 nt, Artificial Sequence
  Description of Artificial Sequence: Synthetic oligonucleotide
gguucuggaaguugaguug

SEQ ID NO: 2017990 - RNA, 19 nt, Artificial Sequence
  Description of Artificial Sequence: Synthetic oligonucleotide
aagguucuggaaguugagu

SEQ ID NO: 2017991 - RNA, 19 nt, Artificial Sequence
  Description of Artificial Sequence: Synthetic oligonucleotide
gaucuguuugugugcugcc

SEQ ID NO: 2017992 - RNA, 19 nt, Artificial Sequence
  Description of Artificial Sequence: Synthetic oligonucleotide
uauugccaccuucaguuuu

SEQ ID NO: 2017993 - RNA, 19 nt, Artificial Sequence
  Description of Artificial Sequence: Synthetic oligonucleotide
gugugcugccuugugaagg

SEQ ID NO: 2017994 - RNA, 19 nt, Artificial Sequence
  Description of Artificial Sequence: Synthetic oligonucleotide
gagucuggagacauccuug

SEQ ID NO: 2017995 - RNA, 19 nt, Artificial Sequence
  Description of Artificial Sequence: Synthetic oligonucleotide
acuuuccuucauugaugac

SEQ ID NO: 2017996 - RNA, 19 nt, Artificial Sequence
  Description of Artificial Sequence: Synthetic oligonucleotide
uuuuaucaguuuguccagu

SEQ ID NO: 2017997 - RNA, 19 nt, Artificial Sequence
  Description of Artificial Sequence: Synthetic oligonucleotide
guaucuccaaacuuguccu

SEQ ID NO: 2017998 - RNA, 19 nt, Artificial Sequence
  Description of Artificial Sequence: Synthetic oligonucleotide
ucuggaaguugaguugucu

SEQ ID NO: 2017999 - RNA, 19 nt, Artificial Sequence
  Description of Artificial Sequence: Synthetic oligonucleotide
agacuuuccuucauugaug

SEQ ID NO: 2018000 - RNA, 19 nt, Artificial Sequence
  Description of Artificial Sequence: Synthetic oligonucleotide
gguaucuuguuuguggaac

SEQ ID NO: 2018001 - RNA, 19 nt, Artificial Sequence
  Description of Artificial Sequence: Synthetic oligonucleotide
ucaguuuguccaguccagc

SEQ ID NO: 2018002 - RNA, 19 nt, Artificial Sequence
  Description of Artificial Sequence: Synthetic oligonucleotide
ccuucacagacuuuuauca

SEQ ID NO: 2018003 - RNA, 19 nt, Artificial Sequence
  Description of Artificial Sequence: Synthetic oligonucleotide
cuccauuaugucagccacc

SEQ ID NO: 2018004 - RNA, 19 nt, Artificial Sequence
  Description of Artificial Sequence: Synthetic oligonucleotide
ugccuucacagacuuuuau

SEQ ID NO: 2018005 - RNA, 19 nt, Artificial Sequence
  Description of Artificial Sequence: Synthetic oligonucleotide
ugcugccuugugaagguuc

SEQ ID NO: 2018006 - RNA, 19 nt, Artificial Sequence
  Description of Artificial Sequence: Synthetic oligonucleotide
aucaguuuguccaguccag

SEQ ID NO: 2018007 - RNA, 19 nt, Artificial Sequence
  Description of Artificial Sequence: Synthetic oligonucleotide
auccuugaucuguuugugu

SEQ ID NO: 2018008 - RNA, 19 nt, Artificial Sequence
  Description of Artificial Sequence: Synthetic oligonucleotide
agccaccugaauucuguca

SEQ ID NO: 2018009 - RNA, 19 nt, Artificial Sequence
  Description of Artificial Sequence: Synthetic oligonucleotide
ugacagacuuuccuucauu

SEQ ID NO: 2018010 - RNA, 19 nt, Artificial Sequence
  Description of Artificial Sequence: Synthetic oligonucleotide
cuguuugugugcugccuug

SEQ ID NO: 2018011 - RNA, 19 nt, Artificial Sequence
  Description of Artificial Sequence: Synthetic oligonucleotide
cuccaaacuuguccuuuag

SEQ ID NO: 2018012 - RNA, 19 nt, Artificial Sequence
  Description of Artificial Sequence: Synthetic oligonucleotide
gugcuguguaucuccaaac

SEQ ID NO: 2018013 - RNA, 19 nt, Artificial Sequence
  Description of Artificial Sequence: Synthetic oligonucleotide
uuuuaacuuuugccuucuc

SEQ ID NO: 2018014 - RNA, 19 nt, Artificial Sequence
  Description of Artificial Sequence: Synthetic oligonucleotide
aggcuuuugaggagucugg

SEQ ID NO: 2018015 - RNA, 19 nt, Artificial Sequence
  Description of Artificial Sequence: Synthetic oligonucleotide
aguccagcaucuuguggga

SEQ ID NO: 2018016 - RNA, 19 nt, Artificial Sequence
  Description of Artificial Sequence: Synthetic oligonucleotide
ugguaucuuguuuguggaa

SEQ ID NO: 2018017 - RNA, 19 nt, Artificial Sequence
  Description of Artificial Sequence: Synthetic oligonucleotide
ucuccaaacuuguccuuua

SEQ ID NO: 2018018 - RNA, 19 nt, Artificial Sequence
  Description of Artificial Sequence: Synthetic oligonucleotide
guuugugugcugccuugug

SEQ ID NO: 2018019 - RNA, 19 nt, Artificial Sequence
  Description of Artificial Sequence: Synthetic oligonucleotide
gcuuuugaggagucuggag

SEQ ID NO: 2018020 - RNA, 19 nt, Artificial Sequence
  Description of Artificial Sequence: Synthetic oligonucleotide
uugugggaauguguccucc

SEQ ID NO: 2018021 - RNA, 19 nt, Artificial Sequence
  Description of Artificial Sequence: Synthetic oligonucleotide
auuaugucagccaccugaa

SEQ ID NO: 2018022 - RNA, 19 nt, Artificial Sequence
  Description of Artificial Sequence: Synthetic oligonucleotide
uuaugucagccaccugaau

SEQ ID NO: 2018023 - RNA, 19 nt, Artificial Sequence
  Description of Artificial Sequence: Synthetic oligonucleotide
agcaucuugugggaaugug

SEQ ID NO: 2018024 - RNA, 19 nt, Artificial Sequence
  Description of Artificial Sequence: Synthetic oligonucleotide
cuuugguaucuuguuugug

SEQ ID NO: 2018025 - RNA, 19 nt, Artificial Sequence
  Description of Artificial Sequence: Synthetic oligonucleotide
gugaagguucuggaaguug

SEQ ID NO: 2018026 - RNA, 19 nt, Artificial Sequence
  Description of Artificial Sequence: Synthetic oligonucleotide
caguuuguccaguccagca

SEQ ID NO: 2018027 - RNA, 19 nt, Artificial Sequence
  Description of Artificial Sequence: Synthetic oligonucleotide
ugucuccugggugagcuuc

SEQ ID NO: 2018028 - RNA, 19 nt, Artificial Sequence
  Description of Artificial Sequence: Synthetic oligonucleotide
cagacuuuuaucaguuugu

SEQ ID NO: 2018029 - RNA, 19 nt, Artificial Sequence
  Description of Artificial Sequence: Synthetic oligonucleotide
ccuugaucuguuugugugc

SEQ ID NO: 2018030 - RNA, 19 nt, Artificial Sequence
  Description of Artificial Sequence: Synthetic oligonucleotide
cuugugggaauguguccuc

SEQ ID NO: 2018031 - RNA, 19 nt, Artificial Sequence
  Description of Artificial Sequence: Synthetic oligonucleotide
uguuugugugcugccuugu

SEQ ID NO: 2018032 - RNA, 19 nt, Artificial Sequence
  Description of Artificial Sequence: Synthetic oligonucleotide
uguccuccauuaugucagc

SEQ ID NO: 2018033 - RNA, 19 nt, Artificial Sequence
  Description of Artificial Sequence: Synthetic oligonucleotide
aguugucuccugggugagc

SEQ ID NO: 2018034 - RNA, 19 nt, Artificial Sequence
  Description of Artificial Sequence: Synthetic oligonucleotide
guaucuuguuuguggaacu

SEQ ID NO: 2018035 - RNA, 19 nt, Artificial Sequence
  Description of Artificial Sequence: Synthetic oligonucleotide
uuauugccaccuucaguuu

SEQ ID NO: 2018036 - RNA, 19 nt, Artificial Sequence
  Description of Artificial Sequence: Synthetic oligonucleotide
agagagagagacagagaga

SEQ ID NO: 2018037 - RNA, 19 nt, Artificial Sequence
  Description of Artificial Sequence: Synthetic oligonucleotide
agagagacagacagacaga

SEQ ID NO: 2018038 - RNA, 19 nt, Artificial Sequence
  Description of Artificial Sequence: Synthetic oligonucleotide
auucugucauauucaucuu

SEQ ID NO: 2018039 - RNA, 19 nt, Artificial Sequence
  Description of Artificial Sequence: Synthetic oligonucleotide
acagaguauuucaaaggua

SEQ ID NO: 2018040 - RNA, 19 nt, Artificial Sequence
  Description of Artificial Sequence: Synthetic oligonucleotide
ugaggagucuggagacauc

SEQ ID NO: 2018041 - RNA, 19 nt, Artificial Sequence
  Description of Artificial Sequence: Synthetic oligonucleotide
ugucagccaccugaauucu

SEQ ID NO: 2018042 - RNA, 19 nt, Artificial Sequence
  Description of Artificial Sequence: Synthetic oligonucleotide
aucuguuugugugcugccu

SEQ ID NO: 2018043 - RNA, 19 nt, Artificial Sequence
  Description of Artificial Sequence: Synthetic oligonucleotide
agaguauuucaaagguaau

SEQ ID NO: 2018044 - RNA, 19 nt, Artificial Sequence
  Description of Artificial Sequence: Synthetic oligonucleotide
cagagacagaguauuucaa

SEQ ID NO: 2018045 - RNA, 19 nt, Artificial Sequence
  Description of Artificial Sequence: Synthetic oligonucleotide
agagagagagagacagaga

SEQ ID NO: 2018046 - RNA, 19 nt, Artificial Sequence
  Description of Artificial Sequence: Synthetic oligonucleotide
gguggaggcuuuugaggag

SEQ ID NO: 2018047 - RNA, 19 nt, Artificial Sequence
  Description of Artificial Sequence: Synthetic oligonucleotide
acagacagagacagaguau

SEQ ID NO: 2018048 - RNA, 19 nt, Artificial Sequence
  Description of Artificial Sequence: Synthetic oligonucleotide
uggaggcuuuugaggaguc

SEQ ID NO: 2018049 - RNA, 19 nt, Artificial Sequence
  Description of Artificial Sequence: Synthetic oligonucleotide
gccuucacagacuuuuauc

SEQ ID NO: 2018050 - RNA, 19 nt, Artificial Sequence
  Description of Artificial Sequence: Synthetic oligonucleotide
ugugaagguucuggaaguu

SEQ ID NO: 2018051 - RNA, 19 nt, Artificial Sequence
  Description of Artificial Sequence: Synthetic oligonucleotide
gaguugucuccugggugag

SEQ ID NO: 2018052 - RNA, 19 nt, Artificial Sequence
  Description of Artificial Sequence: Synthetic oligonucleotide
cagacuuuccuucauugau

SEQ ID NO: 2018053 - RNA, 19 nt, Artificial Sequence
  Description of Artificial Sequence: Synthetic oligonucleotide
uggagacauccuugaucug

SEQ ID NO: 2018054 - RNA, 19 nt, Artificial Sequence
  Description of Artificial Sequence: Synthetic oligonucleotide
acagacagagacagacaga

SEQ ID NO: 2018055 - RNA, 19 nt, Artificial Sequence
  Description of Artificial Sequence: Synthetic oligonucleotide
guucuggaaguugaguugu

SEQ ID NO: 2018056 - RNA, 19 nt, Artificial Sequence
  Description of Artificial Sequence: Synthetic oligonucleotide
acugcuggaugguguuggu

SEQ ID NO: 2018057 - RNA, 19 nt, Artificial Sequence
  Description of Artificial Sequence: Synthetic oligonucleotide
aucuccaaacuuguccuuu

SEQ ID NO: 2018058 - RNA, 19 nt, Artificial Sequence
  Description of Artificial Sequence: Synthetic oligonucleotide
agagagacagagagacaga

SEQ ID NO: 2018059 - RNA, 19 nt, Artificial Sequence
  Description of Artificial Sequence: Synthetic oligonucleotide
ggaugguguugguggaggc

SEQ ID NO: 2018060 - RNA, 19 nt, Artificial Sequence
  Description of Artificial Sequence: Synthetic oligonucleotide
cuugaucuguuugugugcu

SEQ ID NO: 2018061 - RNA, 19 nt, Artificial Sequence
  Description of Artificial Sequence: Synthetic oligonucleotide
gaaggcuccuuugguaucu

SEQ ID NO: 2018062 - RNA, 19 nt, Artificial Sequence
  Description of Artificial Sequence: Synthetic oligonucleotide
accugaauucugucauauu

SEQ ID NO: 2018063 - RNA, 19 nt, Artificial Sequence
  Description of Artificial Sequence: Synthetic oligonucleotide
acagagagacagacagaca

SEQ ID NO: 2018064 - RNA, 19 nt, Artificial Sequence
  Description of Artificial Sequence: Synthetic oligonucleotide
agagagagagagagacaga

SEQ ID NO: 2018065 - RNA, 19 nt, Artificial Sequence
  Description of Artificial Sequence: Synthetic oligonucleotide
uuccuucauugaugaccug

SEQ ID NO: 2018066 - RNA, 19 nt, Artificial Sequence
  Description of Artificial Sequence: Synthetic oligonucleotide
ccaguccagcaucuugugg

SEQ ID NO: 2018067 - RNA, 19 nt, Artificial Sequence
  Description of Artificial Sequence: Synthetic oligonucleotide
uaaugccuucacagacuuu

SEQ ID NO: 2018068 - RNA, 19 nt, Artificial Sequence
  Description of Artificial Sequence: Synthetic oligonucleotide
agagagagacagagagaca

SEQ ID NO: 2018069 - RNA, 19 nt, Artificial Sequence
  Description of Artificial Sequence: Synthetic oligonucleotide
ggagacauccuugaucugu

SEQ ID NO: 2018070 - RNA, 19 nt, Artificial Sequence
  Description of Artificial Sequence: Synthetic oligonucleotide
guccuccauuaugucagcc

SEQ ID NO: 2018071 - RNA, 19 nt, Artificial Sequence
  Description of Artificial Sequence: Synthetic oligonucleotide
gaugguguugguggaggcu

SEQ ID NO: 2018072 - RNA, 19 nt, Artificial Sequence
  Description of Artificial Sequence: Synthetic oligonucleotide
agacauccuugaucuguuu

SEQ ID NO: 2018073 - RNA, 19 nt, Artificial Sequence
  Description of Artificial Sequence: Synthetic oligonucleotide
ugguguugguggaggcuuu

SEQ ID NO: 2018074 - RNA, 19 nt, Artificial Sequence
  Description of Artificial Sequence: Synthetic oligonucleotide
cagccaccugaauucuguc

SEQ ID NO: 2018075 - RNA, 19 nt, Artificial Sequence
  Description of Artificial Sequence: Synthetic oligonucleotide
cagacagagacagaguauu

SEQ ID NO: 2018076 - RNA, 19 nt, Artificial Sequence
  Description of Artificial Sequence: Synthetic oligonucleotide
agacagagacagacagaca

SEQ ID NO: 2018077 - RNA, 19 nt, Artificial Sequence
  Description of Artificial Sequence: Synthetic oligonucleotide
guguugguggaggcuuuug

SEQ ID NO: 2018078 - RNA, 19 nt, Artificial Sequence
  Description of Artificial Sequence: Synthetic oligonucleotide
cugcuggaugguguuggug

SEQ ID NO: 2018079 - RNA, 19 nt, Artificial Sequence
  Description of Artificial Sequence: Synthetic oligonucleotide
guccaguccagcaucuugu

SEQ ID NO: 2018080 - RNA, 19 nt, Artificial Sequence
  Description of Artificial Sequence: Synthetic oligonucleotide
gucagccaccugaauucug

SEQ ID NO: 2018081 - RNA, 19 nt, Artificial Sequence
  Description of Artificial Sequence: Synthetic oligonucleotide
agacagagacagaguauuu

SEQ ID NO: 2018082 - RNA, 19 nt, Artificial Sequence
  Description of Artificial Sequence: Synthetic oligonucleotide
guguaucuccaaacuuguc

SEQ ID NO: 2018083 - RNA, 19 nt, Artificial Sequence
  Description of Artificial Sequence: Synthetic oligonucleotide
gccuugugaagguucugga

SEQ ID NO: 2018084 - RNA, 19 nt, Artificial Sequence
  Description of Artificial Sequence: Synthetic oligonucleotide
ggaaguugaguugucuccu

SEQ ID NO: 2018085 - RNA, 19 nt, Artificial Sequence
  Description of Artificial Sequence: Synthetic oligonucleotide
acagacagacagagacaga

SEQ ID NO: 2018086 - RNA, 19 nt, Artificial Sequence
  Description of Artificial Sequence: Synthetic oligonucleotide
aggagucuggagacauccu

SEQ ID NO: 2018087 - RNA, 19 nt, Artificial Sequence
  Description of Artificial Sequence: Synthetic oligonucleotide
ccagcaucuugugggaaug

SEQ ID NO: 2018088 - RNA, 19 nt, Artificial Sequence
  Description of Artificial Sequence: Synthetic oligonucleotide
ggcuuuugaggagucugga

SEQ ID NO: 2018089 - RNA, 19 nt, Artificial Sequence
  Description of Artificial Sequence: Synthetic oligonucleotide
gagacauccuugaucuguu

SEQ ID NO: 2018090 - RNA, 19 nt, Artificial Sequence
  Description of Artificial Sequence: Synthetic oligonucleotide
guggaggcuuuugaggagu

SEQ ID NO: 2018091 - RNA, 19 nt, Artificial Sequence
  Description of Artificial Sequence: Synthetic oligonucleotide
gcuguguaucuccaaacuu

SEQ ID NO: 2018092 - RNA, 19 nt, Artificial Sequence
  Description of Artificial Sequence: Synthetic oligonucleotide
aaggcuccuuugguaucuu

SEQ ID NO: 2018093 - RNA, 19 nt, Artificial Sequence
  Description of Artificial Sequence: Synthetic oligonucleotide
ggagucuggagacauccuu

SEQ ID NO: 2018094 - RNA, 19 nt, Artificial Sequence
  Description of Artificial Sequence: Synthetic oligonucleotide
cuccuuugguaucuuguuu

SEQ ID NO: 2018095 - RNA, 19 nt, Artificial Sequence
  Description of Artificial Sequence: Synthetic oligonucleotide
caccugaauucugucauau

SEQ ID NO: 2018096 - RNA, 19 nt, Artificial Sequence
  Description of Artificial Sequence: Synthetic oligonucleotide
cuucauugaugaccugcau

SEQ ID NO: 2018097 - RNA, 19 nt, Artificial Sequence
  Description of Artificial Sequence: Synthetic oligonucleotide
gcaucuugugggaaugugu

SEQ ID NO: 2018098 - RNA, 19 nt, Artificial Sequence
  Description of Artificial Sequence: Synthetic oligonucleotide
ggucuucaaguucuuuaau

SEQ ID NO: 2018099 - RNA, 19 nt, Artificial Sequence
  Description of Artificial Sequence: Synthetic oligonucleotide
uuguccaguccagcaucuu

SEQ ID NO: 2018100 - RNA, 19 nt, Artificial Sequence
  Description of Artificial Sequence: Synthetic oligonucleotide
ggcuccuuugguaucuugu

SEQ ID NO: 2018101 - RNA, 19 nt, Artificial Sequence
  Description of Artificial Sequence: Synthetic oligonucleotide
ucuccugggugagcuucuu

SEQ ID NO: 2018102 - RNA, 19 nt, Artificial Sequence
  Description of Artificial Sequence: Synthetic oligonucleotide
augccuucacagacuuuua

SEQ ID NO: 2018103 - RNA, 19 nt, Artificial Sequence
  Description of Artificial Sequence: Synthetic oligonucleotide
gcuccuuugguaucuuguu

SEQ ID NO: 2018104 - RNA, 19 nt, Artificial Sequence
  Description of Artificial Sequence: Synthetic oligonucleotide
gucuggagacauccuugau

SEQ ID NO: 2018105 - RNA, 19 nt, Artificial Sequence
  Description of Artificial Sequence: Synthetic oligonucleotide
ccauuaugucagccaccug

SEQ ID NO: 2018106 - RNA, 19 nt, Artificial Sequence
  Description of Artificial Sequence: Synthetic oligonucleotide
ccuuugguaucuuguuugu

SEQ ID NO: 2018107 - RNA, 19 nt, Artificial Sequence
  Description of Artificial Sequence: Synthetic oligonucleotide
cacagacuuuuaucaguuu

SEQ ID NO: 2018108 - RNA, 19 nt, Artificial Sequence
  Description of Artificial Sequence: Synthetic oligonucleotide
guccagcaucuugugggaa

SEQ ID NO: 2018109 - RNA, 19 nt, Artificial Sequence
  Description of Artificial Sequence: Synthetic oligonucleotide
gcugccuugugaagguucu

SEQ ID NO: 2018110 - RNA, 19 nt, Artificial Sequence
  Description of Artificial Sequence: Synthetic oligonucleotide
cagcaucuugugggaaugu

SEQ ID NO: 2018111 - RNA, 19 nt, Artificial Sequence
  Description of Artificial Sequence: Synthetic oligonucleotide
ggaggcuuuugaggagucu

SEQ ID NO: 2018112 - RNA, 19 nt, Artificial Sequence
  Description of Artificial Sequence: Synthetic oligonucleotide
ccaccugaauucugucaua

SEQ ID NO: 2018113 - RNA, 19 nt, Artificial Sequence
  Description of Artificial Sequence: Synthetic oligonucleotide
gguguugguggaggcuuuu

SEQ ID NO: 2018114 - RNA, 19 nt, Artificial Sequence
  Description of Artificial Sequence: Synthetic oligonucleotide
gugcugccuugugaagguu

SEQ ID NO: 2018115 - RNA, 19 nt, Artificial Sequence
  Description of Artificial Sequence: Synthetic oligonucleotide
aacuuuauggucuugucuc

SEQ ID NO: 2018116 - RNA, 19 nt, Artificial Sequence
  Description of Artificial Sequence: Synthetic oligonucleotide
uucugaaugacucucaucc

SEQ ID NO: 2018117 - RNA, 19 nt, Artificial Sequence
  Description of Artificial Sequence: Synthetic oligonucleotide
aaaucuugauacuggggcc

SEQ ID NO: 2018118 - RNA, 19 nt, Artificial Sequence
  Description of Artificial Sequence: Synthetic oligonucleotide
uguauuugcagacaccgag

SEQ ID NO: 2018119 - RNA, 19 nt, Artificial Sequence
  Description of Artificial Sequence: Synthetic oligonucleotide
gucauaaacuuuuagcggg

SEQ ID NO: 2018120 - RNA, 19 nt, Artificial Sequence
  Description of Artificial Sequence: Synthetic oligonucleotide
ugucauaaacuuuuagcgg

SEQ ID NO: 2018121 - RNA, 19 nt, Artificial Sequence
  Description of Artificial Sequence: Synthetic oligonucleotide
uaguauggccuacaaaucg

SEQ ID NO: 2018122 - RNA, 19 nt, Artificial Sequence
  Description of Artificial Sequence: Synthetic oligonucleotide
caaaucuugauacuggggc

SEQ ID NO: 2018123 - RNA, 19 nt, Artificial Sequence
  Description of Artificial Sequence: Synthetic oligonucleotide
ugucucgagacgcagacag

SEQ ID NO: 2018124 - RNA, 19 nt, Artificial Sequence
  Description of Artificial Sequence: Synthetic oligonucleotide
uguucagauagccagugug

SEQ ID NO: 2018125 - RNA, 19 nt, Artificial Sequence
  Description of Artificial Sequence: Synthetic oligonucleotide
aacgacaucacugacaaaa

SEQ ID NO: 2018126 - RNA, 19 nt, Artificial Sequence
  Description of Artificial Sequence: Synthetic oligonucleotide
aguguauuugcagacaccg

SEQ ID NO: 2018127 - RNA, 19 nt, Artificial Sequence
  Description of Artificial Sequence: Synthetic oligonucleotide
acgaugauaggguugcuac

SEQ ID NO: 2018128 - RNA, 19 nt, Artificial Sequence
  Description of Artificial Sequence: Synthetic oligonucleotide
auagucacuugccacacuc

SEQ ID NO: 2018129 - RNA, 19 nt, Artificial Sequence
  Description of Artificial Sequence: Synthetic oligonucleotide
auaggguugcuacuguucg

SEQ ID NO: 2018130 - RNA, 19 nt, Artificial Sequence
  Description of Artificial Sequence: Synthetic oligonucleotide
aaugggagugaccucgaag

SEQ ID NO: 2018131 - RNA, 19 nt, Artificial Sequence
  Description of Artificial Sequence: Synthetic oligonucleotide
ucgagauccagacacaauc

SEQ ID NO: 2018132 - RNA, 19 nt, Artificial Sequence
  Description of Artificial Sequence: Synthetic oligonucleotide
guaaccggcaaacagaguc

SEQ ID NO: 2018133 - RNA, 19 nt, Artificial Sequence
  Description of Artificial Sequence: Synthetic oligonucleotide
aaucgucucgugguggugc

SEQ ID NO: 2018134 - RNA, 19 nt, Artificial Sequence
  Description of Artificial Sequence: Synthetic oligonucleotide
uaacuuuauggucuugucu

SEQ ID NO: 2018135 - RNA, 19 nt, Artificial Sequence
  Description of Artificial Sequence: Synthetic oligonucleotide
caccggauagcucagagag

SEQ ID NO: 2018136 - RNA, 19 nt, Artificial Sequence
  Description of Artificial Sequence: Synthetic oligonucleotide
uggccuacaaaucgucucg

SEQ ID NO: 2018137 - RNA, 19 nt, Artificial Sequence
  Description of Artificial Sequence: Synthetic oligonucleotide
aguacauccuuaguauggc

SEQ ID NO: 2018138 - RNA, 19 nt, Artificial Sequence
  Description of Artificial Sequence: Synthetic oligonucleotide
auaacuuccugcuucaauu

SEQ ID NO: 2018139 - RNA, 19 nt, Artificial Sequence
  Description of Artificial Sequence: Synthetic oligonucleotide
ucagaggagauaacgacau

SEQ ID NO: 2018140 - RNA, 19 nt, Artificial Sequence
  Description of Artificial Sequence: Synthetic oligonucleotide
uacauccuuaguauggccu

SEQ ID NO: 2018141 - RNA, 19 nt, Artificial Sequence
  Description of Artificial Sequence: Synthetic oligonucleotide
gagauaacgacaucacuga

SEQ ID NO: 2018142 - RNA, 19 nt, Artificial Sequence
  Description of Artificial Sequence: Synthetic oligonucleotide
cuaagacucugucauaaac

SEQ ID NO: 2018143 - RNA, 19 nt, Artificial Sequence
  Description of Artificial Sequence: Synthetic oligonucleotide
uguuacccagccguuaugg

SEQ ID NO: 2018144 - RNA, 19 nt, Artificial Sequence
  Description of Artificial Sequence: Synthetic oligonucleotide
agaagcggacacaagacac

SEQ ID NO: 2018145 - RNA, 19 nt, Artificial Sequence
  Description of Artificial Sequence: Synthetic oligonucleotide
cuugucucgagauccagac

SEQ ID NO: 2018146 - RNA, 19 nt, Artificial Sequence
  Description of Artificial Sequence: Synthetic oligonucleotide
agauccagacacaaucugc

SEQ ID NO: 2018147 - RNA, 19 nt, Artificial Sequence
  Description of Artificial Sequence: Synthetic oligonucleotide
acuuuauggucuugucucg

SEQ ID NO: 2018148 - RNA, 19 nt, Artificial Sequence
  Description of Artificial Sequence: Synthetic oligonucleotide
uacuguucggggagaagcg

SEQ ID NO: 2018149 - RNA, 19 nt, Artificial Sequence
  Description of Artificial Sequence: Synthetic oligonucleotide
auugagaucccacagcaua

SEQ ID NO: 2018150 - RNA, 19 nt, Artificial Sequence
  Description of Artificial Sequence: Synthetic oligonucleotide
gauggucuugucucgagac

SEQ ID NO: 2018151 - RNA, 19 nt, Artificial Sequence
  Description of Artificial Sequence: Synthetic oligonucleotide
uuacccagccguuauggcc

SEQ ID NO: 2018152 - RNA, 19 nt, Artificial Sequence
  Description of Artificial Sequence: Synthetic oligonucleotide
ucuaguguguaaaggugcu

SEQ ID NO: 2018153 - RNA, 19 nt, Artificial Sequence
  Description of Artificial Sequence: Synthetic oligonucleotide
gacagaaucaugucuggga

SEQ ID NO: 2018154 - RNA, 19 nt, Artificial Sequence
  Description of Artificial Sequence: Synthetic oligonucleotide
acgaagggucaucugcucc

SEQ ID NO: 2018155 - RNA, 19 nt, Artificial Sequence
  Description of Artificial Sequence: Synthetic oligonucleotide
guugcuacuguucggggag

SEQ ID NO: 2018156 - RNA, 19 nt, Artificial Sequence
  Description of Artificial Sequence: Synthetic oligonucleotide
aaggauggcaccggauagc

SEQ ID NO: 2018157 - RNA, 19 nt, Artificial Sequence
  Description of Artificial Sequence: Synthetic oligonucleotide
uuaguauggccuacaaauc

SEQ ID NO: 2018158 - RNA, 19 nt, Artificial Sequence
  Description of Artificial Sequence: Synthetic oligonucleotide
uuuauggucuugucucgag

SEQ ID NO: 2018159 - RNA, 19 nt, Artificial Sequence
  Description of Artificial Sequence: Synthetic oligonucleotide
agauaacgacaucacugac

SEQ ID NO: 2018160 - RNA, 19 nt, Artificial Sequence
  Description of Artificial Sequence: Synthetic oligonucleotide
auagcucagagagccaagc

SEQ ID NO: 2018161 - RNA, 19 nt, Artificial Sequence
  Description of Artificial Sequence: Synthetic oligonucleotide
ggagauaacgacaucacug

SEQ ID NO: 2018162 - RNA, 19 nt, Artificial Sequence
  Description of Artificial Sequence: Synthetic oligonucleotide
ucgagacgcagacagaauc

SEQ ID NO: 2018163 - RNA, 19 nt, Artificial Sequence
  Description of Artificial Sequence: Synthetic oligonucleotide
caucuaguguguaaaggug

SEQ ID NO: 2018164 - RNA, 19 nt, Artificial Sequence
  Description of Artificial Sequence: Synthetic oligonucleotide
gccguuauggccuuugagg

SEQ ID NO: 2018165 - RNA, 19 nt, Artificial Sequence
  Description of Artificial Sequence: Synthetic oligonucleotide
gacaaaaugggagugaccu

SEQ ID NO: 2018166 - RNA, 19 nt, Artificial Sequence
  Description of Artificial Sequence: Synthetic oligonucleotide
uaguguguaaaggugcuug

SEQ ID NO: 2018167 - RNA, 19 nt, Artificial Sequence
  Description of Artificial Sequence: Synthetic oligonucleotide
uacaaaucgucucguggug

SEQ ID NO: 2018168 - RNA, 19 nt, Artificial Sequence
  Description of Artificial Sequence: Synthetic oligonucleotide
agaaucaugucugggaacu

SEQ ID NO: 2018169 - RNA, 19 nt, Artificial Sequence
  Description of Artificial Sequence: Synthetic oligonucleotide
auagccuggccauccuugc

SEQ ID NO: 2018170 - RNA, 19 nt, Artificial Sequence
  Description of Artificial Sequence: Synthetic oligonucleotide
ucauaaacuuuuagcgggu

SEQ ID NO: 2018171 - RNA, 19 nt, Artificial Sequence
  Description of Artificial Sequence: Synthetic oligonucleotide
cuguguaaccggcaaacag

SEQ ID NO: 2018172 - RNA, 19 nt, Artificial Sequence
  Description of Artificial Sequence: Synthetic oligonucleotide
cuacuguucggggagaagc

SEQ ID NO: 2018173 - RNA, 19 nt, Artificial Sequence
  Description of Artificial Sequence: Synthetic oligonucleotide
acagaaucaugucugggaa

SEQ ID NO: 2018174 - RNA, 19 nt, Artificial Sequence
  Description of Artificial Sequence: Synthetic oligonucleotide
gauaacgacaucacugaca

SEQ ID NO: 2018175 - RNA, 19 nt, Artificial Sequence
  Description of Artificial Sequence: Synthetic oligonucleotide
agaaggcuacacucaguac

SEQ ID NO: 2018176 - RNA, 19 nt, Artificial Sequence
  Description of Artificial Sequence: Synthetic oligonucleotide
uugauacuggggccugugg

SEQ ID NO: 2018177 - RNA, 19 nt, Artificial Sequence
  Description of Artificial Sequence: Synthetic oligonucleotide
accaucuaguguguaaagg

SEQ ID NO: 2018178 - RNA, 19 nt, Artificial Sequence
  Description of Artificial Sequence: Synthetic oligonucleotide
uucuaagacucugucauaa

SEQ ID NO: 2018179 - RNA, 19 nt, Artificial Sequence
  Description of Artificial Sequence: Synthetic oligonucleotide
gagauccagacacaaucug

SEQ ID NO: 2018180 - RNA, 19 nt, Artificial Sequence
  Description of Artificial Sequence: Synthetic oligonucleotide
uuuuagcgggugccaauag

SEQ ID NO: 2018181 - RNA, 19 nt, Artificial Sequence
  Description of Artificial Sequence: Synthetic oligonucleotide
accgagaguauuccauaac

SEQ ID NO: 2018182 - RNA, 19 nt, Artificial Sequence
  Description of Artificial Sequence: Synthetic oligonucleotide
cagguugucuguguaaccg

SEQ ID NO: 2018183 - RNA, 19 nt, Artificial Sequence
  Description of Artificial Sequence: Synthetic oligonucleotide
acacucaguacauccuuag

SEQ ID NO: 2018184 - RNA, 19 nt, Artificial Sequence
  Description of Artificial Sequence: Synthetic oligonucleotide
agcgggugccaauagucac

SEQ ID NO: 2018185 - RNA, 19 nt, Artificial Sequence
  Description of Artificial Sequence: Synthetic oligonucleotide
uacccagccguuauggccu

SEQ ID NO: 2018186 - RNA, 19 nt, Artificial Sequence
  Description of Artificial Sequence: Synthetic oligonucleotide
auacgagugucgccgcagc

SEQ ID NO: 2018187 - RNA, 19 nt, Artificial Sequence
  Description of Artificial Sequence: Synthetic oligonucleotide
ugacaaaaugggagugacc

SEQ ID NO: 2018188 - RNA, 19 nt, Artificial Sequence
  Description of Artificial Sequence: Synthetic oligonucleotide
agccaguagcgguuggggc

SEQ ID NO: 2018189 - RNA, 19 nt, Artificial Sequence
  Description of Artificial Sequence: Synthetic oligonucleotide
cuugucucgagacgcagac

SEQ ID NO: 2018190 - RNA, 19 nt, Artificial Sequence
  Description of Artificial Sequence: Synthetic oligonucleotide
agcugauacgagugucgcc

SEQ ID NO: 2018191 - RNA, 19 nt, Artificial Sequence
  Description of Artificial Sequence: Synthetic oligonucleotide
uggucuugucucgagacgc

SEQ ID NO: 2018192 - RNA, 19 nt, Artificial Sequence
  Description of Artificial Sequence: Synthetic oligonucleotide
uauggccuacaaaucgucu

SEQ ID NO: 2018193 - RNA, 19 nt, Artificial Sequence
  Description of Artificial Sequence: Synthetic oligonucleotide
uguguucagauagccagug

SEQ ID NO: 2018194 - RNA, 19 nt, Artificial Sequence
  Description of Artificial Sequence: Synthetic oligonucleotide
ugccaauagucacuugcca

SEQ ID NO: 2018195 - RNA, 19 nt, Artificial Sequence
  Description of Artificial Sequence: Synthetic oligonucleotide
ugaccagcuugucccaucc

SEQ ID NO: 2018196 - RNA, 19 nt, Artificial Sequence
  Description of Artificial Sequence: Synthetic oligonucleotide
uguguuacccagccguuau

SEQ ID NO: 2018197 - RNA, 19 nt, Artificial Sequence
  Description of Artificial Sequence: Synthetic oligonucleotide
uaaccggcaaacagagucu

SEQ ID NO: 2018198 - RNA, 19 nt, Artificial Sequence
  Description of Artificial Sequence: Synthetic oligonucleotide
acaaaucgucucguggugg

SEQ ID NO: 2018199 - RNA, 19 nt, Artificial Sequence
  Description of Artificial Sequence: Synthetic oligonucleotide
uugugagaucccagaggcg

SEQ ID NO: 2018200 - RNA, 19 nt, Artificial Sequence
  Description of Artificial Sequence: Synthetic oligonucleotide
agccaaguuccauaccuug

SEQ ID NO: 2018201 - RNA, 19 nt, Artificial Sequence
  Description of Artificial Sequence: Synthetic oligonucleotide
caaguuccauaccuugacc

SEQ ID NO: 2018202 - RNA, 19 nt, Artificial Sequence
  Description of Artificial Sequence: Synthetic oligonucleotide
guguaaccggcaaacagag

SEQ ID NO: 2018203 - RNA, 19 nt, Artificial Sequence
  Description of Artificial Sequence: Synthetic oligonucleotide
ccuacaaaucgucucgugg

SEQ ID NO: 2018204 - RNA, 19 nt, Artificial Sequence
  Description of Artificial Sequence: Synthetic oligonucleotide
ugucggaggagaaggcuac

SEQ ID NO: 2018205 - RNA, 19 nt, Artificial Sequence
  Description of Artificial Sequence: Synthetic oligonucleotide
agucacuugccacacucga

SEQ ID NO: 2018206 - RNA, 19 nt, Artificial Sequence
  Description of Artificial Sequence: Synthetic oligonucleotide
ggcuacacucaguacaucc

SEQ ID NO: 2018207 - RNA, 19 nt, Artificial Sequence
  Description of Artificial Sequence: Synthetic oligonucleotide
agagacugucacuguguuc

SEQ ID NO: 2018208 - RNA, 19 nt, Artificial Sequence
  Description of Artificial Sequence: Synthetic oligonucleotide
uuggucucgucccugguua

SEQ ID NO: 2018209 - RNA, 19 nt, Artificial Sequence
  Description of Artificial Sequence: Synthetic oligonucleotide
cugugguaugccauaguug

SEQ ID NO: 2018210 - RNA, 19 nt, Artificial Sequence
  Description of Artificial Sequence: Synthetic oligonucleotide
gagaagcggacacaagaca

SEQ ID NO: 2018211 - RNA, 19 nt, Artificial Sequence
  Description of Artificial Sequence: Synthetic oligonucleotide
aucgucucgugguggugcc

SEQ ID NO: 2018212 - RNA, 19 nt, Artificial Sequence
  Description of Artificial Sequence: Synthetic oligonucleotide
gcugauaacuuccugcuuc

SEQ ID NO: 2018213 - RNA, 19 nt, Artificial Sequence
  Description of Artificial Sequence: Synthetic oligonucleotide
ucucgagacgcagacagaa

SEQ ID NO: 2018214 - RNA, 19 nt, Artificial Sequence
  Description of Artificial Sequence: Synthetic oligonucleotide
agaggcgcaguguuccauc

SEQ ID NO: 2018215 - RNA, 19 nt, Artificial Sequence
  Description of Artificial Sequence: Synthetic oligonucleotide
ucuugucucgagacgcaga

SEQ ID NO: 2018216 - RNA, 19 nt, Artificial Sequence
  Description of Artificial Sequence: Synthetic oligonucleotide
aaacuuuuagcgggugcca

SEQ ID NO: 2018217 - RNA, 19 nt, Artificial Sequence
  Description of Artificial Sequence: Synthetic oligonucleotide
ccguuauggccuuugaggg

SEQ ID NO: 2018218 - RNA, 19 nt, Artificial Sequence
  Description of Artificial Sequence: Synthetic oligonucleotide
ggugcuugccuucauugag

SEQ ID NO: 2018219 - RNA, 19 nt, Artificial Sequence
  Description of Artificial Sequence: Synthetic oligonucleotide
ugguaugccauaguugguc

SEQ ID NO: 2018220 - RNA, 19 nt, Artificial Sequence
  Description of Artificial Sequence: Synthetic oligonucleotide
aaaggugcuugccuucauu

SEQ ID NO: 2018221 - RNA, 19 nt, Artificial Sequence
  Description of Artificial Sequence: Synthetic oligonucleotide
gaagcggacacaagacacc

SEQ ID NO: 2018222 - RNA, 19 nt, Artificial Sequence
  Description of Artificial Sequence: Synthetic oligonucleotide
gugguuggucuucagcuug

SEQ ID NO: 2018223 - RNA, 19 nt, Artificial Sequence
  Description of Artificial Sequence: Synthetic oligonucleotide
gauacgagugucgccgcag

SEQ ID NO: 2018224 - RNA, 19 nt, Artificial Sequence
  Description of Artificial Sequence: Synthetic oligonucleotide
ucccugguuagcuuccaca

SEQ ID NO: 2018225 - RNA, 19 nt, Artificial Sequence
  Description of Artificial Sequence: Synthetic oligonucleotide
guuauggccuuugaggguc

SEQ ID NO: 2018226 - RNA, 19 nt, Artificial Sequence
  Description of Artificial Sequence: Synthetic oligonucleotide
gaggagauaacgacaucac

SEQ ID NO: 2018227 - RNA, 19 nt, Artificial Sequence
  Description of Artificial Sequence: Synthetic oligonucleotide
aucagaggagauaacgaca

SEQ ID NO: 2018228 - RNA, 19 nt, Artificial Sequence
  Description of Artificial Sequence: Synthetic oligonucleotide
caguguauuugcagacacc

SEQ ID NO: 2018229 - RNA, 19 nt, Artificial Sequence
  Description of Artificial Sequence: Synthetic oligonucleotide
gacgcagacagaaucaugu

SEQ ID NO: 2018230 - RNA, 19 nt, Artificial Sequence
  Description of Artificial Sequence: Synthetic oligonucleotide
ggcaaacuggccaucagag

SEQ ID NO: 2018231 - RNA, 19 nt, Artificial Sequence
  Description of Artificial Sequence: Synthetic oligonucleotide
ucuaagacucugucauaaa

SEQ ID NO: 2018232 - RNA, 19 nt, Artificial Sequence
  Description of Artificial Sequence: Synthetic oligonucleotide
uguucggggagaagcggac

SEQ ID NO: 2018233 - RNA, 19 nt, Artificial Sequence
  Description of Artificial Sequence: Synthetic oligonucleotide
agccguuauggccuuugag

SEQ ID NO: 2018234 - RNA, 19 nt, Artificial Sequence
  Description of Artificial Sequence: Synthetic oligonucleotide
aaccggcaaacagagucug

SEQ ID NO: 2018235 - RNA, 19 nt, Artificial Sequence
  Description of Artificial Sequence: Synthetic oligonucleotide
cagaaucaugucugggaac

SEQ ID NO: 2018236 - RNA, 19 nt, Artificial Sequence
  Description of Artificial Sequence: Synthetic oligonucleotide
uccuuaguauggccuacaa

SEQ ID NO: 2018237 - RNA, 19 nt, Artificial Sequence
  Description of Artificial Sequence: Synthetic oligonucleotide
gucuguguaaccggcaaac

SEQ ID NO: 2018238 - RNA, 19 nt, Artificial Sequence
  Description of Artificial Sequence: Synthetic oligonucleotide
guuccauaccuugaccagc

SEQ ID NO: 2018239 - RNA, 19 nt, Artificial Sequence
  Description of Artificial Sequence: Synthetic oligonucleotide
acuguucggggagaagcgg

SEQ ID NO: 2018240 - RNA, 19 nt, Artificial Sequence
  Description of Artificial Sequence: Synthetic oligonucleotide
cuacaaaucgucucguggu

SEQ ID NO: 2018241 - RNA, 19 nt, Artificial Sequence
  Description of Artificial Sequence: Synthetic oligonucleotide
guuagccaaguuccauacc

SEQ ID NO: 2018242 - RNA, 19 nt, Artificial Sequence
  Description of Artificial Sequence: Synthetic oligonucleotide
uugucucgagauccagaca

SEQ ID NO: 2018243 - RNA, 19 nt, Artificial Sequence
  Description of Artificial Sequence: Synthetic oligonucleotide
uccauaacuuuauggucuu

SEQ ID NO: 2018244 - RNA, 19 nt, Artificial Sequence
  Description of Artificial Sequence: Synthetic oligonucleotide
ugauacgagugucgccgca

SEQ ID NO: 2018245 - RNA, 19 nt, Artificial Sequence
  Description of Artificial Sequence: Synthetic oligonucleotide
acauccuuaguauggccua

SEQ ID NO: 2018246 - RNA, 19 nt, Artificial Sequence
  Description of Artificial Sequence: Synthetic oligonucleotide
caccaucuaguguguaaag

SEQ ID NO: 2018247 - RNA, 19 nt, Artificial Sequence
  Description of Artificial Sequence: Synthetic oligonucleotide
ugcuugccuucauugagau

SEQ ID NO: 2018248 - RNA, 19 nt, Artificial Sequence
  Description of Artificial Sequence: Synthetic oligonucleotide
aucugcuccgucauggcug

SEQ ID NO: 2018249 - RNA, 19 nt, Artificial Sequence
  Description of Artificial Sequence: Synthetic oligonucleotide
guuacccagccguuauggc

SEQ ID NO: 2018250 - RNA, 19 nt, Artificial Sequence
  Description of Artificial Sequence: Synthetic oligonucleotide
aacuuuuagcgggugccaa

SEQ ID NO: 2018251 - RNA, 19 nt, Artificial Sequence
  Description of Artificial Sequence: Synthetic oligonucleotide
cagacaccgagaguauucc

SEQ ID NO: 2018252 - RNA, 19 nt, Artificial Sequence
  Description of Artificial Sequence: Synthetic oligonucleotide
ccggauagcucagagagcc

SEQ ID NO: 2018253 - RNA, 19 nt, Artificial Sequence
  Description of Artificial Sequence: Synthetic oligonucleotide
cauaccuugaccagcuugu

SEQ ID NO: 2018254 - RNA, 19 nt, Artificial Sequence
  Description of Artificial Sequence: Synthetic oligonucleotide
caauagucacuugccacac

SEQ ID NO: 2018255 - RNA, 19 nt, Artificial Sequence
  Description of Artificial Sequence: Synthetic oligonucleotide
uguccccaccaucuagugu

SEQ ID NO: 2018256 - RNA, 19 nt, Artificial Sequence
  Description of Artificial Sequence: Synthetic oligonucleotide
aggcgcaguguuccauccc

SEQ ID NO: 2018257 - RNA, 19 nt, Artificial Sequence
  Description of Artificial Sequence: Synthetic oligonucleotide
gccaauagucacuugccac

SEQ ID NO: 2018258 - RNA, 19 nt, Artificial Sequence
  Description of Artificial Sequence: Synthetic oligonucleotide
cugauaacuuccugcuuca

SEQ ID NO: 2018259 - RNA, 19 nt, Artificial Sequence
  Description of Artificial Sequence: Synthetic oligonucleotide
gugccaauagucacuugcc

SEQ ID NO: 2018260 - RNA, 19 nt, Artificial Sequence
  Description of Artificial Sequence: Synthetic oligonucleotide
uguaaccggcaaacagagu

SEQ ID NO: 2018261 - RNA, 19 nt, Artificial Sequence
  Description of Artificial Sequence: Synthetic oligonucleotide
ugccacacucgaaccaggu

SEQ ID NO: 2018262 - RNA, 19 nt, Artificial Sequence
  Description of Artificial Sequence: Synthetic oligonucleotide
ggacaguguauuugcagac

SEQ ID NO: 2018263 - RNA, 19 nt, Artificial Sequence
  Description of Artificial Sequence: Synthetic oligonucleotide
acuuuuagcgggugccaau

SEQ ID NO: 2018264 - RNA, 19 nt, Artificial Sequence
  Description of Artificial Sequence: Synthetic oligonucleotide
ugauaggguugcuacuguu

SEQ ID NO: 2018265 - RNA, 19 nt, Artificial Sequence
  Description of Artificial Sequence: Synthetic oligonucleotide
aagcgcacgcugugguaug

SEQ ID NO: 2018266 - RNA, 19 nt, Artificial Sequence
  Description of Artificial Sequence: Synthetic oligonucleotide
aggugcuugccuucauuga

SEQ ID NO: 2018267 - RNA, 19 nt, Artificial Sequence
  Description of Artificial Sequence: Synthetic oligonucleotide
ucgucccugguuagcuucc

SEQ ID NO: 2018268 - RNA, 19 nt, Artificial Sequence
  Description of Artificial Sequence: Synthetic oligonucleotide
cuacaaugaucuugcccuc

SEQ ID NO: 2018269 - RNA, 19 nt, Artificial Sequence
  Description of Artificial Sequence: Synthetic oligonucleotide
uugcccuccaaaucccaaa

SEQ ID NO: 2018270 - RNA, 19 nt, Artificial Sequence
  Description of Artificial Sequence: Synthetic oligonucleotide
cugauacgagugucgccgc

SEQ ID NO: 2018271 - RNA, 19 nt, Artificial Sequence
  Description of Artificial Sequence: Synthetic oligonucleotide
accggauagcucagagagc

SEQ ID NO: 2018272 - RNA, 19 nt, Artificial Sequence
  Description of Artificial Sequence: Synthetic oligonucleotide
auguccccaccaucuagug

SEQ ID NO: 2018273 - RNA, 19 nt, Artificial Sequence
  Description of Artificial Sequence: Synthetic oligonucleotide
acagcgacgccgcggagaa

SEQ ID NO: 2018274 - RNA, 19 nt, Artificial Sequence
  Description of Artificial Sequence: Synthetic oligonucleotide
uggcgaucuguguuaccca

SEQ ID NO: 2018275 - RNA, 19 nt, Artificial Sequence
  Description of Artificial Sequence: Synthetic oligonucleotide
cagcugauacgagugucgc

SEQ ID NO: 2018276 - RNA, 19 nt, Artificial Sequence
  Description of Artificial Sequence: Synthetic oligonucleotide
auaccuugaccagcuuguc

SEQ ID NO: 2018277 - RNA, 19 nt, Artificial Sequence
  Description of Artificial Sequence: Synthetic oligonucleotide
cuugauacuggggccugug

SEQ ID NO: 2018278 - RNA, 19 nt, Artificial Sequence
  Description of Artificial Sequence: Synthetic oligonucleotide
ggagaagcggacacaagac

SEQ ID NO: 2018279 - RNA, 19 nt, Artificial Sequence
  Description of Artificial Sequence: Synthetic oligonucleotide
agacaccgagaguauucca

SEQ ID NO: 2018280 - RNA, 19 nt, Artificial Sequence
  Description of Artificial Sequence: Synthetic oligonucleotide
ccaauagucacuugccaca

SEQ ID NO: 2018281 - RNA, 19 nt, Artificial Sequence
  Description of Artificial Sequence: Synthetic oligonucleotide
cauaacuuuauggucuugu

SEQ ID NO: 2018282 - RNA, 19 nt, Artificial Sequence
  Description of Artificial Sequence: Synthetic oligonucleotide
uggucucgucccugguuag

SEQ ID NO: 2018283 - RNA, 19 nt, Artificial Sequence
  Description of Artificial Sequence: Synthetic oligonucleotide
aggagacgaugauaggguu

SEQ ID NO: 2018284 - RNA, 19 nt, Artificial Sequence
  Description of Artificial Sequence: Synthetic oligonucleotide
aucccagaggcgcaguguu

SEQ ID NO: 2018285 - RNA, 19 nt, Artificial Sequence
  Description of Artificial Sequence: Synthetic oligonucleotide
uugaccagcuugucccauc

SEQ ID NO: 2018286 - RNA, 19 nt, Artificial Sequence
  Description of Artificial Sequence: Synthetic oligonucleotide
ggcaccggauagcucagag

SEQ ID NO: 2018287 - RNA, 19 nt, Artificial Sequence
  Description of Artificial Sequence: Synthetic oligonucleotide
agcgcacgcugugguaugc

SEQ ID NO: 2018288 - RNA, 19 nt, Artificial Sequence
  Description of Artificial Sequence: Synthetic oligonucleotide
aacugcggggugguggcga

SEQ ID NO: 2018289 - RNA, 19 nt, Artificial Sequence
  Description of Artificial Sequence: Synthetic oligonucleotide
gguugucuguguaaccggc

SEQ ID NO: 2018290 - RNA, 19 nt, Artificial Sequence
  Description of Artificial Sequence: Synthetic oligonucleotide
ugguuagcuuccacaugau

SEQ ID NO: 2018291 - RNA, 19 nt, Artificial Sequence
  Description of Artificial Sequence: Synthetic oligonucleotide
guauggccuacaaaucguc

SEQ ID NO: 2018292 - RNA, 19 nt, Artificial Sequence
  Description of Artificial Sequence: Synthetic oligonucleotide
ugccgguugucggaggaga

SEQ ID NO: 2018293 - RNA, 19 nt, Artificial Sequence
  Description of Artificial Sequence: Synthetic oligonucleotide
uugcagacaccgagaguau

SEQ ID NO: 2018294 - RNA, 19 nt, Artificial Sequence
  Description of Artificial Sequence: Synthetic oligonucleotide
gucuugucucgagacgcag

SEQ ID NO: 2018295 - RNA, 19 nt, Artificial Sequence
  Description of Artificial Sequence: Synthetic oligonucleotide
ggagacgaugauaggguug

SEQ ID NO: 2018296 - RNA, 19 nt, Artificial Sequence
  Description of Artificial Sequence: Synthetic oligonucleotide
cuguucggggagaagcgga

SEQ ID NO: 2018297 - RNA, 19 nt, Artificial Sequence
  Description of Artificial Sequence: Synthetic oligonucleotide
gguugcuacuguucgggga

SEQ ID NO: 2018298 - RNA, 19 nt, Artificial Sequence
  Description of Artificial Sequence: Synthetic oligonucleotide
cauccuuaguauggccuac

SEQ ID NO: 2018299 - RNA, 19 nt, Artificial Sequence
  Description of Artificial Sequence: Synthetic oligonucleotide
ucgugguggugcccguugu

SEQ ID NO: 2018300 - RNA, 19 nt, Artificial Sequence
  Description of Artificial Sequence: Synthetic oligonucleotide
guguuacccagccguuaug

SEQ ID NO: 2018301 - RNA, 19 nt, Artificial Sequence
  Description of Artificial Sequence: Synthetic oligonucleotide
gauguccccaccaucuagu

SEQ ID NO: 2018302 - RNA, 19 nt, Artificial Sequence
  Description of Artificial Sequence: Synthetic oligonucleotide
ugcccguugugagauccca

SEQ ID NO: 2018303 - RNA, 19 nt, Artificial Sequence
  Description of Artificial Sequence: Synthetic oligonucleotide
gugaccaaugugguugguc

SEQ ID NO: 2018304 - RNA, 19 nt, Artificial Sequence
  Description of Artificial Sequence: Synthetic oligonucleotide
ggugcccguugugagaucc

SEQ ID NO: 2018305 - RNA, 19 nt, Artificial Sequence
  Description of Artificial Sequence: Synthetic oligonucleotide
ggagugaccucgaagcgca

SEQ ID NO: 2018306 - RNA, 19 nt, Artificial Sequence
  Description of Artificial Sequence: Synthetic oligonucleotide
agagggcaaacuggccauc

SEQ ID NO: 2018307 - RNA, 19 nt, Artificial Sequence
  Description of Artificial Sequence: Synthetic oligonucleotide
gacgaugauaggguugcua

SEQ ID NO: 2018308 - RNA, 19 nt, Artificial Sequence
  Description of Artificial Sequence: Synthetic oligonucleotide
ucccacgaagggucaucug

SEQ ID NO: 2018309 - RNA, 19 nt, Artificial Sequence
  Description of Artificial Sequence: Synthetic oligonucleotide
ucuugauacuggggccugu

SEQ ID NO: 2018310 - RNA, 19 nt, Artificial Sequence
  Description of Artificial Sequence: Synthetic oligonucleotide
agccacagcgacgccgcgg

SEQ ID NO: 2018311 - RNA, 19 nt, Artificial Sequence
  Description of Artificial Sequence: Synthetic oligonucleotide
auccuuaguauggccuaca

SEQ ID NO: 2018312 - RNA, 19 nt, Artificial Sequence
  Description of Artificial Sequence: Synthetic oligonucleotide
uugucucgagacgcagaca

SEQ ID NO: 2018313 - RNA, 19 nt, Artificial Sequence
  Description of Artificial Sequence: Synthetic oligonucleotide
augauguccccaccaucua

SEQ ID NO: 2018314 - RNA, 19 nt, Artificial Sequence
  Description of Artificial Sequence: Synthetic oligonucleotide
caccgagaguauuccauaa

SEQ ID NO: 2018315 - RNA, 19 nt, Artificial Sequence
  Description of Artificial Sequence: Synthetic oligonucleotide
cuuuuagcgggugccaaua

SEQ ID NO: 2018316 - RNA, 19 nt, Artificial Sequence
  Description of Artificial Sequence: Synthetic oligonucleotide
cagcgacaaggauggcacc

SEQ ID NO: 2018317 - RNA, 19 nt, Artificial Sequence
  Description of Artificial Sequence: Synthetic oligonucleotide
gggcaaacuggccaucaga

SEQ ID NO: 2018318 - RNA, 19 nt, Artificial Sequence
  Description of Artificial Sequence: Synthetic oligonucleotide
acgacaucacugacaaaau

SEQ ID NO: 2018319 - RNA, 19 nt, Artificial Sequence
  Description of Artificial Sequence: Synthetic oligonucleotide
gugguggcgaucuguguua

SEQ ID NO: 2018320 - RNA, 19 nt, Artificial Sequence
  Description of Artificial Sequence: Synthetic oligonucleotide
guuggggcugaagcacaag

SEQ ID NO: 2018321 - RNA, 19 nt, Artificial Sequence
  Description of Artificial Sequence: Synthetic oligonucleotide
caaaucgucucgugguggu

SEQ ID NO: 2018322 - RNA, 19 nt, Artificial Sequence
  Description of Artificial Sequence: Synthetic oligonucleotide
cagaggagauaacgacauc

SEQ ID NO: 2018323 - RNA, 19 nt, Artificial Sequence
  Description of Artificial Sequence: Synthetic oligonucleotide
caagacacccauucugaau

SEQ ID NO: 2018324 - RNA, 19 nt, Artificial Sequence
  Description of Artificial Sequence: Synthetic oligonucleotide
ggauagcucagagagccaa

SEQ ID NO: 2018325 - RNA, 19 nt, Artificial Sequence
  Description of Artificial Sequence: Synthetic oligonucleotide
gcagacaccgagaguauuc

SEQ ID NO: 2018326 - RNA, 19 nt, Artificial Sequence
  Description of Artificial Sequence: Synthetic oligonucleotide
aggcuacacucaguacauc

SEQ ID NO: 2018327 - RNA, 19 nt, Artificial Sequence
  Description of Artificial Sequence: Synthetic oligonucleotide
uugcuacuguucggggaga

SEQ ID NO: 2018328 - RNA, 19 nt, Artificial Sequence
  Description of Artificial Sequence: Synthetic oligonucleotide
gaacugcggggugguggcg

SEQ ID NO: 2018329 - RNA, 19 nt, Artificial Sequence
  Description of Artificial Sequence: Synthetic oligonucleotide
gaagcgcacgcugugguau

SEQ ID NO: 2018330 - RNA, 19 nt, Artificial Sequence
  Description of Artificial Sequence: Synthetic oligonucleotide
ugguggcgaucuguguuac

SEQ ID NO: 2018331 - RNA, 19 nt, Artificial Sequence
  Description of Artificial Sequence: Synthetic oligonucleotide
gguugucggaggagaaggc

SEQ ID NO: 2018332 - RNA, 19 nt, Artificial Sequence
  Description of Artificial Sequence: Synthetic oligonucleotide
agacucugucauaaacuuu

SEQ ID NO: 2018333 - RNA, 19 nt, Artificial Sequence
  Description of Artificial Sequence: Synthetic oligonucleotide
cgguugucggaggagaagg

SEQ ID NO: 2018334 - RNA, 19 nt, Artificial Sequence
  Description of Artificial Sequence: Synthetic oligonucleotide
uaacgacaucacugacaaa

SEQ ID NO: 2018335 - RNA, 19 nt, Artificial Sequence
  Description of Artificial Sequence: Synthetic oligonucleotide
cccagaggcgcaguguucc

SEQ ID NO: 2018336 - RNA, 19 nt, Artificial Sequence
  Description of Artificial Sequence: Synthetic oligonucleotide
gccuacaaaucgucucgug

SEQ ID NO: 2018337 - RNA, 19 nt, Artificial Sequence
  Description of Artificial Sequence: Synthetic oligonucleotide
gccuuugagggucccacga

SEQ ID NO: 2018338 - RNA, 19 nt, Artificial Sequence
  Description of Artificial Sequence: Synthetic oligonucleotide
agauagccagugugaccaa

SEQ ID NO: 2018339 - RNA, 19 nt, Artificial Sequence
  Description of Artificial Sequence: Synthetic oligonucleotide
cauucugaaugacucucau

SEQ ID NO: 2018340 - RNA, 19 nt, Artificial Sequence
  Description of Artificial Sequence: Synthetic oligonucleotide
guugucggaggagaaggcu

SEQ ID NO: 2018341 - RNA, 19 nt, Artificial Sequence
  Description of Artificial Sequence: Synthetic oligonucleotide
ugugaccaaugugguuggu

SEQ ID NO: 2018342 - RNA, 19 nt, Artificial Sequence
  Description of Artificial Sequence: Synthetic oligonucleotide
cacgcugugguaugccaua

SEQ ID NO: 2018343 - RNA, 19 nt, Artificial Sequence
  Description of Artificial Sequence: Synthetic oligonucleotide
auggcaccggauagcucag

SEQ ID NO: 2018344 - RNA, 19 nt, Artificial Sequence
  Description of Artificial Sequence: Synthetic oligonucleotide
ccgagaguauuccauaacu

SEQ ID NO: 2018345 - RNA, 19 nt, Artificial Sequence
  Description of Artificial Sequence: Synthetic oligonucleotide
guacacugggguggcucug

SEQ ID NO: 2018346 - RNA, 19 nt, Artificial Sequence
  Description of Artificial Sequence: Synthetic oligonucleotide
cgcaguguuccaucccagg

SEQ ID NO: 2018347 - RNA, 19 nt, Artificial Sequence
  Description of Artificial Sequence: Synthetic oligonucleotide
gccaguagcgguuggggcu

SEQ ID NO: 2018348 - RNA, 19 nt, Artificial Sequence
  Description of Artificial Sequence: Synthetic oligonucleotide
acugcggggugguggcgau

SEQ ID NO: 2018349 - RNA, 19 nt, Artificial Sequence
  Description of Artificial Sequence: Synthetic oligonucleotide
gcuacuguucggggagaag

SEQ ID NO: 2018350 - RNA, 19 nt, Artificial Sequence
  Description of Artificial Sequence: Synthetic oligonucleotide
agcuugcaguuagccaagu

SEQ ID NO: 2018351 - RNA, 19 nt, Artificial Sequence
  Description of Artificial Sequence: Synthetic oligonucleotide
cgccgcagcgacaaggaug

SEQ ID NO: 2018352 - RNA, 19 nt, Artificial Sequence
  Description of Artificial Sequence: Synthetic oligonucleotide
gguggcgaucuguguuacc

SEQ ID NO: 2018353 - RNA, 19 nt, Artificial Sequence
  Description of Artificial Sequence: Synthetic oligonucleotide
cgagacgcagacagaauca

SEQ ID NO: 2018354 - RNA, 19 nt, Artificial Sequence
  Description of Artificial Sequence: Synthetic oligonucleotide
gccacagcgacgccgcgga

SEQ ID NO: 2018355 - RNA, 19 nt, Artificial Sequence
  Description of Artificial Sequence: Synthetic oligonucleotide
ggugguggcgaucuguguu

SEQ ID NO: 2018356 - RNA, 19 nt, Artificial Sequence
  Description of Artificial Sequence: Synthetic oligonucleotide
gguacacugggguggcucu

SEQ ID NO: 2018357 - RNA, 19 nt, Artificial Sequence
  Description of Artificial Sequence: Synthetic oligonucleotide
gcaccggauagcucagaga

SEQ ID NO: 2018358 - RNA, 19 nt, Artificial Sequence
  Description of Artificial Sequence: Synthetic oligonucleotide
gauagccagugugaccaau

SEQ ID NO: 2018359 - RNA, 19 nt, Artificial Sequence
  Description of Artificial Sequence: Synthetic oligonucleotide
cugccgguugucggaggag

SEQ ID NO: 2018360 - RNA, 19 nt, Artificial Sequence
  Description of Artificial Sequence: Synthetic oligonucleotide
guuggucucgucccugguu

SEQ ID NO: 2018361 - RNA, 19 nt, Artificial Sequence
  Description of Artificial Sequence: Synthetic oligonucleotide
gucucgucccugguuagcu

SEQ ID NO: 2018362 - RNA, 19 nt, Artificial Sequence
  Description of Artificial Sequence: Synthetic oligonucleotide
gcacagagccaguagcggu

SEQ ID NO: 2018363 - RNA, 19 nt, Artificial Sequence
  Description of Artificial Sequence: Synthetic oligonucleotide
ggagccugagagggcaaac

SEQ ID NO: 2018364 - RNA, 19 nt, Artificial Sequence
  Description of Artificial Sequence: Synthetic oligonucleotide
agacgaugauaggguugcu

SEQ ID NO: 2018365 - RNA, 19 nt, Artificial Sequence
  Description of Artificial Sequence: Synthetic oligonucleotide
ugggaacugcgggguggug

SEQ ID NO: 2018366 - RNA, 19 nt, Artificial Sequence
  Description of Artificial Sequence: Synthetic oligonucleotide
cgagugucgccgcagcgac

SEQ ID NO: 2018367 - RNA, 19 nt, Artificial Sequence
  Description of Artificial Sequence: Synthetic oligonucleotide
gcuacacucaguacauccu

SEQ ID NO: 2018368 - RNA, 19 nt, Artificial Sequence
  Description of Artificial Sequence: Synthetic oligonucleotide
ggucucgucccugguuagc

SEQ ID NO: 2018369 - RNA, 19 nt, Artificial Sequence
  Description of Artificial Sequence: Synthetic oligonucleotide
cucgaaccagguugucugu

SEQ ID NO: 2018370 - RNA, 19 nt, Artificial Sequence
  Description of Artificial Sequence: Synthetic oligonucleotide
uggcaccggauagcucaga

SEQ ID NO: 2018371 - RNA, 19 nt, Artificial Sequence
  Description of Artificial Sequence: Synthetic oligonucleotide
guggugcccguugugagau

SEQ ID NO: 2018372 - RNA, 19 nt, Artificial Sequence
  Description of Artificial Sequence: Synthetic oligonucleotide
gucucgagacgcagacaga

SEQ ID NO: 2018373 - RNA, 19 nt, Artificial Sequence
  Description of Artificial Sequence: Synthetic oligonucleotide
gugcccguugugagauccc

SEQ ID NO: 2018374 - RNA, 19 nt, Artificial Sequence
  Description of Artificial Sequence: Synthetic oligonucleotide
cuguguuacccagccguua

SEQ ID NO: 2018375 - RNA, 19 nt, Artificial Sequence
  Description of Artificial Sequence: Synthetic oligonucleotide
ccaccaucuaguguguaaa

SEQ ID NO: 2018376 - RNA, 19 nt, Artificial Sequence
  Description of Artificial Sequence: Synthetic oligonucleotide
ucucgugguggugcccguu

SEQ ID NO: 2018377 - RNA, 19 nt, Artificial Sequence
  Description of Artificial Sequence: Synthetic oligonucleotide
cagccguuauggccuuuga

SEQ ID NO: 2018378 - RNA, 19 nt, Artificial Sequence
  Description of Artificial Sequence: Synthetic oligonucleotide
cccaccaucuaguguguaa

SEQ ID NO: 2018379 - RNA, 19 nt, Artificial Sequence
  Description of Artificial Sequence: Synthetic oligonucleotide
gagugaccucgaagcgcac

SEQ ID NO: 2018380 - RNA, 19 nt, Artificial Sequence
  Description of Artificial Sequence: Synthetic oligonucleotide
uggugcccguugugagauc

SEQ ID NO: 2018381 - RNA, 19 nt, Artificial Sequence
  Description of Artificial Sequence: Synthetic oligonucleotide
ccgguugucggaggagaag

SEQ ID NO: 2018382 - RNA, 19 nt, Artificial Sequence
  Description of Artificial Sequence: Synthetic oligonucleotide
ccagccguuauggccuuug

SEQ ID NO: 2018383 - RNA, 19 nt, Artificial Sequence
  Description of Artificial Sequence: Synthetic oligonucleotide
cucgagacgcagacagaau

SEQ ID NO: 2018384 - RNA, 19 nt, Artificial Sequence
  Description of Artificial Sequence: Synthetic oligonucleotide
ccgucauggcugcagcuga

SEQ ID NO: 2018385 - RNA, 19 nt, Artificial Sequence
  Description of Artificial Sequence: Synthetic oligonucleotide
ggucccacgaagggucauc

SEQ ID NO: 2018386 - RNA, 19 nt, Artificial Sequence
  Description of Artificial Sequence: Synthetic oligonucleotide
gagugucgccgcagcgaca

SEQ ID NO: 2018387 - RNA, 19 nt, Artificial Sequence
  Description of Artificial Sequence: Synthetic oligonucleotide
gugucgccgcagcgacaag

SEQ ID NO: 2018388 - RNA, 19 nt, Artificial Sequence
  Description of Artificial Sequence: Synthetic oligonucleotide
gugguaugccauaguuggu

SEQ ID NO: 2018389 - RNA, 19 nt, Artificial Sequence
  Description of Artificial Sequence: Synthetic oligonucleotide
gcgcaguguuccaucccag

SEQ ID NO: 2018390 - RNA, 19 nt, Artificial Sequence
  Description of Artificial Sequence: Synthetic oligonucleotide
agaccaugccagggaggua

SEQ ID NO: 2018391 - RNA, 19 nt, Artificial Sequence
  Description of Artificial Sequence: Synthetic oligonucleotide
cuaguguguaaaggugcuu

SEQ ID NO: 2018392 - RNA, 19 nt, Artificial Sequence
  Description of Artificial Sequence: Synthetic oligonucleotide
cgagaguauuccauaacuu

SEQ ID NO: 2018393 - RNA, 19 nt, Artificial Sequence
  Description of Artificial Sequence: Synthetic oligonucleotide
cacugggguggcucugccu

SEQ ID NO: 2018394 - RNA, 19 nt, Artificial Sequence
  Description of Artificial Sequence: Synthetic oligonucleotide
cgcagcgacaaggauggca

SEQ ID NO: 2018395 - RNA, 19 nt, Artificial Sequence
  Description of Artificial Sequence: Synthetic oligonucleotide
gcgcacgcugugguaugcc

SEQ ID NO: 2018396 - RNA, 19 nt, Artificial Sequence
  Description of Artificial Sequence: Synthetic oligonucleotide
ggccuacaaaucgucucgu

SEQ ID NO: 2018397 - RNA, 19 nt, Artificial Sequence
  Description of Artificial Sequence: Synthetic oligonucleotide
gcgggugccaauagucacu

SEQ ID NO: 2018398 - RNA, 19 nt, Artificial Sequence
  Description of Artificial Sequence: Synthetic oligonucleotide
gcuugcaguuagccaaguu

SEQ ID NO: 2018399 - RNA, 19 nt, Artificial Sequence
  Description of Artificial Sequence: Synthetic oligonucleotide
cgaugauaggguugcuacu

SEQ ID NO: 2018400 - RNA, 19 nt, Artificial Sequence
  Description of Artificial Sequence: Synthetic oligonucleotide
gccgguugucggaggagaa

SEQ ID NO: 2018401 - RNA, 19 nt, Artificial Sequence
  Description of Artificial Sequence: Synthetic oligonucleotide
cagaggcgcaguguuccau

SEQ ID NO: 2018402 - RNA, 19 nt, Artificial Sequence
  Description of Artificial Sequence: Synthetic oligonucleotide
gcacgcugugguaugccau

SEQ ID NO: 2018403 - RNA, 19 nt, Artificial Sequence
  Description of Artificial Sequence: Synthetic oligonucleotide
cggauagcucagagagcca

SEQ ID NO: 2018404 - RNA, 19 nt, Artificial Sequence
  Description of Artificial Sequence: Synthetic oligonucleotide
cgucccugguuagcuucca

SEQ ID NO: 2018405 - RNA, 19 nt, Artificial Sequence
  Description of Artificial Sequence: Synthetic oligonucleotide
ccgcagcgacaaggauggc

SEQ ID NO: 2018406 - RNA, 19 nt, Artificial Sequence
  Description of Artificial Sequence: Synthetic oligonucleotide
gggucccacgaagggucau

SEQ ID NO: 2018407 - RNA, 19 nt, Artificial Sequence
  Description of Artificial Sequence: Synthetic oligonucleotide
cagcgacgccgcggagaaa

SEQ ID NO: 2018408 - RNA, 19 nt, Artificial Sequence
  Description of Artificial Sequence: Synthetic oligonucleotide
cccagccguuauggccuuu

SEQ ID NO: 2018409 - RNA, 19 nt, Artificial Sequence
  Description of Artificial Sequence: Synthetic oligonucleotide
auaaauaugcauuagaaca

SEQ ID NO: 2018410 - RNA, 19 nt, Artificial Sequence
  Description of Artificial Sequence: Synthetic oligonucleotide
gauaacauaagcuaagggc

SEQ ID NO: 2018411 - RNA, 19 nt, Artificial Sequence
  Description of Artificial Sequence: Synthetic oligonucleotide
uuuucucuuauaaauaugc

SEQ ID NO: 2018412 - RNA, 19 nt, Artificial Sequence
  Description of Artificial Sequence: Synthetic oligonucleotide
acauuugacaaugagagac

SEQ ID NO: 2018413 - RNA, 19 nt, Artificial Sequence
  Description of Artificial Sequence: Synthetic oligonucleotide
aucugugugauacagaaag

SEQ ID NO: 2018414 - RNA, 19 nt, Artificial Sequence
  Description of Artificial Sequence: Synthetic oligonucleotide
aaaguaacagauguguccg

SEQ ID NO: 2018415 - RNA, 19 nt, Artificial Sequence
  Description of Artificial Sequence: Synthetic oligonucleotide
uuuauugggaauaaauacu

SEQ ID NO: 2018416 - RNA, 19 nt, Artificial Sequence
  Description of Artificial Sequence: Synthetic oligonucleotide
uuugauaacauaagcuaag

SEQ ID NO: 2018417 - RNA, 19 nt, Artificial Sequence
  Description of Artificial Sequence: Synthetic oligonucleotide
uauggcaugguguugacag

SEQ ID NO: 2018418 - RNA, 19 nt, Artificial Sequence
  Description of Artificial Sequence: Synthetic oligonucleotide
aguagcucaaccuucaucu

SEQ ID NO: 2018419 - RNA, 19 nt, Artificial Sequence
  Description of Artificial Sequence: Synthetic oligonucleotide
uaugcauuagaacauuuga

SEQ ID NO: 2018420 - RNA, 19 nt, Artificial Sequence
  Description of Artificial Sequence: Synthetic oligonucleotide
agacauuugacaaugagag

SEQ ID NO: 2018421 - RNA, 19 nt, Artificial Sequence
  Description of Artificial Sequence: Synthetic oligonucleotide
uggauuaacuuaaaagcag

SEQ ID NO: 2018422 - RNA, 19 nt, Artificial Sequence
  Description of Artificial Sequence: Synthetic oligonucleotide
gacuuugugagucaaggcc

SEQ ID NO: 2018423 - RNA, 19 nt, Artificial Sequence
  Description of Artificial Sequence: Synthetic oligonucleotide
caaaguaacagaugugucc

SEQ ID NO: 2018424 - RNA, 19 nt, Artificial Sequence
  Description of Artificial Sequence: Synthetic oligonucleotide
ugagcaaccagacagucac

SEQ ID NO: 2018425 - RNA, 19 nt, Artificial Sequence
  Description of Artificial Sequence: Synthetic oligonucleotide
guuuaugguguacucaugg

SEQ ID NO: 2018426 - RNA, 19 nt, Artificial Sequence
  Description of Artificial Sequence: Synthetic oligonucleotide
cucuggauuaacuuaaaag

SEQ ID NO: 2018427 - RNA, 19 nt, Artificial Sequence
  Description of Artificial Sequence: Synthetic oligonucleotide
uuaugguguacucauggcc

SEQ ID NO: 2018428 - RNA, 19 nt, Artificial Sequence
  Description of Artificial Sequence: Synthetic oligonucleotide
gcuucuauaaccuucuggg

SEQ ID NO: 2018429 - RNA, 19 nt, Artificial Sequence
  Description of Artificial Sequence: Synthetic oligonucleotide
uagaacuucccacagccag

SEQ ID NO: 2018430 - RNA, 19 nt, Artificial Sequence
  Description of Artificial Sequence: Synthetic oligonucleotide
agacuuuugugucuggagg

SEQ ID NO: 2018431 - RNA, 19 nt, Artificial Sequence
  Description of Artificial Sequence: Synthetic oligonucleotide
augucgugcaaacuuaagg

SEQ ID NO: 2018432 - RNA, 19 nt, Artificial Sequence
  Description of Artificial Sequence: Synthetic oligonucleotide
guaguugucagucagggca

SEQ ID NO: 2018433 - RNA, 19 nt, Artificial Sequence
  Description of Artificial Sequence: Synthetic oligonucleotide
cuuaaaagcagacuagauc

SEQ ID NO: 2018434 - RNA, 19 nt, Artificial Sequence
  Description of Artificial Sequence: Synthetic oligonucleotide
ugaguggugagcacugugg

SEQ ID NO: 2018435 - RNA, 19 nt, Artificial Sequence
  Description of Artificial Sequence: Synthetic oligonucleotide
uguuggguuccacaugucg

SEQ ID NO: 2018436 - RNA, 19 nt, Artificial Sequence
  Description of Artificial Sequence: Synthetic oligonucleotide
auaacauaagcuaagggcu

SEQ ID NO: 2018437 - RNA, 19 nt, Artificial Sequence
  Description of Artificial Sequence: Synthetic oligonucleotide
uuaaaaguucccaucccca

SEQ ID NO: 2018438 - RNA, 19 nt, Artificial Sequence
  Description of Artificial Sequence: Synthetic oligonucleotide
ugagucaaggccccaaugc

SEQ ID NO: 2018439 - RNA, 19 nt, Artificial Sequence
  Description of Artificial Sequence: Synthetic oligonucleotide
auuagaacauuugauaaca

SEQ ID NO: 2018440 - RNA, 19 nt, Artificial Sequence
  Description of Artificial Sequence: Synthetic oligonucleotide
ugucgugcaaacuuaaggu

SEQ ID NO: 2018441 - RNA, 19 nt, Artificial Sequence
  Description of Artificial Sequence: Synthetic oligonucleotide
auaggugaacuccucugcc

SEQ ID NO: 2018442 - RNA, 19 nt, Artificial Sequence
  Description of Artificial Sequence: Synthetic oligonucleotide
uuauugggaauaaauacuu

SEQ ID NO: 2018443 - RNA, 19 nt, Artificial Sequence
  Description of Artificial Sequence: Synthetic oligonucleotide
acuuugugagucaaggccc

SEQ ID NO: 2018444 - RNA, 19 nt, Artificial Sequence
  Description of Artificial Sequence: Synthetic oligonucleotide
acagucacuuaaaaguucc

SEQ ID NO: 2018445 - RNA, 19 nt, Artificial Sequence
  Description of Artificial Sequence: Synthetic oligonucleotide
ugcauuagaacauuugaua

SEQ ID NO: 2018446 - RNA, 19 nt, Artificial Sequence
  Description of Artificial Sequence: Synthetic oligonucleotide
ugauacagaaagauuccca

SEQ ID NO: 2018447 - RNA, 19 nt, Artificial Sequence
  Description of Artificial Sequence: Synthetic oligonucleotide
uuuugugucuggaggaagc

SEQ ID NO: 2018448 - RNA, 19 nt, Artificial Sequence
  Description of Artificial Sequence: Synthetic oligonucleotide
ucgugcaaacuuaagguug

SEQ ID NO: 2018449 - RNA, 19 nt, Artificial Sequence
  Description of Artificial Sequence: Synthetic oligonucleotide
auuguuggguuccacaugu

SEQ ID NO: 2018450 - RNA, 19 nt, Artificial Sequence
  Description of Artificial Sequence: Synthetic oligonucleotide
aaagcagacuagauccugc

SEQ ID NO: 2018451 - RNA, 19 nt, Artificial Sequence
  Description of Artificial Sequence: Synthetic oligonucleotide
uugauaacauaagcuaagg

SEQ ID NO: 2018452 - RNA, 19 nt, Artificial Sequence
  Description of Artificial Sequence: Synthetic oligonucleotide
agaacauuugauaacauaa

SEQ ID NO: 2018453 - RNA, 19 nt, Artificial Sequence
  Description of Artificial Sequence: Synthetic oligonucleotide
ucucauucccaccagcaug

SEQ ID NO: 2018454 - RNA, 19 nt, Artificial Sequence
  Description of Artificial Sequence: Synthetic oligonucleotide
uugacaaugagagacccca

SEQ ID NO: 2018455 - RNA, 19 nt, Artificial Sequence
  Description of Artificial Sequence: Synthetic oligonucleotide
uuauaggugaacuccucug

SEQ ID NO: 2018456 - RNA, 19 nt, Artificial Sequence
  Description of Artificial Sequence: Synthetic oligonucleotide
aaaaguucccauccccaug

SEQ ID NO: 2018457 - RNA, 19 nt, Artificial Sequence
  Description of Artificial Sequence: Synthetic oligonucleotide
agucagggcaggcaguagc

SEQ ID NO: 2018458 - RNA, 19 nt, Artificial Sequence
  Description of Artificial Sequence: Synthetic oligonucleotide
caagacuucgagcagugcc

SEQ ID NO: 2018459 - RNA, 19 nt, Artificial Sequence
  Description of Artificial Sequence: Synthetic oligonucleotide
cucauucccaccagcaugg

SEQ ID NO: 2018460 - RNA, 19 nt, Artificial Sequence
  Description of Artificial Sequence: Synthetic oligonucleotide
aacugguccuucucccugc

SEQ ID NO: 2018461 - RNA, 19 nt, Artificial Sequence
  Description of Artificial Sequence: Synthetic oligonucleotide
cauuagaacauuugauaac

SEQ ID NO: 2018462 - RNA, 19 nt, Artificial Sequence
  Description of Artificial Sequence: Synthetic oligonucleotide
acagacauuugacaaugag

SEQ ID NO: 2018463 - RNA, 19 nt, Artificial Sequence
  Description of Artificial Sequence: Synthetic oligonucleotide
ucuuauaaauaugcauuag

SEQ ID NO: 2018464 - RNA, 19 nt, Artificial Sequence
  Description of Artificial Sequence: Synthetic oligonucleotide
aacuuaaaagcagacuaga

SEQ ID NO: 2018465 - RNA, 19 nt, Artificial Sequence
  Description of Artificial Sequence: Synthetic oligonucleotide
gagucaaggccccaaugcg

SEQ ID NO: 2018466 - RNA, 19 nt, Artificial Sequence
  Description of Artificial Sequence: Synthetic oligonucleotide
acauuugauaacauaagcu

SEQ ID NO: 2018467 - RNA, 19 nt, Artificial Sequence
  Description of Artificial Sequence: Synthetic oligonucleotide
ugucuugcuccacagucag

SEQ ID NO: 2018468 - RNA, 19 nt, Artificial Sequence
  Description of Artificial Sequence: Synthetic oligonucleotide
accagacuugcucacaaag

SEQ ID NO: 2018469 - RNA, 19 nt, Artificial Sequence
  Description of Artificial Sequence: Synthetic oligonucleotide
cuggauuaacuuaaaagca

SEQ ID NO: 2018470 - RNA, 19 nt, Artificial Sequence
  Description of Artificial Sequence: Synthetic oligonucleotide
aucaccuccauaaaccuuc

SEQ ID NO: 2018471 - RNA, 19 nt, Artificial Sequence
  Description of Artificial Sequence: Synthetic oligonucleotide
gacuagauccugcaugagc

SEQ ID NO: 2018472 - RNA, 19 nt, Artificial Sequence
  Description of Artificial Sequence: Synthetic oligonucleotide
cauuugacaaugagagacc

SEQ ID NO: 2018473 - RNA, 19 nt, Artificial Sequence
  Description of Artificial Sequence: Synthetic oligonucleotide
ugacagacauuugacaaug

SEQ ID NO: 2018474 - RNA, 19 nt, Artificial Sequence
  Description of Artificial Sequence: Synthetic oligonucleotide
ugcucacaaaguaacagau

SEQ ID NO: 2018475 - RNA, 19 nt, Artificial Sequence
  Description of Artificial Sequence: Synthetic oligonucleotide
cuugucuugcuccacaguc

SEQ ID NO: 2018476 - RNA, 19 nt, Artificial Sequence
  Description of Artificial Sequence: Synthetic oligonucleotide
guugacagacauuugacaa

SEQ ID NO: 2018477 - RNA, 19 nt, Artificial Sequence
  Description of Artificial Sequence: Synthetic oligonucleotide
acagcauacuucuccuugg

SEQ ID NO: 2018478 - RNA, 19 nt, Artificial Sequence
  Description of Artificial Sequence: Synthetic oligonucleotide
cuucuauaaccuucugggg

SEQ ID NO: 2018479 - RNA, 19 nt, Artificial Sequence
  Description of Artificial Sequence: Synthetic oligonucleotide
agucccuucauagaacuuc

SEQ ID NO: 2018480 - RNA, 19 nt, Artificial Sequence
  Description of Artificial Sequence: Synthetic oligonucleotide
aguucccauccccaugugc

SEQ ID NO: 2018481 - RNA, 19 nt, Artificial Sequence
  Description of Artificial Sequence: Synthetic oligonucleotide
uguacucauggccacagua

SEQ ID NO: 2018482 - RNA, 19 nt, Artificial Sequence
  Description of Artificial Sequence: Synthetic oligonucleotide
aacaacgugucaccuguga

SEQ ID NO: 2018483 - RNA, 19 nt, Artificial Sequence
  Description of Artificial Sequence: Synthetic oligonucleotide
aaguaacagauguguccgg

SEQ ID NO: 2018484 - RNA, 19 nt, Artificial Sequence
  Description of Artificial Sequence: Synthetic oligonucleotide
aaaagcagacuagauccug

SEQ ID NO: 2018485 - RNA, 19 nt, Artificial Sequence
  Description of Artificial Sequence: Synthetic oligonucleotide
ccuccauaaaccuucagcc

SEQ ID NO: 2018486 - RNA, 19 nt, Artificial Sequence
  Description of Artificial Sequence: Synthetic oligonucleotide
acuagauccugcaugagca

SEQ ID NO: 2018487 - RNA, 19 nt, Artificial Sequence
  Description of Artificial Sequence: Synthetic oligonucleotide
uccccaacagcauacuucu

SEQ ID NO: 2018488 - RNA, 19 nt, Artificial Sequence
  Description of Artificial Sequence: Synthetic oligonucleotide
ucauagaacuucccacagc

SEQ ID NO: 2018489 - RNA, 19 nt, Artificial Sequence
  Description of Artificial Sequence: Synthetic oligonucleotide
uacucauggccacaguaga

SEQ ID NO: 2018490 - RNA, 19 nt, Artificial Sequence
  Description of Artificial Sequence: Synthetic oligonucleotide
uuugacaaugagagacccc

SEQ ID NO: 2018491 - RNA, 19 nt, Artificial Sequence
  Description of Artificial Sequence: Synthetic oligonucleotide
aaguauggcaugguguuga

SEQ ID NO: 2018492 - RNA, 19 nt, Artificial Sequence
  Description of Artificial Sequence: Synthetic oligonucleotide
uagcucaaccuucaucuug

SEQ ID NO: 2018493 - RNA, 19 nt, Artificial Sequence
  Description of Artificial Sequence: Synthetic oligonucleotide
aagcuaagggcucuggauu

SEQ ID NO: 2018494 - RNA, 19 nt, Artificial Sequence
  Description of Artificial Sequence: Synthetic oligonucleotide
ucuauaaccuucugggguu

SEQ ID NO: 2018495 - RNA, 19 nt, Artificial Sequence
  Description of Artificial Sequence: Synthetic oligonucleotide
uuguacaucucgucugcag

SEQ ID NO: 2018496 - RNA, 19 nt, Artificial Sequence
  Description of Artificial Sequence: Synthetic oligonucleotide
uaacauaagcuaagggcuc

SEQ ID NO: 2018497 - RNA, 19 nt, Artificial Sequence
  Description of Artificial Sequence: Synthetic oligonucleotide
uaagcuaagggcucuggau

SEQ ID NO: 2018498 - RNA, 19 nt, Artificial Sequence
  Description of Artificial Sequence: Synthetic oligonucleotide
cacaguagacuuuuguguc

SEQ ID NO: 2018499 - RNA, 19 nt, Artificial Sequence
  Description of Artificial Sequence: Synthetic oligonucleotide
uaguugucagucagggcag

SEQ ID NO: 2018500 - RNA, 19 nt, Artificial Sequence
  Description of Artificial Sequence: Synthetic oligonucleotide
ugagagaccccaccugcag

SEQ ID NO: 2018501 - RNA, 19 nt, Artificial Sequence
  Description of Artificial Sequence: Synthetic oligonucleotide
ucgagcagugccuuguaca

SEQ ID NO: 2018502 - RNA, 19 nt, Artificial Sequence
  Description of Artificial Sequence: Synthetic oligonucleotide
acucccagcgcugacaguc

SEQ ID NO: 2018503 - RNA, 19 nt, Artificial Sequence
  Description of Artificial Sequence: Synthetic oligonucleotide
cuccauaaaccuucagccc

SEQ ID NO: 2018504 - RNA, 19 nt, Artificial Sequence
  Description of Artificial Sequence: Synthetic oligonucleotide
acaaacaacgugucaccug

SEQ ID NO: 2018505 - RNA, 19 nt, Artificial Sequence
  Description of Artificial Sequence: Synthetic oligonucleotide
agggguuauaggugaacuc

SEQ ID NO: 2018506 - RNA, 19 nt, Artificial Sequence
  Description of Artificial Sequence: Synthetic oligonucleotide
gacuuuugugucuggagga

SEQ ID NO: 2018507 - RNA, 19 nt, Artificial Sequence
  Description of Artificial Sequence: Synthetic oligonucleotide
auuugauaacauaagcuaa

SEQ ID NO: 2018508 - RNA, 19 nt, Artificial Sequence
  Description of Artificial Sequence: Synthetic oligonucleotide
cagacauuugacaaugaga

SEQ ID NO: 2018509 - RNA, 19 nt, Artificial Sequence
  Description of Artificial Sequence: Synthetic oligonucleotide
cuucauagaacuucccaca

SEQ ID NO: 2018510 - RNA, 19 nt, Artificial Sequence
  Description of Artificial Sequence: Synthetic oligonucleotide
acaaaguaacagauguguc

SEQ ID NO: 2018511 - RNA, 19 nt, Artificial Sequence
  Description of Artificial Sequence: Synthetic oligonucleotide
uuggguuccacaugucgug

SEQ ID NO: 2018512 - RNA, 19 nt, Artificial Sequence
  Description of Artificial Sequence: Synthetic oligonucleotide
aagggguuauaggugaacu

SEQ ID NO: 2018513 - RNA, 19 nt, Artificial Sequence
  Description of Artificial Sequence: Synthetic oligonucleotide
uguuuaugguguacucaug

SEQ ID NO: 2018514 - RNA, 19 nt, Artificial Sequence
  Description of Artificial Sequence: Synthetic oligonucleotide
ugccuuguacaucucgucu

SEQ ID NO: 2018515 - RNA, 19 nt, Artificial Sequence
  Description of Artificial Sequence: Synthetic oligonucleotide
aacaaacaacgugucaccu

SEQ ID NO: 2018516 - RNA, 19 nt, Artificial Sequence
  Description of Artificial Sequence: Synthetic oligonucleotide
aagcagacuagauccugca

SEQ ID NO: 2018517 - RNA, 19 nt, Artificial Sequence
  Description of Artificial Sequence: Synthetic oligonucleotide
agcauggucccaguggugg

SEQ ID NO: 2018518 - RNA, 19 nt, Artificial Sequence
  Description of Artificial Sequence: Synthetic oligonucleotide
uugucuugcuccacaguca

SEQ ID NO: 2018519 - RNA, 19 nt, Artificial Sequence
  Description of Artificial Sequence: Synthetic oligonucleotide
aaugcggucaucaccucca

SEQ ID NO: 2018520 - RNA, 19 nt, Artificial Sequence
  Description of Artificial Sequence: Synthetic oligonucleotide
aaauaugcauuagaacauu

SEQ ID NO: 2018521 - RNA, 19 nt, Artificial Sequence
  Description of Artificial Sequence: Synthetic oligonucleotide
guacauguaguugucaguc

SEQ ID NO: 2018522 - RNA, 19 nt, Artificial Sequence
  Description of Artificial Sequence: Synthetic oligonucleotide
gaaagauucccagcagggc

SEQ ID NO: 2018523 - RNA, 19 nt, Artificial Sequence
  Description of Artificial Sequence: Synthetic oligonucleotide
uaaaaguucccauccccau

SEQ ID NO: 2018524 - RNA, 19 nt, Artificial Sequence
  Description of Artificial Sequence: Synthetic oligonucleotide
caacgugucaccugugaac

SEQ ID NO: 2018525 - RNA, 19 nt, Artificial Sequence
  Description of Artificial Sequence: Synthetic oligonucleotide
aagacuucgagcagugccu

SEQ ID NO: 2018526 - RNA, 19 nt, Artificial Sequence
  Description of Artificial Sequence: Synthetic oligonucleotide
aacauaagcuaagggcucu

SEQ ID NO: 2018527 - RNA, 19 nt, Artificial Sequence
  Description of Artificial Sequence: Synthetic oligonucleotide
ccugaaaucugugugauac

SEQ ID NO: 2018528 - RNA, 19 nt, Artificial Sequence
  Description of Artificial Sequence: Synthetic oligonucleotide
aaccuucugggguugcacu

SEQ ID NO: 2018529 - RNA, 19 nt, Artificial Sequence
  Description of Artificial Sequence: Synthetic oligonucleotide
uugacagacauuugacaau

SEQ ID NO: 2018530 - RNA, 19 nt, Artificial Sequence
  Description of Artificial Sequence: Synthetic oligonucleotide
auaugcauuagaacauuug

SEQ ID NO: 2018531 - RNA, 19 nt, Artificial Sequence
  Description of Artificial Sequence: Synthetic oligonucleotide
uggucagcuuuacauggug

SEQ ID NO: 2018532 - RNA, 19 nt, Artificial Sequence
  Description of Artificial Sequence: Synthetic oligonucleotide
aagggcucuggauuaacuu

SEQ ID NO: 2018533 - RNA, 19 nt, Artificial Sequence
  Description of Artificial Sequence: Synthetic oligonucleotide
guucccauccccaugugcc

SEQ ID NO: 2018534 - RNA, 19 nt, Artificial Sequence
  Description of Artificial Sequence: Synthetic oligonucleotide
agagaccccaccugcagug

SEQ ID NO: 2018535 - RNA, 19 nt, Artificial Sequence
  Description of Artificial Sequence: Synthetic oligonucleotide
auaagcuaagggcucugga

SEQ ID NO: 2018536 - RNA, 19 nt, Artificial Sequence
  Description of Artificial Sequence: Synthetic oligonucleotide
gcugacagucuccagaggc

SEQ ID NO: 2018537 - RNA, 19 nt, Artificial Sequence
  Description of Artificial Sequence: Synthetic oligonucleotide
uguaguugucagucagggc

SEQ ID NO: 2018538 - RNA, 19 nt, Artificial Sequence
  Description of Artificial Sequence: Synthetic oligonucleotide
acaguagacuuuugugucu

SEQ ID NO: 2018539 - RNA, 19 nt, Artificial Sequence
  Description of Artificial Sequence: Synthetic oligonucleotide
uaagggcucuggauuaacu

SEQ ID NO: 2018540 - RNA, 19 nt, Artificial Sequence
  Description of Artificial Sequence: Synthetic oligonucleotide
agucacuuaaaaguuccca

SEQ ID NO: 2018541 - RNA, 19 nt, Artificial Sequence
  Description of Artificial Sequence: Synthetic oligonucleotide
agcgcugacagucuccaga

SEQ ID NO: 2018542 - RNA, 19 nt, Artificial Sequence
  Description of Artificial Sequence: Synthetic oligonucleotide
aguauggcaugguguugac

SEQ ID NO: 2018543 - RNA, 19 nt, Artificial Sequence
  Description of Artificial Sequence: Synthetic oligonucleotide
gcaacaaacaacgugucac

SEQ ID NO: 2018544 - RNA, 19 nt, Artificial Sequence
  Description of Artificial Sequence: Synthetic oligonucleotide
uuugugucuggaggaagcc

SEQ ID NO: 2018545 - RNA, 19 nt, Artificial Sequence
  Description of Artificial Sequence: Synthetic oligonucleotide
uauugggaauaaauacuuu

SEQ ID NO: 2018546 - RNA, 19 nt, Artificial Sequence
  Description of Artificial Sequence: Synthetic oligonucleotide
uugugucuggaggaagccg

SEQ ID NO: 2018547 - RNA, 19 nt, Artificial Sequence
  Description of Artificial Sequence: Synthetic oligonucleotide
cuccccaacagcauacuuc

SEQ ID NO: 2018548 - RNA, 19 nt, Artificial Sequence
  Description of Artificial Sequence: Synthetic oligonucleotide
cucuuauaaauaugcauua

SEQ ID NO: 2018549 - RNA, 19 nt, Artificial Sequence
  Description of Artificial Sequence: Synthetic oligonucleotide
gcagacuagauccugcaug

SEQ ID NO: 2018550 - RNA, 19 nt, Artificial Sequence
  Description of Artificial Sequence: Synthetic oligonucleotide
gcauuagaacauuugauaa

SEQ ID NO: 2018551 - RNA, 19 nt, Artificial Sequence
  Description of Artificial Sequence: Synthetic oligonucleotide
aauaugcauuagaacauuu

SEQ ID NO: 2018552 - RNA, 19 nt, Artificial Sequence
  Description of Artificial Sequence: Synthetic oligonucleotide
agggcucugagcuaccaga

SEQ ID NO: 2018553 - RNA, 19 nt, Artificial Sequence
  Description of Artificial Sequence: Synthetic oligonucleotide
cuucacucucaugaagggg

SEQ ID NO: 2018554 - RNA, 19 nt, Artificial Sequence
  Description of Artificial Sequence: Synthetic oligonucleotide
gaacugguccuucucccug

SEQ ID NO: 2018555 - RNA, 19 nt, Artificial Sequence
  Description of Artificial Sequence: Synthetic oligonucleotide
ugugugacuuugugaguca

SEQ ID NO: 2018556 - RNA, 19 nt, Artificial Sequence
  Description of Artificial Sequence: Synthetic oligonucleotide
cagacuagauccugcauga

SEQ ID NO: 2018557 - RNA, 19 nt, Artificial Sequence
  Description of Artificial Sequence: Synthetic oligonucleotide
cuguggucagcuuuacaug

SEQ ID NO: 2018558 - RNA, 19 nt, Artificial Sequence
  Description of Artificial Sequence: Synthetic oligonucleotide
gugauacagaaagauuccc

SEQ ID NO: 2018559 - RNA, 19 nt, Artificial Sequence
  Description of Artificial Sequence: Synthetic oligonucleotide
gggguuauaggugaacucc

SEQ ID NO: 2018560 - RNA, 19 nt, Artificial Sequence
  Description of Artificial Sequence: Synthetic oligonucleotide
ccuucauagaacuucccac

SEQ ID NO: 2018561 - RNA, 19 nt, Artificial Sequence
  Description of Artificial Sequence: Synthetic oligonucleotide
aagauucccagcagggccu

SEQ ID NO: 2018562 - RNA, 19 nt, Artificial Sequence
  Description of Artificial Sequence: Synthetic oligonucleotide
ugugaacacugcagagggc

SEQ ID NO: 2018563 - RNA, 19 nt, Artificial Sequence
  Description of Artificial Sequence: Synthetic oligonucleotide
ucugagcuaccagacuugc

SEQ ID NO: 2018564 - RNA, 19 nt, Artificial Sequence
  Description of Artificial Sequence: Synthetic oligonucleotide
caugucgugcaaacuuaag

SEQ ID NO: 2018565 - RNA, 19 nt, Artificial Sequence
  Description of Artificial Sequence: Synthetic oligonucleotide
gacauuugacaaugagaga

SEQ ID NO: 2018566 - RNA, 19 nt, Artificial Sequence
  Description of Artificial Sequence: Synthetic oligonucleotide
guuguuuaugguguacuca

SEQ ID NO: 2018567 - RNA, 19 nt, Artificial Sequence
  Description of Artificial Sequence: Synthetic oligonucleotide
uacaucucgucugcagucc

SEQ ID NO: 2018568 - RNA, 19 nt, Artificial Sequence
  Description of Artificial Sequence: Synthetic oligonucleotide
uucucauucccaccagcau

SEQ ID NO: 2018569 - RNA, 19 nt, Artificial Sequence
  Description of Artificial Sequence: Synthetic oligonucleotide
cacuggauccacaauggca

SEQ ID NO: 2018570 - RNA, 19 nt, Artificial Sequence
  Description of Artificial Sequence: Synthetic oligonucleotide
cuucucauucccaccagca

SEQ ID NO: 2018571 - RNA, 19 nt, Artificial Sequence
  Description of Artificial Sequence: Synthetic oligonucleotide
gguguccucaucaaugacc

SEQ ID NO: 2018572 - RNA, 19 nt, Artificial Sequence
  Description of Artificial Sequence: Synthetic oligonucleotide
ucuugucuugcuccacagu

SEQ ID NO: 2018573 - RNA, 19 nt, Artificial Sequence
  Description of Artificial Sequence: Synthetic oligonucleotide
aguaacagauguguccgga

SEQ ID NO: 2018574 - RNA, 19 nt, Artificial Sequence
  Description of Artificial Sequence: Synthetic oligonucleotide
uguccggaaguauggcaug

SEQ ID NO: 2018575 - RNA, 19 nt, Artificial Sequence
  Description of Artificial Sequence: Synthetic oligonucleotide
cauacuucuccuuggccca

SEQ ID NO: 2018576 - RNA, 19 nt, Artificial Sequence
  Description of Artificial Sequence: Synthetic oligonucleotide
cccaacagcauacuucucc

SEQ ID NO: 2018577 - RNA, 19 nt, Artificial Sequence
  Description of Artificial Sequence: Synthetic oligonucleotide
cauaagcuaagggcucugg

SEQ ID NO: 2018578 - RNA, 19 nt, Artificial Sequence
  Description of Artificial Sequence: Synthetic oligonucleotide
gccacaguagacuuuugug

SEQ ID NO: 2018579 - RNA, 19 nt, Artificial Sequence
  Description of Artificial Sequence: Synthetic oligonucleotide
guacaucucgucugcaguc

SEQ ID NO: 2018580 - RNA, 19 nt, Artificial Sequence
  Description of Artificial Sequence: Synthetic oligonucleotide
uggcaugguguugacagac

SEQ ID NO: 2018581 - RNA, 19 nt, Artificial Sequence
  Description of Artificial Sequence: Synthetic oligonucleotide
uggauccacaauggcagcc

SEQ ID NO: 2018582 - RNA, 19 nt, Artificial Sequence
  Description of Artificial Sequence: Synthetic oligonucleotide
ugugagucaaggccccaau

SEQ ID NO: 2018583 - RNA, 19 nt, Artificial Sequence
  Description of Artificial Sequence: Synthetic oligonucleotide
auaaaccuucagcccaggu

SEQ ID NO: 2018584 - RNA, 19 nt, Artificial Sequence
  Description of Artificial Sequence: Synthetic oligonucleotide
augcauuagaacauuugau

SEQ ID NO: 2018585 - RNA, 19 nt, Artificial Sequence
  Description of Artificial Sequence: Synthetic oligonucleotide
acaacgugucaccugugaa

SEQ ID NO: 2018586 - RNA, 19 nt, Artificial Sequence
  Description of Artificial Sequence: Synthetic oligonucleotide
caaccagacagucacuuaa

SEQ ID NO: 2018587 - RNA, 19 nt, Artificial Sequence
  Description of Artificial Sequence: Synthetic oligonucleotide
cuucagcccagguuccagc

SEQ ID NO: 2018588 - RNA, 19 nt, Artificial Sequence
  Description of Artificial Sequence: Synthetic oligonucleotide
cagucacuuaaaaguuccc

SEQ ID NO: 2018589 - RNA, 19 nt, Artificial Sequence
  Description of Artificial Sequence: Synthetic oligonucleotide
agggcucuggauuaacuua

SEQ ID NO: 2018590 - RNA, 19 nt, Artificial Sequence
  Description of Artificial Sequence: Synthetic oligonucleotide
uccccaugugccucagucc

SEQ ID NO: 2018591 - RNA, 19 nt, Artificial Sequence
  Description of Artificial Sequence: Synthetic oligonucleotide
uucgagcagugccuuguac

SEQ ID NO: 2018592 - RNA, 19 nt, Artificial Sequence
  Description of Artificial Sequence: Synthetic oligonucleotide
aggaagccggcccaagacu

SEQ ID NO: 2018593 - RNA, 19 nt, Artificial Sequence
  Description of Artificial Sequence: Synthetic oligonucleotide
gugugugacuuugugaguc

SEQ ID NO: 2018594 - RNA, 19 nt, Artificial Sequence
  Description of Artificial Sequence: Synthetic oligonucleotide
cucugagcuaccagacuug

SEQ ID NO: 2018595 - RNA, 19 nt, Artificial Sequence
  Description of Artificial Sequence: Synthetic oligonucleotide
gaaguauggcaugguguug

SEQ ID NO: 2018596 - RNA, 19 nt, Artificial Sequence
  Description of Artificial Sequence: Synthetic oligonucleotide
ugacaaugagagaccccac

SEQ ID NO: 2018597 - RNA, 19 nt, Artificial Sequence
  Description of Artificial Sequence: Synthetic oligonucleotide
ggauuaacuuaaaagcaga

SEQ ID NO: 2018598 - RNA, 19 nt, Artificial Sequence
  Description of Artificial Sequence: Synthetic oligonucleotide
ugucaccugugaacacugc

SEQ ID NO: 2018599 - RNA, 19 nt, Artificial Sequence
  Description of Artificial Sequence: Synthetic oligonucleotide
agcucaaccuucaucuugu

SEQ ID NO: 2018600 - RNA, 19 nt, Artificial Sequence
  Description of Artificial Sequence: Synthetic oligonucleotide
gugagucaaggccccaaug

SEQ ID NO: 2018601 - RNA, 19 nt, Artificial Sequence
  Description of Artificial Sequence: Synthetic oligonucleotide
ucccuucauagaacuuccc

SEQ ID NO: 2018602 - RNA, 19 nt, Artificial Sequence
  Description of Artificial Sequence: Synthetic oligonucleotide
uuccugaaaucugugugau

SEQ ID NO: 2018603 - RNA, 19 nt, Artificial Sequence
  Description of Artificial Sequence: Synthetic oligonucleotide
cuuggcccaggccaguuuc

SEQ ID NO: 2018604 - RNA, 19 nt, Artificial Sequence
  Description of Artificial Sequence: Synthetic oligonucleotide
agcuaagggcucuggauua

SEQ ID NO: 2018605 - RNA, 19 nt, Artificial Sequence
  Description of Artificial Sequence: Synthetic oligonucleotide
gugaguggugagcacugug

SEQ ID NO: 2018606 - RNA, 19 nt, Artificial Sequence
  Description of Artificial Sequence: Synthetic oligonucleotide
cagacuuuuccugaaaucu

SEQ ID NO: 2018607 - RNA, 19 nt, Artificial Sequence
  Description of Artificial Sequence: Synthetic oligonucleotide
gucacuuaaaaguucccau

SEQ ID NO: 2018608 - RNA, 19 nt, Artificial Sequence
  Description of Artificial Sequence: Synthetic oligonucleotide
agugccuuguacaucucgu

SEQ ID NO: 2018609 - RNA, 19 nt, Artificial Sequence
  Description of Artificial Sequence: Synthetic oligonucleotide
gucccuucauagaacuucc

SEQ ID NO: 2018610 - RNA, 19 nt, Artificial Sequence
  Description of Artificial Sequence: Synthetic oligonucleotide
ugcaaacuuaagguuguuu

SEQ ID NO: 2018611 - RNA, 19 nt, Artificial Sequence
  Description of Artificial Sequence: Synthetic oligonucleotide
auucccagcagggccugac

SEQ ID NO: 2018612 - RNA, 19 nt, Artificial Sequence
  Description of Artificial Sequence: Synthetic oligonucleotide
ucagucccguggcaccuug

SEQ ID NO: 2018613 - RNA, 19 nt, Artificial Sequence
  Description of Artificial Sequence: Synthetic oligonucleotide
aaguucccauccccaugug

SEQ ID NO: 2018614 - RNA, 19 nt, Artificial Sequence
  Description of Artificial Sequence: Synthetic oligonucleotide
caguagacuuuugugucug

SEQ ID NO: 2018615 - RNA, 19 nt, Artificial Sequence
  Description of Artificial Sequence: Synthetic oligonucleotide
cuccuugguguccucauca

SEQ ID NO: 2018616 - RNA, 19 nt, Artificial Sequence
  Description of Artificial Sequence: Synthetic oligonucleotide
gguuguuuaugguguacuc

SEQ ID NO: 2018617 - RNA, 19 nt, Artificial Sequence
  Description of Artificial Sequence: Synthetic oligonucleotide
uaaccuucugggguugcac

SEQ ID NO: 2018618 - RNA, 19 nt, Artificial Sequence
  Description of Artificial Sequence: Synthetic oligonucleotide
cugacccaggccacggcgc

SEQ ID NO: 2018619 - RNA, 19 nt, Artificial Sequence
  Description of Artificial Sequence: Synthetic oligonucleotide
aggcaguagcucaaccuuc

SEQ ID NO: 2018620 - RNA, 19 nt, Artificial Sequence
  Description of Artificial Sequence: Synthetic oligonucleotide
agucagacuuuuccugaaa

SEQ ID NO: 2018621 - RNA, 19 nt, Artificial Sequence
  Description of Artificial Sequence: Synthetic oligonucleotide
uucccaccagcaugguccc

SEQ ID NO: 2018622 - RNA, 19 nt, Artificial Sequence
  Description of Artificial Sequence: Synthetic oligonucleotide
cagcaacaaacaacguguc

SEQ ID NO: 2018623 - RNA, 19 nt, Artificial Sequence
  Description of Artificial Sequence: Synthetic oligonucleotide
gccuuguacaucucgucug

SEQ ID NO: 2018624 - RNA, 19 nt, Artificial Sequence
  Description of Artificial Sequence: Synthetic oligonucleotide
guaacagauguguccggaa

SEQ ID NO: 2018625 - RNA, 19 nt, Artificial Sequence
  Description of Artificial Sequence: Synthetic oligonucleotide
acucucaugaagggguuau

SEQ ID NO: 2018626 - RNA, 19 nt, Artificial Sequence
  Description of Artificial Sequence: Synthetic oligonucleotide
agacuugcucacaaaguaa

SEQ ID NO: 2018627 - RNA, 19 nt, Artificial Sequence
  Description of Artificial Sequence: Synthetic oligonucleotide
aaccagacagucacuuaaa

SEQ ID NO: 2018628 - RNA, 19 nt, Artificial Sequence
  Description of Artificial Sequence: Synthetic oligonucleotide
aguugucagucagggcagg

SEQ ID NO: 2018629 - RNA, 19 nt, Artificial Sequence
  Description of Artificial Sequence: Synthetic oligonucleotide
ucgucugcagucccuucau

SEQ ID NO: 2018630 - RNA, 19 nt, Artificial Sequence
  Description of Artificial Sequence: Synthetic oligonucleotide
gucuccagaggcaccgcgg

SEQ ID NO: 2018631 - RNA, 19 nt, Artificial Sequence
  Description of Artificial Sequence: Synthetic oligonucleotide
guagacuuuugugucugga

SEQ ID NO: 2018632 - RNA, 19 nt, Artificial Sequence
  Description of Artificial Sequence: Synthetic oligonucleotide
cauaaaccuucagcccagg

SEQ ID NO: 2018633 - RNA, 19 nt, Artificial Sequence
  Description of Artificial Sequence: Synthetic oligonucleotide
agcagacuagauccugcau

SEQ ID NO: 2018634 - RNA, 19 nt, Artificial Sequence
  Description of Artificial Sequence: Synthetic oligonucleotide
gguguacucauggccacag

SEQ ID NO: 2018635 - RNA, 19 nt, Artificial Sequence
  Description of Artificial Sequence: Synthetic oligonucleotide
caccugugaacacugcaga

SEQ ID NO: 2018636 - RNA, 19 nt, Artificial Sequence
  Description of Artificial Sequence: Synthetic oligonucleotide
acuuuugugucuggaggaa

SEQ ID NO: 2018637 - RNA, 19 nt, Artificial Sequence
  Description of Artificial Sequence: Synthetic oligonucleotide
gugucaccugugaacacug

SEQ ID NO: 2018638 - RNA, 19 nt, Artificial Sequence
  Description of Artificial Sequence: Synthetic oligonucleotide
aaacaacgugucaccugug

SEQ ID NO: 2018639 - RNA, 19 nt, Artificial Sequence
  Description of Artificial Sequence: Synthetic oligonucleotide
cuauaaccuucugggguug

SEQ ID NO: 2018640 - RNA, 19 nt, Artificial Sequence
  Description of Artificial Sequence: Synthetic oligonucleotide
auggccacaguagacuuuu

SEQ ID NO: 2018641 - RNA, 19 nt, Artificial Sequence
  Description of Artificial Sequence: Synthetic oligonucleotide
cacaugucgugcaaacuua

SEQ ID NO: 2018642 - RNA, 19 nt, Artificial Sequence
  Description of Artificial Sequence: Synthetic oligonucleotide
ccauaaaccuucagcccag

SEQ ID NO: 2018643 - RNA, 19 nt, Artificial Sequence
  Description of Artificial Sequence: Synthetic oligonucleotide
gcgcaggcgacucccagcg

SEQ ID NO: 2018644 - RNA, 19 nt, Artificial Sequence
  Description of Artificial Sequence: Synthetic oligonucleotide
gugccuuguacaucucguc

SEQ ID NO: 2018645 - RNA, 19 nt, Artificial Sequence
  Description of Artificial Sequence: Synthetic oligonucleotide
agaggcaccgcggcccgcg

SEQ ID NO: 2018646 - RNA, 19 nt, Artificial Sequence
  Description of Artificial Sequence: Synthetic oligonucleotide
cuaccagacuugcucacaa

SEQ ID NO: 2018647 - RNA, 19 nt, Artificial Sequence
  Description of Artificial Sequence: Synthetic oligonucleotide
uaccagacuugcucacaaa

SEQ ID NO: 2018648 - RNA, 19 nt, Artificial Sequence
  Description of Artificial Sequence: Synthetic oligonucleotide
auagaacuucccacagcca

SEQ ID NO: 2018649 - RNA, 19 nt, Artificial Sequence
  Description of Artificial Sequence: Synthetic oligonucleotide
cuaagggcucuggauuaac

SEQ ID NO: 2018650 - RNA, 19 nt, Artificial Sequence
  Description of Artificial Sequence: Synthetic oligonucleotide
auaaccuucugggguugca

SEQ ID NO: 2018651 - RNA, 19 nt, Artificial Sequence
  Description of Artificial Sequence: Synthetic oligonucleotide
agucccguggcaccuugaa

SEQ ID NO: 2018652 - RNA, 19 nt, Artificial Sequence
  Description of Artificial Sequence: Synthetic oligonucleotide
uggucacaggguccgucuc

SEQ ID NO: 2018653 - RNA, 19 nt, Artificial Sequence
  Description of Artificial Sequence: Synthetic oligonucleotide
augagcaaccagacaguca

SEQ ID NO: 2018654 - RNA, 19 nt, Artificial Sequence
  Description of Artificial Sequence: Synthetic oligonucleotide
ggaaguauggcaugguguu

SEQ ID NO: 2018655 - RNA, 19 nt, Artificial Sequence
  Description of Artificial Sequence: Synthetic oligonucleotide
agacuagauccugcaugag

SEQ ID NO: 2018656 - RNA, 19 nt, Artificial Sequence
  Description of Artificial Sequence: Synthetic oligonucleotide
uuguuggguuccacauguc

SEQ ID NO: 2018657 - RNA, 19 nt, Artificial Sequence
  Description of Artificial Sequence: Synthetic oligonucleotide
guugucagucagggcaggc

SEQ ID NO: 2018658 - RNA, 19 nt, Artificial Sequence
  Description of Artificial Sequence: Synthetic oligonucleotide
cucgucugcagucccuuca

SEQ ID NO: 2018659 - RNA, 19 nt, Artificial Sequence
  Description of Artificial Sequence: Synthetic oligonucleotide
guuggguuccacaugucgu

SEQ ID NO: 2018660 - RNA, 19 nt, Artificial Sequence
  Description of Artificial Sequence: Synthetic oligonucleotide
cggauggcccucauggugg

SEQ ID NO: 2018661 - RNA, 19 nt, Artificial Sequence
  Description of Artificial Sequence: Synthetic oligonucleotide
gacagacauuugacaauga

SEQ ID NO: 2018662 - RNA, 19 nt, Artificial Sequence
  Description of Artificial Sequence: Synthetic oligonucleotide
cauggucccagugguggug

SEQ ID NO: 2018663 - RNA, 19 nt, Artificial Sequence
  Description of Artificial Sequence: Synthetic oligonucleotide
uggaaaggugugugacuuu

SEQ ID NO: 2018664 - RNA, 19 nt, Artificial Sequence
  Description of Artificial Sequence: Synthetic oligonucleotide
ugguguacucauggccaca

SEQ ID NO: 2018665 - RNA, 19 nt, Artificial Sequence
  Description of Artificial Sequence: Synthetic oligonucleotide
acaugucgugcaaacuuaa

SEQ ID NO: 2018666 - RNA, 19 nt, Artificial Sequence
  Description of Artificial Sequence: Synthetic oligonucleotide
gucgugcaaacuuaagguu

SEQ ID NO: 2018667 - RNA, 19 nt, Artificial Sequence
  Description of Artificial Sequence: Synthetic oligonucleotide
auacuucuccuuggcccag

SEQ ID NO: 2018668 - RNA, 19 nt, Artificial Sequence
  Description of Artificial Sequence: Synthetic oligonucleotide
ucacaggguccgucucccc

SEQ ID NO: 2018669 - RNA, 19 nt, Artificial Sequence
  Description of Artificial Sequence: Synthetic oligonucleotide
uucuccugaauggcagcau

SEQ ID NO: 2018670 - RNA, 19 nt, Artificial Sequence
  Description of Artificial Sequence: Synthetic oligonucleotide
agcacuguggucagcuuua

SEQ ID NO: 2018671 - RNA, 19 nt, Artificial Sequence
  Description of Artificial Sequence: Synthetic oligonucleotide
cugguccuucucccugcgg

SEQ ID NO: 2018672 - RNA, 19 nt, Artificial Sequence
  Description of Artificial Sequence: Synthetic oligonucleotide
ucucgucugcagucccuuc

SEQ ID NO: 2018673 - RNA, 19 nt, Artificial Sequence
  Description of Artificial Sequence: Synthetic oligonucleotide
gucccguggcaccuugaac

SEQ ID NO: 2018674 - RNA, 19 nt, Artificial Sequence
  Description of Artificial Sequence: Synthetic oligonucleotide
gcacuggauccacaauggc

SEQ ID NO: 2018675 - RNA, 19 nt, Artificial Sequence
  Description of Artificial Sequence: Synthetic oligonucleotide
caggcgacucccagcgcug

SEQ ID NO: 2018676 - RNA, 19 nt, Artificial Sequence
  Description of Artificial Sequence: Synthetic oligonucleotide
guccgucuccccagcaugc

SEQ ID NO: 2018677 - RNA, 19 nt, Artificial Sequence
  Description of Artificial Sequence: Synthetic oligonucleotide
gguuauaggugaacuccuc

SEQ ID NO: 2018678 - RNA, 19 nt, Artificial Sequence
  Description of Artificial Sequence: Synthetic oligonucleotide
gagagaccccaccugcagu

SEQ ID NO: 2018679 - RNA, 19 nt, Artificial Sequence
  Description of Artificial Sequence: Synthetic oligonucleotide
ccacaguagacuuuugugu

SEQ ID NO: 2018680 - RNA, 19 nt, Artificial Sequence
  Description of Artificial Sequence: Synthetic oligonucleotide
ugcggucaucaccuccaua

SEQ ID NO: 2018681 - RNA, 19 nt, Artificial Sequence
  Description of Artificial Sequence: Synthetic oligonucleotide
uucugggguugcacuggau

SEQ ID NO: 2018682 - RNA, 19 nt, Artificial Sequence
  Description of Artificial Sequence: Synthetic oligonucleotide
agggccugacccaggccac

SEQ ID NO: 2018683 - RNA, 19 nt, Artificial Sequence
  Description of Artificial Sequence: Synthetic oligonucleotide
guggaaaggugugugacuu

SEQ ID NO: 2018684 - RNA, 19 nt, Artificial Sequence
  Description of Artificial Sequence: Synthetic oligonucleotide
cagcauggucccaguggug

SEQ ID NO: 2018685 - RNA, 19 nt, Artificial Sequence
  Description of Artificial Sequence: Synthetic oligonucleotide
caggccacggcgcgcgcag

SEQ ID NO: 2018686 - RNA, 19 nt, Artificial Sequence
  Description of Artificial Sequence: Synthetic oligonucleotide
gagcacuguggucagcuuu

SEQ ID NO: 2018687 - RNA, 19 nt, Artificial Sequence
  Description of Artificial Sequence: Synthetic oligonucleotide
aggcaccgcggcccgcgac

SEQ ID NO: 2018688 - RNA, 19 nt, Artificial Sequence
  Description of Artificial Sequence: Synthetic oligonucleotide
agauucccagcagggccug

SEQ ID NO: 2018689 - RNA, 19 nt, Artificial Sequence
  Description of Artificial Sequence: Synthetic oligonucleotide
agagggcucugagcuacca

SEQ ID NO: 2018690 - RNA, 19 nt, Artificial Sequence
  Description of Artificial Sequence: Synthetic oligonucleotide
cccuucauagaacuuccca

SEQ ID NO: 2018691 - RNA, 19 nt, Artificial Sequence
  Description of Artificial Sequence: Synthetic oligonucleotide
gugagcacuguggucagcu

SEQ ID NO: 2018692 - RNA, 19 nt, Artificial Sequence
  Description of Artificial Sequence: Synthetic oligonucleotide
gaagccggcccaagacuuc

SEQ ID NO: 2018693 - RNA, 19 nt, Artificial Sequence
  Description of Artificial Sequence: Synthetic oligonucleotide
cugcaugagcaaccagaca

SEQ ID NO: 2018694 - RNA, 19 nt, Artificial Sequence
  Description of Artificial Sequence: Synthetic oligonucleotide
guauggcaugguguugaca

SEQ ID NO: 2018695 - RNA, 19 nt, Artificial Sequence
  Description of Artificial Sequence: Synthetic oligonucleotide
cagagggcucugagcuacc

SEQ ID NO: 2018696 - RNA, 19 nt, Artificial Sequence
  Description of Artificial Sequence: Synthetic oligonucleotide
gcucuggauuaacuuaaaa

SEQ ID NO: 2018697 - RNA, 19 nt, Artificial Sequence
  Description of Artificial Sequence: Synthetic oligonucleotide
ggcccaagacuucgagcag

SEQ ID NO: 2018698 - RNA, 19 nt, Artificial Sequence
  Description of Artificial Sequence: Synthetic oligonucleotide
gcgacccagcaccaugacc

SEQ ID NO: 2018699 - RNA, 19 nt, Artificial Sequence
  Description of Artificial Sequence: Synthetic oligonucleotide
uccgucuccccagcaugcu

SEQ ID NO: 2018700 - RNA, 19 nt, Artificial Sequence
  Description of Artificial Sequence: Synthetic oligonucleotide
gguggugaguggugagcac

SEQ ID NO: 2018701 - RNA, 19 nt, Artificial Sequence
  Description of Artificial Sequence: Synthetic oligonucleotide
guggugaguggugagcacu

SEQ ID NO: 2018702 - RNA, 19 nt, Artificial Sequence
  Description of Artificial Sequence: Synthetic oligonucleotide
gccucagucccguggcacc

SEQ ID NO: 2018703 - RNA, 19 nt, Artificial Sequence
  Description of Artificial Sequence: Synthetic oligonucleotide
agacuucgagcagugccuu

SEQ ID NO: 2018704 - RNA, 19 nt, Artificial Sequence
  Description of Artificial Sequence: Synthetic oligonucleotide
cggcccaagacuucgagca

SEQ ID NO: 2018705 - RNA, 19 nt, Artificial Sequence
  Description of Artificial Sequence: Synthetic oligonucleotide
caggguccgucuccccagc

SEQ ID NO: 2018706 - RNA, 19 nt, Artificial Sequence
  Description of Artificial Sequence: Synthetic oligonucleotide
caggcaguagcucaaccuu

SEQ ID NO: 2018707 - RNA, 19 nt, Artificial Sequence
  Description of Artificial Sequence: Synthetic oligonucleotide
aucucgucugcagucccuu

SEQ ID NO: 2018708 - RNA, 19 nt, Artificial Sequence
  Description of Artificial Sequence: Synthetic oligonucleotide
guugcacuggauccacaau

SEQ ID NO: 2018709 - RNA, 19 nt, Artificial Sequence
  Description of Artificial Sequence: Synthetic oligonucleotide
gggcucuggauuaacuuaa

SEQ ID NO: 2018710 - RNA, 19 nt, Artificial Sequence
  Description of Artificial Sequence: Synthetic oligonucleotide
caugugccucagucccgug

SEQ ID NO: 2018711 - RNA, 19 nt, Artificial Sequence
  Description of Artificial Sequence: Synthetic oligonucleotide
ggcaccgcggcccgcgacc

SEQ ID NO: 2018712 - RNA, 19 nt, Artificial Sequence
  Description of Artificial Sequence: Synthetic oligonucleotide
accgcggcccgcgacccag

SEQ ID NO: 2018713 - RNA, 19 nt, Artificial Sequence
  Description of Artificial Sequence: Synthetic oligonucleotide
gugugacuuugugagucaa

SEQ ID NO: 2018714 - RNA, 19 nt, Artificial Sequence
  Description of Artificial Sequence: Synthetic oligonucleotide
aggguccgucuccccagca

SEQ ID NO: 2018715 - RNA, 19 nt, Artificial Sequence
  Description of Artificial Sequence: Synthetic oligonucleotide
cccaugugccucagucccg

SEQ ID NO: 2018716 - RNA, 19 nt, Artificial Sequence
  Description of Artificial Sequence: Synthetic oligonucleotide
gccggcccaagacuucgag

SEQ ID NO: 2018717 - RNA, 19 nt, Artificial Sequence
  Description of Artificial Sequence: Synthetic oligonucleotide
augcggucaucaccuccau

SEQ ID NO: 2018718 - RNA, 19 nt, Artificial Sequence
  Description of Artificial Sequence: Synthetic oligonucleotide
ggccccaaugcggucauca

SEQ ID NO: 2018719 - RNA, 19 nt, Artificial Sequence
  Description of Artificial Sequence: Synthetic oligonucleotide
ggguuccacaugucgugca

SEQ ID NO: 2018720 - RNA, 19 nt, Artificial Sequence
  Description of Artificial Sequence: Synthetic oligonucleotide
ggccacaguagacuuuugu

SEQ ID NO: 2018721 - RNA, 19 nt, Artificial Sequence
  Description of Artificial Sequence: Synthetic oligonucleotide
cacggcgcgcgcaggcgac

SEQ ID NO: 2018722 - RNA, 19 nt, Artificial Sequence
  Description of Artificial Sequence: Synthetic oligonucleotide
gggcucugagcuaccagac

SEQ ID NO: 2018723 - RNA, 19 nt, Artificial Sequence
  Description of Artificial Sequence: Synthetic oligonucleotide
caugguguugacagacauu

SEQ ID NO: 2018724 - RNA, 19 nt, Artificial Sequence
  Description of Artificial Sequence: Synthetic oligonucleotide
cccagcgcugacagucucc

SEQ ID NO: 2018725 - RNA, 19 nt, Artificial Sequence
  Description of Artificial Sequence: Synthetic oligonucleotide
cggcccgcgacccagcacc

SEQ ID NO: 2018726 - RNA, 19 nt, Artificial Sequence
  Description of Artificial Sequence: Synthetic oligonucleotide
cccagcaugcugcugcaca

SEQ ID NO: 2018727 - RNA, 19 nt, Artificial Sequence
  Description of Artificial Sequence: Synthetic oligonucleotide
ggguuauaggugaacuccu

SEQ ID NO: 2018728 - RNA, 19 nt, Artificial Sequence
  Description of Artificial Sequence: Synthetic oligonucleotide
caucaccuccauaaaccuu

SEQ ID NO: 2018729 - RNA, 19 nt, Artificial Sequence
  Description of Artificial Sequence: Synthetic oligonucleotide
gcaggcgacucccagcgcu

SEQ ID NO: 2018730 - RNA, 19 nt, Artificial Sequence
  Description of Artificial Sequence: Synthetic oligonucleotide
cagucuccagaggcaccgc

SEQ ID NO: 2018731 - RNA, 19 nt, Artificial Sequence
  Description of Artificial Sequence: Synthetic oligonucleotide
gcuaccagacuugcucaca

SEQ ID NO: 2018732 - RNA, 19 nt, Artificial Sequence
  Description of Artificial Sequence: Synthetic oligonucleotide
guagcucaaccuucaucuu

SEQ ID NO: 2018733 - RNA, 19 nt, Artificial Sequence
  Description of Artificial Sequence: Synthetic oligonucleotide
cagcuuuacauggugcuuu

SEQ ID NO: 2018734 - RNA, 19 nt, Artificial Sequence
  Description of Artificial Sequence: Synthetic oligonucleotide
gggguugcacuggauccac

SEQ ID NO: 2018735 - RNA, 19 nt, Artificial Sequence
  Description of Artificial Sequence: Synthetic oligonucleotide
ccuucagcccagguuccag

SEQ ID NO: 2018736 - RNA, 19 nt, Artificial Sequence
  Description of Artificial Sequence: Synthetic oligonucleotide
cuucgagcagugccuugua

SEQ ID NO: 2018737 - RNA, 19 nt, Artificial Sequence
  Description of Artificial Sequence: Synthetic oligonucleotide
gccccaaugcggucaucac

SEQ ID NO: 2018738 - RNA, 19 nt, Artificial Sequence
  Description of Artificial Sequence: Synthetic oligonucleotide
ggauccacaauggcagccu

SEQ ID NO: 2018739 - RNA, 19 nt, Artificial Sequence
  Description of Artificial Sequence: Synthetic oligonucleotide
caucucgucugcagucccu

SEQ ID NO: 2018740 - RNA, 19 nt, Artificial Sequence
  Description of Artificial Sequence: Synthetic oligonucleotide
gauggcccucauggugguc

SEQ ID NO: 2018741 - RNA, 19 nt, Artificial Sequence
  Description of Artificial Sequence: Synthetic oligonucleotide
ccaagacuucgagcagugc

SEQ ID NO: 2018742 - RNA, 19 nt, Artificial Sequence
  Description of Artificial Sequence: Synthetic oligonucleotide
cccgcgacccagcaccaug

SEQ ID NO: 2018743 - RNA, 19 nt, Artificial Sequence
  Description of Artificial Sequence: Synthetic oligonucleotide
cucccugcggauggcccuc

SEQ ID NO: 2018744 - RNA, 19 nt, Artificial Sequence
  Description of Artificial Sequence: Synthetic oligonucleotide
cggaaguauggcauggugu

SEQ ID NO: 2018745 - RNA, 19 nt, Artificial Sequence
  Description of Artificial Sequence: Synthetic oligonucleotide
aggcgacucccagcgcuga

SEQ ID NO: 2018746 - RNA, 19 nt, Artificial Sequence
  Description of Artificial Sequence: Synthetic oligonucleotide
gucuugcuccacagucaga

SEQ ID NO: 2018747 - RNA, 19 nt, Artificial Sequence
  Description of Artificial Sequence: Synthetic oligonucleotide
agcccagguuccagcuuca

SEQ ID NO: 2018748 - RNA, 19 nt, Artificial Sequence
  Description of Artificial Sequence: Synthetic oligonucleotide
guguacucauggccacagu

SEQ ID NO: 2018749 - RNA, 19 nt, Artificial Sequence
  Description of Artificial Sequence: Synthetic oligonucleotide
cucucaugaagggguuaua

SEQ ID NO: 2018750 - RNA, 19 nt, Artificial Sequence
  Description of Artificial Sequence: Synthetic oligonucleotide
ggcucugagcuaccagacu

SEQ ID NO: 2018751 - RNA, 19 nt, Artificial Sequence
  Description of Artificial Sequence: Synthetic oligonucleotide
ccguggcaccuugaacugg

SEQ ID NO: 2018752 - RNA, 19 nt, Artificial Sequence
  Description of Artificial Sequence: Synthetic oligonucleotide
gcgcgcaggcgacucccag

SEQ ID NO: 2018753 - RNA, 19 nt, Artificial Sequence
  Description of Artificial Sequence: Synthetic oligonucleotide
cacucucaugaagggguua

SEQ ID NO: 2018754 - RNA, 19 nt, Artificial Sequence
  Description of Artificial Sequence: Synthetic oligonucleotide
gaggcaccgcggcccgcga

SEQ ID NO: 2018755 - RNA, 19 nt, Artificial Sequence
  Description of Artificial Sequence: Synthetic oligonucleotide
ccgucuccccagcaugcug

SEQ ID NO: 2018756 - RNA, 19 nt, Artificial Sequence
  Description of Artificial Sequence: Synthetic oligonucleotide
aggccacggcgcgcgcagg

SEQ ID NO: 2018757 - RNA, 19 nt, Artificial Sequence
  Description of Artificial Sequence: Synthetic oligonucleotide
cgcgcaggcgacucccagc

SEQ ID NO: 2018758 - RNA, 19 nt, Artificial Sequence
  Description of Artificial Sequence: Synthetic oligonucleotide
gcuaagggcucuggauuaa

SEQ ID NO: 2018759 - RNA, 19 nt, Artificial Sequence
  Description of Artificial Sequence: Synthetic oligonucleotide
ggcgacucccagcgcugac

SEQ ID NO: 2018760 - RNA, 19 nt, Artificial Sequence
  Description of Artificial Sequence: Synthetic oligonucleotide
ggaagccggcccaagacuu

SEQ ID NO: 2018761 - RNA, 19 nt, Artificial Sequence
  Description of Artificial Sequence: Synthetic oligonucleotide
gcgacucccagcgcugaca

SEQ ID NO: 2018762 - RNA, 19 nt, Artificial Sequence
  Description of Artificial Sequence: Synthetic oligonucleotide
ggcucuggauuaacuuaaa

SEQ ID NO: 2018763 - RNA, 19 nt, Artificial Sequence
  Description of Artificial Sequence: Synthetic oligonucleotide
ccgcgacccagcaccauga

SEQ ID NO: 2018764 - RNA, 19 nt, Artificial Sequence
  Description of Artificial Sequence: Synthetic oligonucleotide
ccaggccaguuucuccuga

SEQ ID NO: 2018765 - RNA, 19 nt, Artificial Sequence
  Description of Artificial Sequence: Synthetic oligonucleotide
gcccaagacuucgagcagu

SEQ ID NO: 2018766 - RNA, 19 nt, Artificial Sequence
  Description of Artificial Sequence: Synthetic oligonucleotide
agccggcccaagacuucga

SEQ ID NO: 2018767 - RNA, 19 nt, Artificial Sequence
  Description of Artificial Sequence: Synthetic oligonucleotide
gcgcgcgcaggcgacuccc

SEQ ID NO: 2018768 - RNA, 19 nt, Artificial Sequence
  Description of Artificial Sequence: Synthetic oligonucleotide
ggauggcccucaugguggu

SEQ ID NO: 2018769 - RNA, 19 nt, Artificial Sequence
  Description of Artificial Sequence: Synthetic oligonucleotide
cagucccuucauagaacuu

SEQ ID NO: 2018770 - RNA, 19 nt, Artificial Sequence
  Description of Artificial Sequence: Synthetic oligonucleotide
cgagcagugccuuguacau

SEQ ID NO: 2018771 - RNA, 19 nt, Artificial Sequence
  Description of Artificial Sequence: Synthetic oligonucleotide
ccccaacagcauacuucuc

SEQ ID NO: 2018772 - RNA, 19 nt, Artificial Sequence
  Description of Artificial Sequence: Synthetic oligonucleotide
ggugaguggugagcacugu

SEQ ID NO: 2018773 - RNA, 19 nt, Artificial Sequence
  Description of Artificial Sequence: Synthetic oligonucleotide
acggcgcgcgcaggcgacu

SEQ ID NO: 2018774 - RNA, 19 nt, Artificial Sequence
  Description of Artificial Sequence: Synthetic oligonucleotide
ccugaauggcagcauuguu

SEQ ID NO: 2018775 - RNA, 19 nt, Artificial Sequence
  Description of Artificial Sequence: Synthetic oligonucleotide
ggguccgucuccccagcau

SEQ ID NO: 2018776 - RNA, 19 nt, Artificial Sequence
  Description of Artificial Sequence: Synthetic oligonucleotide
cgugucaccugugaacacu

SEQ ID NO: 2018777 - RNA, 19 nt, Artificial Sequence
  Description of Artificial Sequence: Synthetic oligonucleotide
gcuccccaacagcauacuu

SEQ ID NO: 2018778 - RNA, 19 nt, Artificial Sequence
  Description of Artificial Sequence: Synthetic oligonucleotide
gcggcccgcgacccagcac

SEQ ID NO: 2018779 - RNA, 19 nt, Artificial Sequence
  Description of Artificial Sequence: Synthetic oligonucleotide
cgcgacccagcaccaugac

SEQ ID NO: 2018780 - RNA, 19 nt, Artificial Sequence
  Description of Artificial Sequence: Synthetic oligonucleotide
ccacggcgcgcgcaggcga

SEQ ID NO: 2018781 - RNA, 19 nt, Artificial Sequence
  Description of Artificial Sequence: Synthetic oligonucleotide
ccaugugccucagucccgu

SEQ ID NO: 2018782 - RNA, 19 nt, Artificial Sequence
  Description of Artificial Sequence: Synthetic oligonucleotide
cgcaggcgacucccagcgc

SEQ ID NO: 2018783 - RNA, 19 nt, Artificial Sequence
  Description of Artificial Sequence: Synthetic oligonucleotide
ggcccucaugguggucaca

SEQ ID NO: 2018784 - RNA, 19 nt, Artificial Sequence
  Description of Artificial Sequence: Synthetic oligonucleotide
cucagucccguggcaccuu

SEQ ID NO: 2018785 - RNA, 19 nt, Artificial Sequence
  Description of Artificial Sequence: Synthetic oligonucleotide
cgcgcgcaggcgacuccca

SEQ ID NO: 2018786 - RNA, 19 nt, Artificial Sequence
  Description of Artificial Sequence: Synthetic oligonucleotide
cgcggcccgcgacccagca

SEQ ID NO: 2018787 - RNA, 19 nt, Artificial Sequence
  Description of Artificial Sequence: Synthetic oligonucleotide
cggcgcgcgcaggcgacuc

SEQ ID NO: 2018788 - RNA, 19 nt, Artificial Sequence
  Description of Artificial Sequence: Synthetic oligonucleotide
gcccgcgacccagcaccau

SEQ ID NO: 2018789 - RNA, 19 nt, Artificial Sequence
  Description of Artificial Sequence: Synthetic oligonucleotide
uuaacuaugaccuuaaaca

SEQ ID NO: 2018790 - RNA, 19 nt, Artificial Sequence
  Description of Artificial Sequence: Synthetic oligonucleotide
aaaacuuuaggauggacac

SEQ ID NO: 2018791 - RNA, 19 nt, Artificial Sequence
  Description of Artificial Sequence: Synthetic oligonucleotide
uugaaauuaacuaugaccu

SEQ ID NO: 2018792 - RNA, 19 nt, Artificial Sequence
  Description of Artificial Sequence: Synthetic oligonucleotide
ugaauaaucacucagguuc

SEQ ID NO: 2018793 - RNA, 19 nt, Artificial Sequence
  Description of Artificial Sequence: Synthetic oligonucleotide
uuacuuaauaaccagagca

SEQ ID NO: 2018794 - RNA, 19 nt, Artificial Sequence
  Description of Artificial Sequence: Synthetic oligonucleotide
uuaguagcaacucauaccc

SEQ ID NO: 2018795 - RNA, 19 nt, Artificial Sequence
  Description of Artificial Sequence: Synthetic oligonucleotide
acaguaauccuauugaaac

SEQ ID NO: 2018796 - RNA, 19 nt, Artificial Sequence
  Description of Artificial Sequence: Synthetic oligonucleotide
aacaaagugacugcuaugc

SEQ ID NO: 2018797 - RNA, 19 nt, Artificial Sequence
  Description of Artificial Sequence: Synthetic oligonucleotide
uuuauauauauacuaagac

SEQ ID NO: 2018798 - RNA, 19 nt, Artificial Sequence
  Description of Artificial Sequence: Synthetic oligonucleotide
uuuaugccaauaaagaacc

SEQ ID NO: 2018799 - RNA, 19 nt, Artificial Sequence
  Description of Artificial Sequence: Synthetic oligonucleotide
auuaguagcaacucauacc

SEQ ID NO: 2018800 - RNA, 19 nt, Artificial Sequence
  Description of Artificial Sequence: Synthetic oligonucleotide
auuaacuaugaccuuaaac

SEQ ID NO: 2018801 - RNA, 19 nt, Artificial Sequence
  Description of Artificial Sequence: Synthetic oligonucleotide
aaguguguggugcaggugc

SEQ ID NO: 2018802 - RNA, 19 nt, Artificial Sequence
  Description of Artificial Sequence: Synthetic oligonucleotide
uuuuaugccaauaaagaac

SEQ ID NO: 2018803 - RNA, 19 nt, Artificial Sequence
  Description of Artificial Sequence: Synthetic oligonucleotide
uaugccuuuauauauauac

SEQ ID NO: 2018804 - RNA, 19 nt, Artificial Sequence
  Description of Artificial Sequence: Synthetic oligonucleotide
aaaugauuguuuugugccc

SEQ ID NO: 2018805 - RNA, 19 nt, Artificial Sequence
  Description of Artificial Sequence: Synthetic oligonucleotide
uuuaaaagcaugaugguau

SEQ ID NO: 2018806 - RNA, 19 nt, Artificial Sequence
  Description of Artificial Sequence: Synthetic oligonucleotide
ucugcaguaauucagcuca

SEQ ID NO: 2018807 - RNA, 19 nt, Artificial Sequence
  Description of Artificial Sequence: Synthetic oligonucleotide
uaguaaaucacaguaaucc

SEQ ID NO: 2018808 - RNA, 19 nt, Artificial Sequence
  Description of Artificial Sequence: Synthetic oligonucleotide
ugauuuauuucauuaguag

SEQ ID NO: 2018809 - RNA, 19 nt, Artificial Sequence
  Description of Artificial Sequence: Synthetic oligonucleotide
uuagguaguaucuaguuac

SEQ ID NO: 2018810 - RNA, 19 nt, Artificial Sequence
  Description of Artificial Sequence: Synthetic oligonucleotide
caaaugauuguuuugugcc

SEQ ID NO: 2018811 - RNA, 19 nt, Artificial Sequence
  Description of Artificial Sequence: Synthetic oligonucleotide
uccuauugaaacauuauac

SEQ ID NO: 2018812 - RNA, 19 nt, Artificial Sequence
  Description of Artificial Sequence: Synthetic oligonucleotide
uuugagacugucuugaccu

SEQ ID NO: 2018813 - RNA, 19 nt, Artificial Sequence
  Description of Artificial Sequence: Synthetic oligonucleotide
cuauugaaacauuauacag

SEQ ID NO: 2018814 - RNA, 19 nt, Artificial Sequence
  Description of Artificial Sequence: Synthetic oligonucleotide
ucuaguuacuuaauaacca

SEQ ID NO: 2018815 - RNA, 19 nt, Artificial Sequence
  Description of Artificial Sequence: Synthetic oligonucleotide
aguaauucagcucaagugu

SEQ ID NO: 2018816 - RNA, 19 nt, Artificial Sequence
  Description of Artificial Sequence: Synthetic oligonucleotide
gaugugaauaaucacucag

SEQ ID NO: 2018817 - RNA, 19 nt, Artificial Sequence
  Description of Artificial Sequence: Synthetic oligonucleotide
aaucacaguaauccuauug

SEQ ID NO: 2018818 - RNA, 19 nt, Artificial Sequence
  Description of Artificial Sequence: Synthetic oligonucleotide
auaaaagugaggcagcaug

SEQ ID NO: 2018819 - RNA, 19 nt, Artificial Sequence
  Description of Artificial Sequence: Synthetic oligonucleotide
ucugaaaaguuacaguucu

SEQ ID NO: 2018820 - RNA, 19 nt, Artificial Sequence
  Description of Artificial Sequence: Synthetic oligonucleotide
uugguuacacugauuaagg

SEQ ID NO: 2018821 - RNA, 19 nt, Artificial Sequence
  Description of Artificial Sequence: Synthetic oligonucleotide
uucucuauaaaacucaguu

SEQ ID NO: 2018822 - RNA, 19 nt, Artificial Sequence
  Description of Artificial Sequence: Synthetic oligonucleotide
agaaucaaauaguaaauca

SEQ ID NO: 2018823 - RNA, 19 nt, Artificial Sequence
  Description of Artificial Sequence: Synthetic oligonucleotide
uccuauaaaagugaggcag

SEQ ID NO: 2018824 - RNA, 19 nt, Artificial Sequence
  Description of Artificial Sequence: Synthetic oligonucleotide
aaagaaaagucagagagaa

SEQ ID NO: 2018825 - RNA, 19 nt, Artificial Sequence
  Description of Artificial Sequence: Synthetic oligonucleotide
uauacuaagacaucuuccu

SEQ ID NO: 2018826 - RNA, 19 nt, Artificial Sequence
  Description of Artificial Sequence: Synthetic oligonucleotide
aacauuauacagguaauug

SEQ ID NO: 2018827 - RNA, 19 nt, Artificial Sequence
  Description of Artificial Sequence: Synthetic oligonucleotide
auuaacaaguucuacauua

SEQ ID NO: 2018828 - RNA, 19 nt, Artificial Sequence
  Description of Artificial Sequence: Synthetic oligonucleotide
uuugugacuguugucagcg

SEQ ID NO: 2018829 - RNA, 19 nt, Artificial Sequence
  Description of Artificial Sequence: Synthetic oligonucleotide
agaguuaucacuauggaca

SEQ ID NO: 2018830 - RNA, 19 nt, Artificial Sequence
  Description of Artificial Sequence: Synthetic oligonucleotide
cauuauacagguaauugug

SEQ ID NO: 2018831 - RNA, 19 nt, Artificial Sequence
  Description of Artificial Sequence: Synthetic oligonucleotide
aacucaguuuccuggaauc

SEQ ID NO: 2018832 - RNA, 19 nt, Artificial Sequence
  Description of Artificial Sequence: Synthetic oligonucleotide
uguauaguucucuauaaaa

SEQ ID NO: 2018833 - RNA, 19 nt, Artificial Sequence
  Description of Artificial Sequence: Synthetic oligonucleotide
cucaguuugggauaucugg

SEQ ID NO: 2018834 - RNA, 19 nt, Artificial Sequence
  Description of Artificial Sequence: Synthetic oligonucleotide
aaugaguuuaggugguuug

SEQ ID NO: 2018835 - RNA, 19 nt, Artificial Sequence
  Description of Artificial Sequence: Synthetic oligonucleotide
ugugaauaaucacucaggu

SEQ ID NO: 2018836 - RNA, 19 nt, Artificial Sequence
  Description of Artificial Sequence: Synthetic oligonucleotide
caaagagggauaaaauagg

SEQ ID NO: 2018837 - RNA, 19 nt, Artificial Sequence
  Description of Artificial Sequence: Synthetic oligonucleotide
aaaagcaugaugguauuug

SEQ ID NO: 2018838 - RNA, 19 nt, Artificial Sequence
  Description of Artificial Sequence: Synthetic oligonucleotide
agagggauaaaauagguuu

SEQ ID NO: 2018839 - RNA, 19 nt, Artificial Sequence
  Description of Artificial Sequence: Synthetic oligonucleotide
ugaauuccgaauuguauug

SEQ ID NO: 2018840 - RNA, 19 nt, Artificial Sequence
  Description of Artificial Sequence: Synthetic oligonucleotide
auauacuaagacaucuucc

SEQ ID NO: 2018841 - RNA, 19 nt, Artificial Sequence
  Description of Artificial Sequence: Synthetic oligonucleotide
uuaacaaguucuacauuag

SEQ ID NO: 2018842 - RNA, 19 nt, Artificial Sequence
  Description of Artificial Sequence: Synthetic oligonucleotide
agagguagcaacuuaauuu

SEQ ID NO: 2018843 - RNA, 19 nt, Artificial Sequence
  Description of Artificial Sequence: Synthetic oligonucleotide
auuucccagauuuuaaucu

SEQ ID NO: 2018844 - RNA, 19 nt, Artificial Sequence
  Description of Artificial Sequence: Synthetic oligonucleotide
uuaaggguuguuuacauuu

SEQ ID NO: 2018845 - RNA, 19 nt, Artificial Sequence
  Description of Artificial Sequence: Synthetic oligonucleotide
cauaguuaacacuguauag

SEQ ID NO: 2018846 - RNA, 19 nt, Artificial Sequence
  Description of Artificial Sequence: Synthetic oligonucleotide
auugguuacacugauuaag

SEQ ID NO: 2018847 - RNA, 19 nt, Artificial Sequence
  Description of Artificial Sequence: Synthetic oligonucleotide
uuuugaccugaccugaccc

SEQ ID NO: 2018848 - RNA, 19 nt, Artificial Sequence
  Description of Artificial Sequence: Synthetic oligonucleotide
gaaucaaauaguaaaucac

SEQ ID NO: 2018849 - RNA, 19 nt, Artificial Sequence
  Description of Artificial Sequence: Synthetic oligonucleotide
aaggaugugaauaaucacu

SEQ ID NO: 2018850 - RNA, 19 nt, Artificial Sequence
  Description of Artificial Sequence: Synthetic oligonucleotide
uacuuaauaaccagagcac

SEQ ID NO: 2018851 - RNA, 19 nt, Artificial Sequence
  Description of Artificial Sequence: Synthetic oligonucleotide
uacauuaggauuguguugu

SEQ ID NO: 2018852 - RNA, 19 nt, Artificial Sequence
  Description of Artificial Sequence: Synthetic oligonucleotide
acuuaaguugcauaguuaa

SEQ ID NO: 2018853 - RNA, 19 nt, Artificial Sequence
  Description of Artificial Sequence: Synthetic oligonucleotide
uucuacauuaggauugugu

SEQ ID NO: 2018854 - RNA, 19 nt, Artificial Sequence
  Description of Artificial Sequence: Synthetic oligonucleotide
uauaaaacucaguuuccug

SEQ ID NO: 2018855 - RNA, 19 nt, Artificial Sequence
  Description of Artificial Sequence: Synthetic oligonucleotide
uuaauaaccagagcacucc

SEQ ID NO: 2018856 - RNA, 19 nt, Artificial Sequence
  Description of Artificial Sequence: Synthetic oligonucleotide
cuaguuacuuaauaaccag

SEQ ID NO: 2018857 - RNA, 19 nt, Artificial Sequence
  Description of Artificial Sequence: Synthetic oligonucleotide
ucaaauaguaaaucacagu

SEQ ID NO: 2018858 - RNA, 19 nt, Artificial Sequence
  Description of Artificial Sequence: Synthetic oligonucleotide
acauuauacagguaauugu

SEQ ID NO: 2018859 - RNA, 19 nt, Artificial Sequence
  Description of Artificial Sequence: Synthetic oligonucleotide
uguuguugagguuuuaaaa

SEQ ID NO: 2018860 - RNA, 19 nt, Artificial Sequence
  Description of Artificial Sequence: Synthetic oligonucleotide
ugucucauuucccagauuu

SEQ ID NO: 2018861 - RNA, 19 nt, Artificial Sequence
  Description of Artificial Sequence: Synthetic oligonucleotide
uuuugagacugucuugacc

SEQ ID NO: 2018862 - RNA, 19 nt, Artificial Sequence
  Description of Artificial Sequence: Synthetic oligonucleotide
cuugagucugaaaaguuac

SEQ ID NO: 2018863 - RNA, 19 nt, Artificial Sequence
  Description of Artificial Sequence: Synthetic oligonucleotide
uguuuugugcccuuucccc

SEQ ID NO: 2018864 - RNA, 19 nt, Artificial Sequence
  Description of Artificial Sequence: Synthetic oligonucleotide
ugaauuuuaggauuacaua

SEQ ID NO: 2018865 - RNA, 19 nt, Artificial Sequence
  Description of Artificial Sequence: Synthetic oligonucleotide
agauccauuaacaaguucu

SEQ ID NO: 2018866 - RNA, 19 nt, Artificial Sequence
  Description of Artificial Sequence: Synthetic oligonucleotide
aguuacuuaauaaccagag

SEQ ID NO: 2018867 - RNA, 19 nt, Artificial Sequence
  Description of Artificial Sequence: Synthetic oligonucleotide
uaguucucuauaaaacuca

SEQ ID NO: 2018868 - RNA, 19 nt, Artificial Sequence
  Description of Artificial Sequence: Synthetic oligonucleotide
ugagucugaaaaguuacag

SEQ ID NO: 2018869 - RNA, 19 nt, Artificial Sequence
  Description of Artificial Sequence: Synthetic oligonucleotide
uaaaauuccacuccauauu

SEQ ID NO: 2018870 - RNA, 19 nt, Artificial Sequence
  Description of Artificial Sequence: Synthetic oligonucleotide
aaagcaugaugguauuuga

SEQ ID NO: 2018871 - RNA, 19 nt, Artificial Sequence
  Description of Artificial Sequence: Synthetic oligonucleotide
caguaauucagcucaagug

SEQ ID NO: 2018872 - RNA, 19 nt, Artificial Sequence
  Description of Artificial Sequence: Synthetic oligonucleotide
uugauuuauuucauuagua

SEQ ID NO: 2018873 - RNA, 19 nt, Artificial Sequence
  Description of Artificial Sequence: Synthetic oligonucleotide
aaaugucucauuucccaga

SEQ ID NO: 2018874 - RNA, 19 nt, Artificial Sequence
  Description of Artificial Sequence: Synthetic oligonucleotide
uaaguugcauaguuaacac

SEQ ID NO: 2018875 - RNA, 19 nt, Artificial Sequence
  Description of Artificial Sequence: Synthetic oligonucleotide
auaguuaacacuguauagu

SEQ ID NO: 2018876 - RNA, 19 nt, Artificial Sequence
  Description of Artificial Sequence: Synthetic oligonucleotide
aacuaugaccuuaaacauc

SEQ ID NO: 2018877 - RNA, 19 nt, Artificial Sequence
  Description of Artificial Sequence: Synthetic oligonucleotide
uugaaauauuucuucuuga

SEQ ID NO: 2018878 - RNA, 19 nt, Artificial Sequence
  Description of Artificial Sequence: Synthetic oligonucleotide
uauuugaauuuuaggauua

SEQ ID NO: 2018879 - RNA, 19 nt, Artificial Sequence
  Description of Artificial Sequence: Synthetic oligonucleotide
aggauuguguuguugaggu

SEQ ID NO: 2018880 - RNA, 19 nt, Artificial Sequence
  Description of Artificial Sequence: Synthetic oligonucleotide
acuuaauuugaaauauuuc

SEQ ID NO: 2018881 - RNA, 19 nt, Artificial Sequence
  Description of Artificial Sequence: Synthetic oligonucleotide
ugaccugacccucaguuug

SEQ ID NO: 2018882 - RNA, 19 nt, Artificial Sequence
  Description of Artificial Sequence: Synthetic oligonucleotide
aguaaaucacaguaauccu

SEQ ID NO: 2018883 - RNA, 19 nt, Artificial Sequence
  Description of Artificial Sequence: Synthetic oligonucleotide
uugugcaauuuuaaggacu

SEQ ID NO: 2018884 - RNA, 19 nt, Artificial Sequence
  Description of Artificial Sequence: Synthetic oligonucleotide
ugugacuguugucagcgag

SEQ ID NO: 2018885 - RNA, 19 nt, Artificial Sequence
  Description of Artificial Sequence: Synthetic oligonucleotide
uuaagguacaaaugauugu

SEQ ID NO: 2018886 - RNA, 19 nt, Artificial Sequence
  Description of Artificial Sequence: Synthetic oligonucleotide
acugucuugaccugcuuag

SEQ ID NO: 2018887 - RNA, 19 nt, Artificial Sequence
  Description of Artificial Sequence: Synthetic oligonucleotide
aauuccgaauuguauuggu

SEQ ID NO: 2018888 - RNA, 19 nt, Artificial Sequence
  Description of Artificial Sequence: Synthetic oligonucleotide
acaaagugacugcuaugcc

SEQ ID NO: 2018889 - RNA, 19 nt, Artificial Sequence
  Description of Artificial Sequence: Synthetic oligonucleotide
acuaugaccuuaaacaucu

SEQ ID NO: 2018890 - RNA, 19 nt, Artificial Sequence
  Description of Artificial Sequence: Synthetic oligonucleotide
gaguuaucacuauggacag

SEQ ID NO: 2018891 - RNA, 19 nt, Artificial Sequence
  Description of Artificial Sequence: Synthetic oligonucleotide
uugaauuccgaauuguauu

SEQ ID NO: 2018892 - RNA, 19 nt, Artificial Sequence
  Description of Artificial Sequence: Synthetic oligonucleotide
uaauccuauugaaacauua

SEQ ID NO: 2018893 - RNA, 19 nt, Artificial Sequence
  Description of Artificial Sequence: Synthetic oligonucleotide
uaacuaugaccuuaaacau

SEQ ID NO: 2018894 - RNA, 19 nt, Artificial Sequence
  Description of Artificial Sequence: Synthetic oligonucleotide
aagucagagagaaaugucu

SEQ ID NO: 2018895 - RNA, 19 nt, Artificial Sequence
  Description of Artificial Sequence: Synthetic oligonucleotide
uaguuacuuaauaaccaga

SEQ ID NO: 2018896 - RNA, 19 nt, Artificial Sequence
  Description of Artificial Sequence: Synthetic oligonucleotide
ugcauugaauuccgaauug

SEQ ID NO: 2018897 - RNA, 19 nt, Artificial Sequence
  Description of Artificial Sequence: Synthetic oligonucleotide
ucaguuugggauaucuggu

SEQ ID NO: 2018898 - RNA, 19 nt, Artificial Sequence
  Description of Artificial Sequence: Synthetic oligonucleotide
cuuaauaaccagagcacuc

SEQ ID NO: 2018899 - RNA, 19 nt, Artificial Sequence
  Description of Artificial Sequence: Synthetic oligonucleotide
uacuaagacaucuuccuau

SEQ ID NO: 2018900 - RNA, 19 nt, Artificial Sequence
  Description of Artificial Sequence: Synthetic oligonucleotide
guauaguucucuauaaaac

SEQ ID NO: 2018901 - RNA, 19 nt, Artificial Sequence
  Description of Artificial Sequence: Synthetic oligonucleotide
aaagagggauaaaauaggu

SEQ ID NO: 2018902 - RNA, 19 nt, Artificial Sequence
  Description of Artificial Sequence: Synthetic oligonucleotide
gagaguuaucacuauggac

SEQ ID NO: 2018903 - RNA, 19 nt, Artificial Sequence
  Description of Artificial Sequence: Synthetic oligonucleotide
ugguuacacugauuaaggg

SEQ ID NO: 2018904 - RNA, 19 nt, Artificial Sequence
  Description of Artificial Sequence: Synthetic oligonucleotide
guauugguuacacugauua

SEQ ID NO: 2018905 - RNA, 19 nt, Artificial Sequence
  Description of Artificial Sequence: Synthetic oligonucleotide
gcaaagagggauaaaauag

SEQ ID NO: 2018906 - RNA, 19 nt, Artificial Sequence
  Description of Artificial Sequence: Synthetic oligonucleotide
auuuuaggauuacauauuu

SEQ ID NO: 2018907 - RNA, 19 nt, Artificial Sequence
  Description of Artificial Sequence: Synthetic oligonucleotide
aaugauuguuuugugcccu

SEQ ID NO: 2018908 - RNA, 19 nt, Artificial Sequence
  Description of Artificial Sequence: Synthetic oligonucleotide
uuguuuugugcccuuuccc

SEQ ID NO: 2018909 - RNA, 19 nt, Artificial Sequence
  Description of Artificial Sequence: Synthetic oligonucleotide
auacccuugaaagaaaagu

SEQ ID NO: 2018910 - RNA, 19 nt, Artificial Sequence
  Description of Artificial Sequence: Synthetic oligonucleotide
guuacuuaauaaccagagc

SEQ ID NO: 2018911 - RNA, 19 nt, Artificial Sequence
  Description of Artificial Sequence: Synthetic oligonucleotide
uuaggauuguguuguugag

SEQ ID NO: 2018912 - RNA, 19 nt, Artificial Sequence
  Description of Artificial Sequence: Synthetic oligonucleotide
aaauaguaaaucacaguaa

SEQ ID NO: 2018913 - RNA, 19 nt, Artificial Sequence
  Description of Artificial Sequence: Synthetic oligonucleotide
agcaaagagggauaaaaua

SEQ ID NO: 2018914 - RNA, 19 nt, Artificial Sequence
  Description of Artificial Sequence: Synthetic oligonucleotide
uaaggaugugaauaaucac

SEQ ID NO: 2018915 - RNA, 19 nt, Artificial Sequence
  Description of Artificial Sequence: Synthetic oligonucleotide
agcaacuuaauuugaaaua

SEQ ID NO: 2018916 - RNA, 19 nt, Artificial Sequence
  Description of Artificial Sequence: Synthetic oligonucleotide
ucuugagucugaaaaguua

SEQ ID NO: 2018917 - RNA, 19 nt, Artificial Sequence
  Description of Artificial Sequence: Synthetic oligonucleotide
guaguaucuaguuacuuaa

SEQ ID NO: 2018918 - RNA, 19 nt, Artificial Sequence
  Description of Artificial Sequence: Synthetic oligonucleotide
ugcaauuuuaaggacuuaa

SEQ ID NO: 2018919 - RNA, 19 nt, Artificial Sequence
  Description of Artificial Sequence: Synthetic oligonucleotide
guaaggaugugaauaauca

SEQ ID NO: 2018920 - RNA, 19 nt, Artificial Sequence
  Description of Artificial Sequence: Synthetic oligonucleotide
aguuuaggugguuuguacu

SEQ ID NO: 2018921 - RNA, 19 nt, Artificial Sequence
  Description of Artificial Sequence: Synthetic oligonucleotide
augugaauaaucacucagg

SEQ ID NO: 2018922 - RNA, 19 nt, Artificial Sequence
  Description of Artificial Sequence: Synthetic oligonucleotide
uuccgaauuguauugguua

SEQ ID NO: 2018923 - RNA, 19 nt, Artificial Sequence
  Description of Artificial Sequence: Synthetic oligonucleotide
ugucugugcauugaauucc

SEQ ID NO: 2018924 - RNA, 19 nt, Artificial Sequence
  Description of Artificial Sequence: Synthetic oligonucleotide
cugauuaaggguuguuuac

SEQ ID NO: 2018925 - RNA, 19 nt, Artificial Sequence
  Description of Artificial Sequence: Synthetic oligonucleotide
uaggauuguguuguugagg

SEQ ID NO: 2018926 - RNA, 19 nt, Artificial Sequence
  Description of Artificial Sequence: Synthetic oligonucleotide
uuuaaggacuuaaguugca

SEQ ID NO: 2018927 - RNA, 19 nt, Artificial Sequence
  Description of Artificial Sequence: Synthetic oligonucleotide
aguaucuaguuacuuaaua

SEQ ID NO: 2018928 - RNA, 19 nt, Artificial Sequence
  Description of Artificial Sequence: Synthetic oligonucleotide
uaguuaacacuguauaguu

SEQ ID NO: 2018929 - RNA, 19 nt, Artificial Sequence
  Description of Artificial Sequence: Synthetic oligonucleotide
cuacauuaggauuguguug

SEQ ID NO: 2018930 - RNA, 19 nt, Artificial Sequence
  Description of Artificial Sequence: Synthetic oligonucleotide
aauuuuaggauuacauauu

SEQ ID NO: 2018931 - RNA, 19 nt, Artificial Sequence
  Description of Artificial Sequence: Synthetic oligonucleotide
acugauuaaggguuguuua

SEQ ID NO: 2018932 - RNA, 19 nt, Artificial Sequence
  Description of Artificial Sequence: Synthetic oligonucleotide
cagagaucagcagaaagag

SEQ ID NO: 2018933 - RNA, 19 nt, Artificial Sequence
  Description of Artificial Sequence: Synthetic oligonucleotide
auaguaaaucacaguaauc

SEQ ID NO: 2018934 - RNA, 19 nt, Artificial Sequence
  Description of Artificial Sequence: Synthetic oligonucleotide
acugcuaugccuuuauaua

SEQ ID NO: 2018935 - RNA, 19 nt, Artificial Sequence
  Description of Artificial Sequence: Synthetic oligonucleotide
aaacucaguuuccuggaau

SEQ ID NO: 2018936 - RNA, 19 nt, Artificial Sequence
  Description of Artificial Sequence: Synthetic oligonucleotide
aaucucuuagugcugucuu

SEQ ID NO: 2018937 - RNA, 19 nt, Artificial Sequence
  Description of Artificial Sequence: Synthetic oligonucleotide
ugauuaaggguuguuuaca

SEQ ID NO: 2018938 - RNA, 19 nt, Artificial Sequence
  Description of Artificial Sequence: Synthetic oligonucleotide
aagagguagcaacuuaauu

SEQ ID NO: 2018939 - RNA, 19 nt, Artificial Sequence
  Description of Artificial Sequence: Synthetic oligonucleotide
uaauaaccagagcacucca

SEQ ID NO: 2018940 - RNA, 19 nt, Artificial Sequence
  Description of Artificial Sequence: Synthetic oligonucleotide
gaaaagucagagagaaaug

SEQ ID NO: 2018941 - RNA, 19 nt, Artificial Sequence
  Description of Artificial Sequence: Synthetic oligonucleotide
uaaggagcucaguacuucc

SEQ ID NO: 2018942 - RNA, 19 nt, Artificial Sequence
  Description of Artificial Sequence: Synthetic oligonucleotide
aggucgcuggauuugugac

SEQ ID NO: 2018943 - RNA, 19 nt, Artificial Sequence
  Description of Artificial Sequence: Synthetic oligonucleotide
cuuaaguugcauaguuaac

SEQ ID NO: 2018944 - RNA, 19 nt, Artificial Sequence
  Description of Artificial Sequence: Synthetic oligonucleotide
agagaguuaucacuaugga

SEQ ID NO: 2018945 - RNA, 19 nt, Artificial Sequence
  Description of Artificial Sequence: Synthetic oligonucleotide
uccgaauuguauugguuac

SEQ ID NO: 2018946 - RNA, 19 nt, Artificial Sequence
  Description of Artificial Sequence: Synthetic oligonucleotide
ccuuuauauauauacuaag

SEQ ID NO: 2018947 - RNA, 19 nt, Artificial Sequence
  Description of Artificial Sequence: Synthetic oligonucleotide
ugucuugaccugcuuaggu

SEQ ID NO: 2018948 - RNA, 19 nt, Artificial Sequence
  Description of Artificial Sequence: Synthetic oligonucleotide
auucagcucaagugugugg

SEQ ID NO: 2018949 - RNA, 19 nt, Artificial Sequence
  Description of Artificial Sequence: Synthetic oligonucleotide
ucauacccuugaaagaaaa

SEQ ID NO: 2018950 - RNA, 19 nt, Artificial Sequence
  Description of Artificial Sequence: Synthetic oligonucleotide
aagugaggcagcaugacaa

SEQ ID NO: 2018951 - RNA, 19 nt, Artificial Sequence
  Description of Artificial Sequence: Synthetic oligonucleotide
acucaguuuccuggaaucc

SEQ ID NO: 2018952 - RNA, 19 nt, Artificial Sequence
  Description of Artificial Sequence: Synthetic oligonucleotide
uugucugugcauugaauuc

SEQ ID NO: 2018953 - RNA, 19 nt, Artificial Sequence
  Description of Artificial Sequence: Synthetic oligonucleotide
uaggauggacacagaauca

SEQ ID NO: 2018954 - RNA, 19 nt, Artificial Sequence
  Description of Artificial Sequence: Synthetic oligonucleotide
uuucccagauuuuaaucuc

SEQ ID NO: 2018955 - RNA, 19 nt, Artificial Sequence
  Description of Artificial Sequence: Synthetic oligonucleotide
gaguuuaggugguuuguac

SEQ ID NO: 2018956 - RNA, 19 nt, Artificial Sequence
  Description of Artificial Sequence: Synthetic oligonucleotide
uaauucagcucaagugugu

SEQ ID NO: 2018957 - RNA, 19 nt, Artificial Sequence
  Description of Artificial Sequence: Synthetic oligonucleotide
acuuaauaaccagagcacu

SEQ ID NO: 2018958 - RNA, 19 nt, Artificial Sequence
  Description of Artificial Sequence: Synthetic oligonucleotide
uccguaaggaugugaauaa

SEQ ID NO: 2018959 - RNA, 19 nt, Artificial Sequence
  Description of Artificial Sequence: Synthetic oligonucleotide
uugagucugaaaaguuaca

SEQ ID NO: 2018960 - RNA, 19 nt, Artificial Sequence
  Description of Artificial Sequence: Synthetic oligonucleotide
ugaccuuaaacaucuucaa

SEQ ID NO: 2018961 - RNA, 19 nt, Artificial Sequence
  Description of Artificial Sequence: Synthetic oligonucleotide
auaaccagagcacuccaau

SEQ ID NO: 2018962 - RNA, 19 nt, Artificial Sequence
  Description of Artificial Sequence: Synthetic oligonucleotide
ggugccauuuuauuuacac

SEQ ID NO: 2018963 - RNA, 19 nt, Artificial Sequence
  Description of Artificial Sequence: Synthetic oligonucleotide
ucacaguaauccuauugaa

SEQ ID NO: 2018964 - RNA, 19 nt, Artificial Sequence
  Description of Artificial Sequence: Synthetic oligonucleotide
auccuauugaaacauuaua

SEQ ID NO: 2018965 - RNA, 19 nt, Artificial Sequence
  Description of Artificial Sequence: Synthetic oligonucleotide
uucagcucaaguguguggu

SEQ ID NO: 2018966 - RNA, 19 nt, Artificial Sequence
  Description of Artificial Sequence: Synthetic oligonucleotide
agucagagagaaaugucuc

SEQ ID NO: 2018967 - RNA, 19 nt, Artificial Sequence
  Description of Artificial Sequence: Synthetic oligonucleotide
cauacccuugaaagaaaag

SEQ ID NO: 2018968 - RNA, 19 nt, Artificial Sequence
  Description of Artificial Sequence: Synthetic oligonucleotide
aauccuauugaaacauuau

SEQ ID NO: 2018969 - RNA, 19 nt, Artificial Sequence
  Description of Artificial Sequence: Synthetic oligonucleotide
uaacaaagugacugcuaug

SEQ ID NO: 2018970 - RNA, 19 nt, Artificial Sequence
  Description of Artificial Sequence: Synthetic oligonucleotide
uucccagauuuuaaucucu

SEQ ID NO: 2018971 - RNA, 19 nt, Artificial Sequence
  Description of Artificial Sequence: Synthetic oligonucleotide
guaauucagcucaagugug

SEQ ID NO: 2018972 - RNA, 19 nt, Artificial Sequence
  Description of Artificial Sequence: Synthetic oligonucleotide
uuccuauaaaagugaggca

SEQ ID NO: 2018973 - RNA, 19 nt, Artificial Sequence
  Description of Artificial Sequence: Synthetic oligonucleotide
aguuaacacuguauaguuc

SEQ ID NO: 2018974 - RNA, 19 nt, Artificial Sequence
  Description of Artificial Sequence: Synthetic oligonucleotide
ucauuaguagcaacucaua

SEQ ID NO: 2018975 - RNA, 19 nt, Artificial Sequence
  Description of Artificial Sequence: Synthetic oligonucleotide
agcaugacaauuccagaaa

SEQ ID NO: 2018976 - RNA, 19 nt, Artificial Sequence
  Description of Artificial Sequence: Synthetic oligonucleotide
aauuaacuaugaccuuaaa

SEQ ID NO: 2018977 - RNA, 19 nt, Artificial Sequence
  Description of Artificial Sequence: Synthetic oligonucleotide
uuugaccugaccugacccu

SEQ ID NO: 2018978 - RNA, 19 nt, Artificial Sequence
  Description of Artificial Sequence: Synthetic oligonucleotide
uggcuuaaggagcucagua

SEQ ID NO: 2018979 - RNA, 19 nt, Artificial Sequence
  Description of Artificial Sequence: Synthetic oligonucleotide
cugcuuagguaguaucuag

SEQ ID NO: 2018980 - RNA, 19 nt, Artificial Sequence
  Description of Artificial Sequence: Synthetic oligonucleotide
ucccagagaguuaucacua

SEQ ID NO: 2018981 - RNA, 19 nt, Artificial Sequence
  Description of Artificial Sequence: Synthetic oligonucleotide
aucacuauggacagcucag

SEQ ID NO: 2018982 - RNA, 19 nt, Artificial Sequence
  Description of Artificial Sequence: Synthetic oligonucleotide
gaaucccuccguaaggaug

SEQ ID NO: 2018983 - RNA, 19 nt, Artificial Sequence
  Description of Artificial Sequence: Synthetic oligonucleotide
gaaagagguagcaacuuaa

SEQ ID NO: 2018984 - RNA, 19 nt, Artificial Sequence
  Description of Artificial Sequence: Synthetic oligonucleotide
uaugccaauaaagaaccuu

SEQ ID NO: 2018985 - RNA, 19 nt, Artificial Sequence
  Description of Artificial Sequence: Synthetic oligonucleotide
cuggaaucccuccguaagg

SEQ ID NO: 2018986 - RNA, 19 nt, Artificial Sequence
  Description of Artificial Sequence: Synthetic oligonucleotide
uuaaaagcaugaugguauu

SEQ ID NO: 2018987 - RNA, 19 nt, Artificial Sequence
  Description of Artificial Sequence: Synthetic oligonucleotide
ucacuauggacagcucagg

SEQ ID NO: 2018988 - RNA, 19 nt, Artificial Sequence
  Description of Artificial Sequence: Synthetic oligonucleotide
acuccauauuaacuaacaa

SEQ ID NO: 2018989 - RNA, 19 nt, Artificial Sequence
  Description of Artificial Sequence: Synthetic oligonucleotide
uaaacaucuucaaguugau

SEQ ID NO: 2018990 - RNA, 19 nt, Artificial Sequence
  Description of Artificial Sequence: Synthetic oligonucleotide
uauugguuacacugauuaa

SEQ ID NO: 2018991 - RNA, 19 nt, Artificial Sequence
  Description of Artificial Sequence: Synthetic oligonucleotide
uguggugcaggugcuagug

SEQ ID NO: 2018992 - RNA, 19 nt, Artificial Sequence
  Description of Artificial Sequence: Synthetic oligonucleotide
ugaaauuaacuaugaccuu

SEQ ID NO: 2018993 - RNA, 19 nt, Artificial Sequence
  Description of Artificial Sequence: Synthetic oligonucleotide
guagcaacuuaauuugaaa

SEQ ID NO: 2018994 - RNA, 19 nt, Artificial Sequence
  Description of Artificial Sequence: Synthetic oligonucleotide
auacagguaauugugcaau

SEQ ID NO: 2018995 - RNA, 19 nt, Artificial Sequence
  Description of Artificial Sequence: Synthetic oligonucleotide
uaaucucuuagugcugucu

SEQ ID NO: 2018996 - RNA, 19 nt, Artificial Sequence
  Description of Artificial Sequence: Synthetic oligonucleotide
ugcuaugccuuuauauaua

SEQ ID NO: 2018997 - RNA, 19 nt, Artificial Sequence
  Description of Artificial Sequence: Synthetic oligonucleotide
uguguggugcaggugcuag

SEQ ID NO: 2018998 - RNA, 19 nt, Artificial Sequence
  Description of Artificial Sequence: Synthetic oligonucleotide
ggauuugugacuguuguca

SEQ ID NO: 2018999 - RNA, 19 nt, Artificial Sequence
  Description of Artificial Sequence: Synthetic oligonucleotide
agaaagagguagcaacuua

SEQ ID NO: 2019000 - RNA, 19 nt, Artificial Sequence
  Description of Artificial Sequence: Synthetic oligonucleotide
ugcuaguggaacaggccac

SEQ ID NO: 2019001 - RNA, 19 nt, Artificial Sequence
  Description of Artificial Sequence: Synthetic oligonucleotide
uaacacuguauaguucucu

SEQ ID NO: 2019002 - RNA, 19 nt, Artificial Sequence
  Description of Artificial Sequence: Synthetic oligonucleotide
uaggucgcuggauuuguga

SEQ ID NO: 2019003 - RNA, 19 nt, Artificial Sequence
  Description of Artificial Sequence: Synthetic oligonucleotide
uucugcaguaauucagcuc

SEQ ID NO: 2019004 - RNA, 19 nt, Artificial Sequence
  Description of Artificial Sequence: Synthetic oligonucleotide
uuugggauaucuggugcca

SEQ ID NO: 2019005 - RNA, 19 nt, Artificial Sequence
  Description of Artificial Sequence: Synthetic oligonucleotide
uuaaggagcucaguacuuc

SEQ ID NO: 2019006 - RNA, 19 nt, Artificial Sequence
  Description of Artificial Sequence: Synthetic oligonucleotide
ccuauugaaacauuauaca

SEQ ID NO: 2019007 - RNA, 19 nt, Artificial Sequence
  Description of Artificial Sequence: Synthetic oligonucleotide
caguuugggauaucuggug

SEQ ID NO: 2019008 - RNA, 19 nt, Artificial Sequence
  Description of Artificial Sequence: Synthetic oligonucleotide
cucaguuuccuggaauccc

SEQ ID NO: 2019009 - RNA, 19 nt, Artificial Sequence
  Description of Artificial Sequence: Synthetic oligonucleotide
cagagcacuccaaucuggc

SEQ ID NO: 2019010 - RNA, 19 nt, Artificial Sequence
  Description of Artificial Sequence: Synthetic oligonucleotide
uagcaacucauacccuuga

SEQ ID NO: 2019011 - RNA, 19 nt, Artificial Sequence
  Description of Artificial Sequence: Synthetic oligonucleotide
uuaugccaauaaagaaccu

SEQ ID NO: 2019012 - RNA, 19 nt, Artificial Sequence
  Description of Artificial Sequence: Synthetic oligonucleotide
guauuugaauuuuaggauu

SEQ ID NO: 2019013 - RNA, 19 nt, Artificial Sequence
  Description of Artificial Sequence: Synthetic oligonucleotide
uguguuguugagguuuuaa

SEQ ID NO: 2019014 - RNA, 19 nt, Artificial Sequence
  Description of Artificial Sequence: Synthetic oligonucleotide
aaacagcaaagagggauaa

SEQ ID NO: 2019015 - RNA, 19 nt, Artificial Sequence
  Description of Artificial Sequence: Synthetic oligonucleotide
aaagagguagcaacuuaau

SEQ ID NO: 2019016 - RNA, 19 nt, Artificial Sequence
  Description of Artificial Sequence: Synthetic oligonucleotide
acccuugaaagaaaaguca

SEQ ID NO: 2019017 - RNA, 19 nt, Artificial Sequence
  Description of Artificial Sequence: Synthetic oligonucleotide
ugaugguauuugaauuuua

SEQ ID NO: 2019018 - RNA, 19 nt, Artificial Sequence
  Description of Artificial Sequence: Synthetic oligonucleotide
uggaaucccuccguaagga

SEQ ID NO: 2019019 - RNA, 19 nt, Artificial Sequence
  Description of Artificial Sequence: Synthetic oligonucleotide
aucuggugccauuuuauuu

SEQ ID NO: 2019020 - RNA, 19 nt, Artificial Sequence
  Description of Artificial Sequence: Synthetic oligonucleotide
ccaacacccaggaaagugg

SEQ ID NO: 2019021 - RNA, 19 nt, Artificial Sequence
  Description of Artificial Sequence: Synthetic oligonucleotide
ugacuguugucagcgagcu

SEQ ID NO: 2019022 - RNA, 19 nt, Artificial Sequence
  Description of Artificial Sequence: Synthetic oligonucleotide
aguuaucacuauggacagc

SEQ ID NO: 2019023 - RNA, 19 nt, Artificial Sequence
  Description of Artificial Sequence: Synthetic oligonucleotide
cacuccauauuaacuaaca

SEQ ID NO: 2019024 - RNA, 19 nt, Artificial Sequence
  Description of Artificial Sequence: Synthetic oligonucleotide
ucuccuaggucgcuggauu

SEQ ID NO: 2019025 - RNA, 19 nt, Artificial Sequence
  Description of Artificial Sequence: Synthetic oligonucleotide
uccccaucuugucugugca

SEQ ID NO: 2019026 - RNA, 19 nt, Artificial Sequence
  Description of Artificial Sequence: Synthetic oligonucleotide
uaaggguuguuuacauuuu

SEQ ID NO: 2019027 - RNA, 19 nt, Artificial Sequence
  Description of Artificial Sequence: Synthetic oligonucleotide
uaguaucuaguuacuuaau

SEQ ID NO: 2019028 - RNA, 19 nt, Artificial Sequence
  Description of Artificial Sequence: Synthetic oligonucleotide
cccuugaaagaaaagucag

SEQ ID NO: 2019029 - RNA, 19 nt, Artificial Sequence
  Description of Artificial Sequence: Synthetic oligonucleotide
uuaaggacuuaaguugcau

SEQ ID NO: 2019030 - RNA, 19 nt, Artificial Sequence
  Description of Artificial Sequence: Synthetic oligonucleotide
gcaauuuuaaggacuuaag

SEQ ID NO: 2019031 - RNA, 19 nt, Artificial Sequence
  Description of Artificial Sequence: Synthetic oligonucleotide
auuccacuccauauuaacu

SEQ ID NO: 2019032 - RNA, 19 nt, Artificial Sequence
  Description of Artificial Sequence: Synthetic oligonucleotide
aagagggauaaaauagguu

SEQ ID NO: 2019033 - RNA, 19 nt, Artificial Sequence
  Description of Artificial Sequence: Synthetic oligonucleotide
guaaaucacaguaauccua

SEQ ID NO: 2019034 - RNA, 19 nt, Artificial Sequence
  Description of Artificial Sequence: Synthetic oligonucleotide
ugcaguaauucagcucaag

SEQ ID NO: 2019035 - RNA, 19 nt, Artificial Sequence
  Description of Artificial Sequence: Synthetic oligonucleotide
cacaguaauccuauugaaa

SEQ ID NO: 2019036 - RNA, 19 nt, Artificial Sequence
  Description of Artificial Sequence: Synthetic oligonucleotide
auuaaggguuguuuacauu

SEQ ID NO: 2019037 - RNA, 19 nt, Artificial Sequence
  Description of Artificial Sequence: Synthetic oligonucleotide
caguaauccuauugaaaca

SEQ ID NO: 2019038 - RNA, 19 nt, Artificial Sequence
  Description of Artificial Sequence: Synthetic oligonucleotide
gucugugcauugaauuccg

SEQ ID NO: 2019039 - RNA, 19 nt, Artificial Sequence
  Description of Artificial Sequence: Synthetic oligonucleotide
gacugcuaugccuuuauau

SEQ ID NO: 2019040 - RNA, 19 nt, Artificial Sequence
  Description of Artificial Sequence: Synthetic oligonucleotide
gguaguaucuaguuacuua

SEQ ID NO: 2019041 - RNA, 19 nt, Artificial Sequence
  Description of Artificial Sequence: Synthetic oligonucleotide
aauaaccagagcacuccaa

SEQ ID NO: 2019042 - RNA, 19 nt, Artificial Sequence
  Description of Artificial Sequence: Synthetic oligonucleotide
aaagugggcagaaggggaa

SEQ ID NO: 2019043 - RNA, 19 nt, Artificial Sequence
  Description of Artificial Sequence: Synthetic oligonucleotide
cagcaugacaauuccagaa

SEQ ID NO: 2019044 - RNA, 19 nt, Artificial Sequence
  Description of Artificial Sequence: Synthetic oligonucleotide
aaaucacaguaauccuauu

SEQ ID NO: 2019045 - RNA, 19 nt, Artificial Sequence
  Description of Artificial Sequence: Synthetic oligonucleotide
uggauuugugacuguuguc

SEQ ID NO: 2019046 - RNA, 19 nt, Artificial Sequence
  Description of Artificial Sequence: Synthetic oligonucleotide
ggcuuaaggagcucaguac

SEQ ID NO: 2019047 - RNA, 19 nt, Artificial Sequence
  Description of Artificial Sequence: Synthetic oligonucleotide
uugagacugucuugaccug

SEQ ID NO: 2019048 - RNA, 19 nt, Artificial Sequence
  Description of Artificial Sequence: Synthetic oligonucleotide
gcauaguuaacacuguaua

SEQ ID NO: 2019049 - RNA, 19 nt, Artificial Sequence
  Description of Artificial Sequence: Synthetic oligonucleotide
cauugaauuccgaauugua

SEQ ID NO: 2019050 - RNA, 19 nt, Artificial Sequence
  Description of Artificial Sequence: Synthetic oligonucleotide
cuuagguaguaucuaguua

SEQ ID NO: 2019051 - RNA, 19 nt, Artificial Sequence
  Description of Artificial Sequence: Synthetic oligonucleotide
ucagcucaaguguguggug

SEQ ID NO: 2019052 - RNA, 19 nt, Artificial Sequence
  Description of Artificial Sequence: Synthetic oligonucleotide
cuggugccauuuuauuuac

SEQ ID NO: 2019053 - RNA, 19 nt, Artificial Sequence
  Description of Artificial Sequence: Synthetic oligonucleotide
gguuacacugauuaagggu

SEQ ID NO: 2019054 - RNA, 19 nt, Artificial Sequence
  Description of Artificial Sequence: Synthetic oligonucleotide
uuaaucucuuagugcuguc

SEQ ID NO: 2019055 - RNA, 19 nt, Artificial Sequence
  Description of Artificial Sequence: Synthetic oligonucleotide
gguucugcaguaauucagc

SEQ ID NO: 2019056 - RNA, 19 nt, Artificial Sequence
  Description of Artificial Sequence: Synthetic oligonucleotide
ucucuuagugcugucuuuu

SEQ ID NO: 2019057 - RNA, 19 nt, Artificial Sequence
  Description of Artificial Sequence: Synthetic oligonucleotide
ugaguuuaggugguuugua

SEQ ID NO: 2019058 - RNA, 19 nt, Artificial Sequence
  Description of Artificial Sequence: Synthetic oligonucleotide
guagcaacucauacccuug

SEQ ID NO: 2019059 - RNA, 19 nt, Artificial Sequence
  Description of Artificial Sequence: Synthetic oligonucleotide
aguucuacauuaggauugu

SEQ ID NO: 2019060 - RNA, 19 nt, Artificial Sequence
  Description of Artificial Sequence: Synthetic oligonucleotide
gaccugcuuagguaguauc

SEQ ID NO: 2019061 - RNA, 19 nt, Artificial Sequence
  Description of Artificial Sequence: Synthetic oligonucleotide
auauauacuaagacaucuu

SEQ ID NO: 2019062 - RNA, 19 nt, Artificial Sequence
  Description of Artificial Sequence: Synthetic oligonucleotide
aagcaugaugguauuugaa

SEQ ID NO: 2019063 - RNA, 19 nt, Artificial Sequence
  Description of Artificial Sequence: Synthetic oligonucleotide
cagcucaaguguguggugc

SEQ ID NO: 2019064 - RNA, 19 nt, Artificial Sequence
  Description of Artificial Sequence: Synthetic oligonucleotide
ggguuguuuacauuuucuc

SEQ ID NO: 2019065 - RNA, 19 nt, Artificial Sequence
  Description of Artificial Sequence: Synthetic oligonucleotide
cuauggacagcucaggaau

SEQ ID NO: 2019066 - RNA, 19 nt, Artificial Sequence
  Description of Artificial Sequence: Synthetic oligonucleotide
ugacccucaguuugggaua

SEQ ID NO: 2019067 - RNA, 19 nt, Artificial Sequence
  Description of Artificial Sequence: Synthetic oligonucleotide
ugaccugaccugacccuca

SEQ ID NO: 2019068 - RNA, 19 nt, Artificial Sequence
  Description of Artificial Sequence: Synthetic oligonucleotide
gauccauuaacaaguucua

SEQ ID NO: 2019069 - RNA, 19 nt, Artificial Sequence
  Description of Artificial Sequence: Synthetic oligonucleotide
cucaguacuucccucccca

SEQ ID NO: 2019070 - RNA, 19 nt, Artificial Sequence
  Description of Artificial Sequence: Synthetic oligonucleotide
uacacugauuaaggguugu

SEQ ID NO: 2019071 - RNA, 19 nt, Artificial Sequence
  Description of Artificial Sequence: Synthetic oligonucleotide
augaugguauuugaauuuu

SEQ ID NO: 2019072 - RNA, 19 nt, Artificial Sequence
  Description of Artificial Sequence: Synthetic oligonucleotide
gaccugacccucaguuugg

SEQ ID NO: 2019073 - RNA, 19 nt, Artificial Sequence
  Description of Artificial Sequence: Synthetic oligonucleotide
agguaauugugcaauuuua

SEQ ID NO: 2019074 - RNA, 19 nt, Artificial Sequence
  Description of Artificial Sequence: Synthetic oligonucleotide
gauggacacagaaucaaau

SEQ ID NO: 2019075 - RNA, 19 nt, Artificial Sequence
  Description of Artificial Sequence: Synthetic oligonucleotide
cuugucugugcauugaauu

SEQ ID NO: 2019076 - RNA, 19 nt, Artificial Sequence
  Description of Artificial Sequence: Synthetic oligonucleotide
accugcuuagguaguaucu

SEQ ID NO: 2019077 - RNA, 19 nt, Artificial Sequence
  Description of Artificial Sequence: Synthetic oligonucleotide
uccuaggucgcuggauuug

SEQ ID NO: 2019078 - RNA, 19 nt, Artificial Sequence
  Description of Artificial Sequence: Synthetic oligonucleotide
uacagguaauugugcaauu

SEQ ID NO: 2019079 - RNA, 19 nt, Artificial Sequence
  Description of Artificial Sequence: Synthetic oligonucleotide
uaggugguuuguacucagu

SEQ ID NO: 2019080 - RNA, 19 nt, Artificial Sequence
  Description of Artificial Sequence: Synthetic oligonucleotide
caugaugguauuugaauuu

SEQ ID NO: 2019081 - RNA, 19 nt, Artificial Sequence
  Description of Artificial Sequence: Synthetic oligonucleotide
ccuggaaucccuccguaag

SEQ ID NO: 2019082 - RNA, 19 nt, Artificial Sequence
  Description of Artificial Sequence: Synthetic oligonucleotide
acagguaauugugcaauuu

SEQ ID NO: 2019083 - RNA, 19 nt, Artificial Sequence
  Description of Artificial Sequence: Synthetic oligonucleotide
gaauuguauugguuacacu

SEQ ID NO: 2019084 - RNA, 19 nt, Artificial Sequence
  Description of Artificial Sequence: Synthetic oligonucleotide
cuggauuugugacuguugu

SEQ ID NO: 2019085 - RNA, 19 nt, Artificial Sequence
  Description of Artificial Sequence: Synthetic oligonucleotide
cuccguaaggaugugaaua

SEQ ID NO: 2019086 - RNA, 19 nt, Artificial Sequence
  Description of Artificial Sequence: Synthetic oligonucleotide
uggugccauuuuauuuaca

SEQ ID NO: 2019087 - RNA, 19 nt, Artificial Sequence
  Description of Artificial Sequence: Synthetic oligonucleotide
cguaaggaugugaauaauc

SEQ ID NO: 2019088 - RNA, 19 nt, Artificial Sequence
  Description of Artificial Sequence: Synthetic oligonucleotide
cagauccauuaacaaguuc

SEQ ID NO: 2019089 - RNA, 19 nt, Artificial Sequence
  Description of Artificial Sequence: Synthetic oligonucleotide
ugguuuguacucaguccua

SEQ ID NO: 2019090 - RNA, 19 nt, Artificial Sequence
  Description of Artificial Sequence: Synthetic oligonucleotide
gaccugaccugacccucag

SEQ ID NO: 2019091 - RNA, 19 nt, Artificial Sequence
  Description of Artificial Sequence: Synthetic oligonucleotide
uugaccugaccugacccuc

SEQ ID NO: 2019092 - RNA, 19 nt, Artificial Sequence
  Description of Artificial Sequence: Synthetic oligonucleotide
cacuauggacagcucagga

SEQ ID NO: 2019093 - RNA, 19 nt, Artificial Sequence
  Description of Artificial Sequence: Synthetic oligonucleotide
cugucuugaccugcuuagg

SEQ ID NO: 2019094 - RNA, 19 nt, Artificial Sequence
  Description of Artificial Sequence: Synthetic oligonucleotide
caaguucuacauuaggauu

SEQ ID NO: 2019095 - RNA, 19 nt, Artificial Sequence
  Description of Artificial Sequence: Synthetic oligonucleotide
gucuugaccugcuuaggua

SEQ ID NO: 2019096 - RNA, 19 nt, Artificial Sequence
  Description of Artificial Sequence: Synthetic oligonucleotide
gccagauccauuaacaagu

SEQ ID NO: 2019097 - RNA, 19 nt, Artificial Sequence
  Description of Artificial Sequence: Synthetic oligonucleotide
gcuuaaggagcucaguacu

SEQ ID NO: 2019098 - RNA, 19 nt, Artificial Sequence
  Description of Artificial Sequence: Synthetic oligonucleotide
ugggauaucuggugccauu

SEQ ID NO: 2019099 - RNA, 19 nt, Artificial Sequence
  Description of Artificial Sequence: Synthetic oligonucleotide
ggugcuaguggaacaggcc

SEQ ID NO: 2019100 - RNA, 19 nt, Artificial Sequence
  Description of Artificial Sequence: Synthetic oligonucleotide
ggaugugaauaaucacuca

SEQ ID NO: 2019101 - RNA, 19 nt, Artificial Sequence
  Description of Artificial Sequence: Synthetic oligonucleotide
cuaggucgcuggauuugug

SEQ ID NO: 2019102 - RNA, 19 nt, Artificial Sequence
  Description of Artificial Sequence: Synthetic oligonucleotide
gcaacuuaauuugaaauau

SEQ ID NO: 2019103 - RNA, 19 nt, Artificial Sequence
  Description of Artificial Sequence: Synthetic oligonucleotide
gcaugacaauuccagaaaa

SEQ ID NO: 2019104 - RNA, 19 nt, Artificial Sequence
  Description of Artificial Sequence: Synthetic oligonucleotide
cugcuaugccuuuauauau

SEQ ID NO: 2019105 - RNA, 19 nt, Artificial Sequence
  Description of Artificial Sequence: Synthetic oligonucleotide
uacuucccuccccacugaa

SEQ ID NO: 2019106 - RNA, 19 nt, Artificial Sequence
  Description of Artificial Sequence: Synthetic oligonucleotide
ugacugcuaugccuuuaua

SEQ ID NO: 2019107 - RNA, 19 nt, Artificial Sequence
  Description of Artificial Sequence: Synthetic oligonucleotide
auuccgaauuguauugguu

SEQ ID NO: 2019108 - RNA, 19 nt, Artificial Sequence
  Description of Artificial Sequence: Synthetic oligonucleotide
ccagagaguuaucacuaug

SEQ ID NO: 2019109 - RNA, 19 nt, Artificial Sequence
  Description of Artificial Sequence: Synthetic oligonucleotide
augauuguuuugugcccuu

SEQ ID NO: 2019110 - RNA, 19 nt, Artificial Sequence
  Description of Artificial Sequence: Synthetic oligonucleotide
gcaguaauucagcucaagu

SEQ ID NO: 2019111 - RNA, 19 nt, Artificial Sequence
  Description of Artificial Sequence: Synthetic oligonucleotide
ccuugaaagaaaagucaga

SEQ ID NO: 2019112 - RNA, 19 nt, Artificial Sequence
  Description of Artificial Sequence: Synthetic oligonucleotide
cuaguggaacaggccacac

SEQ ID NO: 2019113 - RNA, 19 nt, Artificial Sequence
  Description of Artificial Sequence: Synthetic oligonucleotide
gugaauaaucacucagguu

SEQ ID NO: 2019114 - RNA, 19 nt, Artificial Sequence
  Description of Artificial Sequence: Synthetic oligonucleotide
accugacccucaguuuggg

SEQ ID NO: 2019115 - RNA, 19 nt, Artificial Sequence
  Description of Artificial Sequence: Synthetic oligonucleotide
agguaguaucuaguuacuu

SEQ ID NO: 2019116 - RNA, 19 nt, Artificial Sequence
  Description of Artificial Sequence: Synthetic oligonucleotide
ccauuaacaaguucuacau

SEQ ID NO: 2019117 - RNA, 19 nt, Artificial Sequence
  Description of Artificial Sequence: Synthetic oligonucleotide
cagcucaggaaugaguuua

SEQ ID NO: 2019118 - RNA, 19 nt, Artificial Sequence
  Description of Artificial Sequence: Synthetic oligonucleotide
ccacuccauauuaacuaac

SEQ ID NO: 2019119 - RNA, 19 nt, Artificial Sequence
  Description of Artificial Sequence: Synthetic oligonucleotide
ggacuuaaguugcauaguu

SEQ ID NO: 2019120 - RNA, 19 nt, Artificial Sequence
  Description of Artificial Sequence: Synthetic oligonucleotide
gcaugaugguauuugaauu

SEQ ID NO: 2019121 - RNA, 19 nt, Artificial Sequence
  Description of Artificial Sequence: Synthetic oligonucleotide
gcuggauuugugacuguug

SEQ ID NO: 2019122 - RNA, 19 nt, Artificial Sequence
  Description of Artificial Sequence: Synthetic oligonucleotide
cccaacacccaggaaagug

SEQ ID NO: 2019123 - RNA, 19 nt, Artificial Sequence
  Description of Artificial Sequence: Synthetic oligonucleotide
gaaugaguuuaggugguuu

SEQ ID NO: 2019124 - RNA, 19 nt, Artificial Sequence
  Description of Artificial Sequence: Synthetic oligonucleotide
agaucagcagaaagaggua

SEQ ID NO: 2019125 - RNA, 19 nt, Artificial Sequence
  Description of Artificial Sequence: Synthetic oligonucleotide
cuuaaggagcucaguacuu

SEQ ID NO: 2019126 - RNA, 19 nt, Artificial Sequence
  Description of Artificial Sequence: Synthetic oligonucleotide
caucuugucugugcauuga

SEQ ID NO: 2019127 - RNA, 19 nt, Artificial Sequence
  Description of Artificial Sequence: Synthetic oligonucleotide
cuaugccuuuauauauaua

SEQ ID NO: 2019128 - RNA, 19 nt, Artificial Sequence
  Description of Artificial Sequence: Synthetic oligonucleotide
caacuuaauuugaaauauu

SEQ ID NO: 2019129 - RNA, 19 nt, Artificial Sequence
  Description of Artificial Sequence: Synthetic oligonucleotide
gcucaggaaugaguuuagg

SEQ ID NO: 2019130 - RNA, 19 nt, Artificial Sequence
  Description of Artificial Sequence: Synthetic oligonucleotide
cagguaauugugcaauuuu

SEQ ID NO: 2019131 - RNA, 19 nt, Artificial Sequence
  Description of Artificial Sequence: Synthetic oligonucleotide
ucccuccguaaggauguga

SEQ ID NO: 2019132 - RNA, 19 nt, Artificial Sequence
  Description of Artificial Sequence: Synthetic oligonucleotide
guacuucccuccccacuga

SEQ ID NO: 2019133 - RNA, 19 nt, Artificial Sequence
  Description of Artificial Sequence: Synthetic oligonucleotide
gcuaugccuuuauauauau

SEQ ID NO: 2019134 - RNA, 19 nt, Artificial Sequence
  Description of Artificial Sequence: Synthetic oligonucleotide
guucucuauaaaacucagu

SEQ ID NO: 2019135 - RNA, 19 nt, Artificial Sequence
  Description of Artificial Sequence: Synthetic oligonucleotide
gcuuagguaguaucuaguu

SEQ ID NO: 2019136 - RNA, 19 nt, Artificial Sequence
  Description of Artificial Sequence: Synthetic oligonucleotide
acacugauuaaggguuguu

SEQ ID NO: 2019137 - RNA, 19 nt, Artificial Sequence
  Description of Artificial Sequence: Synthetic oligonucleotide
aggccacacaaagccagau

SEQ ID NO: 2019138 - RNA, 19 nt, Artificial Sequence
  Description of Artificial Sequence: Synthetic oligonucleotide
accugaccugacccucagu

SEQ ID NO: 2019139 - RNA, 19 nt, Artificial Sequence
  Description of Artificial Sequence: Synthetic oligonucleotide
ggauggacacagaaucaaa

SEQ ID NO: 2019140 - RNA, 19 nt, Artificial Sequence
  Description of Artificial Sequence: Synthetic oligonucleotide
ucgcuggauuugugacugu

SEQ ID NO: 2019141 - RNA, 19 nt, Artificial Sequence
  Description of Artificial Sequence: Synthetic oligonucleotide
uuguguuguugagguuuua

SEQ ID NO: 2019142 - RNA, 19 nt, Artificial Sequence
  Description of Artificial Sequence: Synthetic oligonucleotide
gcuaguggaacaggccaca

SEQ ID NO: 2019143 - RNA, 19 nt, Artificial Sequence
  Description of Artificial Sequence: Synthetic oligonucleotide
gcauugaauuccgaauugu

SEQ ID NO: 2019144 - RNA, 19 nt, Artificial Sequence
  Description of Artificial Sequence: Synthetic oligonucleotide
cagcagaaagagguagcaa

SEQ ID NO: 2019145 - RNA, 19 nt, Artificial Sequence
  Description of Artificial Sequence: Synthetic oligonucleotide
cccuccguaaggaugugaa

SEQ ID NO: 2019146 - RNA, 19 nt, Artificial Sequence
  Description of Artificial Sequence: Synthetic oligonucleotide
ggucgcuggauuugugacu

SEQ ID NO: 2019147 - RNA, 19 nt, Artificial Sequence
  Description of Artificial Sequence: Synthetic oligonucleotide
cugcaguaauucagcucaa

SEQ ID NO: 2019148 - RNA, 19 nt, Artificial Sequence
  Description of Artificial Sequence: Synthetic oligonucleotide
caguacuucccuccccacu

SEQ ID NO: 2019149 - RNA, 19 nt, Artificial Sequence
  Description of Artificial Sequence: Synthetic oligonucleotide
ccuuggcuuaaggagcuca

SEQ ID NO: 2019150 - RNA, 19 nt, Artificial Sequence
  Description of Artificial Sequence: Synthetic oligonucleotide
acccucaguuugggauauc

SEQ ID NO: 2019151 - RNA, 19 nt, Artificial Sequence
  Description of Artificial Sequence: Synthetic oligonucleotide
cugaccugacccucaguuu

SEQ ID NO: 2019152 - RNA, 19 nt, Artificial Sequence
  Description of Artificial Sequence: Synthetic oligonucleotide
gguuuguacucaguccuau

SEQ ID NO: 2019153 - RNA, 19 nt, Artificial Sequence
  Description of Artificial Sequence: Synthetic oligonucleotide
ccgaauuguauugguuaca

SEQ ID NO: 2019154 - RNA, 19 nt, Artificial Sequence
  Description of Artificial Sequence: Synthetic oligonucleotide
guguggugcaggugcuagu

SEQ ID NO: 2019155 - RNA, 19 nt, Artificial Sequence
  Description of Artificial Sequence: Synthetic oligonucleotide
aucccuccguaaggaugug

SEQ ID NO: 2019156 - RNA, 19 nt, Artificial Sequence
  Description of Artificial Sequence: Synthetic oligonucleotide
ggaaucccuccguaaggau

SEQ ID NO: 2019157 - RNA, 19 nt, Artificial Sequence
  Description of Artificial Sequence: Synthetic oligonucleotide
ccugcuuagguaguaucua

SEQ ID NO: 2019158 - RNA, 19 nt, Artificial Sequence
  Description of Artificial Sequence: Synthetic oligonucleotide
gugaggcagcaugacaauu

SEQ ID NO: 2019159 - RNA, 19 nt, Artificial Sequence
  Description of Artificial Sequence: Synthetic oligonucleotide
gggauaucuggugccauuu

SEQ ID NO: 2019160 - RNA, 19 nt, Artificial Sequence
  Description of Artificial Sequence: Synthetic oligonucleotide
ccugacccucaguuuggga

SEQ ID NO: 2019161 - RNA, 19 nt, Artificial Sequence
  Description of Artificial Sequence: Synthetic oligonucleotide
cuaugaccuuaaacaucuu

SEQ ID NO: 2019162 - RNA, 19 nt, Artificial Sequence
  Description of Artificial Sequence: Synthetic oligonucleotide
ccagauccauuaacaaguu

SEQ ID NO: 2019163 - RNA, 19 nt, Artificial Sequence
  Description of Artificial Sequence: Synthetic oligonucleotide
cccuuuccccaucuugucu

SEQ ID NO: 2019164 - RNA, 19 nt, Artificial Sequence
  Description of Artificial Sequence: Synthetic oligonucleotide
ggaaugaguuuaggugguu

SEQ ID NO: 2019165 - RNA, 19 nt, Artificial Sequence
  Description of Artificial Sequence: Synthetic oligonucleotide
ccuaggucgcuggauuugu

SEQ ID NO: 2019166 - RNA, 19 nt, Artificial Sequence
  Description of Artificial Sequence: Synthetic oligonucleotide
cccagagaguuaucacuau

SEQ ID NO: 2019167 - RNA, 19 nt, Artificial Sequence
  Description of Artificial Sequence: Synthetic oligonucleotide
ccuccguaaggaugugaau

SEQ ID NO: 2019168 - RNA, 19 nt, Artificial Sequence
  Description of Artificial Sequence: Synthetic oligonucleotide
ccguaaggaugugaauaau

SEQ ID NO: 2019169 - RNA, 19 nt, Artificial Sequence
  Description of Artificial Sequence: Synthetic oligonucleotide
ccccaucuugucugugcau

SEQ ID NO: 2019170 - RNA, 19 nt, Artificial Sequence
  Description of Artificial Sequence: Synthetic oligonucleotide
ugcgauagaauucagaugc

SEQ ID NO: 2019171 - RNA, 19 nt, Artificial Sequence
  Description of Artificial Sequence: Synthetic oligonucleotide
uuucuuucgauccacaaca

SEQ ID NO: 2019172 - RNA, 19 nt, Artificial Sequence
  Description of Artificial Sequence: Synthetic oligonucleotide
gauugugccaguuugcagg

SEQ ID NO: 2019173 - RNA, 19 nt, Artificial Sequence
  Description of Artificial Sequence: Synthetic oligonucleotide
aguguuuuauuucagggag

SEQ ID NO: 2019174 - RNA, 19 nt, Artificial Sequence
  Description of Artificial Sequence: Synthetic oligonucleotide
cuucucaacagccugagcg

SEQ ID NO: 2019175 - RNA, 19 nt, Artificial Sequence
  Description of Artificial Sequence: Synthetic oligonucleotide
aaggaucuagaacuccugc

SEQ ID NO: 2019176 - RNA, 19 nt, Artificial Sequence
  Description of Artificial Sequence: Synthetic oligonucleotide
gauuacggaacuuucgucc

SEQ ID NO: 2019177 - RNA, 19 nt, Artificial Sequence
  Description of Artificial Sequence: Synthetic oligonucleotide
auuagauugugccaguuug

SEQ ID NO: 2019178 - RNA, 19 nt, Artificial Sequence
  Description of Artificial Sequence: Synthetic oligonucleotide
uuucguccagcaaagacag

SEQ ID NO: 2019179 - RNA, 19 nt, Artificial Sequence
  Description of Artificial Sequence: Synthetic oligonucleotide
ucggaaucgacccuuggcg

SEQ ID NO: 2019180 - RNA, 19 nt, Artificial Sequence
  Description of Artificial Sequence: Synthetic oligonucleotide
uucaguagcaggcaauugc

SEQ ID NO: 2019181 - RNA, 19 nt, Artificial Sequence
  Description of Artificial Sequence: Synthetic oligonucleotide
auccacaacacuuaguucu

SEQ ID NO: 2019182 - RNA, 19 nt, Artificial Sequence
  Description of Artificial Sequence: Synthetic oligonucleotide
auugcgauagaauucagau

SEQ ID NO: 2019183 - RNA, 19 nt, Artificial Sequence
  Description of Artificial Sequence: Synthetic oligonucleotide
aacacuuaguucuuuucca

SEQ ID NO: 2019184 - RNA, 19 nt, Artificial Sequence
  Description of Artificial Sequence: Synthetic oligonucleotide
aaucuggauguccacuccg

SEQ ID NO: 2019185 - RNA, 19 nt, Artificial Sequence
  Description of Artificial Sequence: Synthetic oligonucleotide
gauggauucugucacugag

SEQ ID NO: 2019186 - RNA, 19 nt, Artificial Sequence
  Description of Artificial Sequence: Synthetic oligonucleotide
uuggauuacggaacuuucg

SEQ ID NO: 2019187 - RNA, 19 nt, Artificial Sequence
  Description of Artificial Sequence: Synthetic oligonucleotide
acaggauaguucuugauga

SEQ ID NO: 2019188 - RNA, 19 nt, Artificial Sequence
  Description of Artificial Sequence: Synthetic oligonucleotide
ucauagauaccuguggaag

SEQ ID NO: 2019189 - RNA, 19 nt, Artificial Sequence
  Description of Artificial Sequence: Synthetic oligonucleotide
aucuagaacuccugcaugg

SEQ ID NO: 2019190 - RNA, 19 nt, Artificial Sequence
  Description of Artificial Sequence: Synthetic oligonucleotide
agcaaagacagcuuugucu

SEQ ID NO: 2019191 - RNA, 19 nt, Artificial Sequence
  Description of Artificial Sequence: Synthetic oligonucleotide
gaugccgccacauccaugc

SEQ ID NO: 2019192 - RNA, 19 nt, Artificial Sequence
  Description of Artificial Sequence: Synthetic oligonucleotide
ugaauggcugucuucagca

SEQ ID NO: 2019193 - RNA, 19 nt, Artificial Sequence
  Description of Artificial Sequence: Synthetic oligonucleotide
uuuucuuucgauccacaac

SEQ ID NO: 2019194 - RNA, 19 nt, Artificial Sequence
  Description of Artificial Sequence: Synthetic oligonucleotide
auaagcugguuguauuugg

SEQ ID NO: 2019195 - RNA, 19 nt, Artificial Sequence
  Description of Artificial Sequence: Synthetic oligonucleotide
agcugcucggaaucgaccc

SEQ ID NO: 2019196 - RNA, 19 nt, Artificial Sequence
  Description of Artificial Sequence: Synthetic oligonucleotide
acaaucuggauguccacuc

SEQ ID NO: 2019197 - RNA, 19 nt, Artificial Sequence
  Description of Artificial Sequence: Synthetic oligonucleotide
guaaccagcugccugaaug

SEQ ID NO: 2019198 - RNA, 19 nt, Artificial Sequence
  Description of Artificial Sequence: Synthetic oligonucleotide
ugacuguaaggucaucucc

SEQ ID NO: 2019199 - RNA, 19 nt, Artificial Sequence
  Description of Artificial Sequence: Synthetic oligonucleotide
ucuuuuccagcagagcugg

SEQ ID NO: 2019200 - RNA, 19 nt, Artificial Sequence
  Description of Artificial Sequence: Synthetic oligonucleotide
gauagaauucagaugccgc

SEQ ID NO: 2019201 - RNA, 19 nt, Artificial Sequence
  Description of Artificial Sequence: Synthetic oligonucleotide
ugagcgauccucuuggggu

SEQ ID NO: 2019202 - RNA, 19 nt, Artificial Sequence
  Description of Artificial Sequence: Synthetic oligonucleotide
ucaguagcaggcaauugca

SEQ ID NO: 2019203 - RNA, 19 nt, Artificial Sequence
  Description of Artificial Sequence: Synthetic oligonucleotide
ugucuggguaaccagcugc

SEQ ID NO: 2019204 - RNA, 19 nt, Artificial Sequence
  Description of Artificial Sequence: Synthetic oligonucleotide
acaacacuuaguucuuuuc

SEQ ID NO: 2019205 - RNA, 19 nt, Artificial Sequence
  Description of Artificial Sequence: Synthetic oligonucleotide
uuagauugugccaguuugc

SEQ ID NO: 2019206 - RNA, 19 nt, Artificial Sequence
  Description of Artificial Sequence: Synthetic oligonucleotide
cauagauaccuguggaagc

SEQ ID NO: 2019207 - RNA, 19 nt, Artificial Sequence
  Description of Artificial Sequence: Synthetic oligonucleotide
uggauuacggaacuuucgu

SEQ ID NO: 2019208 - RNA, 19 nt, Artificial Sequence
  Description of Artificial Sequence: Synthetic oligonucleotide
agaggaaugagguccacgu

SEQ ID NO: 2019209 - RNA, 19 nt, Artificial Sequence
  Description of Artificial Sequence: Synthetic oligonucleotide
caacacuuaguucuuuucc

SEQ ID NO: 2019210 - RNA, 19 nt, Artificial Sequence
  Description of Artificial Sequence: Synthetic oligonucleotide
uagagucuuguugauaugc

SEQ ID NO: 2019211 - RNA, 19 nt, Artificial Sequence
  Description of Artificial Sequence: Synthetic oligonucleotide
ucgagauuugucuccaucu

SEQ ID NO: 2019212 - RNA, 19 nt, Artificial Sequence
  Description of Artificial Sequence: Synthetic oligonucleotide
agaauucagaugccgccac

SEQ ID NO: 2019213 - RNA, 19 nt, Artificial Sequence
  Description of Artificial Sequence: Synthetic oligonucleotide
uggucaguguuuuauuuca

SEQ ID NO: 2019214 - RNA, 19 nt, Artificial Sequence
  Description of Artificial Sequence: Synthetic oligonucleotide
uuuggauuacggaacuuuc

SEQ ID NO: 2019215 - RNA, 19 nt, Artificial Sequence
  Description of Artificial Sequence: Synthetic oligonucleotide
gucaguguuuuauuucagg

SEQ ID NO: 2019216 - RNA, 19 nt, Artificial Sequence
  Description of Artificial Sequence: Synthetic oligonucleotide
agagcgguggcucaccauc

SEQ ID NO: 2019217 - RNA, 19 nt, Artificial Sequence
  Description of Artificial Sequence: Synthetic oligonucleotide
guagcaggcaauugcaggc

SEQ ID NO: 2019218 - RNA, 19 nt, Artificial Sequence
  Description of Artificial Sequence: Synthetic oligonucleotide
cagcccauuagauugugcc

SEQ ID NO: 2019219 - RNA, 19 nt, Artificial Sequence
  Description of Artificial Sequence: Synthetic oligonucleotide
aggauguugggugcaagcc

SEQ ID NO: 2019220 - RNA, 19 nt, Artificial Sequence
  Description of Artificial Sequence: Synthetic oligonucleotide
uguuuuauuucagggagaa

SEQ ID NO: 2019221 - RNA, 19 nt, Artificial Sequence
  Description of Artificial Sequence: Synthetic oligonucleotide
aguccuggagccuucagcu

SEQ ID NO: 2019222 - RNA, 19 nt, Artificial Sequence
  Description of Artificial Sequence: Synthetic oligonucleotide
ugcuucauagauaccugug

SEQ ID NO: 2019223 - RNA, 19 nt, Artificial Sequence
  Description of Artificial Sequence: Synthetic oligonucleotide
aucgagauuugucuccauc

SEQ ID NO: 2019224 - RNA, 19 nt, Artificial Sequence
  Description of Artificial Sequence: Synthetic oligonucleotide
uucgauccacaacacuuag

SEQ ID NO: 2019225 - RNA, 19 nt, Artificial Sequence
  Description of Artificial Sequence: Synthetic oligonucleotide
acacuuaguucuuuuccag

SEQ ID NO: 2019226 - RNA, 19 nt, Artificial Sequence
  Description of Artificial Sequence: Synthetic oligonucleotide
aucucuuagcuccagugcu

SEQ ID NO: 2019227 - RNA, 19 nt, Artificial Sequence
  Description of Artificial Sequence: Synthetic oligonucleotide
gaucuagaacuccugcaug

SEQ ID NO: 2019228 - RNA, 19 nt, Artificial Sequence
  Description of Artificial Sequence: Synthetic oligonucleotide
uucccauugcgauagaauu

SEQ ID NO: 2019229 - RNA, 19 nt, Artificial Sequence
  Description of Artificial Sequence: Synthetic oligonucleotide
ucaacagccugagcgaucc

SEQ ID NO: 2019230 - RNA, 19 nt, Artificial Sequence
  Description of Artificial Sequence: Synthetic oligonucleotide
agguaucgagauuugucuc

SEQ ID NO: 2019231 - RNA, 19 nt, Artificial Sequence
  Description of Artificial Sequence: Synthetic oligonucleotide
ucgucaggugacuugaagu

SEQ ID NO: 2019232 - RNA, 19 nt, Artificial Sequence
  Description of Artificial Sequence: Synthetic oligonucleotide
ugaugugccgugcaggguc

SEQ ID NO: 2019233 - RNA, 19 nt, Artificial Sequence
  Description of Artificial Sequence: Synthetic oligonucleotide
uguggaagcuccacugggc

SEQ ID NO: 2019234 - RNA, 19 nt, Artificial Sequence
  Description of Artificial Sequence: Synthetic oligonucleotide
aauuaccaccuugucuggg

SEQ ID NO: 2019235 - RNA, 19 nt, Artificial Sequence
  Description of Artificial Sequence: Synthetic oligonucleotide
uugcgauagaauucagaug

SEQ ID NO: 2019236 - RNA, 19 nt, Artificial Sequence
  Description of Artificial Sequence: Synthetic oligonucleotide
uggccuuuggauuacggaa

SEQ ID NO: 2019237 - RNA, 19 nt, Artificial Sequence
  Description of Artificial Sequence: Synthetic oligonucleotide
uggcccuagagucuuguug

SEQ ID NO: 2019238 - RNA, 19 nt, Artificial Sequence
  Description of Artificial Sequence: Synthetic oligonucleotide
gcuucauagauaccugugg

SEQ ID NO: 2019239 - RNA, 19 nt, Artificial Sequence
  Description of Artificial Sequence: Synthetic oligonucleotide
auuacggaacuuucgucca

SEQ ID NO: 2019240 - RNA, 19 nt, Artificial Sequence
  Description of Artificial Sequence: Synthetic oligonucleotide
ugugccaguuugcaggccu

SEQ ID NO: 2019241 - RNA, 19 nt, Artificial Sequence
  Description of Artificial Sequence: Synthetic oligonucleotide
agauaccuguggaagcucc

SEQ ID NO: 2019242 - RNA, 19 nt, Artificial Sequence
  Description of Artificial Sequence: Synthetic oligonucleotide
cuuaguucuuuuccagcag

SEQ ID NO: 2019243 - RNA, 19 nt, Artificial Sequence
  Description of Artificial Sequence: Synthetic oligonucleotide
  modified_base (9)..(9): a, c, u, g, unknown or other
uucagcacncuuuccccag

SEQ ID NO: 2019244 - RNA, 19 nt, Artificial Sequence
  Description of Artificial Sequence: Synthetic oligonucleotide
caucucuuagcuccagugc

SEQ ID NO: 2019245 - RNA, 19 nt, Artificial Sequence
  Description of Artificial Sequence: Synthetic oligonucleotide
gaacuuucguccagcaaag

SEQ ID NO: 2019246 - RNA, 19 nt, Artificial Sequence
  Description of Artificial Sequence: Synthetic oligonucleotide
ugggguuggugacuguaag

SEQ ID NO: 2019247 - RNA, 19 nt, Artificial Sequence
  Description of Artificial Sequence: Synthetic oligonucleotide
ggaacuuucguccagcaaa

SEQ ID NO: 2019248 - RNA, 19 nt, Artificial Sequence
  Description of Artificial Sequence: Synthetic oligonucleotide
uugauaugcuccacagccu

SEQ ID NO: 2019249 - RNA, 19 nt, Artificial Sequence
  Description of Artificial Sequence: Synthetic oligonucleotide
auagauaccuguggaagcu

SEQ ID NO: 2019250 - RNA, 19 nt, Artificial Sequence
  Description of Artificial Sequence: Synthetic oligonucleotide
gguaucgagauuugucucc

SEQ ID NO: 2019251 - RNA, 19 nt, Artificial Sequence
  Description of Artificial Sequence: Synthetic oligonucleotide
aaccagcugccugaauggc

SEQ ID NO: 2019252 - RNA, 19 nt, Artificial Sequence
  Description of Artificial Sequence: Synthetic oligonucleotide
agauugugccaguuugcag

SEQ ID NO: 2019253 - RNA, 19 nt, Artificial Sequence
  Description of Artificial Sequence: Synthetic oligonucleotide
ucccauugcgauagaauuc

SEQ ID NO: 2019254 - RNA, 19 nt, Artificial Sequence
  Description of Artificial Sequence: Synthetic oligonucleotide
uccacggugggguugcccc

SEQ ID NO: 2019255 - RNA, 19 nt, Artificial Sequence
  Description of Artificial Sequence: Synthetic oligonucleotide
uuggccuuuggauuacgga

SEQ ID NO: 2019256 - RNA, 19 nt, Artificial Sequence
  Description of Artificial Sequence: Synthetic oligonucleotide
auuucucgagcaaagauuu

SEQ ID NO: 2019257 - RNA, 19 nt, Artificial Sequence
  Description of Artificial Sequence: Synthetic oligonucleotide
aggauaguucuugaugaag

SEQ ID NO: 2019258 - RNA, 19 nt, Artificial Sequence
  Description of Artificial Sequence: Synthetic oligonucleotide
uagauugugccaguuugca

SEQ ID NO: 2019259 - RNA, 19 nt, Artificial Sequence
  Description of Artificial Sequence: Synthetic oligonucleotide
  modified_base (3)..(3): a, c, u, g, unknown or other
acncuuuccccagguaucg

SEQ ID NO: 2019260 - RNA, 19 nt, Artificial Sequence
  Description of Artificial Sequence: Synthetic oligonucleotide
aauucagaugccgccacau

SEQ ID NO: 2019261 - RNA, 19 nt, Artificial Sequence
  Description of Artificial Sequence: Synthetic oligonucleotide
cuucauagauaccugugga

SEQ ID NO: 2019262 - RNA, 19 nt, Artificial Sequence
  Description of Artificial Sequence: Synthetic oligonucleotide
cuuggcggugugcaggucc

SEQ ID NO: 2019263 - RNA, 19 nt, Artificial Sequence
  Description of Artificial Sequence: Synthetic oligonucleotide
  modified_base (8)..(8): a, c, u, g, unknown or other
ucagcacncuuuccccagg

SEQ ID NO: 2019264 - RNA, 19 nt, Artificial Sequence
  Description of Artificial Sequence: Synthetic oligonucleotide
uuacggaacuuucguccag

SEQ ID NO: 2019265 - RNA, 19 nt, Artificial Sequence
  Description of Artificial Sequence: Synthetic oligonucleotide
cuguggaagcuccacuggg

SEQ ID NO: 2019266 - RNA, 19 nt, Artificial Sequence
  Description of Artificial Sequence: Synthetic oligonucleotide
cucggaaucgacccuuggc

SEQ ID NO: 2019267 - RNA, 19 nt, Artificial Sequence
  Description of Artificial Sequence: Synthetic oligonucleotide
ugcagagucccaccacgag

SEQ ID NO: 2019268 - RNA, 19 nt, Artificial Sequence
  Description of Artificial Sequence: Synthetic oligonucleotide
uccacuccggagaggaaug

SEQ ID NO: 2019269 - RNA, 19 nt, Artificial Sequence
  Description of Artificial Sequence: Synthetic oligonucleotide
  modified_base (4)..(4): a, c, u, g, unknown or other
cacncuuuccccagguauc

SEQ ID NO: 2019270 - RNA, 19 nt, Artificial Sequence
  Description of Artificial Sequence: Synthetic oligonucleotide
gagucuuguugauaugcuc

SEQ ID NO: 2019271 - RNA, 19 nt, Artificial Sequence
  Description of Artificial Sequence: Synthetic oligonucleotide
ucguccucccacauuggug

SEQ ID NO: 2019272 - RNA, 19 nt, Artificial Sequence
  Description of Artificial Sequence: Synthetic oligonucleotide
uugggugcaagccucccuc

SEQ ID NO: 2019273 - RNA, 19 nt, Artificial Sequence
  Description of Artificial Sequence: Synthetic oligonucleotide
aacggcacggggcaccagu

SEQ ID NO: 2019274 - RNA, 19 nt, Artificial Sequence
  Description of Artificial Sequence: Synthetic oligonucleotide
cuuccaggauguugggugc

SEQ ID NO: 2019275 - RNA, 19 nt, Artificial Sequence
  Description of Artificial Sequence: Synthetic oligonucleotide
ucuagaacuccugcauggc

SEQ ID NO: 2019276 - RNA, 19 nt, Artificial Sequence
  Description of Artificial Sequence: Synthetic oligonucleotide
gauguugggugcaagccuc

SEQ ID NO: 2019277 - RNA, 19 nt, Artificial Sequence
  Description of Artificial Sequence: Synthetic oligonucleotide
uucuuucgauccacaacac

SEQ ID NO: 2019278 - RNA, 19 nt, Artificial Sequence
  Description of Artificial Sequence: Synthetic oligonucleotide
uggauggauucugucacug

SEQ ID NO: 2019279 - RNA, 19 nt, Artificial Sequence
  Description of Artificial Sequence: Synthetic oligonucleotide
caguguuuuauuucaggga

SEQ ID NO: 2019280 - RNA, 19 nt, Artificial Sequence
  Description of Artificial Sequence: Synthetic oligonucleotide
acuccggagaggaaugagg

SEQ ID NO: 2019281 - RNA, 19 nt, Artificial Sequence
  Description of Artificial Sequence: Synthetic oligonucleotide
cugagcgauccucuugggg

SEQ ID NO: 2019282 - RNA, 19 nt, Artificial Sequence
  Description of Artificial Sequence: Synthetic oligonucleotide
gguuguauuuggccagacg

SEQ ID NO: 2019283 - RNA, 19 nt, Artificial Sequence
  Description of Artificial Sequence: Synthetic oligonucleotide
caaucuggauguccacucc

SEQ ID NO: 2019284 - RNA, 19 nt, Artificial Sequence
  Description of Artificial Sequence: Synthetic oligonucleotide
accuugucuggguaaccag

SEQ ID NO: 2019285 - RNA, 19 nt, Artificial Sequence
  Description of Artificial Sequence: Synthetic oligonucleotide
gaggaaugagguccacgug

SEQ ID NO: 2019286 - RNA, 19 nt, Artificial Sequence
  Description of Artificial Sequence: Synthetic oligonucleotide
gucgucaggugacuugaag

SEQ ID NO: 2019287 - RNA, 19 nt, Artificial Sequence
  Description of Artificial Sequence: Synthetic oligonucleotide
agcccauuagauugugcca

SEQ ID NO: 2019288 - RNA, 19 nt, Artificial Sequence
  Description of Artificial Sequence: Synthetic oligonucleotide
ucuccaagagccuccucaa

SEQ ID NO: 2019289 - RNA, 19 nt, Artificial Sequence
  Description of Artificial Sequence: Synthetic oligonucleotide
cuuucgauccacaacacuu

SEQ ID NO: 2019290 - RNA, 19 nt, Artificial Sequence
  Description of Artificial Sequence: Synthetic oligonucleotide
gcagagucccaccacgagg

SEQ ID NO: 2019291 - RNA, 19 nt, Artificial Sequence
  Description of Artificial Sequence: Synthetic oligonucleotide
agacgcucugaacggcacg

SEQ ID NO: 2019292 - RNA, 19 nt, Artificial Sequence
  Description of Artificial Sequence: Synthetic oligonucleotide
ucgauccacaacacuuagu

SEQ ID NO: 2019293 - RNA, 19 nt, Artificial Sequence
  Description of Artificial Sequence: Synthetic oligonucleotide
cauugcgauagaauucaga

SEQ ID NO: 2019294 - RNA, 19 nt, Artificial Sequence
  Description of Artificial Sequence: Synthetic oligonucleotide
  modified_base (10)..(10): a, c, u, g, unknown or other
cuucagcacncuuucccca

SEQ ID NO: 2019295 - RNA, 19 nt, Artificial Sequence
  Description of Artificial Sequence: Synthetic oligonucleotide
uaccuguggaagcuccacu

SEQ ID NO: 2019296 - RNA, 19 nt, Artificial Sequence
  Description of Artificial Sequence: Synthetic oligonucleotide
gucaggugacuugaagucc

SEQ ID NO: 2019297 - RNA, 19 nt, Artificial Sequence
  Description of Artificial Sequence: Synthetic oligonucleotide
accacaggauaguucuuga

SEQ ID NO: 2019298 - RNA, 19 nt, Artificial Sequence
  Description of Artificial Sequence: Synthetic oligonucleotide
uacggaacuuucguccagc

SEQ ID NO: 2019299 - RNA, 19 nt, Artificial Sequence
  Description of Artificial Sequence: Synthetic oligonucleotide
aguccagaucauacuuccc

SEQ ID NO: 2019300 - RNA, 19 nt, Artificial Sequence
  Description of Artificial Sequence: Synthetic oligonucleotide
gaugugccgugcagggucg

SEQ ID NO: 2019301 - RNA, 19 nt, Artificial Sequence
  Description of Artificial Sequence: Synthetic oligonucleotide
ugggguugccccuggaguc

SEQ ID NO: 2019302 - RNA, 19 nt, Artificial Sequence
  Description of Artificial Sequence: Synthetic oligonucleotide
ugccgccacauccaugcca

SEQ ID NO: 2019303 - RNA, 19 nt, Artificial Sequence
  Description of Artificial Sequence: Synthetic oligonucleotide
uugggguuggugacuguaa

SEQ ID NO: 2019304 - RNA, 19 nt, Artificial Sequence
  Description of Artificial Sequence: Synthetic oligonucleotide
cuagagucuuguugauaug

SEQ ID NO: 2019305 - RNA, 19 nt, Artificial Sequence
  Description of Artificial Sequence: Synthetic oligonucleotide
augccaauuaccaccuugu

SEQ ID NO: 2019306 - RNA, 19 nt, Artificial Sequence
  Description of Artificial Sequence: Synthetic oligonucleotide
uccacaacacuuaguucuu

SEQ ID NO: 2019307 - RNA, 19 nt, Artificial Sequence
  Description of Artificial Sequence: Synthetic oligonucleotide
ugaccuucaguagcaggca

SEQ ID NO: 2019308 - RNA, 19 nt, Artificial Sequence
  Description of Artificial Sequence: Synthetic oligonucleotide
gauuucucgagcaaagauu

SEQ ID NO: 2019309 - RNA, 19 nt, Artificial Sequence
  Description of Artificial Sequence: Synthetic oligonucleotide
ucucuuagcuccagugcuu

SEQ ID NO: 2019310 - RNA, 19 nt, Artificial Sequence
  Description of Artificial Sequence: Synthetic oligonucleotide
ugccaauuaccaccuuguc

SEQ ID NO: 2019311 - RNA, 19 nt, Artificial Sequence
  Description of Artificial Sequence: Synthetic oligonucleotide
agggucgucaggugacuug

SEQ ID NO: 2019312 - RNA, 19 nt, Artificial Sequence
  Description of Artificial Sequence: Synthetic oligonucleotide
gcaauugcaggccuucuuc

SEQ ID NO: 2019313 - RNA, 19 nt, Artificial Sequence
  Description of Artificial Sequence: Synthetic oligonucleotide
uguccugugcagaguccca

SEQ ID NO: 2019314 - RNA, 19 nt, Artificial Sequence
  Description of Artificial Sequence: Synthetic oligonucleotide
agcgguggcucaccaucac

SEQ ID NO: 2019315 - RNA, 19 nt, Artificial Sequence
  Description of Artificial Sequence: Synthetic oligonucleotide
agcuccagugcuucauaga

SEQ ID NO: 2019316 - RNA, 19 nt, Artificial Sequence
  Description of Artificial Sequence: Synthetic oligonucleotide
gaauucagaugccgccaca

SEQ ID NO: 2019317 - RNA, 19 nt, Artificial Sequence
  Description of Artificial Sequence: Synthetic oligonucleotide
  modified_base (11)..(11): a, c, u, g, unknown or other
ccuucagcacncuuucccc

SEQ ID NO: 2019318 - RNA, 19 nt, Artificial Sequence
  Description of Artificial Sequence: Synthetic oligonucleotide
gaaucgacccuuggcggug

SEQ ID NO: 2019319 - RNA, 19 nt, Artificial Sequence
  Description of Artificial Sequence: Synthetic oligonucleotide
ggcccuagagucuuguuga

SEQ ID NO: 2019320 - RNA, 19 nt, Artificial Sequence
  Description of Artificial Sequence: Synthetic oligonucleotide
ggccucauuguucuuccag

SEQ ID NO: 2019321 - RNA, 19 nt, Artificial Sequence
  Description of Artificial Sequence: Synthetic oligonucleotide
gcccauuagauugugccag

SEQ ID NO: 2019322 - RNA, 19 nt, Artificial Sequence
  Description of Artificial Sequence: Synthetic oligonucleotide
gauuugucuccaucucuua

SEQ ID NO: 2019323 - RNA, 19 nt, Artificial Sequence
  Description of Artificial Sequence: Synthetic oligonucleotide
ggauuacggaacuuucguc

SEQ ID NO: 2019324 - RNA, 19 nt, Artificial Sequence
  Description of Artificial Sequence: Synthetic oligonucleotide
ugccaguuugcaggccugg

SEQ ID NO: 2019325 - RNA, 19 nt, Artificial Sequence
  Description of Artificial Sequence: Synthetic oligonucleotide
caccacgaggucagcaaug

SEQ ID NO: 2019326 - RNA, 19 nt, Artificial Sequence
  Description of Artificial Sequence: Synthetic oligonucleotide
cagcugcucggaaucgacc

SEQ ID NO: 2019327 - RNA, 19 nt, Artificial Sequence
  Description of Artificial Sequence: Synthetic oligonucleotide
acguggcccagucauccug

SEQ ID NO: 2019328 - RNA, 19 nt, Artificial Sequence
  Description of Artificial Sequence: Synthetic oligonucleotide
ugccgugcagggucgucag

SEQ ID NO: 2019329 - RNA, 19 nt, Artificial Sequence
  Description of Artificial Sequence: Synthetic oligonucleotide
auguugggugcaagccucc

SEQ ID NO: 2019330 - RNA, 19 nt, Artificial Sequence
  Description of Artificial Sequence: Synthetic oligonucleotide
aucauacuucccauugcga

SEQ ID NO: 2019331 - RNA, 19 nt, Artificial Sequence
  Description of Artificial Sequence: Synthetic oligonucleotide
uugcaggccuucuucucaa

SEQ ID NO: 2019332 - RNA, 19 nt, Artificial Sequence
  Description of Artificial Sequence: Synthetic oligonucleotide
ugcucggaaucgacccuug

SEQ ID NO: 2019333 - RNA, 19 nt, Artificial Sequence
  Description of Artificial Sequence: Synthetic oligonucleotide
ggaaugagguccacguggc

SEQ ID NO: 2019334 - RNA, 19 nt, Artificial Sequence
  Description of Artificial Sequence: Synthetic oligonucleotide
aggauuucucgagcaaaga

SEQ ID NO: 2019335 - RNA, 19 nt, Artificial Sequence
  Description of Artificial Sequence: Synthetic oligonucleotide
auuuggccuuuggauuacg

SEQ ID NO: 2019336 - RNA, 19 nt, Artificial Sequence
  Description of Artificial Sequence: Synthetic oligonucleotide
acggaacuuucguccagca

SEQ ID NO: 2019337 - RNA, 19 nt, Artificial Sequence
  Description of Artificial Sequence: Synthetic oligonucleotide
cucugaacggcacggggca

SEQ ID NO: 2019338 - RNA, 19 nt, Artificial Sequence
  Description of Artificial Sequence: Synthetic oligonucleotide
guaucgagauuugucucca

SEQ ID NO: 2019339 - RNA, 19 nt, Artificial Sequence
  Description of Artificial Sequence: Synthetic oligonucleotide
uccggagaggaaugagguc

SEQ ID NO: 2019340 - RNA, 19 nt, Artificial Sequence
  Description of Artificial Sequence: Synthetic oligonucleotide
aacuuucguccagcaaaga

SEQ ID NO: 2019341 - RNA, 19 nt, Artificial Sequence
  Description of Artificial Sequence: Synthetic oligonucleotide
guacagcuccccaagcuuc

SEQ ID NO: 2019342 - RNA, 19 nt, Artificial Sequence
  Description of Artificial Sequence: Synthetic oligonucleotide
uaccaccuugucuggguaa

SEQ ID NO: 2019343 - RNA, 19 nt, Artificial Sequence
  Description of Artificial Sequence: Synthetic oligonucleotide
uuucucgagcaaagauuuu

SEQ ID NO: 2019344 - RNA, 19 nt, Artificial Sequence
  Description of Artificial Sequence: Synthetic oligonucleotide
uguugggugcaagccuccc

SEQ ID NO: 2019345 - RNA, 19 nt, Artificial Sequence
  Description of Artificial Sequence: Synthetic oligonucleotide
auuucagggagaagggcuu

SEQ ID NO: 2019346 - RNA, 19 nt, Artificial Sequence
  Description of Artificial Sequence: Synthetic oligonucleotide
  modified_base (15)..(15): a, c, u, g, unknown or other
acagccuucagcacncuuu

SEQ ID NO: 2019347 - RNA, 19 nt, Artificial Sequence
  Description of Artificial Sequence: Synthetic oligonucleotide
cagagucccaccacgaggu

SEQ ID NO: 2019348 - RNA, 19 nt, Artificial Sequence
  Description of Artificial Sequence: Synthetic oligonucleotide
cucuuagcuccagugcuuc

SEQ ID NO: 2019349 - RNA, 19 nt, Artificial Sequence
  Description of Artificial Sequence: Synthetic oligonucleotide
ggauaguucuugaugaagu

SEQ ID NO: 2019350 - RNA, 19 nt, Artificial Sequence
  Description of Artificial Sequence: Synthetic oligonucleotide
cucaacagccugagcgauc

SEQ ID NO: 2019351 - RNA, 19 nt, Artificial Sequence
  Description of Artificial Sequence: Synthetic oligonucleotide
augccgccacauccaugcc

SEQ ID NO: 2019352 - RNA, 19 nt, Artificial Sequence
  Description of Artificial Sequence: Synthetic oligonucleotide
uugccccuggaguccagga

SEQ ID NO: 2019353 - RNA, 19 nt, Artificial Sequence
  Description of Artificial Sequence: Synthetic oligonucleotide
uccccaagcuucuccccac

SEQ ID NO: 2019354 - RNA, 19 nt, Artificial Sequence
  Description of Artificial Sequence: Synthetic oligonucleotide
cugaacggcacggggcacc

SEQ ID NO: 2019355 - RNA, 19 nt, Artificial Sequence
  Description of Artificial Sequence: Synthetic oligonucleotide
cgauagaauucagaugccg

SEQ ID NO: 2019356 - RNA, 19 nt, Artificial Sequence
  Description of Artificial Sequence: Synthetic oligonucleotide
ccuguggaagcuccacugg

SEQ ID NO: 2019357 - RNA, 19 nt, Artificial Sequence
  Description of Artificial Sequence: Synthetic oligonucleotide
cuccggagaggaaugaggu

SEQ ID NO: 2019358 - RNA, 19 nt, Artificial Sequence
  Description of Artificial Sequence: Synthetic oligonucleotide
gaccuucaguagcaggcaa

SEQ ID NO: 2019359 - RNA, 19 nt, Artificial Sequence
  Description of Artificial Sequence: Synthetic oligonucleotide
cuuuuccagcagagcuggc

SEQ ID NO: 2019360 - RNA, 19 nt, Artificial Sequence
  Description of Artificial Sequence: Synthetic oligonucleotide
ugaacggcacggggcacca

SEQ ID NO: 2019361 - RNA, 19 nt, Artificial Sequence
  Description of Artificial Sequence: Synthetic oligonucleotide
cauuuggccuuuggauuac

SEQ ID NO: 2019362 - RNA, 19 nt, Artificial Sequence
  Description of Artificial Sequence: Synthetic oligonucleotide
ggauuucucgagcaaagau

SEQ ID NO: 2019363 - RNA, 19 nt, Artificial Sequence
  Description of Artificial Sequence: Synthetic oligonucleotide
uuggaguccuggagccuuc

SEQ ID NO: 2019364 - RNA, 19 nt, Artificial Sequence
  Description of Artificial Sequence: Synthetic oligonucleotide
aaucgacccuuggcggugu

SEQ ID NO: 2019365 - RNA, 19 nt, Artificial Sequence
  Description of Artificial Sequence: Synthetic oligonucleotide
cgucaggugacuugaaguc

SEQ ID NO: 2019366 - RNA, 19 nt, Artificial Sequence
  Description of Artificial Sequence: Synthetic oligonucleotide
ggaucuagaacuccugcau

SEQ ID NO: 2019367 - RNA, 19 nt, Artificial Sequence
  Description of Artificial Sequence: Synthetic oligonucleotide
ggucaguguuuuauuucag

SEQ ID NO: 2019368 - RNA, 19 nt, Artificial Sequence
  Description of Artificial Sequence: Synthetic oligonucleotide
uaucgagauuugucuccau

SEQ ID NO: 2019369 - RNA, 19 nt, Artificial Sequence
  Description of Artificial Sequence: Synthetic oligonucleotide
ggccuuuggauuacggaac

SEQ ID NO: 2019370 - RNA, 19 nt, Artificial Sequence
  Description of Artificial Sequence: Synthetic oligonucleotide
uccacguggcccagucauc

SEQ ID NO: 2019371 - RNA, 19 nt, Artificial Sequence
  Description of Artificial Sequence: Synthetic oligonucleotide
ugguuguauuuggccagac

SEQ ID NO: 2019372 - RNA, 19 nt, Artificial Sequence
  Description of Artificial Sequence: Synthetic oligonucleotide
gugcuucauagauaccugu

SEQ ID NO: 2019373 - RNA, 19 nt, Artificial Sequence
  Description of Artificial Sequence: Synthetic oligonucleotide
caauugcaggccuucuucu

SEQ ID NO: 2019374 - RNA, 19 nt, Artificial Sequence
  Description of Artificial Sequence: Synthetic oligonucleotide
ccuagagucuuguugauau

SEQ ID NO: 2019375 - RNA, 19 nt, Artificial Sequence
  Description of Artificial Sequence: Synthetic oligonucleotide
caggauaguucuugaugaa

SEQ ID NO: 2019376 - RNA, 19 nt, Artificial Sequence
  Description of Artificial Sequence: Synthetic oligonucleotide
caggcaauugcaggccuuc

SEQ ID NO: 2019377 - RNA, 19 nt, Artificial Sequence
  Description of Artificial Sequence: Synthetic oligonucleotide
cacuccggagaggaaugag

SEQ ID NO: 2019378 - RNA, 19 nt, Artificial Sequence
  Description of Artificial Sequence: Synthetic oligonucleotide
cggaaucgacccuuggcgg

SEQ ID NO: 2019379 - RNA, 19 nt, Artificial Sequence
  Description of Artificial Sequence: Synthetic oligonucleotide
ggaguccaggauuucucga

SEQ ID NO: 2019380 - RNA, 19 nt, Artificial Sequence
  Description of Artificial Sequence: Synthetic oligonucleotide
  modified_base (6)..(6): a, c, u, g, unknown or other
agcacncuuuccccaggua

SEQ ID NO: 2019381 - RNA, 19 nt, Artificial Sequence
  Description of Artificial Sequence: Synthetic oligonucleotide
ggugacuguaaggucaucu

SEQ ID NO: 2019382 - RNA, 19 nt, Artificial Sequence
  Description of Artificial Sequence: Synthetic oligonucleotide
uguccacuccggagaggaa

SEQ ID NO: 2019383 - RNA, 19 nt, Artificial Sequence
  Description of Artificial Sequence: Synthetic oligonucleotide
ggauggauucugucacuga

SEQ ID NO: 2019384 - RNA, 19 nt, Artificial Sequence
  Description of Artificial Sequence: Synthetic oligonucleotide
ucuugggguuggugacugu

SEQ ID NO: 2019385 - RNA, 19 nt, Artificial Sequence
  Description of Artificial Sequence: Synthetic oligonucleotide
ggauguugggugcaagccu

SEQ ID NO: 2019386 - RNA, 19 nt, Artificial Sequence
  Description of Artificial Sequence: Synthetic oligonucleotide
ucgacccuuggcggugugc

SEQ ID NO: 2019387 - RNA, 19 nt, Artificial Sequence
  Description of Artificial Sequence: Synthetic oligonucleotide
accuucaguagcaggcaau

SEQ ID NO: 2019388 - RNA, 19 nt, Artificial Sequence
  Description of Artificial Sequence: Synthetic oligonucleotide
gcucggaaucgacccuugg

SEQ ID NO: 2019389 - RNA, 19 nt, Artificial Sequence
  Description of Artificial Sequence: Synthetic oligonucleotide
uugugccaguuugcaggcc

SEQ ID NO: 2019390 - RNA, 19 nt, Artificial Sequence
  Description of Artificial Sequence: Synthetic oligonucleotide
acgcucugaacggcacggg

SEQ ID NO: 2019391 - RNA, 19 nt, Artificial Sequence
  Description of Artificial Sequence: Synthetic oligonucleotide
ggugcaagccucccucguc

SEQ ID NO: 2019392 - RNA, 19 nt, Artificial Sequence
  Description of Artificial Sequence: Synthetic oligonucleotide
guccugugcagagucccac

SEQ ID NO: 2019393 - RNA, 19 nt, Artificial Sequence
  Description of Artificial Sequence: Synthetic oligonucleotide
agcgauccucuugggguug

SEQ ID NO: 2019394 - RNA, 19 nt, Artificial Sequence
  Description of Artificial Sequence: Synthetic oligonucleotide
aggugacuugaaguccaga

SEQ ID NO: 2019395 - RNA, 19 nt, Artificial Sequence
  Description of Artificial Sequence: Synthetic oligonucleotide
cauuagauugugccaguuu

SEQ ID NO: 2019396 - RNA, 19 nt, Artificial Sequence
  Description of Artificial Sequence: Synthetic oligonucleotide
guccucccacauugguggc

SEQ ID NO: 2019397 - RNA, 19 nt, Artificial Sequence
  Description of Artificial Sequence: Synthetic oligonucleotide
cuugggguuggugacugua

SEQ ID NO: 2019398 - RNA, 19 nt, Artificial Sequence
  Description of Artificial Sequence: Synthetic oligonucleotide
ccacguggcccagucaucc

SEQ ID NO: 2019399 - RNA, 19 nt, Artificial Sequence
  Description of Artificial Sequence: Synthetic oligonucleotide
  modified_base (5)..(5): a, c, u, g, unknown or other
gcacncuuuccccagguau

SEQ ID NO: 2019400 - RNA, 19 nt, Artificial Sequence
  Description of Artificial Sequence: Synthetic oligonucleotide
gagcgguggcucaccauca

SEQ ID NO: 2019401 - RNA, 19 nt, Artificial Sequence
  Description of Artificial Sequence: Synthetic oligonucleotide
gcgauagaauucagaugcc

SEQ ID NO: 2019402 - RNA, 19 nt, Artificial Sequence
  Description of Artificial Sequence: Synthetic oligonucleotide
cacaacacuuaguucuuuu

SEQ ID NO: 2019403 - RNA, 19 nt, Artificial Sequence
  Description of Artificial Sequence: Synthetic oligonucleotide
aggcaauugcaggccuucu

SEQ ID NO: 2019404 - RNA, 19 nt, Artificial Sequence
  Description of Artificial Sequence: Synthetic oligonucleotide
guugggugcaagccucccu

SEQ ID NO: 2019405 - RNA, 19 nt, Artificial Sequence
  Description of Artificial Sequence: Synthetic oligonucleotide
ccagcccauuagauugugc

SEQ ID NO: 2019406 - RNA, 19 nt, Artificial Sequence
  Description of Artificial Sequence: Synthetic oligonucleotide
agaugccgccacauccaug

SEQ ID NO: 2019407 - RNA, 19 nt, Artificial Sequence
  Description of Artificial Sequence: Synthetic oligonucleotide
ccauugcgauagaauucag

SEQ ID NO: 2019408 - RNA, 19 nt, Artificial Sequence
  Description of Artificial Sequence: Synthetic oligonucleotide
ggaaucgacccuuggcggu

SEQ ID NO: 2019409 - RNA, 19 nt, Artificial Sequence
  Description of Artificial Sequence: Synthetic oligonucleotide
gugccaguuugcaggccug

SEQ ID NO: 2019410 - RNA, 19 nt, Artificial Sequence
  Description of Artificial Sequence: Synthetic oligonucleotide
gggucgucaggugacuuga

SEQ ID NO: 2019411 - RNA, 19 nt, Artificial Sequence
  Description of Artificial Sequence: Synthetic oligonucleotide
aucgacccuuggcggugug

SEQ ID NO: 2019412 - RNA, 19 nt, Artificial Sequence
  Description of Artificial Sequence: Synthetic oligonucleotide
gagcgauccucuugggguu

SEQ ID NO: 2019413 - RNA, 19 nt, Artificial Sequence
  Description of Artificial Sequence: Synthetic oligonucleotide
gugccgugcagggucguca

SEQ ID NO: 2019414 - RNA, 19 nt, Artificial Sequence
  Description of Artificial Sequence: Synthetic oligonucleotide
cgcucugaacggcacgggg

SEQ ID NO: 2019415 - RNA, 19 nt, Artificial Sequence
  Description of Artificial Sequence: Synthetic oligonucleotide
ugugccgugcagggucguc

SEQ ID NO: 2019416 - RNA, 19 nt, Artificial Sequence
  Description of Artificial Sequence: Synthetic oligonucleotide
ccagugcuucauagauacc

SEQ ID NO: 2019417 - RNA, 19 nt, Artificial Sequence
  Description of Artificial Sequence: Synthetic oligonucleotide
caagagccuccucaauccu

SEQ ID NO: 2019418 - RNA, 19 nt, Artificial Sequence
  Description of Artificial Sequence: Synthetic oligonucleotide
ggcggugugcagguccacc

SEQ ID NO: 2019419 - RNA, 19 nt, Artificial Sequence
  Description of Artificial Sequence: Synthetic oligonucleotide
guccacuccggagaggaau

SEQ ID NO: 2019420 - RNA, 19 nt, Artificial Sequence
  Description of Artificial Sequence: Synthetic oligonucleotide
  modified_base (7)..(7): a, c, u, g, unknown or other
cagcacncuuuccccaggu

SEQ ID NO: 2019421 - RNA, 19 nt, Artificial Sequence
  Description of Artificial Sequence: Synthetic oligonucleotide
ccucguccucccacauugg

SEQ ID NO: 2019422 - RNA, 19 nt, Artificial Sequence
  Description of Artificial Sequence: Synthetic oligonucleotide
cucguccucccacauuggu

SEQ ID NO: 2019423 - RNA, 19 nt, Artificial Sequence
  Description of Artificial Sequence: Synthetic oligonucleotide
cauggccagcuugucaacu

SEQ ID NO: 2019424 - RNA, 19 nt, Artificial Sequence
  Description of Artificial Sequence: Synthetic oligonucleotide
gaacggcacggggcaccag

SEQ ID NO: 2019425 - RNA, 19 nt, Artificial Sequence
  Description of Artificial Sequence: Synthetic oligonucleotide
cccacgggaaggaucuaga

SEQ ID NO: 2019426 - RNA, 19 nt, Artificial Sequence
  Description of Artificial Sequence: Synthetic oligonucleotide
gccgccacauccaugccaa

SEQ ID NO: 2019427 - RNA, 19 nt, Artificial Sequence
  Description of Artificial Sequence: Synthetic oligonucleotide
cucccacauugguggcguc

SEQ ID NO: 2019428 - RNA, 19 nt, Artificial Sequence
  Description of Artificial Sequence: Synthetic oligonucleotide
gcgauccucuugggguugg

SEQ ID NO: 2019429 - RNA, 19 nt, Artificial Sequence
  Description of Artificial Sequence: Synthetic oligonucleotide
  modified_base (2)..(2): a, c, u, g, unknown or other
cncuuuccccagguaucga

SEQ ID NO: 2019430 - RNA, 19 nt, Artificial Sequence
  Description of Artificial Sequence: Synthetic oligonucleotide
gccgugcagggucgucagg

SEQ ID NO: 2019431 - RNA, 19 nt, Artificial Sequence
  Description of Artificial Sequence: Synthetic oligonucleotide
  modified_base (16)..(16): a, c, u, g, unknown or other
cacagccuucagcacncuu

SEQ ID NO: 2019432 - RNA, 19 nt, Artificial Sequence
  Description of Artificial Sequence: Synthetic oligonucleotide
gcaagccucccucguccuc

SEQ ID NO: 2019433 - RNA, 19 nt, Artificial Sequence
  Description of Artificial Sequence: Synthetic oligonucleotide
ccccagguaucgagauuug

SEQ ID NO: 2019434 - RNA, 19 nt, Artificial Sequence
  Description of Artificial Sequence: Synthetic oligonucleotide
uggcggugugcagguccac

SEQ ID NO: 2019435 - RNA, 19 nt, Artificial Sequence
  Description of Artificial Sequence: Synthetic oligonucleotide
gcugcucggaaucgacccu

SEQ ID NO: 2019436 - RNA, 19 nt, Artificial Sequence
  Description of Artificial Sequence: Synthetic oligonucleotide
augugccgugcagggucgu

SEQ ID NO: 2019437 - RNA, 19 nt, Artificial Sequence
  Description of Artificial Sequence: Synthetic oligonucleotide
cggagaggaaugaggucca

SEQ ID NO: 2019438 - RNA, 19 nt, Artificial Sequence
  Description of Artificial Sequence: Synthetic oligonucleotide
cagaugccgccacauccau

SEQ ID NO: 2019439 - RNA, 19 nt, Artificial Sequence
  Description of Artificial Sequence: Synthetic oligonucleotide
cuccaagagccuccucaau

SEQ ID NO: 2019440 - RNA, 19 nt, Artificial Sequence
  Description of Artificial Sequence: Synthetic oligonucleotide
gccaguuugcaggccugga

SEQ ID NO: 2019441 - RNA, 19 nt, Artificial Sequence
  Description of Artificial Sequence: Synthetic oligonucleotide
cuggagccuucagcuucuc

SEQ ID NO: 2019442 - RNA, 19 nt, Artificial Sequence
  Description of Artificial Sequence: Synthetic oligonucleotide
gggccucauuguucuucca

SEQ ID NO: 2019443 - RNA, 19 nt, Artificial Sequence
  Description of Artificial Sequence: Synthetic oligonucleotide
caucucccacaaucuggau

SEQ ID NO: 2019444 - RNA, 19 nt, Artificial Sequence
  Description of Artificial Sequence: Synthetic oligonucleotide
guggcccagucauccuggu

SEQ ID NO: 2019445 - RNA, 19 nt, Artificial Sequence
  Description of Artificial Sequence: Synthetic oligonucleotide
cacguggcccagucauccu

SEQ ID NO: 2019446 - RNA, 19 nt, Artificial Sequence
  Description of Artificial Sequence: Synthetic oligonucleotide
gggugcaagccucccucgu

SEQ ID NO: 2019447 - RNA, 19 nt, Artificial Sequence
  Description of Artificial Sequence: Synthetic oligonucleotide
ccagagcgguggcucacca

SEQ ID NO: 2019448 - RNA, 19 nt, Artificial Sequence
  Description of Artificial Sequence: Synthetic oligonucleotide
ccagaucauacuucccauu

SEQ ID NO: 2019449 - RNA, 19 nt, Artificial Sequence
  Description of Artificial Sequence: Synthetic oligonucleotide
ccuggaguccaggauuucu

SEQ ID NO: 2019450 - RNA, 19 nt, Artificial Sequence
  Description of Artificial Sequence: Synthetic oligonucleotide
cccauuagauugugccagu

SEQ ID NO: 2019451 - RNA, 19 nt, Artificial Sequence
  Description of Artificial Sequence: Synthetic oligonucleotide
ccaguuugcaggccuggau

SEQ ID NO: 2019452 - RNA, 19 nt, Artificial Sequence
  Description of Artificial Sequence: Synthetic oligonucleotide
gguaaccagcugccugaau

SEQ ID NO: 2019453 - RNA, 19 nt, Artificial Sequence
  Description of Artificial Sequence: Synthetic oligonucleotide
ggguaaccagcugccugaa

SEQ ID NO: 2019454 - RNA, 19 nt, Artificial Sequence
  Description of Artificial Sequence: Synthetic oligonucleotide
cugcucggaaucgacccuu

SEQ ID NO: 2019455 - RNA, 19 nt, Artificial Sequence
  Description of Artificial Sequence: Synthetic oligonucleotide
ccacaggauaguucuugau

SEQ ID NO: 2019456 - RNA, 19 nt, Artificial Sequence
  Description of Artificial Sequence: Synthetic oligonucleotide
ggucgucaggugacuugaa

SEQ ID NO: 2019457 - RNA, 19 nt, Artificial Sequence
  Description of Artificial Sequence: Synthetic oligonucleotide
gcuggcccuagagucuugu

SEQ ID NO: 2019458 - RNA, 19 nt, Artificial Sequence
  Description of Artificial Sequence: Synthetic oligonucleotide
cggaacuuucguccagcaa

SEQ ID NO: 2019459 - RNA, 19 nt, Artificial Sequence
  Description of Artificial Sequence: Synthetic oligonucleotide
ccgugcagggucgucaggu

SEQ ID NO: 2019460 - RNA, 19 nt, Artificial Sequence
  Description of Artificial Sequence: Synthetic oligonucleotide
gcccuagagucuuguugau

SEQ ID NO: 2019461 - RNA, 19 nt, Artificial Sequence
  Description of Artificial Sequence: Synthetic oligonucleotide
ccacuccggagaggaauga

SEQ ID NO: 2019462 - RNA, 19 nt, Artificial Sequence
  Description of Artificial Sequence: Synthetic oligonucleotide
cagccugagcgauccucuu

SEQ ID NO: 2019463 - RNA, 19 nt, Artificial Sequence
  Description of Artificial Sequence: Synthetic oligonucleotide
gagguccacguggcccagu

SEQ ID NO: 2019464 - RNA, 19 nt, Artificial Sequence
  Description of Artificial Sequence: Synthetic oligonucleotide
cgaggucagcaaugaaagu

SEQ ID NO: 2019465 - RNA, 19 nt, Artificial Sequence
  Description of Artificial Sequence: Synthetic oligonucleotide
caacagccugagcgauccu

SEQ ID NO: 2019466 - RNA, 19 nt, Artificial Sequence
  Description of Artificial Sequence: Synthetic oligonucleotide
ccucccacauugguggcgu

SEQ ID NO: 2019467 - RNA, 19 nt, Artificial Sequence
  Description of Artificial Sequence: Synthetic oligonucleotide
ccaccacgaggucagcaau

SEQ ID NO: 2019468 - RNA, 19 nt, Artificial Sequence
  Description of Artificial Sequence: Synthetic oligonucleotide
cccuuggcggugugcaggu

SEQ ID NO: 2019469 - RNA, 19 nt, Artificial Sequence
  Description of Artificial Sequence: Synthetic oligonucleotide
ccauuagauugugccaguu

SEQ ID NO: 2019470 - RNA, 19 nt, Artificial Sequence
  Description of Artificial Sequence: Synthetic oligonucleotide
ccccuggaguccaggauuu

SEQ ID NO: 2019471 - RNA, 19 nt, Artificial Sequence
  Description of Artificial Sequence: Synthetic oligonucleotide
gcaggcaauugcaggccuu

SEQ ID NO: 2019472 - RNA, 19 nt, Artificial Sequence
  Description of Artificial Sequence: Synthetic oligonucleotide
ccccagcccauuagauugu

SEQ ID NO: 2019473 - RNA, 19 nt, Artificial Sequence
  Description of Artificial Sequence: Synthetic oligonucleotide
ccucuugggguuggugacu

SEQ ID NO: 2019474 - RNA, 19 nt, Artificial Sequence
  Description of Artificial Sequence: Synthetic oligonucleotide
ccuuggcggugugcagguc

SEQ ID NO: 2019475 - RNA, 19 nt, Artificial Sequence
  Description of Artificial Sequence: Synthetic oligonucleotide
ccccaagcuucuccccacu

SEQ ID NO: 2019476 - RNA, 19 nt, Artificial Sequence
  Description of Artificial Sequence: Synthetic oligonucleotide
ccacaacacuuaguucuuu

SEQ ID NO: 2019477 - RNA, 19 nt, Artificial Sequence
  Description of Artificial Sequence: Synthetic oligonucleotide
cgccacauccaugccaauu

SEQ ID NO: 2019478 - RNA, 19 nt, Artificial Sequence
  Description of Artificial Sequence: Synthetic oligonucleotide
ccgccacauccaugccaau

SEQ ID NO: 2019479 - RNA, 19 nt, Artificial Sequence
  Description of Artificial Sequence: Synthetic oligonucleotide
  modified_base (1)..(1): a, c, u, g, unknown or other
ncuuuccccagguaucgag

SEQ ID NO: 2019480 - RNA, 19 nt, Artificial Sequence
  Description of Artificial Sequence: Synthetic oligonucleotide
aaacauccaauccagcgcc

SEQ ID NO: 2019481 - RNA, 19 nt, Artificial Sequence
  Description of Artificial Sequence: Synthetic oligonucleotide
auuucaggcacuuccaggc

SEQ ID NO: 2019482 - RNA, 19 nt, Artificial Sequence
  Description of Artificial Sequence: Synthetic oligonucleotide
aagauggucaugugcaggc

SEQ ID NO: 2019483 - RNA, 19 nt, Artificial Sequence
  Description of Artificial Sequence: Synthetic oligonucleotide
aaccucuuuggcuauacgg

SEQ ID NO: 2019484 - RNA, 19 nt, Artificial Sequence
  Description of Artificial Sequence: Synthetic oligonucleotide
aagacauccacucgacagc

SEQ ID NO: 2019485 - RNA, 19 nt, Artificial Sequence
  Description of Artificial Sequence: Synthetic oligonucleotide
gaagacauccacucgacag

SEQ ID NO: 2019486 - RNA, 19 nt, Artificial Sequence
  Description of Artificial Sequence: Synthetic oligonucleotide
caugaugucagaaggacag

SEQ ID NO: 2019487 - RNA, 19 nt, Artificial Sequence
  Description of Artificial Sequence: Synthetic oligonucleotide
auacggagaucccaaagcc

SEQ ID NO: 2019488 - RNA, 19 nt, Artificial Sequence
  Description of Artificial Sequence: Synthetic oligonucleotide
uauacggagaucccaaagc

SEQ ID NO: 2019489 - RNA, 19 nt, Artificial Sequence
  Description of Artificial Sequence: Synthetic oligonucleotide
uuaaguuccccacucagcu

SEQ ID NO: 2019490 - RNA, 19 nt, Artificial Sequence
  Description of Artificial Sequence: Synthetic oligonucleotide
uuuggcuauacggagaucc

SEQ ID NO: 2019491 - RNA, 19 nt, Artificial Sequence
  Description of Artificial Sequence: Synthetic oligonucleotide
caaggcauugauuucaggc

SEQ ID NO: 2019492 - RNA, 19 nt, Artificial Sequence
  Description of Artificial Sequence: Synthetic oligonucleotide
uggaggaucaugaugucag

SEQ ID NO: 2019493 - RNA, 19 nt, Artificial Sequence
  Description of Artificial Sequence: Synthetic oligonucleotide
agagagaaagcucgguagc

SEQ ID NO: 2019494 - RNA, 19 nt, Artificial Sequence
  Description of Artificial Sequence: Synthetic oligonucleotide
agaggaaccaggcaccugg

SEQ ID NO: 2019495 - RNA, 19 nt, Artificial Sequence
  Description of Artificial Sequence: Synthetic oligonucleotide
uguagaagaccugaggugc

SEQ ID NO: 2019496 - RNA, 19 nt, Artificial Sequence
  Description of Artificial Sequence: Synthetic oligonucleotide
agugguugacacaacagcc

SEQ ID NO: 2019497 - RNA, 19 nt, Artificial Sequence
  Description of Artificial Sequence: Synthetic oligonucleotide
cuucagaacuacaaguccc

SEQ ID NO: 2019498 - RNA, 19 nt, Artificial Sequence
  Description of Artificial Sequence: Synthetic oligonucleotide
uuauagacuucgauggucu

SEQ ID NO: 2019499 - RNA, 19 nt, Artificial Sequence
  Description of Artificial Sequence: Synthetic oligonucleotide
aauuguugccagcugccag

SEQ ID NO: 2019500 - RNA, 19 nt, Artificial Sequence
  Description of Artificial Sequence: Synthetic oligonucleotide
uguauggaggcugacgacg

SEQ ID NO: 2019501 - RNA, 19 nt, Artificial Sequence
  Description of Artificial Sequence: Synthetic oligonucleotide
agcucgguagcccagauug

SEQ ID NO: 2019502 - RNA, 19 nt, Artificial Sequence
  Description of Artificial Sequence: Synthetic oligonucleotide
ggaucaugaugucagaagg

SEQ ID NO: 2019503 - RNA, 19 nt, Artificial Sequence
  Description of Artificial Sequence: Synthetic oligonucleotide
aaagauggucaugugcagg

SEQ ID NO: 2019504 - RNA, 19 nt, Artificial Sequence
  Description of Artificial Sequence: Synthetic oligonucleotide
aguagccaaacauccaauc

SEQ ID NO: 2019505 - RNA, 19 nt, Artificial Sequence
  Description of Artificial Sequence: Synthetic oligonucleotide
accagauagcaccucaggg

SEQ ID NO: 2019506 - RNA, 19 nt, Artificial Sequence
  Description of Artificial Sequence: Synthetic oligonucleotide
gagugaauucuccuugggg

SEQ ID NO: 2019507 - RNA, 19 nt, Artificial Sequence
  Description of Artificial Sequence: Synthetic oligonucleotide
aacucaaggcagcagacaa

SEQ ID NO: 2019508 - RNA, 19 nt, Artificial Sequence
  Description of Artificial Sequence: Synthetic oligonucleotide
gacuucgauggucugaacc

SEQ ID NO: 2019509 - RNA, 19 nt, Artificial Sequence
  Description of Artificial Sequence: Synthetic oligonucleotide
gacacaacagcccuggcca

SEQ ID NO: 2019510 - RNA, 19 nt, Artificial Sequence
  Description of Artificial Sequence: Synthetic oligonucleotide
aaggugacauguuucugug

SEQ ID NO: 2019511 - RNA, 19 nt, Artificial Sequence
  Description of Artificial Sequence: Synthetic oligonucleotide
guagacaggcccaucaugg

SEQ ID NO: 2019512 - RNA, 19 nt, Artificial Sequence
  Description of Artificial Sequence: Synthetic oligonucleotide
ucaguagccaaacauccaa

SEQ ID NO: 2019513 - RNA, 19 nt, Artificial Sequence
  Description of Artificial Sequence: Synthetic oligonucleotide
auauagucuguguggcccc

SEQ ID NO: 2019514 - RNA, 19 nt, Artificial Sequence
  Description of Artificial Sequence: Synthetic oligonucleotide
aggaucaugaugucagaag

SEQ ID NO: 2019515 - RNA, 19 nt, Artificial Sequence
  Description of Artificial Sequence: Synthetic oligonucleotide
uacggagaucccaaagccg

SEQ ID NO: 2019516 - RNA, 19 nt, Artificial Sequence
  Description of Artificial Sequence: Synthetic oligonucleotide
agauggaggaucaugaugu

SEQ ID NO: 2019517 - RNA, 19 nt, Artificial Sequence
  Description of Artificial Sequence: Synthetic oligonucleotide
cugguugaggcuuaggcug

SEQ ID NO: 2019518 - RNA, 19 nt, Artificial Sequence
  Description of Artificial Sequence: Synthetic oligonucleotide
uucuguggugcccgaaucg

SEQ ID NO: 2019519 - RNA, 19 nt, Artificial Sequence
  Description of Artificial Sequence: Synthetic oligonucleotide
ugagugaauucuccuuggg

SEQ ID NO: 2019520 - RNA, 19 nt, Artificial Sequence
  Description of Artificial Sequence: Synthetic oligonucleotide
ugacacaacagcccuggcc

SEQ ID NO: 2019521 - RNA, 19 nt, Artificial Sequence
  Description of Artificial Sequence: Synthetic oligonucleotide
acuucgauggucugaaccu

SEQ ID NO: 2019522 - RNA, 19 nt, Artificial Sequence
  Description of Artificial Sequence: Synthetic oligonucleotide
guagccaaacauccaaucc

SEQ ID NO: 2019523 - RNA, 19 nt, Artificial Sequence
  Description of Artificial Sequence: Synthetic oligonucleotide
uucagaacuacaaguccca

SEQ ID NO: 2019524 - RNA, 19 nt, Artificial Sequence
  Description of Artificial Sequence: Synthetic oligonucleotide
cagagagaaagcucgguag

SEQ ID NO: 2019525 - RNA, 19 nt, Artificial Sequence
  Description of Artificial Sequence: Synthetic oligonucleotide
guugccagcugccagaaac

SEQ ID NO: 2019526 - RNA, 19 nt, Artificial Sequence
  Description of Artificial Sequence: Synthetic oligonucleotide
aauccagcgcccauugugg

SEQ ID NO: 2019527 - RNA, 19 nt, Artificial Sequence
  Description of Artificial Sequence: Synthetic oligonucleotide
cuuaaguuccccacucagc

SEQ ID NO: 2019528 - RNA, 19 nt, Artificial Sequence
  Description of Artificial Sequence: Synthetic oligonucleotide
cagaaugagugaauucucc

SEQ ID NO: 2019529 - RNA, 19 nt, Artificial Sequence
  Description of Artificial Sequence: Synthetic oligonucleotide
uugaggcuuaggcugagca

SEQ ID NO: 2019530 - RNA, 19 nt, Artificial Sequence
  Description of Artificial Sequence: Synthetic oligonucleotide
cugacgacgccacaguucc

SEQ ID NO: 2019531 - RNA, 19 nt, Artificial Sequence
  Description of Artificial Sequence: Synthetic oligonucleotide
ggaaaagauggucaugugc

SEQ ID NO: 2019532 - RNA, 19 nt, Artificial Sequence
  Description of Artificial Sequence: Synthetic oligonucleotide
agaaugagugaauucuccu

SEQ ID NO: 2019533 - RNA, 19 nt, Artificial Sequence
  Description of Artificial Sequence: Synthetic oligonucleotide
ugcgacgugauccaucuuc

SEQ ID NO: 2019534 - RNA, 19 nt, Artificial Sequence
  Description of Artificial Sequence: Synthetic oligonucleotide
cauccucaccaccagauag

SEQ ID NO: 2019535 - RNA, 19 nt, Artificial Sequence
  Description of Artificial Sequence: Synthetic oligonucleotide
agagaaagcucgguagccc

SEQ ID NO: 2019536 - RNA, 19 nt, Artificial Sequence
  Description of Artificial Sequence: Synthetic oligonucleotide
acgugauccaucuucagaa

SEQ ID NO: 2019537 - RNA, 19 nt, Artificial Sequence
  Description of Artificial Sequence: Synthetic oligonucleotide
ucuugaggaucucugccca

SEQ ID NO: 2019538 - RNA, 19 nt, Artificial Sequence
  Description of Artificial Sequence: Synthetic oligonucleotide
cauaguaugcagcugacaa

SEQ ID NO: 2019539 - RNA, 19 nt, Artificial Sequence
  Description of Artificial Sequence: Synthetic oligonucleotide
uuaccugaagcagucagga

SEQ ID NO: 2019540 - RNA, 19 nt, Artificial Sequence
  Description of Artificial Sequence: Synthetic oligonucleotide
uaguaugcagcugacaauc

SEQ ID NO: 2019541 - RNA, 19 nt, Artificial Sequence
  Description of Artificial Sequence: Synthetic oligonucleotide
guugacacaacagcccugg

SEQ ID NO: 2019542 - RNA, 19 nt, Artificial Sequence
  Description of Artificial Sequence: Synthetic oligonucleotide
cagauuggugaagacaucc

SEQ ID NO: 2019543 - RNA, 19 nt, Artificial Sequence
  Description of Artificial Sequence: Synthetic oligonucleotide
cagugguugacacaacagc

SEQ ID NO: 2019544 - RNA, 19 nt, Artificial Sequence
  Description of Artificial Sequence: Synthetic oligonucleotide
ccaaacauccaauccagcg

SEQ ID NO: 2019545 - RNA, 19 nt, Artificial Sequence
  Description of Artificial Sequence: Synthetic oligonucleotide
gaggcuuaggcugagcagc

SEQ ID NO: 2019546 - RNA, 19 nt, Artificial Sequence
  Description of Artificial Sequence: Synthetic oligonucleotide
aucugcccguaauuguugc

SEQ ID NO: 2019547 - RNA, 19 nt, Artificial Sequence
  Description of Artificial Sequence: Synthetic oligonucleotide
ugaacucaaggcagcagac

SEQ ID NO: 2019548 - RNA, 19 nt, Artificial Sequence
  Description of Artificial Sequence: Synthetic oligonucleotide
uggugaagacauccacucg

SEQ ID NO: 2019549 - RNA, 19 nt, Artificial Sequence
  Description of Artificial Sequence: Synthetic oligonucleotide
ugguggguguagaagaccu

SEQ ID NO: 2019550 - RNA, 19 nt, Artificial Sequence
  Description of Artificial Sequence: Synthetic oligonucleotide
ucugcccaaagccagcccu

SEQ ID NO: 2019551 - RNA, 19 nt, Artificial Sequence
  Description of Artificial Sequence: Synthetic oligonucleotide
gucagaaggacagagagaa

SEQ ID NO: 2019552 - RNA, 19 nt, Artificial Sequence
  Description of Artificial Sequence: Synthetic oligonucleotide
uuccagguccauaguaugc

SEQ ID NO: 2019553 - RNA, 19 nt, Artificial Sequence
  Description of Artificial Sequence: Synthetic oligonucleotide
ugguugacacaacagcccu

SEQ ID NO: 2019554 - RNA, 19 nt, Artificial Sequence
  Description of Artificial Sequence: Synthetic oligonucleotide
gauggucaugugcaggcgc

SEQ ID NO: 2019555 - RNA, 19 nt, Artificial Sequence
  Description of Artificial Sequence: Synthetic oligonucleotide
ugaaggucccaguuuccag

SEQ ID NO: 2019556 - RNA, 19 nt, Artificial Sequence
  Description of Artificial Sequence: Synthetic oligonucleotide
guguagaagaccugaggug

SEQ ID NO: 2019557 - RNA, 19 nt, Artificial Sequence
  Description of Artificial Sequence: Synthetic oligonucleotide
ugucagaaggacagagaga

SEQ ID NO: 2019558 - RNA, 19 nt, Artificial Sequence
  Description of Artificial Sequence: Synthetic oligonucleotide
ugaggcuuaggcugagcag

SEQ ID NO: 2019559 - RNA, 19 nt, Artificial Sequence
  Description of Artificial Sequence: Synthetic oligonucleotide
auuguugccagcugccaga

SEQ ID NO: 2019560 - RNA, 19 nt, Artificial Sequence
  Description of Artificial Sequence: Synthetic oligonucleotide
ggcacuuccaggcuggucc

SEQ ID NO: 2019561 - RNA, 19 nt, Artificial Sequence
  Description of Artificial Sequence: Synthetic oligonucleotide
cucaugcuuauagacuucg

SEQ ID NO: 2019562 - RNA, 19 nt, Artificial Sequence
  Description of Artificial Sequence: Synthetic oligonucleotide
caauccagcgcccauugug

SEQ ID NO: 2019563 - RNA, 19 nt, Artificial Sequence
  Description of Artificial Sequence: Synthetic oligonucleotide
ucugggaaaagauggucau

SEQ ID NO: 2019564 - RNA, 19 nt, Artificial Sequence
  Description of Artificial Sequence: Synthetic oligonucleotide
uccaauccagcgcccauug

SEQ ID NO: 2019565 - RNA, 19 nt, Artificial Sequence
  Description of Artificial Sequence: Synthetic oligonucleotide
cuuauagacuucgaugguc

SEQ ID NO: 2019566 - RNA, 19 nt, Artificial Sequence
  Description of Artificial Sequence: Synthetic oligonucleotide
gaaucggaaagacaguggu

SEQ ID NO: 2019567 - RNA, 19 nt, Artificial Sequence
  Description of Artificial Sequence: Synthetic oligonucleotide
cugagauggaggaucauga

SEQ ID NO: 2019568 - RNA, 19 nt, Artificial Sequence
  Description of Artificial Sequence: Synthetic oligonucleotide
cauguuucuguggugcccg

SEQ ID NO: 2019569 - RNA, 19 nt, Artificial Sequence
  Description of Artificial Sequence: Synthetic oligonucleotide
agccagaaugagugaauuc

SEQ ID NO: 2019570 - RNA, 19 nt, Artificial Sequence
  Description of Artificial Sequence: Synthetic oligonucleotide
gaagcagucaggaccuugc

SEQ ID NO: 2019571 - RNA, 19 nt, Artificial Sequence
  Description of Artificial Sequence: Synthetic oligonucleotide
ucggaaagacagugguggg

SEQ ID NO: 2019572 - RNA, 19 nt, Artificial Sequence
  Description of Artificial Sequence: Synthetic oligonucleotide
cucuaggcgcgacacaacc

SEQ ID NO: 2019573 - RNA, 19 nt, Artificial Sequence
  Description of Artificial Sequence: Synthetic oligonucleotide
guuaccugaagcagucagg

SEQ ID NO: 2019574 - RNA, 19 nt, Artificial Sequence
  Description of Artificial Sequence: Synthetic oligonucleotide
guaugcagcugacaauccc

SEQ ID NO: 2019575 - RNA, 19 nt, Artificial Sequence
  Description of Artificial Sequence: Synthetic oligonucleotide
uccuguauggaggcugacg

SEQ ID NO: 2019576 - RNA, 19 nt, Artificial Sequence
  Description of Artificial Sequence: Synthetic oligonucleotide
gaaggugacauguuucugu

SEQ ID NO: 2019577 - RNA, 19 nt, Artificial Sequence
  Description of Artificial Sequence: Synthetic oligonucleotide
guccauaguaugcagcuga

SEQ ID NO: 2019578 - RNA, 19 nt, Artificial Sequence
  Description of Artificial Sequence: Synthetic oligonucleotide
ugugaaggucccaguuucc

SEQ ID NO: 2019579 - RNA, 19 nt, Artificial Sequence
  Description of Artificial Sequence: Synthetic oligonucleotide
gcugcgaucccucagugcc

SEQ ID NO: 2019580 - RNA, 19 nt, Artificial Sequence
  Description of Artificial Sequence: Synthetic oligonucleotide
uuggcuauacggagauccc

SEQ ID NO: 2019581 - RNA, 19 nt, Artificial Sequence
  Description of Artificial Sequence: Synthetic oligonucleotide
guaauuguugccagcugcc

SEQ ID NO: 2019582 - RNA, 19 nt, Artificial Sequence
  Description of Artificial Sequence: Synthetic oligonucleotide
agacaaacugaagauggca

SEQ ID NO: 2019583 - RNA, 19 nt, Artificial Sequence
  Description of Artificial Sequence: Synthetic oligonucleotide
gacauguuucuguggugcc

SEQ ID NO: 2019584 - RNA, 19 nt, Artificial Sequence
  Description of Artificial Sequence: Synthetic oligonucleotide
gacgugauccaucuucaga

SEQ ID NO: 2019585 - RNA, 19 nt, Artificial Sequence
  Description of Artificial Sequence: Synthetic oligonucleotide
gagagaaagcucgguagcc

SEQ ID NO: 2019586 - RNA, 19 nt, Artificial Sequence
  Description of Artificial Sequence: Synthetic oligonucleotide
gugaauucuccuuggggac

SEQ ID NO: 2019587 - RNA, 19 nt, Artificial Sequence
  Description of Artificial Sequence: Synthetic oligonucleotide
ccagauagcaccucagggc

SEQ ID NO: 2019588 - RNA, 19 nt, Artificial Sequence
  Description of Artificial Sequence: Synthetic oligonucleotide
gauagcaccucagggcugc

SEQ ID NO: 2019589 - RNA, 19 nt, Artificial Sequence
  Description of Artificial Sequence: Synthetic oligonucleotide
auaguaugcagcugacaau

SEQ ID NO: 2019590 - RNA, 19 nt, Artificial Sequence
  Description of Artificial Sequence: Synthetic oligonucleotide
aaucggaaagacaguggug

SEQ ID NO: 2019591 - RNA, 19 nt, Artificial Sequence
  Description of Artificial Sequence: Synthetic oligonucleotide
aacauccaauccagcgccc

SEQ ID NO: 2019592 - RNA, 19 nt, Artificial Sequence
  Description of Artificial Sequence: Synthetic oligonucleotide
cauggaaggucaccauggg

SEQ ID NO: 2019593 - RNA, 19 nt, Artificial Sequence
  Description of Artificial Sequence: Synthetic oligonucleotide
uuucuguggugcccgaauc

SEQ ID NO: 2019594 - RNA, 19 nt, Artificial Sequence
  Description of Artificial Sequence: Synthetic oligonucleotide
auccucaccaccagauagc

SEQ ID NO: 2019595 - RNA, 19 nt, Artificial Sequence
  Description of Artificial Sequence: Synthetic oligonucleotide
gaaccucuuuggcuauacg

SEQ ID NO: 2019596 - RNA, 19 nt, Artificial Sequence
  Description of Artificial Sequence: Synthetic oligonucleotide
aguuuccagguccauagua

SEQ ID NO: 2019597 - RNA, 19 nt, Artificial Sequence
  Description of Artificial Sequence: Synthetic oligonucleotide
ugagcagaugccgaucugu

SEQ ID NO: 2019598 - RNA, 19 nt, Artificial Sequence
  Description of Artificial Sequence: Synthetic oligonucleotide
ggugaagacauccacucga

SEQ ID NO: 2019599 - RNA, 19 nt, Artificial Sequence
  Description of Artificial Sequence: Synthetic oligonucleotide
agcugccagaaacuucccg

SEQ ID NO: 2019600 - RNA, 19 nt, Artificial Sequence
  Description of Artificial Sequence: Synthetic oligonucleotide
uccagguccauaguaugca

SEQ ID NO: 2019601 - RNA, 19 nt, Artificial Sequence
  Description of Artificial Sequence: Synthetic oligonucleotide
gaugccgaucuguggagac

SEQ ID NO: 2019602 - RNA, 19 nt, Artificial Sequence
  Description of Artificial Sequence: Synthetic oligonucleotide
cagguccauaguaugcagc

SEQ ID NO: 2019603 - RNA, 19 nt, Artificial Sequence
  Description of Artificial Sequence: Synthetic oligonucleotide
uccauaguaugcagcugac

SEQ ID NO: 2019604 - RNA, 19 nt, Artificial Sequence
  Description of Artificial Sequence: Synthetic oligonucleotide
auuguggggccucgagcac

SEQ ID NO: 2019605 - RNA, 19 nt, Artificial Sequence
  Description of Artificial Sequence: Synthetic oligonucleotide
ucuaggcgcgacacaaccu

SEQ ID NO: 2019606 - RNA, 19 nt, Artificial Sequence
  Description of Artificial Sequence: Synthetic oligonucleotide
caucuucagaacuacaagu

SEQ ID NO: 2019607 - RNA, 19 nt, Artificial Sequence
  Description of Artificial Sequence: Synthetic oligonucleotide
uaaguuccccacucagcug

SEQ ID NO: 2019608 - RNA, 19 nt, Artificial Sequence
  Description of Artificial Sequence: Synthetic oligonucleotide
caccagauagcaccucagg

SEQ ID NO: 2019609 - RNA, 19 nt, Artificial Sequence
  Description of Artificial Sequence: Synthetic oligonucleotide
cuaggcgcgacacaaccuc

SEQ ID NO: 2019610 - RNA, 19 nt, Artificial Sequence
  Description of Artificial Sequence: Synthetic oligonucleotide
gcugccagaaacuucccgc

SEQ ID NO: 2019611 - RNA, 19 nt, Artificial Sequence
  Description of Artificial Sequence: Synthetic oligonucleotide
ucaugcuuauagacuucga

SEQ ID NO: 2019612 - RNA, 19 nt, Artificial Sequence
  Description of Artificial Sequence: Synthetic oligonucleotide
cagggcgagacacucuggg

SEQ ID NO: 2019613 - RNA, 19 nt, Artificial Sequence
  Description of Artificial Sequence: Synthetic oligonucleotide
gaucaugaugucagaagga

SEQ ID NO: 2019614 - RNA, 19 nt, Artificial Sequence
  Description of Artificial Sequence: Synthetic oligonucleotide
guagaaggugacauguuuc

SEQ ID NO: 2019615 - RNA, 19 nt, Artificial Sequence
  Description of Artificial Sequence: Synthetic oligonucleotide
agccaaacauccaauccag

SEQ ID NO: 2019616 - RNA, 19 nt, Artificial Sequence
  Description of Artificial Sequence: Synthetic oligonucleotide
uguggagaccaugcuguag

SEQ ID NO: 2019617 - RNA, 19 nt, Artificial Sequence
  Description of Artificial Sequence: Synthetic oligonucleotide
gcccgaaucggaaagacag

SEQ ID NO: 2019618 - RNA, 19 nt, Artificial Sequence
  Description of Artificial Sequence: Synthetic oligonucleotide
caugcuguagacaggccca

SEQ ID NO: 2019619 - RNA, 19 nt, Artificial Sequence
  Description of Artificial Sequence: Synthetic oligonucleotide
uuuggccucugaacucaag

SEQ ID NO: 2019620 - RNA, 19 nt, Artificial Sequence
  Description of Artificial Sequence: Synthetic oligonucleotide
ucgguagcccagauuggug

SEQ ID NO: 2019621 - RNA, 19 nt, Artificial Sequence
  Description of Artificial Sequence: Synthetic oligonucleotide
gugguugacacaacagccc

SEQ ID NO: 2019622 - RNA, 19 nt, Artificial Sequence
  Description of Artificial Sequence: Synthetic oligonucleotide
ugcccguaauuguugccag

SEQ ID NO: 2019623 - RNA, 19 nt, Artificial Sequence
  Description of Artificial Sequence: Synthetic oligonucleotide
ggaccuugcacucgggugc

SEQ ID NO: 2019624 - RNA, 19 nt, Artificial Sequence
  Description of Artificial Sequence: Synthetic oligonucleotide
ucagugccaggcaauggau

SEQ ID NO: 2019625 - RNA, 19 nt, Artificial Sequence
  Description of Artificial Sequence: Synthetic oligonucleotide
uaauuguugccagcugcca

SEQ ID NO: 2019626 - RNA, 19 nt, Artificial Sequence
  Description of Artificial Sequence: Synthetic oligonucleotide
ggaaagacaguggugggug

SEQ ID NO: 2019627 - RNA, 19 nt, Artificial Sequence
  Description of Artificial Sequence: Synthetic oligonucleotide
uccuuacagcccuucuuga

SEQ ID NO: 2019628 - RNA, 19 nt, Artificial Sequence
  Description of Artificial Sequence: Synthetic oligonucleotide
gaaacuucccgcagggcga

SEQ ID NO: 2019629 - RNA, 19 nt, Artificial Sequence
  Description of Artificial Sequence: Synthetic oligonucleotide
auggcaaucugcccguaau

SEQ ID NO: 2019630 - RNA, 19 nt, Artificial Sequence
  Description of Artificial Sequence: Synthetic oligonucleotide
ucgagcacuccucaugcuu

SEQ ID NO: 2019631 - RNA, 19 nt, Artificial Sequence
  Description of Artificial Sequence: Synthetic oligonucleotide
ugccgaucuguggagacca

SEQ ID NO: 2019632 - RNA, 19 nt, Artificial Sequence
  Description of Artificial Sequence: Synthetic oligonucleotide
aggcugguccuguauggag

SEQ ID NO: 2019633 - RNA, 19 nt, Artificial Sequence
  Description of Artificial Sequence: Synthetic oligonucleotide
gguguagaagaccugaggu

SEQ ID NO: 2019634 - RNA, 19 nt, Artificial Sequence
  Description of Artificial Sequence: Synthetic oligonucleotide
gaucagguccugguagaag

SEQ ID NO: 2019635 - RNA, 19 nt, Artificial Sequence
  Description of Artificial Sequence: Synthetic oligonucleotide
ugguccuguauggaggcug

SEQ ID NO: 2019636 - RNA, 19 nt, Artificial Sequence
  Description of Artificial Sequence: Synthetic oligonucleotide
uauggaggcugacgacgcc

SEQ ID NO: 2019637 - RNA, 19 nt, Artificial Sequence
  Description of Artificial Sequence: Synthetic oligonucleotide
agggcucuaggcgcgacac

SEQ ID NO: 2019638 - RNA, 19 nt, Artificial Sequence
  Description of Artificial Sequence: Synthetic oligonucleotide
cucgacagcuguuaccuga

SEQ ID NO: 2019639 - RNA, 19 nt, Artificial Sequence
  Description of Artificial Sequence: Synthetic oligonucleotide
ucugcccguaauuguugcc

SEQ ID NO: 2019640 - RNA, 19 nt, Artificial Sequence
  Description of Artificial Sequence: Synthetic oligonucleotide
aguuccuuacagcccuucu

SEQ ID NO: 2019641 - RNA, 19 nt, Artificial Sequence
  Description of Artificial Sequence: Synthetic oligonucleotide
agaggcaccggcgacggug

SEQ ID NO: 2019642 - RNA, 19 nt, Artificial Sequence
  Description of Artificial Sequence: Synthetic oligonucleotide
acggagaucccaaagccgu

SEQ ID NO: 2019643 - RNA, 19 nt, Artificial Sequence
  Description of Artificial Sequence: Synthetic oligonucleotide
aaacuucccgcagggcgag

SEQ ID NO: 2019644 - RNA, 19 nt, Artificial Sequence
  Description of Artificial Sequence: Synthetic oligonucleotide
auccagucugagucaguag

SEQ ID NO: 2019645 - RNA, 19 nt, Artificial Sequence
  Description of Artificial Sequence: Synthetic oligonucleotide
cguaauuguugccagcugc

SEQ ID NO: 2019646 - RNA, 19 nt, Artificial Sequence
  Description of Artificial Sequence: Synthetic oligonucleotide
ugcccgaaucggaaagaca

SEQ ID NO: 2019647 - RNA, 19 nt, Artificial Sequence
  Description of Artificial Sequence: Synthetic oligonucleotide
auccagcgcccauuguggg

SEQ ID NO: 2019648 - RNA, 19 nt, Artificial Sequence
  Description of Artificial Sequence: Synthetic oligonucleotide
gacgccacaguuccuuaca

SEQ ID NO: 2019649 - RNA, 19 nt, Artificial Sequence
  Description of Artificial Sequence: Synthetic oligonucleotide
augccgaucuguggagacc

SEQ ID NO: 2019650 - RNA, 19 nt, Artificial Sequence
  Description of Artificial Sequence: Synthetic oligonucleotide
gaaugagugaauucuccuu

SEQ ID NO: 2019651 - RNA, 19 nt, Artificial Sequence
  Description of Artificial Sequence: Synthetic oligonucleotide
agacauccacucgacagcu

SEQ ID NO: 2019652 - RNA, 19 nt, Artificial Sequence
  Description of Artificial Sequence: Synthetic oligonucleotide
agauggucaugugcaggcg

SEQ ID NO: 2019653 - RNA, 19 nt, Artificial Sequence
  Description of Artificial Sequence: Synthetic oligonucleotide
guauggaggcugacgacgc

SEQ ID NO: 2019654 - RNA, 19 nt, Artificial Sequence
  Description of Artificial Sequence: Synthetic oligonucleotide
gauggaggaucaugauguc

SEQ ID NO: 2019655 - RNA, 19 nt, Artificial Sequence
  Description of Artificial Sequence: Synthetic oligonucleotide
agaaggugacauguuucug

SEQ ID NO: 2019656 - RNA, 19 nt, Artificial Sequence
  Description of Artificial Sequence: Synthetic oligonucleotide
uggcuauacggagauccca

SEQ ID NO: 2019657 - RNA, 19 nt, Artificial Sequence
  Description of Artificial Sequence: Synthetic oligonucleotide
acuucccgcagggcgagac

SEQ ID NO: 2019658 - RNA, 19 nt, Artificial Sequence
  Description of Artificial Sequence: Synthetic oligonucleotide
gugacauguuucuguggug

SEQ ID NO: 2019659 - RNA, 19 nt, Artificial Sequence
  Description of Artificial Sequence: Synthetic oligonucleotide
gcagaugccgaucugugga

SEQ ID NO: 2019660 - RNA, 19 nt, Artificial Sequence
  Description of Artificial Sequence: Synthetic oligonucleotide
aggcuuaggcugagcagcc

SEQ ID NO: 2019661 - RNA, 19 nt, Artificial Sequence
  Description of Artificial Sequence: Synthetic oligonucleotide
ugcgaucccucagugccag

SEQ ID NO: 2019662 - RNA, 19 nt, Artificial Sequence
  Description of Artificial Sequence: Synthetic oligonucleotide
agccguacagcuccauccu

SEQ ID NO: 2019663 - RNA, 19 nt, Artificial Sequence
  Description of Artificial Sequence: Synthetic oligonucleotide
gagacacucugggaaaaga

SEQ ID NO: 2019664 - RNA, 19 nt, Artificial Sequence
  Description of Artificial Sequence: Synthetic oligonucleotide
ggcaaucugcccguaauug

SEQ ID NO: 2019665 - RNA, 19 nt, Artificial Sequence
  Description of Artificial Sequence: Synthetic oligonucleotide
ggauauagucuguguggcc

SEQ ID NO: 2019666 - RNA, 19 nt, Artificial Sequence
  Description of Artificial Sequence: Synthetic oligonucleotide
agggcugcgaucccucagu

SEQ ID NO: 2019667 - RNA, 19 nt, Artificial Sequence
  Description of Artificial Sequence: Synthetic oligonucleotide
cagaacuacaagucccaga

SEQ ID NO: 2019668 - RNA, 19 nt, Artificial Sequence
  Description of Artificial Sequence: Synthetic oligonucleotide
ggugacauguuucuguggu

SEQ ID NO: 2019669 - RNA, 19 nt, Artificial Sequence
  Description of Artificial Sequence: Synthetic oligonucleotide
cagcuguuaccugaagcag

SEQ ID NO: 2019670 - RNA, 19 nt, Artificial Sequence
  Description of Artificial Sequence: Synthetic oligonucleotide
acaagcagcaaggcauuga

SEQ ID NO: 2019671 - RNA, 19 nt, Artificial Sequence
  Description of Artificial Sequence: Synthetic oligonucleotide
acacaacagcccuggccag

SEQ ID NO: 2019672 - RNA, 19 nt, Artificial Sequence
  Description of Artificial Sequence: Synthetic oligonucleotide
uggcaaucugcccguaauu

SEQ ID NO: 2019673 - RNA, 19 nt, Artificial Sequence
  Description of Artificial Sequence: Synthetic oligonucleotide
uugaggaucucugcccaaa

SEQ ID NO: 2019674 - RNA, 19 nt, Artificial Sequence
  Description of Artificial Sequence: Synthetic oligonucleotide
agggcccgugugaaggucc

SEQ ID NO: 2019675 - RNA, 19 nt, Artificial Sequence
  Description of Artificial Sequence: Synthetic oligonucleotide
gaggaucaugaugucagaa

SEQ ID NO: 2019676 - RNA, 19 nt, Artificial Sequence
  Description of Artificial Sequence: Synthetic oligonucleotide
gagaucccaaagccguaca

SEQ ID NO: 2019677 - RNA, 19 nt, Artificial Sequence
  Description of Artificial Sequence: Synthetic oligonucleotide
guggguguagaagaccuga

SEQ ID NO: 2019678 - RNA, 19 nt, Artificial Sequence
  Description of Artificial Sequence: Synthetic oligonucleotide
gacggugcgacgugaucca

SEQ ID NO: 2019679 - RNA, 19 nt, Artificial Sequence
  Description of Artificial Sequence: Synthetic oligonucleotide
ucccaaagccguacagcuc

SEQ ID NO: 2019680 - RNA, 19 nt, Artificial Sequence
  Description of Artificial Sequence: Synthetic oligonucleotide
uaggcgcgacacaaccucu

SEQ ID NO: 2019681 - RNA, 19 nt, Artificial Sequence
  Description of Artificial Sequence: Synthetic oligonucleotide
cagauagcaccucagggcu

SEQ ID NO: 2019682 - RNA, 19 nt, Artificial Sequence
  Description of Artificial Sequence: Synthetic oligonucleotide
ugguagaaggugacauguu

SEQ ID NO: 2019683 - RNA, 19 nt, Artificial Sequence
  Description of Artificial Sequence: Synthetic oligonucleotide
gaggaaccaggcaccuggg

SEQ ID NO: 2019684 - RNA, 19 nt, Artificial Sequence
  Description of Artificial Sequence: Synthetic oligonucleotide
uucccgcagggcgagacac

SEQ ID NO: 2019685 - RNA, 19 nt, Artificial Sequence
  Description of Artificial Sequence: Synthetic oligonucleotide
ggcugguccuguauggagg

SEQ ID NO: 2019686 - RNA, 19 nt, Artificial Sequence
  Description of Artificial Sequence: Synthetic oligonucleotide
agaaagcucgguagcccag

SEQ ID NO: 2019687 - RNA, 19 nt, Artificial Sequence
  Description of Artificial Sequence: Synthetic oligonucleotide
ccuguauggaggcugacga

SEQ ID NO: 2019688 - RNA, 19 nt, Artificial Sequence
  Description of Artificial Sequence: Synthetic oligonucleotide
gcagucaggaccuugcacu

SEQ ID NO: 2019689 - RNA, 19 nt, Artificial Sequence
  Description of Artificial Sequence: Synthetic oligonucleotide
cagcagacaggaucagguc

SEQ ID NO: 2019690 - RNA, 19 nt, Artificial Sequence
  Description of Artificial Sequence: Synthetic oligonucleotide
gcaauggauauagucugug

SEQ ID NO: 2019691 - RNA, 19 nt, Artificial Sequence
  Description of Artificial Sequence: Synthetic oligonucleotide
gcugguccuguauggaggc

SEQ ID NO: 2019692 - RNA, 19 nt, Artificial Sequence
  Description of Artificial Sequence: Synthetic oligonucleotide
ccagaaugagugaauucuc

SEQ ID NO: 2019693 - RNA, 19 nt, Artificial Sequence
  Description of Artificial Sequence: Synthetic oligonucleotide
cucgggugcugcuggcugc

SEQ ID NO: 2019694 - RNA, 19 nt, Artificial Sequence
  Description of Artificial Sequence: Synthetic oligonucleotide
uggggacaagcagcaaggc

SEQ ID NO: 2019695 - RNA, 19 nt, Artificial Sequence
  Description of Artificial Sequence: Synthetic oligonucleotide
gacccagaggcaccggcga

SEQ ID NO: 2019696 - RNA, 19 nt, Artificial Sequence
  Description of Artificial Sequence: Synthetic oligonucleotide
ccucgagcacuccucaugc

SEQ ID NO: 2019697 - RNA, 19 nt, Artificial Sequence
  Description of Artificial Sequence: Synthetic oligonucleotide
agggcgagacacucuggga

SEQ ID NO: 2019698 - RNA, 19 nt, Artificial Sequence
  Description of Artificial Sequence: Synthetic oligonucleotide
agacaggaucagguccugg

SEQ ID NO: 2019699 - RNA, 19 nt, Artificial Sequence
  Description of Artificial Sequence: Synthetic oligonucleotide
ccuuacagcccuucuugag

SEQ ID NO: 2019700 - RNA, 19 nt, Artificial Sequence
  Description of Artificial Sequence: Synthetic oligonucleotide
gauggcaaucugcccguaa

SEQ ID NO: 2019701 - RNA, 19 nt, Artificial Sequence
  Description of Artificial Sequence: Synthetic oligonucleotide
ugcgcuaccucagccugac

SEQ ID NO: 2019702 - RNA, 19 nt, Artificial Sequence
  Description of Artificial Sequence: Synthetic oligonucleotide
gaaagcucgguagcccaga

SEQ ID NO: 2019703 - RNA, 19 nt, Artificial Sequence
  Description of Artificial Sequence: Synthetic oligonucleotide
uggggccucgagcacuccu

SEQ ID NO: 2019704 - RNA, 19 nt, Artificial Sequence
  Description of Artificial Sequence: Synthetic oligonucleotide
cagccugacccagaggcac

SEQ ID NO: 2019705 - RNA, 19 nt, Artificial Sequence
  Description of Artificial Sequence: Synthetic oligonucleotide
guacagcuccauccucacc

SEQ ID NO: 2019706 - RNA, 19 nt, Artificial Sequence
  Description of Artificial Sequence: Synthetic oligonucleotide
ggcgcgacacaaccucucg

SEQ ID NO: 2019707 - RNA, 19 nt, Artificial Sequence
  Description of Artificial Sequence: Synthetic oligonucleotide
ucgauggucugaaccucuu

SEQ ID NO: 2019708 - RNA, 19 nt, Artificial Sequence
  Description of Artificial Sequence: Synthetic oligonucleotide
aguuccccacucagcugcc

SEQ ID NO: 2019709 - RNA, 19 nt, Artificial Sequence
  Description of Artificial Sequence: Synthetic oligonucleotide
acucgacagcuguuaccug

SEQ ID NO: 2019710 - RNA, 19 nt, Artificial Sequence
  Description of Artificial Sequence: Synthetic oligonucleotide
caauggauauagucugugu

SEQ ID NO: 2019711 - RNA, 19 nt, Artificial Sequence
  Description of Artificial Sequence: Synthetic oligonucleotide
acauccaauccagcgccca

SEQ ID NO: 2019712 - RNA, 19 nt, Artificial Sequence
  Description of Artificial Sequence: Synthetic oligonucleotide
agccugacccagaggcacc

SEQ ID NO: 2019713 - RNA, 19 nt, Artificial Sequence
  Description of Artificial Sequence: Synthetic oligonucleotide
aggcugacgacgccacagu

SEQ ID NO: 2019714 - RNA, 19 nt, Artificial Sequence
  Description of Artificial Sequence: Synthetic oligonucleotide
ccgaaucggaaagacagug

SEQ ID NO: 2019715 - RNA, 19 nt, Artificial Sequence
  Description of Artificial Sequence: Synthetic oligonucleotide
cugcccguaauuguugcca

SEQ ID NO: 2019716 - RNA, 19 nt, Artificial Sequence
  Description of Artificial Sequence: Synthetic oligonucleotide
uugcacucgggugcugcug

SEQ ID NO: 2019717 - RNA, 19 nt, Artificial Sequence
  Description of Artificial Sequence: Synthetic oligonucleotide
uaccucagccugacccaga

SEQ ID NO: 2019718 - RNA, 19 nt, Artificial Sequence
  Description of Artificial Sequence: Synthetic oligonucleotide
ggacagagagaaagcucgg

SEQ ID NO: 2019719 - RNA, 19 nt, Artificial Sequence
  Description of Artificial Sequence: Synthetic oligonucleotide
gaggcaccggcgacggugc

SEQ ID NO: 2019720 - RNA, 19 nt, Artificial Sequence
  Description of Artificial Sequence: Synthetic oligonucleotide
gcuguuaccugaagcaguc

SEQ ID NO: 2019721 - RNA, 19 nt, Artificial Sequence
  Description of Artificial Sequence: Synthetic oligonucleotide
ggccuuaaguuccccacuc

SEQ ID NO: 2019722 - RNA, 19 nt, Artificial Sequence
  Description of Artificial Sequence: Synthetic oligonucleotide
gccagugguugacacaaca

SEQ ID NO: 2019723 - RNA, 19 nt, Artificial Sequence
  Description of Artificial Sequence: Synthetic oligonucleotide
caugggcauggaaggucac

SEQ ID NO: 2019724 - RNA, 19 nt, Artificial Sequence
  Description of Artificial Sequence: Synthetic oligonucleotide
gggacaagcagcaaggcau

SEQ ID NO: 2019725 - RNA, 19 nt, Artificial Sequence
  Description of Artificial Sequence: Synthetic oligonucleotide
agaugccgaucuguggaga

SEQ ID NO: 2019726 - RNA, 19 nt, Artificial Sequence
  Description of Artificial Sequence: Synthetic oligonucleotide
cagcagacaaacugaagau

SEQ ID NO: 2019727 - RNA, 19 nt, Artificial Sequence
  Description of Artificial Sequence: Synthetic oligonucleotide
gguagaaggugacauguuu

SEQ ID NO: 2019728 - RNA, 19 nt, Artificial Sequence
  Description of Artificial Sequence: Synthetic oligonucleotide
ggugcgacgugauccaucu

SEQ ID NO: 2019729 - RNA, 19 nt, Artificial Sequence
  Description of Artificial Sequence: Synthetic oligonucleotide
ggagaucccaaagccguac

SEQ ID NO: 2019730 - RNA, 19 nt, Artificial Sequence
  Description of Artificial Sequence: Synthetic oligonucleotide
gagaggaaccaggcaccug

SEQ ID NO: 2019731 - RNA, 19 nt, Artificial Sequence
  Description of Artificial Sequence: Synthetic oligonucleotide
agauagcaccucagggcug

SEQ ID NO: 2019732 - RNA, 19 nt, Artificial Sequence
  Description of Artificial Sequence: Synthetic oligonucleotide
cauccagucugagucagua

SEQ ID NO: 2019733 - RNA, 19 nt, Artificial Sequence
  Description of Artificial Sequence: Synthetic oligonucleotide
cccuggagaggaaccaggc

SEQ ID NO: 2019734 - RNA, 19 nt, Artificial Sequence
  Description of Artificial Sequence: Synthetic oligonucleotide
gugcccgaaucggaaagac

SEQ ID NO: 2019735 - RNA, 19 nt, Artificial Sequence
  Description of Artificial Sequence: Synthetic oligonucleotide
agagggcucuaggcgcgac

SEQ ID NO: 2019736 - RNA, 19 nt, Artificial Sequence
  Description of Artificial Sequence: Synthetic oligonucleotide
cugagucaguagccaaaca

SEQ ID NO: 2019737 - RNA, 19 nt, Artificial Sequence
  Description of Artificial Sequence: Synthetic oligonucleotide
gacauccacucgacagcug

SEQ ID NO: 2019738 - RNA, 19 nt, Artificial Sequence
  Description of Artificial Sequence: Synthetic oligonucleotide
auccacucgacagcuguua

SEQ ID NO: 2019739 - RNA, 19 nt, Artificial Sequence
  Description of Artificial Sequence: Synthetic oligonucleotide
aggcgcgacacaaccucuc

SEQ ID NO: 2019740 - RNA, 19 nt, Artificial Sequence
  Description of Artificial Sequence: Synthetic oligonucleotide
ugccagugguugacacaac

SEQ ID NO: 2019741 - RNA, 19 nt, Artificial Sequence
  Description of Artificial Sequence: Synthetic oligonucleotide
gagggcucuaggcgcgaca

SEQ ID NO: 2019742 - RNA, 19 nt, Artificial Sequence
  Description of Artificial Sequence: Synthetic oligonucleotide
accggcgacggugcgacgu

SEQ ID NO: 2019743 - RNA, 19 nt, Artificial Sequence
  Description of Artificial Sequence: Synthetic oligonucleotide
cccaaagccagcccuucac

SEQ ID NO: 2019744 - RNA, 19 nt, Artificial Sequence
  Description of Artificial Sequence: Synthetic oligonucleotide
ccaccagauagcaccucag

SEQ ID NO: 2019745 - RNA, 19 nt, Artificial Sequence
  Description of Artificial Sequence: Synthetic oligonucleotide
cccagauuggugaagacau

SEQ ID NO: 2019746 - RNA, 19 nt, Artificial Sequence
  Description of Artificial Sequence: Synthetic oligonucleotide
cucugaacucaaggcagca

SEQ ID NO: 2019747 - RNA, 19 nt, Artificial Sequence
  Description of Artificial Sequence: Synthetic oligonucleotide
cucagcugccagugguuga

SEQ ID NO: 2019748 - RNA, 19 nt, Artificial Sequence
  Description of Artificial Sequence: Synthetic oligonucleotide
acucaaggcagcagacaaa

SEQ ID NO: 2019749 - RNA, 19 nt, Artificial Sequence
  Description of Artificial Sequence: Synthetic oligonucleotide
agggccugcgcuaccucag

SEQ ID NO: 2019750 - RNA, 19 nt, Artificial Sequence
  Description of Artificial Sequence: Synthetic oligonucleotide
ggucaugugcaggcgcugc

SEQ ID NO: 2019751 - RNA, 19 nt, Artificial Sequence
  Description of Artificial Sequence: Synthetic oligonucleotide
ccugcgcuaccucagccug

SEQ ID NO: 2019752 - RNA, 19 nt, Artificial Sequence
  Description of Artificial Sequence: Synthetic oligonucleotide
cgcgacacaaccucucgac

SEQ ID NO: 2019753 - RNA, 19 nt, Artificial Sequence
  Description of Artificial Sequence: Synthetic oligonucleotide
ugacgacgccacaguuccu

SEQ ID NO: 2019754 - RNA, 19 nt, Artificial Sequence
  Description of Artificial Sequence: Synthetic oligonucleotide
ggaggaucaugaugucaga

SEQ ID NO: 2019755 - RNA, 19 nt, Artificial Sequence
  Description of Artificial Sequence: Synthetic oligonucleotide
ucccgcagggcgagacacu

SEQ ID NO: 2019756 - RNA, 19 nt, Artificial Sequence
  Description of Artificial Sequence: Synthetic oligonucleotide
gguccauaguaugcagcug

SEQ ID NO: 2019757 - RNA, 19 nt, Artificial Sequence
  Description of Artificial Sequence: Synthetic oligonucleotide
gcaaucugcccguaauugu

SEQ ID NO: 2019758 - RNA, 19 nt, Artificial Sequence
  Description of Artificial Sequence: Synthetic oligonucleotide
cgacggugcgacgugaucc

SEQ ID NO: 2019759 - RNA, 19 nt, Artificial Sequence
  Description of Artificial Sequence: Synthetic oligonucleotide
cagaccauccagucugagu

SEQ ID NO: 2019760 - RNA, 19 nt, Artificial Sequence
  Description of Artificial Sequence: Synthetic oligonucleotide
ggcuauacggagaucccaa

SEQ ID NO: 2019761 - RNA, 19 nt, Artificial Sequence
  Description of Artificial Sequence: Synthetic oligonucleotide
gcccuggagaggaaccagg

SEQ ID NO: 2019762 - RNA, 19 nt, Artificial Sequence
  Description of Artificial Sequence: Synthetic oligonucleotide
gguccugguagaaggugac

SEQ ID NO: 2019763 - RNA, 19 nt, Artificial Sequence
  Description of Artificial Sequence: Synthetic oligonucleotide
ggcugcgaucccucagugc

SEQ ID NO: 2019764 - RNA, 19 nt, Artificial Sequence
  Description of Artificial Sequence: Synthetic oligonucleotide
agccagcccuucacuuccc

SEQ ID NO: 2019765 - RNA, 19 nt, Artificial Sequence
  Description of Artificial Sequence: Synthetic oligonucleotide
ggcucuaggcgcgacacaa

SEQ ID NO: 2019766 - RNA, 19 nt, Artificial Sequence
  Description of Artificial Sequence: Synthetic oligonucleotide
auagcaccucagggcugcg

SEQ ID NO: 2019767 - RNA, 19 nt, Artificial Sequence
  Description of Artificial Sequence: Synthetic oligonucleotide
cagggccugcgcuaccuca

SEQ ID NO: 2019768 - RNA, 19 nt, Artificial Sequence
  Description of Artificial Sequence: Synthetic oligonucleotide
ggcgagacacucugggaaa

SEQ ID NO: 2019769 - RNA, 19 nt, Artificial Sequence
  Description of Artificial Sequence: Synthetic oligonucleotide
guggugcccgaaucggaaa

SEQ ID NO: 2019770 - RNA, 19 nt, Artificial Sequence
  Description of Artificial Sequence: Synthetic oligonucleotide
cuuuggcuauacggagauc

SEQ ID NO: 2019771 - RNA, 19 nt, Artificial Sequence
  Description of Artificial Sequence: Synthetic oligonucleotide
gcugacgacgccacaguuc

SEQ ID NO: 2019772 - RNA, 19 nt, Artificial Sequence
  Description of Artificial Sequence: Synthetic oligonucleotide
caaagccagcccuucacuu

SEQ ID NO: 2019773 - RNA, 19 nt, Artificial Sequence
  Description of Artificial Sequence: Synthetic oligonucleotide
uagcaccucagggcugcga

SEQ ID NO: 2019774 - RNA, 19 nt, Artificial Sequence
  Description of Artificial Sequence: Synthetic oligonucleotide
gcuauacggagaucccaaa

SEQ ID NO: 2019775 - RNA, 19 nt, Artificial Sequence
  Description of Artificial Sequence: Synthetic oligonucleotide
cccauuguggggccucgag

SEQ ID NO: 2019776 - RNA, 19 nt, Artificial Sequence
  Description of Artificial Sequence: Synthetic oligonucleotide
ugcuguagacaggcccauc

SEQ ID NO: 2019777 - RNA, 19 nt, Artificial Sequence
  Description of Artificial Sequence: Synthetic oligonucleotide
gcuuauagacuucgauggu

SEQ ID NO: 2019778 - RNA, 19 nt, Artificial Sequence
  Description of Artificial Sequence: Synthetic oligonucleotide
acgacgccacaguuccuua

SEQ ID NO: 2019779 - RNA, 19 nt, Artificial Sequence
  Description of Artificial Sequence: Synthetic oligonucleotide
ccucaugcuuauagacuuc

SEQ ID NO: 2019780 - RNA, 19 nt, Artificial Sequence
  Description of Artificial Sequence: Synthetic oligonucleotide
ccguacagcuccauccuca

SEQ ID NO: 2019781 - RNA, 19 nt, Artificial Sequence
  Description of Artificial Sequence: Synthetic oligonucleotide
cugcgaucccucagugcca

SEQ ID NO: 2019782 - RNA, 19 nt, Artificial Sequence
  Description of Artificial Sequence: Synthetic oligonucleotide
gguggguguagaagaccug

SEQ ID NO: 2019783 - RNA, 19 nt, Artificial Sequence
  Description of Artificial Sequence: Synthetic oligonucleotide
ggagaccaugcuguagaca

SEQ ID NO: 2019784 - RNA, 19 nt, Artificial Sequence
  Description of Artificial Sequence: Synthetic oligonucleotide
gcccguaauuguugccagc

SEQ ID NO: 2019785 - RNA, 19 nt, Artificial Sequence
  Description of Artificial Sequence: Synthetic oligonucleotide
caguagccaaacauccaau

SEQ ID NO: 2019786 - RNA, 19 nt, Artificial Sequence
  Description of Artificial Sequence: Synthetic oligonucleotide
gacgacgccacaguuccuu

SEQ ID NO: 2019787 - RNA, 19 nt, Artificial Sequence
  Description of Artificial Sequence: Synthetic oligonucleotide
cuuuggccucugaacucaa

SEQ ID NO: 2019788 - RNA, 19 nt, Artificial Sequence
  Description of Artificial Sequence: Synthetic oligonucleotide
ccuugcacucgggugcugc

SEQ ID NO: 2019789 - RNA, 19 nt, Artificial Sequence
  Description of Artificial Sequence: Synthetic oligonucleotide
gcuuaggcugagcagcccu

SEQ ID NO: 2019790 - RNA, 19 nt, Artificial Sequence
  Description of Artificial Sequence: Synthetic oligonucleotide
gcgacgugauccaucuuca

SEQ ID NO: 2019791 - RNA, 19 nt, Artificial Sequence
  Description of Artificial Sequence: Synthetic oligonucleotide
cguacagcuccauccucac

SEQ ID NO: 2019792 - RNA, 19 nt, Artificial Sequence
  Description of Artificial Sequence: Synthetic oligonucleotide
gggcugcgaucccucagug

SEQ ID NO: 2019793 - RNA, 19 nt, Artificial Sequence
  Description of Artificial Sequence: Synthetic oligonucleotide
gagcacuccucaugcuuau

SEQ ID NO: 2019794 - RNA, 19 nt, Artificial Sequence
  Description of Artificial Sequence: Synthetic oligonucleotide
cgaucccucagugccaggc

SEQ ID NO: 2019795 - RNA, 19 nt, Artificial Sequence
  Description of Artificial Sequence: Synthetic oligonucleotide
uccugagauggaggaucau

SEQ ID NO: 2019796 - RNA, 19 nt, Artificial Sequence
  Description of Artificial Sequence: Synthetic oligonucleotide
cgcagggcgagacacucug

SEQ ID NO: 2019797 - RNA, 19 nt, Artificial Sequence
  Description of Artificial Sequence: Synthetic oligonucleotide
gguccuguauggaggcuga

SEQ ID NO: 2019798 - RNA, 19 nt, Artificial Sequence
  Description of Artificial Sequence: Synthetic oligonucleotide
cuucccgcagggcgagaca

SEQ ID NO: 2019799 - RNA, 19 nt, Artificial Sequence
  Description of Artificial Sequence: Synthetic oligonucleotide
caggcugguccuguaugga

SEQ ID NO: 2019800 - RNA, 19 nt, Artificial Sequence
  Description of Artificial Sequence: Synthetic oligonucleotide
cuugcacucgggugcugcu

SEQ ID NO: 2019801 - RNA, 19 nt, Artificial Sequence
  Description of Artificial Sequence: Synthetic oligonucleotide
cccacucagcugccagugg

SEQ ID NO: 2019802 - RNA, 19 nt, Artificial Sequence
  Description of Artificial Sequence: Synthetic oligonucleotide
cugcgcuaccucagccuga

SEQ ID NO: 2019803 - RNA, 19 nt, Artificial Sequence
  Description of Artificial Sequence: Synthetic oligonucleotide
aacuucccgcagggcgaga

SEQ ID NO: 2019804 - RNA, 19 nt, Artificial Sequence
  Description of Artificial Sequence: Synthetic oligonucleotide
cagcccuggagaggaacca

SEQ ID NO: 2019805 - RNA, 19 nt, Artificial Sequence
  Description of Artificial Sequence: Synthetic oligonucleotide
cuguggagaccaugcugua

SEQ ID NO: 2019806 - RNA, 19 nt, Artificial Sequence
  Description of Artificial Sequence: Synthetic oligonucleotide
gcagggcgagacacucugg

SEQ ID NO: 2019807 - RNA, 19 nt, Artificial Sequence
  Description of Artificial Sequence: Synthetic oligonucleotide
gcaccggcgacggugcgac

SEQ ID NO: 2019808 - RNA, 19 nt, Artificial Sequence
  Description of Artificial Sequence: Synthetic oligonucleotide
gccguacagcuccauccuc

SEQ ID NO: 2019809 - RNA, 19 nt, Artificial Sequence
  Description of Artificial Sequence: Synthetic oligonucleotide
ggcuuaggcugagcagccc

SEQ ID NO: 2019810 - RNA, 19 nt, Artificial Sequence
  Description of Artificial Sequence: Synthetic oligonucleotide
cgacgugauccaucuucag

SEQ ID NO: 2019811 - RNA, 19 nt, Artificial Sequence
  Description of Artificial Sequence: Synthetic oligonucleotide
cccucagugccaggcaaug

SEQ ID NO: 2019812 - RNA, 19 nt, Artificial Sequence
  Description of Artificial Sequence: Synthetic oligonucleotide
gcgcgacacaaccucucga

SEQ ID NO: 2019813 - RNA, 19 nt, Artificial Sequence
  Description of Artificial Sequence: Synthetic oligonucleotide
ggcauugauuucaggcacu

SEQ ID NO: 2019814 - RNA, 19 nt, Artificial Sequence
  Description of Artificial Sequence: Synthetic oligonucleotide
ccauaguaugcagcugaca

SEQ ID NO: 2019815 - RNA, 19 nt, Artificial Sequence
  Description of Artificial Sequence: Synthetic oligonucleotide
gggccuuaaguuccccacu

SEQ ID NO: 2019816 - RNA, 19 nt, Artificial Sequence
  Description of Artificial Sequence: Synthetic oligonucleotide
cucgagcacuccucaugcu

SEQ ID NO: 2019817 - RNA, 19 nt, Artificial Sequence
  Description of Artificial Sequence: Synthetic oligonucleotide
agcacuccucaugcuuaua

SEQ ID NO: 2019818 - RNA, 19 nt, Artificial Sequence
  Description of Artificial Sequence: Synthetic oligonucleotide
gcaccucagggcugcgauc

SEQ ID NO: 2019819 - RNA, 19 nt, Artificial Sequence
  Description of Artificial Sequence: Synthetic oligonucleotide
cagccagaaugagugaauu

SEQ ID NO: 2019820 - RNA, 19 nt, Artificial Sequence
  Description of Artificial Sequence: Synthetic oligonucleotide
cauccaauccagcgcccau

SEQ ID NO: 2019821 - RNA, 19 nt, Artificial Sequence
  Description of Artificial Sequence: Synthetic oligonucleotide
cgacgccacaguuccuuac

SEQ ID NO: 2019822 - RNA, 19 nt, Artificial Sequence
  Description of Artificial Sequence: Synthetic oligonucleotide
ccccauccccagcacugag

SEQ ID NO: 2019823 - RNA, 19 nt, Artificial Sequence
  Description of Artificial Sequence: Synthetic oligonucleotide
caccggcgacggugcgacg

SEQ ID NO: 2019824 - RNA, 19 nt, Artificial Sequence
  Description of Artificial Sequence: Synthetic oligonucleotide
gcgacggugcgacgugauc

SEQ ID NO: 2019825 - RNA, 19 nt, Artificial Sequence
  Description of Artificial Sequence: Synthetic oligonucleotide
gcucuaggcgcgacacaac

SEQ ID NO: 2019826 - RNA, 19 nt, Artificial Sequence
  Description of Artificial Sequence: Synthetic oligonucleotide
gcgaucccucagugccagg

SEQ ID NO: 2019827 - RNA, 19 nt, Artificial Sequence
  Description of Artificial Sequence: Synthetic oligonucleotide
gccccggagggcccgugug

SEQ ID NO: 2019828 - RNA, 19 nt, Artificial Sequence
  Description of Artificial Sequence: Synthetic oligonucleotide
acggugcgacgugauccau

SEQ ID NO: 2019829 - RNA, 19 nt, Artificial Sequence
  Description of Artificial Sequence: Synthetic oligonucleotide
accuugcacucgggugcug

SEQ ID NO: 2019830 - RNA, 19 nt, Artificial Sequence
  Description of Artificial Sequence: Synthetic oligonucleotide
gcgagacacucugggaaaa

SEQ ID NO: 2019831 - RNA, 19 nt, Artificial Sequence
  Description of Artificial Sequence: Synthetic oligonucleotide
ccaaagccguacagcucca

SEQ ID NO: 2019832 - RNA, 19 nt, Artificial Sequence
  Description of Artificial Sequence: Synthetic oligonucleotide
cugaaccucuuuggcuaua

SEQ ID NO: 2019833 - RNA, 19 nt, Artificial Sequence
  Description of Artificial Sequence: Synthetic oligonucleotide
gcacuuccaggcugguccu

SEQ ID NO: 2019834 - RNA, 19 nt, Artificial Sequence
  Description of Artificial Sequence: Synthetic oligonucleotide
gggcucuaggcgcgacaca

SEQ ID NO: 2019835 - RNA, 19 nt, Artificial Sequence
  Description of Artificial Sequence: Synthetic oligonucleotide
ccggagggcccgugugaag

SEQ ID NO: 2019836 - RNA, 19 nt, Artificial Sequence
  Description of Artificial Sequence: Synthetic oligonucleotide
ggagggcccgugugaaggu

SEQ ID NO: 2019837 - RNA, 19 nt, Artificial Sequence
  Description of Artificial Sequence: Synthetic oligonucleotide
cggugcgacgugauccauc

SEQ ID NO: 2019838 - RNA, 19 nt, Artificial Sequence
  Description of Artificial Sequence: Synthetic oligonucleotide
ggcugacgacgccacaguu

SEQ ID NO: 2019839 - RNA, 19 nt, Artificial Sequence
  Description of Artificial Sequence: Synthetic oligonucleotide
ccggcgacggugcgacgug

SEQ ID NO: 2019840 - RNA, 19 nt, Artificial Sequence
  Description of Artificial Sequence: Synthetic oligonucleotide
uggccccggagggcccgug

SEQ ID NO: 2019841 - RNA, 19 nt, Artificial Sequence
  Description of Artificial Sequence: Synthetic oligonucleotide
cccgaaucggaaagacagu

SEQ ID NO: 2019842 - RNA, 19 nt, Artificial Sequence
  Description of Artificial Sequence: Synthetic oligonucleotide
cagagggcucuaggcgcga

SEQ ID NO: 2019843 - RNA, 19 nt, Artificial Sequence
  Description of Artificial Sequence: Synthetic oligonucleotide
gggcauggaaggucaccau

SEQ ID NO: 2019844 - RNA, 19 nt, Artificial Sequence
  Description of Artificial Sequence: Synthetic oligonucleotide
gcgcuaccucagccugacc

SEQ ID NO: 2019845 - RNA, 19 nt, Artificial Sequence
  Description of Artificial Sequence: Synthetic oligonucleotide
caaagccguacagcuccau

SEQ ID NO: 2019846 - RNA, 19 nt, Artificial Sequence
  Description of Artificial Sequence: Synthetic oligonucleotide
cugguccuguauggaggcu

SEQ ID NO: 2019847 - RNA, 19 nt, Artificial Sequence
  Description of Artificial Sequence: Synthetic oligonucleotide
ccgugugaaggucccaguu

SEQ ID NO: 2019848 - RNA, 19 nt, Artificial Sequence
  Description of Artificial Sequence: Synthetic oligonucleotide
cgcccauuguggggccucg

SEQ ID NO: 2019849 - RNA, 19 nt, Artificial Sequence
  Description of Artificial Sequence: Synthetic oligonucleotide
gcgcccauuguggggccuc

SEQ ID NO: 2019850 - RNA, 19 nt, Artificial Sequence
  Description of Artificial Sequence: Synthetic oligonucleotide
cccgugugaaggucccagu

SEQ ID NO: 2019851 - RNA, 19 nt, Artificial Sequence
  Description of Artificial Sequence: Synthetic oligonucleotide
ccccuccacagaccaucca

SEQ ID NO: 2019852 - RNA, 19 nt, Artificial Sequence
  Description of Artificial Sequence: Synthetic oligonucleotide
cggagaucccaaagccgua

SEQ ID NO: 2019853 - RNA, 19 nt, Artificial Sequence
  Description of Artificial Sequence: Synthetic oligonucleotide
gugcgacgugauccaucuu

SEQ ID NO: 2019854 - RNA, 19 nt, Artificial Sequence
  Description of Artificial Sequence: Synthetic oligonucleotide
ggcgacggugcgacgugau

SEQ ID NO: 2019855 - RNA, 19 nt, Artificial Sequence
  Description of Artificial Sequence: Synthetic oligonucleotide
ggccccggagggcccgugu

SEQ ID NO: 2019856 - RNA, 19 nt, Artificial Sequence
  Description of Artificial Sequence: Synthetic oligonucleotide
cggcgacggugcgacguga

SEQ ID NO: 2019857 - RNA, 19 nt, Artificial Sequence
  Description of Artificial Sequence: Synthetic oligonucleotide
uguaacguaaagaagggcg

SEQ ID NO: 2019858 - RNA, 19 nt, Artificial Sequence
  Description of Artificial Sequence: Synthetic oligonucleotide
ucuaauacaaucuggauug

SEQ ID NO: 2019859 - RNA, 19 nt, Artificial Sequence
  Description of Artificial Sequence: Synthetic oligonucleotide
aaucaucagguuuauagac

SEQ ID NO: 2019860 - RNA, 19 nt, Artificial Sequence
  Description of Artificial Sequence: Synthetic oligonucleotide
gauuaagugacaaacaucc

SEQ ID NO: 2019861 - RNA, 19 nt, Artificial Sequence
  Description of Artificial Sequence: Synthetic oligonucleotide
uuaauaucauaaaucagag

SEQ ID NO: 2019862 - RNA, 19 nt, Artificial Sequence
  Description of Artificial Sequence: Synthetic oligonucleotide
uugacguuguugaagagcg

SEQ ID NO: 2019863 - RNA, 19 nt, Artificial Sequence
  Description of Artificial Sequence: Synthetic oligonucleotide
agcccuuugagucugaugg

SEQ ID NO: 2019864 - RNA, 19 nt, Artificial Sequence
  Description of Artificial Sequence: Synthetic oligonucleotide
gauaaucucagccuugugc

SEQ ID NO: 2019865 - RNA, 19 nt, Artificial Sequence
  Description of Artificial Sequence: Synthetic oligonucleotide
ucauaaaucagagugggcc

SEQ ID NO: 2019866 - RNA, 19 nt, Artificial Sequence
  Description of Artificial Sequence: Synthetic oligonucleotide
aacaucccuaaauccaagc

SEQ ID NO: 2019867 - RNA, 19 nt, Artificial Sequence
  Description of Artificial Sequence: Synthetic oligonucleotide
acuuugagcccuuugaguc

SEQ ID NO: 2019868 - RNA, 19 nt, Artificial Sequence
  Description of Artificial Sequence: Synthetic oligonucleotide
auacaaucuggauugacuc

SEQ ID NO: 2019869 - RNA, 19 nt, Artificial Sequence
  Description of Artificial Sequence: Synthetic oligonucleotide
uaaagaagggcggaaagcg

SEQ ID NO: 2019870 - RNA, 19 nt, Artificial Sequence
  Description of Artificial Sequence: Synthetic oligonucleotide
gacagugauaaucucagcc

SEQ ID NO: 2019871 - RNA, 19 nt, Artificial Sequence
  Description of Artificial Sequence: Synthetic oligonucleotide
aagaaguagagggagacag

SEQ ID NO: 2019872 - RNA, 19 nt, Artificial Sequence
  Description of Artificial Sequence: Synthetic oligonucleotide
uguagcuugacguuguuga

SEQ ID NO: 2019873 - RNA, 19 nt, Artificial Sequence
  Description of Artificial Sequence: Synthetic oligonucleotide
ugcuagaagaacuugacuc

SEQ ID NO: 2019874 - RNA, 19 nt, Artificial Sequence
  Description of Artificial Sequence: Synthetic oligonucleotide
cuagucaguucauauaggg

SEQ ID NO: 2019875 - RNA, 19 nt, Artificial Sequence
  Description of Artificial Sequence: Synthetic oligonucleotide
cuucguauugccuggaagg

SEQ ID NO: 2019876 - RNA, 19 nt, Artificial Sequence
  Description of Artificial Sequence: Synthetic oligonucleotide
aucacugacagugauaauc

SEQ ID NO: 2019877 - RNA, 19 nt, Artificial Sequence
  Description of Artificial Sequence: Synthetic oligonucleotide
ucaucagguuuauagaccc

SEQ ID NO: 2019878 - RNA, 19 nt, Artificial Sequence
  Description of Artificial Sequence: Synthetic oligonucleotide
gacuagucgaucuagucug

SEQ ID NO: 2019879 - RNA, 19 nt, Artificial Sequence
  Description of Artificial Sequence: Synthetic oligonucleotide
aaacucaucgccaucguag

SEQ ID NO: 2019880 - RNA, 19 nt, Artificial Sequence
  Description of Artificial Sequence: Synthetic oligonucleotide
uucuaauacaaucuggauu

SEQ ID NO: 2019881 - RNA, 19 nt, Artificial Sequence
  Description of Artificial Sequence: Synthetic oligonucleotide
uucuuauccaaccacucga

SEQ ID NO: 2019882 - RNA, 19 nt, Artificial Sequence
  Description of Artificial Sequence: Synthetic oligonucleotide
agagauuuuaauaucauaa

SEQ ID NO: 2019883 - RNA, 19 nt, Artificial Sequence
  Description of Artificial Sequence: Synthetic oligonucleotide
ugaucaggaagcuagacuu

SEQ ID NO: 2019884 - RNA, 19 nt, Artificial Sequence
  Description of Artificial Sequence: Synthetic oligonucleotide
auucuuauccaaccacucg

SEQ ID NO: 2019885 - RNA, 19 nt, Artificial Sequence
  Description of Artificial Sequence: Synthetic oligonucleotide
uuguaaaucaucagguuua

SEQ ID NO: 2019886 - RNA, 19 nt, Artificial Sequence
  Description of Artificial Sequence: Synthetic oligonucleotide
aaacccauugauaaaugag

SEQ ID NO: 2019887 - RNA, 19 nt, Artificial Sequence
  Description of Artificial Sequence: Synthetic oligonucleotide
uggauuaagugacaaacau

SEQ ID NO: 2019888 - RNA, 19 nt, Artificial Sequence
  Description of Artificial Sequence: Synthetic oligonucleotide
gacuuauucuuauccaacc

SEQ ID NO: 2019889 - RNA, 19 nt, Artificial Sequence
  Description of Artificial Sequence: Synthetic oligonucleotide
ucggcuguaacguaaagaa

SEQ ID NO: 2019890 - RNA, 19 nt, Artificial Sequence
  Description of Artificial Sequence: Synthetic oligonucleotide
uuauccaaccacucgaggu

SEQ ID NO: 2019891 - RNA, 19 nt, Artificial Sequence
  Description of Artificial Sequence: Synthetic oligonucleotide
ugacaaacaucccuaaauc

SEQ ID NO: 2019892 - RNA, 19 nt, Artificial Sequence
  Description of Artificial Sequence: Synthetic oligonucleotide
uccacguucggcuguaacg

SEQ ID NO: 2019893 - RNA, 19 nt, Artificial Sequence
  Description of Artificial Sequence: Synthetic oligonucleotide
cuuauucuuauccaaccac

SEQ ID NO: 2019894 - RNA, 19 nt, Artificial Sequence
  Description of Artificial Sequence: Synthetic oligonucleotide
uuccccacuagucaguuca

SEQ ID NO: 2019895 - RNA, 19 nt, Artificial Sequence
  Description of Artificial Sequence: Synthetic oligonucleotide
cauaaaucagagugggccc

SEQ ID NO: 2019896 - RNA, 19 nt, Artificial Sequence
  Description of Artificial Sequence: Synthetic oligonucleotide
auaucauaaaucagagugg

SEQ ID NO: 2019897 - RNA, 19 nt, Artificial Sequence
  Description of Artificial Sequence: Synthetic oligonucleotide
ugacuagucgaucuagucu

SEQ ID NO: 2019898 - RNA, 19 nt, Artificial Sequence
  Description of Artificial Sequence: Synthetic oligonucleotide
ucacugacagugauaaucu

SEQ ID NO: 2019899 - RNA, 19 nt, Artificial Sequence
  Description of Artificial Sequence: Synthetic oligonucleotide
agcuuucaggacuuugagc

SEQ ID NO: 2019900 - RNA, 19 nt, Artificial Sequence
  Description of Artificial Sequence: Synthetic oligonucleotide
ggcuguaacguaaagaagg

SEQ ID NO: 2019901 - RNA, 19 nt, Artificial Sequence
  Description of Artificial Sequence: Synthetic oligonucleotide
ucgaaacucaucgccaucg

SEQ ID NO: 2019902 - RNA, 19 nt, Artificial Sequence
  Description of Artificial Sequence: Synthetic oligonucleotide
ugggagguaagaaguagag

SEQ ID NO: 2019903 - RNA, 19 nt, Artificial Sequence
  Description of Artificial Sequence: Synthetic oligonucleotide
ucagguuuauagacccugg

SEQ ID NO: 2019904 - RNA, 19 nt, Artificial Sequence
  Description of Artificial Sequence: Synthetic oligonucleotide
ucugcuagaagaacuugac

SEQ ID NO: 2019905 - RNA, 19 nt, Artificial Sequence
  Description of Artificial Sequence: Synthetic oligonucleotide
aacccauugauaaaugagu

SEQ ID NO: 2019906 - RNA, 19 nt, Artificial Sequence
  Description of Artificial Sequence: Synthetic oligonucleotide
uuacgugugagaacacuug

SEQ ID NO: 2019907 - RNA, 19 nt, Artificial Sequence
  Description of Artificial Sequence: Synthetic oligonucleotide
gacguuguugaagagcggg

SEQ ID NO: 2019908 - RNA, 19 nt, Artificial Sequence
  Description of Artificial Sequence: Synthetic oligonucleotide
acaggucucugcuagaaga

SEQ ID NO: 2019909 - RNA, 19 nt, Artificial Sequence
  Description of Artificial Sequence: Synthetic oligonucleotide
agguagacuggauuaagug

SEQ ID NO: 2019910 - RNA, 19 nt, Artificial Sequence
  Description of Artificial Sequence: Synthetic oligonucleotide
aguagagauuuuaauauca

SEQ ID NO: 2019911 - RNA, 19 nt, Artificial Sequence
  Description of Artificial Sequence: Synthetic oligonucleotide
acacagaauuguucuggcc

SEQ ID NO: 2019912 - RNA, 19 nt, Artificial Sequence
  Description of Artificial Sequence: Synthetic oligonucleotide
uauagggugaacacagaau

SEQ ID NO: 2019913 - RNA, 19 nt, Artificial Sequence
  Description of Artificial Sequence: Synthetic oligonucleotide
aucgccaucguaguagccc

SEQ ID NO: 2019914 - RNA, 19 nt, Artificial Sequence
  Description of Artificial Sequence: Synthetic oligonucleotide
guaacguaaagaagggcgg

SEQ ID NO: 2019915 - RNA, 19 nt, Artificial Sequence
  Description of Artificial Sequence: Synthetic oligonucleotide
uagucgaucuagucugugg

SEQ ID NO: 2019916 - RNA, 19 nt, Artificial Sequence
  Description of Artificial Sequence: Synthetic oligonucleotide
cuaucuucguauugccugg

SEQ ID NO: 2019917 - RNA, 19 nt, Artificial Sequence
  Description of Artificial Sequence: Synthetic oligonucleotide
guagacuggauuaagugac

SEQ ID NO: 2019918 - RNA, 19 nt, Artificial Sequence
  Description of Artificial Sequence: Synthetic oligonucleotide
uaauaucauaaaucagagu

SEQ ID NO: 2019919 - RNA, 19 nt, Artificial Sequence
  Description of Artificial Sequence: Synthetic oligonucleotide
gaaauguauccuuccuccc

SEQ ID NO: 2019920 - RNA, 19 nt, Artificial Sequence
  Description of Artificial Sequence: Synthetic oligonucleotide
uggguguguacuuacgugu

SEQ ID NO: 2019921 - RNA, 19 nt, Artificial Sequence
  Description of Artificial Sequence: Synthetic oligonucleotide
gaaacccauugauaaauga

SEQ ID NO: 2019922 - RNA, 19 nt, Artificial Sequence
  Description of Artificial Sequence: Synthetic oligonucleotide
agacuuauucuuauccaac

SEQ ID NO: 2019923 - RNA, 19 nt, Artificial Sequence
  Description of Artificial Sequence: Synthetic oligonucleotide
uguacuuacgugugagaac

SEQ ID NO: 2019924 - RNA, 19 nt, Artificial Sequence
  Description of Artificial Sequence: Synthetic oligonucleotide
cuuccuaucuucguauugc

SEQ ID NO: 2019925 - RNA, 19 nt, Artificial Sequence
  Description of Artificial Sequence: Synthetic oligonucleotide
auauagggugaacacagaa

SEQ ID NO: 2019926 - RNA, 19 nt, Artificial Sequence
  Description of Artificial Sequence: Synthetic oligonucleotide
aacucaucgccaucguagu

SEQ ID NO: 2019927 - RNA, 19 nt, Artificial Sequence
  Description of Artificial Sequence: Synthetic oligonucleotide
agguaagaaguagagggag

SEQ ID NO: 2019928 - RNA, 19 nt, Artificial Sequence
  Description of Artificial Sequence: Synthetic oligonucleotide
guacuuacgugugagaaca

SEQ ID NO: 2019929 - RNA, 19 nt, Artificial Sequence
  Description of Artificial Sequence: Synthetic oligonucleotide
uagggugaacacagaauug

SEQ ID NO: 2019930 - RNA, 19 nt, Artificial Sequence
  Description of Artificial Sequence: Synthetic oligonucleotide
uuccgcuguagcuugacgu

SEQ ID NO: 2019931 - RNA, 19 nt, Artificial Sequence
  Description of Artificial Sequence: Synthetic oligonucleotide
acaucccuaaauccaagcu

SEQ ID NO: 2019932 - RNA, 19 nt, Artificial Sequence
  Description of Artificial Sequence: Synthetic oligonucleotide
ucugauggagugacuaguc

SEQ ID NO: 2019933 - RNA, 19 nt, Artificial Sequence
  Description of Artificial Sequence: Synthetic oligonucleotide
caggaagcuagacuuauuc

SEQ ID NO: 2019934 - RNA, 19 nt, Artificial Sequence
  Description of Artificial Sequence: Synthetic oligonucleotide
uacgugugagaacacuugu

SEQ ID NO: 2019935 - RNA, 19 nt, Artificial Sequence
  Description of Artificial Sequence: Synthetic oligonucleotide
gaagagcgggcucuccugg

SEQ ID NO: 2019936 - RNA, 19 nt, Artificial Sequence
  Description of Artificial Sequence: Synthetic oligonucleotide
uggaaacccauugauaaau

SEQ ID NO: 2019937 - RNA, 19 nt, Artificial Sequence
  Description of Artificial Sequence: Synthetic oligonucleotide
guaagaaguagagggagac

SEQ ID NO: 2019938 - RNA, 19 nt, Artificial Sequence
  Description of Artificial Sequence: Synthetic oligonucleotide
uauccaaccacucgagguu

SEQ ID NO: 2019939 - RNA, 19 nt, Artificial Sequence
  Description of Artificial Sequence: Synthetic oligonucleotide
guaaagaagggcggaaagc

SEQ ID NO: 2019940 - RNA, 19 nt, Artificial Sequence
  Description of Artificial Sequence: Synthetic oligonucleotide
uaaaugagugggaggugga

SEQ ID NO: 2019941 - RNA, 19 nt, Artificial Sequence
  Description of Artificial Sequence: Synthetic oligonucleotide
cuaucccagggacagguag

SEQ ID NO: 2019942 - RNA, 19 nt, Artificial Sequence
  Description of Artificial Sequence: Synthetic oligonucleotide
ggauugacuccacaggaag

SEQ ID NO: 2019943 - RNA, 19 nt, Artificial Sequence
  Description of Artificial Sequence: Synthetic oligonucleotide
uuccuaucuucguauugcc

SEQ ID NO: 2019944 - RNA, 19 nt, Artificial Sequence
  Description of Artificial Sequence: Synthetic oligonucleotide
uugggaguagagauuuuaa

SEQ ID NO: 2019945 - RNA, 19 nt, Artificial Sequence
  Description of Artificial Sequence: Synthetic oligonucleotide
acaaucuggauugacucca

SEQ ID NO: 2019946 - RNA, 19 nt, Artificial Sequence
  Description of Artificial Sequence: Synthetic oligonucleotide
uucguauugccuggaaggc

SEQ ID NO: 2019947 - RNA, 19 nt, Artificial Sequence
  Description of Artificial Sequence: Synthetic oligonucleotide
uugagucugauggagugac

SEQ ID NO: 2019948 - RNA, 19 nt, Artificial Sequence
  Description of Artificial Sequence: Synthetic oligonucleotide
uggaaagaugggagguaag

SEQ ID NO: 2019949 - RNA, 19 nt, Artificial Sequence
  Description of Artificial Sequence: Synthetic oligonucleotide
agcuagacuuauucuuauc

SEQ ID NO: 2019950 - RNA, 19 nt, Artificial Sequence
  Description of Artificial Sequence: Synthetic oligonucleotide
uuuauagacccugguccag

SEQ ID NO: 2019951 - RNA, 19 nt, Artificial Sequence
  Description of Artificial Sequence: Synthetic oligonucleotide
cucaucgccaucguaguag

SEQ ID NO: 2019952 - RNA, 19 nt, Artificial Sequence
  Description of Artificial Sequence: Synthetic oligonucleotide
aucagguuuauagacccug

SEQ ID NO: 2019953 - RNA, 19 nt, Artificial Sequence
  Description of Artificial Sequence: Synthetic oligonucleotide
cauccccuaggaaggaucc

SEQ ID NO: 2019954 - RNA, 19 nt, Artificial Sequence
  Description of Artificial Sequence: Synthetic oligonucleotide
uucggcuguaacguaaaga

SEQ ID NO: 2019955 - RNA, 19 nt, Artificial Sequence
  Description of Artificial Sequence: Synthetic oligonucleotide
gguagacuggauuaaguga

SEQ ID NO: 2019956 - RNA, 19 nt, Artificial Sequence
  Description of Artificial Sequence: Synthetic oligonucleotide
gaacuugacuccucggcca

SEQ ID NO: 2019957 - RNA, 19 nt, Artificial Sequence
  Description of Artificial Sequence: Synthetic oligonucleotide
ugggcucacgcuaucccag

SEQ ID NO: 2019958 - RNA, 19 nt, Artificial Sequence
  Description of Artificial Sequence: Synthetic oligonucleotide
ccuaucuucguauugccug

SEQ ID NO: 2019959 - RNA, 19 nt, Artificial Sequence
  Description of Artificial Sequence: Synthetic oligonucleotide
aagagcgggcucuccuggg

SEQ ID NO: 2019960 - RNA, 19 nt, Artificial Sequence
  Description of Artificial Sequence: Synthetic oligonucleotide
uguguacuuacgugugaga

SEQ ID NO: 2019961 - RNA, 19 nt, Artificial Sequence
  Description of Artificial Sequence: Synthetic oligonucleotide
uuugggaguagagauuuua

SEQ ID NO: 2019962 - RNA, 19 nt, Artificial Sequence
  Description of Artificial Sequence: Synthetic oligonucleotide
uagacuggauuaagugaca

SEQ ID NO: 2019963 - RNA, 19 nt, Artificial Sequence
  Description of Artificial Sequence: Synthetic oligonucleotide
acuagucaguucauauagg

SEQ ID NO: 2019964 - RNA, 19 nt, Artificial Sequence
  Description of Artificial Sequence: Synthetic oligonucleotide
ucgaucuagucugugggac

SEQ ID NO: 2019965 - RNA, 19 nt, Artificial Sequence
  Description of Artificial Sequence: Synthetic oligonucleotide
gcaagaaauguauccuucc

SEQ ID NO: 2019966 - RNA, 19 nt, Artificial Sequence
  Description of Artificial Sequence: Synthetic oligonucleotide
ugccgcguguccacguucg

SEQ ID NO: 2019967 - RNA, 19 nt, Artificial Sequence
  Description of Artificial Sequence: Synthetic oligonucleotide
aaguagagggagacagguc

SEQ ID NO: 2019968 - RNA, 19 nt, Artificial Sequence
  Description of Artificial Sequence: Synthetic oligonucleotide
acaggcuaggaugggaaag

SEQ ID NO: 2019969 - RNA, 19 nt, Artificial Sequence
  Description of Artificial Sequence: Synthetic oligonucleotide
cucacgcuaucccagggac

SEQ ID NO: 2019970 - RNA, 19 nt, Artificial Sequence
  Description of Artificial Sequence: Synthetic oligonucleotide
ggaguagagauuuuaauau

SEQ ID NO: 2019971 - RNA, 19 nt, Artificial Sequence
  Description of Artificial Sequence: Synthetic oligonucleotide
cacgcuaucccagggacag

SEQ ID NO: 2019972 - RNA, 19 nt, Artificial Sequence
  Description of Artificial Sequence: Synthetic oligonucleotide
cacgaaguaggguugccuc

SEQ ID NO: 2019973 - RNA, 19 nt, Artificial Sequence
  Description of Artificial Sequence: Synthetic oligonucleotide
gagugacuagucgaucuag

SEQ ID NO: 2019974 - RNA, 19 nt, Artificial Sequence
  Description of Artificial Sequence: Synthetic oligonucleotide
cuggauuaagugacaaaca

SEQ ID NO: 2019975 - RNA, 19 nt, Artificial Sequence
  Description of Artificial Sequence: Synthetic oligonucleotide
cauguggguguguacuuac

SEQ ID NO: 2019976 - RNA, 19 nt, Artificial Sequence
  Description of Artificial Sequence: Synthetic oligonucleotide
uaacguaaagaagggcgga

SEQ ID NO: 2019977 - RNA, 19 nt, Artificial Sequence
  Description of Artificial Sequence: Synthetic oligonucleotide
gaaagaugggagguaagaa

SEQ ID NO: 2019978 - RNA, 19 nt, Artificial Sequence
  Description of Artificial Sequence: Synthetic oligonucleotide
uaagaaguagagggagaca

SEQ ID NO: 2019979 - RNA, 19 nt, Artificial Sequence
  Description of Artificial Sequence: Synthetic oligonucleotide
aggagguagggcaagaaau

SEQ ID NO: 2019980 - RNA, 19 nt, Artificial Sequence
  Description of Artificial Sequence: Synthetic oligonucleotide
uccuggaaacccauugaua

SEQ ID NO: 2019981 - RNA, 19 nt, Artificial Sequence
  Description of Artificial Sequence: Synthetic oligonucleotide
caggcuaggaugggaaagg

SEQ ID NO: 2019982 - RNA, 19 nt, Artificial Sequence
  Description of Artificial Sequence: Synthetic oligonucleotide
guguguacuuacgugugag

SEQ ID NO: 2019983 - RNA, 19 nt, Artificial Sequence
  Description of Artificial Sequence: Synthetic oligonucleotide
gaagcuagacuuauucuua

SEQ ID NO: 2019984 - RNA, 19 nt, Artificial Sequence
  Description of Artificial Sequence: Synthetic oligonucleotide
gugacuagucgaucuaguc

SEQ ID NO: 2019985 - RNA, 19 nt, Artificial Sequence
  Description of Artificial Sequence: Synthetic oligonucleotide
gggaguagagauuuuaaua

SEQ ID NO: 2019986 - RNA, 19 nt, Artificial Sequence
  Description of Artificial Sequence: Synthetic oligonucleotide
ugacuccucggccaucacu

SEQ ID NO: 2019987 - RNA, 19 nt, Artificial Sequence
  Description of Artificial Sequence: Synthetic oligonucleotide
acagguagacuggauuaag

SEQ ID NO: 2019988 - RNA, 19 nt, Artificial Sequence
  Description of Artificial Sequence: Synthetic oligonucleotide
ucgccaucguaguagccca

SEQ ID NO: 2019989 - RNA, 19 nt, Artificial Sequence
  Description of Artificial Sequence: Synthetic oligonucleotide
uguaaaucaucagguuuau

SEQ ID NO: 2019990 - RNA, 19 nt, Artificial Sequence
  Description of Artificial Sequence: Synthetic oligonucleotide
aacuugacuccucggccau

SEQ ID NO: 2019991 - RNA, 19 nt, Artificial Sequence
  Description of Artificial Sequence: Synthetic oligonucleotide
aacguaaagaagggcggaa

SEQ ID NO: 2019992 - RNA, 19 nt, Artificial Sequence
  Description of Artificial Sequence: Synthetic oligonucleotide
cugugggacacuuggucug

SEQ ID NO: 2019993 - RNA, 19 nt, Artificial Sequence
  Description of Artificial Sequence: Synthetic oligonucleotide
gugucuuccccacuaguca

SEQ ID NO: 2019994 - RNA, 19 nt, Artificial Sequence
  Description of Artificial Sequence: Synthetic oligonucleotide
auugacuccacaggaaguu

SEQ ID NO: 2019995 - RNA, 19 nt, Artificial Sequence
  Description of Artificial Sequence: Synthetic oligonucleotide
acgaaguaggguugccuca

SEQ ID NO: 2019996 - RNA, 19 nt, Artificial Sequence
  Description of Artificial Sequence: Synthetic oligonucleotide
gacuguuugugcaggcggc

SEQ ID NO: 2019997 - RNA, 19 nt, Artificial Sequence
  Description of Artificial Sequence: Synthetic oligonucleotide
auguauccuuccucccggg

SEQ ID NO: 2019998 - RNA, 19 nt, Artificial Sequence
  Description of Artificial Sequence: Synthetic oligonucleotide
acucgaaacucaucgccau

SEQ ID NO: 2019999 - RNA, 19 nt, Artificial Sequence
  Description of Artificial Sequence: Synthetic oligonucleotide
cucgagguucccuuucuuc

SEQ ID NO: 2020000 - RNA, 19 nt, Artificial Sequence
  Description of Artificial Sequence: Synthetic oligonucleotide
agcuagugcaggcgcaugu

SEQ ID NO: 2020001 - RNA, 19 nt, Artificial Sequence
  Description of Artificial Sequence: Synthetic oligonucleotide
aagggcggaaagcgguacu

SEQ ID NO: 2020002 - RNA, 19 nt, Artificial Sequence
  Description of Artificial Sequence: Synthetic oligonucleotide
aucccuaaauccaagcuuu

SEQ ID NO: 2020003 - RNA, 19 nt, Artificial Sequence
  Description of Artificial Sequence: Synthetic oligonucleotide
agaauuguucuggccgcuc

SEQ ID NO: 2020004 - RNA, 19 nt, Artificial Sequence
  Description of Artificial Sequence: Synthetic oligonucleotide
gacuuugagcccuuugagu

SEQ ID NO: 2020005 - RNA, 19 nt, Artificial Sequence
  Description of Artificial Sequence: Synthetic oligonucleotide
ucacgcuaucccagggaca

SEQ ID NO: 2020006 - RNA, 19 nt, Artificial Sequence
  Description of Artificial Sequence: Synthetic oligonucleotide
guguacuuacgugugagaa

SEQ ID NO: 2020007 - RNA, 19 nt, Artificial Sequence
  Description of Artificial Sequence: Synthetic oligonucleotide
ccacucgaaacucaucgcc

SEQ ID NO: 2020008 - RNA, 19 nt, Artificial Sequence
  Description of Artificial Sequence: Synthetic oligonucleotide
cacucgaaacucaucgcca

SEQ ID NO: 2020009 - RNA, 19 nt, Artificial Sequence
  Description of Artificial Sequence: Synthetic oligonucleotide
ucuagucugugggacacuu

SEQ ID NO: 2020010 - RNA, 19 nt, Artificial Sequence
  Description of Artificial Sequence: Synthetic oligonucleotide
ucguauugccuggaaggcu

SEQ ID NO: 2020011 - RNA, 19 nt, Artificial Sequence
  Description of Artificial Sequence: Synthetic oligonucleotide
ggauuaagugacaaacauc

SEQ ID NO: 2020012 - RNA, 19 nt, Artificial Sequence
  Description of Artificial Sequence: Synthetic oligonucleotide
ugccacggccacucgaaac

SEQ ID NO: 2020013 - RNA, 19 nt, Artificial Sequence
  Description of Artificial Sequence: Synthetic oligonucleotide
ggagguagggcaagaaaug

SEQ ID NO: 2020014 - RNA, 19 nt, Artificial Sequence
  Description of Artificial Sequence: Synthetic oligonucleotide
ucuggccgcuccuggaaac

SEQ ID NO: 2020015 - RNA, 19 nt, Artificial Sequence
  Description of Artificial Sequence: Synthetic oligonucleotide
aucaggaagcuagacuuau

SEQ ID NO: 2020016 - RNA, 19 nt, Artificial Sequence
  Description of Artificial Sequence: Synthetic oligonucleotide
uuccucccgggcaccgugg

SEQ ID NO: 2020017 - RNA, 19 nt, Artificial Sequence
  Description of Artificial Sequence: Synthetic oligonucleotide
gagucugauggagugacua

SEQ ID NO: 2020018 - RNA, 19 nt, Artificial Sequence
  Description of Artificial Sequence: Synthetic oligonucleotide
augggagguaagaaguaga

SEQ ID NO: 2020019 - RNA, 19 nt, Artificial Sequence
  Description of Artificial Sequence: Synthetic oligonucleotide
gagcccuuugagucugaug

SEQ ID NO: 2020020 - RNA, 19 nt, Artificial Sequence
  Description of Artificial Sequence: Synthetic oligonucleotide
cuggacuguuugugcaggc

SEQ ID NO: 2020021 - RNA, 19 nt, Artificial Sequence
  Description of Artificial Sequence: Synthetic oligonucleotide
gggagguaagaaguagagg

SEQ ID NO: 2020022 - RNA, 19 nt, Artificial Sequence
  Description of Artificial Sequence: Synthetic oligonucleotide
uccgcuguagcuugacguu

SEQ ID NO: 2020023 - RNA, 19 nt, Artificial Sequence
  Description of Artificial Sequence: Synthetic oligonucleotide
agagugggcccgcuuuuca

SEQ ID NO: 2020024 - RNA, 19 nt, Artificial Sequence
  Description of Artificial Sequence: Synthetic oligonucleotide
ggaaagaugggagguaaga

SEQ ID NO: 2020025 - RNA, 19 nt, Artificial Sequence
  Description of Artificial Sequence: Synthetic oligonucleotide
ucccuaaauccaagcuuuc

SEQ ID NO: 2020026 - RNA, 19 nt, Artificial Sequence
  Description of Artificial Sequence: Synthetic oligonucleotide
uacuuacgugugagaacac

SEQ ID NO: 2020027 - RNA, 19 nt, Artificial Sequence
  Description of Artificial Sequence: Synthetic oligonucleotide
ucaguucauauagggugaa

SEQ ID NO: 2020028 - RNA, 19 nt, Artificial Sequence
  Description of Artificial Sequence: Synthetic oligonucleotide
acccauugauaaaugaguu

SEQ ID NO: 2020029 - RNA, 19 nt, Artificial Sequence
  Description of Artificial Sequence: Synthetic oligonucleotide
agugacuagucgaucuagu

SEQ ID NO: 2020030 - RNA, 19 nt, Artificial Sequence
  Description of Artificial Sequence: Synthetic oligonucleotide
aaucagagugggcccgcuu

SEQ ID NO: 2020031 - RNA, 19 nt, Artificial Sequence
  Description of Artificial Sequence: Synthetic oligonucleotide
uccgccacaugaucaggaa

SEQ ID NO: 2020032 - RNA, 19 nt, Artificial Sequence
  Description of Artificial Sequence: Synthetic oligonucleotide
ucaggaagcuagacuuauu

SEQ ID NO: 2020033 - RNA, 19 nt, Artificial Sequence
  Description of Artificial Sequence: Synthetic oligonucleotide
gucgaucuagucuguggga

SEQ ID NO: 2020034 - RNA, 19 nt, Artificial Sequence
  Description of Artificial Sequence: Synthetic oligonucleotide
agacuggauuaagugacaa

SEQ ID NO: 2020035 - RNA, 19 nt, Artificial Sequence
  Description of Artificial Sequence: Synthetic oligonucleotide
aaaucagagugggcccgcu

SEQ ID NO: 2020036 - RNA, 19 nt, Artificial Sequence
  Description of Artificial Sequence: Synthetic oligonucleotide
ggcggaaagcgguacugcc

SEQ ID NO: 2020037 - RNA, 19 nt, Artificial Sequence
  Description of Artificial Sequence: Synthetic oligonucleotide
gcuuccuaucuucguauug

SEQ ID NO: 2020038 - RNA, 19 nt, Artificial Sequence
  Description of Artificial Sequence: Synthetic oligonucleotide
cguaaagaagggcggaaag

SEQ ID NO: 2020039 - RNA, 19 nt, Artificial Sequence
  Description of Artificial Sequence: Synthetic oligonucleotide
cguauugccuggaaggcug

SEQ ID NO: 2020040 - RNA, 19 nt, Artificial Sequence
  Description of Artificial Sequence: Synthetic oligonucleotide
auguggguguguacuuacg

SEQ ID NO: 2020041 - RNA, 19 nt, Artificial Sequence
  Description of Artificial Sequence: Synthetic oligonucleotide
uaucuucguauugccugga

SEQ ID NO: 2020042 - RNA, 19 nt, Artificial Sequence
  Description of Artificial Sequence: Synthetic oligonucleotide
ugcaggcgcaugugggugu

SEQ ID NO: 2020043 - RNA, 19 nt, Artificial Sequence
  Description of Artificial Sequence: Synthetic oligonucleotide
gaaguuuccgcuguagcuu

SEQ ID NO: 2020044 - RNA, 19 nt, Artificial Sequence
  Description of Artificial Sequence: Synthetic oligonucleotide
gacagguagacuggauuaa

SEQ ID NO: 2020045 - RNA, 19 nt, Artificial Sequence
  Description of Artificial Sequence: Synthetic oligonucleotide
uuuugggaguagagauuuu

SEQ ID NO: 2020046 - RNA, 19 nt, Artificial Sequence
  Description of Artificial Sequence: Synthetic oligonucleotide
gaagggcggaaagcgguac

SEQ ID NO: 2020047 - RNA, 19 nt, Artificial Sequence
  Description of Artificial Sequence: Synthetic oligonucleotide
uauugccuggaaggcugcc

SEQ ID NO: 2020048 - RNA, 19 nt, Artificial Sequence
  Description of Artificial Sequence: Synthetic oligonucleotide
aagcuagugcaggcgcaug

SEQ ID NO: 2020049 - RNA, 19 nt, Artificial Sequence
  Description of Artificial Sequence: Synthetic oligonucleotide
gauugacuccacaggaagu

SEQ ID NO: 2020050 - RNA, 19 nt, Artificial Sequence
  Description of Artificial Sequence: Synthetic oligonucleotide
acguaaagaagggcggaaa

SEQ ID NO: 2020051 - RNA, 19 nt, Artificial Sequence
  Description of Artificial Sequence: Synthetic oligonucleotide
cucgaaacucaucgccauc

SEQ ID NO: 2020052 - RNA, 19 nt, Artificial Sequence
  Description of Artificial Sequence: Synthetic oligonucleotide
gacaggcuaggaugggaaa

SEQ ID NO: 2020053 - RNA, 19 nt, Artificial Sequence
  Description of Artificial Sequence: Synthetic oligonucleotide
guagggcaagaaauguauc

SEQ ID NO: 2020054 - RNA, 19 nt, Artificial Sequence
  Description of Artificial Sequence: Synthetic oligonucleotide
cuagucgaucuagucugug

SEQ ID NO: 2020055 - RNA, 19 nt, Artificial Sequence
  Description of Artificial Sequence: Synthetic oligonucleotide
gguacugccacggccacuc

SEQ ID NO: 2020056 - RNA, 19 nt, Artificial Sequence
  Description of Artificial Sequence: Synthetic oligonucleotide
cuggaaacccauugauaaa

SEQ ID NO: 2020057 - RNA, 19 nt, Artificial Sequence
  Description of Artificial Sequence: Synthetic oligonucleotide
agggcggaaagcgguacug

SEQ ID NO: 2020058 - RNA, 19 nt, Artificial Sequence
  Description of Artificial Sequence: Synthetic oligonucleotide
cuuccucccgggcaccgug

SEQ ID NO: 2020059 - RNA, 19 nt, Artificial Sequence
  Description of Artificial Sequence: Synthetic oligonucleotide
agcagcuaaaugaguggga

SEQ ID NO: 2020060 - RNA, 19 nt, Artificial Sequence
  Description of Artificial Sequence: Synthetic oligonucleotide
cuugacuccucggccauca

SEQ ID NO: 2020061 - RNA, 19 nt, Artificial Sequence
  Description of Artificial Sequence: Synthetic oligonucleotide
aucuucguauugccuggaa

SEQ ID NO: 2020062 - RNA, 19 nt, Artificial Sequence
  Description of Artificial Sequence: Synthetic oligonucleotide
gguaagaaguagagggaga

SEQ ID NO: 2020063 - RNA, 19 nt, Artificial Sequence
  Description of Artificial Sequence: Synthetic oligonucleotide
ggaaagcgguacugccacg

SEQ ID NO: 2020064 - RNA, 19 nt, Artificial Sequence
  Description of Artificial Sequence: Synthetic oligonucleotide
caggucucugcuagaagaa

SEQ ID NO: 2020065 - RNA, 19 nt, Artificial Sequence
  Description of Artificial Sequence: Synthetic oligonucleotide
caucccuaaauccaagcuu

SEQ ID NO: 2020066 - RNA, 19 nt, Artificial Sequence
  Description of Artificial Sequence: Synthetic oligonucleotide
cuccgccacaugaucagga

SEQ ID NO: 2020067 - RNA, 19 nt, Artificial Sequence
  Description of Artificial Sequence: Synthetic oligonucleotide
ggcucacgcuaucccaggg

SEQ ID NO: 2020068 - RNA, 19 nt, Artificial Sequence
  Description of Artificial Sequence: Synthetic oligonucleotide
gaucaggaagcuagacuua

SEQ ID NO: 2020069 - RNA, 19 nt, Artificial Sequence
  Description of Artificial Sequence: Synthetic oligonucleotide
gggacacuuggucugucuc

SEQ ID NO: 2020070 - RNA, 19 nt, Artificial Sequence
  Description of Artificial Sequence: Synthetic oligonucleotide
guccacguucggcuguaac

SEQ ID NO: 2020071 - RNA, 19 nt, Artificial Sequence
  Description of Artificial Sequence: Synthetic oligonucleotide
ggcuaggaugggaaaggag

SEQ ID NO: 2020072 - RNA, 19 nt, Artificial Sequence
  Description of Artificial Sequence: Synthetic oligonucleotide
caguucauauagggugaac

SEQ ID NO: 2020073 - RNA, 19 nt, Artificial Sequence
  Description of Artificial Sequence: Synthetic oligonucleotide
cagguagacuggauuaagu

SEQ ID NO: 2020074 - RNA, 19 nt, Artificial Sequence
  Description of Artificial Sequence: Synthetic oligonucleotide
acucaucgccaucguagua

SEQ ID NO: 2020075 - RNA, 19 nt, Artificial Sequence
  Description of Artificial Sequence: Synthetic oligonucleotide
cccuuugagucugauggag

SEQ ID NO: 2020076 - RNA, 19 nt, Artificial Sequence
  Description of Artificial Sequence: Synthetic oligonucleotide
ucugccgcguguccacguu

SEQ ID NO: 2020077 - RNA, 19 nt, Artificial Sequence
  Description of Artificial Sequence: Synthetic oligonucleotide
acuagucgaucuagucugu

SEQ ID NO: 2020078 - RNA, 19 nt, Artificial Sequence
  Description of Artificial Sequence: Synthetic oligonucleotide
ggguguguacuuacgugug

SEQ ID NO: 2020079 - RNA, 19 nt, Artificial Sequence
  Description of Artificial Sequence: Synthetic oligonucleotide
agguagggcaagaaaugua

SEQ ID NO: 2020080 - RNA, 19 nt, Artificial Sequence
  Description of Artificial Sequence: Synthetic oligonucleotide
cagaaccagagagcaccag

SEQ ID NO: 2020081 - RNA, 19 nt, Artificial Sequence
  Description of Artificial Sequence: Synthetic oligonucleotide
cgugucuuccccacuaguc

SEQ ID NO: 2020082 - RNA, 19 nt, Artificial Sequence
  Description of Artificial Sequence: Synthetic oligonucleotide
cuucugccgcguguccacg

SEQ ID NO: 2020083 - RNA, 19 nt, Artificial Sequence
  Description of Artificial Sequence: Synthetic oligonucleotide
gccuccgccacaugaucag

SEQ ID NO: 2020084 - RNA, 19 nt, Artificial Sequence
  Description of Artificial Sequence: Synthetic oligonucleotide
guuuccgcuguagcuugac

SEQ ID NO: 2020085 - RNA, 19 nt, Artificial Sequence
  Description of Artificial Sequence: Synthetic oligonucleotide
cgucaugcuggacuguuug

SEQ ID NO: 2020086 - RNA, 19 nt, Artificial Sequence
  Description of Artificial Sequence: Synthetic oligonucleotide
cugcuagaagaacuugacu

SEQ ID NO: 2020087 - RNA, 19 nt, Artificial Sequence
  Description of Artificial Sequence: Synthetic oligonucleotide
cuuccccacuagucaguuc

SEQ ID NO: 2020088 - RNA, 19 nt, Artificial Sequence
  Description of Artificial Sequence: Synthetic oligonucleotide
cccgcuuuucacugccagg

SEQ ID NO: 2020089 - RNA, 19 nt, Artificial Sequence
  Description of Artificial Sequence: Synthetic oligonucleotide
acguucggcuguaacguaa

SEQ ID NO: 2020090 - RNA, 19 nt, Artificial Sequence
  Description of Artificial Sequence: Synthetic oligonucleotide
ccauccccuaggaaggauc

SEQ ID NO: 2020091 - RNA, 19 nt, Artificial Sequence
  Description of Artificial Sequence: Synthetic oligonucleotide
guacugccacggccacucg

SEQ ID NO: 2020092 - RNA, 19 nt, Artificial Sequence
  Description of Artificial Sequence: Synthetic oligonucleotide
gcccgcuuuucacugccag

SEQ ID NO: 2020093 - RNA, 19 nt, Artificial Sequence
  Description of Artificial Sequence: Synthetic oligonucleotide
cagugauaaucucagccuu

SEQ ID NO: 2020094 - RNA, 19 nt, Artificial Sequence
  Description of Artificial Sequence: Synthetic oligonucleotide
accgucaugcuggacuguu

SEQ ID NO: 2020095 - RNA, 19 nt, Artificial Sequence
  Description of Artificial Sequence: Synthetic oligonucleotide
cagguuuauagacccuggu

SEQ ID NO: 2020096 - RNA, 19 nt, Artificial Sequence
  Description of Artificial Sequence: Synthetic oligonucleotide
ugagcccuuugagucugau

SEQ ID NO: 2020097 - RNA, 19 nt, Artificial Sequence
  Description of Artificial Sequence: Synthetic oligonucleotide
gcuagugcaggcgcaugug

SEQ ID NO: 2020098 - RNA, 19 nt, Artificial Sequence
  Description of Artificial Sequence: Synthetic oligonucleotide
ggagugacuagucgaucua

SEQ ID NO: 2020099 - RNA, 19 nt, Artificial Sequence
  Description of Artificial Sequence: Synthetic oligonucleotide
ccgccacaugaucaggaag

SEQ ID NO: 2020100 - RNA, 19 nt, Artificial Sequence
  Description of Artificial Sequence: Synthetic oligonucleotide
gaagcuagugcaggcgcau

SEQ ID NO: 2020101 - RNA, 19 nt, Artificial Sequence
  Description of Artificial Sequence: Synthetic oligonucleotide
ggggcuuccuaucuucgua

SEQ ID NO: 2020102 - RNA, 19 nt, Artificial Sequence
  Description of Artificial Sequence: Synthetic oligonucleotide
cugccgcguguccacguuc

SEQ ID NO: 2020103 - RNA, 19 nt, Artificial Sequence
  Description of Artificial Sequence: Synthetic oligonucleotide
cagagugggcccgcuuuuc

SEQ ID NO: 2020104 - RNA, 19 nt, Artificial Sequence
  Description of Artificial Sequence: Synthetic oligonucleotide
cccuaggaaggauccagca

SEQ ID NO: 2020105 - RNA, 19 nt, Artificial Sequence
  Description of Artificial Sequence: Synthetic oligonucleotide
acgcuaucccagggacagg

SEQ ID NO: 2020106 - RNA, 19 nt, Artificial Sequence
  Description of Artificial Sequence: Synthetic oligonucleotide
cgugggcucacgcuauccc

SEQ ID NO: 2020107 - RNA, 19 nt, Artificial Sequence
  Description of Artificial Sequence: Synthetic oligonucleotide
ggcgcauguggguguguac

SEQ ID NO: 2020108 - RNA, 19 nt, Artificial Sequence
  Description of Artificial Sequence: Synthetic oligonucleotide
ccacuagucaguucauaua

SEQ ID NO: 2020109 - RNA, 19 nt, Artificial Sequence
  Description of Artificial Sequence: Synthetic oligonucleotide
gggcggaaagcgguacugc

SEQ ID NO: 2020110 - RNA, 19 nt, Artificial Sequence
  Description of Artificial Sequence: Synthetic oligonucleotide
aguuuccgcuguagcuuga

SEQ ID NO: 2020111 - RNA, 19 nt, Artificial Sequence
  Description of Artificial Sequence: Synthetic oligonucleotide
gcggaaagcgguacugcca

SEQ ID NO: 2020112 - RNA, 19 nt, Artificial Sequence
  Description of Artificial Sequence: Synthetic oligonucleotide
ggcggcagaaggacagaac

SEQ ID NO: 2020113 - RNA, 19 nt, Artificial Sequence
  Description of Artificial Sequence: Synthetic oligonucleotide
ucaggacuuugagcccuuu

SEQ ID NO: 2020114 - RNA, 19 nt, Artificial Sequence
  Description of Artificial Sequence: Synthetic oligonucleotide
gcguguccacguucggcug

SEQ ID NO: 2020115 - RNA, 19 nt, Artificial Sequence
  Description of Artificial Sequence: Synthetic oligonucleotide
aggcgcaugugggugugua

SEQ ID NO: 2020116 - RNA, 19 nt, Artificial Sequence
  Description of Artificial Sequence: Synthetic oligonucleotide
gcccuuugagucugaugga

SEQ ID NO: 2020117 - RNA, 19 nt, Artificial Sequence
  Description of Artificial Sequence: Synthetic oligonucleotide
cacguucggcuguaacgua

SEQ ID NO: 2020118 - RNA, 19 nt, Artificial Sequence
  Description of Artificial Sequence: Synthetic oligonucleotide
ggccuccgccacaugauca

SEQ ID NO: 2020119 - RNA, 19 nt, Artificial Sequence
  Description of Artificial Sequence: Synthetic oligonucleotide
gggcuuccuaucuucguau

SEQ ID NO: 2020120 - RNA, 19 nt, Artificial Sequence
  Description of Artificial Sequence: Synthetic oligonucleotide
ccaaccacucgagguuccc

SEQ ID NO: 2020121 - RNA, 19 nt, Artificial Sequence
  Description of Artificial Sequence: Synthetic oligonucleotide
ccacucgagguucccuuuc

SEQ ID NO: 2020122 - RNA, 19 nt, Artificial Sequence
  Description of Artificial Sequence: Synthetic oligonucleotide
uguccacguucggcuguaa

SEQ ID NO: 2020123 - RNA, 19 nt, Artificial Sequence
  Description of Artificial Sequence: Synthetic oligonucleotide
ccgcuguagcuugacguug

SEQ ID NO: 2020124 - RNA, 19 nt, Artificial Sequence
  Description of Artificial Sequence: Synthetic oligonucleotide
cucccgggcaccgugggcu

SEQ ID NO: 2020125 - RNA, 19 nt, Artificial Sequence
  Description of Artificial Sequence: Synthetic oligonucleotide
cgaucuagucugugggaca

SEQ ID NO: 2020126 - RNA, 19 nt, Artificial Sequence
  Description of Artificial Sequence: Synthetic oligonucleotide
cuggccuccgccacaugau

SEQ ID NO: 2020127 - RNA, 19 nt, Artificial Sequence
  Description of Artificial Sequence: Synthetic oligonucleotide
ccuccgccacaugaucagg

SEQ ID NO: 2020128 - RNA, 19 nt, Artificial Sequence
  Description of Artificial Sequence: Synthetic oligonucleotide
gccgcguguccacguucgg

SEQ ID NO: 2020129 - RNA, 19 nt, Artificial Sequence
  Description of Artificial Sequence: Synthetic oligonucleotide
gcgcauguggguguguacu

SEQ ID NO: 2020130 - RNA, 19 nt, Artificial Sequence
  Description of Artificial Sequence: Synthetic oligonucleotide
cagaauuguucuggccgcu

SEQ ID NO: 2020131 - RNA, 19 nt, Artificial Sequence
  Description of Artificial Sequence: Synthetic oligonucleotide
ccgcguguccacguucggc

SEQ ID NO: 2020132 - RNA, 19 nt, Artificial Sequence
  Description of Artificial Sequence: Synthetic oligonucleotide
ccacguucggcuguaacgu

SEQ ID NO: 2020133 - RNA, 19 nt, Artificial Sequence
  Description of Artificial Sequence: Synthetic oligonucleotide
gccaucacugacagugaua

SEQ ID NO: 2020134 - RNA, 19 nt, Artificial Sequence
  Description of Artificial Sequence: Synthetic oligonucleotide
gcauguggguguguacuua

SEQ ID NO: 2020135 - RNA, 19 nt, Artificial Sequence
  Description of Artificial Sequence: Synthetic oligonucleotide
cugccacggccacucgaaa

SEQ ID NO: 2020136 - RNA, 19 nt, Artificial Sequence
  Description of Artificial Sequence: Synthetic oligonucleotide
caaccacucgagguucccu

SEQ ID NO: 2020137 - RNA, 19 nt, Artificial Sequence
  Description of Artificial Sequence: Synthetic oligonucleotide
caucacugacagugauaau

SEQ ID NO: 2020138 - RNA, 19 nt, Artificial Sequence
  Description of Artificial Sequence: Synthetic oligonucleotide
gcacgaaguaggguugccu

SEQ ID NO: 2020139 - RNA, 19 nt, Artificial Sequence
  Description of Artificial Sequence: Synthetic oligonucleotide
cguucggcuguaacguaaa

SEQ ID NO: 2020140 - RNA, 19 nt, Artificial Sequence
  Description of Artificial Sequence: Synthetic oligonucleotide
caccgugggcucacgcuau

SEQ ID NO: 2020141 - RNA, 19 nt, Artificial Sequence
  Description of Artificial Sequence: Synthetic oligonucleotide
cgcguguccacguucggcu

SEQ ID NO: 2020142 - RNA, 19 nt, Artificial Sequence
  Description of Artificial Sequence: Synthetic oligonucleotide
ggccgcuccuggaaaccca

SEQ ID NO: 2020143 - RNA, 19 nt, Artificial Sequence
  Description of Artificial Sequence: Synthetic oligonucleotide
cguuguugaagagcgggcu

SEQ ID NO: 2020144 - RNA, 19 nt, Artificial Sequence
  Description of Artificial Sequence: Synthetic oligonucleotide
cucggccaucacugacagu

SEQ ID NO: 2020145 - RNA, 19 nt, Artificial Sequence
  Description of Artificial Sequence: Synthetic oligonucleotide
cgcuguagcuugacguugu

SEQ ID NO: 2020146 - RNA, 19 nt, Artificial Sequence
  Description of Artificial Sequence: Synthetic oligonucleotide
cgcuaucccagggacaggu

SEQ ID NO: 2020147 - RNA, 19 nt, Artificial Sequence
  Description of Artificial Sequence: Synthetic oligonucleotide
ccgugucuuccccacuagu

SEQ ID NO: 2020148 - RNA, 19 nt, Artificial Sequence
  Description of Artificial Sequence: Synthetic oligonucleotide
ggcccgcuuuucacugcca

SEQ ID NO: 2020149 - RNA, 19 nt, Artificial Sequence
  Description of Artificial Sequence: Synthetic oligonucleotide
caccgucaugcuggacugu

SEQ ID NO: 2020150 - RNA, 19 nt, Artificial Sequence
  Description of Artificial Sequence: Synthetic oligonucleotide
cgaaguaggguugccucau

SEQ ID NO: 2020151 - RNA, 19 nt, Artificial Sequence
  Description of Artificial Sequence: Synthetic oligonucleotide
ccccacuagucaguucaua

SEQ ID NO: 2020152 - RNA, 19 nt, Artificial Sequence
  Description of Artificial Sequence: Synthetic oligonucleotide
cgcauguggguguguacuu

SEQ ID NO: 2020153 - RNA, 19 nt, Artificial Sequence
  Description of Artificial Sequence: Synthetic oligonucleotide
ccgucaugcuggacuguuu

SEQ ID NO: 2020154 - RNA, 19 nt, Artificial Sequence
  Description of Artificial Sequence: Synthetic oligonucleotide
ccgcuccuggaaacccauu

SEQ ID NO: 2020155 - RNA, 19 nt, Artificial Sequence
  Description of Artificial Sequence: Synthetic oligonucleotide
cgguacugccacggccacu

SEQ ID NO: 2020156 - RNA, 19 nt, Artificial Sequence
  Description of Artificial Sequence: Synthetic oligonucleotide
aauuaaauagucucagauc

SEQ ID NO: 2020157 - RNA, 19 nt, Artificial Sequence
  Description of Artificial Sequence: Synthetic oligonucleotide
acuauagacauuaagacac

SEQ ID NO: 2020158 - RNA, 19 nt, Artificial Sequence
  Description of Artificial Sequence: Synthetic oligonucleotide
aguacuuucauccaugaag

SEQ ID NO: 2020159 - RNA, 19 nt, Artificial Sequence
  Description of Artificial Sequence: Synthetic oligonucleotide
aaauuaaauagucucagau

SEQ ID NO: 2020160 - RNA, 19 nt, Artificial Sequence
  Description of Artificial Sequence: Synthetic oligonucleotide
acuaaagcacacuauagac

SEQ ID NO: 2020161 - RNA, 19 nt, Artificial Sequence
  Description of Artificial Sequence: Synthetic oligonucleotide
acacuauagacauuaagac

SEQ ID NO: 2020162 - RNA, 19 nt, Artificial Sequence
  Description of Artificial Sequence: Synthetic oligonucleotide
aaaacuuuagcuucauucu

SEQ ID NO: 2020163 - RNA, 19 nt, Artificial Sequence
  Description of Artificial Sequence: Synthetic oligonucleotide
uaauuuagauuguaguagg

SEQ ID NO: 2020164 - RNA, 19 nt, Artificial Sequence
  Description of Artificial Sequence: Synthetic oligonucleotide
uuaagguuggaucuaaaug

SEQ ID NO: 2020165 - RNA, 19 nt, Artificial Sequence
  Description of Artificial Sequence: Synthetic oligonucleotide
uaagguuggaucuaaaugu

SEQ ID NO: 2020166 - RNA, 19 nt, Artificial Sequence
  Description of Artificial Sequence: Synthetic oligonucleotide
uuuagauuguaguagguca

SEQ ID NO: 2020167 - RNA, 19 nt, Artificial Sequence
  Description of Artificial Sequence: Synthetic oligonucleotide
agagagaagauacuuucgc

SEQ ID NO: 2020168 - RNA, 19 nt, Artificial Sequence
  Description of Artificial Sequence: Synthetic oligonucleotide
auaccuaucaugcaacaac

SEQ ID NO: 2020169 - RNA, 19 nt, Artificial Sequence
  Description of Artificial Sequence: Synthetic oligonucleotide
caacaaaacacuuuuguag

SEQ ID NO: 2020170 - RNA, 19 nt, Artificial Sequence
  Description of Artificial Sequence: Synthetic oligonucleotide
aaacauuuuguuaagguug

SEQ ID NO: 2020171 - RNA, 19 nt, Artificial Sequence
  Description of Artificial Sequence: Synthetic oligonucleotide
uagacauuaagacacuuca

SEQ ID NO: 2020172 - RNA, 19 nt, Artificial Sequence
  Description of Artificial Sequence: Synthetic oligonucleotide
ugcucuuuaagaaagguuc

SEQ ID NO: 2020173 - RNA, 19 nt, Artificial Sequence
  Description of Artificial Sequence: Synthetic oligonucleotide
aaacuuuagcuucauucuc

SEQ ID NO: 2020174 - RNA, 19 nt, Artificial Sequence
  Description of Artificial Sequence: Synthetic oligonucleotide
agugauuucaguuucaguu

SEQ ID NO: 2020175 - RNA, 19 nt, Artificial Sequence
  Description of Artificial Sequence: Synthetic oligonucleotide
cuaucaugcaacaacauuc

SEQ ID NO: 2020176 - RNA, 19 nt, Artificial Sequence
  Description of Artificial Sequence: Synthetic oligonucleotide
aaaaugggcauuuugugaa

SEQ ID NO: 2020177 - RNA, 19 nt, Artificial Sequence
  Description of Artificial Sequence: Synthetic oligonucleotide
uuuuguuaagguuggaucu

SEQ ID NO: 2020178 - RNA, 19 nt, Artificial Sequence
  Description of Artificial Sequence: Synthetic oligonucleotide
guuccaauucuucagagag

SEQ ID NO: 2020179 - RNA, 19 nt, Artificial Sequence
  Description of Artificial Sequence: Synthetic oligonucleotide
agagaagauacuuucgcuc

SEQ ID NO: 2020180 - RNA, 19 nt, Artificial Sequence
  Description of Artificial Sequence: Synthetic oligonucleotide
uguaggauccacuuuaacu

SEQ ID NO: 2020181 - RNA, 19 nt, Artificial Sequence
  Description of Artificial Sequence: Synthetic oligonucleotide
aacuaaagcacacuauaga

SEQ ID NO: 2020182 - RNA, 19 nt, Artificial Sequence
  Description of Artificial Sequence: Synthetic oligonucleotide
uuaagaaagguucaaguuu

SEQ ID NO: 2020183 - RNA, 19 nt, Artificial Sequence
  Description of Artificial Sequence: Synthetic oligonucleotide
agauccuugcagcucaucc

SEQ ID NO: 2020184 - RNA, 19 nt, Artificial Sequence
  Description of Artificial Sequence: Synthetic oligonucleotide
ucucugaugacaagaaccc

SEQ ID NO: 2020185 - RNA, 19 nt, Artificial Sequence
  Description of Artificial Sequence: Synthetic oligonucleotide
uuuagugccacacuugaaa

SEQ ID NO: 2020186 - RNA, 19 nt, Artificial Sequence
  Description of Artificial Sequence: Synthetic oligonucleotide
uccacuuuaacuucaguga

SEQ ID NO: 2020187 - RNA, 19 nt, Artificial Sequence
  Description of Artificial Sequence: Synthetic oligonucleotide
ugauccaauauaccuauca

SEQ ID NO: 2020188 - RNA, 19 nt, Artificial Sequence
  Description of Artificial Sequence: Synthetic oligonucleotide
aauagucucagaucuuucu

SEQ ID NO: 2020189 - RNA, 19 nt, Artificial Sequence
  Description of Artificial Sequence: Synthetic oligonucleotide
guacugaguacuuucaucc

SEQ ID NO: 2020190 - RNA, 19 nt, Artificial Sequence
  Description of Artificial Sequence: Synthetic oligonucleotide
aagucugacguucuaaaga

SEQ ID NO: 2020191 - RNA, 19 nt, Artificial Sequence
  Description of Artificial Sequence: Synthetic oligonucleotide
uuaaggacuuccuucuggg

SEQ ID NO: 2020192 - RNA, 19 nt, Artificial Sequence
  Description of Artificial Sequence: Synthetic oligonucleotide
uuucucaacagagaacugg

SEQ ID NO: 2020193 - RNA, 19 nt, Artificial Sequence
  Description of Artificial Sequence: Synthetic oligonucleotide
uaguagaugacuucugcag

SEQ ID NO: 2020194 - RNA, 19 nt, Artificial Sequence
  Description of Artificial Sequence: Synthetic oligonucleotide
uucuuaggggagcaaaggg

SEQ ID NO: 2020195 - RNA, 19 nt, Artificial Sequence
  Description of Artificial Sequence: Synthetic oligonucleotide
ugacaagaacccaacuugg

SEQ ID NO: 2020196 - RNA, 19 nt, Artificial Sequence
  Description of Artificial Sequence: Synthetic oligonucleotide
ucaugcaacaacauucuac

SEQ ID NO: 2020197 - RNA, 19 nt, Artificial Sequence
  Description of Artificial Sequence: Synthetic oligonucleotide
aauauggggacugaagaug

SEQ ID NO: 2020198 - RNA, 19 nt, Artificial Sequence
  Description of Artificial Sequence: Synthetic oligonucleotide
ucuucaacaaaacacuuuu

SEQ ID NO: 2020199 - RNA, 19 nt, Artificial Sequence
  Description of Artificial Sequence: Synthetic oligonucleotide
acuccaugcaggcaaagac

SEQ ID NO: 2020200 - RNA, 19 nt, Artificial Sequence
  Description of Artificial Sequence: Synthetic oligonucleotide
agucucagaucuuucuugc

SEQ ID NO: 2020201 - RNA, 19 nt, Artificial Sequence
  Description of Artificial Sequence: Synthetic oligonucleotide
uguaguagaugacuucugc

SEQ ID NO: 2020202 - RNA, 19 nt, Artificial Sequence
  Description of Artificial Sequence: Synthetic oligonucleotide
aacauuuuguuaagguugg

SEQ ID NO: 2020203 - RNA, 19 nt, Artificial Sequence
  Description of Artificial Sequence: Synthetic oligonucleotide
aaaacacuuuuguagaguu

SEQ ID NO: 2020204 - RNA, 19 nt, Artificial Sequence
  Description of Artificial Sequence: Synthetic oligonucleotide
gacauuaagacacuucaga

SEQ ID NO: 2020205 - RNA, 19 nt, Artificial Sequence
  Description of Artificial Sequence: Synthetic oligonucleotide
uuuaagaaagguucaaguu

SEQ ID NO: 2020206 - RNA, 19 nt, Artificial Sequence
  Description of Artificial Sequence: Synthetic oligonucleotide
ugugaagugauccaauaua

SEQ ID NO: 2020207 - RNA, 19 nt, Artificial Sequence
  Description of Artificial Sequence: Synthetic oligonucleotide
aacaacauucuacacucga

SEQ ID NO: 2020208 - RNA, 19 nt, Artificial Sequence
  Description of Artificial Sequence: Synthetic oligonucleotide
cuacacucgaccuuuagug

SEQ ID NO: 2020209 - RNA, 19 nt, Artificial Sequence
  Description of Artificial Sequence: Synthetic oligonucleotide
uguguuaaggacuuccuuc

SEQ ID NO: 2020210 - RNA, 19 nt, Artificial Sequence
  Description of Artificial Sequence: Synthetic oligonucleotide
cacacuauagacauuaaga

SEQ ID NO: 2020211 - RNA, 19 nt, Artificial Sequence
  Description of Artificial Sequence: Synthetic oligonucleotide
uugguucugauuccguacg

SEQ ID NO: 2020212 - RNA, 19 nt, Artificial Sequence
  Description of Artificial Sequence: Synthetic oligonucleotide
acacucgaccuuuagugcc

SEQ ID NO: 2020213 - RNA, 19 nt, Artificial Sequence
  Description of Artificial Sequence: Synthetic oligonucleotide
acuuuuguagaguuccauc

SEQ ID NO: 2020214 - RNA, 19 nt, Artificial Sequence
  Description of Artificial Sequence: Synthetic oligonucleotide
auuccguacgauuuccugg

SEQ ID NO: 2020215 - RNA, 19 nt, Artificial Sequence
  Description of Artificial Sequence: Synthetic oligonucleotide
aaggggaacuuccagagaa

SEQ ID NO: 2020216 - RNA, 19 nt, Artificial Sequence
  Description of Artificial Sequence: Synthetic oligonucleotide
aaacuaaagcacacuauag

SEQ ID NO: 2020217 - RNA, 19 nt, Artificial Sequence
  Description of Artificial Sequence: Synthetic oligonucleotide
uguuguaagagcugauccc

SEQ ID NO: 2020218 - RNA, 19 nt, Artificial Sequence
  Description of Artificial Sequence: Synthetic oligonucleotide
uuugaaucuucaacaaaac

SEQ ID NO: 2020219 - RNA, 19 nt, Artificial Sequence
  Description of Artificial Sequence: Synthetic oligonucleotide
ucuugagcuguacugacac

SEQ ID NO: 2020220 - RNA, 19 nt, Artificial Sequence
  Description of Artificial Sequence: Synthetic oligonucleotide
cuucucuguaaaauguucc

SEQ ID NO: 2020221 - RNA, 19 nt, Artificial Sequence
  Description of Artificial Sequence: Synthetic oligonucleotide
aaauauggggacugaagau

SEQ ID NO: 2020222 - RNA, 19 nt, Artificial Sequence
  Description of Artificial Sequence: Synthetic oligonucleotide
auuuagauuguaguagguc

SEQ ID NO: 2020223 - RNA, 19 nt, Artificial Sequence
  Description of Artificial Sequence: Synthetic oligonucleotide
gaaaaugggcauuuuguga

SEQ ID NO: 2020224 - RNA, 19 nt, Artificial Sequence
  Description of Artificial Sequence: Synthetic oligonucleotide
gacacuucagaaaaugggc

SEQ ID NO: 2020225 - RNA, 19 nt, Artificial Sequence
  Description of Artificial Sequence: Synthetic oligonucleotide
ugauuucaguuucaguuga

SEQ ID NO: 2020226 - RNA, 19 nt, Artificial Sequence
  Description of Artificial Sequence: Synthetic oligonucleotide
ugaagugauccaauauacc

SEQ ID NO: 2020227 - RNA, 19 nt, Artificial Sequence
  Description of Artificial Sequence: Synthetic oligonucleotide
uaucaugcaacaacauucu

SEQ ID NO: 2020228 - RNA, 19 nt, Artificial Sequence
  Description of Artificial Sequence: Synthetic oligonucleotide
gauuguaguaggucaauuc

SEQ ID NO: 2020229 - RNA, 19 nt, Artificial Sequence
  Description of Artificial Sequence: Synthetic oligonucleotide
auccaauauaccuaucaug

SEQ ID NO: 2020230 - RNA, 19 nt, Artificial Sequence
  Description of Artificial Sequence: Synthetic oligonucleotide
uggaucuaaaugucuuugg

SEQ ID NO: 2020231 - RNA, 19 nt, Artificial Sequence
  Description of Artificial Sequence: Synthetic oligonucleotide
aaagaaaacuuugcuauau

SEQ ID NO: 2020232 - RNA, 19 nt, Artificial Sequence
  Description of Artificial Sequence: Synthetic oligonucleotide
agaaaacuuugcuauauau

SEQ ID NO: 2020233 - RNA, 19 nt, Artificial Sequence
  Description of Artificial Sequence: Synthetic oligonucleotide
acgauuuccugguagucgg

SEQ ID NO: 2020234 - RNA, 19 nt, Artificial Sequence
  Description of Artificial Sequence: Synthetic oligonucleotide
uuuguagaguuccaucacu

SEQ ID NO: 2020235 - RNA, 19 nt, Artificial Sequence
  Description of Artificial Sequence: Synthetic oligonucleotide
caacauucuacacucgacc

SEQ ID NO: 2020236 - RNA, 19 nt, Artificial Sequence
  Description of Artificial Sequence: Synthetic oligonucleotide
gaagugauccaauauaccu

SEQ ID NO: 2020237 - RNA, 19 nt, Artificial Sequence
  Description of Artificial Sequence: Synthetic oligonucleotide
aaagcccuggggucaauuc

SEQ ID NO: 2020238 - RNA, 19 nt, Artificial Sequence
  Description of Artificial Sequence: Synthetic oligonucleotide
ucugggaagacccaagaua

SEQ ID NO: 2020239 - RNA, 19 nt, Artificial Sequence
  Description of Artificial Sequence: Synthetic oligonucleotide
acuaacuccaugcaggcaa

SEQ ID NO: 2020240 - RNA, 19 nt, Artificial Sequence
  Description of Artificial Sequence: Synthetic oligonucleotide
gaagacccaagauaagaug

SEQ ID NO: 2020241 - RNA, 19 nt, Artificial Sequence
  Description of Artificial Sequence: Synthetic oligonucleotide
uaccuaucaugcaacaaca

SEQ ID NO: 2020242 - RNA, 19 nt, Artificial Sequence
  Description of Artificial Sequence: Synthetic oligonucleotide
uguacugacaccugcugga

SEQ ID NO: 2020243 - RNA, 19 nt, Artificial Sequence
  Description of Artificial Sequence: Synthetic oligonucleotide
uucucaacagagaacugga

SEQ ID NO: 2020244 - RNA, 19 nt, Artificial Sequence
  Description of Artificial Sequence: Synthetic oligonucleotide
cucaacagagaacuggaag

SEQ ID NO: 2020245 - RNA, 19 nt, Artificial Sequence
  Description of Artificial Sequence: Synthetic oligonucleotide
caaaggggaacuuccagag

SEQ ID NO: 2020246 - RNA, 19 nt, Artificial Sequence
  Description of Artificial Sequence: Synthetic oligonucleotide
cacacuugaaaacuuuagc

SEQ ID NO: 2020247 - RNA, 19 nt, Artificial Sequence
  Description of Artificial Sequence: Synthetic oligonucleotide
uccuuagugcucuuuaaga

SEQ ID NO: 2020248 - RNA, 19 nt, Artificial Sequence
  Description of Artificial Sequence: Synthetic oligonucleotide
caugcaacaacauucuaca

SEQ ID NO: 2020249 - RNA, 19 nt, Artificial Sequence
  Description of Artificial Sequence: Synthetic oligonucleotide
aauucuuaggggagcaaag

SEQ ID NO: 2020250 - RNA, 19 nt, Artificial Sequence
  Description of Artificial Sequence: Synthetic oligonucleotide
uuucugcuaacuucaaacu

SEQ ID NO: 2020251 - RNA, 19 nt, Artificial Sequence
  Description of Artificial Sequence: Synthetic oligonucleotide
ucagugagaauguuugccu

SEQ ID NO: 2020252 - RNA, 19 nt, Artificial Sequence
  Description of Artificial Sequence: Synthetic oligonucleotide
ucaguugauccccugggca

SEQ ID NO: 2020253 - RNA, 19 nt, Artificial Sequence
  Description of Artificial Sequence: Synthetic oligonucleotide
ugguacuguuguaagagcu

SEQ ID NO: 2020254 - RNA, 19 nt, Artificial Sequence
  Description of Artificial Sequence: Synthetic oligonucleotide
uuagauuguaguaggucaa

SEQ ID NO: 2020255 - RNA, 19 nt, Artificial Sequence
  Description of Artificial Sequence: Synthetic oligonucleotide
ugagcaguuuucgagcagg

SEQ ID NO: 2020256 - RNA, 19 nt, Artificial Sequence
  Description of Artificial Sequence: Synthetic oligonucleotide
uguguaguagaugacuucu

SEQ ID NO: 2020257 - RNA, 19 nt, Artificial Sequence
  Description of Artificial Sequence: Synthetic oligonucleotide
uaucuaauuguuccaugcu

SEQ ID NO: 2020258 - RNA, 19 nt, Artificial Sequence
  Description of Artificial Sequence: Synthetic oligonucleotide
ucuugcaauaauuuagauu

SEQ ID NO: 2020259 - RNA, 19 nt, Artificial Sequence
  Description of Artificial Sequence: Synthetic oligonucleotide
uacgauuuccugguagucg

SEQ ID NO: 2020260 - RNA, 19 nt, Artificial Sequence
  Description of Artificial Sequence: Synthetic oligonucleotide
cuucacagauccuugcagc

SEQ ID NO: 2020261 - RNA, 19 nt, Artificial Sequence
  Description of Artificial Sequence: Synthetic oligonucleotide
ugacguucuaaagaaaacu

SEQ ID NO: 2020262 - RNA, 19 nt, Artificial Sequence
  Description of Artificial Sequence: Synthetic oligonucleotide
aggugaaguaucuaauugu

SEQ ID NO: 2020263 - RNA, 19 nt, Artificial Sequence
  Description of Artificial Sequence: Synthetic oligonucleotide
cuuuguguuaaggacuucc

SEQ ID NO: 2020264 - RNA, 19 nt, Artificial Sequence
  Description of Artificial Sequence: Synthetic oligonucleotide
uguaguaggucaauucaau

SEQ ID NO: 2020265 - RNA, 19 nt, Artificial Sequence
  Description of Artificial Sequence: Synthetic oligonucleotide
gagaauguuugccuaguac

SEQ ID NO: 2020266 - RNA, 19 nt, Artificial Sequence
  Description of Artificial Sequence: Synthetic oligonucleotide
ugugaugccugggugaaag

SEQ ID NO: 2020267 - RNA, 19 nt, Artificial Sequence
  Description of Artificial Sequence: Synthetic oligonucleotide
agauguaggauccacuuua

SEQ ID NO: 2020268 - RNA, 19 nt, Artificial Sequence
  Description of Artificial Sequence: Synthetic oligonucleotide
agugauccaauauaccuau

SEQ ID NO: 2020269 - RNA, 19 nt, Artificial Sequence
  Description of Artificial Sequence: Synthetic oligonucleotide
uuuguguuaaggacuuccu

SEQ ID NO: 2020270 - RNA, 19 nt, Artificial Sequence
  Description of Artificial Sequence: Synthetic oligonucleotide
agugagaauguuugccuag

SEQ ID NO: 2020271 - RNA, 19 nt, Artificial Sequence
  Description of Artificial Sequence: Synthetic oligonucleotide
ucuacacucgaccuuuagu

SEQ ID NO: 2020272 - RNA, 19 nt, Artificial Sequence
  Description of Artificial Sequence: Synthetic oligonucleotide
uagucucagaucuuucuug

SEQ ID NO: 2020273 - RNA, 19 nt, Artificial Sequence
  Description of Artificial Sequence: Synthetic oligonucleotide
uggggacugaagaugaaac

SEQ ID NO: 2020274 - RNA, 19 nt, Artificial Sequence
  Description of Artificial Sequence: Synthetic oligonucleotide
aagguuggaucuaaauguc

SEQ ID NO: 2020275 - RNA, 19 nt, Artificial Sequence
  Description of Artificial Sequence: Synthetic oligonucleotide
uaagauguaggauccacuu

SEQ ID NO: 2020276 - RNA, 19 nt, Artificial Sequence
  Description of Artificial Sequence: Synthetic oligonucleotide
gugauuucaguuucaguug

SEQ ID NO: 2020277 - RNA, 19 nt, Artificial Sequence
  Description of Artificial Sequence: Synthetic oligonucleotide
uguaagagcugaucccaag

SEQ ID NO: 2020278 - RNA, 19 nt, Artificial Sequence
  Description of Artificial Sequence: Synthetic oligonucleotide
aguaucuaauuguuccaug

SEQ ID NO: 2020279 - RNA, 19 nt, Artificial Sequence
  Description of Artificial Sequence: Synthetic oligonucleotide
ucuguaaaauguuccaauu

SEQ ID NO: 2020280 - RNA, 19 nt, Artificial Sequence
  Description of Artificial Sequence: Synthetic oligonucleotide
aguaggucaauucaaucuu

SEQ ID NO: 2020281 - RNA, 19 nt, Artificial Sequence
  Description of Artificial Sequence: Synthetic oligonucleotide
uaagagcugaucccaaguc

SEQ ID NO: 2020282 - RNA, 19 nt, Artificial Sequence
  Description of Artificial Sequence: Synthetic oligonucleotide
gauaagauguaggauccac

SEQ ID NO: 2020283 - RNA, 19 nt, Artificial Sequence
  Description of Artificial Sequence: Synthetic oligonucleotide
uuguaguaggucaauucaa

SEQ ID NO: 2020284 - RNA, 19 nt, Artificial Sequence
  Description of Artificial Sequence: Synthetic oligonucleotide
uuggaucuaaaugucuuug

SEQ ID NO: 2020285 - RNA, 19 nt, Artificial Sequence
  Description of Artificial Sequence: Synthetic oligonucleotide
uugagcuguacugacaccu

SEQ ID NO: 2020286 - RNA, 19 nt, Artificial Sequence
  Description of Artificial Sequence: Synthetic oligonucleotide
uucugauuccguacgauuu

SEQ ID NO: 2020287 - RNA, 19 nt, Artificial Sequence
  Description of Artificial Sequence: Synthetic oligonucleotide
caggugaaguaucuaauug

SEQ ID NO: 2020288 - RNA, 19 nt, Artificial Sequence
  Description of Artificial Sequence: Synthetic oligonucleotide
gauuccguacgauuuccug

SEQ ID NO: 2020289 - RNA, 19 nt, Artificial Sequence
  Description of Artificial Sequence: Synthetic oligonucleotide
auucuuaggggagcaaagg

SEQ ID NO: 2020290 - RNA, 19 nt, Artificial Sequence
  Description of Artificial Sequence: Synthetic oligonucleotide
uacacucgaccuuuagugc

SEQ ID NO: 2020291 - RNA, 19 nt, Artificial Sequence
  Description of Artificial Sequence: Synthetic oligonucleotide
uuagugccacacuugaaaa

SEQ ID NO: 2020292 - RNA, 19 nt, Artificial Sequence
  Description of Artificial Sequence: Synthetic oligonucleotide
aagcacacuauagacauua

SEQ ID NO: 2020293 - RNA, 19 nt, Artificial Sequence
  Description of Artificial Sequence: Synthetic oligonucleotide
cuugguucugauuccguac

SEQ ID NO: 2020294 - RNA, 19 nt, Artificial Sequence
  Description of Artificial Sequence: Synthetic oligonucleotide
uucaccucagccacugaug

SEQ ID NO: 2020295 - RNA, 19 nt, Artificial Sequence
  Description of Artificial Sequence: Synthetic oligonucleotide
ucacuaacuccaugcaggc

SEQ ID NO: 2020296 - RNA, 19 nt, Artificial Sequence
  Description of Artificial Sequence: Synthetic oligonucleotide
cuaacuucaaacugaugga

SEQ ID NO: 2020297 - RNA, 19 nt, Artificial Sequence
  Description of Artificial Sequence: Synthetic oligonucleotide
caauaauuuagauuguagu

SEQ ID NO: 2020298 - RNA, 19 nt, Artificial Sequence
  Description of Artificial Sequence: Synthetic oligonucleotide
uagugcucuuuaagaaagg

SEQ ID NO: 2020299 - RNA, 19 nt, Artificial Sequence
  Description of Artificial Sequence: Synthetic oligonucleotide
acaacauucuacacucgac

SEQ ID NO: 2020300 - RNA, 19 nt, Artificial Sequence
  Description of Artificial Sequence: Synthetic oligonucleotide
ugaguacuuucauccauga

SEQ ID NO: 2020301 - RNA, 19 nt, Artificial Sequence
  Description of Artificial Sequence: Synthetic oligonucleotide
cacuauagacauuaagaca

SEQ ID NO: 2020302 - RNA, 19 nt, Artificial Sequence
  Description of Artificial Sequence: Synthetic oligonucleotide
uucaguugauccccugggc

SEQ ID NO: 2020303 - RNA, 19 nt, Artificial Sequence
  Description of Artificial Sequence: Synthetic oligonucleotide
aauuuagauuguaguaggu

SEQ ID NO: 2020304 - RNA, 19 nt, Artificial Sequence
  Description of Artificial Sequence: Synthetic oligonucleotide
uugugaagugauccaauau

SEQ ID NO: 2020305 - RNA, 19 nt, Artificial Sequence
  Description of Artificial Sequence: Synthetic oligonucleotide
agugccacacuugaaaacu

SEQ ID NO: 2020306 - RNA, 19 nt, Artificial Sequence
  Description of Artificial Sequence: Synthetic oligonucleotide
agauacuuucgcucugaag

SEQ ID NO: 2020307 - RNA, 19 nt, Artificial Sequence
  Description of Artificial Sequence: Synthetic oligonucleotide
aagaaaacuuugcuauaua

SEQ ID NO: 2020308 - RNA, 19 nt, Artificial Sequence
  Description of Artificial Sequence: Synthetic oligonucleotide
ucugauuccguacgauuuc

SEQ ID NO: 2020309 - RNA, 19 nt, Artificial Sequence
  Description of Artificial Sequence: Synthetic oligonucleotide
gugaagugauccaauauac

SEQ ID NO: 2020310 - RNA, 19 nt, Artificial Sequence
  Description of Artificial Sequence: Synthetic oligonucleotide
aaacacuuuuguagaguuc

SEQ ID NO: 2020311 - RNA, 19 nt, Artificial Sequence
  Description of Artificial Sequence: Synthetic oligonucleotide
agcaaaggggaacuuccag

SEQ ID NO: 2020312 - RNA, 19 nt, Artificial Sequence
  Description of Artificial Sequence: Synthetic oligonucleotide
auacuuucgcucugaagca

SEQ ID NO: 2020313 - RNA, 19 nt, Artificial Sequence
  Description of Artificial Sequence: Synthetic oligonucleotide
caauauaccuaucaugcaa

SEQ ID NO: 2020314 - RNA, 19 nt, Artificial Sequence
  Description of Artificial Sequence: Synthetic oligonucleotide
agaucuuucuugcaauaau

SEQ ID NO: 2020315 - RNA, 19 nt, Artificial Sequence
  Description of Artificial Sequence: Synthetic oligonucleotide
uuccaugcuucucuucuug

SEQ ID NO: 2020316 - RNA, 19 nt, Artificial Sequence
  Description of Artificial Sequence: Synthetic oligonucleotide
cuuuaagaaagguucaagu

SEQ ID NO: 2020317 - RNA, 19 nt, Artificial Sequence
  Description of Artificial Sequence: Synthetic oligonucleotide
ugggcaucucuucgggugg

SEQ ID NO: 2020318 - RNA, 19 nt, Artificial Sequence
  Description of Artificial Sequence: Synthetic oligonucleotide
caaguuucucaacagagaa

SEQ ID NO: 2020319 - RNA, 19 nt, Artificial Sequence
  Description of Artificial Sequence: Synthetic oligonucleotide
caucacuaacuccaugcag

SEQ ID NO: 2020320 - RNA, 19 nt, Artificial Sequence
  Description of Artificial Sequence: Synthetic oligonucleotide
uccaugcaggcaaagacuu

SEQ ID NO: 2020321 - RNA, 19 nt, Artificial Sequence
  Description of Artificial Sequence: Synthetic oligonucleotide
auguaggauccacuuuaac

SEQ ID NO: 2020322 - RNA, 19 nt, Artificial Sequence
  Description of Artificial Sequence: Synthetic oligonucleotide
cugcugagagcugugaugc

SEQ ID NO: 2020323 - RNA, 19 nt, Artificial Sequence
  Description of Artificial Sequence: Synthetic oligonucleotide
cugaguacuuucauccaug

SEQ ID NO: 2020324 - RNA, 19 nt, Artificial Sequence
  Description of Artificial Sequence: Synthetic oligonucleotide
uuccguacgauuuccuggu

SEQ ID NO: 2020325 - RNA, 19 nt, Artificial Sequence
  Description of Artificial Sequence: Synthetic oligonucleotide
ucgcucugaagcauucaag

SEQ ID NO: 2020326 - RNA, 19 nt, Artificial Sequence
  Description of Artificial Sequence: Synthetic oligonucleotide
gucugagcaguuuucgagc

SEQ ID NO: 2020327 - RNA, 19 nt, Artificial Sequence
  Description of Artificial Sequence: Synthetic oligonucleotide
cugacguucuaaagaaaac

SEQ ID NO: 2020328 - RNA, 19 nt, Artificial Sequence
  Description of Artificial Sequence: Synthetic oligonucleotide
ucgggcuuuguguuaagga

SEQ ID NO: 2020329 - RNA, 19 nt, Artificial Sequence
  Description of Artificial Sequence: Synthetic oligonucleotide
auauaccuaucaugcaaca

SEQ ID NO: 2020330 - RNA, 19 nt, Artificial Sequence
  Description of Artificial Sequence: Synthetic oligonucleotide
ugguagucgggcuuugugu

SEQ ID NO: 2020331 - RNA, 19 nt, Artificial Sequence
  Description of Artificial Sequence: Synthetic oligonucleotide
auccugaucacuguguagu

SEQ ID NO: 2020332 - RNA, 19 nt, Artificial Sequence
  Description of Artificial Sequence: Synthetic oligonucleotide
uuguagaguuccaucacuu

SEQ ID NO: 2020333 - RNA, 19 nt, Artificial Sequence
  Description of Artificial Sequence: Synthetic oligonucleotide
uucuacacucgaccuuuag

SEQ ID NO: 2020334 - RNA, 19 nt, Artificial Sequence
  Description of Artificial Sequence: Synthetic oligonucleotide
uguuaaggacuuccuucug

SEQ ID NO: 2020335 - RNA, 19 nt, Artificial Sequence
  Description of Artificial Sequence: Synthetic oligonucleotide
uucgcucugaagcauucaa

SEQ ID NO: 2020336 - RNA, 19 nt, Artificial Sequence
  Description of Artificial Sequence: Synthetic oligonucleotide
uuccaauucuucagagaga

SEQ ID NO: 2020337 - RNA, 19 nt, Artificial Sequence
  Description of Artificial Sequence: Synthetic oligonucleotide
guccuuagugcucuuuaag

SEQ ID NO: 2020338 - RNA, 19 nt, Artificial Sequence
  Description of Artificial Sequence: Synthetic oligonucleotide
aagauguaggauccacuuu

SEQ ID NO: 2020339 - RNA, 19 nt, Artificial Sequence
  Description of Artificial Sequence: Synthetic oligonucleotide
guaguagaugacuucugca

SEQ ID NO: 2020340 - RNA, 19 nt, Artificial Sequence
  Description of Artificial Sequence: Synthetic oligonucleotide
gacccaagauaagauguag

SEQ ID NO: 2020341 - RNA, 19 nt, Artificial Sequence
  Description of Artificial Sequence: Synthetic oligonucleotide
gagaagauacuuucgcucu

SEQ ID NO: 2020342 - RNA, 19 nt, Artificial Sequence
  Description of Artificial Sequence: Synthetic oligonucleotide
aaguccuuagugcucuuua

SEQ ID NO: 2020343 - RNA, 19 nt, Artificial Sequence
  Description of Artificial Sequence: Synthetic oligonucleotide
guaguaggucaauucaauc

SEQ ID NO: 2020344 - RNA, 19 nt, Artificial Sequence
  Description of Artificial Sequence: Synthetic oligonucleotide
aaaggggaacuuccagaga

SEQ ID NO: 2020345 - RNA, 19 nt, Artificial Sequence
  Description of Artificial Sequence: Synthetic oligonucleotide
acugaguacuuucauccau

SEQ ID NO: 2020346 - RNA, 19 nt, Artificial Sequence
  Description of Artificial Sequence: Synthetic oligonucleotide
gcauuuugugaagugaucc

SEQ ID NO: 2020347 - RNA, 19 nt, Artificial Sequence
  Description of Artificial Sequence: Synthetic oligonucleotide
gcaauaauuuagauuguag

SEQ ID NO: 2020348 - RNA, 19 nt, Artificial Sequence
  Description of Artificial Sequence: Synthetic oligonucleotide
guaggauccacuuuaacuu

SEQ ID NO: 2020349 - RNA, 19 nt, Artificial Sequence
  Description of Artificial Sequence: Synthetic oligonucleotide
agagcgccaagccguuugc

SEQ ID NO: 2020350 - RNA, 19 nt, Artificial Sequence
  Description of Artificial Sequence: Synthetic oligonucleotide
uucugguacuguuguaaga

SEQ ID NO: 2020351 - RNA, 19 nt, Artificial Sequence
  Description of Artificial Sequence: Synthetic oligonucleotide
cuuagugcucuuuaagaaa

SEQ ID NO: 2020352 - RNA, 19 nt, Artificial Sequence
  Description of Artificial Sequence: Synthetic oligonucleotide
cuucuugagcuguacugac

SEQ ID NO: 2020353 - RNA, 19 nt, Artificial Sequence
  Description of Artificial Sequence: Synthetic oligonucleotide
ugcaauaauuuagauugua

SEQ ID NO: 2020354 - RNA, 19 nt, Artificial Sequence
  Description of Artificial Sequence: Synthetic oligonucleotide
aagugauccaauauaccua

SEQ ID NO: 2020355 - RNA, 19 nt, Artificial Sequence
  Description of Artificial Sequence: Synthetic oligonucleotide
gcaguuuucgagcagguga

SEQ ID NO: 2020356 - RNA, 19 nt, Artificial Sequence
  Description of Artificial Sequence: Synthetic oligonucleotide
cugaucacuguguaguaga

SEQ ID NO: 2020357 - RNA, 19 nt, Artificial Sequence
  Description of Artificial Sequence: Synthetic oligonucleotide
uucggguggaaccuccuuc

SEQ ID NO: 2020358 - RNA, 19 nt, Artificial Sequence
  Description of Artificial Sequence: Synthetic oligonucleotide
gaaggcuugcagcugcuuc

SEQ ID NO: 2020359 - RNA, 19 nt, Artificial Sequence
  Description of Artificial Sequence: Synthetic oligonucleotide
acaagauccugaucacugu

SEQ ID NO: 2020360 - RNA, 19 nt, Artificial Sequence
  Description of Artificial Sequence: Synthetic oligonucleotide
caagauccugaucacugug

SEQ ID NO: 2020361 - RNA, 19 nt, Artificial Sequence
  Description of Artificial Sequence: Synthetic oligonucleotide
auagucucagaucuuucuu

SEQ ID NO: 2020362 - RNA, 19 nt, Artificial Sequence
  Description of Artificial Sequence: Synthetic oligonucleotide
aagauccugaucacugugu

SEQ ID NO: 2020363 - RNA, 19 nt, Artificial Sequence
  Description of Artificial Sequence: Synthetic oligonucleotide
ucgagcaggugaaguaucu

SEQ ID NO: 2020364 - RNA, 19 nt, Artificial Sequence
  Description of Artificial Sequence: Synthetic oligonucleotide
cguucuaaagaaaacuuug

SEQ ID NO: 2020365 - RNA, 19 nt, Artificial Sequence
  Description of Artificial Sequence: Synthetic oligonucleotide
guaccugcaaagcccuggg

SEQ ID NO: 2020366 - RNA, 19 nt, Artificial Sequence
  Description of Artificial Sequence: Synthetic oligonucleotide
uucuugcaauaauuuagau

SEQ ID NO: 2020367 - RNA, 19 nt, Artificial Sequence
  Description of Artificial Sequence: Synthetic oligonucleotide
ucgaccuuuagugccacac

SEQ ID NO: 2020368 - RNA, 19 nt, Artificial Sequence
  Description of Artificial Sequence: Synthetic oligonucleotide
gaucccaagucugacguuc

SEQ ID NO: 2020369 - RNA, 19 nt, Artificial Sequence
  Description of Artificial Sequence: Synthetic oligonucleotide
uagugccacacuugaaaac

SEQ ID NO: 2020370 - RNA, 19 nt, Artificial Sequence
  Description of Artificial Sequence: Synthetic oligonucleotide
agugcucuuuaagaaaggu

SEQ ID NO: 2020371 - RNA, 19 nt, Artificial Sequence
  Description of Artificial Sequence: Synthetic oligonucleotide
acccaagauaagauguagg

SEQ ID NO: 2020372 - RNA, 19 nt, Artificial Sequence
  Description of Artificial Sequence: Synthetic oligonucleotide
agagcugaucccaagucug

SEQ ID NO: 2020373 - RNA, 19 nt, Artificial Sequence
  Description of Artificial Sequence: Synthetic oligonucleotide
uuggugacaagauccugau

SEQ ID NO: 2020374 - RNA, 19 nt, Artificial Sequence
  Description of Artificial Sequence: Synthetic oligonucleotide
uauaccuaucaugcaacaa

SEQ ID NO: 2020375 - RNA, 19 nt, Artificial Sequence
  Description of Artificial Sequence: Synthetic oligonucleotide
uuguguuaaggacuuccuu

SEQ ID NO: 2020376 - RNA, 19 nt, Artificial Sequence
  Description of Artificial Sequence: Synthetic oligonucleotide
agacuugguucugauuccg

SEQ ID NO: 2020377 - RNA, 19 nt, Artificial Sequence
  Description of Artificial Sequence: Synthetic oligonucleotide
auauggggacugaagauga

SEQ ID NO: 2020378 - RNA, 19 nt, Artificial Sequence
  Description of Artificial Sequence: Synthetic oligonucleotide
agacauuaagacacuucag

SEQ ID NO: 2020379 - RNA, 19 nt, Artificial Sequence
  Description of Artificial Sequence: Synthetic oligonucleotide
augggcauuuugugaagug

SEQ ID NO: 2020380 - RNA, 19 nt, Artificial Sequence
  Description of Artificial Sequence: Synthetic oligonucleotide
auaagauguaggauccacu

SEQ ID NO: 2020381 - RNA, 19 nt, Artificial Sequence
  Description of Artificial Sequence: Synthetic oligonucleotide
gcaggcaaagacuugguuc

SEQ ID NO: 2020382 - RNA, 19 nt, Artificial Sequence
  Description of Artificial Sequence: Synthetic oligonucleotide
uuucgagcaggugaaguau

SEQ ID NO: 2020383 - RNA, 19 nt, Artificial Sequence
  Description of Artificial Sequence: Synthetic oligonucleotide
ucucaacagagaacuggaa

SEQ ID NO: 2020384 - RNA, 19 nt, Artificial Sequence
  Description of Artificial Sequence: Synthetic oligonucleotide
caacaacauucuacacucg

SEQ ID NO: 2020385 - RNA, 19 nt, Artificial Sequence
  Description of Artificial Sequence: Synthetic oligonucleotide
uaccugcaaagcccugggg

SEQ ID NO: 2020386 - RNA, 19 nt, Artificial Sequence
  Description of Artificial Sequence: Synthetic oligonucleotide
ucggguggaaccuccuucu

SEQ ID NO: 2020387 - RNA, 19 nt, Artificial Sequence
  Description of Artificial Sequence: Synthetic oligonucleotide
uguagaguuccaucacuuu

SEQ ID NO: 2020388 - RNA, 19 nt, Artificial Sequence
  Description of Artificial Sequence: Synthetic oligonucleotide
uaaggacuuccuucuggga

SEQ ID NO: 2020389 - RNA, 19 nt, Artificial Sequence
  Description of Artificial Sequence: Synthetic oligonucleotide
uguuaagguuggaucuaaa

SEQ ID NO: 2020390 - RNA, 19 nt, Artificial Sequence
  Description of Artificial Sequence: Synthetic oligonucleotide
ugauuccguacgauuuccu

SEQ ID NO: 2020391 - RNA, 19 nt, Artificial Sequence
  Description of Artificial Sequence: Synthetic oligonucleotide
gguacugaguacuuucauc

SEQ ID NO: 2020392 - RNA, 19 nt, Artificial Sequence
  Description of Artificial Sequence: Synthetic oligonucleotide
uucgagcaggugaaguauc

SEQ ID NO: 2020393 - RNA, 19 nt, Artificial Sequence
  Description of Artificial Sequence: Synthetic oligonucleotide
cagcucauccaucacuaac

SEQ ID NO: 2020394 - RNA, 19 nt, Artificial Sequence
  Description of Artificial Sequence: Synthetic oligonucleotide
gcacacuauagacauuaag

SEQ ID NO: 2020395 - RNA, 19 nt, Artificial Sequence
  Description of Artificial Sequence: Synthetic oligonucleotide
auccuugcagcucauccau

SEQ ID NO: 2020396 - RNA, 19 nt, Artificial Sequence
  Description of Artificial Sequence: Synthetic oligonucleotide
uccaugcuucucuucuuga

SEQ ID NO: 2020397 - RNA, 19 nt, Artificial Sequence
  Description of Artificial Sequence: Synthetic oligonucleotide
cuguguaguagaugacuuc

SEQ ID NO: 2020398 - RNA, 19 nt, Artificial Sequence
  Description of Artificial Sequence: Synthetic oligonucleotide
gcaguagagcgccaagccg

SEQ ID NO: 2020399 - RNA, 19 nt, Artificial Sequence
  Description of Artificial Sequence: Synthetic oligonucleotide
ggagguacugaguacuuuc

SEQ ID NO: 2020400 - RNA, 19 nt, Artificial Sequence
  Description of Artificial Sequence: Synthetic oligonucleotide
cugauuccguacgauuucc

SEQ ID NO: 2020401 - RNA, 19 nt, Artificial Sequence
  Description of Artificial Sequence: Synthetic oligonucleotide
gauccaauauaccuaucau

SEQ ID NO: 2020402 - RNA, 19 nt, Artificial Sequence
  Description of Artificial Sequence: Synthetic oligonucleotide
ugguucugauuccguacga

SEQ ID NO: 2020403 - RNA, 19 nt, Artificial Sequence
  Description of Artificial Sequence: Synthetic oligonucleotide
cuugagcuguacugacacc

SEQ ID NO: 2020404 - RNA, 19 nt, Artificial Sequence
  Description of Artificial Sequence: Synthetic oligonucleotide
uggccccgaaaacauuuug

SEQ ID NO: 2020405 - RNA, 19 nt, Artificial Sequence
  Description of Artificial Sequence: Synthetic oligonucleotide
gaauguuugccuaguaccu

SEQ ID NO: 2020406 - RNA, 19 nt, Artificial Sequence
  Description of Artificial Sequence: Synthetic oligonucleotide
cucugaagcauucaaggcu

SEQ ID NO: 2020407 - RNA, 19 nt, Artificial Sequence
  Description of Artificial Sequence: Synthetic oligonucleotide
cgcucugaagcauucaagg

SEQ ID NO: 2020408 - RNA, 19 nt, Artificial Sequence
  Description of Artificial Sequence: Synthetic oligonucleotide
gaugacuucugcaggugga

SEQ ID NO: 2020409 - RNA, 19 nt, Artificial Sequence
  Description of Artificial Sequence: Synthetic oligonucleotide
gcugaucccaagucugacg

SEQ ID NO: 2020410 - RNA, 19 nt, Artificial Sequence
  Description of Artificial Sequence: Synthetic oligonucleotide
cccgaaaacauuuuguuaa

SEQ ID NO: 2020411 - RNA, 19 nt, Artificial Sequence
  Description of Artificial Sequence: Synthetic oligonucleotide
ugccuaguaccugcaaagc

SEQ ID NO: 2020412 - RNA, 19 nt, Artificial Sequence
  Description of Artificial Sequence: Synthetic oligonucleotide
agauccugaucacugugua

SEQ ID NO: 2020413 - RNA, 19 nt, Artificial Sequence
  Description of Artificial Sequence: Synthetic oligonucleotide
aguugauccccugggcauc

SEQ ID NO: 2020414 - RNA, 19 nt, Artificial Sequence
  Description of Artificial Sequence: Synthetic oligonucleotide
uuguuaagguuggaucuaa

SEQ ID NO: 2020415 - RNA, 19 nt, Artificial Sequence
  Description of Artificial Sequence: Synthetic oligonucleotide
guuaagguuggaucuaaau

SEQ ID NO: 2020416 - RNA, 19 nt, Artificial Sequence
  Description of Artificial Sequence: Synthetic oligonucleotide
acauucuacacucgaccuu

SEQ ID NO: 2020417 - RNA, 19 nt, Artificial Sequence
  Description of Artificial Sequence: Synthetic oligonucleotide
cuuucgcucugaagcauuc

SEQ ID NO: 2020418 - RNA, 19 nt, Artificial Sequence
  Description of Artificial Sequence: Synthetic oligonucleotide
guguuaaggacuuccuucu

SEQ ID NO: 2020419 - RNA, 19 nt, Artificial Sequence
  Description of Artificial Sequence: Synthetic oligonucleotide
guacuguuguaagagcuga

SEQ ID NO: 2020420 - RNA, 19 nt, Artificial Sequence
  Description of Artificial Sequence: Synthetic oligonucleotide
aguccuuagugcucuuuaa

SEQ ID NO: 2020421 - RNA, 19 nt, Artificial Sequence
  Description of Artificial Sequence: Synthetic oligonucleotide
gcucugaagcauucaaggc

SEQ ID NO: 2020422 - RNA, 19 nt, Artificial Sequence
  Description of Artificial Sequence: Synthetic oligonucleotide
cugguagucgggcuuugug

SEQ ID NO: 2020423 - RNA, 19 nt, Artificial Sequence
  Description of Artificial Sequence: Synthetic oligonucleotide
ccagcuucucuguaaaaug

SEQ ID NO: 2020424 - RNA, 19 nt, Artificial Sequence
  Description of Artificial Sequence: Synthetic oligonucleotide
caggcaaagacuugguucu

SEQ ID NO: 2020425 - RNA, 19 nt, Artificial Sequence
  Description of Artificial Sequence: Synthetic oligonucleotide
agagaacuggaagcuggag

SEQ ID NO: 2020426 - RNA, 19 nt, Artificial Sequence
  Description of Artificial Sequence: Synthetic oligonucleotide
ggguggaaccuccuucugg

SEQ ID NO: 2020427 - RNA, 19 nt, Artificial Sequence
  Description of Artificial Sequence: Synthetic oligonucleotide
cccaagauaagauguagga

SEQ ID NO: 2020428 - RNA, 19 nt, Artificial Sequence
  Description of Artificial Sequence: Synthetic oligonucleotide
ugcaggcaaagacuugguu

SEQ ID NO: 2020429 - RNA, 19 nt, Artificial Sequence
  Description of Artificial Sequence: Synthetic oligonucleotide
gugaaguaucuaauuguuc

SEQ ID NO: 2020430 - RNA, 19 nt, Artificial Sequence
  Description of Artificial Sequence: Synthetic oligonucleotide
gccuaguaccugcaaagcc

SEQ ID NO: 2020431 - RNA, 19 nt, Artificial Sequence
  Description of Artificial Sequence: Synthetic oligonucleotide
uacuguuguaagagcugau

SEQ ID NO: 2020432 - RNA, 19 nt, Artificial Sequence
  Description of Artificial Sequence: Synthetic oligonucleotide
agguacugaguacuuucau

SEQ ID NO: 2020433 - RNA, 19 nt, Artificial Sequence
  Description of Artificial Sequence: Synthetic oligonucleotide
guaagagcugaucccaagu

SEQ ID NO: 2020434 - RNA, 19 nt, Artificial Sequence
  Description of Artificial Sequence: Synthetic oligonucleotide
cauucaaggcugaaguccu

SEQ ID NO: 2020435 - RNA, 19 nt, Artificial Sequence
  Description of Artificial Sequence: Synthetic oligonucleotide
gagguacugaguacuuuca

SEQ ID NO: 2020436 - RNA, 19 nt, Artificial Sequence
  Description of Artificial Sequence: Synthetic oligonucleotide
gugaugccugggugaaagg

SEQ ID NO: 2020437 - RNA, 19 nt, Artificial Sequence
  Description of Artificial Sequence: Synthetic oligonucleotide
caaacugauggagcugcug

SEQ ID NO: 2020438 - RNA, 19 nt, Artificial Sequence
  Description of Artificial Sequence: Synthetic oligonucleotide
acguucuaaagaaaacuuu

SEQ ID NO: 2020439 - RNA, 19 nt, Artificial Sequence
  Description of Artificial Sequence: Synthetic oligonucleotide
caguuuucgagcaggugaa

SEQ ID NO: 2020440 - RNA, 19 nt, Artificial Sequence
  Description of Artificial Sequence: Synthetic oligonucleotide
uauggggacugaagaugaa

SEQ ID NO: 2020441 - RNA, 19 nt, Artificial Sequence
  Description of Artificial Sequence: Synthetic oligonucleotide
gguacuguuguaagagcug

SEQ ID NO: 2020442 - RNA, 19 nt, Artificial Sequence
  Description of Artificial Sequence: Synthetic oligonucleotide
gcuucauucucugaugaca

SEQ ID NO: 2020443 - RNA, 19 nt, Artificial Sequence
  Description of Artificial Sequence: Synthetic oligonucleotide
gacguucuaaagaaaacuu

SEQ ID NO: 2020444 - RNA, 19 nt, Artificial Sequence
  Description of Artificial Sequence: Synthetic oligonucleotide
ucuucggguggaaccuccu

SEQ ID NO: 2020445 - RNA, 19 nt, Artificial Sequence
  Description of Artificial Sequence: Synthetic oligonucleotide
cuaauuguuccaugcuucu

SEQ ID NO: 2020446 - RNA, 19 nt, Artificial Sequence
  Description of Artificial Sequence: Synthetic oligonucleotide
ccgaaaacauuuuguuaag

SEQ ID NO: 2020447 - RNA, 19 nt, Artificial Sequence
  Description of Artificial Sequence: Synthetic oligonucleotide
gucaauucuuaggggagca

SEQ ID NO: 2020448 - RNA, 19 nt, Artificial Sequence
  Description of Artificial Sequence: Synthetic oligonucleotide
cugaucccaagucugacgu

SEQ ID NO: 2020449 - RNA, 19 nt, Artificial Sequence
  Description of Artificial Sequence: Synthetic oligonucleotide
guacugacaccugcuggag

SEQ ID NO: 2020450 - RNA, 19 nt, Artificial Sequence
  Description of Artificial Sequence: Synthetic oligonucleotide
gucgggcuuuguguuaagg

SEQ ID NO: 2020451 - RNA, 19 nt, Artificial Sequence
  Description of Artificial Sequence: Synthetic oligonucleotide
uuucgcucugaagcauuca

SEQ ID NO: 2020452 - RNA, 19 nt, Artificial Sequence
  Description of Artificial Sequence: Synthetic oligonucleotide
agauuguaguaggucaauu

SEQ ID NO: 2020453 - RNA, 19 nt, Artificial Sequence
  Description of Artificial Sequence: Synthetic oligonucleotide
uccugaucacuguguagua

SEQ ID NO: 2020454 - RNA, 19 nt, Artificial Sequence
  Description of Artificial Sequence: Synthetic oligonucleotide
ugcuuucugcuaacuucaa

SEQ ID NO: 2020455 - RNA, 19 nt, Artificial Sequence
  Description of Artificial Sequence: Synthetic oligonucleotide
aguuuucgagcaggugaag

SEQ ID NO: 2020456 - RNA, 19 nt, Artificial Sequence
  Description of Artificial Sequence: Synthetic oligonucleotide
ugacuucugcagguggagu

SEQ ID NO: 2020457 - RNA, 19 nt, Artificial Sequence
  Description of Artificial Sequence: Synthetic oligonucleotide
gggucaauucuuaggggag

SEQ ID NO: 2020458 - RNA, 19 nt, Artificial Sequence
  Description of Artificial Sequence: Synthetic oligonucleotide
ugaagcauucaaggcugaa

SEQ ID NO: 2020459 - RNA, 19 nt, Artificial Sequence
  Description of Artificial Sequence: Synthetic oligonucleotide
caguagagcgccaagccgu

SEQ ID NO: 2020460 - RNA, 19 nt, Artificial Sequence
  Description of Artificial Sequence: Synthetic oligonucleotide
agguuggaucuaaaugucu

SEQ ID NO: 2020461 - RNA, 19 nt, Artificial Sequence
  Description of Artificial Sequence: Synthetic oligonucleotide
ugcugagagcugugaugcc

SEQ ID NO: 2020462 - RNA, 19 nt, Artificial Sequence
  Description of Artificial Sequence: Synthetic oligonucleotide
agauaagauguaggaucca

SEQ ID NO: 2020463 - RNA, 19 nt, Artificial Sequence
  Description of Artificial Sequence: Synthetic oligonucleotide
aucaugcaacaacauucua

SEQ ID NO: 2020464 - RNA, 19 nt, Artificial Sequence
  Description of Artificial Sequence: Synthetic oligonucleotide
ggaagcuggagagcaguag

SEQ ID NO: 2020465 - RNA, 19 nt, Artificial Sequence
  Description of Artificial Sequence: Synthetic oligonucleotide
agcaguuuucgagcaggug

SEQ ID NO: 2020466 - RNA, 19 nt, Artificial Sequence
  Description of Artificial Sequence: Synthetic oligonucleotide
ggucaauucuuaggggagc

SEQ ID NO: 2020467 - RNA, 19 nt, Artificial Sequence
  Description of Artificial Sequence: Synthetic oligonucleotide
gaugaaacucagugagaau

SEQ ID NO: 2020468 - RNA, 19 nt, Artificial Sequence
  Description of Artificial Sequence: Synthetic oligonucleotide
acugauguuucaagugaaa

SEQ ID NO: 2020469 - RNA, 19 nt, Artificial Sequence
  Description of Artificial Sequence: Synthetic oligonucleotide
uacuuucgcucugaagcau

SEQ ID NO: 2020470 - RNA, 19 nt, Artificial Sequence
  Description of Artificial Sequence: Synthetic oligonucleotide
acucgaccuuuagugccac

SEQ ID NO: 2020471 - RNA, 19 nt, Artificial Sequence
  Description of Artificial Sequence: Synthetic oligonucleotide
uccuucugggaagacccaa

SEQ ID NO: 2020472 - RNA, 19 nt, Artificial Sequence
  Description of Artificial Sequence: Synthetic oligonucleotide
agcgccaagccguuugcuu

SEQ ID NO: 2020473 - RNA, 19 nt, Artificial Sequence
  Description of Artificial Sequence: Synthetic oligonucleotide
ccuuagugcucuuuaagaa

SEQ ID NO: 2020474 - RNA, 19 nt, Artificial Sequence
  Description of Artificial Sequence: Synthetic oligonucleotide
gucucagaucuuucuugca

SEQ ID NO: 2020475 - RNA, 19 nt, Artificial Sequence
  Description of Artificial Sequence: Synthetic oligonucleotide
guacgauuuccugguaguc

SEQ ID NO: 2020476 - RNA, 19 nt, Artificial Sequence
  Description of Artificial Sequence: Synthetic oligonucleotide
uuggccccgaaaacauuuu

SEQ ID NO: 2020477 - RNA, 19 nt, Artificial Sequence
  Description of Artificial Sequence: Synthetic oligonucleotide
gcuucucuguaaaauguuc

SEQ ID NO: 2020478 - RNA, 19 nt, Artificial Sequence
  Description of Artificial Sequence: Synthetic oligonucleotide
cgggcuuuguguuaaggac

SEQ ID NO: 2020479 - RNA, 19 nt, Artificial Sequence
  Description of Artificial Sequence: Synthetic oligonucleotide
uccuugcagcucauccauc

SEQ ID NO: 2020480 - RNA, 19 nt, Artificial Sequence
  Description of Artificial Sequence: Synthetic oligonucleotide
cuauagacauuaagacacu

SEQ ID NO: 2020481 - RNA, 19 nt, Artificial Sequence
  Description of Artificial Sequence: Synthetic oligonucleotide
agccguuugcuuucugcua

SEQ ID NO: 2020482 - RNA, 19 nt, Artificial Sequence
  Description of Artificial Sequence: Synthetic oligonucleotide
gguggaaccuccuucuggu

SEQ ID NO: 2020483 - RNA, 19 nt, Artificial Sequence
  Description of Artificial Sequence: Synthetic oligonucleotide
cacucgaccuuuagugcca

SEQ ID NO: 2020484 - RNA, 19 nt, Artificial Sequence
  Description of Artificial Sequence: Synthetic oligonucleotide
guuggaucuaaaugucuuu

SEQ ID NO: 2020485 - RNA, 19 nt, Artificial Sequence
  Description of Artificial Sequence: Synthetic oligonucleotide
guuuucgagcaggugaagu

SEQ ID NO: 2020486 - RNA, 19 nt, Artificial Sequence
  Description of Artificial Sequence: Synthetic oligonucleotide
gcucauccaucacuaacuc

SEQ ID NO: 2020487 - RNA, 19 nt, Artificial Sequence
  Description of Artificial Sequence: Synthetic oligonucleotide
ccguacgauuuccugguag

SEQ ID NO: 2020488 - RNA, 19 nt, Artificial Sequence
  Description of Artificial Sequence: Synthetic oligonucleotide
cagaucuuucuugcaauaa

SEQ ID NO: 2020489 - RNA, 19 nt, Artificial Sequence
  Description of Artificial Sequence: Synthetic oligonucleotide
gagcugaucccaagucuga

SEQ ID NO: 2020490 - RNA, 19 nt, Artificial Sequence
  Description of Artificial Sequence: Synthetic oligonucleotide
gagagcaguagagcgccaa

SEQ ID NO: 2020491 - RNA, 19 nt, Artificial Sequence
  Description of Artificial Sequence: Synthetic oligonucleotide
agacccaagauaagaugua

SEQ ID NO: 2020492 - RNA, 19 nt, Artificial Sequence
  Description of Artificial Sequence: Synthetic oligonucleotide
guuugccuaguaccugcaa

SEQ ID NO: 2020493 - RNA, 19 nt, Artificial Sequence
  Description of Artificial Sequence: Synthetic oligonucleotide
accuaucaugcaacaacau

SEQ ID NO: 2020494 - RNA, 19 nt, Artificial Sequence
  Description of Artificial Sequence: Synthetic oligonucleotide
ccugaucacuguguaguag

SEQ ID NO: 2020495 - RNA, 19 nt, Artificial Sequence
  Description of Artificial Sequence: Synthetic oligonucleotide
gccguuugcuuucugcuaa

SEQ ID NO: 2020496 - RNA, 19 nt, Artificial Sequence
  Description of Artificial Sequence: Synthetic oligonucleotide
ggcauuuugugaagugauc

SEQ ID NO: 2020497 - RNA, 19 nt, Artificial Sequence
  Description of Artificial Sequence: Synthetic oligonucleotide
uccguacgauuuccuggua

SEQ ID NO: 2020498 - RNA, 19 nt, Artificial Sequence
  Description of Artificial Sequence: Synthetic oligonucleotide
cccaacuuggccccgaaaa

SEQ ID NO: 2020499 - RNA, 19 nt, Artificial Sequence
  Description of Artificial Sequence: Synthetic oligonucleotide
cauucuacacucgaccuuu

SEQ ID NO: 2020500 - RNA, 19 nt, Artificial Sequence
  Description of Artificial Sequence: Synthetic oligonucleotide
acuuucgcucugaagcauu

SEQ ID NO: 2020501 - RNA, 19 nt, Artificial Sequence
  Description of Artificial Sequence: Synthetic oligonucleotide
ucucuucggguggaaccuc

SEQ ID NO: 2020502 - RNA, 19 nt, Artificial Sequence
  Description of Artificial Sequence: Synthetic oligonucleotide
ggugaaguaucuaauuguu

SEQ ID NO: 2020503 - RNA, 19 nt, Artificial Sequence
  Description of Artificial Sequence: Synthetic oligonucleotide
cugcuaacuucaaacugau

SEQ ID NO: 2020504 - RNA, 19 nt, Artificial Sequence
  Description of Artificial Sequence: Synthetic oligonucleotide
ggggacugaagaugaaacu

SEQ ID NO: 2020505 - RNA, 19 nt, Artificial Sequence
  Description of Artificial Sequence: Synthetic oligonucleotide
aucccaagucugacguucu

SEQ ID NO: 2020506 - RNA, 19 nt, Artificial Sequence
  Description of Artificial Sequence: Synthetic oligonucleotide
guggagucugagcaguuuu

SEQ ID NO: 2020507 - RNA, 19 nt, Artificial Sequence
  Description of Artificial Sequence: Synthetic oligonucleotide
ccaucacuaacuccaugca

SEQ ID NO: 2020508 - RNA, 19 nt, Artificial Sequence
  Description of Artificial Sequence: Synthetic oligonucleotide
cacuuuaacuucagugauu

SEQ ID NO: 2020509 - RNA, 19 nt, Artificial Sequence
  Description of Artificial Sequence: Synthetic oligonucleotide
cuucagaaaaugggcauuu

SEQ ID NO: 2020510 - RNA, 19 nt, Artificial Sequence
  Description of Artificial Sequence: Synthetic oligonucleotide
uccugguagucgggcuuug

SEQ ID NO: 2020511 - RNA, 19 nt, Artificial Sequence
  Description of Artificial Sequence: Synthetic oligonucleotide
gacuuccuucugggaagac

SEQ ID NO: 2020512 - RNA, 19 nt, Artificial Sequence
  Description of Artificial Sequence: Synthetic oligonucleotide
gggcuuuguguuaaggacu

SEQ ID NO: 2020513 - RNA, 19 nt, Artificial Sequence
  Description of Artificial Sequence: Synthetic oligonucleotide
aguagagcgccaagccguu

SEQ ID NO: 2020514 - RNA, 19 nt, Artificial Sequence
  Description of Artificial Sequence: Synthetic oligonucleotide
gugauccaauauaccuauc

SEQ ID NO: 2020515 - RNA, 19 nt, Artificial Sequence
  Description of Artificial Sequence: Synthetic oligonucleotide
ccaugcaggcaaagacuug

SEQ ID NO: 2020516 - RNA, 19 nt, Artificial Sequence
  Description of Artificial Sequence: Synthetic oligonucleotide
gcaggugaaguaucuaauu

SEQ ID NO: 2020517 - RNA, 19 nt, Artificial Sequence
  Description of Artificial Sequence: Synthetic oligonucleotide
cacuaacuccaugcaggca

SEQ ID NO: 2020518 - RNA, 19 nt, Artificial Sequence
  Description of Artificial Sequence: Synthetic oligonucleotide
cgauuuccugguagucggg

SEQ ID NO: 2020519 - RNA, 19 nt, Artificial Sequence
  Description of Artificial Sequence: Synthetic oligonucleotide
cagauccuugcagcucauc

SEQ ID NO: 2020520 - RNA, 19 nt, Artificial Sequence
  Description of Artificial Sequence: Synthetic oligonucleotide
gcaaagacuugguucugau

SEQ ID NO: 2020521 - RNA, 19 nt, Artificial Sequence
  Description of Artificial Sequence: Synthetic oligonucleotide
ccuaucaugcaacaacauu

SEQ ID NO: 2020522 - RNA, 19 nt, Artificial Sequence
  Description of Artificial Sequence: Synthetic oligonucleotide
ccccgaaaacauuuuguua

SEQ ID NO: 2020523 - RNA, 19 nt, Artificial Sequence
  Description of Artificial Sequence: Synthetic oligonucleotide
cacuuuuguagaguuccau

SEQ ID NO: 2020524 - RNA, 19 nt, Artificial Sequence
  Description of Artificial Sequence: Synthetic oligonucleotide
gccccgaaaacauuuuguu

SEQ ID NO: 2020525 - RNA, 19 nt, Artificial Sequence
  Description of Artificial Sequence: Synthetic oligonucleotide
ccucagccacugauguuuc

SEQ ID NO: 2020526 - RNA, 19 nt, Artificial Sequence
  Description of Artificial Sequence: Synthetic oligonucleotide
ggacuuccuucugggaaga

SEQ ID NO: 2020527 - RNA, 19 nt, Artificial Sequence
  Description of Artificial Sequence: Synthetic oligonucleotide
auucuacacucgaccuuua

SEQ ID NO: 2020528 - RNA, 19 nt, Artificial Sequence
  Description of Artificial Sequence: Synthetic oligonucleotide
cucgaccuuuagugccaca

SEQ ID NO: 2020529 - RNA, 19 nt, Artificial Sequence
  Description of Artificial Sequence: Synthetic oligonucleotide
ggccccgaaaacauuuugu

SEQ ID NO: 2020530 - RNA, 19 nt, Artificial Sequence
  Description of Artificial Sequence: Synthetic oligonucleotide
acagauccuugcagcucau

SEQ ID NO: 2020531 - RNA, 19 nt, Artificial Sequence
  Description of Artificial Sequence: Synthetic oligonucleotide
ggcuuuguguuaaggacuu

SEQ ID NO: 2020532 - RNA, 19 nt, Artificial Sequence
  Description of Artificial Sequence: Synthetic oligonucleotide
cguacgauuuccugguagu

SEQ ID NO: 2020533 - RNA, 19 nt, Artificial Sequence
  Description of Artificial Sequence: Synthetic oligonucleotide
cuggagguacugaguacuu

SEQ ID NO: 2020534 - RNA, 19 nt, Artificial Sequence
  Description of Artificial Sequence: Synthetic oligonucleotide
gguucugauuccguacgau

SEQ ID NO: 2020535 - RNA, 19 nt, Artificial Sequence
  Description of Artificial Sequence: Synthetic oligonucleotide
cgccaagccguuugcuuuc

SEQ ID NO: 2020536 - RNA, 19 nt, Artificial Sequence
  Description of Artificial Sequence: Synthetic oligonucleotide
gagcgccaagccguuugcu

SEQ ID NO: 2020537 - RNA, 19 nt, Artificial Sequence
  Description of Artificial Sequence: Synthetic oligonucleotide
gcgccaagccguuugcuuu

SEQ ID NO: 2020538 - RNA, 19 nt, Artificial Sequence
  Description of Artificial Sequence: Synthetic oligonucleotide
gugccacacuugaaaacuu

SEQ ID NO: 2020539 - RNA, 19 nt, Artificial Sequence
  Description of Artificial Sequence: Synthetic oligonucleotide
cuucggguggaaccuccuu

SEQ ID NO: 2020540 - RNA, 19 nt, Artificial Sequence
  Description of Artificial Sequence: Synthetic oligonucleotide
gggcaucucuucgggugga

SEQ ID NO: 2020541 - RNA, 19 nt, Artificial Sequence
  Description of Artificial Sequence: Synthetic oligonucleotide
cgaccuuuagugccacacu

SEQ ID NO: 2020542 - RNA, 19 nt, Artificial Sequence
  Description of Artificial Sequence: Synthetic oligonucleotide
guagagcgccaagccguuu

SEQ ID NO: 2020543 - RNA, 19 nt, Artificial Sequence
  Description of Artificial Sequence: Synthetic oligonucleotide
gcccuggggucaauucuua

SEQ ID NO: 2020544 - RNA, 19 nt, Artificial Sequence
  Description of Artificial Sequence: Synthetic oligonucleotide
cgagcaggugaaguaucua

SEQ ID NO: 2020545 - RNA, 19 nt, Artificial Sequence
  Description of Artificial Sequence: Synthetic oligonucleotide
cguuugcuuucugcuaacu

SEQ ID NO: 2020546 - RNA, 19 nt, Artificial Sequence
  Description of Artificial Sequence: Synthetic oligonucleotide
ccugguagucgggcuuugu

SEQ ID NO: 2020547 - RNA, 19 nt, Artificial Sequence
  Description of Artificial Sequence: Synthetic oligonucleotide
agugacaucucuaaguugc

SEQ ID NO: 2020548 - RNA, 19 nt, Artificial Sequence
  Description of Artificial Sequence: Synthetic oligonucleotide
agauaucccacacaggcgg

SEQ ID NO: 2020549 - RNA, 19 nt, Artificial Sequence
  Description of Artificial Sequence: Synthetic oligonucleotide
cuagcaaggguacugaggg

SEQ ID NO: 2020550 - RNA, 19 nt, Artificial Sequence
  Description of Artificial Sequence: Synthetic oligonucleotide
uucucgaaaccucugaagc

SEQ ID NO: 2020551 - RNA, 19 nt, Artificial Sequence
  Description of Artificial Sequence: Synthetic oligonucleotide
ucgaugauuguccagugag

SEQ ID NO: 2020552 - RNA, 19 nt, Artificial Sequence
  Description of Artificial Sequence: Synthetic oligonucleotide
uuuacuggugacuggagag

SEQ ID NO: 2020553 - RNA, 19 nt, Artificial Sequence
  Description of Artificial Sequence: Synthetic oligonucleotide
auagaguucacccuggagu

SEQ ID NO: 2020554 - RNA, 19 nt, Artificial Sequence
  Description of Artificial Sequence: Synthetic oligonucleotide
aagacucuuggguacagag

SEQ ID NO: 2020555 - RNA, 19 nt, Artificial Sequence
  Description of Artificial Sequence: Synthetic oligonucleotide
ugucagaugcaucaaagcu

SEQ ID NO: 2020556 - RNA, 19 nt, Artificial Sequence
  Description of Artificial Sequence: Synthetic oligonucleotide
gauagugggaugcucaccc

SEQ ID NO: 2020557 - RNA, 19 nt, Artificial Sequence
  Description of Artificial Sequence: Synthetic oligonucleotide
agagggaugagcugguggc

SEQ ID NO: 2020558 - RNA, 19 nt, Artificial Sequence
  Description of Artificial Sequence: Synthetic oligonucleotide
acaggacagacuuugggac

SEQ ID NO: 2020559 - RNA, 19 nt, Artificial Sequence
  Description of Artificial Sequence: Synthetic oligonucleotide
auaccuuucgguuggcccc

SEQ ID NO: 2020560 - RNA, 19 nt, Artificial Sequence
  Description of Artificial Sequence: Synthetic oligonucleotide
uccuucacaggacacagag

SEQ ID NO: 2020561 - RNA, 19 nt, Artificial Sequence
  Description of Artificial Sequence: Synthetic oligonucleotide
agaauggauagugggaugc

SEQ ID NO: 2020562 - RNA, 19 nt, Artificial Sequence
  Description of Artificial Sequence: Synthetic oligonucleotide
gaauccgauacugaugugg

SEQ ID NO: 2020563 - RNA, 19 nt, Artificial Sequence
  Description of Artificial Sequence: Synthetic oligonucleotide
ugggaacacagcuucaggg

SEQ ID NO: 2020564 - RNA, 19 nt, Artificial Sequence
  Description of Artificial Sequence: Synthetic oligonucleotide
uccgauacugauguggugg

SEQ ID NO: 2020565 - RNA, 19 nt, Artificial Sequence
  Description of Artificial Sequence: Synthetic oligonucleotide
aagagggaugagcuggugg

SEQ ID NO: 2020566 - RNA, 19 nt, Artificial Sequence
  Description of Artificial Sequence: Synthetic oligonucleotide
aaucauagcccagguaugg

SEQ ID NO: 2020567 - RNA, 19 nt, Artificial Sequence
  Description of Artificial Sequence: Synthetic oligonucleotide
ugcaauccaaucauagccc

SEQ ID NO: 2020568 - RNA, 19 nt, Artificial Sequence
  Description of Artificial Sequence: Synthetic oligonucleotide
uccccuuccacacagcugc

SEQ ID NO: 2020569 - RNA, 19 nt, Artificial Sequence
  Description of Artificial Sequence: Synthetic oligonucleotide
acucucuugggacagugac

SEQ ID NO: 2020570 - RNA, 19 nt, Artificial Sequence
  Description of Artificial Sequence: Synthetic oligonucleotide
cucgagauaucccacacag

SEQ ID NO: 2020571 - RNA, 19 nt, Artificial Sequence
  Description of Artificial Sequence: Synthetic oligonucleotide
cauuacagacucuugggag

SEQ ID NO: 2020572 - RNA, 19 nt, Artificial Sequence
  Description of Artificial Sequence: Synthetic oligonucleotide
cauaccagguuuuaucagc

SEQ ID NO: 2020573 - RNA, 19 nt, Artificial Sequence
  Description of Artificial Sequence: Synthetic oligonucleotide
ugacaggacagacuuuggg

SEQ ID NO: 2020574 - RNA, 19 nt, Artificial Sequence
  Description of Artificial Sequence: Synthetic oligonucleotide
aacaagcgccgguugacac

SEQ ID NO: 2020575 - RNA, 19 nt, Artificial Sequence
  Description of Artificial Sequence: Synthetic oligonucleotide
uaacaguacacacacucgu

SEQ ID NO: 2020576 - RNA, 19 nt, Artificial Sequence
  Description of Artificial Sequence: Synthetic oligonucleotide
aggcauuacagacucuugg

SEQ ID NO: 2020577 - RNA, 19 nt, Artificial Sequence
  Description of Artificial Sequence: Synthetic oligonucleotide
uuuggagggaggauguccc

SEQ ID NO: 2020578 - RNA, 19 nt, Artificial Sequence
  Description of Artificial Sequence: Synthetic oligonucleotide
uuuuccgucuaugaauccg

SEQ ID NO: 2020579 - RNA, 19 nt, Artificial Sequence
  Description of Artificial Sequence: Synthetic oligonucleotide
ugugguggguccagaaugg

SEQ ID NO: 2020580 - RNA, 19 nt, Artificial Sequence
  Description of Artificial Sequence: Synthetic oligonucleotide
caguagacagugcugaggg

SEQ ID NO: 2020581 - RNA, 19 nt, Artificial Sequence
  Description of Artificial Sequence: Synthetic oligonucleotide
ugggauagaguucacccug

SEQ ID NO: 2020582 - RNA, 19 nt, Artificial Sequence
  Description of Artificial Sequence: Synthetic oligonucleotide
ugagcuuggggccacugag

SEQ ID NO: 2020583 - RNA, 19 nt, Artificial Sequence
  Description of Artificial Sequence: Synthetic oligonucleotide
gucacuuugggcuuagaug

SEQ ID NO: 2020584 - RNA, 19 nt, Artificial Sequence
  Description of Artificial Sequence: Synthetic oligonucleotide
ucuugggacagugacaucu

SEQ ID NO: 2020585 - RNA, 19 nt, Artificial Sequence
  Description of Artificial Sequence: Synthetic oligonucleotide
ucuaugaauccgauacuga

SEQ ID NO: 2020586 - RNA, 19 nt, Artificial Sequence
  Description of Artificial Sequence: Synthetic oligonucleotide
ugcaucaaagcuuuuccgu

SEQ ID NO: 2020587 - RNA, 19 nt, Artificial Sequence
  Description of Artificial Sequence: Synthetic oligonucleotide
ugucauaccagguuuuauc

SEQ ID NO: 2020588 - RNA, 19 nt, Artificial Sequence
  Description of Artificial Sequence: Synthetic oligonucleotide
uccagugaguuccacacgu

SEQ ID NO: 2020589 - RNA, 19 nt, Artificial Sequence
  Description of Artificial Sequence: Synthetic oligonucleotide
auuacagacucuugggaga

SEQ ID NO: 2020590 - RNA, 19 nt, Artificial Sequence
  Description of Artificial Sequence: Synthetic oligonucleotide
cauaccuuucgguuggccc

SEQ ID NO: 2020591 - RNA, 19 nt, Artificial Sequence
  Description of Artificial Sequence: Synthetic oligonucleotide
uggagaguuacuguccagg

SEQ ID NO: 2020592 - RNA, 19 nt, Artificial Sequence
  Description of Artificial Sequence: Synthetic oligonucleotide
gugucuuuuguccugugag

SEQ ID NO: 2020593 - RNA, 19 nt, Artificial Sequence
  Description of Artificial Sequence: Synthetic oligonucleotide
acacgguaacaguacacac

SEQ ID NO: 2020594 - RNA, 19 nt, Artificial Sequence
  Description of Artificial Sequence: Synthetic oligonucleotide
gguaacaguacacacacuc

SEQ ID NO: 2020595 - RNA, 19 nt, Artificial Sequence
  Description of Artificial Sequence: Synthetic oligonucleotide
aauggauagugggaugcuc

SEQ ID NO: 2020596 - RNA, 19 nt, Artificial Sequence
  Description of Artificial Sequence: Synthetic oligonucleotide
cuuggggccacugaggagg

SEQ ID NO: 2020597 - RNA, 19 nt, Artificial Sequence
  Description of Artificial Sequence: Synthetic oligonucleotide
guuggcacguggcaggugg

SEQ ID NO: 2020598 - RNA, 19 nt, Artificial Sequence
  Description of Artificial Sequence: Synthetic oligonucleotide
augcaucaaagcuuuuccg

SEQ ID NO: 2020599 - RNA, 19 nt, Artificial Sequence
  Description of Artificial Sequence: Synthetic oligonucleotide
uaucagcuguguuuccucg

SEQ ID NO: 2020600 - RNA, 19 nt, Artificial Sequence
  Description of Artificial Sequence: Synthetic oligonucleotide
uuggucucgagauauccca

SEQ ID NO: 2020601 - RNA, 19 nt, Artificial Sequence
  Description of Artificial Sequence: Synthetic oligonucleotide
ucucaggcauuacagacuc

SEQ ID NO: 2020602 - RNA, 19 nt, Artificial Sequence
  Description of Artificial Sequence: Synthetic oligonucleotide
acagcuucaggggagucgc

SEQ ID NO: 2020603 - RNA, 19 nt, Artificial Sequence
  Description of Artificial Sequence: Synthetic oligonucleotide
gauagaguucacccuggag

SEQ ID NO: 2020604 - RNA, 19 nt, Artificial Sequence
  Description of Artificial Sequence: Synthetic oligonucleotide
ucuuuugcggucccauacc

SEQ ID NO: 2020605 - RNA, 19 nt, Artificial Sequence
  Description of Artificial Sequence: Synthetic oligonucleotide
uuggguacagagcuuuucu

SEQ ID NO: 2020606 - RNA, 19 nt, Artificial Sequence
  Description of Artificial Sequence: Synthetic oligonucleotide
uuuccgucuaugaauccga

SEQ ID NO: 2020607 - RNA, 19 nt, Artificial Sequence
  Description of Artificial Sequence: Synthetic oligonucleotide
guagacagugcugagggag

SEQ ID NO: 2020608 - RNA, 19 nt, Artificial Sequence
  Description of Artificial Sequence: Synthetic oligonucleotide
ggugggauagaguucaccc

SEQ ID NO: 2020609 - RNA, 19 nt, Artificial Sequence
  Description of Artificial Sequence: Synthetic oligonucleotide
agaugcaucaaagcuuuuc

SEQ ID NO: 2020610 - RNA, 19 nt, Artificial Sequence
  Description of Artificial Sequence: Synthetic oligonucleotide
cagaggucaagacucuugg

SEQ ID NO: 2020611 - RNA, 19 nt, Artificial Sequence
  Description of Artificial Sequence: Synthetic oligonucleotide
ucgguuggccccuucacag

SEQ ID NO: 2020612 - RNA, 19 nt, Artificial Sequence
  Description of Artificial Sequence: Synthetic oligonucleotide
gacaggacagacuuuggga

SEQ ID NO: 2020613 - RNA, 19 nt, Artificial Sequence
  Description of Artificial Sequence: Synthetic oligonucleotide
guuuccucgaugauugucc

SEQ ID NO: 2020614 - RNA, 19 nt, Artificial Sequence
  Description of Artificial Sequence: Synthetic oligonucleotide
aagaacucucuugggacag

SEQ ID NO: 2020615 - RNA, 19 nt, Artificial Sequence
  Description of Artificial Sequence: Synthetic oligonucleotide
uggcacuggaaacaagcgc

SEQ ID NO: 2020616 - RNA, 19 nt, Artificial Sequence
  Description of Artificial Sequence: Synthetic oligonucleotide
uuguugguuucucgaaacc

SEQ ID NO: 2020617 - RNA, 19 nt, Artificial Sequence
  Description of Artificial Sequence: Synthetic oligonucleotide
agguauggcaggaaacgcc

SEQ ID NO: 2020618 - RNA, 19 nt, Artificial Sequence
  Description of Artificial Sequence: Synthetic oligonucleotide
agcuguguuuccucgauga

SEQ ID NO: 2020619 - RNA, 19 nt, Artificial Sequence
  Description of Artificial Sequence: Synthetic oligonucleotide
gacucuuggguacagagcu

SEQ ID NO: 2020620 - RNA, 19 nt, Artificial Sequence
  Description of Artificial Sequence: Synthetic oligonucleotide
cuugacacggcucuggcca

SEQ ID NO: 2020621 - RNA, 19 nt, Artificial Sequence
  Description of Artificial Sequence: Synthetic oligonucleotide
acacucgugguccccuucc

SEQ ID NO: 2020622 - RNA, 19 nt, Artificial Sequence
  Description of Artificial Sequence: Synthetic oligonucleotide
uguugguuucucgaaaccu

SEQ ID NO: 2020623 - RNA, 19 nt, Artificial Sequence
  Description of Artificial Sequence: Synthetic oligonucleotide
guuggauggguccuuaguc

SEQ ID NO: 2020624 - RNA, 19 nt, Artificial Sequence
  Description of Artificial Sequence: Synthetic oligonucleotide
aagugguacccagauccac

SEQ ID NO: 2020625 - RNA, 19 nt, Artificial Sequence
  Description of Artificial Sequence: Synthetic oligonucleotide
aguuacuguccagggaccc

SEQ ID NO: 2020626 - RNA, 19 nt, Artificial Sequence
  Description of Artificial Sequence: Synthetic oligonucleotide
gagauaucccacacaggcg

SEQ ID NO: 2020627 - RNA, 19 nt, Artificial Sequence
  Description of Artificial Sequence: Synthetic oligonucleotide
ucgagauaucccacacagg

SEQ ID NO: 2020628 - RNA, 19 nt, Artificial Sequence
  Description of Artificial Sequence: Synthetic oligonucleotide
auggcaucaugcccagccc

SEQ ID NO: 2020629 - RNA, 19 nt, Artificial Sequence
  Description of Artificial Sequence: Synthetic oligonucleotide
gucuaugaauccgauacug

SEQ ID NO: 2020630 - RNA, 19 nt, Artificial Sequence
  Description of Artificial Sequence: Synthetic oligonucleotide
ugguggcugacagaugucg

SEQ ID NO: 2020631 - RNA, 19 nt, Artificial Sequence
  Description of Artificial Sequence: Synthetic oligonucleotide
ucuuuguugguuucucgaa

SEQ ID NO: 2020632 - RNA, 19 nt, Artificial Sequence
  Description of Artificial Sequence: Synthetic oligonucleotide
auccacuggcacuggaaac

SEQ ID NO: 2020633 - RNA, 19 nt, Artificial Sequence
  Description of Artificial Sequence: Synthetic oligonucleotide
gacagugacaucucuaagu

SEQ ID NO: 2020634 - RNA, 19 nt, Artificial Sequence
  Description of Artificial Sequence: Synthetic oligonucleotide
uugacacgguaacaguaca

SEQ ID NO: 2020635 - RNA, 19 nt, Artificial Sequence
  Description of Artificial Sequence: Synthetic oligonucleotide
ccgucuaugaauccgauac

SEQ ID NO: 2020636 - RNA, 19 nt, Artificial Sequence
  Description of Artificial Sequence: Synthetic oligonucleotide
ugcggucccauaccuuucg

SEQ ID NO: 2020637 - RNA, 19 nt, Artificial Sequence
  Description of Artificial Sequence: Synthetic oligonucleotide
cgagauaucccacacaggc

SEQ ID NO: 2020638 - RNA, 19 nt, Artificial Sequence
  Description of Artificial Sequence: Synthetic oligonucleotide
uuugcggucccauaccuuu

SEQ ID NO: 2020639 - RNA, 19 nt, Artificial Sequence
  Description of Artificial Sequence: Synthetic oligonucleotide
agaggucaagacucuuggg

SEQ ID NO: 2020640 - RNA, 19 nt, Artificial Sequence
  Description of Artificial Sequence: Synthetic oligonucleotide
uccgguuuacuggugacug

SEQ ID NO: 2020641 - RNA, 19 nt, Artificial Sequence
  Description of Artificial Sequence: Synthetic oligonucleotide
aaccucugaagcucagaga

SEQ ID NO: 2020642 - RNA, 19 nt, Artificial Sequence
  Description of Artificial Sequence: Synthetic oligonucleotide
cucacccugacuugcgagg

SEQ ID NO: 2020643 - RNA, 19 nt, Artificial Sequence
  Description of Artificial Sequence: Synthetic oligonucleotide
gggaacacagcuucagggg

SEQ ID NO: 2020644 - RNA, 19 nt, Artificial Sequence
  Description of Artificial Sequence: Synthetic oligonucleotide
ucucagacuuuggagggag

SEQ ID NO: 2020645 - RNA, 19 nt, Artificial Sequence
  Description of Artificial Sequence: Synthetic oligonucleotide
aaaugcaguccucuuuguu

SEQ ID NO: 2020646 - RNA, 19 nt, Artificial Sequence
  Description of Artificial Sequence: Synthetic oligonucleotide
uguugcuacaguccuguuu

SEQ ID NO: 2020647 - RNA, 19 nt, Artificial Sequence
  Description of Artificial Sequence: Synthetic oligonucleotide
ugacacgguaacaguacac

SEQ ID NO: 2020648 - RNA, 19 nt, Artificial Sequence
  Description of Artificial Sequence: Synthetic oligonucleotide
uacaguccuguuuuggcuc

SEQ ID NO: 2020649 - RNA, 19 nt, Artificial Sequence
  Description of Artificial Sequence: Synthetic oligonucleotide
ucagacuuuggagggagga

SEQ ID NO: 2020650 - RNA, 19 nt, Artificial Sequence
  Description of Artificial Sequence: Synthetic oligonucleotide
acuggagaguuacugucca

SEQ ID NO: 2020651 - RNA, 19 nt, Artificial Sequence
  Description of Artificial Sequence: Synthetic oligonucleotide
gacucuugggagaagguca

SEQ ID NO: 2020652 - RNA, 19 nt, Artificial Sequence
  Description of Artificial Sequence: Synthetic oligonucleotide
acaagcgccgguugacacg

SEQ ID NO: 2020653 - RNA, 19 nt, Artificial Sequence
  Description of Artificial Sequence: Synthetic oligonucleotide
ggagaguuacuguccaggg

SEQ ID NO: 2020654 - RNA, 19 nt, Artificial Sequence
  Description of Artificial Sequence: Synthetic oligonucleotide
acaucucuaaguugcugcu

SEQ ID NO: 2020655 - RNA, 19 nt, Artificial Sequence
  Description of Artificial Sequence: Synthetic oligonucleotide
uggaaacaagcgccgguug

SEQ ID NO: 2020656 - RNA, 19 nt, Artificial Sequence
  Description of Artificial Sequence: Synthetic oligonucleotide
aaguuggauggguccuuag

SEQ ID NO: 2020657 - RNA, 19 nt, Artificial Sequence
  Description of Artificial Sequence: Synthetic oligonucleotide
guacacacacucguggucc

SEQ ID NO: 2020658 - RNA, 19 nt, Artificial Sequence
  Description of Artificial Sequence: Synthetic oligonucleotide
ucgaaaccucugaagcuca

SEQ ID NO: 2020659 - RNA, 19 nt, Artificial Sequence
  Description of Artificial Sequence: Synthetic oligonucleotide
gucuuuugcggucccauac

SEQ ID NO: 2020660 - RNA, 19 nt, Artificial Sequence
  Description of Artificial Sequence: Synthetic oligonucleotide
aguuggauggguccuuagu

SEQ ID NO: 2020661 - RNA, 19 nt, Artificial Sequence
  Description of Artificial Sequence: Synthetic oligonucleotide
gaugucccagcccaguaga

SEQ ID NO: 2020662 - RNA, 19 nt, Artificial Sequence
  Description of Artificial Sequence: Synthetic oligonucleotide
uagugggaugcucacccug

SEQ ID NO: 2020663 - RNA, 19 nt, Artificial Sequence
  Description of Artificial Sequence: Synthetic oligonucleotide
caaucauagcccagguaug

SEQ ID NO: 2020664 - RNA, 19 nt, Artificial Sequence
  Description of Artificial Sequence: Synthetic oligonucleotide
gguauggcaggaaacgccg

SEQ ID NO: 2020665 - RNA, 19 nt, Artificial Sequence
  Description of Artificial Sequence: Synthetic oligonucleotide
accugugucuuuugcgguc

SEQ ID NO: 2020666 - RNA, 19 nt, Artificial Sequence
  Description of Artificial Sequence: Synthetic oligonucleotide
gaggucaagacucuugggu

SEQ ID NO: 2020667 - RNA, 19 nt, Artificial Sequence
  Description of Artificial Sequence: Synthetic oligonucleotide
guggguccagaauggauag

SEQ ID NO: 2020668 - RNA, 19 nt, Artificial Sequence
  Description of Artificial Sequence: Synthetic oligonucleotide
ucucgagauaucccacaca

SEQ ID NO: 2020669 - RNA, 19 nt, Artificial Sequence
  Description of Artificial Sequence: Synthetic oligonucleotide
uuuccucgaugauugucca

SEQ ID NO: 2020670 - RNA, 19 nt, Artificial Sequence
  Description of Artificial Sequence: Synthetic oligonucleotide
uagacagugcugagggaga

SEQ ID NO: 2020671 - RNA, 19 nt, Artificial Sequence
  Description of Artificial Sequence: Synthetic oligonucleotide
uucgguuggccccuucaca

SEQ ID NO: 2020672 - RNA, 19 nt, Artificial Sequence
  Description of Artificial Sequence: Synthetic oligonucleotide
uuggagaccggaagaggga

SEQ ID NO: 2020673 - RNA, 19 nt, Artificial Sequence
  Description of Artificial Sequence: Synthetic oligonucleotide
ucacccugacuugcgaggg

SEQ ID NO: 2020674 - RNA, 19 nt, Artificial Sequence
  Description of Artificial Sequence: Synthetic oligonucleotide
caggacagacuuugggacc

SEQ ID NO: 2020675 - RNA, 19 nt, Artificial Sequence
  Description of Artificial Sequence: Synthetic oligonucleotide
ucuugacacggcucuggcc

SEQ ID NO: 2020676 - RNA, 19 nt, Artificial Sequence
  Description of Artificial Sequence: Synthetic oligonucleotide
uuucgguuggccccuucac

SEQ ID NO: 2020677 - RNA, 19 nt, Artificial Sequence
  Description of Artificial Sequence: Synthetic oligonucleotide
guugacacgguaacaguac

SEQ ID NO: 2020678 - RNA, 19 nt, Artificial Sequence
  Description of Artificial Sequence: Synthetic oligonucleotide
aggggagucgcaaaugcag

SEQ ID NO: 2020679 - RNA, 19 nt, Artificial Sequence
  Description of Artificial Sequence: Synthetic oligonucleotide
gacuggagaguuacugucc

SEQ ID NO: 2020680 - RNA, 19 nt, Artificial Sequence
  Description of Artificial Sequence: Synthetic oligonucleotide
uuguccagugaguuccaca

SEQ ID NO: 2020681 - RNA, 19 nt, Artificial Sequence
  Description of Artificial Sequence: Synthetic oligonucleotide
uccuguuuuggcucuugac

SEQ ID NO: 2020682 - RNA, 19 nt, Artificial Sequence
  Description of Artificial Sequence: Synthetic oligonucleotide
ugguacccagauccacugg

SEQ ID NO: 2020683 - RNA, 19 nt, Artificial Sequence
  Description of Artificial Sequence: Synthetic oligonucleotide
gaaacaagcgccgguugac

SEQ ID NO: 2020684 - RNA, 19 nt, Artificial Sequence
  Description of Artificial Sequence: Synthetic oligonucleotide
aggucaagacucuugggua

SEQ ID NO: 2020685 - RNA, 19 nt, Artificial Sequence
  Description of Artificial Sequence: Synthetic oligonucleotide
uuacuguccagggacccug

SEQ ID NO: 2020686 - RNA, 19 nt, Artificial Sequence
  Description of Artificial Sequence: Synthetic oligonucleotide
aggugggauagaguucacc

SEQ ID NO: 2020687 - RNA, 19 nt, Artificial Sequence
  Description of Artificial Sequence: Synthetic oligonucleotide
cucgaaaccucugaagcuc

SEQ ID NO: 2020688 - RNA, 19 nt, Artificial Sequence
  Description of Artificial Sequence: Synthetic oligonucleotide
cugggaacacagcuucagg

SEQ ID NO: 2020689 - RNA, 19 nt, Artificial Sequence
  Description of Artificial Sequence: Synthetic oligonucleotide
uggauagugggaugcucac

SEQ ID NO: 2020690 - RNA, 19 nt, Artificial Sequence
  Description of Artificial Sequence: Synthetic oligonucleotide
uccgccagagucucagggc

SEQ ID NO: 2020691 - RNA, 19 nt, Artificial Sequence
  Description of Artificial Sequence: Synthetic oligonucleotide
ugguuucucgaaaccucug

SEQ ID NO: 2020692 - RNA, 19 nt, Artificial Sequence
  Description of Artificial Sequence: Synthetic oligonucleotide
gucccauaccuuucgguug

SEQ ID NO: 2020693 - RNA, 19 nt, Artificial Sequence
  Description of Artificial Sequence: Synthetic oligonucleotide
cucuuuguugguuucucga

SEQ ID NO: 2020694 - RNA, 19 nt, Artificial Sequence
  Description of Artificial Sequence: Synthetic oligonucleotide
caagcgccgguugacacgg

SEQ ID NO: 2020695 - RNA, 19 nt, Artificial Sequence
  Description of Artificial Sequence: Synthetic oligonucleotide
guugcuacaguccuguuuu

SEQ ID NO: 2020696 - RNA, 19 nt, Artificial Sequence
  Description of Artificial Sequence: Synthetic oligonucleotide
caauccaaucauagcccag

SEQ ID NO: 2020697 - RNA, 19 nt, Artificial Sequence
  Description of Artificial Sequence: Synthetic oligonucleotide
cuccgccagagucucaggg

SEQ ID NO: 2020698 - RNA, 19 nt, Artificial Sequence
  Description of Artificial Sequence: Synthetic oligonucleotide
cacgguaacaguacacaca

SEQ ID NO: 2020699 - RNA, 19 nt, Artificial Sequence
  Description of Artificial Sequence: Synthetic oligonucleotide
gagaguuacuguccaggga

SEQ ID NO: 2020700 - RNA, 19 nt, Artificial Sequence
  Description of Artificial Sequence: Synthetic oligonucleotide
aaacaagcgccgguugaca

SEQ ID NO: 2020701 - RNA, 19 nt, Artificial Sequence
  Description of Artificial Sequence: Synthetic oligonucleotide
gugguacccagauccacug

SEQ ID NO: 2020702 - RNA, 19 nt, Artificial Sequence
  Description of Artificial Sequence: Synthetic oligonucleotide
uguuuccucgaugauuguc

SEQ ID NO: 2020703 - RNA, 19 nt, Artificial Sequence
  Description of Artificial Sequence: Synthetic oligonucleotide
gggaccugugucuuuugcg

SEQ ID NO: 2020704 - RNA, 19 nt, Artificial Sequence
  Description of Artificial Sequence: Synthetic oligonucleotide
uuacagacucuugggagaa

SEQ ID NO: 2020705 - RNA, 19 nt, Artificial Sequence
  Description of Artificial Sequence: Synthetic oligonucleotide
uuacuggugacuggagagu

SEQ ID NO: 2020706 - RNA, 19 nt, Artificial Sequence
  Description of Artificial Sequence: Synthetic oligonucleotide
ggcuuagauggcuugcuug

SEQ ID NO: 2020707 - RNA, 19 nt, Artificial Sequence
  Description of Artificial Sequence: Synthetic oligonucleotide
uucacccuggaguucuccu

SEQ ID NO: 2020708 - RNA, 19 nt, Artificial Sequence
  Description of Artificial Sequence: Synthetic oligonucleotide
auggauagugggaugcuca

SEQ ID NO: 2020709 - RNA, 19 nt, Artificial Sequence
  Description of Artificial Sequence: Synthetic oligonucleotide
ggcacauggcaucaugccc

SEQ ID NO: 2020710 - RNA, 19 nt, Artificial Sequence
  Description of Artificial Sequence: Synthetic oligonucleotide
cagaauggauagugggaug

SEQ ID NO: 2020711 - RNA, 19 nt, Artificial Sequence
  Description of Artificial Sequence: Synthetic oligonucleotide
gaacucucuugggacagug

SEQ ID NO: 2020712 - RNA, 19 nt, Artificial Sequence
  Description of Artificial Sequence: Synthetic oligonucleotide
accggaagagggaugagcu

SEQ ID NO: 2020713 - RNA, 19 nt, Artificial Sequence
  Description of Artificial Sequence: Synthetic oligonucleotide
ugaugugguggguccagaa

SEQ ID NO: 2020714 - RNA, 19 nt, Artificial Sequence
  Description of Artificial Sequence: Synthetic oligonucleotide
uggucucgagauaucccac

SEQ ID NO: 2020715 - RNA, 19 nt, Artificial Sequence
  Description of Artificial Sequence: Synthetic oligonucleotide
guuggucucgagauauccc

SEQ ID NO: 2020716 - RNA, 19 nt, Artificial Sequence
  Description of Artificial Sequence: Synthetic oligonucleotide
acacgugucuuuuguccug

SEQ ID NO: 2020717 - RNA, 19 nt, Artificial Sequence
  Description of Artificial Sequence: Synthetic oligonucleotide
uuuuggcucuugacacggc

SEQ ID NO: 2020718 - RNA, 19 nt, Artificial Sequence
  Description of Artificial Sequence: Synthetic oligonucleotide
uacacacacucgugguccc

SEQ ID NO: 2020719 - RNA, 19 nt, Artificial Sequence
  Description of Artificial Sequence: Synthetic oligonucleotide
gacuuugggaccugugucu

SEQ ID NO: 2020720 - RNA, 19 nt, Artificial Sequence
  Description of Artificial Sequence: Synthetic oligonucleotide
ucuugggagaaggucacuu

SEQ ID NO: 2020721 - RNA, 19 nt, Artificial Sequence
  Description of Artificial Sequence: Synthetic oligonucleotide
auccaaucauagcccaggu

SEQ ID NO: 2020722 - RNA, 19 nt, Artificial Sequence
  Description of Artificial Sequence: Synthetic oligonucleotide
ccacacgugucuuuugucc

SEQ ID NO: 2020723 - RNA, 19 nt, Artificial Sequence
  Description of Artificial Sequence: Synthetic oligonucleotide
gucucgagauaucccacac

SEQ ID NO: 2020724 - RNA, 19 nt, Artificial Sequence
  Description of Artificial Sequence: Synthetic oligonucleotide
cucuaaguugcugcuguug

SEQ ID NO: 2020725 - RNA, 19 nt, Artificial Sequence
  Description of Artificial Sequence: Synthetic oligonucleotide
ucgugguccccuuccacac

SEQ ID NO: 2020726 - RNA, 19 nt, Artificial Sequence
  Description of Artificial Sequence: Synthetic oligonucleotide
cagguauggcaggaaacgc

SEQ ID NO: 2020727 - RNA, 19 nt, Artificial Sequence
  Description of Artificial Sequence: Synthetic oligonucleotide
aggcauccgguuuacuggu

SEQ ID NO: 2020728 - RNA, 19 nt, Artificial Sequence
  Description of Artificial Sequence: Synthetic oligonucleotide
cuaugaauccgauacugau

SEQ ID NO: 2020729 - RNA, 19 nt, Artificial Sequence
  Description of Artificial Sequence: Synthetic oligonucleotide
gcuagcaaggguacugagg

SEQ ID NO: 2020730 - RNA, 19 nt, Artificial Sequence
  Description of Artificial Sequence: Synthetic oligonucleotide
uuccucgaugauuguccag

SEQ ID NO: 2020731 - RNA, 19 nt, Artificial Sequence
  Description of Artificial Sequence: Synthetic oligonucleotide
ggucaagacucuuggguac

SEQ ID NO: 2020732 - RNA, 19 nt, Artificial Sequence
  Description of Artificial Sequence: Synthetic oligonucleotide
cugaccggcacauggcauc

SEQ ID NO: 2020733 - RNA, 19 nt, Artificial Sequence
  Description of Artificial Sequence: Synthetic oligonucleotide
uugggcuuagauggcuugc

SEQ ID NO: 2020734 - RNA, 19 nt, Artificial Sequence
  Description of Artificial Sequence: Synthetic oligonucleotide
ugaauccgauacugaugug

SEQ ID NO: 2020735 - RNA, 19 nt, Artificial Sequence
  Description of Artificial Sequence: Synthetic oligonucleotide
guccugugagcuuggggcc

SEQ ID NO: 2020736 - RNA, 19 nt, Artificial Sequence
  Description of Artificial Sequence: Synthetic oligonucleotide
aggacagacuuugggaccu

SEQ ID NO: 2020737 - RNA, 19 nt, Artificial Sequence
  Description of Artificial Sequence: Synthetic oligonucleotide
uuugggaccugugucuuuu

SEQ ID NO: 2020738 - RNA, 19 nt, Artificial Sequence
  Description of Artificial Sequence: Synthetic oligonucleotide
acggcucuggccacugacc

SEQ ID NO: 2020739 - RNA, 19 nt, Artificial Sequence
  Description of Artificial Sequence: Synthetic oligonucleotide
gagucucagggcccuguug

SEQ ID NO: 2020740 - RNA, 19 nt, Artificial Sequence
  Description of Artificial Sequence: Synthetic oligonucleotide
agugguacccagauccacu

SEQ ID NO: 2020741 - RNA, 19 nt, Artificial Sequence
  Description of Artificial Sequence: Synthetic oligonucleotide
cucagacuuuggagggagg

SEQ ID NO: 2020742 - RNA, 19 nt, Artificial Sequence
  Description of Artificial Sequence: Synthetic oligonucleotide
gauaucccacacaggcggc

SEQ ID NO: 2020743 - RNA, 19 nt, Artificial Sequence
  Description of Artificial Sequence: Synthetic oligonucleotide
ggaacacagcuucagggga

SEQ ID NO: 2020744 - RNA, 19 nt, Artificial Sequence
  Description of Artificial Sequence: Synthetic oligonucleotide
ggguccagaauggauagug

SEQ ID NO: 2020745 - RNA, 19 nt, Artificial Sequence
  Description of Artificial Sequence: Synthetic oligonucleotide
aucagcuguguuuccucga

SEQ ID NO: 2020746 - RNA, 19 nt, Artificial Sequence
  Description of Artificial Sequence: Synthetic oligonucleotide
aguagacagugcugaggga

SEQ ID NO: 2020747 - RNA, 19 nt, Artificial Sequence
  Description of Artificial Sequence: Synthetic oligonucleotide
gccuaaguuggaugggucc

SEQ ID NO: 2020748 - RNA, 19 nt, Artificial Sequence
  Description of Artificial Sequence: Synthetic oligonucleotide
cccugcaauccaaucauag

SEQ ID NO: 2020749 - RNA, 19 nt, Artificial Sequence
  Description of Artificial Sequence: Synthetic oligonucleotide
gguuuuaucagcuguguuu

SEQ ID NO: 2020750 - RNA, 19 nt, Artificial Sequence
  Description of Artificial Sequence: Synthetic oligonucleotide
acuugcgagggcuccgcca

SEQ ID NO: 2020751 - RNA, 19 nt, Artificial Sequence
  Description of Artificial Sequence: Synthetic oligonucleotide
cauccgguuuacuggugac

SEQ ID NO: 2020752 - RNA, 19 nt, Artificial Sequence
  Description of Artificial Sequence: Synthetic oligonucleotide
ugcucacccugacuugcga

SEQ ID NO: 2020753 - RNA, 19 nt, Artificial Sequence
  Description of Artificial Sequence: Synthetic oligonucleotide
auccgauacugauguggug

SEQ ID NO: 2020754 - RNA, 19 nt, Artificial Sequence
  Description of Artificial Sequence: Synthetic oligonucleotide
gagugucagaugcaucaaa

SEQ ID NO: 2020755 - RNA, 19 nt, Artificial Sequence
  Description of Artificial Sequence: Synthetic oligonucleotide
uuggccccuucacagcuuc

SEQ ID NO: 2020756 - RNA, 19 nt, Artificial Sequence
  Description of Artificial Sequence: Synthetic oligonucleotide
accggcacauggcaucaug

SEQ ID NO: 2020757 - RNA, 19 nt, Artificial Sequence
  Description of Artificial Sequence: Synthetic oligonucleotide
ggacccugcaauccaauca

SEQ ID NO: 2020758 - RNA, 19 nt, Artificial Sequence
  Description of Artificial Sequence: Synthetic oligonucleotide
cuuggguacagagcuuuuc

SEQ ID NO: 2020759 - RNA, 19 nt, Artificial Sequence
  Description of Artificial Sequence: Synthetic oligonucleotide
ggaugucccagcccaguag

SEQ ID NO: 2020760 - RNA, 19 nt, Artificial Sequence
  Description of Artificial Sequence: Synthetic oligonucleotide
cacguggcaggugggauag

SEQ ID NO: 2020761 - RNA, 19 nt, Artificial Sequence
  Description of Artificial Sequence: Synthetic oligonucleotide
cacccuggaguucuccuug

SEQ ID NO: 2020762 - RNA, 19 nt, Artificial Sequence
  Description of Artificial Sequence: Synthetic oligonucleotide
uuuugcggucccauaccuu

SEQ ID NO: 2020763 - RNA, 19 nt, Artificial Sequence
  Description of Artificial Sequence: Synthetic oligonucleotide
auagugggaugcucacccu

SEQ ID NO: 2020764 - RNA, 19 nt, Artificial Sequence
  Description of Artificial Sequence: Synthetic oligonucleotide
gcauuacagacucuuggga

SEQ ID NO: 2020765 - RNA, 19 nt, Artificial Sequence
  Description of Artificial Sequence: Synthetic oligonucleotide
agaguucacccuggaguuc

SEQ ID NO: 2020766 - RNA, 19 nt, Artificial Sequence
  Description of Artificial Sequence: Synthetic oligonucleotide
agccuaaguuggauggguc

SEQ ID NO: 2020767 - RNA, 19 nt, Artificial Sequence
  Description of Artificial Sequence: Synthetic oligonucleotide
gguuucucgaaaccucuga

SEQ ID NO: 2020768 - RNA, 19 nt, Artificial Sequence
  Description of Artificial Sequence: Synthetic oligonucleotide
agcuuuucucagacuuugg

SEQ ID NO: 2020769 - RNA, 19 nt, Artificial Sequence
  Description of Artificial Sequence: Synthetic oligonucleotide
aaggucacuuugggcuuag

SEQ ID NO: 2020770 - RNA, 19 nt, Artificial Sequence
  Description of Artificial Sequence: Synthetic oligonucleotide
cugggguguuggcacgugg

SEQ ID NO: 2020771 - RNA, 19 nt, Artificial Sequence
  Description of Artificial Sequence: Synthetic oligonucleotide
gacagaugucggcgcuggg

SEQ ID NO: 2020772 - RNA, 19 nt, Artificial Sequence
  Description of Artificial Sequence: Synthetic oligonucleotide
ugggcuuagauggcuugcu

SEQ ID NO: 2020773 - RNA, 19 nt, Artificial Sequence
  Description of Artificial Sequence: Synthetic oligonucleotide
ggagucgcaaaugcagucc

SEQ ID NO: 2020774 - RNA, 19 nt, Artificial Sequence
  Description of Artificial Sequence: Synthetic oligonucleotide
ccagguuuuaucagcugug

SEQ ID NO: 2020775 - RNA, 19 nt, Artificial Sequence
  Description of Artificial Sequence: Synthetic oligonucleotide
guauggcaggaaacgccgg

SEQ ID NO: 2020776 - RNA, 19 nt, Artificial Sequence
  Description of Artificial Sequence: Synthetic oligonucleotide
gacccugcaauccaaucau

SEQ ID NO: 2020777 - RNA, 19 nt, Artificial Sequence
  Description of Artificial Sequence: Synthetic oligonucleotide
ggaaacaagcgccgguuga

SEQ ID NO: 2020778 - RNA, 19 nt, Artificial Sequence
  Description of Artificial Sequence: Synthetic oligonucleotide
ugucuuuugcggucccaua

SEQ ID NO: 2020779 - RNA, 19 nt, Artificial Sequence
  Description of Artificial Sequence: Synthetic oligonucleotide
uucucagacuuuggaggga

SEQ ID NO: 2020780 - RNA, 19 nt, Artificial Sequence
  Description of Artificial Sequence: Synthetic oligonucleotide
gggacagugacaucucuaa

SEQ ID NO: 2020781 - RNA, 19 nt, Artificial Sequence
  Description of Artificial Sequence: Synthetic oligonucleotide
uccgucuaugaauccgaua

SEQ ID NO: 2020782 - RNA, 19 nt, Artificial Sequence
  Description of Artificial Sequence: Synthetic oligonucleotide
uuccgucuaugaauccgau

SEQ ID NO: 2020783 - RNA, 19 nt, Artificial Sequence
  Description of Artificial Sequence: Synthetic oligonucleotide
gcaauccaaucauagccca

SEQ ID NO: 2020784 - RNA, 19 nt, Artificial Sequence
  Description of Artificial Sequence: Synthetic oligonucleotide
ucuugacaggacagacuuu

SEQ ID NO: 2020785 - RNA, 19 nt, Artificial Sequence
  Description of Artificial Sequence: Synthetic oligonucleotide
cucucuugggacagugaca

SEQ ID NO: 2020786 - RNA, 19 nt, Artificial Sequence
  Description of Artificial Sequence: Synthetic oligonucleotide
gagaagaaggcauccgguu

SEQ ID NO: 2020787 - RNA, 19 nt, Artificial Sequence
  Description of Artificial Sequence: Synthetic oligonucleotide
aaacgccggcugcucucag

SEQ ID NO: 2020788 - RNA, 19 nt, Artificial Sequence
  Description of Artificial Sequence: Synthetic oligonucleotide
aggaaacgccggcugcucu

SEQ ID NO: 2020789 - RNA, 19 nt, Artificial Sequence
  Description of Artificial Sequence: Synthetic oligonucleotide
cucgugguccccuuccaca

SEQ ID NO: 2020790 - RNA, 19 nt, Artificial Sequence
  Description of Artificial Sequence: Synthetic oligonucleotide
caucaaagcuuuuccgucu

SEQ ID NO: 2020791 - RNA, 19 nt, Artificial Sequence
  Description of Artificial Sequence: Synthetic oligonucleotide
caucucuaaguugcugcug

SEQ ID NO: 2020792 - RNA, 19 nt, Artificial Sequence
  Description of Artificial Sequence: Synthetic oligonucleotide
cacuggaaacaagcgccgg

SEQ ID NO: 2020793 - RNA, 19 nt, Artificial Sequence
  Description of Artificial Sequence: Synthetic oligonucleotide
ccaaucauagcccagguau

SEQ ID NO: 2020794 - RNA, 19 nt, Artificial Sequence
  Description of Artificial Sequence: Synthetic oligonucleotide
ugacuugcgagggcuccgc

SEQ ID NO: 2020795 - RNA, 19 nt, Artificial Sequence
  Description of Artificial Sequence: Synthetic oligonucleotide
cacggcucuggccacugac

SEQ ID NO: 2020796 - RNA, 19 nt, Artificial Sequence
  Description of Artificial Sequence: Synthetic oligonucleotide
agaggaccagaggucaaga

SEQ ID NO: 2020797 - RNA, 19 nt, Artificial Sequence
  Description of Artificial Sequence: Synthetic oligonucleotide
ugaccggcacauggcauca

SEQ ID NO: 2020798 - RNA, 19 nt, Artificial Sequence
  Description of Artificial Sequence: Synthetic oligonucleotide
ugugucuuuugcgguccca

SEQ ID NO: 2020799 - RNA, 19 nt, Artificial Sequence
  Description of Artificial Sequence: Synthetic oligonucleotide
gagucgcaaaugcaguccu

SEQ ID NO: 2020800 - RNA, 19 nt, Artificial Sequence
  Description of Artificial Sequence: Synthetic oligonucleotide
cuuucgguuggccccuuca

SEQ ID NO: 2020801 - RNA, 19 nt, Artificial Sequence
  Description of Artificial Sequence: Synthetic oligonucleotide
uaaguuggauggguccuua

SEQ ID NO: 2020802 - RNA, 19 nt, Artificial Sequence
  Description of Artificial Sequence: Synthetic oligonucleotide
gcugcucucaggcauuaca

SEQ ID NO: 2020803 - RNA, 19 nt, Artificial Sequence
  Description of Artificial Sequence: Synthetic oligonucleotide
cacacaggcggcaaguggu

SEQ ID NO: 2020804 - RNA, 19 nt, Artificial Sequence
  Description of Artificial Sequence: Synthetic oligonucleotide
ucacccuggaguucuccuu

SEQ ID NO: 2020805 - RNA, 19 nt, Artificial Sequence
  Description of Artificial Sequence: Synthetic oligonucleotide
ugugagcuuggggccacug

SEQ ID NO: 2020806 - RNA, 19 nt, Artificial Sequence
  Description of Artificial Sequence: Synthetic oligonucleotide
agggcuccgccagagucuc

SEQ ID NO: 2020807 - RNA, 19 nt, Artificial Sequence
  Description of Artificial Sequence: Synthetic oligonucleotide
cuacaguccuguuuuggcu

SEQ ID NO: 2020808 - RNA, 19 nt, Artificial Sequence
  Description of Artificial Sequence: Synthetic oligonucleotide
uugacacggcucuggccac

SEQ ID NO: 2020809 - RNA, 19 nt, Artificial Sequence
  Description of Artificial Sequence: Synthetic oligonucleotide
cugacuugcgagggcuccg

SEQ ID NO: 2020810 - RNA, 19 nt, Artificial Sequence
  Description of Artificial Sequence: Synthetic oligonucleotide
gguggcugacagaugucgg

SEQ ID NO: 2020811 - RNA, 19 nt, Artificial Sequence
  Description of Artificial Sequence: Synthetic oligonucleotide
uccugugagcuuggggcca

SEQ ID NO: 2020812 - RNA, 19 nt, Artificial Sequence
  Description of Artificial Sequence: Synthetic oligonucleotide
cucgaugauuguccaguga

SEQ ID NO: 2020813 - RNA, 19 nt, Artificial Sequence
  Description of Artificial Sequence: Synthetic oligonucleotide
ccgguugacacgguaacag

SEQ ID NO: 2020814 - RNA, 19 nt, Artificial Sequence
  Description of Artificial Sequence: Synthetic oligonucleotide
ugaguuccacacgugucuu

SEQ ID NO: 2020815 - RNA, 19 nt, Artificial Sequence
  Description of Artificial Sequence: Synthetic oligonucleotide
agucgcaaaugcaguccuc

SEQ ID NO: 2020816 - RNA, 19 nt, Artificial Sequence
  Description of Artificial Sequence: Synthetic oligonucleotide
uugcggucccauaccuuuc

SEQ ID NO: 2020817 - RNA, 19 nt, Artificial Sequence
  Description of Artificial Sequence: Synthetic oligonucleotide
gcugguggcugacagaugu

SEQ ID NO: 2020818 - RNA, 19 nt, Artificial Sequence
  Description of Artificial Sequence: Synthetic oligonucleotide
auaucccacacaggcggca

SEQ ID NO: 2020819 - RNA, 19 nt, Artificial Sequence
  Description of Artificial Sequence: Synthetic oligonucleotide
uggugacuggagaguuacu

SEQ ID NO: 2020820 - RNA, 19 nt, Artificial Sequence
  Description of Artificial Sequence: Synthetic oligonucleotide
acccugacuugcgagggcu

SEQ ID NO: 2020821 - RNA, 19 nt, Artificial Sequence
  Description of Artificial Sequence: Synthetic oligonucleotide
gacuugcgagggcuccgcc

SEQ ID NO: 2020822 - RNA, 19 nt, Artificial Sequence
  Description of Artificial Sequence: Synthetic oligonucleotide
gugggauagaguucacccu

SEQ ID NO: 2020823 - RNA, 19 nt, Artificial Sequence
  Description of Artificial Sequence: Synthetic oligonucleotide
auccgguuuacuggugacu

SEQ ID NO: 2020824 - RNA, 19 nt, Artificial Sequence
  Description of Artificial Sequence: Synthetic oligonucleotide
ugcaguccucuuuguuggu

SEQ ID NO: 2020825 - RNA, 19 nt, Artificial Sequence
  Description of Artificial Sequence: Synthetic oligonucleotide
ucucagggcccuguugguc

SEQ ID NO: 2020826 - RNA, 19 nt, Artificial Sequence
  Description of Artificial Sequence: Synthetic oligonucleotide
cacuggcacuggaaacaag

SEQ ID NO: 2020827 - RNA, 19 nt, Artificial Sequence
  Description of Artificial Sequence: Synthetic oligonucleotide
aggaugucccagcccagua

SEQ ID NO: 2020828 - RNA, 19 nt, Artificial Sequence
  Description of Artificial Sequence: Synthetic oligonucleotide
ucgcaaaugcaguccucuu

SEQ ID NO: 2020829 - RNA, 19 nt, Artificial Sequence
  Description of Artificial Sequence: Synthetic oligonucleotide
ccggcacauggcaucaugc

SEQ ID NO: 2020830 - RNA, 19 nt, Artificial Sequence
  Description of Artificial Sequence: Synthetic oligonucleotide
uaccuuucgguuggccccu

SEQ ID NO: 2020831 - RNA, 19 nt, Artificial Sequence
  Description of Artificial Sequence: Synthetic oligonucleotide
gguuuacuggugacuggag

SEQ ID NO: 2020832 - RNA, 19 nt, Artificial Sequence
  Description of Artificial Sequence: Synthetic oligonucleotide
gaaacgccggcugcucuca

SEQ ID NO: 2020833 - RNA, 19 nt, Artificial Sequence
  Description of Artificial Sequence: Synthetic oligonucleotide
cacugaccggcacauggca

SEQ ID NO: 2020834 - RNA, 19 nt, Artificial Sequence
  Description of Artificial Sequence: Synthetic oligonucleotide
cuuuugcggucccauaccu

SEQ ID NO: 2020835 - RNA, 19 nt, Artificial Sequence
  Description of Artificial Sequence: Synthetic oligonucleotide
ggucucgagauaucccaca

SEQ ID NO: 2020836 - RNA, 19 nt, Artificial Sequence
  Description of Artificial Sequence: Synthetic oligonucleotide
gucaagacucuuggguaca

SEQ ID NO: 2020837 - RNA, 19 nt, Artificial Sequence
  Description of Artificial Sequence: Synthetic oligonucleotide
gguggguccagaauggaua

SEQ ID NO: 2020838 - RNA, 19 nt, Artificial Sequence
  Description of Artificial Sequence: Synthetic oligonucleotide
ggcugacagaugucggcgc

SEQ ID NO: 2020839 - RNA, 19 nt, Artificial Sequence
  Description of Artificial Sequence: Synthetic oligonucleotide
augcucacccugacuugcg

SEQ ID NO: 2020840 - RNA, 19 nt, Artificial Sequence
  Description of Artificial Sequence: Synthetic oligonucleotide
cuguuggucucgagauauc

SEQ ID NO: 2020841 - RNA, 19 nt, Artificial Sequence
  Description of Artificial Sequence: Synthetic oligonucleotide
aguccuguuuuggcucuug

SEQ ID NO: 2020842 - RNA, 19 nt, Artificial Sequence
  Description of Artificial Sequence: Synthetic oligonucleotide
caggggagucgcaaaugca

SEQ ID NO: 2020843 - RNA, 19 nt, Artificial Sequence
  Description of Artificial Sequence: Synthetic oligonucleotide
cugugucuuuugcgguccc

SEQ ID NO: 2020844 - RNA, 19 nt, Artificial Sequence
  Description of Artificial Sequence: Synthetic oligonucleotide
gugagcuuggggccacuga

SEQ ID NO: 2020845 - RNA, 19 nt, Artificial Sequence
  Description of Artificial Sequence: Synthetic oligonucleotide
guucacccuggaguucucc

SEQ ID NO: 2020846 - RNA, 19 nt, Artificial Sequence
  Description of Artificial Sequence: Synthetic oligonucleotide
ggggcuagcaaggguacug

SEQ ID NO: 2020847 - RNA, 19 nt, Artificial Sequence
  Description of Artificial Sequence: Synthetic oligonucleotide
cagcuguguuuccucgaug

SEQ ID NO: 2020848 - RNA, 19 nt, Artificial Sequence
  Description of Artificial Sequence: Synthetic oligonucleotide
gaccugugucuuuugcggu

SEQ ID NO: 2020849 - RNA, 19 nt, Artificial Sequence
  Description of Artificial Sequence: Synthetic oligonucleotide
gguugacacgguaacagua

SEQ ID NO: 2020850 - RNA, 19 nt, Artificial Sequence
  Description of Artificial Sequence: Synthetic oligonucleotide
agcccaguagacagugcug

SEQ ID NO: 2020851 - RNA, 19 nt, Artificial Sequence
  Description of Artificial Sequence: Synthetic oligonucleotide
cugacagaugucggcgcug

SEQ ID NO: 2020852 - RNA, 19 nt, Artificial Sequence
  Description of Artificial Sequence: Synthetic oligonucleotide
cacacgugucuuuuguccu

SEQ ID NO: 2020853 - RNA, 19 nt, Artificial Sequence
  Description of Artificial Sequence: Synthetic oligonucleotide
gucgcaaaugcaguccucu

SEQ ID NO: 2020854 - RNA, 19 nt, Artificial Sequence
  Description of Artificial Sequence: Synthetic oligonucleotide
ucugggguguuggcacgug

SEQ ID NO: 2020855 - RNA, 19 nt, Artificial Sequence
  Description of Artificial Sequence: Synthetic oligonucleotide
agcuucaggggagucgcaa

SEQ ID NO: 2020856 - RNA, 19 nt, Artificial Sequence
  Description of Artificial Sequence: Synthetic oligonucleotide
ggauagugggaugcucacc

SEQ ID NO: 2020857 - RNA, 19 nt, Artificial Sequence
  Description of Artificial Sequence: Synthetic oligonucleotide
gugggaugcucacccugac

SEQ ID NO: 2020858 - RNA, 19 nt, Artificial Sequence
  Description of Artificial Sequence: Synthetic oligonucleotide
guacccagauccacuggca

SEQ ID NO: 2020859 - RNA, 19 nt, Artificial Sequence
  Description of Artificial Sequence: Synthetic oligonucleotide
gaauggauagugggaugcu

SEQ ID NO: 2020860 - RNA, 19 nt, Artificial Sequence
  Description of Artificial Sequence: Synthetic oligonucleotide
gccccuucacagcuucagg

SEQ ID NO: 2020861 - RNA, 19 nt, Artificial Sequence
  Description of Artificial Sequence: Synthetic oligonucleotide
gcauccgguuuacugguga

SEQ ID NO: 2020862 - RNA, 19 nt, Artificial Sequence
  Description of Artificial Sequence: Synthetic oligonucleotide
cacccugacuugcgagggc

SEQ ID NO: 2020863 - RNA, 19 nt, Artificial Sequence
  Description of Artificial Sequence: Synthetic oligonucleotide
cagugaguuccacacgugu

SEQ ID NO: 2020864 - RNA, 19 nt, Artificial Sequence
  Description of Artificial Sequence: Synthetic oligonucleotide
gcucugggguguuggcacg

SEQ ID NO: 2020865 - RNA, 19 nt, Artificial Sequence
  Description of Artificial Sequence: Synthetic oligonucleotide
cuugucauaccagguuuua

SEQ ID NO: 2020866 - RNA, 19 nt, Artificial Sequence
  Description of Artificial Sequence: Synthetic oligonucleotide
uguuggcacguggcaggug

SEQ ID NO: 2020867 - RNA, 19 nt, Artificial Sequence
  Description of Artificial Sequence: Synthetic oligonucleotide
agaacucucuugggacagu

SEQ ID NO: 2020868 - RNA, 19 nt, Artificial Sequence
  Description of Artificial Sequence: Synthetic oligonucleotide
ccugugucuuuugcggucc

SEQ ID NO: 2020869 - RNA, 19 nt, Artificial Sequence
  Description of Artificial Sequence: Synthetic oligonucleotide
ggauagaguucacccugga

SEQ ID NO: 2020870 - RNA, 19 nt, Artificial Sequence
  Description of Artificial Sequence: Synthetic oligonucleotide
ggcuccgccagagucucag

SEQ ID NO: 2020871 - RNA, 19 nt, Artificial Sequence
  Description of Artificial Sequence: Synthetic oligonucleotide
cacaggcggcaagugguac

SEQ ID NO: 2020872 - RNA, 19 nt, Artificial Sequence
  Description of Artificial Sequence: Synthetic oligonucleotide
cacacucgugguccccuuc

SEQ ID NO: 2020873 - RNA, 19 nt, Artificial Sequence
  Description of Artificial Sequence: Synthetic oligonucleotide
acugaccggcacauggcau

SEQ ID NO: 2020874 - RNA, 19 nt, Artificial Sequence
  Description of Artificial Sequence: Synthetic oligonucleotide
uugcgagggcuccgccaga

SEQ ID NO: 2020875 - RNA, 19 nt, Artificial Sequence
  Description of Artificial Sequence: Synthetic oligonucleotide
ccucgaugauuguccagug

SEQ ID NO: 2020876 - RNA, 19 nt, Artificial Sequence
  Description of Artificial Sequence: Synthetic oligonucleotide
ggucccauaccuuucgguu

SEQ ID NO: 2020877 - RNA, 19 nt, Artificial Sequence
  Description of Artificial Sequence: Synthetic oligonucleotide
gcccaguagacagugcuga

SEQ ID NO: 2020878 - RNA, 19 nt, Artificial Sequence
  Description of Artificial Sequence: Synthetic oligonucleotide
agcgccgguugacacggua

SEQ ID NO: 2020879 - RNA, 19 nt, Artificial Sequence
  Description of Artificial Sequence: Synthetic oligonucleotide
gaaggucacuuugggcuua

SEQ ID NO: 2020880 - RNA, 19 nt, Artificial Sequence
  Description of Artificial Sequence: Synthetic oligonucleotide
gggacccugcaauccaauc

SEQ ID NO: 2020881 - RNA, 19 nt, Artificial Sequence
  Description of Artificial Sequence: Synthetic oligonucleotide
cggcacauggcaucaugcc

SEQ ID NO: 2020882 - RNA, 19 nt, Artificial Sequence
  Description of Artificial Sequence: Synthetic oligonucleotide
gggguguuggcacguggca

SEQ ID NO: 2020883 - RNA, 19 nt, Artificial Sequence
  Description of Artificial Sequence: Synthetic oligonucleotide
cuugggagaaggucacuuu

SEQ ID NO: 2020884 - RNA, 19 nt, Artificial Sequence
  Description of Artificial Sequence: Synthetic oligonucleotide
caggaaacgccggcugcuc

SEQ ID NO: 2020885 - RNA, 19 nt, Artificial Sequence
  Description of Artificial Sequence: Synthetic oligonucleotide
cucuugggacagugacauc

SEQ ID NO: 2020886 - RNA, 19 nt, Artificial Sequence
  Description of Artificial Sequence: Synthetic oligonucleotide
caggugggauagaguucac

SEQ ID NO: 2020887 - RNA, 19 nt, Artificial Sequence
  Description of Artificial Sequence: Synthetic oligonucleotide
caagacucuuggguacaga

SEQ ID NO: 2020888 - RNA, 19 nt, Artificial Sequence
  Description of Artificial Sequence: Synthetic oligonucleotide
cagauccacuggcacugga

SEQ ID NO: 2020889 - RNA, 19 nt, Artificial Sequence
  Description of Artificial Sequence: Synthetic oligonucleotide
agccagagugucagaugca

SEQ ID NO: 2020890 - RNA, 19 nt, Artificial Sequence
  Description of Artificial Sequence: Synthetic oligonucleotide
ggagaccggaagagggaug

SEQ ID NO: 2020891 - RNA, 19 nt, Artificial Sequence
  Description of Artificial Sequence: Synthetic oligonucleotide
ggaggugcaagaacucucu

SEQ ID NO: 2020892 - RNA, 19 nt, Artificial Sequence
  Description of Artificial Sequence: Synthetic oligonucleotide
cacaguccauucuggggcu

SEQ ID NO: 2020893 - RNA, 19 nt, Artificial Sequence
  Description of Artificial Sequence: Synthetic oligonucleotide
gaggaugucccagcccagu

SEQ ID NO: 2020894 - RNA, 19 nt, Artificial Sequence
  Description of Artificial Sequence: Synthetic oligonucleotide
ccggaagagggaugagcug

SEQ ID NO: 2020895 - RNA, 19 nt, Artificial Sequence
  Description of Artificial Sequence: Synthetic oligonucleotide
guuacuguccagggacccu

SEQ ID NO: 2020896 - RNA, 19 nt, Artificial Sequence
  Description of Artificial Sequence: Synthetic oligonucleotide
cagggacccugcaauccaa

SEQ ID NO: 2020897 - RNA, 19 nt, Artificial Sequence
  Description of Artificial Sequence: Synthetic oligonucleotide
gagggaugagcugguggcu

SEQ ID NO: 2020898 - RNA, 19 nt, Artificial Sequence
  Description of Artificial Sequence: Synthetic oligonucleotide
cuuagauggcuugcuuggu

SEQ ID NO: 2020899 - RNA, 19 nt, Artificial Sequence
  Description of Artificial Sequence: Synthetic oligonucleotide
cacucgugguccccuucca

SEQ ID NO: 2020900 - RNA, 19 nt, Artificial Sequence
  Description of Artificial Sequence: Synthetic oligonucleotide
ccauaccuuucgguuggcc

SEQ ID NO: 2020901 - RNA, 19 nt, Artificial Sequence
  Description of Artificial Sequence: Synthetic oligonucleotide
gaggugcaagaacucucuu

SEQ ID NO: 2020902 - RNA, 19 nt, Artificial Sequence
  Description of Artificial Sequence: Synthetic oligonucleotide
gcccuguuggucucgagau

SEQ ID NO: 2020903 - RNA, 19 nt, Artificial Sequence
  Description of Artificial Sequence: Synthetic oligonucleotide
cuggaaacaagcgccgguu

SEQ ID NO: 2020904 - RNA, 19 nt, Artificial Sequence
  Description of Artificial Sequence: Synthetic oligonucleotide
gugucuuuugcggucccau

SEQ ID NO: 2020905 - RNA, 19 nt, Artificial Sequence
  Description of Artificial Sequence: Synthetic oligonucleotide
cagccuaaguuggaugggu

SEQ ID NO: 2020906 - RNA, 19 nt, Artificial Sequence
  Description of Artificial Sequence: Synthetic oligonucleotide
agggacccugcaauccaau

SEQ ID NO: 2020907 - RNA, 19 nt, Artificial Sequence
  Description of Artificial Sequence: Synthetic oligonucleotide
gcugacagaugucggcgcu

SEQ ID NO: 2020908 - RNA, 19 nt, Artificial Sequence
  Description of Artificial Sequence: Synthetic oligonucleotide
ccagggacccugcaaucca

SEQ ID NO: 2020909 - RNA, 19 nt, Artificial Sequence
  Description of Artificial Sequence: Synthetic oligonucleotide
gucucagggcccuguuggu

SEQ ID NO: 2020910 - RNA, 19 nt, Artificial Sequence
  Description of Artificial Sequence: Synthetic oligonucleotide
cgugucuuuuguccuguga

SEQ ID NO: 2020911 - RNA, 19 nt, Artificial Sequence
  Description of Artificial Sequence: Synthetic oligonucleotide
acccugcaauccaaucaua

SEQ ID NO: 2020912 - RNA, 19 nt, Artificial Sequence
  Description of Artificial Sequence: Synthetic oligonucleotide
cgccgguugacacgguaac

SEQ ID NO: 2020913 - RNA, 19 nt, Artificial Sequence
  Description of Artificial Sequence: Synthetic oligonucleotide
cuaaguuggauggguccuu

SEQ ID NO: 2020914 - RNA, 19 nt, Artificial Sequence
  Description of Artificial Sequence: Synthetic oligonucleotide
cagacuuuggagggaggau

SEQ ID NO: 2020915 - RNA, 19 nt, Artificial Sequence
  Description of Artificial Sequence: Synthetic oligonucleotide
cgguuuacuggugacugga

SEQ ID NO: 2020916 - RNA, 19 nt, Artificial Sequence
  Description of Artificial Sequence: Synthetic oligonucleotide
ggaagagggaugagcuggu

SEQ ID NO: 2020917 - RNA, 19 nt, Artificial Sequence
  Description of Artificial Sequence: Synthetic oligonucleotide
cagcuucaggggagucgca

SEQ ID NO: 2020918 - RNA, 19 nt, Artificial Sequence
  Description of Artificial Sequence: Synthetic oligonucleotide
gccgguugacacgguaaca

SEQ ID NO: 2020919 - RNA, 19 nt, Artificial Sequence
  Description of Artificial Sequence: Synthetic oligonucleotide
cacacacucgugguccccu

SEQ ID NO: 2020920 - RNA, 19 nt, Artificial Sequence
  Description of Artificial Sequence: Synthetic oligonucleotide
ggacagacuuugggaccug

SEQ ID NO: 2020921 - RNA, 19 nt, Artificial Sequence
  Description of Artificial Sequence: Synthetic oligonucleotide
guguuggcacguggcaggu

SEQ ID NO: 2020922 - RNA, 19 nt, Artificial Sequence
  Description of Artificial Sequence: Synthetic oligonucleotide
cuuugggaccugugucuuu

SEQ ID NO: 2020923 - RNA, 19 nt, Artificial Sequence
  Description of Artificial Sequence: Synthetic oligonucleotide
gccggcugcucucaggcau

SEQ ID NO: 2020924 - RNA, 19 nt, Artificial Sequence
  Description of Artificial Sequence: Synthetic oligonucleotide
gcuguguuuccucgaugau

SEQ ID NO: 2020925 - RNA, 19 nt, Artificial Sequence
  Description of Artificial Sequence: Synthetic oligonucleotide
cuggggcucugggguguug

SEQ ID NO: 2020926 - RNA, 19 nt, Artificial Sequence
  Description of Artificial Sequence: Synthetic oligonucleotide
caguccauucuggggcucu

SEQ ID NO: 2020927 - RNA, 19 nt, Artificial Sequence
  Description of Artificial Sequence: Synthetic oligonucleotide
ccuugucauaccagguuuu

SEQ ID NO: 2020928 - RNA, 19 nt, Artificial Sequence
  Description of Artificial Sequence: Synthetic oligonucleotide
aagcgccgguugacacggu

SEQ ID NO: 2020929 - RNA, 19 nt, Artificial Sequence
  Description of Artificial Sequence: Synthetic oligonucleotide
gcgccgguugacacgguaa

SEQ ID NO: 2020930 - RNA, 19 nt, Artificial Sequence
  Description of Artificial Sequence: Synthetic oligonucleotide
cccauaccuuucgguuggc

SEQ ID NO: 2020931 - RNA, 19 nt, Artificial Sequence
  Description of Artificial Sequence: Synthetic oligonucleotide
gccugggaacacagcuuca

SEQ ID NO: 2020932 - RNA, 19 nt, Artificial Sequence
  Description of Artificial Sequence: Synthetic oligonucleotide
acguggcaggugggauaga

SEQ ID NO: 2020933 - RNA, 19 nt, Artificial Sequence
  Description of Artificial Sequence: Synthetic oligonucleotide
cagaugcaucaaagcuuuu

SEQ ID NO: 2020934 - RNA, 19 nt, Artificial Sequence
  Description of Artificial Sequence: Synthetic oligonucleotide
ggcacguggcaggugggau

SEQ ID NO: 2020935 - RNA, 19 nt, Artificial Sequence
  Description of Artificial Sequence: Synthetic oligonucleotide
cuguugcuacaguccuguu

SEQ ID NO: 2020936 - RNA, 19 nt, Artificial Sequence
  Description of Artificial Sequence: Synthetic oligonucleotide
cccuguuggucucgagaua

SEQ ID NO: 2020937 - RNA, 19 nt, Artificial Sequence
  Description of Artificial Sequence: Synthetic oligonucleotide
cgguugacacgguaacagu

SEQ ID NO: 2020938 - RNA, 19 nt, Artificial Sequence
  Description of Artificial Sequence: Synthetic oligonucleotide
cgugguccccuuccacaca

SEQ ID NO: 2020939 - RNA, 19 nt, Artificial Sequence
  Description of Artificial Sequence: Synthetic oligonucleotide
gaccggcacauggcaucau

SEQ ID NO: 2020940 - RNA, 19 nt, Artificial Sequence
  Description of Artificial Sequence: Synthetic oligonucleotide
cggucccauaccuuucggu

SEQ ID NO: 2020941 - RNA, 19 nt, Artificial Sequence
  Description of Artificial Sequence: Synthetic oligonucleotide
cgguaacaguacacacacu

SEQ ID NO: 2020942 - RNA, 19 nt, Artificial Sequence
  Description of Artificial Sequence: Synthetic oligonucleotide
caguccuguuuuggcucuu

SEQ ID NO: 2020943 - RNA, 19 nt, Artificial Sequence
  Description of Artificial Sequence: Synthetic oligonucleotide
ccggcugcucucaggcauu

SEQ ID NO: 2020944 - RNA, 19 nt, Artificial Sequence
  Description of Artificial Sequence: Synthetic oligonucleotide
gggcuccgccagagucuca

SEQ ID NO: 2020945 - RNA, 19 nt, Artificial Sequence
  Description of Artificial Sequence: Synthetic oligonucleotide
aaugaaguaaccaaaauac

SEQ ID NO: 2020946 - RNA, 19 nt, Artificial Sequence
  Description of Artificial Sequence: Synthetic oligonucleotide
uuuaguaucucuuuuagga

SEQ ID NO: 2020947 - RNA, 19 nt, Artificial Sequence
  Description of Artificial Sequence: Synthetic oligonucleotide
ucucuuuacuuauagaggg

SEQ ID NO: 2020948 - RNA, 19 nt, Artificial Sequence
  Description of Artificial Sequence: Synthetic oligonucleotide
aaccaaaauacaucagugc

SEQ ID NO: 2020949 - RNA, 19 nt, Artificial Sequence
  Description of Artificial Sequence: Synthetic oligonucleotide
ugaugaagauuucacaagg

SEQ ID NO: 2020950 - RNA, 19 nt, Artificial Sequence
  Description of Artificial Sequence: Synthetic oligonucleotide
uuuagugugagcaacucca

SEQ ID NO: 2020951 - RNA, 19 nt, Artificial Sequence
  Description of Artificial Sequence: Synthetic oligonucleotide
guaguaaaagccuuaagcc

SEQ ID NO: 2020952 - RNA, 19 nt, Artificial Sequence
  Description of Artificial Sequence: Synthetic oligonucleotide
uauagcuacacaaauuuga

SEQ ID NO: 2020953 - RNA, 19 nt, Artificial Sequence
  Description of Artificial Sequence: Synthetic oligonucleotide
ugugagaauagccaugucc

SEQ ID NO: 2020954 - RNA, 19 nt, Artificial Sequence
  Description of Artificial Sequence: Synthetic oligonucleotide
uuuacuugugacaucagca

SEQ ID NO: 2020955 - RNA, 19 nt, Artificial Sequence
  Description of Artificial Sequence: Synthetic oligonucleotide
aaguaaccaaaauacauca

SEQ ID NO: 2020956 - RNA, 19 nt, Artificial Sequence
  Description of Artificial Sequence: Synthetic oligonucleotide
auaaauauuuuggaauucc

SEQ ID NO: 2020957 - RNA, 19 nt, Artificial Sequence
  Description of Artificial Sequence: Synthetic oligonucleotide
aauuugaugaagauuucac

SEQ ID NO: 2020958 - RNA, 19 nt, Artificial Sequence
  Description of Artificial Sequence: Synthetic oligonucleotide
agcuacacaaauuugauga

SEQ ID NO: 2020959 - RNA, 19 nt, Artificial Sequence
  Description of Artificial Sequence: Synthetic oligonucleotide
caaguuuucauacacauuc

SEQ ID NO: 2020960 - RNA, 19 nt, Artificial Sequence
  Description of Artificial Sequence: Synthetic oligonucleotide
acaagguaggaauaguuac

SEQ ID NO: 2020961 - RNA, 19 nt, Artificial Sequence
  Description of Artificial Sequence: Synthetic oligonucleotide
uacuuaacccacaagguag

SEQ ID NO: 2020962 - RNA, 19 nt, Artificial Sequence
  Description of Artificial Sequence: Synthetic oligonucleotide
aaauacaucagugccacag

SEQ ID NO: 2020963 - RNA, 19 nt, Artificial Sequence
  Description of Artificial Sequence: Synthetic oligonucleotide
aagcuuguaggcuucaguc

SEQ ID NO: 2020964 - RNA, 19 nt, Artificial Sequence
  Description of Artificial Sequence: Synthetic oligonucleotide
aagaacagagccgagcgcc

SEQ ID NO: 2020965 - RNA, 19 nt, Artificial Sequence
  Description of Artificial Sequence: Synthetic oligonucleotide
auauccuuaaagucaaagg

SEQ ID NO: 2020966 - RNA, 19 nt, Artificial Sequence
  Description of Artificial Sequence: Synthetic oligonucleotide
uucucuuuacuuauagagg

SEQ ID NO: 2020967 - RNA, 19 nt, Artificial Sequence
  Description of Artificial Sequence: Synthetic oligonucleotide
uuuacuuaaugaaguaacc

SEQ ID NO: 2020968 - RNA, 19 nt, Artificial Sequence
  Description of Artificial Sequence: Synthetic oligonucleotide
aaagccuuaagcccagcgg

SEQ ID NO: 2020969 - RNA, 19 nt, Artificial Sequence
  Description of Artificial Sequence: Synthetic oligonucleotide
aaaagugacauaaauauuu

SEQ ID NO: 2020970 - RNA, 19 nt, Artificial Sequence
  Description of Artificial Sequence: Synthetic oligonucleotide
acuuauagagggaaaaggc

SEQ ID NO: 2020971 - RNA, 19 nt, Artificial Sequence
  Description of Artificial Sequence: Synthetic oligonucleotide
uuuaggagaaggcaagcag

SEQ ID NO: 2020972 - RNA, 19 nt, Artificial Sequence
  Description of Artificial Sequence: Synthetic oligonucleotide
ucuauagcuacacaaauuu

SEQ ID NO: 2020973 - RNA, 19 nt, Artificial Sequence
  Description of Artificial Sequence: Synthetic oligonucleotide
auagguuuucaucaagaac

SEQ ID NO: 2020974 - RNA, 19 nt, Artificial Sequence
  Description of Artificial Sequence: Synthetic oligonucleotide
uaaccaaaauacaucagug

SEQ ID NO: 2020975 - RNA, 19 nt, Artificial Sequence
  Description of Artificial Sequence: Synthetic oligonucleotide
uuuaguggggauuucuuag

SEQ ID NO: 2020976 - RNA, 19 nt, Artificial Sequence
  Description of Artificial Sequence: Synthetic oligonucleotide
uuucaaaucuggauugucc

SEQ ID NO: 2020977 - RNA, 19 nt, Artificial Sequence
  Description of Artificial Sequence: Synthetic oligonucleotide
cuuauagagggaaaaggcc

SEQ ID NO: 2020978 - RNA, 19 nt, Artificial Sequence
  Description of Artificial Sequence: Synthetic oligonucleotide
uucgauaccagcauuggcu

SEQ ID NO: 2020979 - RNA, 19 nt, Artificial Sequence
  Description of Artificial Sequence: Synthetic oligonucleotide
agugcuuguaguaagacuc

SEQ ID NO: 2020980 - RNA, 19 nt, Artificial Sequence
  Description of Artificial Sequence: Synthetic oligonucleotide
gacaucagcaauuucuacc

SEQ ID NO: 2020981 - RNA, 19 nt, Artificial Sequence
  Description of Artificial Sequence: Synthetic oligonucleotide
uaguaaaagccuuaagccc

SEQ ID NO: 2020982 - RNA, 19 nt, Artificial Sequence
  Description of Artificial Sequence: Synthetic oligonucleotide
agagcaacggcguugggcg

SEQ ID NO: 2020983 - RNA, 19 nt, Artificial Sequence
  Description of Artificial Sequence: Synthetic oligonucleotide
ucuuuuaggagaaggcaag

SEQ ID NO: 2020984 - RNA, 19 nt, Artificial Sequence
  Description of Artificial Sequence: Synthetic oligonucleotide
aaaagccuuaagcccagcg

SEQ ID NO: 2020985 - RNA, 19 nt, Artificial Sequence
  Description of Artificial Sequence: Synthetic oligonucleotide
uacuuauagagggaaaagg

SEQ ID NO: 2020986 - RNA, 19 nt, Artificial Sequence
  Description of Artificial Sequence: Synthetic oligonucleotide
uguaguaagacucguggac

SEQ ID NO: 2020987 - RNA, 19 nt, Artificial Sequence
  Description of Artificial Sequence: Synthetic oligonucleotide
acaaauuugaugaagauuu

SEQ ID NO: 2020988 - RNA, 19 nt, Artificial Sequence
  Description of Artificial Sequence: Synthetic oligonucleotide
aaggauuagugaaucaagg

SEQ ID NO: 2020989 - RNA, 19 nt, Artificial Sequence
  Description of Artificial Sequence: Synthetic oligonucleotide
agagccgagcgccauaucc

SEQ ID NO: 2020990 - RNA, 19 nt, Artificial Sequence
  Description of Artificial Sequence: Synthetic oligonucleotide
agagggaaaaggccaaccc

SEQ ID NO: 2020991 - RNA, 19 nt, Artificial Sequence
  Description of Artificial Sequence: Synthetic oligonucleotide
uuucacaaggauuagugaa

SEQ ID NO: 2020992 - RNA, 19 nt, Artificial Sequence
  Description of Artificial Sequence: Synthetic oligonucleotide
gauuucacaaggauuagug

SEQ ID NO: 2020993 - RNA, 19 nt, Artificial Sequence
  Description of Artificial Sequence: Synthetic oligonucleotide
uggucauagguuuucauca

SEQ ID NO: 2020994 - RNA, 19 nt, Artificial Sequence
  Description of Artificial Sequence: Synthetic oligonucleotide
auuuaaguaggacaccaug

SEQ ID NO: 2020995 - RNA, 19 nt, Artificial Sequence
  Description of Artificial Sequence: Synthetic oligonucleotide
caaacaaguuuucauacac

SEQ ID NO: 2020996 - RNA, 19 nt, Artificial Sequence
  Description of Artificial Sequence: Synthetic oligonucleotide
uacuuaaugaaguaaccaa

SEQ ID NO: 2020997 - RNA, 19 nt, Artificial Sequence
  Description of Artificial Sequence: Synthetic oligonucleotide
aguuacugucuuuaguauc

SEQ ID NO: 2020998 - RNA, 19 nt, Artificial Sequence
  Description of Artificial Sequence: Synthetic oligonucleotide
ggauuagugaaucaaggag

SEQ ID NO: 2020999 - RNA, 19 nt, Artificial Sequence
  Description of Artificial Sequence: Synthetic oligonucleotide
ucuggauugucccaggaaa

SEQ ID NO: 2021000 - RNA, 19 nt, Artificial Sequence
  Description of Artificial Sequence: Synthetic oligonucleotide
aggucauuuaaguaggaca

SEQ ID NO: 2021001 - RNA, 19 nt, Artificial Sequence
  Description of Artificial Sequence: Synthetic oligonucleotide
aauuuacuuaaugaaguaa

SEQ ID NO: 2021002 - RNA, 19 nt, Artificial Sequence
  Description of Artificial Sequence: Synthetic oligonucleotide
aggccaacccaccaguugc

SEQ ID NO: 2021003 - RNA, 19 nt, Artificial Sequence
  Description of Artificial Sequence: Synthetic oligonucleotide
ucaucaagaaccuggcugu

SEQ ID NO: 2021004 - RNA, 19 nt, Artificial Sequence
  Description of Artificial Sequence: Synthetic oligonucleotide
ugaagauuucacaaggauu

SEQ ID NO: 2021005 - RNA, 19 nt, Artificial Sequence
  Description of Artificial Sequence: Synthetic oligonucleotide
uaguaucucuuuuaggaga

SEQ ID NO: 2021006 - RNA, 19 nt, Artificial Sequence
  Description of Artificial Sequence: Synthetic oligonucleotide
aagccuuaagcccagcggu

SEQ ID NO: 2021007 - RNA, 19 nt, Artificial Sequence
  Description of Artificial Sequence: Synthetic oligonucleotide
aagcaggaaagguaggaca

SEQ ID NO: 2021008 - RNA, 19 nt, Artificial Sequence
  Description of Artificial Sequence: Synthetic oligonucleotide
agcggccaagaacagagcc

SEQ ID NO: 2021009 - RNA, 19 nt, Artificial Sequence
  Description of Artificial Sequence: Synthetic oligonucleotide
accagaguuggccagacug

SEQ ID NO: 2021010 - RNA, 19 nt, Artificial Sequence
  Description of Artificial Sequence: Synthetic oligonucleotide
uagugaaucaaggaggaga

SEQ ID NO: 2021011 - RNA, 19 nt, Artificial Sequence
  Description of Artificial Sequence: Synthetic oligonucleotide
ucagcaauuucuaccaauc

SEQ ID NO: 2021012 - RNA, 19 nt, Artificial Sequence
  Description of Artificial Sequence: Synthetic oligonucleotide
aauuucuaccaaucuggcu

SEQ ID NO: 2021013 - RNA, 19 nt, Artificial Sequence
  Description of Artificial Sequence: Synthetic oligonucleotide
aagguaggaauaguuacug

SEQ ID NO: 2021014 - RNA, 19 nt, Artificial Sequence
  Description of Artificial Sequence: Synthetic oligonucleotide
uccuuaaagucaaaggcau

SEQ ID NO: 2021015 - RNA, 19 nt, Artificial Sequence
  Description of Artificial Sequence: Synthetic oligonucleotide
ucaaggaggagagauuucc

SEQ ID NO: 2021016 - RNA, 19 nt, Artificial Sequence
  Description of Artificial Sequence: Synthetic oligonucleotide
uccaccacaagccauccga

SEQ ID NO: 2021017 - RNA, 19 nt, Artificial Sequence
  Description of Artificial Sequence: Synthetic oligonucleotide
ugaaucaaggaggagagau

SEQ ID NO: 2021018 - RNA, 19 nt, Artificial Sequence
  Description of Artificial Sequence: Synthetic oligonucleotide
caaggauuagugaaucaag

SEQ ID NO: 2021019 - RNA, 19 nt, Artificial Sequence
  Description of Artificial Sequence: Synthetic oligonucleotide
ucucccuauacuuaaccca

SEQ ID NO: 2021020 - RNA, 19 nt, Artificial Sequence
  Description of Artificial Sequence: Synthetic oligonucleotide
uucuucgauaccagcauug

SEQ ID NO: 2021021 - RNA, 19 nt, Artificial Sequence
  Description of Artificial Sequence: Synthetic oligonucleotide
ugguuggauacgcugacug

SEQ ID NO: 2021022 - RNA, 19 nt, Artificial Sequence
  Description of Artificial Sequence: Synthetic oligonucleotide
acauucccgucauagcggc

SEQ ID NO: 2021023 - RNA, 19 nt, Artificial Sequence
  Description of Artificial Sequence: Synthetic oligonucleotide
agcgccauauccuuaaagu

SEQ ID NO: 2021024 - RNA, 19 nt, Artificial Sequence
  Description of Artificial Sequence: Synthetic oligonucleotide
uaacccacaagguaggaau

SEQ ID NO: 2021025 - RNA, 19 nt, Artificial Sequence
  Description of Artificial Sequence: Synthetic oligonucleotide
gacaguguuuucucccucg

SEQ ID NO: 2021026 - RNA, 19 nt, Artificial Sequence
  Description of Artificial Sequence: Synthetic oligonucleotide
aguaaaagccuuaagccca

SEQ ID NO: 2021027 - RNA, 19 nt, Artificial Sequence
  Description of Artificial Sequence: Synthetic oligonucleotide
aagugcuuguaguaagacu

SEQ ID NO: 2021028 - RNA, 19 nt, Artificial Sequence
  Description of Artificial Sequence: Synthetic oligonucleotide
caaaauacaucagugccac

SEQ ID NO: 2021029 - RNA, 19 nt, Artificial Sequence
  Description of Artificial Sequence: Synthetic oligonucleotide
uuacuugugacaucagcaa

SEQ ID NO: 2021030 - RNA, 19 nt, Artificial Sequence
  Description of Artificial Sequence: Synthetic oligonucleotide
gaaagguaggacaucagca

SEQ ID NO: 2021031 - RNA, 19 nt, Artificial Sequence
  Description of Artificial Sequence: Synthetic oligonucleotide
auacacauucccgucauag

SEQ ID NO: 2021032 - RNA, 19 nt, Artificial Sequence
  Description of Artificial Sequence: Synthetic oligonucleotide
agugaaucaaggaggagag

SEQ ID NO: 2021033 - RNA, 19 nt, Artificial Sequence
  Description of Artificial Sequence: Synthetic oligonucleotide
cuaccaaucuggcugcacg

SEQ ID NO: 2021034 - RNA, 19 nt, Artificial Sequence
  Description of Artificial Sequence: Synthetic oligonucleotide
aggauuagugaaucaagga

SEQ ID NO: 2021035 - RNA, 19 nt, Artificial Sequence
  Description of Artificial Sequence: Synthetic oligonucleotide
agcaaccaugacugaagcc

SEQ ID NO: 2021036 - RNA, 19 nt, Artificial Sequence
  Description of Artificial Sequence: Synthetic oligonucleotide
guuggauacgcugacuggg

SEQ ID NO: 2021037 - RNA, 19 nt, Artificial Sequence
  Description of Artificial Sequence: Synthetic oligonucleotide
uuaagcccagcggugaggg

SEQ ID NO: 2021038 - RNA, 19 nt, Artificial Sequence
  Description of Artificial Sequence: Synthetic oligonucleotide
auagcggccaagaacagag

SEQ ID NO: 2021039 - RNA, 19 nt, Artificial Sequence
  Description of Artificial Sequence: Synthetic oligonucleotide
cauauccuuaaagucaaag

SEQ ID NO: 2021040 - RNA, 19 nt, Artificial Sequence
  Description of Artificial Sequence: Synthetic oligonucleotide
uuaguggggauuucuuagc

SEQ ID NO: 2021041 - RNA, 19 nt, Artificial Sequence
  Description of Artificial Sequence: Synthetic oligonucleotide
aguguuuucucccucgaaa

SEQ ID NO: 2021042 - RNA, 19 nt, Artificial Sequence
  Description of Artificial Sequence: Synthetic oligonucleotide
ucucccucgaaagugcagg

SEQ ID NO: 2021043 - RNA, 19 nt, Artificial Sequence
  Description of Artificial Sequence: Synthetic oligonucleotide
uauagagggaaaaggccaa

SEQ ID NO: 2021044 - RNA, 19 nt, Artificial Sequence
  Description of Artificial Sequence: Synthetic oligonucleotide
uuucuaccaaucuggcugc

SEQ ID NO: 2021045 - RNA, 19 nt, Artificial Sequence
  Description of Artificial Sequence: Synthetic oligonucleotide
agggaaaaggccaacccac

SEQ ID NO: 2021046 - RNA, 19 nt, Artificial Sequence
  Description of Artificial Sequence: Synthetic oligonucleotide
cuguugauguccaccagag

SEQ ID NO: 2021047 - RNA, 19 nt, Artificial Sequence
  Description of Artificial Sequence: Synthetic oligonucleotide
cuguccagguaguaaaagc

SEQ ID NO: 2021048 - RNA, 19 nt, Artificial Sequence
  Description of Artificial Sequence: Synthetic oligonucleotide
uuagugugagcaacuccag

SEQ ID NO: 2021049 - RNA, 19 nt, Artificial Sequence
  Description of Artificial Sequence: Synthetic oligonucleotide
ucaagugcuuguaguaaga

SEQ ID NO: 2021050 - RNA, 19 nt, Artificial Sequence
  Description of Artificial Sequence: Synthetic oligonucleotide
ugcucuauagcuacacaaa

SEQ ID NO: 2021051 - RNA, 19 nt, Artificial Sequence
  Description of Artificial Sequence: Synthetic oligonucleotide
gagggcgugaagcucaggc

SEQ ID NO: 2021052 - RNA, 19 nt, Artificial Sequence
  Description of Artificial Sequence: Synthetic oligonucleotide
ucgauaccagcauuggcug

SEQ ID NO: 2021053 - RNA, 19 nt, Artificial Sequence
  Description of Artificial Sequence: Synthetic oligonucleotide
aggagagauuuccugccac

SEQ ID NO: 2021054 - RNA, 19 nt, Artificial Sequence
  Description of Artificial Sequence: Synthetic oligonucleotide
ucuucgauaccagcauugg

SEQ ID NO: 2021055 - RNA, 19 nt, Artificial Sequence
  Description of Artificial Sequence: Synthetic oligonucleotide
agguaggacaucagcaacc

SEQ ID NO: 2021056 - RNA, 19 nt, Artificial Sequence
  Description of Artificial Sequence: Synthetic oligonucleotide
aguugcucuauagcuacac

SEQ ID NO: 2021057 - RNA, 19 nt, Artificial Sequence
  Description of Artificial Sequence: Synthetic oligonucleotide
cacauucccgucauagcgg

SEQ ID NO: 2021058 - RNA, 19 nt, Artificial Sequence
  Description of Artificial Sequence: Synthetic oligonucleotide
cucccuauacuuaacccac

SEQ ID NO: 2021059 - RNA, 19 nt, Artificial Sequence
  Description of Artificial Sequence: Synthetic oligonucleotide
uucuuagcccacucaaaca

SEQ ID NO: 2021060 - RNA, 19 nt, Artificial Sequence
  Description of Artificial Sequence: Synthetic oligonucleotide
auacuuaacccacaaggua

SEQ ID NO: 2021061 - RNA, 19 nt, Artificial Sequence
  Description of Artificial Sequence: Synthetic oligonucleotide
accugcugugguuggauac

SEQ ID NO: 2021062 - RNA, 19 nt, Artificial Sequence
  Description of Artificial Sequence: Synthetic oligonucleotide
gauacgcugacugggcagg

SEQ ID NO: 2021063 - RNA, 19 nt, Artificial Sequence
  Description of Artificial Sequence: Synthetic oligonucleotide
gacaucagcaaccaugacu

SEQ ID NO: 2021064 - RNA, 19 nt, Artificial Sequence
  Description of Artificial Sequence: Synthetic oligonucleotide
guuuagugugagcaacucc

SEQ ID NO: 2021065 - RNA, 19 nt, Artificial Sequence
  Description of Artificial Sequence: Synthetic oligonucleotide
gaaccuggcugucuggagc

SEQ ID NO: 2021066 - RNA, 19 nt, Artificial Sequence
  Description of Artificial Sequence: Synthetic oligonucleotide
gguaggaauaguuacuguc

SEQ ID NO: 2021067 - RNA, 19 nt, Artificial Sequence
  Description of Artificial Sequence: Synthetic oligonucleotide
uagcuacacaaauuugaug

SEQ ID NO: 2021068 - RNA, 19 nt, Artificial Sequence
  Description of Artificial Sequence: Synthetic oligonucleotide
aaggccaacccaccaguug

SEQ ID NO: 2021069 - RNA, 19 nt, Artificial Sequence
  Description of Artificial Sequence: Synthetic oligonucleotide
auuagugaaucaaggagga

SEQ ID NO: 2021070 - RNA, 19 nt, Artificial Sequence
  Description of Artificial Sequence: Synthetic oligonucleotide
cucucccuauacuuaaccc

SEQ ID NO: 2021071 - RNA, 19 nt, Artificial Sequence
  Description of Artificial Sequence: Synthetic oligonucleotide
aacuccaggauccggcuau

SEQ ID NO: 2021072 - RNA, 19 nt, Artificial Sequence
  Description of Artificial Sequence: Synthetic oligonucleotide
guaguaagacucguggacc

SEQ ID NO: 2021073 - RNA, 19 nt, Artificial Sequence
  Description of Artificial Sequence: Synthetic oligonucleotide
gggcaggucauuuaaguag

SEQ ID NO: 2021074 - RNA, 19 nt, Artificial Sequence
  Description of Artificial Sequence: Synthetic oligonucleotide
gaagcucaaagcuuggacu

SEQ ID NO: 2021075 - RNA, 19 nt, Artificial Sequence
  Description of Artificial Sequence: Synthetic oligonucleotide
aagauuucacaaggauuag

SEQ ID NO: 2021076 - RNA, 19 nt, Artificial Sequence
  Description of Artificial Sequence: Synthetic oligonucleotide
gugagaauagccaugucca

SEQ ID NO: 2021077 - RNA, 19 nt, Artificial Sequence
  Description of Artificial Sequence: Synthetic oligonucleotide
uuucaucucuacagucugc

SEQ ID NO: 2021078 - RNA, 19 nt, Artificial Sequence
  Description of Artificial Sequence: Synthetic oligonucleotide
auccgacauucuucgauac

SEQ ID NO: 2021079 - RNA, 19 nt, Artificial Sequence
  Description of Artificial Sequence: Synthetic oligonucleotide
uacacauucccgucauagc

SEQ ID NO: 2021080 - RNA, 19 nt, Artificial Sequence
  Description of Artificial Sequence: Synthetic oligonucleotide
cuggucauagguuuucauc

SEQ ID NO: 2021081 - RNA, 19 nt, Artificial Sequence
  Description of Artificial Sequence: Synthetic oligonucleotide
agugcaccuggucauaggu

SEQ ID NO: 2021082 - RNA, 19 nt, Artificial Sequence
  Description of Artificial Sequence: Synthetic oligonucleotide
uuggauacgcugacugggc

SEQ ID NO: 2021083 - RNA, 19 nt, Artificial Sequence
  Description of Artificial Sequence: Synthetic oligonucleotide
uaagacucguggaccuccg

SEQ ID NO: 2021084 - RNA, 19 nt, Artificial Sequence
  Description of Artificial Sequence: Synthetic oligonucleotide
uggaccuccguuuguuuag

SEQ ID NO: 2021085 - RNA, 19 nt, Artificial Sequence
  Description of Artificial Sequence: Synthetic oligonucleotide
uaguaagacucguggaccu

SEQ ID NO: 2021086 - RNA, 19 nt, Artificial Sequence
  Description of Artificial Sequence: Synthetic oligonucleotide
gagauuuccugccacucuc

SEQ ID NO: 2021087 - RNA, 19 nt, Artificial Sequence
  Description of Artificial Sequence: Synthetic oligonucleotide
auccuuaaagucaaaggca

SEQ ID NO: 2021088 - RNA, 19 nt, Artificial Sequence
  Description of Artificial Sequence: Synthetic oligonucleotide
uaggcuucagucaggcugu

SEQ ID NO: 2021089 - RNA, 19 nt, Artificial Sequence
  Description of Artificial Sequence: Synthetic oligonucleotide
ugcugugagaauagccaug

SEQ ID NO: 2021090 - RNA, 19 nt, Artificial Sequence
  Description of Artificial Sequence: Synthetic oligonucleotide
ugugguuggauacgcugac

SEQ ID NO: 2021091 - RNA, 19 nt, Artificial Sequence
  Description of Artificial Sequence: Synthetic oligonucleotide
acuuaaugaaguaaccaaa

SEQ ID NO: 2021092 - RNA, 19 nt, Artificial Sequence
  Description of Artificial Sequence: Synthetic oligonucleotide
acaaggauuagugaaucaa

SEQ ID NO: 2021093 - RNA, 19 nt, Artificial Sequence
  Description of Artificial Sequence: Synthetic oligonucleotide
auugucccaggaaauuuac

SEQ ID NO: 2021094 - RNA, 19 nt, Artificial Sequence
  Description of Artificial Sequence: Synthetic oligonucleotide
gagggaaaaggccaaccca

SEQ ID NO: 2021095 - RNA, 19 nt, Artificial Sequence
  Description of Artificial Sequence: Synthetic oligonucleotide
uccaccagagcaacggcgu

SEQ ID NO: 2021096 - RNA, 19 nt, Artificial Sequence
  Description of Artificial Sequence: Synthetic oligonucleotide
acacaaauuugaugaagau

SEQ ID NO: 2021097 - RNA, 19 nt, Artificial Sequence
  Description of Artificial Sequence: Synthetic oligonucleotide
guugauguccaccagaguu

SEQ ID NO: 2021098 - RNA, 19 nt, Artificial Sequence
  Description of Artificial Sequence: Synthetic oligonucleotide
uacuugugacaucagcaau

SEQ ID NO: 2021099 - RNA, 19 nt, Artificial Sequence
  Description of Artificial Sequence: Synthetic oligonucleotide
gaguuggccagacugccac

SEQ ID NO: 2021100 - RNA, 19 nt, Artificial Sequence
  Description of Artificial Sequence: Synthetic oligonucleotide
ccaagaacagagccgagcg

SEQ ID NO: 2021101 - RNA, 19 nt, Artificial Sequence
  Description of Artificial Sequence: Synthetic oligonucleotide
uguuuaguggggauuucuu

SEQ ID NO: 2021102 - RNA, 19 nt, Artificial Sequence
  Description of Artificial Sequence: Synthetic oligonucleotide
acuuaacccacaagguagg

SEQ ID NO: 2021103 - RNA, 19 nt, Artificial Sequence
  Description of Artificial Sequence: Synthetic oligonucleotide
uaguuacugucuuuaguau

SEQ ID NO: 2021104 - RNA, 19 nt, Artificial Sequence
  Description of Artificial Sequence: Synthetic oligonucleotide
gcuuguaggcuucagucag

SEQ ID NO: 2021105 - RNA, 19 nt, Artificial Sequence
  Description of Artificial Sequence: Synthetic oligonucleotide
gaugaagauuucacaagga

SEQ ID NO: 2021106 - RNA, 19 nt, Artificial Sequence
  Description of Artificial Sequence: Synthetic oligonucleotide
ugagaauagccauguccac

SEQ ID NO: 2021107 - RNA, 19 nt, Artificial Sequence
  Description of Artificial Sequence: Synthetic oligonucleotide
cuucgauaccagcauuggc

SEQ ID NO: 2021108 - RNA, 19 nt, Artificial Sequence
  Description of Artificial Sequence: Synthetic oligonucleotide
guggggauuucuuagccca

SEQ ID NO: 2021109 - RNA, 19 nt, Artificial Sequence
  Description of Artificial Sequence: Synthetic oligonucleotide
ccuccguuuguuuaguggg

SEQ ID NO: 2021110 - RNA, 19 nt, Artificial Sequence
  Description of Artificial Sequence: Synthetic oligonucleotide
gagcgccauauccuuaaag

SEQ ID NO: 2021111 - RNA, 19 nt, Artificial Sequence
  Description of Artificial Sequence: Synthetic oligonucleotide
augacaguguuuucucccu

SEQ ID NO: 2021112 - RNA, 19 nt, Artificial Sequence
  Description of Artificial Sequence: Synthetic oligonucleotide
cuccguuuguuuagugggg

SEQ ID NO: 2021113 - RNA, 19 nt, Artificial Sequence
  Description of Artificial Sequence: Synthetic oligonucleotide
cugcacgaagcuuguaggc

SEQ ID NO: 2021114 - RNA, 19 nt, Artificial Sequence
  Description of Artificial Sequence: Synthetic oligonucleotide
ucacaaggauuagugaauc

SEQ ID NO: 2021115 - RNA, 19 nt, Artificial Sequence
  Description of Artificial Sequence: Synthetic oligonucleotide
aggcaagcaggaaagguag

SEQ ID NO: 2021116 - RNA, 19 nt, Artificial Sequence
  Description of Artificial Sequence: Synthetic oligonucleotide
uccagguaguaaaagccuu

SEQ ID NO: 2021117 - RNA, 19 nt, Artificial Sequence
  Description of Artificial Sequence: Synthetic oligonucleotide
uuguuuaguggggauuucu

SEQ ID NO: 2021118 - RNA, 19 nt, Artificial Sequence
  Description of Artificial Sequence: Synthetic oligonucleotide
accaacuucccagagugca

SEQ ID NO: 2021119 - RNA, 19 nt, Artificial Sequence
  Description of Artificial Sequence: Synthetic oligonucleotide
aaaauacaucagugccaca

SEQ ID NO: 2021120 - RNA, 19 nt, Artificial Sequence
  Description of Artificial Sequence: Synthetic oligonucleotide
gcugcacgaagcuuguagg

SEQ ID NO: 2021121 - RNA, 19 nt, Artificial Sequence
  Description of Artificial Sequence: Synthetic oligonucleotide
uaccaaucuggcugcacga

SEQ ID NO: 2021122 - RNA, 19 nt, Artificial Sequence
  Description of Artificial Sequence: Synthetic oligonucleotide
agggguuucaagugcuugu

SEQ ID NO: 2021123 - RNA, 19 nt, Artificial Sequence
  Description of Artificial Sequence: Synthetic oligonucleotide
cagacugccaccugcugug

SEQ ID NO: 2021124 - RNA, 19 nt, Artificial Sequence
  Description of Artificial Sequence: Synthetic oligonucleotide
augaaguaaccaaaauaca

SEQ ID NO: 2021125 - RNA, 19 nt, Artificial Sequence
  Description of Artificial Sequence: Synthetic oligonucleotide
uggauacgcugacugggca

SEQ ID NO: 2021126 - RNA, 19 nt, Artificial Sequence
  Description of Artificial Sequence: Synthetic oligonucleotide
agcucaaagcuuggacugc

SEQ ID NO: 2021127 - RNA, 19 nt, Artificial Sequence
  Description of Artificial Sequence: Synthetic oligonucleotide
uuucucccucgaaagugca

SEQ ID NO: 2021128 - RNA, 19 nt, Artificial Sequence
  Description of Artificial Sequence: Synthetic oligonucleotide
uccggcuauuuacuuguga

SEQ ID NO: 2021129 - RNA, 19 nt, Artificial Sequence
  Description of Artificial Sequence: Synthetic oligonucleotide
gauccggcuauuuacuugu

SEQ ID NO: 2021130 - RNA, 19 nt, Artificial Sequence
  Description of Artificial Sequence: Synthetic oligonucleotide
guugggcggguuuagugug

SEQ ID NO: 2021131 - RNA, 19 nt, Artificial Sequence
  Description of Artificial Sequence: Synthetic oligonucleotide
uuagugaaucaaggaggag

SEQ ID NO: 2021132 - RNA, 19 nt, Artificial Sequence
  Description of Artificial Sequence: Synthetic oligonucleotide
ucacucagguccccuuugc

SEQ ID NO: 2021133 - RNA, 19 nt, Artificial Sequence
  Description of Artificial Sequence: Synthetic oligonucleotide
auagcuacacaaauuugau

SEQ ID NO: 2021134 - RNA, 19 nt, Artificial Sequence
  Description of Artificial Sequence: Synthetic oligonucleotide
accagcauuggcuguccag

SEQ ID NO: 2021135 - RNA, 19 nt, Artificial Sequence
  Description of Artificial Sequence: Synthetic oligonucleotide
caaccaugacugaagccug

SEQ ID NO: 2021136 - RNA, 19 nt, Artificial Sequence
  Description of Artificial Sequence: Synthetic oligonucleotide
ugagcaacuccaggauccg

SEQ ID NO: 2021137 - RNA, 19 nt, Artificial Sequence
  Description of Artificial Sequence: Synthetic oligonucleotide
gguuggauacgcugacugg

SEQ ID NO: 2021138 - RNA, 19 nt, Artificial Sequence
  Description of Artificial Sequence: Synthetic oligonucleotide
ggaggagagauuuccugcc

SEQ ID NO: 2021139 - RNA, 19 nt, Artificial Sequence
  Description of Artificial Sequence: Synthetic oligonucleotide
uggccagacugccaccugc

SEQ ID NO: 2021140 - RNA, 19 nt, Artificial Sequence
  Description of Artificial Sequence: Synthetic oligonucleotide
ugcacgaagcuuguaggcu

SEQ ID NO: 2021141 - RNA, 19 nt, Artificial Sequence
  Description of Artificial Sequence: Synthetic oligonucleotide
guaagacucguggaccucc

SEQ ID NO: 2021142 - RNA, 19 nt, Artificial Sequence
  Description of Artificial Sequence: Synthetic oligonucleotide
ucuuucaaaucuggauugu

SEQ ID NO: 2021143 - RNA, 19 nt, Artificial Sequence
  Description of Artificial Sequence: Synthetic oligonucleotide
aucucuacagucugcucau

SEQ ID NO: 2021144 - RNA, 19 nt, Artificial Sequence
  Description of Artificial Sequence: Synthetic oligonucleotide
agauuucacaaggauuagu

SEQ ID NO: 2021145 - RNA, 19 nt, Artificial Sequence
  Description of Artificial Sequence: Synthetic oligonucleotide
uguugauguccaccagagu

SEQ ID NO: 2021146 - RNA, 19 nt, Artificial Sequence
  Description of Artificial Sequence: Synthetic oligonucleotide
cagcaaccaugacugaagc

SEQ ID NO: 2021147 - RNA, 19 nt, Artificial Sequence
  Description of Artificial Sequence: Synthetic oligonucleotide
uuaacccacaagguaggaa

SEQ ID NO: 2021148 - RNA, 19 nt, Artificial Sequence
  Description of Artificial Sequence: Synthetic oligonucleotide
caagaaccuggcugucugg

SEQ ID NO: 2021149 - RNA, 19 nt, Artificial Sequence
  Description of Artificial Sequence: Synthetic oligonucleotide
caacuucccagagugcacc

SEQ ID NO: 2021150 - RNA, 19 nt, Artificial Sequence
  Description of Artificial Sequence: Synthetic oligonucleotide
ggcugcacgaagcuuguag

SEQ ID NO: 2021151 - RNA, 19 nt, Artificial Sequence
  Description of Artificial Sequence: Synthetic oligonucleotide
aguaucucuuuuaggagaa

SEQ ID NO: 2021152 - RNA, 19 nt, Artificial Sequence
  Description of Artificial Sequence: Synthetic oligonucleotide
guaaaagccuuaagcccag

SEQ ID NO: 2021153 - RNA, 19 nt, Artificial Sequence
  Description of Artificial Sequence: Synthetic oligonucleotide
uccaggauccggcuauuua

SEQ ID NO: 2021154 - RNA, 19 nt, Artificial Sequence
  Description of Artificial Sequence: Synthetic oligonucleotide
uccguuuguuuagugggga

SEQ ID NO: 2021155 - RNA, 19 nt, Artificial Sequence
  Description of Artificial Sequence: Synthetic oligonucleotide
auagccauguccaccacaa

SEQ ID NO: 2021156 - RNA, 19 nt, Artificial Sequence
  Description of Artificial Sequence: Synthetic oligonucleotide
ugcaggccgggguaaaagu

SEQ ID NO: 2021157 - RNA, 19 nt, Artificial Sequence
  Description of Artificial Sequence: Synthetic oligonucleotide
ucugcucauuucucuuuac

SEQ ID NO: 2021158 - RNA, 19 nt, Artificial Sequence
  Description of Artificial Sequence: Synthetic oligonucleotide
agguaggaauaguuacugu

SEQ ID NO: 2021159 - RNA, 19 nt, Artificial Sequence
  Description of Artificial Sequence: Synthetic oligonucleotide
ucgaaagugcaggccgggg

SEQ ID NO: 2021160 - RNA, 19 nt, Artificial Sequence
  Description of Artificial Sequence: Synthetic oligonucleotide
caagugcuuguaguaagac

SEQ ID NO: 2021161 - RNA, 19 nt, Artificial Sequence
  Description of Artificial Sequence: Synthetic oligonucleotide
guuuaguggggauuucuua

SEQ ID NO: 2021162 - RNA, 19 nt, Artificial Sequence
  Description of Artificial Sequence: Synthetic oligonucleotide
agcccacucaaacaaguuu

SEQ ID NO: 2021163 - RNA, 19 nt, Artificial Sequence
  Description of Artificial Sequence: Synthetic oligonucleotide
gaaagugcaggccggggua

SEQ ID NO: 2021164 - RNA, 19 nt, Artificial Sequence
  Description of Artificial Sequence: Synthetic oligonucleotide
auucccgucauagcggcca

SEQ ID NO: 2021165 - RNA, 19 nt, Artificial Sequence
  Description of Artificial Sequence: Synthetic oligonucleotide
cugcagggguuucaagugc

SEQ ID NO: 2021166 - RNA, 19 nt, Artificial Sequence
  Description of Artificial Sequence: Synthetic oligonucleotide
uuccacugcugugagaaua

SEQ ID NO: 2021167 - RNA, 19 nt, Artificial Sequence
  Description of Artificial Sequence: Synthetic oligonucleotide
ucccuauacuuaacccaca

SEQ ID NO: 2021168 - RNA, 19 nt, Artificial Sequence
  Description of Artificial Sequence: Synthetic oligonucleotide
guaggaauaguuacugucu

SEQ ID NO: 2021169 - RNA, 19 nt, Artificial Sequence
  Description of Artificial Sequence: Synthetic oligonucleotide
acgcugacugggcagguca

SEQ ID NO: 2021170 - RNA, 19 nt, Artificial Sequence
  Description of Artificial Sequence: Synthetic oligonucleotide
acucguggaccuccguuug

SEQ ID NO: 2021171 - RNA, 19 nt, Artificial Sequence
  Description of Artificial Sequence: Synthetic oligonucleotide
acaguguuuucucccucga

SEQ ID NO: 2021172 - RNA, 19 nt, Artificial Sequence
  Description of Artificial Sequence: Synthetic oligonucleotide
aguaagacucguggaccuc

SEQ ID NO: 2021173 - RNA, 19 nt, Artificial Sequence
  Description of Artificial Sequence: Synthetic oligonucleotide
cugucuggagcaucaugac

SEQ ID NO: 2021174 - RNA, 19 nt, Artificial Sequence
  Description of Artificial Sequence: Synthetic oligonucleotide
cagaguuggccagacugcc

SEQ ID NO: 2021175 - RNA, 19 nt, Artificial Sequence
  Description of Artificial Sequence: Synthetic oligonucleotide
acccacaagguaggaauag

SEQ ID NO: 2021176 - RNA, 19 nt, Artificial Sequence
  Description of Artificial Sequence: Synthetic oligonucleotide
ccaggauccggcuauuuac

SEQ ID NO: 2021177 - RNA, 19 nt, Artificial Sequence
  Description of Artificial Sequence: Synthetic oligonucleotide
ccggcuauuuacuugugac

SEQ ID NO: 2021178 - RNA, 19 nt, Artificial Sequence
  Description of Artificial Sequence: Synthetic oligonucleotide
gacugggcaggucauuuaa

SEQ ID NO: 2021179 - RNA, 19 nt, Artificial Sequence
  Description of Artificial Sequence: Synthetic oligonucleotide
auucuucgauaccagcauu

SEQ ID NO: 2021180 - RNA, 19 nt, Artificial Sequence
  Description of Artificial Sequence: Synthetic oligonucleotide
agggcgugaagcucaggca

SEQ ID NO: 2021181 - RNA, 19 nt, Artificial Sequence
  Description of Artificial Sequence: Synthetic oligonucleotide
cugugguuggauacgcuga

SEQ ID NO: 2021182 - RNA, 19 nt, Artificial Sequence
  Description of Artificial Sequence: Synthetic oligonucleotide
gaggagagauuuccugcca

SEQ ID NO: 2021183 - RNA, 19 nt, Artificial Sequence
  Description of Artificial Sequence: Synthetic oligonucleotide
cccucgaaagugcaggccg

SEQ ID NO: 2021184 - RNA, 19 nt, Artificial Sequence
  Description of Artificial Sequence: Synthetic oligonucleotide
aucagcaaccaugacugaa

SEQ ID NO: 2021185 - RNA, 19 nt, Artificial Sequence
  Description of Artificial Sequence: Synthetic oligonucleotide
caggucauuuaaguaggac

SEQ ID NO: 2021186 - RNA, 19 nt, Artificial Sequence
  Description of Artificial Sequence: Synthetic oligonucleotide
ugcuuguaguaagacucgu

SEQ ID NO: 2021187 - RNA, 19 nt, Artificial Sequence
  Description of Artificial Sequence: Synthetic oligonucleotide
agagugcaccuggucauag

SEQ ID NO: 2021188 - RNA, 19 nt, Artificial Sequence
  Description of Artificial Sequence: Synthetic oligonucleotide
uggggauuucuuagcccac

SEQ ID NO: 2021189 - RNA, 19 nt, Artificial Sequence
  Description of Artificial Sequence: Synthetic oligonucleotide
caagguaggaauaguuacu

SEQ ID NO: 2021190 - RNA, 19 nt, Artificial Sequence
  Description of Artificial Sequence: Synthetic oligonucleotide
aagacucguggaccuccgu

SEQ ID NO: 2021191 - RNA, 19 nt, Artificial Sequence
  Description of Artificial Sequence: Synthetic oligonucleotide
gcucucccuauacuuaacc

SEQ ID NO: 2021192 - RNA, 19 nt, Artificial Sequence
  Description of Artificial Sequence: Synthetic oligonucleotide
gcaaccaugacugaagccu

SEQ ID NO: 2021193 - RNA, 19 nt, Artificial Sequence
  Description of Artificial Sequence: Synthetic oligonucleotide
ccagcauuggcuguccagg

SEQ ID NO: 2021194 - RNA, 19 nt, Artificial Sequence
  Description of Artificial Sequence: Synthetic oligonucleotide
aucaagaaccuggcugucu

SEQ ID NO: 2021195 - RNA, 19 nt, Artificial Sequence
  Description of Artificial Sequence: Synthetic oligonucleotide
cacaaggauuagugaauca

SEQ ID NO: 2021196 - RNA, 19 nt, Artificial Sequence
  Description of Artificial Sequence: Synthetic oligonucleotide
agcaacggcguugggcggg

SEQ ID NO: 2021197 - RNA, 19 nt, Artificial Sequence
  Description of Artificial Sequence: Synthetic oligonucleotide
ggcggguuuagugugagca

SEQ ID NO: 2021198 - RNA, 19 nt, Artificial Sequence
  Description of Artificial Sequence: Synthetic oligonucleotide
ucuaccaaucuggcugcac

SEQ ID NO: 2021199 - RNA, 19 nt, Artificial Sequence
  Description of Artificial Sequence: Synthetic oligonucleotide
agacucguggaccuccguu

SEQ ID NO: 2021200 - RNA, 19 nt, Artificial Sequence
  Description of Artificial Sequence: Synthetic oligonucleotide
uugggcggguuuaguguga

SEQ ID NO: 2021201 - RNA, 19 nt, Artificial Sequence
  Description of Artificial Sequence: Synthetic oligonucleotide
ccagaguuggccagacugc

SEQ ID NO: 2021202 - RNA, 19 nt, Artificial Sequence
  Description of Artificial Sequence: Synthetic oligonucleotide
gagcaacggcguugggcgg

SEQ ID NO: 2021203 - RNA, 19 nt, Artificial Sequence
  Description of Artificial Sequence: Synthetic oligonucleotide
ccuauacuuaacccacaag

SEQ ID NO: 2021204 - RNA, 19 nt, Artificial Sequence
  Description of Artificial Sequence: Synthetic oligonucleotide
gguuucaagugcuuguagu

SEQ ID NO: 2021205 - RNA, 19 nt, Artificial Sequence
  Description of Artificial Sequence: Synthetic oligonucleotide
cucgaaagugcaggccggg

SEQ ID NO: 2021206 - RNA, 19 nt, Artificial Sequence
  Description of Artificial Sequence: Synthetic oligonucleotide
ucccucgaaagugcaggcc

SEQ ID NO: 2021207 - RNA, 19 nt, Artificial Sequence
  Description of Artificial Sequence: Synthetic oligonucleotide
gcaauggcccauuucaucu

SEQ ID NO: 2021208 - RNA, 19 nt, Artificial Sequence
  Description of Artificial Sequence: Synthetic oligonucleotide
uagcggccaagaacagagc

SEQ ID NO: 2021209 - RNA, 19 nt, Artificial Sequence
  Description of Artificial Sequence: Synthetic oligonucleotide
gaccuccguuuguuuagug

SEQ ID NO: 2021210 - RNA, 19 nt, Artificial Sequence
  Description of Artificial Sequence: Synthetic oligonucleotide
cauccgacauucuucgaua

SEQ ID NO: 2021211 - RNA, 19 nt, Artificial Sequence
  Description of Artificial Sequence: Synthetic oligonucleotide
uuacugucuuuaguaucuc

SEQ ID NO: 2021212 - RNA, 19 nt, Artificial Sequence
  Description of Artificial Sequence: Synthetic oligonucleotide
aggaaagguaggacaucag

SEQ ID NO: 2021213 - RNA, 19 nt, Artificial Sequence
  Description of Artificial Sequence: Synthetic oligonucleotide
uuggccagacugccaccug

SEQ ID NO: 2021214 - RNA, 19 nt, Artificial Sequence
  Description of Artificial Sequence: Synthetic oligonucleotide
ggcaauggcccauuucauc

SEQ ID NO: 2021215 - RNA, 19 nt, Artificial Sequence
  Description of Artificial Sequence: Synthetic oligonucleotide
aacggcguugggcggguuu

SEQ ID NO: 2021216 - RNA, 19 nt, Artificial Sequence
  Description of Artificial Sequence: Synthetic oligonucleotide
gcgccauauccuuaaaguc

SEQ ID NO: 2021217 - RNA, 19 nt, Artificial Sequence
  Description of Artificial Sequence: Synthetic oligonucleotide
ggauuucuuagcccacuca

SEQ ID NO: 2021218 - RNA, 19 nt, Artificial Sequence
  Description of Artificial Sequence: Synthetic oligonucleotide
caccaacuucccagagugc

SEQ ID NO: 2021219 - RNA, 19 nt, Artificial Sequence
  Description of Artificial Sequence: Synthetic oligonucleotide
uccaccagaguuggccaga

SEQ ID NO: 2021220 - RNA, 19 nt, Artificial Sequence
  Description of Artificial Sequence: Synthetic oligonucleotide
ugggcggguuuagugugag

SEQ ID NO: 2021221 - RNA, 19 nt, Artificial Sequence
  Description of Artificial Sequence: Synthetic oligonucleotide
ugacugggcaggucauuua

SEQ ID NO: 2021222 - RNA, 19 nt, Artificial Sequence
  Description of Artificial Sequence: Synthetic oligonucleotide
aacccacaagguaggaaua

SEQ ID NO: 2021223 - RNA, 19 nt, Artificial Sequence
  Description of Artificial Sequence: Synthetic oligonucleotide
gugcaggccgggguaaaag

SEQ ID NO: 2021224 - RNA, 19 nt, Artificial Sequence
  Description of Artificial Sequence: Synthetic oligonucleotide
cauucccgucauagcggcc

SEQ ID NO: 2021225 - RNA, 19 nt, Artificial Sequence
  Description of Artificial Sequence: Synthetic oligonucleotide
gagggcucucccuauacuu

SEQ ID NO: 2021226 - RNA, 19 nt, Artificial Sequence
  Description of Artificial Sequence: Synthetic oligonucleotide
ccaaucuggcugcacgaag

SEQ ID NO: 2021227 - RNA, 19 nt, Artificial Sequence
  Description of Artificial Sequence: Synthetic oligonucleotide
ccucgaaagugcaggccgg

SEQ ID NO: 2021228 - RNA, 19 nt, Artificial Sequence
  Description of Artificial Sequence: Synthetic oligonucleotide
caccagagcaacggcguug

SEQ ID NO: 2021229 - RNA, 19 nt, Artificial Sequence
  Description of Artificial Sequence: Synthetic oligonucleotide
ggugagggcgugaagcuca

SEQ ID NO: 2021230 - RNA, 19 nt, Artificial Sequence
  Description of Artificial Sequence: Synthetic oligonucleotide
ugacugaagccugggcaau

SEQ ID NO: 2021231 - RNA, 19 nt, Artificial Sequence
  Description of Artificial Sequence: Synthetic oligonucleotide
gcuuguaguaagacucgug

SEQ ID NO: 2021232 - RNA, 19 nt, Artificial Sequence
  Description of Artificial Sequence: Synthetic oligonucleotide
acagagccgagcgccauau

SEQ ID NO: 2021233 - RNA, 19 nt, Artificial Sequence
  Description of Artificial Sequence: Synthetic oligonucleotide
guggaccuccguuuguuua

SEQ ID NO: 2021234 - RNA, 19 nt, Artificial Sequence
  Description of Artificial Sequence: Synthetic oligonucleotide
gguuuagugugagcaacuc

SEQ ID NO: 2021235 - RNA, 19 nt, Artificial Sequence
  Description of Artificial Sequence: Synthetic oligonucleotide
gcaagcaggaaagguagga

SEQ ID NO: 2021236 - RNA, 19 nt, Artificial Sequence
  Description of Artificial Sequence: Synthetic oligonucleotide
caccacaagccauccgaca

SEQ ID NO: 2021237 - RNA, 19 nt, Artificial Sequence
  Description of Artificial Sequence: Synthetic oligonucleotide
ccugcugugguuggauacg

SEQ ID NO: 2021238 - RNA, 19 nt, Artificial Sequence
  Description of Artificial Sequence: Synthetic oligonucleotide
agaacagagccgagcgcca

SEQ ID NO: 2021239 - RNA, 19 nt, Artificial Sequence
  Description of Artificial Sequence: Synthetic oligonucleotide
gacucguggaccuccguuu

SEQ ID NO: 2021240 - RNA, 19 nt, Artificial Sequence
  Description of Artificial Sequence: Synthetic oligonucleotide
cugccaccugcugugguug

SEQ ID NO: 2021241 - RNA, 19 nt, Artificial Sequence
  Description of Artificial Sequence: Synthetic oligonucleotide
gcguugggcggguuuagug

SEQ ID NO: 2021242 - RNA, 19 nt, Artificial Sequence
  Description of Artificial Sequence: Synthetic oligonucleotide
agacugccaccugcugugg

SEQ ID NO: 2021243 - RNA, 19 nt, Artificial Sequence
  Description of Artificial Sequence: Synthetic oligonucleotide
cugucuuuaguaucucuuu

SEQ ID NO: 2021244 - RNA, 19 nt, Artificial Sequence
  Description of Artificial Sequence: Synthetic oligonucleotide
cauagcggccaagaacaga

SEQ ID NO: 2021245 - RNA, 19 nt, Artificial Sequence
  Description of Artificial Sequence: Synthetic oligonucleotide
cauuuaaguaggacaccau

SEQ ID NO: 2021246 - RNA, 19 nt, Artificial Sequence
  Description of Artificial Sequence: Synthetic oligonucleotide
gauguccaccagaguuggc

SEQ ID NO: 2021247 - RNA, 19 nt, Artificial Sequence
  Description of Artificial Sequence: Synthetic oligonucleotide
cuuaacccacaagguagga

SEQ ID NO: 2021248 - RNA, 19 nt, Artificial Sequence
  Description of Artificial Sequence: Synthetic oligonucleotide
ccaacuucccagagugcac

SEQ ID NO: 2021249 - RNA, 19 nt, Artificial Sequence
  Description of Artificial Sequence: Synthetic oligonucleotide
uucccgucauagcggccaa

SEQ ID NO: 2021250 - RNA, 19 nt, Artificial Sequence
  Description of Artificial Sequence: Synthetic oligonucleotide
uucuaccaaucuggcugca

SEQ ID NO: 2021251 - RNA, 19 nt, Artificial Sequence
  Description of Artificial Sequence: Synthetic oligonucleotide
ucguggaccuccguuuguu

SEQ ID NO: 2021252 - RNA, 19 nt, Artificial Sequence
  Description of Artificial Sequence: Synthetic oligonucleotide
caaggaggagagauuuccu

SEQ ID NO: 2021253 - RNA, 19 nt, Artificial Sequence
  Description of Artificial Sequence: Synthetic oligonucleotide
gcucuauagcuacacaaau

SEQ ID NO: 2021254 - RNA, 19 nt, Artificial Sequence
  Description of Artificial Sequence: Synthetic oligonucleotide
caucaagaaccuggcuguc

SEQ ID NO: 2021255 - RNA, 19 nt, Artificial Sequence
  Description of Artificial Sequence: Synthetic oligonucleotide
cugugagaauagccauguc

SEQ ID NO: 2021256 - RNA, 19 nt, Artificial Sequence
  Description of Artificial Sequence: Synthetic oligonucleotide
agcugagggcucucccuau

SEQ ID NO: 2021257 - RNA, 19 nt, Artificial Sequence
  Description of Artificial Sequence: Synthetic oligonucleotide
ggcccauuucaucucuaca

SEQ ID NO: 2021258 - RNA, 19 nt, Artificial Sequence
  Description of Artificial Sequence: Synthetic oligonucleotide
caggauccggcuauuuacu

SEQ ID NO: 2021259 - RNA, 19 nt, Artificial Sequence
  Description of Artificial Sequence: Synthetic oligonucleotide
agcucacucagguccccuu

SEQ ID NO: 2021260 - RNA, 19 nt, Artificial Sequence
  Description of Artificial Sequence: Synthetic oligonucleotide
caccuggucauagguuuuc

SEQ ID NO: 2021261 - RNA, 19 nt, Artificial Sequence
  Description of Artificial Sequence: Synthetic oligonucleotide
gcaggccgggguaaaagug

SEQ ID NO: 2021262 - RNA, 19 nt, Artificial Sequence
  Description of Artificial Sequence: Synthetic oligonucleotide
cgggguaaaagugacauaa

SEQ ID NO: 2021263 - RNA, 19 nt, Artificial Sequence
  Description of Artificial Sequence: Synthetic oligonucleotide
acucucugagcaagucaga

SEQ ID NO: 2021264 - RNA, 19 nt, Artificial Sequence
  Description of Artificial Sequence: Synthetic oligonucleotide
ggagagauuuccugccacu

SEQ ID NO: 2021265 - RNA, 19 nt, Artificial Sequence
  Description of Artificial Sequence: Synthetic oligonucleotide
agggcucucccuauacuua

SEQ ID NO: 2021266 - RNA, 19 nt, Artificial Sequence
  Description of Artificial Sequence: Synthetic oligonucleotide
gugaaucaaggaggagaga

SEQ ID NO: 2021267 - RNA, 19 nt, Artificial Sequence
  Description of Artificial Sequence: Synthetic oligonucleotide
aagugcaggccgggguaaa

SEQ ID NO: 2021268 - RNA, 19 nt, Artificial Sequence
  Description of Artificial Sequence: Synthetic oligonucleotide
ggggaagcucaaagcuugg

SEQ ID NO: 2021269 - RNA, 19 nt, Artificial Sequence
  Description of Artificial Sequence: Synthetic oligonucleotide
uacgcugacugggcagguc

SEQ ID NO: 2021270 - RNA, 19 nt, Artificial Sequence
  Description of Artificial Sequence: Synthetic oligonucleotide
ccaccacaagccauccgac

SEQ ID NO: 2021271 - RNA, 19 nt, Artificial Sequence
  Description of Artificial Sequence: Synthetic oligonucleotide
gagccgagcgccauauccu

SEQ ID NO: 2021272 - RNA, 19 nt, Artificial Sequence
  Description of Artificial Sequence: Synthetic oligonucleotide
caucagcaaccaugacuga

SEQ ID NO: 2021273 - RNA, 19 nt, Artificial Sequence
  Description of Artificial Sequence: Synthetic oligonucleotide
caguguuuucucccucgaa

SEQ ID NO: 2021274 - RNA, 19 nt, Artificial Sequence
  Description of Artificial Sequence: Synthetic oligonucleotide
cuuggacugcagggguuuc

SEQ ID NO: 2021275 - RNA, 19 nt, Artificial Sequence
  Description of Artificial Sequence: Synthetic oligonucleotide
gcaucaugacaguguuuuc

SEQ ID NO: 2021276 - RNA, 19 nt, Artificial Sequence
  Description of Artificial Sequence: Synthetic oligonucleotide
caguugcucuauagcuaca

SEQ ID NO: 2021277 - RNA, 19 nt, Artificial Sequence
  Description of Artificial Sequence: Synthetic oligonucleotide
gugagggcgugaagcucag

SEQ ID NO: 2021278 - RNA, 19 nt, Artificial Sequence
  Description of Artificial Sequence: Synthetic oligonucleotide
gggcucucccuauacuuaa

SEQ ID NO: 2021279 - RNA, 19 nt, Artificial Sequence
  Description of Artificial Sequence: Synthetic oligonucleotide
cuggggaagcucaaagcuu

SEQ ID NO: 2021280 - RNA, 19 nt, Artificial Sequence
  Description of Artificial Sequence: Synthetic oligonucleotide
gcucaaagcuuggacugca

SEQ ID NO: 2021281 - RNA, 19 nt, Artificial Sequence
  Description of Artificial Sequence: Synthetic oligonucleotide
auacgcugacugggcaggu

SEQ ID NO: 2021282 - RNA, 19 nt, Artificial Sequence
  Description of Artificial Sequence: Synthetic oligonucleotide
agugcaggccgggguaaaa

SEQ ID NO: 2021283 - RNA, 19 nt, Artificial Sequence
  Description of Artificial Sequence: Synthetic oligonucleotide
cucuacagucugcucauuu

SEQ ID NO: 2021284 - RNA, 19 nt, Artificial Sequence
  Description of Artificial Sequence: Synthetic oligonucleotide
cggguuuagugugagcaac

SEQ ID NO: 2021285 - RNA, 19 nt, Artificial Sequence
  Description of Artificial Sequence: Synthetic oligonucleotide
cccuauacuuaacccacaa

SEQ ID NO: 2021286 - RNA, 19 nt, Artificial Sequence
  Description of Artificial Sequence: Synthetic oligonucleotide
ccacucucugagcaaguca

SEQ ID NO: 2021287 - RNA, 19 nt, Artificial Sequence
  Description of Artificial Sequence: Synthetic oligonucleotide
cauacacauucccgucaua

SEQ ID NO: 2021288 - RNA, 19 nt, Artificial Sequence
  Description of Artificial Sequence: Synthetic oligonucleotide
acggcguugggcggguuua

SEQ ID NO: 2021289 - RNA, 19 nt, Artificial Sequence
  Description of Artificial Sequence: Synthetic oligonucleotide
auccggcuauuuacuugug

SEQ ID NO: 2021290 - RNA, 19 nt, Artificial Sequence
  Description of Artificial Sequence: Synthetic oligonucleotide
gccgggguaaaagugacau

SEQ ID NO: 2021291 - RNA, 19 nt, Artificial Sequence
  Description of Artificial Sequence: Synthetic oligonucleotide
gcggguuuagugugagcaa

SEQ ID NO: 2021292 - RNA, 19 nt, Artificial Sequence
  Description of Artificial Sequence: Synthetic oligonucleotide
agcuuggacugcagggguu

SEQ ID NO: 2021293 - RNA, 19 nt, Artificial Sequence
  Description of Artificial Sequence: Synthetic oligonucleotide
ggauugucccaggaaauuu

SEQ ID NO: 2021294 - RNA, 19 nt, Artificial Sequence
  Description of Artificial Sequence: Synthetic oligonucleotide
agcccagcggugagggcgu

SEQ ID NO: 2021295 - RNA, 19 nt, Artificial Sequence
  Description of Artificial Sequence: Synthetic oligonucleotide
gcccacucaaacaaguuuu

SEQ ID NO: 2021296 - RNA, 19 nt, Artificial Sequence
  Description of Artificial Sequence: Synthetic oligonucleotide
guaggacaucagcaaccau

SEQ ID NO: 2021297 - RNA, 19 nt, Artificial Sequence
  Description of Artificial Sequence: Synthetic oligonucleotide
caccugcugugguuggaua

SEQ ID NO: 2021298 - RNA, 19 nt, Artificial Sequence
  Description of Artificial Sequence: Synthetic oligonucleotide
ggguuuagugugagcaacu

SEQ ID NO: 2021299 - RNA, 19 nt, Artificial Sequence
  Description of Artificial Sequence: Synthetic oligonucleotide
ccacugcugugagaauagc

SEQ ID NO: 2021300 - RNA, 19 nt, Artificial Sequence
  Description of Artificial Sequence: Synthetic oligonucleotide
ggcucucccuauacuuaac

SEQ ID NO: 2021301 - RNA, 19 nt, Artificial Sequence
  Description of Artificial Sequence: Synthetic oligonucleotide
cugacugggcaggucauuu

SEQ ID NO: 2021302 - RNA, 19 nt, Artificial Sequence
  Description of Artificial Sequence: Synthetic oligonucleotide
ccauccgacauucuucgau

SEQ ID NO: 2021303 - RNA, 19 nt, Artificial Sequence
  Description of Artificial Sequence: Synthetic oligonucleotide
ccgagcgccauauccuuaa

SEQ ID NO: 2021304 - RNA, 19 nt, Artificial Sequence
  Description of Artificial Sequence: Synthetic oligonucleotide
acccaccaguugcucuaua

SEQ ID NO: 2021305 - RNA, 19 nt, Artificial Sequence
  Description of Artificial Sequence: Synthetic oligonucleotide
gugguuggauacgcugacu

SEQ ID NO: 2021306 - RNA, 19 nt, Artificial Sequence
  Description of Artificial Sequence: Synthetic oligonucleotide
gggcggguuuagugugagc

SEQ ID NO: 2021307 - RNA, 19 nt, Artificial Sequence
  Description of Artificial Sequence: Synthetic oligonucleotide
ggcuguccagguaguaaaa

SEQ ID NO: 2021308 - RNA, 19 nt, Artificial Sequence
  Description of Artificial Sequence: Synthetic oligonucleotide
ccccaccaacuucccagag

SEQ ID NO: 2021309 - RNA, 19 nt, Artificial Sequence
  Description of Artificial Sequence: Synthetic oligonucleotide
auggcccauuucaucucua

SEQ ID NO: 2021310 - RNA, 19 nt, Artificial Sequence
  Description of Artificial Sequence: Synthetic oligonucleotide
cccgucauagcggccaaga

SEQ ID NO: 2021311 - RNA, 19 nt, Artificial Sequence
  Description of Artificial Sequence: Synthetic oligonucleotide
cggccaagaacagagccga

SEQ ID NO: 2021312 - RNA, 19 nt, Artificial Sequence
  Description of Artificial Sequence: Synthetic oligonucleotide
gcggugagggcgugaagcu

SEQ ID NO: 2021313 - RNA, 19 nt, Artificial Sequence
  Description of Artificial Sequence: Synthetic oligonucleotide
cucguggaccuccguuugu

SEQ ID NO: 2021314 - RNA, 19 nt, Artificial Sequence
  Description of Artificial Sequence: Synthetic oligonucleotide
cagagugcaccuggucaua

SEQ ID NO: 2021315 - RNA, 19 nt, Artificial Sequence
  Description of Artificial Sequence: Synthetic oligonucleotide
gcugagggcucucccuaua

SEQ ID NO: 2021316 - RNA, 19 nt, Artificial Sequence
  Description of Artificial Sequence: Synthetic oligonucleotide
cguugggcggguuuagugu

SEQ ID NO: 2021317 - RNA, 19 nt, Artificial Sequence
  Description of Artificial Sequence: Synthetic oligonucleotide
gccaacccaccaguugcuc

SEQ ID NO: 2021318 - RNA, 19 nt, Artificial Sequence
  Description of Artificial Sequence: Synthetic oligonucleotide
gugcaccuggucauagguu

SEQ ID NO: 2021319 - RNA, 19 nt, Artificial Sequence
  Description of Artificial Sequence: Synthetic oligonucleotide
cgaaagugcaggccggggu

SEQ ID NO: 2021320 - RNA, 19 nt, Artificial Sequence
  Description of Artificial Sequence: Synthetic oligonucleotide
ggccgggguaaaagugaca

SEQ ID NO: 2021321 - RNA, 19 nt, Artificial Sequence
  Description of Artificial Sequence: Synthetic oligonucleotide
cccaggaaauuuacuuaau

SEQ ID NO: 2021322 - RNA, 19 nt, Artificial Sequence
  Description of Artificial Sequence: Synthetic oligonucleotide
gcgugaagcucaggcagcu

SEQ ID NO: 2021323 - RNA, 19 nt, Artificial Sequence
  Description of Artificial Sequence: Synthetic oligonucleotide
ggaccuccguuuguuuagu

SEQ ID NO: 2021324 - RNA, 19 nt, Artificial Sequence
  Description of Artificial Sequence: Synthetic oligonucleotide
caccagaguuggccagacu

SEQ ID NO: 2021325 - RNA, 19 nt, Artificial Sequence
  Description of Artificial Sequence: Synthetic oligonucleotide
ggccagacugccaccugcu

SEQ ID NO: 2021326 - RNA, 19 nt, Artificial Sequence
  Description of Artificial Sequence: Synthetic oligonucleotide
ccagcggugagggcgugaa

SEQ ID NO: 2021327 - RNA, 19 nt, Artificial Sequence
  Description of Artificial Sequence: Synthetic oligonucleotide
ccgggguaaaagugacaua

SEQ ID NO: 2021328 - RNA, 19 nt, Artificial Sequence
  Description of Artificial Sequence: Synthetic oligonucleotide
ggccaacccaccaguugcu

SEQ ID NO: 2021329 - RNA, 19 nt, Artificial Sequence
  Description of Artificial Sequence: Synthetic oligonucleotide
ccguuuguuuaguggggau

SEQ ID NO: 2021330 - RNA, 19 nt, Artificial Sequence
  Description of Artificial Sequence: Synthetic oligonucleotide
cagcucacucagguccccu

SEQ ID NO: 2021331 - RNA, 19 nt, Artificial Sequence
  Description of Artificial Sequence: Synthetic oligonucleotide
ccacaagccauccgacauu

SEQ ID NO: 2021332 - RNA, 19 nt, Artificial Sequence
  Description of Artificial Sequence: Synthetic oligonucleotide
cgauaccagcauuggcugu

SEQ ID NO: 2021333 - RNA, 19 nt, Artificial Sequence
  Description of Artificial Sequence: Synthetic oligonucleotide
ggcguugggcggguuuagu

SEQ ID NO: 2021334 - RNA, 19 nt, Artificial Sequence
  Description of Artificial Sequence: Synthetic oligonucleotide
gccgagcgccauauccuua

SEQ ID NO: 2021335 - RNA, 19 nt, Artificial Sequence
  Description of Artificial Sequence: Synthetic oligonucleotide
gcaccuggucauagguuuu

SEQ ID NO: 2021336 - RNA, 19 nt, Artificial Sequence
  Description of Artificial Sequence: Synthetic oligonucleotide
cggcguugggcggguuuag

SEQ ID NO: 2021337 - RNA, 19 nt, Artificial Sequence
  Description of Artificial Sequence: Synthetic oligonucleotide
gcagggguuucaagugcuu

SEQ ID NO: 2021338 - RNA, 19 nt, Artificial Sequence
  Description of Artificial Sequence: Synthetic oligonucleotide
gcaacggcguugggcgggu

SEQ ID NO: 2021339 - RNA, 19 nt, Artificial Sequence
  Description of Artificial Sequence: Synthetic oligonucleotide
cgagcgccauauccuuaaa

SEQ ID NO: 2021340 - RNA, 19 nt, Artificial Sequence
  Description of Artificial Sequence: Synthetic oligonucleotide
gcccagcggugagggcgug

SEQ ID NO: 2021341 - RNA, 19 nt, Artificial Sequence
  Description of Artificial Sequence: Synthetic oligonucleotide
cccagcggugagggcguga

SEQ ID NO: 2021342 - RNA, 19 nt, Artificial Sequence
  Description of Artificial Sequence: Synthetic oligonucleotide
cgcugacugggcaggucau

SEQ ID NO: 2021343 - RNA, 19 nt, Artificial Sequence
  Description of Artificial Sequence: Synthetic oligonucleotide
gccugggcaauggcccauu

SEQ ID NO: 2021344 - RNA, 19 nt, Artificial Sequence
  Description of Artificial Sequence: Synthetic oligonucleotide
caacggcguugggcggguu

SEQ ID NO: 2021345 - RNA, 19 nt, Artificial Sequence
  Description of Artificial Sequence: Synthetic oligonucleotide
aaaguuugauuuugaauuc

SEQ ID NO: 2021346 - RNA, 19 nt, Artificial Sequence
  Description of Artificial Sequence: Synthetic oligonucleotide
aaacauacgauagaaaugu

SEQ ID NO: 2021347 - RNA, 19 nt, Artificial Sequence
  Description of Artificial Sequence: Synthetic oligonucleotide
aagaaaucagcuugggccg

SEQ ID NO: 2021348 - RNA, 19 nt, Artificial Sequence
  Description of Artificial Sequence: Synthetic oligonucleotide
uuauucacagucaucuugg

SEQ ID NO: 2021349 - RNA, 19 nt, Artificial Sequence
  Description of Artificial Sequence: Synthetic oligonucleotide
aauucuguggguugugugg

SEQ ID NO: 2021350 - RNA, 19 nt, Artificial Sequence
  Description of Artificial Sequence: Synthetic oligonucleotide
aagacaaccuccucgcuac

SEQ ID NO: 2021351 - RNA, 19 nt, Artificial Sequence
  Description of Artificial Sequence: Synthetic oligonucleotide
auacgauagaaauguaacc

SEQ ID NO: 2021352 - RNA, 19 nt, Artificial Sequence
  Description of Artificial Sequence: Synthetic oligonucleotide
aucuaggucauauaaguuc

SEQ ID NO: 2021353 - RNA, 19 nt, Artificial Sequence
  Description of Artificial Sequence: Synthetic oligonucleotide
gaagauugcacuucauggg

SEQ ID NO: 2021354 - RNA, 19 nt, Artificial Sequence
  Description of Artificial Sequence: Synthetic oligonucleotide
uacgauagaaauguaaccc

SEQ ID NO: 2021355 - RNA, 19 nt, Artificial Sequence
  Description of Artificial Sequence: Synthetic oligonucleotide
acuucuuguacgcagugac

SEQ ID NO: 2021356 - RNA, 19 nt, Artificial Sequence
  Description of Artificial Sequence: Synthetic oligonucleotide
cauacgauagaaauguaac

SEQ ID NO: 2021357 - RNA, 19 nt, Artificial Sequence
  Description of Artificial Sequence: Synthetic oligonucleotide
auuauucacagucaucuug

SEQ ID NO: 2021358 - RNA, 19 nt, Artificial Sequence
  Description of Artificial Sequence: Synthetic oligonucleotide
ucaucuaggucauauaagu

SEQ ID NO: 2021359 - RNA, 19 nt, Artificial Sequence
  Description of Artificial Sequence: Synthetic oligonucleotide
auagaaauguaacccacag

SEQ ID NO: 2021360 - RNA, 19 nt, Artificial Sequence
  Description of Artificial Sequence: Synthetic oligonucleotide
aaagaggaaacauacgaua

SEQ ID NO: 2021361 - RNA, 19 nt, Artificial Sequence
  Description of Artificial Sequence: Synthetic oligonucleotide
aaaagggcuacccaggaaa

SEQ ID NO: 2021362 - RNA, 19 nt, Artificial Sequence
  Description of Artificial Sequence: Synthetic oligonucleotide
ugcaucauccuucuucacg

SEQ ID NO: 2021363 - RNA, 19 nt, Artificial Sequence
  Description of Artificial Sequence: Synthetic oligonucleotide
aauguaacccacagaaggg

SEQ ID NO: 2021364 - RNA, 19 nt, Artificial Sequence
  Description of Artificial Sequence: Synthetic oligonucleotide
acaaacacagccuaccaug

SEQ ID NO: 2021365 - RNA, 19 nt, Artificial Sequence
  Description of Artificial Sequence: Synthetic oligonucleotide
ugcaacgucaucaucuuca

SEQ ID NO: 2021366 - RNA, 19 nt, Artificial Sequence
  Description of Artificial Sequence: Synthetic oligonucleotide
uuuuguaggaacaggugcu

SEQ ID NO: 2021367 - RNA, 19 nt, Artificial Sequence
  Description of Artificial Sequence: Synthetic oligonucleotide
acgaagacaaccuccucgc

SEQ ID NO: 2021368 - RNA, 19 nt, Artificial Sequence
  Description of Artificial Sequence: Synthetic oligonucleotide
ugaaccacuuuugugagag

SEQ ID NO: 2021369 - RNA, 19 nt, Artificial Sequence
  Description of Artificial Sequence: Synthetic oligonucleotide
ugaggaagcacucccuagg

SEQ ID NO: 2021370 - RNA, 19 nt, Artificial Sequence
  Description of Artificial Sequence: Synthetic oligonucleotide
auuggucacaagcuuugcc

SEQ ID NO: 2021371 - RNA, 19 nt, Artificial Sequence
  Description of Artificial Sequence: Synthetic oligonucleotide
cuugguaccuuccaagggg

SEQ ID NO: 2021372 - RNA, 19 nt, Artificial Sequence
  Description of Artificial Sequence: Synthetic oligonucleotide
caugugauggacaaagcug

SEQ ID NO: 2021373 - RNA, 19 nt, Artificial Sequence
  Description of Artificial Sequence: Synthetic oligonucleotide
ugagcacaggcucagcagg

SEQ ID NO: 2021374 - RNA, 19 nt, Artificial Sequence
  Description of Artificial Sequence: Synthetic oligonucleotide
aagaggaaacauacgauag

SEQ ID NO: 2021375 - RNA, 19 nt, Artificial Sequence
  Description of Artificial Sequence: Synthetic oligonucleotide
gaagagagcuuugagaaug

SEQ ID NO: 2021376 - RNA, 19 nt, Artificial Sequence
  Description of Artificial Sequence: Synthetic oligonucleotide
ucaugugauggacaaagcu

SEQ ID NO: 2021377 - RNA, 19 nt, Artificial Sequence
  Description of Artificial Sequence: Synthetic oligonucleotide
acuuuugugagagggaggg

SEQ ID NO: 2021378 - RNA, 19 nt, Artificial Sequence
  Description of Artificial Sequence: Synthetic oligonucleotide
gacauggacagcuuggaac

SEQ ID NO: 2021379 - RNA, 19 nt, Artificial Sequence
  Description of Artificial Sequence: Synthetic oligonucleotide
ugagguaaugacauuccca

SEQ ID NO: 2021380 - RNA, 19 nt, Artificial Sequence
  Description of Artificial Sequence: Synthetic oligonucleotide
agaaaagcucaacaauguc

SEQ ID NO: 2021381 - RNA, 19 nt, Artificial Sequence
  Description of Artificial Sequence: Synthetic oligonucleotide
ugcugcaacgucaucaucu

SEQ ID NO: 2021382 - RNA, 19 nt, Artificial Sequence
  Description of Artificial Sequence: Synthetic oligonucleotide
agucaugugauggacaaag

SEQ ID NO: 2021383 - RNA, 19 nt, Artificial Sequence
  Description of Artificial Sequence: Synthetic oligonucleotide
guuguguggucacagaggc

SEQ ID NO: 2021384 - RNA, 19 nt, Artificial Sequence
  Description of Artificial Sequence: Synthetic oligonucleotide
aaagguauggggaacaaua

SEQ ID NO: 2021385 - RNA, 19 nt, Artificial Sequence
  Description of Artificial Sequence: Synthetic oligonucleotide
cuuugguucgaacagagga

SEQ ID NO: 2021386 - RNA, 19 nt, Artificial Sequence
  Description of Artificial Sequence: Synthetic oligonucleotide
gaaaaggugggucccgucc

SEQ ID NO: 2021387 - RNA, 19 nt, Artificial Sequence
  Description of Artificial Sequence: Synthetic oligonucleotide
uuggucacaagcuuugccu

SEQ ID NO: 2021388 - RNA, 19 nt, Artificial Sequence
  Description of Artificial Sequence: Synthetic oligonucleotide
cacgaagacaaccuccucg

SEQ ID NO: 2021389 - RNA, 19 nt, Artificial Sequence
  Description of Artificial Sequence: Synthetic oligonucleotide
aagguauggggaacaauac

SEQ ID NO: 2021390 - RNA, 19 nt, Artificial Sequence
  Description of Artificial Sequence: Synthetic oligonucleotide
ucugaaccacuuuugugag

SEQ ID NO: 2021391 - RNA, 19 nt, Artificial Sequence
  Description of Artificial Sequence: Synthetic oligonucleotide
cuucacgaagacaaccucc

SEQ ID NO: 2021392 - RNA, 19 nt, Artificial Sequence
  Description of Artificial Sequence: Synthetic oligonucleotide
gggaacaauacagaaaagg

SEQ ID NO: 2021393 - RNA, 19 nt, Artificial Sequence
  Description of Artificial Sequence: Synthetic oligonucleotide
uuguuuaccagcguccgag

SEQ ID NO: 2021394 - RNA, 19 nt, Artificial Sequence
  Description of Artificial Sequence: Synthetic oligonucleotide
uucuucacgaagacaaccu

SEQ ID NO: 2021395 - RNA, 19 nt, Artificial Sequence
  Description of Artificial Sequence: Synthetic oligonucleotide
auuccuagggaagaaauca

SEQ ID NO: 2021396 - RNA, 19 nt, Artificial Sequence
  Description of Artificial Sequence: Synthetic oligonucleotide
acauggacagcuuggaacu

SEQ ID NO: 2021397 - RNA, 19 nt, Artificial Sequence
  Description of Artificial Sequence: Synthetic oligonucleotide
uugguucgaacagaggagg

SEQ ID NO: 2021398 - RNA, 19 nt, Artificial Sequence
  Description of Artificial Sequence: Synthetic oligonucleotide
uucuuguacgcagugacug

SEQ ID NO: 2021399 - RNA, 19 nt, Artificial Sequence
  Description of Artificial Sequence: Synthetic oligonucleotide
ucauggguugcccauccag

SEQ ID NO: 2021400 - RNA, 19 nt, Artificial Sequence
  Description of Artificial Sequence: Synthetic oligonucleotide
ugcaccauuccuagggaag

SEQ ID NO: 2021401 - RNA, 19 nt, Artificial Sequence
  Description of Artificial Sequence: Synthetic oligonucleotide
guagcugcaaacuucaucu

SEQ ID NO: 2021402 - RNA, 19 nt, Artificial Sequence
  Description of Artificial Sequence: Synthetic oligonucleotide
auguaacccacagaagggc

SEQ ID NO: 2021403 - RNA, 19 nt, Artificial Sequence
  Description of Artificial Sequence: Synthetic oligonucleotide
uuuaccagcguccgagaca

SEQ ID NO: 2021404 - RNA, 19 nt, Artificial Sequence
  Description of Artificial Sequence: Synthetic oligonucleotide
cucgcuaccccacggaugg

SEQ ID NO: 2021405 - RNA, 19 nt, Artificial Sequence
  Description of Artificial Sequence: Synthetic oligonucleotide
acgauagaaauguaaccca

SEQ ID NO: 2021406 - RNA, 19 nt, Artificial Sequence
  Description of Artificial Sequence: Synthetic oligonucleotide
cagugcaccauuccuaggg

SEQ ID NO: 2021407 - RNA, 19 nt, Artificial Sequence
  Description of Artificial Sequence: Synthetic oligonucleotide
gagaauggugucaggaucc

SEQ ID NO: 2021408 - RNA, 19 nt, Artificial Sequence
  Description of Artificial Sequence: Synthetic oligonucleotide
uguacuucuuguacgcagu

SEQ ID NO: 2021409 - RNA, 19 nt, Artificial Sequence
  Description of Artificial Sequence: Synthetic oligonucleotide
aaaaggugggucccgucca

SEQ ID NO: 2021410 - RNA, 19 nt, Artificial Sequence
  Description of Artificial Sequence: Synthetic oligonucleotide
ucgguuguuguacuucuug

SEQ ID NO: 2021411 - RNA, 19 nt, Artificial Sequence
  Description of Artificial Sequence: Synthetic oligonucleotide
uguaacccacagaagggca

SEQ ID NO: 2021412 - RNA, 19 nt, Artificial Sequence
  Description of Artificial Sequence: Synthetic oligonucleotide
gguauggggaacaauacag

SEQ ID NO: 2021413 - RNA, 19 nt, Artificial Sequence
  Description of Artificial Sequence: Synthetic oligonucleotide
gugaagauugcacuucaug

SEQ ID NO: 2021414 - RNA, 19 nt, Artificial Sequence
  Description of Artificial Sequence: Synthetic oligonucleotide
ucccuaggugccuugaccc

SEQ ID NO: 2021415 - RNA, 19 nt, Artificial Sequence
  Description of Artificial Sequence: Synthetic oligonucleotide
caugaugaguggaggaaag

SEQ ID NO: 2021416 - RNA, 19 nt, Artificial Sequence
  Description of Artificial Sequence: Synthetic oligonucleotide
auggguugcccauccagac

SEQ ID NO: 2021417 - RNA, 19 nt, Artificial Sequence
  Description of Artificial Sequence: Synthetic oligonucleotide
aaagcucaacaauguccuc

SEQ ID NO: 2021418 - RNA, 19 nt, Artificial Sequence
  Description of Artificial Sequence: Synthetic oligonucleotide
ggaagcacucccuaggugc

SEQ ID NO: 2021419 - RNA, 19 nt, Artificial Sequence
  Description of Artificial Sequence: Synthetic oligonucleotide
gagacacacggacaaacac

SEQ ID NO: 2021420 - RNA, 19 nt, Artificial Sequence
  Description of Artificial Sequence: Synthetic oligonucleotide
aagcucaacaauguccucu

SEQ ID NO: 2021421 - RNA, 19 nt, Artificial Sequence
  Description of Artificial Sequence: Synthetic oligonucleotide
uguaggaacaggugcugca

SEQ ID NO: 2021422 - RNA, 19 nt, Artificial Sequence
  Description of Artificial Sequence: Synthetic oligonucleotide
ucuuccgugacucgagggu

SEQ ID NO: 2021423 - RNA, 19 nt, Artificial Sequence
  Description of Artificial Sequence: Synthetic oligonucleotide
uccaacggcccauugguca

SEQ ID NO: 2021424 - RNA, 19 nt, Artificial Sequence
  Description of Artificial Sequence: Synthetic oligonucleotide
uugguaccuuccaaggggc

SEQ ID NO: 2021425 - RNA, 19 nt, Artificial Sequence
  Description of Artificial Sequence: Synthetic oligonucleotide
aaguuugauuuugaauucu

SEQ ID NO: 2021426 - RNA, 19 nt, Artificial Sequence
  Description of Artificial Sequence: Synthetic oligonucleotide
guugcucugagguaaugac

SEQ ID NO: 2021427 - RNA, 19 nt, Artificial Sequence
  Description of Artificial Sequence: Synthetic oligonucleotide
uggacaaagcugccuguag

SEQ ID NO: 2021428 - RNA, 19 nt, Artificial Sequence
  Description of Artificial Sequence: Synthetic oligonucleotide
agaggaaacauacgauaga

SEQ ID NO: 2021429 - RNA, 19 nt, Artificial Sequence
  Description of Artificial Sequence: Synthetic oligonucleotide
uguuggucaaggcuuuggu

SEQ ID NO: 2021430 - RNA, 19 nt, Artificial Sequence
  Description of Artificial Sequence: Synthetic oligonucleotide
ugguucgaacagaggaggg

SEQ ID NO: 2021431 - RNA, 19 nt, Artificial Sequence
  Description of Artificial Sequence: Synthetic oligonucleotide
acaauacagaaaagguggg

SEQ ID NO: 2021432 - RNA, 19 nt, Artificial Sequence
  Description of Artificial Sequence: Synthetic oligonucleotide
acaauguccucuuccguga

SEQ ID NO: 2021433 - RNA, 19 nt, Artificial Sequence
  Description of Artificial Sequence: Synthetic oligonucleotide
uucgaacagaggagggaag

SEQ ID NO: 2021434 - RNA, 19 nt, Artificial Sequence
  Description of Artificial Sequence: Synthetic oligonucleotide
uuugugagagggagggccu

SEQ ID NO: 2021435 - RNA, 19 nt, Artificial Sequence
  Description of Artificial Sequence: Synthetic oligonucleotide
ugugauggacaaagcugcc

SEQ ID NO: 2021436 - RNA, 19 nt, Artificial Sequence
  Description of Artificial Sequence: Synthetic oligonucleotide
caguccagucaugugaugg

SEQ ID NO: 2021437 - RNA, 19 nt, Artificial Sequence
  Description of Artificial Sequence: Synthetic oligonucleotide
agaagggcaaagguauggg

SEQ ID NO: 2021438 - RNA, 19 nt, Artificial Sequence
  Description of Artificial Sequence: Synthetic oligonucleotide
ucaucuugguaccuuccaa

SEQ ID NO: 2021439 - RNA, 19 nt, Artificial Sequence
  Description of Artificial Sequence: Synthetic oligonucleotide
ucuucacgaagacaaccuc

SEQ ID NO: 2021440 - RNA, 19 nt, Artificial Sequence
  Description of Artificial Sequence: Synthetic oligonucleotide
aaaggugggucccguccag

SEQ ID NO: 2021441 - RNA, 19 nt, Artificial Sequence
  Description of Artificial Sequence: Synthetic oligonucleotide
agccguguaggcaucauuc

SEQ ID NO: 2021442 - RNA, 19 nt, Artificial Sequence
  Description of Artificial Sequence: Synthetic oligonucleotide
uaccaugaugaguggagga

SEQ ID NO: 2021443 - RNA, 19 nt, Artificial Sequence
  Description of Artificial Sequence: Synthetic oligonucleotide
ucgagggugcagauuauuc

SEQ ID NO: 2021444 - RNA, 19 nt, Artificial Sequence
  Description of Artificial Sequence: Synthetic oligonucleotide
auggacagcuuggaacugc

SEQ ID NO: 2021445 - RNA, 19 nt, Artificial Sequence
  Description of Artificial Sequence: Synthetic oligonucleotide
gauagaaauguaacccaca

SEQ ID NO: 2021446 - RNA, 19 nt, Artificial Sequence
  Description of Artificial Sequence: Synthetic oligonucleotide
cugagguaaugacauuccc

SEQ ID NO: 2021447 - RNA, 19 nt, Artificial Sequence
  Description of Artificial Sequence: Synthetic oligonucleotide
gauggaccagccgugcccg

SEQ ID NO: 2021448 - RNA, 19 nt, Artificial Sequence
  Description of Artificial Sequence: Synthetic oligonucleotide
gacucgagggugcagauua

SEQ ID NO: 2021449 - RNA, 19 nt, Artificial Sequence
  Description of Artificial Sequence: Synthetic oligonucleotide
uuaccagcguccgagacau

SEQ ID NO: 2021450 - RNA, 19 nt, Artificial Sequence
  Description of Artificial Sequence: Synthetic oligonucleotide
cauuccuagggaagaaauc

SEQ ID NO: 2021451 - RNA, 19 nt, Artificial Sequence
  Description of Artificial Sequence: Synthetic oligonucleotide
cucugagguaaugacauuc

SEQ ID NO: 2021452 - RNA, 19 nt, Artificial Sequence
  Description of Artificial Sequence: Synthetic oligonucleotide
cagaagggcaaagguaugg

SEQ ID NO: 2021453 - RNA, 19 nt, Artificial Sequence
  Description of Artificial Sequence: Synthetic oligonucleotide
acaucgguuguuguacuuc

SEQ ID NO: 2021454 - RNA, 19 nt, Artificial Sequence
  Description of Artificial Sequence: Synthetic oligonucleotide
agaaaaggugggucccguc

SEQ ID NO: 2021455 - RNA, 19 nt, Artificial Sequence
  Description of Artificial Sequence: Synthetic oligonucleotide
aguuugauuuugaauucug

SEQ ID NO: 2021456 - RNA, 19 nt, Artificial Sequence
  Description of Artificial Sequence: Synthetic oligonucleotide
acaggagccguguaggcau

SEQ ID NO: 2021457 - RNA, 19 nt, Artificial Sequence
  Description of Artificial Sequence: Synthetic oligonucleotide
cuuggacauggacagcuug

SEQ ID NO: 2021458 - RNA, 19 nt, Artificial Sequence
  Description of Artificial Sequence: Synthetic oligonucleotide
guaaugacauucccauuca

SEQ ID NO: 2021459 - RNA, 19 nt, Artificial Sequence
  Description of Artificial Sequence: Synthetic oligonucleotide
cacuuuugugagagggagg

SEQ ID NO: 2021460 - RNA, 19 nt, Artificial Sequence
  Description of Artificial Sequence: Synthetic oligonucleotide
agucaucuugguaccuucc

SEQ ID NO: 2021461 - RNA, 19 nt, Artificial Sequence
  Description of Artificial Sequence: Synthetic oligonucleotide
guugcccauccagacaucg

SEQ ID NO: 2021462 - RNA, 19 nt, Artificial Sequence
  Description of Artificial Sequence: Synthetic oligonucleotide
aggaaagaggaaacauacg

SEQ ID NO: 2021463 - RNA, 19 nt, Artificial Sequence
  Description of Artificial Sequence: Synthetic oligonucleotide
cuucauggguugcccaucc

SEQ ID NO: 2021464 - RNA, 19 nt, Artificial Sequence
  Description of Artificial Sequence: Synthetic oligonucleotide
cuaccaugaugaguggagg

SEQ ID NO: 2021465 - RNA, 19 nt, Artificial Sequence
  Description of Artificial Sequence: Synthetic oligonucleotide
acauacgauagaaauguaa

SEQ ID NO: 2021466 - RNA, 19 nt, Artificial Sequence
  Description of Artificial Sequence: Synthetic oligonucleotide
cagacaucgguuguuguac

SEQ ID NO: 2021467 - RNA, 19 nt, Artificial Sequence
  Description of Artificial Sequence: Synthetic oligonucleotide
guccgagacauguugguca

SEQ ID NO: 2021468 - RNA, 19 nt, Artificial Sequence
  Description of Artificial Sequence: Synthetic oligonucleotide
gaagacaaccuccucgcua

SEQ ID NO: 2021469 - RNA, 19 nt, Artificial Sequence
  Description of Artificial Sequence: Synthetic oligonucleotide
cagauuauucacagucauc

SEQ ID NO: 2021470 - RNA, 19 nt, Artificial Sequence
  Description of Artificial Sequence: Synthetic oligonucleotide
cucuuccgugacucgaggg

SEQ ID NO: 2021471 - RNA, 19 nt, Artificial Sequence
  Description of Artificial Sequence: Synthetic oligonucleotide
aggggagacacacggacaa

SEQ ID NO: 2021472 - RNA, 19 nt, Artificial Sequence
  Description of Artificial Sequence: Synthetic oligonucleotide
gugaggaagcacucccuag

SEQ ID NO: 2021473 - RNA, 19 nt, Artificial Sequence
  Description of Artificial Sequence: Synthetic oligonucleotide
gucccguccagugaggaag

SEQ ID NO: 2021474 - RNA, 19 nt, Artificial Sequence
  Description of Artificial Sequence: Synthetic oligonucleotide
aaacacagccuaccaugau

SEQ ID NO: 2021475 - RNA, 19 nt, Artificial Sequence
  Description of Artificial Sequence: Synthetic oligonucleotide
aaaucagcuugggccgagg

SEQ ID NO: 2021476 - RNA, 19 nt, Artificial Sequence
  Description of Artificial Sequence: Synthetic oligonucleotide
gaagaggaggcagcauucc

SEQ ID NO: 2021477 - RNA, 19 nt, Artificial Sequence
  Description of Artificial Sequence: Synthetic oligonucleotide
uguacgcagugacugcauc

SEQ ID NO: 2021478 - RNA, 19 nt, Artificial Sequence
  Description of Artificial Sequence: Synthetic oligonucleotide
gucacaagcuuugccuugg

SEQ ID NO: 2021479 - RNA, 19 nt, Artificial Sequence
  Description of Artificial Sequence: Synthetic oligonucleotide
agacacacggacaaacaca

SEQ ID NO: 2021480 - RNA, 19 nt, Artificial Sequence
  Description of Artificial Sequence: Synthetic oligonucleotide
caguccaacggcccauugg

SEQ ID NO: 2021481 - RNA, 19 nt, Artificial Sequence
  Description of Artificial Sequence: Synthetic oligonucleotide
acagaaaaggugggucccg

SEQ ID NO: 2021482 - RNA, 19 nt, Artificial Sequence
  Description of Artificial Sequence: Synthetic oligonucleotide
gacaaagcugccuguagcu

SEQ ID NO: 2021483 - RNA, 19 nt, Artificial Sequence
  Description of Artificial Sequence: Synthetic oligonucleotide
auguuggucaaggcuuugg

SEQ ID NO: 2021484 - RNA, 19 nt, Artificial Sequence
  Description of Artificial Sequence: Synthetic oligonucleotide
cucccuaggugccuugacc

SEQ ID NO: 2021485 - RNA, 19 nt, Artificial Sequence
  Description of Artificial Sequence: Synthetic oligonucleotide
ugcacuucauggguugccc

SEQ ID NO: 2021486 - RNA, 19 nt, Artificial Sequence
  Description of Artificial Sequence: Synthetic oligonucleotide
ugggaaacagagccacccu

SEQ ID NO: 2021487 - RNA, 19 nt, Artificial Sequence
  Description of Artificial Sequence: Synthetic oligonucleotide
caucuguuuuguaggaaca

SEQ ID NO: 2021488 - RNA, 19 nt, Artificial Sequence
  Description of Artificial Sequence: Synthetic oligonucleotide
cuccuuguuuaccagcguc

SEQ ID NO: 2021489 - RNA, 19 nt, Artificial Sequence
  Description of Artificial Sequence: Synthetic oligonucleotide
ccuaccaugaugaguggag

SEQ ID NO: 2021490 - RNA, 19 nt, Artificial Sequence
  Description of Artificial Sequence: Synthetic oligonucleotide
gugggucccguccagugag

SEQ ID NO: 2021491 - RNA, 19 nt, Artificial Sequence
  Description of Artificial Sequence: Synthetic oligonucleotide
uuccgugacucgagggugc

SEQ ID NO: 2021492 - RNA, 19 nt, Artificial Sequence
  Description of Artificial Sequence: Synthetic oligonucleotide
agggcuacccaggaaaaca

SEQ ID NO: 2021493 - RNA, 19 nt, Artificial Sequence
  Description of Artificial Sequence: Synthetic oligonucleotide
caaacacagccuaccauga

SEQ ID NO: 2021494 - RNA, 19 nt, Artificial Sequence
  Description of Artificial Sequence: Synthetic oligonucleotide
gguuguguggucacagagg

SEQ ID NO: 2021495 - RNA, 19 nt, Artificial Sequence
  Description of Artificial Sequence: Synthetic oligonucleotide
ucuguggguugugugguca

SEQ ID NO: 2021496 - RNA, 19 nt, Artificial Sequence
  Description of Artificial Sequence: Synthetic oligonucleotide
caagcuuugccuugggaaa

SEQ ID NO: 2021497 - RNA, 19 nt, Artificial Sequence
  Description of Artificial Sequence: Synthetic oligonucleotide
gauuuugaauucugugggu

SEQ ID NO: 2021498 - RNA, 19 nt, Artificial Sequence
  Description of Artificial Sequence: Synthetic oligonucleotide
cuuccaaggggcugagcac

SEQ ID NO: 2021499 - RNA, 19 nt, Artificial Sequence
  Description of Artificial Sequence: Synthetic oligonucleotide
gaacugcucaguccaguca

SEQ ID NO: 2021500 - RNA, 19 nt, Artificial Sequence
  Description of Artificial Sequence: Synthetic oligonucleotide
uguuuaccagcguccgaga

SEQ ID NO: 2021501 - RNA, 19 nt, Artificial Sequence
  Description of Artificial Sequence: Synthetic oligonucleotide
ggguuguguggucacagag

SEQ ID NO: 2021502 - RNA, 19 nt, Artificial Sequence
  Description of Artificial Sequence: Synthetic oligonucleotide
gaagcacucccuaggugcc

SEQ ID NO: 2021503 - RNA, 19 nt, Artificial Sequence
  Description of Artificial Sequence: Synthetic oligonucleotide
uggguugcccauccagaca

SEQ ID NO: 2021504 - RNA, 19 nt, Artificial Sequence
  Description of Artificial Sequence: Synthetic oligonucleotide
gaaccacuuuugugagagg

SEQ ID NO: 2021505 - RNA, 19 nt, Artificial Sequence
  Description of Artificial Sequence: Synthetic oligonucleotide
uuggaacugcucaguccag

SEQ ID NO: 2021506 - RNA, 19 nt, Artificial Sequence
  Description of Artificial Sequence: Synthetic oligonucleotide
guuuaccagcguccgagac

SEQ ID NO: 2021507 - RNA, 19 nt, Artificial Sequence
  Description of Artificial Sequence: Synthetic oligonucleotide
acucccuaggugccuugac

SEQ ID NO: 2021508 - RNA, 19 nt, Artificial Sequence
  Description of Artificial Sequence: Synthetic oligonucleotide
gcaucauccuucuucacga

SEQ ID NO: 2021509 - RNA, 19 nt, Artificial Sequence
  Description of Artificial Sequence: Synthetic oligonucleotide
uccagugaggaagcacucc

SEQ ID NO: 2021510 - RNA, 19 nt, Artificial Sequence
  Description of Artificial Sequence: Synthetic oligonucleotide
aggaagcacucccuaggug

SEQ ID NO: 2021511 - RNA, 19 nt, Artificial Sequence
  Description of Artificial Sequence: Synthetic oligonucleotide
agugaggaagcacucccua

SEQ ID NO: 2021512 - RNA, 19 nt, Artificial Sequence
  Description of Artificial Sequence: Synthetic oligonucleotide
agacaaccuccucgcuacc

SEQ ID NO: 2021513 - RNA, 19 nt, Artificial Sequence
  Description of Artificial Sequence: Synthetic oligonucleotide
gagcuuugagaaugguguc

SEQ ID NO: 2021514 - RNA, 19 nt, Artificial Sequence
  Description of Artificial Sequence: Synthetic oligonucleotide
uucagcaggaggguuggaa

SEQ ID NO: 2021515 - RNA, 19 nt, Artificial Sequence
  Description of Artificial Sequence: Synthetic oligonucleotide
auggguugcucugagguaa

SEQ ID NO: 2021516 - RNA, 19 nt, Artificial Sequence
  Description of Artificial Sequence: Synthetic oligonucleotide
acuucauggguugcccauc

SEQ ID NO: 2021517 - RNA, 19 nt, Artificial Sequence
  Description of Artificial Sequence: Synthetic oligonucleotide
gaaagaggaaacauacgau

SEQ ID NO: 2021518 - RNA, 19 nt, Artificial Sequence
  Description of Artificial Sequence: Synthetic oligonucleotide
cagaaaagcucaacaaugu

SEQ ID NO: 2021519 - RNA, 19 nt, Artificial Sequence
  Description of Artificial Sequence: Synthetic oligonucleotide
acagccuaccaugaugagu

SEQ ID NO: 2021520 - RNA, 19 nt, Artificial Sequence
  Description of Artificial Sequence: Synthetic oligonucleotide
ugcucaguccagucaugug

SEQ ID NO: 2021521 - RNA, 19 nt, Artificial Sequence
  Description of Artificial Sequence: Synthetic oligonucleotide
accagcguccgagacaugu

SEQ ID NO: 2021522 - RNA, 19 nt, Artificial Sequence
  Description of Artificial Sequence: Synthetic oligonucleotide
guacgcagugacugcauca

SEQ ID NO: 2021523 - RNA, 19 nt, Artificial Sequence
  Description of Artificial Sequence: Synthetic oligonucleotide
ggaaacagagccacccucc

SEQ ID NO: 2021524 - RNA, 19 nt, Artificial Sequence
  Description of Artificial Sequence: Synthetic oligonucleotide
ucaguccaacggcccauug

SEQ ID NO: 2021525 - RNA, 19 nt, Artificial Sequence
  Description of Artificial Sequence: Synthetic oligonucleotide
cuugacccuugcucagggg

SEQ ID NO: 2021526 - RNA, 19 nt, Artificial Sequence
  Description of Artificial Sequence: Synthetic oligonucleotide
ugccuugacccuugcucag

SEQ ID NO: 2021527 - RNA, 19 nt, Artificial Sequence
  Description of Artificial Sequence: Synthetic oligonucleotide
gugccuugacccuugcuca

SEQ ID NO: 2021528 - RNA, 19 nt, Artificial Sequence
  Description of Artificial Sequence: Synthetic oligonucleotide
agacaucgguuguuguacu

SEQ ID NO: 2021529 - RNA, 19 nt, Artificial Sequence
  Description of Artificial Sequence: Synthetic oligonucleotide
gacaaccuccucgcuaccc

SEQ ID NO: 2021530 - RNA, 19 nt, Artificial Sequence
  Description of Artificial Sequence: Synthetic oligonucleotide
gucaucuugguaccuucca

SEQ ID NO: 2021531 - RNA, 19 nt, Artificial Sequence
  Description of Artificial Sequence: Synthetic oligonucleotide
cauggguugcccauccaga

SEQ ID NO: 2021532 - RNA, 19 nt, Artificial Sequence
  Description of Artificial Sequence: Synthetic oligonucleotide
gaaaucagcuugggccgag

SEQ ID NO: 2021533 - RNA, 19 nt, Artificial Sequence
  Description of Artificial Sequence: Synthetic oligonucleotide
guauggggaacaauacaga

SEQ ID NO: 2021534 - RNA, 19 nt, Artificial Sequence
  Description of Artificial Sequence: Synthetic oligonucleotide
acggauggaccagccgugc

SEQ ID NO: 2021535 - RNA, 19 nt, Artificial Sequence
  Description of Artificial Sequence: Synthetic oligonucleotide
ucccguccagugaggaagc

SEQ ID NO: 2021536 - RNA, 19 nt, Artificial Sequence
  Description of Artificial Sequence: Synthetic oligonucleotide
gcuuggaacugcucagucc

SEQ ID NO: 2021537 - RNA, 19 nt, Artificial Sequence
  Description of Artificial Sequence: Synthetic oligonucleotide
uacgcagugacugcaucau

SEQ ID NO: 2021538 - RNA, 19 nt, Artificial Sequence
  Description of Artificial Sequence: Synthetic oligonucleotide
uugcacuucauggguugcc

SEQ ID NO: 2021539 - RNA, 19 nt, Artificial Sequence
  Description of Artificial Sequence: Synthetic oligonucleotide
cuaggugccuugacccuug

SEQ ID NO: 2021540 - RNA, 19 nt, Artificial Sequence
  Description of Artificial Sequence: Synthetic oligonucleotide
ucaguccagucaugugaug

SEQ ID NO: 2021541 - RNA, 19 nt, Artificial Sequence
  Description of Artificial Sequence: Synthetic oligonucleotide
cuuccgugacucgagggug

SEQ ID NO: 2021542 - RNA, 19 nt, Artificial Sequence
  Description of Artificial Sequence: Synthetic oligonucleotide
agcguccgagacauguugg

SEQ ID NO: 2021543 - RNA, 19 nt, Artificial Sequence
  Description of Artificial Sequence: Synthetic oligonucleotide
cccgaggacuugaagagag

SEQ ID NO: 2021544 - RNA, 19 nt, Artificial Sequence
  Description of Artificial Sequence: Synthetic oligonucleotide
cagcguccgagacauguug

SEQ ID NO: 2021545 - RNA, 19 nt, Artificial Sequence
  Description of Artificial Sequence: Synthetic oligonucleotide
acggacaaacacagccuac

SEQ ID NO: 2021546 - RNA, 19 nt, Artificial Sequence
  Description of Artificial Sequence: Synthetic oligonucleotide
gugucacucagccgcagca

SEQ ID NO: 2021547 - RNA, 19 nt, Artificial Sequence
  Description of Artificial Sequence: Synthetic oligonucleotide
cacggauggaccagccgug

SEQ ID NO: 2021548 - RNA, 19 nt, Artificial Sequence
  Description of Artificial Sequence: Synthetic oligonucleotide
ucacuccccuccucaaagu

SEQ ID NO: 2021549 - RNA, 19 nt, Artificial Sequence
  Description of Artificial Sequence: Synthetic oligonucleotide
acgcagugacugcaucauc

SEQ ID NO: 2021550 - RNA, 19 nt, Artificial Sequence
  Description of Artificial Sequence: Synthetic oligonucleotide
auccagacaucgguuguug

SEQ ID NO: 2021551 - RNA, 19 nt, Artificial Sequence
  Description of Artificial Sequence: Synthetic oligonucleotide
accuccucgcuaccccacg

SEQ ID NO: 2021552 - RNA, 19 nt, Artificial Sequence
  Description of Artificial Sequence: Synthetic oligonucleotide
uuguacgcagugacugcau

SEQ ID NO: 2021553 - RNA, 19 nt, Artificial Sequence
  Description of Artificial Sequence: Synthetic oligonucleotide
ccauucaugugaagauugc

SEQ ID NO: 2021554 - RNA, 19 nt, Artificial Sequence
  Description of Artificial Sequence: Synthetic oligonucleotide
acacggacaaacacagccu

SEQ ID NO: 2021555 - RNA, 19 nt, Artificial Sequence
  Description of Artificial Sequence: Synthetic oligonucleotide
ugagggcuccacacacaca

SEQ ID NO: 2021556 - RNA, 19 nt, Artificial Sequence
  Description of Artificial Sequence: Synthetic oligonucleotide
gucaugugauggacaaagc

SEQ ID NO: 2021557 - RNA, 19 nt, Artificial Sequence
  Description of Artificial Sequence: Synthetic oligonucleotide
ggauggguugcucugaggu

SEQ ID NO: 2021558 - RNA, 19 nt, Artificial Sequence
  Description of Artificial Sequence: Synthetic oligonucleotide
uccucgcuaccccacggau

SEQ ID NO: 2021559 - RNA, 19 nt, Artificial Sequence
  Description of Artificial Sequence: Synthetic oligonucleotide
gauggguugcucugaggua

SEQ ID NO: 2021560 - RNA, 19 nt, Artificial Sequence
  Description of Artificial Sequence: Synthetic oligonucleotide
cgauagaaauguaacccac

SEQ ID NO: 2021561 - RNA, 19 nt, Artificial Sequence
  Description of Artificial Sequence: Synthetic oligonucleotide
cuuguacgcagugacugca

SEQ ID NO: 2021562 - RNA, 19 nt, Artificial Sequence
  Description of Artificial Sequence: Synthetic oligonucleotide
ggcuuugguucgaacagag

SEQ ID NO: 2021563 - RNA, 19 nt, Artificial Sequence
  Description of Artificial Sequence: Synthetic oligonucleotide
ccauuggucacaagcuuug

SEQ ID NO: 2021564 - RNA, 19 nt, Artificial Sequence
  Description of Artificial Sequence: Synthetic oligonucleotide
cauuggucacaagcuuugc

SEQ ID NO: 2021565 - RNA, 19 nt, Artificial Sequence
  Description of Artificial Sequence: Synthetic oligonucleotide
ccacuuuugugagagggag

SEQ ID NO: 2021566 - RNA, 19 nt, Artificial Sequence
  Description of Artificial Sequence: Synthetic oligonucleotide
ugggucccguccagugagg

SEQ ID NO: 2021567 - RNA, 19 nt, Artificial Sequence
  Description of Artificial Sequence: Synthetic oligonucleotide
ugguaccuuccaaggggcu

SEQ ID NO: 2021568 - RNA, 19 nt, Artificial Sequence
  Description of Artificial Sequence: Synthetic oligonucleotide
gaaacagagccacccuccu

SEQ ID NO: 2021569 - RNA, 19 nt, Artificial Sequence
  Description of Artificial Sequence: Synthetic oligonucleotide
gauggacaaagcugccugu

SEQ ID NO: 2021570 - RNA, 19 nt, Artificial Sequence
  Description of Artificial Sequence: Synthetic oligonucleotide
aacauacgauagaaaugua

SEQ ID NO: 2021571 - RNA, 19 nt, Artificial Sequence
  Description of Artificial Sequence: Synthetic oligonucleotide
ggaacugcucaguccaguc

SEQ ID NO: 2021572 - RNA, 19 nt, Artificial Sequence
  Description of Artificial Sequence: Synthetic oligonucleotide
agaauggugucaggaucca

SEQ ID NO: 2021573 - RNA, 19 nt, Artificial Sequence
  Description of Artificial Sequence: Synthetic oligonucleotide
caauguccucuuccgugac

SEQ ID NO: 2021574 - RNA, 19 nt, Artificial Sequence
  Description of Artificial Sequence: Synthetic oligonucleotide
gaggaagcacucccuaggu

SEQ ID NO: 2021575 - RNA, 19 nt, Artificial Sequence
  Description of Artificial Sequence: Synthetic oligonucleotide
gguuggaagaggaggcagc

SEQ ID NO: 2021576 - RNA, 19 nt, Artificial Sequence
  Description of Artificial Sequence: Synthetic oligonucleotide
ccuuccaaggggcugagca

SEQ ID NO: 2021577 - RNA, 19 nt, Artificial Sequence
  Description of Artificial Sequence: Synthetic oligonucleotide
guguaggcaucauucugaa

SEQ ID NO: 2021578 - RNA, 19 nt, Artificial Sequence
  Description of Artificial Sequence: Synthetic oligonucleotide
agaaaucagcuugggccga

SEQ ID NO: 2021579 - RNA, 19 nt, Artificial Sequence
  Description of Artificial Sequence: Synthetic oligonucleotide
accacuuuugugagaggga

SEQ ID NO: 2021580 - RNA, 19 nt, Artificial Sequence
  Description of Artificial Sequence: Synthetic oligonucleotide
guaccuuccaaggggcuga

SEQ ID NO: 2021581 - RNA, 19 nt, Artificial Sequence
  Description of Artificial Sequence: Synthetic oligonucleotide
accccacggauggaccagc

SEQ ID NO: 2021582 - RNA, 19 nt, Artificial Sequence
  Description of Artificial Sequence: Synthetic oligonucleotide
gaggcuccuccuuguuuac

SEQ ID NO: 2021583 - RNA, 19 nt, Artificial Sequence
  Description of Artificial Sequence: Synthetic oligonucleotide
gaagaacaggagccgugua

SEQ ID NO: 2021584 - RNA, 19 nt, Artificial Sequence
  Description of Artificial Sequence: Synthetic oligonucleotide
gaauggugucaggauccac

SEQ ID NO: 2021585 - RNA, 19 nt, Artificial Sequence
  Description of Artificial Sequence: Synthetic oligonucleotide
uaccccacggauggaccag

SEQ ID NO: 2021586 - RNA, 19 nt, Artificial Sequence
  Description of Artificial Sequence: Synthetic oligonucleotide
uggcagcucuuugggaggc

SEQ ID NO: 2021587 - RNA, 19 nt, Artificial Sequence
  Description of Artificial Sequence: Synthetic oligonucleotide
guccagucaugugauggac

SEQ ID NO: 2021588 - RNA, 19 nt, Artificial Sequence
  Description of Artificial Sequence: Synthetic oligonucleotide
gguaccuuccaaggggcug

SEQ ID NO: 2021589 - RNA, 19 nt, Artificial Sequence
  Description of Artificial Sequence: Synthetic oligonucleotide
gagccacccuccucugccc

SEQ ID NO: 2021590 - RNA, 19 nt, Artificial Sequence
  Description of Artificial Sequence: Synthetic oligonucleotide
uucuguggguugugugguc

SEQ ID NO: 2021591 - RNA, 19 nt, Artificial Sequence
  Description of Artificial Sequence: Synthetic oligonucleotide
cuuguuuaccagcguccga

SEQ ID NO: 2021592 - RNA, 19 nt, Artificial Sequence
  Description of Artificial Sequence: Synthetic oligonucleotide
cuaccccacggauggacca

SEQ ID NO: 2021593 - RNA, 19 nt, Artificial Sequence
  Description of Artificial Sequence: Synthetic oligonucleotide
ggaaaacagugcaccauuc

SEQ ID NO: 2021594 - RNA, 19 nt, Artificial Sequence
  Description of Artificial Sequence: Synthetic oligonucleotide
gggcuacccaggaaaacag

SEQ ID NO: 2021595 - RNA, 19 nt, Artificial Sequence
  Description of Artificial Sequence: Synthetic oligonucleotide
cacggacaaacacagccua

SEQ ID NO: 2021596 - RNA, 19 nt, Artificial Sequence
  Description of Artificial Sequence: Synthetic oligonucleotide
ggaggcuccuccuuguuua

SEQ ID NO: 2021597 - RNA, 19 nt, Artificial Sequence
  Description of Artificial Sequence: Synthetic oligonucleotide
ccuugacccuugcucaggg

SEQ ID NO: 2021598 - RNA, 19 nt, Artificial Sequence
  Description of Artificial Sequence: Synthetic oligonucleotide
ggugucacucagccgcagc

SEQ ID NO: 2021599 - RNA, 19 nt, Artificial Sequence
  Description of Artificial Sequence: Synthetic oligonucleotide
aggcuuugguucgaacaga

SEQ ID NO: 2021600 - RNA, 19 nt, Artificial Sequence
  Description of Artificial Sequence: Synthetic oligonucleotide
uggguugcucugagguaau

SEQ ID NO: 2021601 - RNA, 19 nt, Artificial Sequence
  Description of Artificial Sequence: Synthetic oligonucleotide
aggguuggaagaggaggca

SEQ ID NO: 2021602 - RNA, 19 nt, Artificial Sequence
  Description of Artificial Sequence: Synthetic oligonucleotide
guaacccacagaagggcaa

SEQ ID NO: 2021603 - RNA, 19 nt, Artificial Sequence
  Description of Artificial Sequence: Synthetic oligonucleotide
uaggugccuugacccuugc

SEQ ID NO: 2021604 - RNA, 19 nt, Artificial Sequence
  Description of Artificial Sequence: Synthetic oligonucleotide
aaggugggucccguccagu

SEQ ID NO: 2021605 - RNA, 19 nt, Artificial Sequence
  Description of Artificial Sequence: Synthetic oligonucleotide
gcagauuauucacagucau

SEQ ID NO: 2021606 - RNA, 19 nt, Artificial Sequence
  Description of Artificial Sequence: Synthetic oligonucleotide
auggacaaagcugccugua

SEQ ID NO: 2021607 - RNA, 19 nt, Artificial Sequence
  Description of Artificial Sequence: Synthetic oligonucleotide
cacaagcuuugccuuggga

SEQ ID NO: 2021608 - RNA, 19 nt, Artificial Sequence
  Description of Artificial Sequence: Synthetic oligonucleotide
gcuuugguucgaacagagg

SEQ ID NO: 2021609 - RNA, 19 nt, Artificial Sequence
  Description of Artificial Sequence: Synthetic oligonucleotide
aagcacucccuaggugccu

SEQ ID NO: 2021610 - RNA, 19 nt, Artificial Sequence
  Description of Artificial Sequence: Synthetic oligonucleotide
acaggugcugcaacgucau

SEQ ID NO: 2021611 - RNA, 19 nt, Artificial Sequence
  Description of Artificial Sequence: Synthetic oligonucleotide
cuguuucuggcugccucac

SEQ ID NO: 2021612 - RNA, 19 nt, Artificial Sequence
  Description of Artificial Sequence: Synthetic oligonucleotide
cauguuggucaaggcuuug

SEQ ID NO: 2021613 - RNA, 19 nt, Artificial Sequence
  Description of Artificial Sequence: Synthetic oligonucleotide
gugcaccauuccuagggaa

SEQ ID NO: 2021614 - RNA, 19 nt, Artificial Sequence
  Description of Artificial Sequence: Synthetic oligonucleotide
ccagucaugugauggacaa

SEQ ID NO: 2021615 - RNA, 19 nt, Artificial Sequence
  Description of Artificial Sequence: Synthetic oligonucleotide
cugcaacgucaucaucuuc

SEQ ID NO: 2021616 - RNA, 19 nt, Artificial Sequence
  Description of Artificial Sequence: Synthetic oligonucleotide
guuggucaaggcuuugguu

SEQ ID NO: 2021617 - RNA, 19 nt, Artificial Sequence
  Description of Artificial Sequence: Synthetic oligonucleotide
ccuagggaagaaaucagcu

SEQ ID NO: 2021618 - RNA, 19 nt, Artificial Sequence
  Description of Artificial Sequence: Synthetic oligonucleotide
cuucuuguacgcagugacu

SEQ ID NO: 2021619 - RNA, 19 nt, Artificial Sequence
  Description of Artificial Sequence: Synthetic oligonucleotide
gguucgaacagaggaggga

SEQ ID NO: 2021620 - RNA, 19 nt, Artificial Sequence
  Description of Artificial Sequence: Synthetic oligonucleotide
ggcaaagguauggggaaca

SEQ ID NO: 2021621 - RNA, 19 nt, Artificial Sequence
  Description of Artificial Sequence: Synthetic oligonucleotide
cucaguccagucaugugau

SEQ ID NO: 2021622 - RNA, 19 nt, Artificial Sequence
  Description of Artificial Sequence: Synthetic oligonucleotide
uccgugacucgagggugca

SEQ ID NO: 2021623 - RNA, 19 nt, Artificial Sequence
  Description of Artificial Sequence: Synthetic oligonucleotide
ggggaacaauacagaaaag

SEQ ID NO: 2021624 - RNA, 19 nt, Artificial Sequence
  Description of Artificial Sequence: Synthetic oligonucleotide
caucuaggucauauaaguu

SEQ ID NO: 2021625 - RNA, 19 nt, Artificial Sequence
  Description of Artificial Sequence: Synthetic oligonucleotide
uaccuuccaaggggcugag

SEQ ID NO: 2021626 - RNA, 19 nt, Artificial Sequence
  Description of Artificial Sequence: Synthetic oligonucleotide
caaccuccucgcuacccca

SEQ ID NO: 2021627 - RNA, 19 nt, Artificial Sequence
  Description of Artificial Sequence: Synthetic oligonucleotide
uccccuccucaaaguuuga

SEQ ID NO: 2021628 - RNA, 19 nt, Artificial Sequence
  Description of Artificial Sequence: Synthetic oligonucleotide
ccaacggcccauuggucac

SEQ ID NO: 2021629 - RNA, 19 nt, Artificial Sequence
  Description of Artificial Sequence: Synthetic oligonucleotide
aggugccuugacccuugcu

SEQ ID NO: 2021630 - RNA, 19 nt, Artificial Sequence
  Description of Artificial Sequence: Synthetic oligonucleotide
gccuguagcugcaaacuuc

SEQ ID NO: 2021631 - RNA, 19 nt, Artificial Sequence
  Description of Artificial Sequence: Synthetic oligonucleotide
gcucaggggcuucagucca

SEQ ID NO: 2021632 - RNA, 19 nt, Artificial Sequence
  Description of Artificial Sequence: Synthetic oligonucleotide
ccucuuccgugacucgagg

SEQ ID NO: 2021633 - RNA, 19 nt, Artificial Sequence
  Description of Artificial Sequence: Synthetic oligonucleotide
ugggaggcuccuccuuguu

SEQ ID NO: 2021634 - RNA, 19 nt, Artificial Sequence
  Description of Artificial Sequence: Synthetic oligonucleotide
uucaguccaacggcccauu

SEQ ID NO: 2021635 - RNA, 19 nt, Artificial Sequence
  Description of Artificial Sequence: Synthetic oligonucleotide
ccucaaaguuugauuuuga

SEQ ID NO: 2021636 - RNA, 19 nt, Artificial Sequence
  Description of Artificial Sequence: Synthetic oligonucleotide
gacaucgguuguuguacuu

SEQ ID NO: 2021637 - RNA, 19 nt, Artificial Sequence
  Description of Artificial Sequence: Synthetic oligonucleotide
gcaccauuccuagggaaga

SEQ ID NO: 2021638 - RNA, 19 nt, Artificial Sequence
  Description of Artificial Sequence: Synthetic oligonucleotide
ccgcuugagggcuccacac

SEQ ID NO: 2021639 - RNA, 19 nt, Artificial Sequence
  Description of Artificial Sequence: Synthetic oligonucleotide
uugugagagggagggccuu

SEQ ID NO: 2021640 - RNA, 19 nt, Artificial Sequence
  Description of Artificial Sequence: Synthetic oligonucleotide
gcuaccccacggauggacc

SEQ ID NO: 2021641 - RNA, 19 nt, Artificial Sequence
  Description of Artificial Sequence: Synthetic oligonucleotide
ccuguuucuggcugccuca

SEQ ID NO: 2021642 - RNA, 19 nt, Artificial Sequence
  Description of Artificial Sequence: Synthetic oligonucleotide
ccucgcuaccccacggaug

SEQ ID NO: 2021643 - RNA, 19 nt, Artificial Sequence
  Description of Artificial Sequence: Synthetic oligonucleotide
ccgaggacuugaagagagc

SEQ ID NO: 2021644 - RNA, 19 nt, Artificial Sequence
  Description of Artificial Sequence: Synthetic oligonucleotide
gccuugacccuugcucagg

SEQ ID NO: 2021645 - RNA, 19 nt, Artificial Sequence
  Description of Artificial Sequence: Synthetic oligonucleotide
acccuugcucaggggcuuc

SEQ ID NO: 2021646 - RNA, 19 nt, Artificial Sequence
  Description of Artificial Sequence: Synthetic oligonucleotide
cacuucauggguugcccau

SEQ ID NO: 2021647 - RNA, 19 nt, Artificial Sequence
  Description of Artificial Sequence: Synthetic oligonucleotide
gcacuucauggguugccca

SEQ ID NO: 2021648 - RNA, 19 nt, Artificial Sequence
  Description of Artificial Sequence: Synthetic oligonucleotide
cccacggauggaccagccg

SEQ ID NO: 2021649 - RNA, 19 nt, Artificial Sequence
  Description of Artificial Sequence: Synthetic oligonucleotide
ccuccucgcuaccccacgg

SEQ ID NO: 2021650 - RNA, 19 nt, Artificial Sequence
  Description of Artificial Sequence: Synthetic oligonucleotide
ccagacaucgguuguugua

SEQ ID NO: 2021651 - RNA, 19 nt, Artificial Sequence
  Description of Artificial Sequence: Synthetic oligonucleotide
caucauucugaaccacuuu

SEQ ID NO: 2021652 - RNA, 19 nt, Artificial Sequence
  Description of Artificial Sequence: Synthetic oligonucleotide
acggcccauuggucacaag

SEQ ID NO: 2021653 - RNA, 19 nt, Artificial Sequence
  Description of Artificial Sequence: Synthetic oligonucleotide
agcacucccuaggugccuu

SEQ ID NO: 2021654 - RNA, 19 nt, Artificial Sequence
  Description of Artificial Sequence: Synthetic oligonucleotide
ggaacaggugcugcaacgu

SEQ ID NO: 2021655 - RNA, 19 nt, Artificial Sequence
  Description of Artificial Sequence: Synthetic oligonucleotide
gggcaaagguauggggaac

SEQ ID NO: 2021656 - RNA, 19 nt, Artificial Sequence
  Description of Artificial Sequence: Synthetic oligonucleotide
ccauuccuagggaagaaau

SEQ ID NO: 2021657 - RNA, 19 nt, Artificial Sequence
  Description of Artificial Sequence: Synthetic oligonucleotide
guccaacggcccauugguc

SEQ ID NO: 2021658 - RNA, 19 nt, Artificial Sequence
  Description of Artificial Sequence: Synthetic oligonucleotide
aucgguuguuguacuucuu

SEQ ID NO: 2021659 - RNA, 19 nt, Artificial Sequence
  Description of Artificial Sequence: Synthetic oligonucleotide
cugcucaguccagucaugu

SEQ ID NO: 2021660 - RNA, 19 nt, Artificial Sequence
  Description of Artificial Sequence: Synthetic oligonucleotide
ccaugaugaguggaggaaa

SEQ ID NO: 2021661 - RNA, 19 nt, Artificial Sequence
  Description of Artificial Sequence: Synthetic oligonucleotide
agggagggccuuggacaug

SEQ ID NO: 2021662 - RNA, 19 nt, Artificial Sequence
  Description of Artificial Sequence: Synthetic oligonucleotide
ccacggauggaccagccgu

SEQ ID NO: 2021663 - RNA, 19 nt, Artificial Sequence
  Description of Artificial Sequence: Synthetic oligonucleotide
ggggcugagcacaggcuca

SEQ ID NO: 2021664 - RNA, 19 nt, Artificial Sequence
  Description of Artificial Sequence: Synthetic oligonucleotide
gccgugcccgcuugagggc

SEQ ID NO: 2021665 - RNA, 19 nt, Artificial Sequence
  Description of Artificial Sequence: Synthetic oligonucleotide
acucgagggugcagauuau

SEQ ID NO: 2021666 - RNA, 19 nt, Artificial Sequence
  Description of Artificial Sequence: Synthetic oligonucleotide
cagaaaaggugggucccgu

SEQ ID NO: 2021667 - RNA, 19 nt, Artificial Sequence
  Description of Artificial Sequence: Synthetic oligonucleotide
ggguugcucugagguaaug

SEQ ID NO: 2021668 - RNA, 19 nt, Artificial Sequence
  Description of Artificial Sequence: Synthetic oligonucleotide
gcugcaacgucaucaucuu

SEQ ID NO: 2021669 - RNA, 19 nt, Artificial Sequence
  Description of Artificial Sequence: Synthetic oligonucleotide
gcaucauucugaaccacuu

SEQ ID NO: 2021670 - RNA, 19 nt, Artificial Sequence
  Description of Artificial Sequence: Synthetic oligonucleotide
ggcuccacacacacagaaa

SEQ ID NO: 2021671 - RNA, 19 nt, Artificial Sequence
  Description of Artificial Sequence: Synthetic oligonucleotide
gugcccgcuugagggcucc

SEQ ID NO: 2021672 - RNA, 19 nt, Artificial Sequence
  Description of Artificial Sequence: Synthetic oligonucleotide
ccccacggauggaccagcc

SEQ ID NO: 2021673 - RNA, 19 nt, Artificial Sequence
  Description of Artificial Sequence: Synthetic oligonucleotide
ccguccagugaggaagcac

SEQ ID NO: 2021674 - RNA, 19 nt, Artificial Sequence
  Description of Artificial Sequence: Synthetic oligonucleotide
cagucaugugauggacaaa

SEQ ID NO: 2021675 - RNA, 19 nt, Artificial Sequence
  Description of Artificial Sequence: Synthetic oligonucleotide
ggucccguccagugaggaa

SEQ ID NO: 2021676 - RNA, 19 nt, Artificial Sequence
  Description of Artificial Sequence: Synthetic oligonucleotide
gcacucccuaggugccuug

SEQ ID NO: 2021677 - RNA, 19 nt, Artificial Sequence
  Description of Artificial Sequence: Synthetic oligonucleotide
ucgcuaccccacggaugga

SEQ ID NO: 2021678 - RNA, 19 nt, Artificial Sequence
  Description of Artificial Sequence: Synthetic oligonucleotide
cgugacucgagggugcaga

SEQ ID NO: 2021679 - RNA, 19 nt, Artificial Sequence
  Description of Artificial Sequence: Synthetic oligonucleotide
gggugucacucagccgcag

SEQ ID NO: 2021680 - RNA, 19 nt, Artificial Sequence
  Description of Artificial Sequence: Synthetic oligonucleotide
cuucaguccaacggcccau

SEQ ID NO: 2021681 - RNA, 19 nt, Artificial Sequence
  Description of Artificial Sequence: Synthetic oligonucleotide
ggucaaggcuuugguucga

SEQ ID NO: 2021682 - RNA, 19 nt, Artificial Sequence
  Description of Artificial Sequence: Synthetic oligonucleotide
cggauggaccagccgugcc

SEQ ID NO: 2021683 - RNA, 19 nt, Artificial Sequence
  Description of Artificial Sequence: Synthetic oligonucleotide
cccauuggucacaagcuuu

SEQ ID NO: 2021684 - RNA, 19 nt, Artificial Sequence
  Description of Artificial Sequence: Synthetic oligonucleotide
gcguccgagacauguuggu

SEQ ID NO: 2021685 - RNA, 19 nt, Artificial Sequence
  Description of Artificial Sequence: Synthetic oligonucleotide
cauccagacaucgguuguu

SEQ ID NO: 2021686 - RNA, 19 nt, Artificial Sequence
  Description of Artificial Sequence: Synthetic oligonucleotide
cccgcuugagggcuccaca

SEQ ID NO: 2021687 - RNA, 19 nt, Artificial Sequence
  Description of Artificial Sequence: Synthetic oligonucleotide
gggucccguccagugagga

SEQ ID NO: 2021688 - RNA, 19 nt, Artificial Sequence
  Description of Artificial Sequence: Synthetic oligonucleotide
ccgccgaggcagcucacuc

SEQ ID NO: 2021689 - RNA, 19 nt, Artificial Sequence
  Description of Artificial Sequence: Synthetic oligonucleotide
cgaggacuugaagagagcu

SEQ ID NO: 2021690 - RNA, 19 nt, Artificial Sequence
  Description of Artificial Sequence: Synthetic oligonucleotide
cuguagcugcaaacuucau

SEQ ID NO: 2021691 - RNA, 19 nt, Artificial Sequence
  Description of Artificial Sequence: Synthetic oligonucleotide
cgcuaccccacggauggac

SEQ ID NO: 2021692 - RNA, 19 nt, Artificial Sequence
  Description of Artificial Sequence: Synthetic oligonucleotide
ggcuacccaggaaaacagu

SEQ ID NO: 2021693 - RNA, 19 nt, Artificial Sequence
  Description of Artificial Sequence: Synthetic oligonucleotide
gacccuugcucaggggcuu

SEQ ID NO: 2021694 - RNA, 19 nt, Artificial Sequence
  Description of Artificial Sequence: Synthetic oligonucleotide
ugcccgcuugagggcucca

SEQ ID NO: 2021695 - RNA, 19 nt, Artificial Sequence
  Description of Artificial Sequence: Synthetic oligonucleotide
cucgagggugcagauuauu

SEQ ID NO: 2021696 - RNA, 19 nt, Artificial Sequence
  Description of Artificial Sequence: Synthetic oligonucleotide
gguugcccauccagacauc

SEQ ID NO: 2021697 - RNA, 19 nt, Artificial Sequence
  Description of Artificial Sequence: Synthetic oligonucleotide
ccgagacauguuggucaag

SEQ ID NO: 2021698 - RNA, 19 nt, Artificial Sequence
  Description of Artificial Sequence: Synthetic oligonucleotide
ggggagacacacggacaaa

SEQ ID NO: 2021699 - RNA, 19 nt, Artificial Sequence
  Description of Artificial Sequence: Synthetic oligonucleotide
gcccgcuugagggcuccac

SEQ ID NO: 2021700 - RNA, 19 nt, Artificial Sequence
  Description of Artificial Sequence: Synthetic oligonucleotide
ccgugacucgagggugcag

SEQ ID NO: 2021701 - RNA, 19 nt, Artificial Sequence
  Description of Artificial Sequence: Synthetic oligonucleotide
ggaccagccgugcccgcuu

SEQ ID NO: 2021702 - RNA, 19 nt, Artificial Sequence
  Description of Artificial Sequence: Synthetic oligonucleotide
cgugcccgcuugagggcuc

SEQ ID NO: 2021703 - RNA, 19 nt, Artificial Sequence
  Description of Artificial Sequence: Synthetic oligonucleotide
gcccauccagacaucgguu

SEQ ID NO: 2021704 - RNA, 19 nt, Artificial Sequence
  Description of Artificial Sequence: Synthetic oligonucleotide
ggagccguguaggcaucau

SEQ ID NO: 2021705 - RNA, 19 nt, Artificial Sequence
  Description of Artificial Sequence: Synthetic oligonucleotide
ccuaggugccuugacccuu

SEQ ID NO: 2021706 - RNA, 19 nt, Artificial Sequence
  Description of Artificial Sequence: Synthetic oligonucleotide
cgaagacaaccuccucgcu

SEQ ID NO: 2021707 - RNA, 19 nt, Artificial Sequence
  Description of Artificial Sequence: Synthetic oligonucleotide
ccagcguccgagacauguu

SEQ ID NO: 2021708 - RNA, 19 nt, Artificial Sequence
  Description of Artificial Sequence: Synthetic oligonucleotide
cccguccagugaggaagca

SEQ ID NO: 2021709 - RNA, 19 nt, Artificial Sequence
  Description of Artificial Sequence: Synthetic oligonucleotide
ccccgccgaggcagcucac

SEQ ID NO: 2021710 - RNA, 19 nt, Artificial Sequence
  Description of Artificial Sequence: Synthetic oligonucleotide
ccccuccucaaaguuugau

SEQ ID NO: 2021711 - RNA, 19 nt, Artificial Sequence
  Description of Artificial Sequence: Synthetic oligonucleotide
ccgugcccgcuugagggcu

SEQ ID NO: 2021712 - RNA, 19 nt, Artificial Sequence
  Description of Artificial Sequence: Synthetic oligonucleotide
aaaccauagaaauagggcc

SEQ ID NO: 2021713 - RNA, 19 nt, Artificial Sequence
  Description of Artificial Sequence: Synthetic oligonucleotide
cuucuuauaagucugaacg

SEQ ID NO: 2021714 - RNA, 19 nt, Artificial Sequence
  Description of Artificial Sequence: Synthetic oligonucleotide
acauacaggacacaaaagc

SEQ ID NO: 2021715 - RNA, 19 nt, Artificial Sequence
  Description of Artificial Sequence: Synthetic oligonucleotide
uucauuguaagaauucugg

SEQ ID NO: 2021716 - RNA, 19 nt, Artificial Sequence
  Description of Artificial Sequence: Synthetic oligonucleotide
agguuaaaagcccugaagc

SEQ ID NO: 2021717 - RNA, 19 nt, Artificial Sequence
  Description of Artificial Sequence: Synthetic oligonucleotide
uuaacuagguuuuaucagg

SEQ ID NO: 2021718 - RNA, 19 nt, Artificial Sequence
  Description of Artificial Sequence: Synthetic oligonucleotide
ugauuuuaguucaaaagcc

SEQ ID NO: 2021719 - RNA, 19 nt, Artificial Sequence
  Description of Artificial Sequence: Synthetic oligonucleotide
uccaauaaaagucugcagc

SEQ ID NO: 2021720 - RNA, 19 nt, Artificial Sequence
  Description of Artificial Sequence: Synthetic oligonucleotide
aaguuuuguucccugaggg

SEQ ID NO: 2021721 - RNA, 19 nt, Artificial Sequence
  Description of Artificial Sequence: Synthetic oligonucleotide
gugauuuuaguucaaaagc

SEQ ID NO: 2021722 - RNA, 19 nt, Artificial Sequence
  Description of Artificial Sequence: Synthetic oligonucleotide
ucugcuaugccauucauga

SEQ ID NO: 2021723 - RNA, 19 nt, Artificial Sequence
  Description of Artificial Sequence: Synthetic oligonucleotide
aggcaaauaagcuuaagag

SEQ ID NO: 2021724 - RNA, 19 nt, Artificial Sequence
  Description of Artificial Sequence: Synthetic oligonucleotide
gagaaauucaugaacaggc

SEQ ID NO: 2021725 - RNA, 19 nt, Artificial Sequence
  Description of Artificial Sequence: Synthetic oligonucleotide
agggaugugauuuuaguuc

SEQ ID NO: 2021726 - RNA, 19 nt, Artificial Sequence
  Description of Artificial Sequence: Synthetic oligonucleotide
uuaucagggacacagagau

SEQ ID NO: 2021727 - RNA, 19 nt, Artificial Sequence
  Description of Artificial Sequence: Synthetic oligonucleotide
acuagguuuuaucagggac

SEQ ID NO: 2021728 - RNA, 19 nt, Artificial Sequence
  Description of Artificial Sequence: Synthetic oligonucleotide
uguccaaccaugaggaagg

SEQ ID NO: 2021729 - RNA, 19 nt, Artificial Sequence
  Description of Artificial Sequence: Synthetic oligonucleotide
aauuuucucuucuuauaag

SEQ ID NO: 2021730 - RNA, 19 nt, Artificial Sequence
  Description of Artificial Sequence: Synthetic oligonucleotide
aacaguuccaagcucggag

SEQ ID NO: 2021731 - RNA, 19 nt, Artificial Sequence
  Description of Artificial Sequence: Synthetic oligonucleotide
aaauacgccuccgacaugg

SEQ ID NO: 2021732 - RNA, 19 nt, Artificial Sequence
  Description of Artificial Sequence: Synthetic oligonucleotide
aagguuaaaagcccugaag

SEQ ID NO: 2021733 - RNA, 19 nt, Artificial Sequence
  Description of Artificial Sequence: Synthetic oligonucleotide
caaaaccauagaaauaggg

SEQ ID NO: 2021734 - RNA, 19 nt, Artificial Sequence
  Description of Artificial Sequence: Synthetic oligonucleotide
aauaaaagucugcagcaga

SEQ ID NO: 2021735 - RNA, 19 nt, Artificial Sequence
  Description of Artificial Sequence: Synthetic oligonucleotide
aaccauagaaauagggccc

SEQ ID NO: 2021736 - RNA, 19 nt, Artificial Sequence
  Description of Artificial Sequence: Synthetic oligonucleotide
agaagccugacccuuuucc

SEQ ID NO: 2021737 - RNA, 19 nt, Artificial Sequence
  Description of Artificial Sequence: Synthetic oligonucleotide
gacauuagcaucugcacug

SEQ ID NO: 2021738 - RNA, 19 nt, Artificial Sequence
  Description of Artificial Sequence: Synthetic oligonucleotide
aguuaacuagguuuuauca

SEQ ID NO: 2021739 - RNA, 19 nt, Artificial Sequence
  Description of Artificial Sequence: Synthetic oligonucleotide
aaagacaggaaguucuccu

SEQ ID NO: 2021740 - RNA, 19 nt, Artificial Sequence
  Description of Artificial Sequence: Synthetic oligonucleotide
uuauaagucugaacgaggu

SEQ ID NO: 2021741 - RNA, 19 nt, Artificial Sequence
  Description of Artificial Sequence: Synthetic oligonucleotide
uccaaagacaggaaguucu

SEQ ID NO: 2021742 - RNA, 19 nt, Artificial Sequence
  Description of Artificial Sequence: Synthetic oligonucleotide
gaugcugugaucugagaag

SEQ ID NO: 2021743 - RNA, 19 nt, Artificial Sequence
  Description of Artificial Sequence: Synthetic oligonucleotide
guuaacuagguuuuaucag

SEQ ID NO: 2021744 - RNA, 19 nt, Artificial Sequence
  Description of Artificial Sequence: Synthetic oligonucleotide
uccuguuuuggaaauuggg

SEQ ID NO: 2021745 - RNA, 19 nt, Artificial Sequence
  Description of Artificial Sequence: Synthetic oligonucleotide
ucuuauaagucugaacgag

SEQ ID NO: 2021746 - RNA, 19 nt, Artificial Sequence
  Description of Artificial Sequence: Synthetic oligonucleotide
aauucaugaacaggcagag

SEQ ID NO: 2021747 - RNA, 19 nt, Artificial Sequence
  Description of Artificial Sequence: Synthetic oligonucleotide
gaaggcaaggcaaauaagc

SEQ ID NO: 2021748 - RNA, 19 nt, Artificial Sequence
  Description of Artificial Sequence: Synthetic oligonucleotide
ugggguaagucccagcagg

SEQ ID NO: 2021749 - RNA, 19 nt, Artificial Sequence
  Description of Artificial Sequence: Synthetic oligonucleotide
caaccaaacaguuccaagc

SEQ ID NO: 2021750 - RNA, 19 nt, Artificial Sequence
  Description of Artificial Sequence: Synthetic oligonucleotide
gucaaaaugcagaaguugg

SEQ ID NO: 2021751 - RNA, 19 nt, Artificial Sequence
  Description of Artificial Sequence: Synthetic oligonucleotide
uugucaaagaguccuuuag

SEQ ID NO: 2021752 - RNA, 19 nt, Artificial Sequence
  Description of Artificial Sequence: Synthetic oligonucleotide
ugcuaugccauucaugacu

SEQ ID NO: 2021753 - RNA, 19 nt, Artificial Sequence
  Description of Artificial Sequence: Synthetic oligonucleotide
uuuuaguucaaaagcccug

SEQ ID NO: 2021754 - RNA, 19 nt, Artificial Sequence
  Description of Artificial Sequence: Synthetic oligonucleotide
gagauaaauccacaaguug

SEQ ID NO: 2021755 - RNA, 19 nt, Artificial Sequence
  Description of Artificial Sequence: Synthetic oligonucleotide
cucugaaagucauucagcc

SEQ ID NO: 2021756 - RNA, 19 nt, Artificial Sequence
  Description of Artificial Sequence: Synthetic oligonucleotide
uaagucugaacgagguugg

SEQ ID NO: 2021757 - RNA, 19 nt, Artificial Sequence
  Description of Artificial Sequence: Synthetic oligonucleotide
gagacugggagauaucugc

SEQ ID NO: 2021758 - RNA, 19 nt, Artificial Sequence
  Description of Artificial Sequence: Synthetic oligonucleotide
auuagugaauuuucucuuc

SEQ ID NO: 2021759 - RNA, 19 nt, Artificial Sequence
  Description of Artificial Sequence: Synthetic oligonucleotide
aaccaaacaguuccaagcu

SEQ ID NO: 2021760 - RNA, 19 nt, Artificial Sequence
  Description of Artificial Sequence: Synthetic oligonucleotide
auaagucugaacgagguug

SEQ ID NO: 2021761 - RNA, 19 nt, Artificial Sequence
  Description of Artificial Sequence: Synthetic oligonucleotide
uugggagccaaaaccauag

SEQ ID NO: 2021762 - RNA, 19 nt, Artificial Sequence
  Description of Artificial Sequence: Synthetic oligonucleotide
ucaaguuuuguucccugag

SEQ ID NO: 2021763 - RNA, 19 nt, Artificial Sequence
  Description of Artificial Sequence: Synthetic oligonucleotide
ugaagugucuucauuguaa

SEQ ID NO: 2021764 - RNA, 19 nt, Artificial Sequence
  Description of Artificial Sequence: Synthetic oligonucleotide
cucuggacugucaaaaugc

SEQ ID NO: 2021765 - RNA, 19 nt, Artificial Sequence
  Description of Artificial Sequence: Synthetic oligonucleotide
gaagaaggcgcccaggcgc

SEQ ID NO: 2021766 - RNA, 19 nt, Artificial Sequence
  Description of Artificial Sequence: Synthetic oligonucleotide
ugagggagcgcguaguccg

SEQ ID NO: 2021767 - RNA, 19 nt, Artificial Sequence
  Description of Artificial Sequence: Synthetic oligonucleotide
aauugggguaagucccagc

SEQ ID NO: 2021768 - RNA, 19 nt, Artificial Sequence
  Description of Artificial Sequence: Synthetic oligonucleotide
aauagggccccauuuugug

SEQ ID NO: 2021769 - RNA, 19 nt, Artificial Sequence
  Description of Artificial Sequence: Synthetic oligonucleotide
aaauaagcuuaagagaaau

SEQ ID NO: 2021770 - RNA, 19 nt, Artificial Sequence
  Description of Artificial Sequence: Synthetic oligonucleotide
uguccuuuguccaaccaug

SEQ ID NO: 2021771 - RNA, 19 nt, Artificial Sequence
  Description of Artificial Sequence: Synthetic oligonucleotide
uccauauuagugaauuuuc

SEQ ID NO: 2021772 - RNA, 19 nt, Artificial Sequence
  Description of Artificial Sequence: Synthetic oligonucleotide
acgacauuagcaucugcac

SEQ ID NO: 2021773 - RNA, 19 nt, Artificial Sequence
  Description of Artificial Sequence: Synthetic oligonucleotide
uaucuugggaauuuccaca

SEQ ID NO: 2021774 - RNA, 19 nt, Artificial Sequence
  Description of Artificial Sequence: Synthetic oligonucleotide
ucuugguauaucuugggaa

SEQ ID NO: 2021775 - RNA, 19 nt, Artificial Sequence
  Description of Artificial Sequence: Synthetic oligonucleotide
uuuguggagguccacgaca

SEQ ID NO: 2021776 - RNA, 19 nt, Artificial Sequence
  Description of Artificial Sequence: Synthetic oligonucleotide
aagcucaaguuuuguuccc

SEQ ID NO: 2021777 - RNA, 19 nt, Artificial Sequence
  Description of Artificial Sequence: Synthetic oligonucleotide
gguuuuaucagggacacag

SEQ ID NO: 2021778 - RNA, 19 nt, Artificial Sequence
  Description of Artificial Sequence: Synthetic oligonucleotide
cugauuacauacaggacac

SEQ ID NO: 2021779 - RNA, 19 nt, Artificial Sequence
  Description of Artificial Sequence: Synthetic oligonucleotide
agaugacccacuuucagga

SEQ ID NO: 2021780 - RNA, 19 nt, Artificial Sequence
  Description of Artificial Sequence: Synthetic oligonucleotide
ugaacaggcagagaugacc

SEQ ID NO: 2021781 - RNA, 19 nt, Artificial Sequence
  Description of Artificial Sequence: Synthetic oligonucleotide
uuagccagccacaagggaa

SEQ ID NO: 2021782 - RNA, 19 nt, Artificial Sequence
  Description of Artificial Sequence: Synthetic oligonucleotide
uucuuauaagucugaacga

SEQ ID NO: 2021783 - RNA, 19 nt, Artificial Sequence
  Description of Artificial Sequence: Synthetic oligonucleotide
gaaccguccaauaaaaguc

SEQ ID NO: 2021784 - RNA, 19 nt, Artificial Sequence
  Description of Artificial Sequence: Synthetic oligonucleotide
gagauaucugcauucucug

SEQ ID NO: 2021785 - RNA, 19 nt, Artificial Sequence
  Description of Artificial Sequence: Synthetic oligonucleotide
ugaucugagaagccugacc

SEQ ID NO: 2021786 - RNA, 19 nt, Artificial Sequence
  Description of Artificial Sequence: Synthetic oligonucleotide
uuuaguucaaaagcccuga

SEQ ID NO: 2021787 - RNA, 19 nt, Artificial Sequence
  Description of Artificial Sequence: Synthetic oligonucleotide
ucugaacgagguuggaugc

SEQ ID NO: 2021788 - RNA, 19 nt, Artificial Sequence
  Description of Artificial Sequence: Synthetic oligonucleotide
auaagccucucucugucuc

SEQ ID NO: 2021789 - RNA, 19 nt, Artificial Sequence
  Description of Artificial Sequence: Synthetic oligonucleotide
aucuugggaauuuccacag

SEQ ID NO: 2021790 - RNA, 19 nt, Artificial Sequence
  Description of Artificial Sequence: Synthetic oligonucleotide
uguaagaauucugggagga

SEQ ID NO: 2021791 - RNA, 19 nt, Artificial Sequence
  Description of Artificial Sequence: Synthetic oligonucleotide
agugucuucauuguaagaa

SEQ ID NO: 2021792 - RNA, 19 nt, Artificial Sequence
  Description of Artificial Sequence: Synthetic oligonucleotide
ucugaaagucauucagccc

SEQ ID NO: 2021793 - RNA, 19 nt, Artificial Sequence
  Description of Artificial Sequence: Synthetic oligonucleotide
gucugaacgagguuggaug

SEQ ID NO: 2021794 - RNA, 19 nt, Artificial Sequence
  Description of Artificial Sequence: Synthetic oligonucleotide
agagaugacccacuuucag

SEQ ID NO: 2021795 - RNA, 19 nt, Artificial Sequence
  Description of Artificial Sequence: Synthetic oligonucleotide
gaguccuuuagccagccac

SEQ ID NO: 2021796 - RNA, 19 nt, Artificial Sequence
  Description of Artificial Sequence: Synthetic oligonucleotide
uguuuuggaaauuggggua

SEQ ID NO: 2021797 - RNA, 19 nt, Artificial Sequence
  Description of Artificial Sequence: Synthetic oligonucleotide
uaagaauucugggaggagu

SEQ ID NO: 2021798 - RNA, 19 nt, Artificial Sequence
  Description of Artificial Sequence: Synthetic oligonucleotide
ucuagccuggcuaccagug

SEQ ID NO: 2021799 - RNA, 19 nt, Artificial Sequence
  Description of Artificial Sequence: Synthetic oligonucleotide
gacacagagauaaauccac

SEQ ID NO: 2021800 - RNA, 19 nt, Artificial Sequence
  Description of Artificial Sequence: Synthetic oligonucleotide
cacccaugaaguuaacuag

SEQ ID NO: 2021801 - RNA, 19 nt, Artificial Sequence
  Description of Artificial Sequence: Synthetic oligonucleotide
ccuauuugaaauaagccuc

SEQ ID NO: 2021802 - RNA, 19 nt, Artificial Sequence
  Description of Artificial Sequence: Synthetic oligonucleotide
cuuuagccagccacaaggg

SEQ ID NO: 2021803 - RNA, 19 nt, Artificial Sequence
  Description of Artificial Sequence: Synthetic oligonucleotide
aaggaugcgccgcuuguug

SEQ ID NO: 2021804 - RNA, 19 nt, Artificial Sequence
  Description of Artificial Sequence: Synthetic oligonucleotide
ggaauuuccacagaaagga

SEQ ID NO: 2021805 - RNA, 19 nt, Artificial Sequence
  Description of Artificial Sequence: Synthetic oligonucleotide
ccuuuagccagccacaagg

SEQ ID NO: 2021806 - RNA, 19 nt, Artificial Sequence
  Description of Artificial Sequence: Synthetic oligonucleotide
ccuguuuuggaaauugggg

SEQ ID NO: 2021807 - RNA, 19 nt, Artificial Sequence
  Description of Artificial Sequence: Synthetic oligonucleotide
aucagggacacagagauaa

SEQ ID NO: 2021808 - RNA, 19 nt, Artificial Sequence
  Description of Artificial Sequence: Synthetic oligonucleotide
accauagaaauagggcccc

SEQ ID NO: 2021809 - RNA, 19 nt, Artificial Sequence
  Description of Artificial Sequence: Synthetic oligonucleotide
ugugaucugagaagccuga

SEQ ID NO: 2021810 - RNA, 19 nt, Artificial Sequence
  Description of Artificial Sequence: Synthetic oligonucleotide
augacccacuuucaggauc

SEQ ID NO: 2021811 - RNA, 19 nt, Artificial Sequence
  Description of Artificial Sequence: Synthetic oligonucleotide
aagcuuaagagaaauucau

SEQ ID NO: 2021812 - RNA, 19 nt, Artificial Sequence
  Description of Artificial Sequence: Synthetic oligonucleotide
ccaaacaguuccaagcucg

SEQ ID NO: 2021813 - RNA, 19 nt, Artificial Sequence
  Description of Artificial Sequence: Synthetic oligonucleotide
ggaaauugggguaaguccc

SEQ ID NO: 2021814 - RNA, 19 nt, Artificial Sequence
  Description of Artificial Sequence: Synthetic oligonucleotide
aaguugggagccaaaacca

SEQ ID NO: 2021815 - RNA, 19 nt, Artificial Sequence
  Description of Artificial Sequence: Synthetic oligonucleotide
gaagccugacccuuuuccc

SEQ ID NO: 2021816 - RNA, 19 nt, Artificial Sequence
  Description of Artificial Sequence: Synthetic oligonucleotide
aauaagccucucucugucu

SEQ ID NO: 2021817 - RNA, 19 nt, Artificial Sequence
  Description of Artificial Sequence: Synthetic oligonucleotide
aaaagcccugaagcaagac

SEQ ID NO: 2021818 - RNA, 19 nt, Artificial Sequence
  Description of Artificial Sequence: Synthetic oligonucleotide
uccacggggaaauacgccu

SEQ ID NO: 2021819 - RNA, 19 nt, Artificial Sequence
  Description of Artificial Sequence: Synthetic oligonucleotide
aucugcauucucuggacug

SEQ ID NO: 2021820 - RNA, 19 nt, Artificial Sequence
  Description of Artificial Sequence: Synthetic oligonucleotide
gguaagucccagcagguag

SEQ ID NO: 2021821 - RNA, 19 nt, Artificial Sequence
  Description of Artificial Sequence: Synthetic oligonucleotide
uuccauauuagugaauuuu

SEQ ID NO: 2021822 - RNA, 19 nt, Artificial Sequence
  Description of Artificial Sequence: Synthetic oligonucleotide
uuuguucccugagggagcg

SEQ ID NO: 2021823 - RNA, 19 nt, Artificial Sequence
  Description of Artificial Sequence: Synthetic oligonucleotide
auaaauccacaaguuguag

SEQ ID NO: 2021824 - RNA, 19 nt, Artificial Sequence
  Description of Artificial Sequence: Synthetic oligonucleotide
ggcaaauaagcuuaagaga

SEQ ID NO: 2021825 - RNA, 19 nt, Artificial Sequence
  Description of Artificial Sequence: Synthetic oligonucleotide
ugaagguuaaaagcccuga

SEQ ID NO: 2021826 - RNA, 19 nt, Artificial Sequence
  Description of Artificial Sequence: Synthetic oligonucleotide
augccauucaugacuuucc

SEQ ID NO: 2021827 - RNA, 19 nt, Artificial Sequence
  Description of Artificial Sequence: Synthetic oligonucleotide
uuggaaauugggguaaguc

SEQ ID NO: 2021828 - RNA, 19 nt, Artificial Sequence
  Description of Artificial Sequence: Synthetic oligonucleotide
ucccaauuuccuguuuugg

SEQ ID NO: 2021829 - RNA, 19 nt, Artificial Sequence
  Description of Artificial Sequence: Synthetic oligonucleotide
uuucugcccuauuugaaau

SEQ ID NO: 2021830 - RNA, 19 nt, Artificial Sequence
  Description of Artificial Sequence: Synthetic oligonucleotide
ccuuuguccaaccaugagg

SEQ ID NO: 2021831 - RNA, 19 nt, Artificial Sequence
  Description of Artificial Sequence: Synthetic oligonucleotide
ugccauucaugacuuuccc

SEQ ID NO: 2021832 - RNA, 19 nt, Artificial Sequence
  Description of Artificial Sequence: Synthetic oligonucleotide
ucucaucuagccuggcuac

SEQ ID NO: 2021833 - RNA, 19 nt, Artificial Sequence
  Description of Artificial Sequence: Synthetic oligonucleotide
cuccucgggucccagagcg

SEQ ID NO: 2021834 - RNA, 19 nt, Artificial Sequence
  Description of Artificial Sequence: Synthetic oligonucleotide
uuuuguggagguccacgac

SEQ ID NO: 2021835 - RNA, 19 nt, Artificial Sequence
  Description of Artificial Sequence: Synthetic oligonucleotide
uucccaauuuccuguuuug

SEQ ID NO: 2021836 - RNA, 19 nt, Artificial Sequence
  Description of Artificial Sequence: Synthetic oligonucleotide
uaaaagcccugaagcaaga

SEQ ID NO: 2021837 - RNA, 19 nt, Artificial Sequence
  Description of Artificial Sequence: Synthetic oligonucleotide
guauaucuugggaauuucc

SEQ ID NO: 2021838 - RNA, 19 nt, Artificial Sequence
  Description of Artificial Sequence: Synthetic oligonucleotide
aaccguccaauaaaagucu

SEQ ID NO: 2021839 - RNA, 19 nt, Artificial Sequence
  Description of Artificial Sequence: Synthetic oligonucleotide
aacgagguuggaugcugug

SEQ ID NO: 2021840 - RNA, 19 nt, Artificial Sequence
  Description of Artificial Sequence: Synthetic oligonucleotide
cacgacauuagcaucugca

SEQ ID NO: 2021841 - RNA, 19 nt, Artificial Sequence
  Description of Artificial Sequence: Synthetic oligonucleotide
aaauagggccccauuuugu

SEQ ID NO: 2021842 - RNA, 19 nt, Artificial Sequence
  Description of Artificial Sequence: Synthetic oligonucleotide
cagagauaaauccacaagu

SEQ ID NO: 2021843 - RNA, 19 nt, Artificial Sequence
  Description of Artificial Sequence: Synthetic oligonucleotide
acuccacggggaaauacgc

SEQ ID NO: 2021844 - RNA, 19 nt, Artificial Sequence
  Description of Artificial Sequence: Synthetic oligonucleotide
uucucccgggacauuagga

SEQ ID NO: 2021845 - RNA, 19 nt, Artificial Sequence
  Description of Artificial Sequence: Synthetic oligonucleotide
agaaaggaugcgccgcuug

SEQ ID NO: 2021846 - RNA, 19 nt, Artificial Sequence
  Description of Artificial Sequence: Synthetic oligonucleotide
guucaaaagcccugauuac

SEQ ID NO: 2021847 - RNA, 19 nt, Artificial Sequence
  Description of Artificial Sequence: Synthetic oligonucleotide
uguaguucguuuccacuuu

SEQ ID NO: 2021848 - RNA, 19 nt, Artificial Sequence
  Description of Artificial Sequence: Synthetic oligonucleotide
ucugcccuauuugaaauaa

SEQ ID NO: 2021849 - RNA, 19 nt, Artificial Sequence
  Description of Artificial Sequence: Synthetic oligonucleotide
cugaacacaguccuccauc

SEQ ID NO: 2021850 - RNA, 19 nt, Artificial Sequence
  Description of Artificial Sequence: Synthetic oligonucleotide
aaauugggguaagucccag

SEQ ID NO: 2021851 - RNA, 19 nt, Artificial Sequence
  Description of Artificial Sequence: Synthetic oligonucleotide
uccuccaucccucuuggua

SEQ ID NO: 2021852 - RNA, 19 nt, Artificial Sequence
  Description of Artificial Sequence: Synthetic oligonucleotide
uaguucaaaagcccugauu

SEQ ID NO: 2021853 - RNA, 19 nt, Artificial Sequence
  Description of Artificial Sequence: Synthetic oligonucleotide
guuaaaagcccugaagcaa

SEQ ID NO: 2021854 - RNA, 19 nt, Artificial Sequence
  Description of Artificial Sequence: Synthetic oligonucleotide
acaguugggucacccauga

SEQ ID NO: 2021855 - RNA, 19 nt, Artificial Sequence
  Description of Artificial Sequence: Synthetic oligonucleotide
cauacaggacacaaaagcu

SEQ ID NO: 2021856 - RNA, 19 nt, Artificial Sequence
  Description of Artificial Sequence: Synthetic oligonucleotide
cugugaucugagaagccug

SEQ ID NO: 2021857 - RNA, 19 nt, Artificial Sequence
  Description of Artificial Sequence: Synthetic oligonucleotide
ugaacgagguuggaugcug

SEQ ID NO: 2021858 - RNA, 19 nt, Artificial Sequence
  Description of Artificial Sequence: Synthetic oligonucleotide
cuaccagugcugaaguguc

SEQ ID NO: 2021859 - RNA, 19 nt, Artificial Sequence
  Description of Artificial Sequence: Synthetic oligonucleotide
agcaucugcacugaacaca

SEQ ID NO: 2021860 - RNA, 19 nt, Artificial Sequence
  Description of Artificial Sequence: Synthetic oligonucleotide
agagauaaauccacaaguu

SEQ ID NO: 2021861 - RNA, 19 nt, Artificial Sequence
  Description of Artificial Sequence: Synthetic oligonucleotide
gaaauaagccucucucugu

SEQ ID NO: 2021862 - RNA, 19 nt, Artificial Sequence
  Description of Artificial Sequence: Synthetic oligonucleotide
cuuguugucaaagaguccu

SEQ ID NO: 2021863 - RNA, 19 nt, Artificial Sequence
  Description of Artificial Sequence: Synthetic oligonucleotide
cuugggaauuuccacagaa

SEQ ID NO: 2021864 - RNA, 19 nt, Artificial Sequence
  Description of Artificial Sequence: Synthetic oligonucleotide
cugaagguuaaaagcccug

SEQ ID NO: 2021865 - RNA, 19 nt, Artificial Sequence
  Description of Artificial Sequence: Synthetic oligonucleotide
acagaaaggaugcgccgcu

SEQ ID NO: 2021866 - RNA, 19 nt, Artificial Sequence
  Description of Artificial Sequence: Synthetic oligonucleotide
ucucccgggacauuaggau

SEQ ID NO: 2021867 - RNA, 19 nt, Artificial Sequence
  Description of Artificial Sequence: Synthetic oligonucleotide
uuaguucaaaagcccugau

SEQ ID NO: 2021868 - RNA, 19 nt, Artificial Sequence
  Description of Artificial Sequence: Synthetic oligonucleotide
agcuuaagagaaauucaug

SEQ ID NO: 2021869 - RNA, 19 nt, Artificial Sequence
  Description of Artificial Sequence: Synthetic oligonucleotide
gcccugauuacauacagga

SEQ ID NO: 2021870 - RNA, 19 nt, Artificial Sequence
  Description of Artificial Sequence: Synthetic oligonucleotide
acacaguugggucacccau

SEQ ID NO: 2021871 - RNA, 19 nt, Artificial Sequence
  Description of Artificial Sequence: Synthetic oligonucleotide
cuggcuaccagugcugaag

SEQ ID NO: 2021872 - RNA, 19 nt, Artificial Sequence
  Description of Artificial Sequence: Synthetic oligonucleotide
caagcucggagauugcuga

SEQ ID NO: 2021873 - RNA, 19 nt, Artificial Sequence
  Description of Artificial Sequence: Synthetic oligonucleotide
cacagaaaggaugcgccgc

SEQ ID NO: 2021874 - RNA, 19 nt, Artificial Sequence
  Description of Artificial Sequence: Synthetic oligonucleotide
auggcugcucgccgcagcg

SEQ ID NO: 2021875 - RNA, 19 nt, Artificial Sequence
  Description of Artificial Sequence: Synthetic oligonucleotide
ucuugggaauuuccacaga

SEQ ID NO: 2021876 - RNA, 19 nt, Artificial Sequence
  Description of Artificial Sequence: Synthetic oligonucleotide
aauacgccuccgacauggc

SEQ ID NO: 2021877 - RNA, 19 nt, Artificial Sequence
  Description of Artificial Sequence: Synthetic oligonucleotide
cuuucugcccuauuugaaa

SEQ ID NO: 2021878 - RNA, 19 nt, Artificial Sequence
  Description of Artificial Sequence: Synthetic oligonucleotide
uggcuaccagugcugaagu

SEQ ID NO: 2021879 - RNA, 19 nt, Artificial Sequence
  Description of Artificial Sequence: Synthetic oligonucleotide
uccgacauggcugcucgcc

SEQ ID NO: 2021880 - RNA, 19 nt, Artificial Sequence
  Description of Artificial Sequence: Synthetic oligonucleotide
gggaugugauuuuaguuca

SEQ ID NO: 2021881 - RNA, 19 nt, Artificial Sequence
  Description of Artificial Sequence: Synthetic oligonucleotide
ccaauaaaagucugcagca

SEQ ID NO: 2021882 - RNA, 19 nt, Artificial Sequence
  Description of Artificial Sequence: Synthetic oligonucleotide
cacagagauaaauccacaa

SEQ ID NO: 2021883 - RNA, 19 nt, Artificial Sequence
  Description of Artificial Sequence: Synthetic oligonucleotide
gcucggagauugcugaagg

SEQ ID NO: 2021884 - RNA, 19 nt, Artificial Sequence
  Description of Artificial Sequence: Synthetic oligonucleotide
ggaggaguccaugaugcgg

SEQ ID NO: 2021885 - RNA, 19 nt, Artificial Sequence
  Description of Artificial Sequence: Synthetic oligonucleotide
cuucucccgggacauuagg

SEQ ID NO: 2021886 - RNA, 19 nt, Artificial Sequence
  Description of Artificial Sequence: Synthetic oligonucleotide
ucggagauugcugaagguu

SEQ ID NO: 2021887 - RNA, 19 nt, Artificial Sequence
  Description of Artificial Sequence: Synthetic oligonucleotide
uccacaaguuguaguucgu

SEQ ID NO: 2021888 - RNA, 19 nt, Artificial Sequence
  Description of Artificial Sequence: Synthetic oligonucleotide
cucgcuccaggaagaaggc

SEQ ID NO: 2021889 - RNA, 19 nt, Artificial Sequence
  Description of Artificial Sequence: Synthetic oligonucleotide
guaagaauucugggaggag

SEQ ID NO: 2021890 - RNA, 19 nt, Artificial Sequence
  Description of Artificial Sequence: Synthetic oligonucleotide
ggaaccguccaauaaaagu

SEQ ID NO: 2021891 - RNA, 19 nt, Artificial Sequence
  Description of Artificial Sequence: Synthetic oligonucleotide
cuauuugaaauaagccucu

SEQ ID NO: 2021892 - RNA, 19 nt, Artificial Sequence
  Description of Artificial Sequence: Synthetic oligonucleotide
ucccaacucugaaagucau

SEQ ID NO: 2021893 - RNA, 19 nt, Artificial Sequence
  Description of Artificial Sequence: Synthetic oligonucleotide
acauggccccucugggugg

SEQ ID NO: 2021894 - RNA, 19 nt, Artificial Sequence
  Description of Artificial Sequence: Synthetic oligonucleotide
aaacaguuccaagcucgga

SEQ ID NO: 2021895 - RNA, 19 nt, Artificial Sequence
  Description of Artificial Sequence: Synthetic oligonucleotide
ugaaagucauucagcccuu

SEQ ID NO: 2021896 - RNA, 19 nt, Artificial Sequence
  Description of Artificial Sequence: Synthetic oligonucleotide
uauuugaaauaagccucuc

SEQ ID NO: 2021897 - RNA, 19 nt, Artificial Sequence
  Description of Artificial Sequence: Synthetic oligonucleotide
gagcgcguaguccgacucg

SEQ ID NO: 2021898 - RNA, 19 nt, Artificial Sequence
  Description of Artificial Sequence: Synthetic oligonucleotide
uagcaucugcacugaacac

SEQ ID NO: 2021899 - RNA, 19 nt, Artificial Sequence
  Description of Artificial Sequence: Synthetic oligonucleotide
cuccacggggaaauacgcc

SEQ ID NO: 2021900 - RNA, 19 nt, Artificial Sequence
  Description of Artificial Sequence: Synthetic oligonucleotide
cacaguugggucacccaug

SEQ ID NO: 2021901 - RNA, 19 nt, Artificial Sequence
  Description of Artificial Sequence: Synthetic oligonucleotide
uucucuggacugucaaaau

SEQ ID NO: 2021902 - RNA, 19 nt, Artificial Sequence
  Description of Artificial Sequence: Synthetic oligonucleotide
aggaucaagggcauccaca

SEQ ID NO: 2021903 - RNA, 19 nt, Artificial Sequence
  Description of Artificial Sequence: Synthetic oligonucleotide
aggaguccaugaugcggcg

SEQ ID NO: 2021904 - RNA, 19 nt, Artificial Sequence
  Description of Artificial Sequence: Synthetic oligonucleotide
gaugcggcggaaccgucca

SEQ ID NO: 2021905 - RNA, 19 nt, Artificial Sequence
  Description of Artificial Sequence: Synthetic oligonucleotide
guuuuggaaauugggguaa

SEQ ID NO: 2021906 - RNA, 19 nt, Artificial Sequence
  Description of Artificial Sequence: Synthetic oligonucleotide
ucguuuccacuuucagucu

SEQ ID NO: 2021907 - RNA, 19 nt, Artificial Sequence
  Description of Artificial Sequence: Synthetic oligonucleotide
gaaauacgccuccgacaug

SEQ ID NO: 2021908 - RNA, 19 nt, Artificial Sequence
  Description of Artificial Sequence: Synthetic oligonucleotide
cucuugguauaucuuggga

SEQ ID NO: 2021909 - RNA, 19 nt, Artificial Sequence
  Description of Artificial Sequence: Synthetic oligonucleotide
agcgcguaguccgacucgg

SEQ ID NO: 2021910 - RNA, 19 nt, Artificial Sequence
  Description of Artificial Sequence: Synthetic oligonucleotide
uguugucaaagaguccuuu

SEQ ID NO: 2021911 - RNA, 19 nt, Artificial Sequence
  Description of Artificial Sequence: Synthetic oligonucleotide
gacacaguugggucaccca

SEQ ID NO: 2021912 - RNA, 19 nt, Artificial Sequence
  Description of Artificial Sequence: Synthetic oligonucleotide
gagguccacgacauuagca

SEQ ID NO: 2021913 - RNA, 19 nt, Artificial Sequence
  Description of Artificial Sequence: Synthetic oligonucleotide
ggaaauacgccuccgacau

SEQ ID NO: 2021914 - RNA, 19 nt, Artificial Sequence
  Description of Artificial Sequence: Synthetic oligonucleotide
ugggucacccaugaaguua

SEQ ID NO: 2021915 - RNA, 19 nt, Artificial Sequence
  Description of Artificial Sequence: Synthetic oligonucleotide
ugagaagccugacccuuuu

SEQ ID NO: 2021916 - RNA, 19 nt, Artificial Sequence
  Description of Artificial Sequence: Synthetic oligonucleotide
ugauuacauacaggacaca

SEQ ID NO: 2021917 - RNA, 19 nt, Artificial Sequence
  Description of Artificial Sequence: Synthetic oligonucleotide
ugggagccaaaaccauaga

SEQ ID NO: 2021918 - RNA, 19 nt, Artificial Sequence
  Description of Artificial Sequence: Synthetic oligonucleotide
cacggggaaauacgccucc

SEQ ID NO: 2021919 - RNA, 19 nt, Artificial Sequence
  Description of Artificial Sequence: Synthetic oligonucleotide
guugucaaagaguccuuua

SEQ ID NO: 2021920 - RNA, 19 nt, Artificial Sequence
  Description of Artificial Sequence: Synthetic oligonucleotide
gggaaauacgccuccgaca

SEQ ID NO: 2021921 - RNA, 19 nt, Artificial Sequence
  Description of Artificial Sequence: Synthetic oligonucleotide
uucugcccuauuugaaaua

SEQ ID NO: 2021922 - RNA, 19 nt, Artificial Sequence
  Description of Artificial Sequence: Synthetic oligonucleotide
ggcgucuccacgcgcaccg

SEQ ID NO: 2021923 - RNA, 19 nt, Artificial Sequence
  Description of Artificial Sequence: Synthetic oligonucleotide
gagggaugugauuuuaguu

SEQ ID NO: 2021924 - RNA, 19 nt, Artificial Sequence
  Description of Artificial Sequence: Synthetic oligonucleotide
agcucggagauugcugaag

SEQ ID NO: 2021925 - RNA, 19 nt, Artificial Sequence
  Description of Artificial Sequence: Synthetic oligonucleotide
uuuguccaaccaugaggaa

SEQ ID NO: 2021926 - RNA, 19 nt, Artificial Sequence
  Description of Artificial Sequence: Synthetic oligonucleotide
auacgccuccgacauggcu

SEQ ID NO: 2021927 - RNA, 19 nt, Artificial Sequence
  Description of Artificial Sequence: Synthetic oligonucleotide
ucgcuccaggaagaaggcg

SEQ ID NO: 2021928 - RNA, 19 nt, Artificial Sequence
  Description of Artificial Sequence: Synthetic oligonucleotide
aguccuuuagccagccaca

SEQ ID NO: 2021929 - RNA, 19 nt, Artificial Sequence
  Description of Artificial Sequence: Synthetic oligonucleotide
caucuagccuggcuaccag

SEQ ID NO: 2021930 - RNA, 19 nt, Artificial Sequence
  Description of Artificial Sequence: Synthetic oligonucleotide
ggggaaauacgccuccgac

SEQ ID NO: 2021931 - RNA, 19 nt, Artificial Sequence
  Description of Artificial Sequence: Synthetic oligonucleotide
caaggcaaauaagcuuaag

SEQ ID NO: 2021932 - RNA, 19 nt, Artificial Sequence
  Description of Artificial Sequence: Synthetic oligonucleotide
uugguauaucuugggaauu

SEQ ID NO: 2021933 - RNA, 19 nt, Artificial Sequence
  Description of Artificial Sequence: Synthetic oligonucleotide
gcaagacacaguuggguca

SEQ ID NO: 2021934 - RNA, 19 nt, Artificial Sequence
  Description of Artificial Sequence: Synthetic oligonucleotide
uccacgacauuagcaucug

SEQ ID NO: 2021935 - RNA, 19 nt, Artificial Sequence
  Description of Artificial Sequence: Synthetic oligonucleotide
ggcaaggcaaauaagcuua

SEQ ID NO: 2021936 - RNA, 19 nt, Artificial Sequence
  Description of Artificial Sequence: Synthetic oligonucleotide
aggaugcgccgcuuguugu

SEQ ID NO: 2021937 - RNA, 19 nt, Artificial Sequence
  Description of Artificial Sequence: Synthetic oligonucleotide
gaucaagggcauccacauc

SEQ ID NO: 2021938 - RNA, 19 nt, Artificial Sequence
  Description of Artificial Sequence: Synthetic oligonucleotide
gaaaggaugcgccgcuugu

SEQ ID NO: 2021939 - RNA, 19 nt, Artificial Sequence
  Description of Artificial Sequence: Synthetic oligonucleotide
cccuauuugaaauaagccu

SEQ ID NO: 2021940 - RNA, 19 nt, Artificial Sequence
  Description of Artificial Sequence: Synthetic oligonucleotide
acacagagauaaauccaca

SEQ ID NO: 2021941 - RNA, 19 nt, Artificial Sequence
  Description of Artificial Sequence: Synthetic oligonucleotide
agcgcccgacuccacgggg

SEQ ID NO: 2021942 - RNA, 19 nt, Artificial Sequence
  Description of Artificial Sequence: Synthetic oligonucleotide
ucgggucccagagcgcccg

SEQ ID NO: 2021943 - RNA, 19 nt, Artificial Sequence
  Description of Artificial Sequence: Synthetic oligonucleotide
cugcuaugccauucaugac

SEQ ID NO: 2021944 - RNA, 19 nt, Artificial Sequence
  Description of Artificial Sequence: Synthetic oligonucleotide
ucuucccaauuuccuguuu

SEQ ID NO: 2021945 - RNA, 19 nt, Artificial Sequence
  Description of Artificial Sequence: Synthetic oligonucleotide
ggacugucaaaaugcagaa

SEQ ID NO: 2021946 - RNA, 19 nt, Artificial Sequence
  Description of Artificial Sequence: Synthetic oligonucleotide
agucugaacgagguuggau

SEQ ID NO: 2021947 - RNA, 19 nt, Artificial Sequence
  Description of Artificial Sequence: Synthetic oligonucleotide
uuccaagcucggagauugc

SEQ ID NO: 2021948 - RNA, 19 nt, Artificial Sequence
  Description of Artificial Sequence: Synthetic oligonucleotide
acgagguuggaugcuguga

SEQ ID NO: 2021949 - RNA, 19 nt, Artificial Sequence
  Description of Artificial Sequence: Synthetic oligonucleotide
aguccgacucggcgcccgc

SEQ ID NO: 2021950 - RNA, 19 nt, Artificial Sequence
  Description of Artificial Sequence: Synthetic oligonucleotide
agcucaaguuuuguucccu

SEQ ID NO: 2021951 - RNA, 19 nt, Artificial Sequence
  Description of Artificial Sequence: Synthetic oligonucleotide
ccacagaaaggaugcgccg

SEQ ID NO: 2021952 - RNA, 19 nt, Artificial Sequence
  Description of Artificial Sequence: Synthetic oligonucleotide
uaucagggacacagagaua

SEQ ID NO: 2021953 - RNA, 19 nt, Artificial Sequence
  Description of Artificial Sequence: Synthetic oligonucleotide
guuuuaucagggacacaga

SEQ ID NO: 2021954 - RNA, 19 nt, Artificial Sequence
  Description of Artificial Sequence: Synthetic oligonucleotide
cagagaugacccacuuuca

SEQ ID NO: 2021955 - RNA, 19 nt, Artificial Sequence
  Description of Artificial Sequence: Synthetic oligonucleotide
uaguccgacucggcgcccg

SEQ ID NO: 2021956 - RNA, 19 nt, Artificial Sequence
  Description of Artificial Sequence: Synthetic oligonucleotide
agacugggagauaucugca

SEQ ID NO: 2021957 - RNA, 19 nt, Artificial Sequence
  Description of Artificial Sequence: Synthetic oligonucleotide
caucccucuugguauaucu

SEQ ID NO: 2021958 - RNA, 19 nt, Artificial Sequence
  Description of Artificial Sequence: Synthetic oligonucleotide
ccccauuuuguggaggucc

SEQ ID NO: 2021959 - RNA, 19 nt, Artificial Sequence
  Description of Artificial Sequence: Synthetic oligonucleotide
ccguccaauaaaagucugc

SEQ ID NO: 2021960 - RNA, 19 nt, Artificial Sequence
  Description of Artificial Sequence: Synthetic oligonucleotide
uugggucacccaugaaguu

SEQ ID NO: 2021961 - RNA, 19 nt, Artificial Sequence
  Description of Artificial Sequence: Synthetic oligonucleotide
gagaagccugacccuuuuc

SEQ ID NO: 2021962 - RNA, 19 nt, Artificial Sequence
  Description of Artificial Sequence: Synthetic oligonucleotide
gguauaucuugggaauuuc

SEQ ID NO: 2021963 - RNA, 19 nt, Artificial Sequence
  Description of Artificial Sequence: Synthetic oligonucleotide
gcucaaguuuuguucccug

SEQ ID NO: 2021964 - RNA, 19 nt, Artificial Sequence
  Description of Artificial Sequence: Synthetic oligonucleotide
ccaagcucggagauugcug

SEQ ID NO: 2021965 - RNA, 19 nt, Artificial Sequence
  Description of Artificial Sequence: Synthetic oligonucleotide
cauucucuggacugucaaa

SEQ ID NO: 2021966 - RNA, 19 nt, Artificial Sequence
  Description of Artificial Sequence: Synthetic oligonucleotide
accguccaauaaaagucug

SEQ ID NO: 2021967 - RNA, 19 nt, Artificial Sequence
  Description of Artificial Sequence: Synthetic oligonucleotide
ccuccgacauggcugcucg

SEQ ID NO: 2021968 - RNA, 19 nt, Artificial Sequence
  Description of Artificial Sequence: Synthetic oligonucleotide
gaugcgccgcuuguuguca

SEQ ID NO: 2021969 - RNA, 19 nt, Artificial Sequence
  Description of Artificial Sequence: Synthetic oligonucleotide
cugacccuuuucccaacuc

SEQ ID NO: 2021970 - RNA, 19 nt, Artificial Sequence
  Description of Artificial Sequence: Synthetic oligonucleotide
ggcggaaccguccaauaaa

SEQ ID NO: 2021971 - RNA, 19 nt, Artificial Sequence
  Description of Artificial Sequence: Synthetic oligonucleotide
caugggcgucuccacgcgc

SEQ ID NO: 2021972 - RNA, 19 nt, Artificial Sequence
  Description of Artificial Sequence: Synthetic oligonucleotide
agccaaaaccauagaaaua

SEQ ID NO: 2021973 - RNA, 19 nt, Artificial Sequence
  Description of Artificial Sequence: Synthetic oligonucleotide
ggaucaagggcauccacau

SEQ ID NO: 2021974 - RNA, 19 nt, Artificial Sequence
  Description of Artificial Sequence: Synthetic oligonucleotide
gguccacgacauuagcauc

SEQ ID NO: 2021975 - RNA, 19 nt, Artificial Sequence
  Description of Artificial Sequence: Synthetic oligonucleotide
cagugcugaagugucuuca

SEQ ID NO: 2021976 - RNA, 19 nt, Artificial Sequence
  Description of Artificial Sequence: Synthetic oligonucleotide
gucccagagcgcccgacuc

SEQ ID NO: 2021977 - RNA, 19 nt, Artificial Sequence
  Description of Artificial Sequence: Synthetic oligonucleotide
guugggagccaaaaccaua

SEQ ID NO: 2021978 - RNA, 19 nt, Artificial Sequence
  Description of Artificial Sequence: Synthetic oligonucleotide
ggggaugcuguccuuuguc

SEQ ID NO: 2021979 - RNA, 19 nt, Artificial Sequence
  Description of Artificial Sequence: Synthetic oligonucleotide
agaguccuuuagccagcca

SEQ ID NO: 2021980 - RNA, 19 nt, Artificial Sequence
  Description of Artificial Sequence: Synthetic oligonucleotide
ggagggaugugauuuuagu

SEQ ID NO: 2021981 - RNA, 19 nt, Artificial Sequence
  Description of Artificial Sequence: Synthetic oligonucleotide
agcuucucccgggacauua

SEQ ID NO: 2021982 - RNA, 19 nt, Artificial Sequence
  Description of Artificial Sequence: Synthetic oligonucleotide
guccuuuguccaaccauga

SEQ ID NO: 2021983 - RNA, 19 nt, Artificial Sequence
  Description of Artificial Sequence: Synthetic oligonucleotide
cccugauuacauacaggac

SEQ ID NO: 2021984 - RNA, 19 nt, Artificial Sequence
  Description of Artificial Sequence: Synthetic oligonucleotide
cacaaguuguaguucguuu

SEQ ID NO: 2021985 - RNA, 19 nt, Artificial Sequence
  Description of Artificial Sequence: Synthetic oligonucleotide
agggagcgcguaguccgac

SEQ ID NO: 2021986 - RNA, 19 nt, Artificial Sequence
  Description of Artificial Sequence: Synthetic oligonucleotide
guccacgacauuagcaucu

SEQ ID NO: 2021987 - RNA, 19 nt, Artificial Sequence
  Description of Artificial Sequence: Synthetic oligonucleotide
ugcggcggaaccguccaau

SEQ ID NO: 2021988 - RNA, 19 nt, Artificial Sequence
  Description of Artificial Sequence: Synthetic oligonucleotide
gugaucugagaagccugac

SEQ ID NO: 2021989 - RNA, 19 nt, Artificial Sequence
  Description of Artificial Sequence: Synthetic oligonucleotide
cucgggucccagagcgccc

SEQ ID NO: 2021990 - RNA, 19 nt, Artificial Sequence
  Description of Artificial Sequence: Synthetic oligonucleotide
ugggcgucuccacgcgcac

SEQ ID NO: 2021991 - RNA, 19 nt, Artificial Sequence
  Description of Artificial Sequence: Synthetic oligonucleotide
cguaguccgacucggcgcc

SEQ ID NO: 2021992 - RNA, 19 nt, Artificial Sequence
  Description of Artificial Sequence: Synthetic oligonucleotide
ccauauuagugaauuuucu

SEQ ID NO: 2021993 - RNA, 19 nt, Artificial Sequence
  Description of Artificial Sequence: Synthetic oligonucleotide
ccaugaugcggcggaaccg

SEQ ID NO: 2021994 - RNA, 19 nt, Artificial Sequence
  Description of Artificial Sequence: Synthetic oligonucleotide
augggcgucuccacgcgca

SEQ ID NO: 2021995 - RNA, 19 nt, Artificial Sequence
  Description of Artificial Sequence: Synthetic oligonucleotide
ggaguccaugaugcggcgg

SEQ ID NO: 2021996 - RNA, 19 nt, Artificial Sequence
  Description of Artificial Sequence: Synthetic oligonucleotide
ggagcgcguaguccgacuc

SEQ ID NO: 2021997 - RNA, 19 nt, Artificial Sequence
  Description of Artificial Sequence: Synthetic oligonucleotide
aguuccaagcucggagauu

SEQ ID NO: 2021998 - RNA, 19 nt, Artificial Sequence
  Description of Artificial Sequence: Synthetic oligonucleotide
gcuaccagugcugaagugu

SEQ ID NO: 2021999 - RNA, 19 nt, Artificial Sequence
  Description of Artificial Sequence: Synthetic oligonucleotide
ccgacauggcugcucgccg

SEQ ID NO: 2022000 - RNA, 19 nt, Artificial Sequence
  Description of Artificial Sequence: Synthetic oligonucleotide
gccacaagggaagcucaag

SEQ ID NO: 2022001 - RNA, 19 nt, Artificial Sequence
  Description of Artificial Sequence: Synthetic oligonucleotide
cccaggcgcggcaugggcg

SEQ ID NO: 2022002 - RNA, 19 nt, Artificial Sequence
  Description of Artificial Sequence: Synthetic oligonucleotide
uucccugagggagcgcgua

SEQ ID NO: 2022003 - RNA, 19 nt, Artificial Sequence
  Description of Artificial Sequence: Synthetic oligonucleotide
cgcguaguccgacucggcg

SEQ ID NO: 2022004 - RNA, 19 nt, Artificial Sequence
  Description of Artificial Sequence: Synthetic oligonucleotide
ugcgccgcuuguugucaaa

SEQ ID NO: 2022005 - RNA, 19 nt, Artificial Sequence
  Description of Artificial Sequence: Synthetic oligonucleotide
uccaucccucuugguauau

SEQ ID NO: 2022006 - RNA, 19 nt, Artificial Sequence
  Description of Artificial Sequence: Synthetic oligonucleotide
ggagauugcugaagguuaa

SEQ ID NO: 2022007 - RNA, 19 nt, Artificial Sequence
  Description of Artificial Sequence: Synthetic oligonucleotide
caugaugcggcggaaccgu

SEQ ID NO: 2022008 - RNA, 19 nt, Artificial Sequence
  Description of Artificial Sequence: Synthetic oligonucleotide
cccuuucugcccuauuuga

SEQ ID NO: 2022009 - RNA, 19 nt, Artificial Sequence
  Description of Artificial Sequence: Synthetic oligonucleotide
cuccgacauggcugcucgc

SEQ ID NO: 2022010 - RNA, 19 nt, Artificial Sequence
  Description of Artificial Sequence: Synthetic oligonucleotide
cauucaugacuuucccuuu

SEQ ID NO: 2022011 - RNA, 19 nt, Artificial Sequence
  Description of Artificial Sequence: Synthetic oligonucleotide
gggucacccaugaaguuaa

SEQ ID NO: 2022012 - RNA, 19 nt, Artificial Sequence
  Description of Artificial Sequence: Synthetic oligonucleotide
cugcucgccgcagcgucag

SEQ ID NO: 2022013 - RNA, 19 nt, Artificial Sequence
  Description of Artificial Sequence: Synthetic oligonucleotide
gcugugaucugagaagccu

SEQ ID NO: 2022014 - RNA, 19 nt, Artificial Sequence
  Description of Artificial Sequence: Synthetic oligonucleotide
agguuuuaucagggacaca

SEQ ID NO: 2022015 - RNA, 19 nt, Artificial Sequence
  Description of Artificial Sequence: Synthetic oligonucleotide
guucuccucgggucccaga

SEQ ID NO: 2022016 - RNA, 19 nt, Artificial Sequence
  Description of Artificial Sequence: Synthetic oligonucleotide
ggccccucuggguggacug

SEQ ID NO: 2022017 - RNA, 19 nt, Artificial Sequence
  Description of Artificial Sequence: Synthetic oligonucleotide
gaacgagguuggaugcugu

SEQ ID NO: 2022018 - RNA, 19 nt, Artificial Sequence
  Description of Artificial Sequence: Synthetic oligonucleotide
cucggagauugcugaaggu

SEQ ID NO: 2022019 - RNA, 19 nt, Artificial Sequence
  Description of Artificial Sequence: Synthetic oligonucleotide
ccuuucugcccuauuugaa

SEQ ID NO: 2022020 - RNA, 19 nt, Artificial Sequence
  Description of Artificial Sequence: Synthetic oligonucleotide
cggaaccguccaauaaaag

SEQ ID NO: 2022021 - RNA, 19 nt, Artificial Sequence
  Description of Artificial Sequence: Synthetic oligonucleotide
ccacggggaaauacgccuc

SEQ ID NO: 2022022 - RNA, 19 nt, Artificial Sequence
  Description of Artificial Sequence: Synthetic oligonucleotide
cauagaaauagggccccau

SEQ ID NO: 2022023 - RNA, 19 nt, Artificial Sequence
  Description of Artificial Sequence: Synthetic oligonucleotide
aguccaugaugcggcggaa

SEQ ID NO: 2022024 - RNA, 19 nt, Artificial Sequence
  Description of Artificial Sequence: Synthetic oligonucleotide
guccgacucggcgcccgcg

SEQ ID NO: 2022025 - RNA, 19 nt, Artificial Sequence
  Description of Artificial Sequence: Synthetic oligonucleotide
uggccccucuggguggacu

SEQ ID NO: 2022026 - RNA, 19 nt, Artificial Sequence
  Description of Artificial Sequence: Synthetic oligonucleotide
gcggaaccguccaauaaaa

SEQ ID NO: 2022027 - RNA, 19 nt, Artificial Sequence
  Description of Artificial Sequence: Synthetic oligonucleotide
cggagauugcugaagguua

SEQ ID NO: 2022028 - RNA, 19 nt, Artificial Sequence
  Description of Artificial Sequence: Synthetic oligonucleotide
cuccaucccucuugguaua

SEQ ID NO: 2022029 - RNA, 19 nt, Artificial Sequence
  Description of Artificial Sequence: Synthetic oligonucleotide
agccacaagggaagcucaa

SEQ ID NO: 2022030 - RNA, 19 nt, Artificial Sequence
  Description of Artificial Sequence: Synthetic oligonucleotide
ccacgacauuagcaucugc

SEQ ID NO: 2022031 - RNA, 19 nt, Artificial Sequence
  Description of Artificial Sequence: Synthetic oligonucleotide
augcgccgcuuguugucaa

SEQ ID NO: 2022032 - RNA, 19 nt, Artificial Sequence
  Description of Artificial Sequence: Synthetic oligonucleotide
gagggagcgcguaguccga

SEQ ID NO: 2022033 - RNA, 19 nt, Artificial Sequence
  Description of Artificial Sequence: Synthetic oligonucleotide
gcgccgcuuguugucaaag

SEQ ID NO: 2022034 - RNA, 19 nt, Artificial Sequence
  Description of Artificial Sequence: Synthetic oligonucleotide
gggccccauuuuguggagg

SEQ ID NO: 2022035 - RNA, 19 nt, Artificial Sequence
  Description of Artificial Sequence: Synthetic oligonucleotide
gacucggcgcccgcgccuc

SEQ ID NO: 2022036 - RNA, 19 nt, Artificial Sequence
  Description of Artificial Sequence: Synthetic oligonucleotide
gggaagcucaaguuuuguu

SEQ ID NO: 2022037 - RNA, 19 nt, Artificial Sequence
  Description of Artificial Sequence: Synthetic oligonucleotide
guaguccgacucggcgccc

SEQ ID NO: 2022038 - RNA, 19 nt, Artificial Sequence
  Description of Artificial Sequence: Synthetic oligonucleotide
ccuccaucccucuugguau

SEQ ID NO: 2022039 - RNA, 19 nt, Artificial Sequence
  Description of Artificial Sequence: Synthetic oligonucleotide
ggaugugauuuuaguucaa

SEQ ID NO: 2022040 - RNA, 19 nt, Artificial Sequence
  Description of Artificial Sequence: Synthetic oligonucleotide
gcuaugccauucaugacuu

SEQ ID NO: 2022041 - RNA, 19 nt, Artificial Sequence
  Description of Artificial Sequence: Synthetic oligonucleotide
gaaagucauucagcccuuu

SEQ ID NO: 2022042 - RNA, 19 nt, Artificial Sequence
  Description of Artificial Sequence: Synthetic oligonucleotide
cugaacgagguuggaugcu

SEQ ID NO: 2022043 - RNA, 19 nt, Artificial Sequence
  Description of Artificial Sequence: Synthetic oligonucleotide
cugccccaaccaaacaguu

SEQ ID NO: 2022044 - RNA, 19 nt, Artificial Sequence
  Description of Artificial Sequence: Synthetic oligonucleotide
augcggcggaaccguccaa

SEQ ID NO: 2022045 - RNA, 19 nt, Artificial Sequence
  Description of Artificial Sequence: Synthetic oligonucleotide
cugagaagccugacccuuu

SEQ ID NO: 2022046 - RNA, 19 nt, Artificial Sequence
  Description of Artificial Sequence: Synthetic oligonucleotide
cggcaugggcgucuccacg

SEQ ID NO: 2022047 - RNA, 19 nt, Artificial Sequence
  Description of Artificial Sequence: Synthetic oligonucleotide
cgacauuagcaucugcacu

SEQ ID NO: 2022048 - RNA, 19 nt, Artificial Sequence
  Description of Artificial Sequence: Synthetic oligonucleotide
cucggcgcccgcgccucgc

SEQ ID NO: 2022049 - RNA, 19 nt, Artificial Sequence
  Description of Artificial Sequence: Synthetic oligonucleotide
cauggccccucugggugga

SEQ ID NO: 2022050 - RNA, 19 nt, Artificial Sequence
  Description of Artificial Sequence: Synthetic oligonucleotide
ggguggacuggagggaugu

SEQ ID NO: 2022051 - RNA, 19 nt, Artificial Sequence
  Description of Artificial Sequence: Synthetic oligonucleotide
caguugggucacccaugaa

SEQ ID NO: 2022052 - RNA, 19 nt, Artificial Sequence
  Description of Artificial Sequence: Synthetic oligonucleotide
caucugcacugaacacagu

SEQ ID NO: 2022053 - RNA, 19 nt, Artificial Sequence
  Description of Artificial Sequence: Synthetic oligonucleotide
ggcagagaugacccacuuu

SEQ ID NO: 2022054 - RNA, 19 nt, Artificial Sequence
  Description of Artificial Sequence: Synthetic oligonucleotide
ccgacucggcgcccgcgcc

SEQ ID NO: 2022055 - RNA, 19 nt, Artificial Sequence
  Description of Artificial Sequence: Synthetic oligonucleotide
ggucacccaugaaguuaac

SEQ ID NO: 2022056 - RNA, 19 nt, Artificial Sequence
  Description of Artificial Sequence: Synthetic oligonucleotide
gggcgucuccacgcgcacc

SEQ ID NO: 2022057 - RNA, 19 nt, Artificial Sequence
  Description of Artificial Sequence: Synthetic oligonucleotide
cuaugccauucaugacuuu

SEQ ID NO: 2022058 - RNA, 19 nt, Artificial Sequence
  Description of Artificial Sequence: Synthetic oligonucleotide
gcggcggaaccguccaaua

SEQ ID NO: 2022059 - RNA, 19 nt, Artificial Sequence
  Description of Artificial Sequence: Synthetic oligonucleotide
guucccugagggagcgcgu

SEQ ID NO: 2022060 - RNA, 19 nt, Artificial Sequence
  Description of Artificial Sequence: Synthetic oligonucleotide
ccauagaaauagggcccca

SEQ ID NO: 2022061 - RNA, 19 nt, Artificial Sequence
  Description of Artificial Sequence: Synthetic oligonucleotide
ggacuggagggaugugauu

SEQ ID NO: 2022062 - RNA, 19 nt, Artificial Sequence
  Description of Artificial Sequence: Synthetic oligonucleotide
gccccauuuuguggagguc

SEQ ID NO: 2022063 - RNA, 19 nt, Artificial Sequence
  Description of Artificial Sequence: Synthetic oligonucleotide
cggggaaauacgccuccga

SEQ ID NO: 2022064 - RNA, 19 nt, Artificial Sequence
  Description of Artificial Sequence: Synthetic oligonucleotide
gggagcgcguaguccgacu

SEQ ID NO: 2022065 - RNA, 19 nt, Artificial Sequence
  Description of Artificial Sequence: Synthetic oligonucleotide
gcgcguaguccgacucggc

SEQ ID NO: 2022066 - RNA, 19 nt, Artificial Sequence
  Description of Artificial Sequence: Synthetic oligonucleotide
cgccgcuuguugucaaaga

SEQ ID NO: 2022067 - RNA, 19 nt, Artificial Sequence
  Description of Artificial Sequence: Synthetic oligonucleotide
caggcgcggcaugggcguc

SEQ ID NO: 2022068 - RNA, 19 nt, Artificial Sequence
  Description of Artificial Sequence: Synthetic oligonucleotide
ccaggcgcggcaugggcgu

SEQ ID NO: 2022069 - RNA, 19 nt, Artificial Sequence
  Description of Artificial Sequence: Synthetic oligonucleotide
gcgcccgacuccacgggga

SEQ ID NO: 2022070 - RNA, 19 nt, Artificial Sequence
  Description of Artificial Sequence: Synthetic oligonucleotide
cagaaaggaugcgccgcuu

SEQ ID NO: 2022071 - RNA, 19 nt, Artificial Sequence
  Description of Artificial Sequence: Synthetic oligonucleotide
cggcggaaccguccaauaa

SEQ ID NO: 2022072 - RNA, 19 nt, Artificial Sequence
  Description of Artificial Sequence: Synthetic oligonucleotide
cccgacuccacggggaaau

SEQ ID NO: 2022073 - RNA, 19 nt, Artificial Sequence
  Description of Artificial Sequence: Synthetic oligonucleotide
ccgggacauuaggauguca

SEQ ID NO: 2022074 - RNA, 19 nt, Artificial Sequence
  Description of Artificial Sequence: Synthetic oligonucleotide
ccacaaguuguaguucguu

SEQ ID NO: 2022075 - RNA, 19 nt, Artificial Sequence
  Description of Artificial Sequence: Synthetic oligonucleotide
cccaacucugaaagucauu

SEQ ID NO: 2022076 - RNA, 19 nt, Artificial Sequence
  Description of Artificial Sequence: Synthetic oligonucleotide
ggcgcggcaugggcgucuc

SEQ ID NO: 2022077 - RNA, 19 nt, Artificial Sequence
  Description of Artificial Sequence: Synthetic oligonucleotide
gcgcggcaugggcgucucc

SEQ ID NO: 2022078 - RNA, 19 nt, Artificial Sequence
  Description of Artificial Sequence: Synthetic oligonucleotide
cccugagggagcgcguagu

SEQ ID NO: 2022079 - RNA, 19 nt, Artificial Sequence
  Description of Artificial Sequence: Synthetic oligonucleotide
ccgcgccucgcuccaggaa

SEQ ID NO: 2022080 - RNA, 19 nt, Artificial Sequence
  Description of Artificial Sequence: Synthetic oligonucleotide
cgcccgacuccacggggaa

SEQ ID NO: 2022081 - RNA, 19 nt, Artificial Sequence
  Description of Artificial Sequence: Synthetic oligonucleotide
cagcuucucccgggacauu

SEQ ID NO: 2022082 - RNA, 19 nt, Artificial Sequence
  Description of Artificial Sequence: Synthetic oligonucleotide
uuaauaaagacuaaugucu

SEQ ID NO: 2022083 - RNA, 19 nt, Artificial Sequence
  Description of Artificial Sequence: Synthetic oligonucleotide
aaacagauugcccagguac

SEQ ID NO: 2022084 - RNA, 19 nt, Artificial Sequence
  Description of Artificial Sequence: Synthetic oligonucleotide
aaugaagauguguugaccg

SEQ ID NO: 2022085 - RNA, 19 nt, Artificial Sequence
  Description of Artificial Sequence: Synthetic oligonucleotide
uuaggaauaacaaaugggc

SEQ ID NO: 2022086 - RNA, 19 nt, Artificial Sequence
  Description of Artificial Sequence: Synthetic oligonucleotide
aagacuaaugucuaguguc

SEQ ID NO: 2022087 - RNA, 19 nt, Artificial Sequence
  Description of Artificial Sequence: Synthetic oligonucleotide
ucaacaugguuucaaaugg

SEQ ID NO: 2022088 - RNA, 19 nt, Artificial Sequence
  Description of Artificial Sequence: Synthetic oligonucleotide
aacuuugcaguuauuaugc

SEQ ID NO: 2022089 - RNA, 19 nt, Artificial Sequence
  Description of Artificial Sequence: Synthetic oligonucleotide
augcaaauuaaccaggaac

SEQ ID NO: 2022090 - RNA, 19 nt, Artificial Sequence
  Description of Artificial Sequence: Synthetic oligonucleotide
ugcaaauuaaccaggaacu

SEQ ID NO: 2022091 - RNA, 19 nt, Artificial Sequence
  Description of Artificial Sequence: Synthetic oligonucleotide
uuucaugcaaauuaaccag

SEQ ID NO: 2022092 - RNA, 19 nt, Artificial Sequence
  Description of Artificial Sequence: Synthetic oligonucleotide
uucaaugucuugaagccgg

SEQ ID NO: 2022093 - RNA, 19 nt, Artificial Sequence
  Description of Artificial Sequence: Synthetic oligonucleotide
aaguaauaggacccuuucc

SEQ ID NO: 2022094 - RNA, 19 nt, Artificial Sequence
  Description of Artificial Sequence: Synthetic oligonucleotide
acuuaauaaagacuaaugu

SEQ ID NO: 2022095 - RNA, 19 nt, Artificial Sequence
  Description of Artificial Sequence: Synthetic oligonucleotide
uaugcaaccggccagagaa

SEQ ID NO: 2022096 - RNA, 19 nt, Artificial Sequence
  Description of Artificial Sequence: Synthetic oligonucleotide
cuuuucaugcaaauuaacc

SEQ ID NO: 2022097 - RNA, 19 nt, Artificial Sequence
  Description of Artificial Sequence: Synthetic oligonucleotide
aaugucuagugucuuuugg

SEQ ID NO: 2022098 - RNA, 19 nt, Artificial Sequence
  Description of Artificial Sequence: Synthetic oligonucleotide
uuugcaguuauuaugcaac

SEQ ID NO: 2022099 - RNA, 19 nt, Artificial Sequence
  Description of Artificial Sequence: Synthetic oligonucleotide
uaucuuuucaugcaaauua

SEQ ID NO: 2022100 - RNA, 19 nt, Artificial Sequence
  Description of Artificial Sequence: Synthetic oligonucleotide
uacuuaauaaagacuaaug

SEQ ID NO: 2022101 - RNA, 19 nt, Artificial Sequence
  Description of Artificial Sequence: Synthetic oligonucleotide
aauaaagacuaaugucuag

SEQ ID NO: 2022102 - RNA, 19 nt, Artificial Sequence
  Description of Artificial Sequence: Synthetic oligonucleotide
uucaacaugguuucaaaug

SEQ ID NO: 2022103 - RNA, 19 nt, Artificial Sequence
  Description of Artificial Sequence: Synthetic oligonucleotide
aagugaggaaaacacuuuc

SEQ ID NO: 2022104 - RNA, 19 nt, Artificial Sequence
  Description of Artificial Sequence: Synthetic oligonucleotide
aguaauaggacccuuucca

SEQ ID NO: 2022105 - RNA, 19 nt, Artificial Sequence
  Description of Artificial Sequence: Synthetic oligonucleotide
ugcauuaagaagucaauga

SEQ ID NO: 2022106 - RNA, 19 nt, Artificial Sequence
  Description of Artificial Sequence: Synthetic oligonucleotide
acacuuucaucacugauuc

SEQ ID NO: 2022107 - RNA, 19 nt, Artificial Sequence
  Description of Artificial Sequence: Synthetic oligonucleotide
uucaugcaaauuaaccagg

SEQ ID NO: 2022108 - RNA, 19 nt, Artificial Sequence
  Description of Artificial Sequence: Synthetic oligonucleotide
augacuucaacaugguuuc

SEQ ID NO: 2022109 - RNA, 19 nt, Artificial Sequence
  Description of Artificial Sequence: Synthetic oligonucleotide
aaagcgaucuggaucaaac

SEQ ID NO: 2022110 - RNA, 19 nt, Artificial Sequence
  Description of Artificial Sequence: Synthetic oligonucleotide
uccuucaaugucuugaagc

SEQ ID NO: 2022111 - RNA, 19 nt, Artificial Sequence
  Description of Artificial Sequence: Synthetic oligonucleotide
caagcugaccacaagacgc

SEQ ID NO: 2022112 - RNA, 19 nt, Artificial Sequence
  Description of Artificial Sequence: Synthetic oligonucleotide
cauuaagaagucaaugaag

SEQ ID NO: 2022113 - RNA, 19 nt, Artificial Sequence
  Description of Artificial Sequence: Synthetic oligonucleotide
uacaaaaugaugcuggguu

SEQ ID NO: 2022114 - RNA, 19 nt, Artificial Sequence
  Description of Artificial Sequence: Synthetic oligonucleotide
uacaguuuccuccucaugu

SEQ ID NO: 2022115 - RNA, 19 nt, Artificial Sequence
  Description of Artificial Sequence: Synthetic oligonucleotide
ugauucgucagcaaagcga

SEQ ID NO: 2022116 - RNA, 19 nt, Artificial Sequence
  Description of Artificial Sequence: Synthetic oligonucleotide
cauacugucuucuaggauc

SEQ ID NO: 2022117 - RNA, 19 nt, Artificial Sequence
  Description of Artificial Sequence: Synthetic oligonucleotide
uuuuauugggguugaagug

SEQ ID NO: 2022118 - RNA, 19 nt, Artificial Sequence
  Description of Artificial Sequence: Synthetic oligonucleotide
aaagacuaaugucuagugu

SEQ ID NO: 2022119 - RNA, 19 nt, Artificial Sequence
  Description of Artificial Sequence: Synthetic oligonucleotide
uaguauuccaacugcauga

SEQ ID NO: 2022120 - RNA, 19 nt, Artificial Sequence
  Description of Artificial Sequence: Synthetic oligonucleotide
uuuauugggguugaagugc

SEQ ID NO: 2022121 - RNA, 19 nt, Artificial Sequence
  Description of Artificial Sequence: Synthetic oligonucleotide
uuauuaugcaaccggccag

SEQ ID NO: 2022122 - RNA, 19 nt, Artificial Sequence
  Description of Artificial Sequence: Synthetic oligonucleotide
uaggaauaacaaaugggcc

SEQ ID NO: 2022123 - RNA, 19 nt, Artificial Sequence
  Description of Artificial Sequence: Synthetic oligonucleotide
ucuagugucuuuuggagac

SEQ ID NO: 2022124 - RNA, 19 nt, Artificial Sequence
  Description of Artificial Sequence: Synthetic oligonucleotide
ugcaaagcagccgucaugg

SEQ ID NO: 2022125 - RNA, 19 nt, Artificial Sequence
  Description of Artificial Sequence: Synthetic oligonucleotide
agcaaagcgaucuggauca

SEQ ID NO: 2022126 - RNA, 19 nt, Artificial Sequence
  Description of Artificial Sequence: Synthetic oligonucleotide
ugaugaugugaccaguuca

SEQ ID NO: 2022127 - RNA, 19 nt, Artificial Sequence
  Description of Artificial Sequence: Synthetic oligonucleotide
gaaaacacuuucaucacug

SEQ ID NO: 2022128 - RNA, 19 nt, Artificial Sequence
  Description of Artificial Sequence: Synthetic oligonucleotide
auaguauuccaacugcaug

SEQ ID NO: 2022129 - RNA, 19 nt, Artificial Sequence
  Description of Artificial Sequence: Synthetic oligonucleotide
uuucguuccuuuaugauuu

SEQ ID NO: 2022130 - RNA, 19 nt, Artificial Sequence
  Description of Artificial Sequence: Synthetic oligonucleotide
aacuugugcggugauggcc

SEQ ID NO: 2022131 - RNA, 19 nt, Artificial Sequence
  Description of Artificial Sequence: Synthetic oligonucleotide
ugucuagugucuuuuggag

SEQ ID NO: 2022132 - RNA, 19 nt, Artificial Sequence
  Description of Artificial Sequence: Synthetic oligonucleotide
cucugaaguaauaggaccc

SEQ ID NO: 2022133 - RNA, 19 nt, Artificial Sequence
  Description of Artificial Sequence: Synthetic oligonucleotide
acaaacugggguuagucug

SEQ ID NO: 2022134 - RNA, 19 nt, Artificial Sequence
  Description of Artificial Sequence: Synthetic oligonucleotide
aaaaggacucagcacagau

SEQ ID NO: 2022135 - RNA, 19 nt, Artificial Sequence
  Description of Artificial Sequence: Synthetic oligonucleotide
caaacuugugcggugaugg

SEQ ID NO: 2022136 - RNA, 19 nt, Artificial Sequence
  Description of Artificial Sequence: Synthetic oligonucleotide
uuauauagcuucuucugaa

SEQ ID NO: 2022137 - RNA, 19 nt, Artificial Sequence
  Description of Artificial Sequence: Synthetic oligonucleotide
aaaugggccaaccuuuccu

SEQ ID NO: 2022138 - RNA, 19 nt, Artificial Sequence
  Description of Artificial Sequence: Synthetic oligonucleotide
uucagauguugucagaaaa

SEQ ID NO: 2022139 - RNA, 19 nt, Artificial Sequence
  Description of Artificial Sequence: Synthetic oligonucleotide
uuggagacagugauccacg

SEQ ID NO: 2022140 - RNA, 19 nt, Artificial Sequence
  Description of Artificial Sequence: Synthetic oligonucleotide
aaugaugcuggguuuguaa

SEQ ID NO: 2022141 - RNA, 19 nt, Artificial Sequence
  Description of Artificial Sequence: Synthetic oligonucleotide
aggaaaacacuuucaucac

SEQ ID NO: 2022142 - RNA, 19 nt, Artificial Sequence
  Description of Artificial Sequence: Synthetic oligonucleotide
uaauaaagacuaaugucua

SEQ ID NO: 2022143 - RNA, 19 nt, Artificial Sequence
  Description of Artificial Sequence: Synthetic oligonucleotide
ucuucacucacacucccgc

SEQ ID NO: 2022144 - RNA, 19 nt, Artificial Sequence
  Description of Artificial Sequence: Synthetic oligonucleotide
aguuauuaugcaaccggcc

SEQ ID NO: 2022145 - RNA, 19 nt, Artificial Sequence
  Description of Artificial Sequence: Synthetic oligonucleotide
gauguguugaccgaaguuc

SEQ ID NO: 2022146 - RNA, 19 nt, Artificial Sequence
  Description of Artificial Sequence: Synthetic oligonucleotide
aguccgaacaguuucacaa

SEQ ID NO: 2022147 - RNA, 19 nt, Artificial Sequence
  Description of Artificial Sequence: Synthetic oligonucleotide
agagugauacccuaguaau

SEQ ID NO: 2022148 - RNA, 19 nt, Artificial Sequence
  Description of Artificial Sequence: Synthetic oligonucleotide
aaauuaaccaggaacucau

SEQ ID NO: 2022149 - RNA, 19 nt, Artificial Sequence
  Description of Artificial Sequence: Synthetic oligonucleotide
acugauucgucagcaaagc

SEQ ID NO: 2022150 - RNA, 19 nt, Artificial Sequence
  Description of Artificial Sequence: Synthetic oligonucleotide
ugaugugaccaguucauac

SEQ ID NO: 2022151 - RNA, 19 nt, Artificial Sequence
  Description of Artificial Sequence: Synthetic oligonucleotide
cacaccgagggcauaaagg

SEQ ID NO: 2022152 - RNA, 19 nt, Artificial Sequence
  Description of Artificial Sequence: Synthetic oligonucleotide
guggucuucacucacacuc

SEQ ID NO: 2022153 - RNA, 19 nt, Artificial Sequence
  Description of Artificial Sequence: Synthetic oligonucleotide
gcaguuauuaugcaaccgg

SEQ ID NO: 2022154 - RNA, 19 nt, Artificial Sequence
  Description of Artificial Sequence: Synthetic oligonucleotide
uugucagaaaacagauugc

SEQ ID NO: 2022155 - RNA, 19 nt, Artificial Sequence
  Description of Artificial Sequence: Synthetic oligonucleotide
guuauuaugcaaccggcca

SEQ ID NO: 2022156 - RNA, 19 nt, Artificial Sequence
  Description of Artificial Sequence: Synthetic oligonucleotide
agugauacccuaguaauga

SEQ ID NO: 2022157 - RNA, 19 nt, Artificial Sequence
  Description of Artificial Sequence: Synthetic oligonucleotide
ucaguuuucucugaaguaa

SEQ ID NO: 2022158 - RNA, 19 nt, Artificial Sequence
  Description of Artificial Sequence: Synthetic oligonucleotide
uaguaaugacuucaacaug

SEQ ID NO: 2022159 - RNA, 19 nt, Artificial Sequence
  Description of Artificial Sequence: Synthetic oligonucleotide
uuuucguuccuuuaugauu

SEQ ID NO: 2022160 - RNA, 19 nt, Artificial Sequence
  Description of Artificial Sequence: Synthetic oligonucleotide
accaggaacucaugcaaac

SEQ ID NO: 2022161 - RNA, 19 nt, Artificial Sequence
  Description of Artificial Sequence: Synthetic oligonucleotide
agagaaaauaucauacugu

SEQ ID NO: 2022162 - RNA, 19 nt, Artificial Sequence
  Description of Artificial Sequence: Synthetic oligonucleotide
auauagcuucuucugaacu

SEQ ID NO: 2022163 - RNA, 19 nt, Artificial Sequence
  Description of Artificial Sequence: Synthetic oligonucleotide
auaaagacuaaugucuagu

SEQ ID NO: 2022164 - RNA, 19 nt, Artificial Sequence
  Description of Artificial Sequence: Synthetic oligonucleotide
cagcacagauucuacauag

SEQ ID NO: 2022165 - RNA, 19 nt, Artificial Sequence
  Description of Artificial Sequence: Synthetic oligonucleotide
agccaagugaggaaaacac

SEQ ID NO: 2022166 - RNA, 19 nt, Artificial Sequence
  Description of Artificial Sequence: Synthetic oligonucleotide
aaauaguauuccaacugca

SEQ ID NO: 2022167 - RNA, 19 nt, Artificial Sequence
  Description of Artificial Sequence: Synthetic oligonucleotide
uauauagcuucuucugaac

SEQ ID NO: 2022168 - RNA, 19 nt, Artificial Sequence
  Description of Artificial Sequence: Synthetic oligonucleotide
uugcauuaagaagucaaug

SEQ ID NO: 2022169 - RNA, 19 nt, Artificial Sequence
  Description of Artificial Sequence: Synthetic oligonucleotide
acaccgagggcauaaagga

SEQ ID NO: 2022170 - RNA, 19 nt, Artificial Sequence
  Description of Artificial Sequence: Synthetic oligonucleotide
cucauugagguuuccuugc

SEQ ID NO: 2022171 - RNA, 19 nt, Artificial Sequence
  Description of Artificial Sequence: Synthetic oligonucleotide
aauaucauacugucuucua

SEQ ID NO: 2022172 - RNA, 19 nt, Artificial Sequence
  Description of Artificial Sequence: Synthetic oligonucleotide
aguuuuauugggguugaag

SEQ ID NO: 2022173 - RNA, 19 nt, Artificial Sequence
  Description of Artificial Sequence: Synthetic oligonucleotide
aagucaaugaagauguguu

SEQ ID NO: 2022174 - RNA, 19 nt, Artificial Sequence
  Description of Artificial Sequence: Synthetic oligonucleotide
ucuacuuaauaaagacuaa

SEQ ID NO: 2022175 - RNA, 19 nt, Artificial Sequence
  Description of Artificial Sequence: Synthetic oligonucleotide
agucaaugaagauguguug

SEQ ID NO: 2022176 - RNA, 19 nt, Artificial Sequence
  Description of Artificial Sequence: Synthetic oligonucleotide
ugcaguuauuaugcaaccg

SEQ ID NO: 2022177 - RNA, 19 nt, Artificial Sequence
  Description of Artificial Sequence: Synthetic oligonucleotide
auguguugaccgaaguucc

SEQ ID NO: 2022178 - RNA, 19 nt, Artificial Sequence
  Description of Artificial Sequence: Synthetic oligonucleotide
uccgaaguuuuauuggggu

SEQ ID NO: 2022179 - RNA, 19 nt, Artificial Sequence
  Description of Artificial Sequence: Synthetic oligonucleotide
acaacuuugcaguuauuau

SEQ ID NO: 2022180 - RNA, 19 nt, Artificial Sequence
  Description of Artificial Sequence: Synthetic oligonucleotide
uguaagcaaaccucaguuc

SEQ ID NO: 2022181 - RNA, 19 nt, Artificial Sequence
  Description of Artificial Sequence: Synthetic oligonucleotide
uuaagaagucaaugaagau

SEQ ID NO: 2022182 - RNA, 19 nt, Artificial Sequence
  Description of Artificial Sequence: Synthetic oligonucleotide
uuucaucacugauucguca

SEQ ID NO: 2022183 - RNA, 19 nt, Artificial Sequence
  Description of Artificial Sequence: Synthetic oligonucleotide
ugcggugauggccaagugc

SEQ ID NO: 2022184 - RNA, 19 nt, Artificial Sequence
  Description of Artificial Sequence: Synthetic oligonucleotide
uggaagguuaccaucuuuu

SEQ ID NO: 2022185 - RNA, 19 nt, Artificial Sequence
  Description of Artificial Sequence: Synthetic oligonucleotide
cacugauucgucagcaaag

SEQ ID NO: 2022186 - RNA, 19 nt, Artificial Sequence
  Description of Artificial Sequence: Synthetic oligonucleotide
cugaagaaccacaccgagg

SEQ ID NO: 2022187 - RNA, 19 nt, Artificial Sequence
  Description of Artificial Sequence: Synthetic oligonucleotide
uucacucacacucccgcca

SEQ ID NO: 2022188 - RNA, 19 nt, Artificial Sequence
  Description of Artificial Sequence: Synthetic oligonucleotide
ucacugauucgucagcaaa

SEQ ID NO: 2022189 - RNA, 19 nt, Artificial Sequence
  Description of Artificial Sequence: Synthetic oligonucleotide
uugcaguuauuaugcaacc

SEQ ID NO: 2022190 - RNA, 19 nt, Artificial Sequence
  Description of Artificial Sequence: Synthetic oligonucleotide
aaccuuuccuucaaugucu

SEQ ID NO: 2022191 - RNA, 19 nt, Artificial Sequence
  Description of Artificial Sequence: Synthetic oligonucleotide
uacccuaguaaugacuuca

SEQ ID NO: 2022192 - RNA, 19 nt, Artificial Sequence
  Description of Artificial Sequence: Synthetic oligonucleotide
uggucuaucuccuuauaua

SEQ ID NO: 2022193 - RNA, 19 nt, Artificial Sequence
  Description of Artificial Sequence: Synthetic oligonucleotide
augucuagugucuuuugga

SEQ ID NO: 2022194 - RNA, 19 nt, Artificial Sequence
  Description of Artificial Sequence: Synthetic oligonucleotide
cuuauauagcuucuucuga

SEQ ID NO: 2022195 - RNA, 19 nt, Artificial Sequence
  Description of Artificial Sequence: Synthetic oligonucleotide
cuggaucaaacuugugcgg

SEQ ID NO: 2022196 - RNA, 19 nt, Artificial Sequence
  Description of Artificial Sequence: Synthetic oligonucleotide
uauagcuucuucugaacuu

SEQ ID NO: 2022197 - RNA, 19 nt, Artificial Sequence
  Description of Artificial Sequence: Synthetic oligonucleotide
guuucaaauggguccgaag

SEQ ID NO: 2022198 - RNA, 19 nt, Artificial Sequence
  Description of Artificial Sequence: Synthetic oligonucleotide
aaagcagccgucauggcau

SEQ ID NO: 2022199 - RNA, 19 nt, Artificial Sequence
  Description of Artificial Sequence: Synthetic oligonucleotide
aucauacugucuucuagga

SEQ ID NO: 2022200 - RNA, 19 nt, Artificial Sequence
  Description of Artificial Sequence: Synthetic oligonucleotide
ugaaguaauaggacccuuu

SEQ ID NO: 2022201 - RNA, 19 nt, Artificial Sequence
  Description of Artificial Sequence: Synthetic oligonucleotide
ccuuaggaauaacaaaugg

SEQ ID NO: 2022202 - RNA, 19 nt, Artificial Sequence
  Description of Artificial Sequence: Synthetic oligonucleotide
ccaucuacuuaauaaagac

SEQ ID NO: 2022203 - RNA, 19 nt, Artificial Sequence
  Description of Artificial Sequence: Synthetic oligonucleotide
agggcauaaaggacgaggg

SEQ ID NO: 2022204 - RNA, 19 nt, Artificial Sequence
  Description of Artificial Sequence: Synthetic oligonucleotide
gguccgaaguuuuauuggg

SEQ ID NO: 2022205 - RNA, 19 nt, Artificial Sequence
  Description of Artificial Sequence: Synthetic oligonucleotide
uaauaggacccuuuccaaa

SEQ ID NO: 2022206 - RNA, 19 nt, Artificial Sequence
  Description of Artificial Sequence: Synthetic oligonucleotide
aagcgaucuggaucaaacu

SEQ ID NO: 2022207 - RNA, 19 nt, Artificial Sequence
  Description of Artificial Sequence: Synthetic oligonucleotide
uuggucuaucuccuuauau

SEQ ID NO: 2022208 - RNA, 19 nt, Artificial Sequence
  Description of Artificial Sequence: Synthetic oligonucleotide
uugaugaugugaccaguuc

SEQ ID NO: 2022209 - RNA, 19 nt, Artificial Sequence
  Description of Artificial Sequence: Synthetic oligonucleotide
caaaccucaguucugggca

SEQ ID NO: 2022210 - RNA, 19 nt, Artificial Sequence
  Description of Artificial Sequence: Synthetic oligonucleotide
ccuucaaugucuugaagcc

SEQ ID NO: 2022211 - RNA, 19 nt, Artificial Sequence
  Description of Artificial Sequence: Synthetic oligonucleotide
cagguacacaacuuugcag

SEQ ID NO: 2022212 - RNA, 19 nt, Artificial Sequence
  Description of Artificial Sequence: Synthetic oligonucleotide
uccugaagaaccacaccga

SEQ ID NO: 2022213 - RNA, 19 nt, Artificial Sequence
  Description of Artificial Sequence: Synthetic oligonucleotide
auaucuuagcugcucaguu

SEQ ID NO: 2022214 - RNA, 19 nt, Artificial Sequence
  Description of Artificial Sequence: Synthetic oligonucleotide
guuuguaaaaggacucagc

SEQ ID NO: 2022215 - RNA, 19 nt, Artificial Sequence
  Description of Artificial Sequence: Synthetic oligonucleotide
uaaugucuagugucuuuug

SEQ ID NO: 2022216 - RNA, 19 nt, Artificial Sequence
  Description of Artificial Sequence: Synthetic oligonucleotide
caauaucuuagcugcucag

SEQ ID NO: 2022217 - RNA, 19 nt, Artificial Sequence
  Description of Artificial Sequence: Synthetic oligonucleotide
uauuaugcaaccggccaga

SEQ ID NO: 2022218 - RNA, 19 nt, Artificial Sequence
  Description of Artificial Sequence: Synthetic oligonucleotide
aagccgggcacaaacuggg

SEQ ID NO: 2022219 - RNA, 19 nt, Artificial Sequence
  Description of Artificial Sequence: Synthetic oligonucleotide
aaugggccaaccuuuccuu

SEQ ID NO: 2022220 - RNA, 19 nt, Artificial Sequence
  Description of Artificial Sequence: Synthetic oligonucleotide
gaagccgggcacaaacugg

SEQ ID NO: 2022221 - RNA, 19 nt, Artificial Sequence
  Description of Artificial Sequence: Synthetic oligonucleotide
aucuuagcugcucaguuuu

SEQ ID NO: 2022222 - RNA, 19 nt, Artificial Sequence
  Description of Artificial Sequence: Synthetic oligonucleotide
caaccuuuccuucaauguc

SEQ ID NO: 2022223 - RNA, 19 nt, Artificial Sequence
  Description of Artificial Sequence: Synthetic oligonucleotide
caggaacucaugcaaacuc

SEQ ID NO: 2022224 - RNA, 19 nt, Artificial Sequence
  Description of Artificial Sequence: Synthetic oligonucleotide
cuucaaugucuugaagccg

SEQ ID NO: 2022225 - RNA, 19 nt, Artificial Sequence
  Description of Artificial Sequence: Synthetic oligonucleotide
acaugguuucaaauggguc

SEQ ID NO: 2022226 - RNA, 19 nt, Artificial Sequence
  Description of Artificial Sequence: Synthetic oligonucleotide
gaagauguguugaccgaag

SEQ ID NO: 2022227 - RNA, 19 nt, Artificial Sequence
  Description of Artificial Sequence: Synthetic oligonucleotide
aggcaucuugcaaagcagc

SEQ ID NO: 2022228 - RNA, 19 nt, Artificial Sequence
  Description of Artificial Sequence: Synthetic oligonucleotide
caaugaagauguguugacc

SEQ ID NO: 2022229 - RNA, 19 nt, Artificial Sequence
  Description of Artificial Sequence: Synthetic oligonucleotide
cugauucgucagcaaagcg

SEQ ID NO: 2022230 - RNA, 19 nt, Artificial Sequence
  Description of Artificial Sequence: Synthetic oligonucleotide
agcgaucuggaucaaacuu

SEQ ID NO: 2022231 - RNA, 19 nt, Artificial Sequence
  Description of Artificial Sequence: Synthetic oligonucleotide
ucauugagguuuccuugca

SEQ ID NO: 2022232 - RNA, 19 nt, Artificial Sequence
  Description of Artificial Sequence: Synthetic oligonucleotide
gucaaugaagauguguuga

SEQ ID NO: 2022233 - RNA, 19 nt, Artificial Sequence
  Description of Artificial Sequence: Synthetic oligonucleotide
ucauguggucuucacucac

SEQ ID NO: 2022234 - RNA, 19 nt, Artificial Sequence
  Description of Artificial Sequence: Synthetic oligonucleotide
uggcaguccgaacaguuuc

SEQ ID NO: 2022235 - RNA, 19 nt, Artificial Sequence
  Description of Artificial Sequence: Synthetic oligonucleotide
ccuaguaaugacuucaaca

SEQ ID NO: 2022236 - RNA, 19 nt, Artificial Sequence
  Description of Artificial Sequence: Synthetic oligonucleotide
agucuccucaccagcacgc

SEQ ID NO: 2022237 - RNA, 19 nt, Artificial Sequence
  Description of Artificial Sequence: Synthetic oligonucleotide
aaaacagauugcccaggua

SEQ ID NO: 2022238 - RNA, 19 nt, Artificial Sequence
  Description of Artificial Sequence: Synthetic oligonucleotide
aaaaugaugcuggguuugu

SEQ ID NO: 2022239 - RNA, 19 nt, Artificial Sequence
  Description of Artificial Sequence: Synthetic oligonucleotide
aggcccauaucuuuucaug

SEQ ID NO: 2022240 - RNA, 19 nt, Artificial Sequence
  Description of Artificial Sequence: Synthetic oligonucleotide
guaaaaggacucagcacag

SEQ ID NO: 2022241 - RNA, 19 nt, Artificial Sequence
  Description of Artificial Sequence: Synthetic oligonucleotide
ugcaugaggcaucuugcaa

SEQ ID NO: 2022242 - RNA, 19 nt, Artificial Sequence
  Description of Artificial Sequence: Synthetic oligonucleotide
gaugugaccaguucauacu

SEQ ID NO: 2022243 - RNA, 19 nt, Artificial Sequence
  Description of Artificial Sequence: Synthetic oligonucleotide
acagauugcccagguacac

SEQ ID NO: 2022244 - RNA, 19 nt, Artificial Sequence
  Description of Artificial Sequence: Synthetic oligonucleotide
agcaagcaggugcagucuc

SEQ ID NO: 2022245 - RNA, 19 nt, Artificial Sequence
  Description of Artificial Sequence: Synthetic oligonucleotide
aacagauugcccagguaca

SEQ ID NO: 2022246 - RNA, 19 nt, Artificial Sequence
  Description of Artificial Sequence: Synthetic oligonucleotide
uuacaaaaugaugcugggu

SEQ ID NO: 2022247 - RNA, 19 nt, Artificial Sequence
  Description of Artificial Sequence: Synthetic oligonucleotide
aggacgagggucuccuuag

SEQ ID NO: 2022248 - RNA, 19 nt, Artificial Sequence
  Description of Artificial Sequence: Synthetic oligonucleotide
acaaaaugaugcuggguuu

SEQ ID NO: 2022249 - RNA, 19 nt, Artificial Sequence
  Description of Artificial Sequence: Synthetic oligonucleotide
ugaugcuggguuuguaaaa

SEQ ID NO: 2022250 - RNA, 19 nt, Artificial Sequence
  Description of Artificial Sequence: Synthetic oligonucleotide
auacccuaguaaugacuuc

SEQ ID NO: 2022251 - RNA, 19 nt, Artificial Sequence
  Description of Artificial Sequence: Synthetic oligonucleotide
cugaccacaagacgccugc

SEQ ID NO: 2022252 - RNA, 19 nt, Artificial Sequence
  Description of Artificial Sequence: Synthetic oligonucleotide
cuuucaucacugauucguc

SEQ ID NO: 2022253 - RNA, 19 nt, Artificial Sequence
  Description of Artificial Sequence: Synthetic oligonucleotide
caccguguaagcaaaccuc

SEQ ID NO: 2022254 - RNA, 19 nt, Artificial Sequence
  Description of Artificial Sequence: Synthetic oligonucleotide
acuucaacaugguuucaaa

SEQ ID NO: 2022255 - RNA, 19 nt, Artificial Sequence
  Description of Artificial Sequence: Synthetic oligonucleotide
ucaugcaaacucccacugu

SEQ ID NO: 2022256 - RNA, 19 nt, Artificial Sequence
  Description of Artificial Sequence: Synthetic oligonucleotide
ugucccuccacagcaagca

SEQ ID NO: 2022257 - RNA, 19 nt, Artificial Sequence
  Description of Artificial Sequence: Synthetic oligonucleotide
uguugaccgaaguuccuuc

SEQ ID NO: 2022258 - RNA, 19 nt, Artificial Sequence
  Description of Artificial Sequence: Synthetic oligonucleotide
cagcaaagcgaucuggauc

SEQ ID NO: 2022259 - RNA, 19 nt, Artificial Sequence
  Description of Artificial Sequence: Synthetic oligonucleotide
cucaugcaaacucccacug

SEQ ID NO: 2022260 - RNA, 19 nt, Artificial Sequence
  Description of Artificial Sequence: Synthetic oligonucleotide
gccagagaaaauaucauac

SEQ ID NO: 2022261 - RNA, 19 nt, Artificial Sequence
  Description of Artificial Sequence: Synthetic oligonucleotide
uugaagccgggcacaaacu

SEQ ID NO: 2022262 - RNA, 19 nt, Artificial Sequence
  Description of Artificial Sequence: Synthetic oligonucleotide
ucuggcaguccgaacaguu

SEQ ID NO: 2022263 - RNA, 19 nt, Artificial Sequence
  Description of Artificial Sequence: Synthetic oligonucleotide
uugaccgaaguuccuuccu

SEQ ID NO: 2022264 - RNA, 19 nt, Artificial Sequence
  Description of Artificial Sequence: Synthetic oligonucleotide
uccucauguggucuucacu

SEQ ID NO: 2022265 - RNA, 19 nt, Artificial Sequence
  Description of Artificial Sequence: Synthetic oligonucleotide
acgucggcagugcccaagc

SEQ ID NO: 2022266 - RNA, 19 nt, Artificial Sequence
  Description of Artificial Sequence: Synthetic oligonucleotide
aaggacgagggucuccuua

SEQ ID NO: 2022267 - RNA, 19 nt, Artificial Sequence
  Description of Artificial Sequence: Synthetic oligonucleotide
aauuaaccaggaacucaug

SEQ ID NO: 2022268 - RNA, 19 nt, Artificial Sequence
  Description of Artificial Sequence: Synthetic oligonucleotide
gugaccaguucauacuuca

SEQ ID NO: 2022269 - RNA, 19 nt, Artificial Sequence
  Description of Artificial Sequence: Synthetic oligonucleotide
gagugauacccuaguaaug

SEQ ID NO: 2022270 - RNA, 19 nt, Artificial Sequence
  Description of Artificial Sequence: Synthetic oligonucleotide
ugcuggcaauaucuuagcu

SEQ ID NO: 2022271 - RNA, 19 nt, Artificial Sequence
  Description of Artificial Sequence: Synthetic oligonucleotide
uuaugcaaccggccagaga

SEQ ID NO: 2022272 - RNA, 19 nt, Artificial Sequence
  Description of Artificial Sequence: Synthetic oligonucleotide
acacucccgccacagagug

SEQ ID NO: 2022273 - RNA, 19 nt, Artificial Sequence
  Description of Artificial Sequence: Synthetic oligonucleotide
agcaaaccucaguucuggg

SEQ ID NO: 2022274 - RNA, 19 nt, Artificial Sequence
  Description of Artificial Sequence: Synthetic oligonucleotide
uguugucagaaaacagauu

SEQ ID NO: 2022275 - RNA, 19 nt, Artificial Sequence
  Description of Artificial Sequence: Synthetic oligonucleotide
acaagacgccugccaaaac

SEQ ID NO: 2022276 - RNA, 19 nt, Artificial Sequence
  Description of Artificial Sequence: Synthetic oligonucleotide
caaaaccagaaagaggcca

SEQ ID NO: 2022277 - RNA, 19 nt, Artificial Sequence
  Description of Artificial Sequence: Synthetic oligonucleotide
uuccuugcauuaagaaguc

SEQ ID NO: 2022278 - RNA, 19 nt, Artificial Sequence
  Description of Artificial Sequence: Synthetic oligonucleotide
uccaacugcaugaggcauc

SEQ ID NO: 2022279 - RNA, 19 nt, Artificial Sequence
  Description of Artificial Sequence: Synthetic oligonucleotide
ggguuagucuggcaguccg

SEQ ID NO: 2022280 - RNA, 19 nt, Artificial Sequence
  Description of Artificial Sequence: Synthetic oligonucleotide
ggcccauaucuuuucaugc

SEQ ID NO: 2022281 - RNA, 19 nt, Artificial Sequence
  Description of Artificial Sequence: Synthetic oligonucleotide
gagacagugauccacgcuu

SEQ ID NO: 2022282 - RNA, 19 nt, Artificial Sequence
  Description of Artificial Sequence: Synthetic oligonucleotide
ugugcggugauggccaagu

SEQ ID NO: 2022283 - RNA, 19 nt, Artificial Sequence
  Description of Artificial Sequence: Synthetic oligonucleotide
gcauuaagaagucaaugaa

SEQ ID NO: 2022284 - RNA, 19 nt, Artificial Sequence
  Description of Artificial Sequence: Synthetic oligonucleotide
ugggccaaccuuuccuuca

SEQ ID NO: 2022285 - RNA, 19 nt, Artificial Sequence
  Description of Artificial Sequence: Synthetic oligonucleotide
agacuaaugucuagugucu

SEQ ID NO: 2022286 - RNA, 19 nt, Artificial Sequence
  Description of Artificial Sequence: Synthetic oligonucleotide
acuuugcaguuauuaugca

SEQ ID NO: 2022287 - RNA, 19 nt, Artificial Sequence
  Description of Artificial Sequence: Synthetic oligonucleotide
cagagugauacccuaguaa

SEQ ID NO: 2022288 - RNA, 19 nt, Artificial Sequence
  Description of Artificial Sequence: Synthetic oligonucleotide
gaaaacagauugcccaggu

SEQ ID NO: 2022289 - RNA, 19 nt, Artificial Sequence
  Description of Artificial Sequence: Synthetic oligonucleotide
gcucauugagguuuccuug

SEQ ID NO: 2022290 - RNA, 19 nt, Artificial Sequence
  Description of Artificial Sequence: Synthetic oligonucleotide
gaucaaacuugugcgguga

SEQ ID NO: 2022291 - RNA, 19 nt, Artificial Sequence
  Description of Artificial Sequence: Synthetic oligonucleotide
uggcauuuccauacaguuu

SEQ ID NO: 2022292 - RNA, 19 nt, Artificial Sequence
  Description of Artificial Sequence: Synthetic oligonucleotide
accacaagacgccugccaa

SEQ ID NO: 2022293 - RNA, 19 nt, Artificial Sequence
  Description of Artificial Sequence: Synthetic oligonucleotide
uagcacuguggccaccgug

SEQ ID NO: 2022294 - RNA, 19 nt, Artificial Sequence
  Description of Artificial Sequence: Synthetic oligonucleotide
uggagacagugauccacgc

SEQ ID NO: 2022295 - RNA, 19 nt, Artificial Sequence
  Description of Artificial Sequence: Synthetic oligonucleotide
guccgaaguuuuauugggg

SEQ ID NO: 2022296 - RNA, 19 nt, Artificial Sequence
  Description of Artificial Sequence: Synthetic oligonucleotide
cacgcuucuucccuugaug

SEQ ID NO: 2022297 - RNA, 19 nt, Artificial Sequence
  Description of Artificial Sequence: Synthetic oligonucleotide
gucuagugucuuuuggaga

SEQ ID NO: 2022298 - RNA, 19 nt, Artificial Sequence
  Description of Artificial Sequence: Synthetic oligonucleotide
agauucuacauaggcauuu

SEQ ID NO: 2022299 - RNA, 19 nt, Artificial Sequence
  Description of Artificial Sequence: Synthetic oligonucleotide
gcaaaccucaguucugggc

SEQ ID NO: 2022300 - RNA, 19 nt, Artificial Sequence
  Description of Artificial Sequence: Synthetic oligonucleotide
acgagggucuccuuaggaa

SEQ ID NO: 2022301 - RNA, 19 nt, Artificial Sequence
  Description of Artificial Sequence: Synthetic oligonucleotide
acuugugcggugauggcca

SEQ ID NO: 2022302 - RNA, 19 nt, Artificial Sequence
  Description of Artificial Sequence: Synthetic oligonucleotide
aaguuccuuccuuuucguu

SEQ ID NO: 2022303 - RNA, 19 nt, Artificial Sequence
  Description of Artificial Sequence: Synthetic oligonucleotide
gauacccuaguaaugacuu

SEQ ID NO: 2022304 - RNA, 19 nt, Artificial Sequence
  Description of Artificial Sequence: Synthetic oligonucleotide
gauucgucagcaaagcgau

SEQ ID NO: 2022305 - RNA, 19 nt, Artificial Sequence
  Description of Artificial Sequence: Synthetic oligonucleotide
agcacagauucuacauagg

SEQ ID NO: 2022306 - RNA, 19 nt, Artificial Sequence
  Description of Artificial Sequence: Synthetic oligonucleotide
cacuuucaucacugauucg

SEQ ID NO: 2022307 - RNA, 19 nt, Artificial Sequence
  Description of Artificial Sequence: Synthetic oligonucleotide
uuagucuggcaguccgaac

SEQ ID NO: 2022308 - RNA, 19 nt, Artificial Sequence
  Description of Artificial Sequence: Synthetic oligonucleotide
gacgagggucuccuuagga

SEQ ID NO: 2022309 - RNA, 19 nt, Artificial Sequence
  Description of Artificial Sequence: Synthetic oligonucleotide
cccaugucccugaaaagcc

SEQ ID NO: 2022310 - RNA, 19 nt, Artificial Sequence
  Description of Artificial Sequence: Synthetic oligonucleotide
ugaccgaaguuccuuccuu

SEQ ID NO: 2022311 - RNA, 19 nt, Artificial Sequence
  Description of Artificial Sequence: Synthetic oligonucleotide
gaccacaagacgccugcca

SEQ ID NO: 2022312 - RNA, 19 nt, Artificial Sequence
  Description of Artificial Sequence: Synthetic oligonucleotide
gugauacccuaguaaugac

SEQ ID NO: 2022313 - RNA, 19 nt, Artificial Sequence
  Description of Artificial Sequence: Synthetic oligonucleotide
auuucccuccaucuacuua

SEQ ID NO: 2022314 - RNA, 19 nt, Artificial Sequence
  Description of Artificial Sequence: Synthetic oligonucleotide
acagagugauacccuagua

SEQ ID NO: 2022315 - RNA, 19 nt, Artificial Sequence
  Description of Artificial Sequence: Synthetic oligonucleotide
ugggcauucccaugucccu

SEQ ID NO: 2022316 - RNA, 19 nt, Artificial Sequence
  Description of Artificial Sequence: Synthetic oligonucleotide
ccaagcugaccacaagacg

SEQ ID NO: 2022317 - RNA, 19 nt, Artificial Sequence
  Description of Artificial Sequence: Synthetic oligonucleotide
ggaacucaugcaaacuccc

SEQ ID NO: 2022318 - RNA, 19 nt, Artificial Sequence
  Description of Artificial Sequence: Synthetic oligonucleotide
ugcccaagcugaccacaag

SEQ ID NO: 2022319 - RNA, 19 nt, Artificial Sequence
  Description of Artificial Sequence: Synthetic oligonucleotide
agcacgcucacuagcacug

SEQ ID NO: 2022320 - RNA, 19 nt, Artificial Sequence
  Description of Artificial Sequence: Synthetic oligonucleotide
ucuuagcugcucaguuuuc

SEQ ID NO: 2022321 - RNA, 19 nt, Artificial Sequence
  Description of Artificial Sequence: Synthetic oligonucleotide
agacagugauccacgcuuc

SEQ ID NO: 2022322 - RNA, 19 nt, Artificial Sequence
  Description of Artificial Sequence: Synthetic oligonucleotide
acauaggcauuucccucca

SEQ ID NO: 2022323 - RNA, 19 nt, Artificial Sequence
  Description of Artificial Sequence: Synthetic oligonucleotide
acgcucacuagcacugugg

SEQ ID NO: 2022324 - RNA, 19 nt, Artificial Sequence
  Description of Artificial Sequence: Synthetic oligonucleotide
ugcaaccggccagagaaaa

SEQ ID NO: 2022325 - RNA, 19 nt, Artificial Sequence
  Description of Artificial Sequence: Synthetic oligonucleotide
gaugaugugaccaguucau

SEQ ID NO: 2022326 - RNA, 19 nt, Artificial Sequence
  Description of Artificial Sequence: Synthetic oligonucleotide
ugaccaguucauacuucau

SEQ ID NO: 2022327 - RNA, 19 nt, Artificial Sequence
  Description of Artificial Sequence: Synthetic oligonucleotide
uguggccaccguguaagca

SEQ ID NO: 2022328 - RNA, 19 nt, Artificial Sequence
  Description of Artificial Sequence: Synthetic oligonucleotide
ucccgccacagagugauac

SEQ ID NO: 2022329 - RNA, 19 nt, Artificial Sequence
  Description of Artificial Sequence: Synthetic oligonucleotide
cgucauggcauuuccauac

SEQ ID NO: 2022330 - RNA, 19 nt, Artificial Sequence
  Description of Artificial Sequence: Synthetic oligonucleotide
ggaucaaacuugugcggug

SEQ ID NO: 2022331 - RNA, 19 nt, Artificial Sequence
  Description of Artificial Sequence: Synthetic oligonucleotide
gcaauaucuuagcugcuca

SEQ ID NO: 2022332 - RNA, 19 nt, Artificial Sequence
  Description of Artificial Sequence: Synthetic oligonucleotide
caccgagggcauaaaggac

SEQ ID NO: 2022333 - RNA, 19 nt, Artificial Sequence
  Description of Artificial Sequence: Synthetic oligonucleotide
ccugaagaaccacaccgag

SEQ ID NO: 2022334 - RNA, 19 nt, Artificial Sequence
  Description of Artificial Sequence: Synthetic oligonucleotide
uggccaagugcuggggucc

SEQ ID NO: 2022335 - RNA, 19 nt, Artificial Sequence
  Description of Artificial Sequence: Synthetic oligonucleotide
uggcaauaucuuagcugcu

SEQ ID NO: 2022336 - RNA, 19 nt, Artificial Sequence
  Description of Artificial Sequence: Synthetic oligonucleotide
gcgaucuggaucaaacuug

SEQ ID NO: 2022337 - RNA, 19 nt, Artificial Sequence
  Description of Artificial Sequence: Synthetic oligonucleotide
caucuugcaaagcagccgu

SEQ ID NO: 2022338 - RNA, 19 nt, Artificial Sequence
  Description of Artificial Sequence: Synthetic oligonucleotide
guggccaccguguaagcaa

SEQ ID NO: 2022339 - RNA, 19 nt, Artificial Sequence
  Description of Artificial Sequence: Synthetic oligonucleotide
aaaugaugcuggguuugua

SEQ ID NO: 2022340 - RNA, 19 nt, Artificial Sequence
  Description of Artificial Sequence: Synthetic oligonucleotide
aggacgucggcagugccca

SEQ ID NO: 2022341 - RNA, 19 nt, Artificial Sequence
  Description of Artificial Sequence: Synthetic oligonucleotide
cucauguggucuucacuca

SEQ ID NO: 2022342 - RNA, 19 nt, Artificial Sequence
  Description of Artificial Sequence: Synthetic oligonucleotide
ccuugcauuaagaagucaa

SEQ ID NO: 2022343 - RNA, 19 nt, Artificial Sequence
  Description of Artificial Sequence: Synthetic oligonucleotide
gaaguuccuuccuuuucgu

SEQ ID NO: 2022344 - RNA, 19 nt, Artificial Sequence
  Description of Artificial Sequence: Synthetic oligonucleotide
aagcacuugcuggcaauau

SEQ ID NO: 2022345 - RNA, 19 nt, Artificial Sequence
  Description of Artificial Sequence: Synthetic oligonucleotide
aucaaacuugugcggugau

SEQ ID NO: 2022346 - RNA, 19 nt, Artificial Sequence
  Description of Artificial Sequence: Synthetic oligonucleotide
cuucaggacgucggcagug

SEQ ID NO: 2022347 - RNA, 19 nt, Artificial Sequence
  Description of Artificial Sequence: Synthetic oligonucleotide
cauggcauuuccauacagu

SEQ ID NO: 2022348 - RNA, 19 nt, Artificial Sequence
  Description of Artificial Sequence: Synthetic oligonucleotide
accggccagagaaaauauc

SEQ ID NO: 2022349 - RNA, 19 nt, Artificial Sequence
  Description of Artificial Sequence: Synthetic oligonucleotide
uggccaccguguaagcaaa

SEQ ID NO: 2022350 - RNA, 19 nt, Artificial Sequence
  Description of Artificial Sequence: Synthetic oligonucleotide
gguccugaagaaccacacc

SEQ ID NO: 2022351 - RNA, 19 nt, Artificial Sequence
  Description of Artificial Sequence: Synthetic oligonucleotide
auccacgcuucuucccuug

SEQ ID NO: 2022352 - RNA, 19 nt, Artificial Sequence
  Description of Artificial Sequence: Synthetic oligonucleotide
uccuugcauuaagaaguca

SEQ ID NO: 2022353 - RNA, 19 nt, Artificial Sequence
  Description of Artificial Sequence: Synthetic oligonucleotide
agaggccacaggcccauau

SEQ ID NO: 2022354 - RNA, 19 nt, Artificial Sequence
  Description of Artificial Sequence: Synthetic oligonucleotide
uccacgcuucuucccuuga

SEQ ID NO: 2022355 - RNA, 19 nt, Artificial Sequence
  Description of Artificial Sequence: Synthetic oligonucleotide
caaugucuugaagccgggc

SEQ ID NO: 2022356 - RNA, 19 nt, Artificial Sequence
  Description of Artificial Sequence: Synthetic oligonucleotide
ccaaaaccagaaagaggcc

SEQ ID NO: 2022357 - RNA, 19 nt, Artificial Sequence
  Description of Artificial Sequence: Synthetic oligonucleotide
aaccggccagagaaaauau

SEQ ID NO: 2022358 - RNA, 19 nt, Artificial Sequence
  Description of Artificial Sequence: Synthetic oligonucleotide
cucagcacagauucuacau

SEQ ID NO: 2022359 - RNA, 19 nt, Artificial Sequence
  Description of Artificial Sequence: Synthetic oligonucleotide
ccggccagagaaaauauca

SEQ ID NO: 2022360 - RNA, 19 nt, Artificial Sequence
  Description of Artificial Sequence: Synthetic oligonucleotide
caugucccugaaaagccaa

SEQ ID NO: 2022361 - RNA, 19 nt, Artificial Sequence
  Description of Artificial Sequence: Synthetic oligonucleotide
cuacuuaauaaagacuaau

SEQ ID NO: 2022362 - RNA, 19 nt, Artificial Sequence
  Description of Artificial Sequence: Synthetic oligonucleotide
aacucccacuguucacaau

SEQ ID NO: 2022363 - RNA, 19 nt, Artificial Sequence
  Description of Artificial Sequence: Synthetic oligonucleotide
ugggguuagucuggcaguc

SEQ ID NO: 2022364 - RNA, 19 nt, Artificial Sequence
  Description of Artificial Sequence: Synthetic oligonucleotide
guuagucuggcaguccgaa

SEQ ID NO: 2022365 - RNA, 19 nt, Artificial Sequence
  Description of Artificial Sequence: Synthetic oligonucleotide
gacgucggcagugcccaag

SEQ ID NO: 2022366 - RNA, 19 nt, Artificial Sequence
  Description of Artificial Sequence: Synthetic oligonucleotide
gggguugaagugcugcuuc

SEQ ID NO: 2022367 - RNA, 19 nt, Artificial Sequence
  Description of Artificial Sequence: Synthetic oligonucleotide
gcaaauuaaccaggaacuc

SEQ ID NO: 2022368 - RNA, 19 nt, Artificial Sequence
  Description of Artificial Sequence: Synthetic oligonucleotide
aaauggguccgaaguuuua

SEQ ID NO: 2022369 - RNA, 19 nt, Artificial Sequence
  Description of Artificial Sequence: Synthetic oligonucleotide
cauaaaggacgagggucuc

SEQ ID NO: 2022370 - RNA, 19 nt, Artificial Sequence
  Description of Artificial Sequence: Synthetic oligonucleotide
caugcaaacucccacuguu

SEQ ID NO: 2022371 - RNA, 19 nt, Artificial Sequence
  Description of Artificial Sequence: Synthetic oligonucleotide
aggcauuucccuccaucua

SEQ ID NO: 2022372 - RNA, 19 nt, Artificial Sequence
  Description of Artificial Sequence: Synthetic oligonucleotide
gacgccugccaaaaccaga

SEQ ID NO: 2022373 - RNA, 19 nt, Artificial Sequence
  Description of Artificial Sequence: Synthetic oligonucleotide
ucguuccuuuaugauuuuc

SEQ ID NO: 2022374 - RNA, 19 nt, Artificial Sequence
  Description of Artificial Sequence: Synthetic oligonucleotide
aaaggacgagggucuccuu

SEQ ID NO: 2022375 - RNA, 19 nt, Artificial Sequence
  Description of Artificial Sequence: Synthetic oligonucleotide
ugacuucaacaugguuuca

SEQ ID NO: 2022376 - RNA, 19 nt, Artificial Sequence
  Description of Artificial Sequence: Synthetic oligonucleotide
ugaccacaagacgccugcc

SEQ ID NO: 2022377 - RNA, 19 nt, Artificial Sequence
  Description of Artificial Sequence: Synthetic oligonucleotide
caaccggccagagaaaaua

SEQ ID NO: 2022378 - RNA, 19 nt, Artificial Sequence
  Description of Artificial Sequence: Synthetic oligonucleotide
uucccuccaucuacuuaau

SEQ ID NO: 2022379 - RNA, 19 nt, Artificial Sequence
  Description of Artificial Sequence: Synthetic oligonucleotide
ucccuccaucuacuuaaua

SEQ ID NO: 2022380 - RNA, 19 nt, Artificial Sequence
  Description of Artificial Sequence: Synthetic oligonucleotide
ccuuuucguuccuuuauga

SEQ ID NO: 2022381 - RNA, 19 nt, Artificial Sequence
  Description of Artificial Sequence: Synthetic oligonucleotide
gcccaagcugaccacaaga

SEQ ID NO: 2022382 - RNA, 19 nt, Artificial Sequence
  Description of Artificial Sequence: Synthetic oligonucleotide
agacgccugccaaaaccag

SEQ ID NO: 2022383 - RNA, 19 nt, Artificial Sequence
  Description of Artificial Sequence: Synthetic oligonucleotide
cuugaugaugugaccaguu

SEQ ID NO: 2022384 - RNA, 19 nt, Artificial Sequence
  Description of Artificial Sequence: Synthetic oligonucleotide
auucgucagcaaagcgauc

SEQ ID NO: 2022385 - RNA, 19 nt, Artificial Sequence
  Description of Artificial Sequence: Synthetic oligonucleotide
gcucacuagcacuguggcc

SEQ ID NO: 2022386 - RNA, 19 nt, Artificial Sequence
  Description of Artificial Sequence: Synthetic oligonucleotide
cacaagacgccugccaaaa

SEQ ID NO: 2022387 - RNA, 19 nt, Artificial Sequence
  Description of Artificial Sequence: Synthetic oligonucleotide
ggacgagggucuccuuagg

SEQ ID NO: 2022388 - RNA, 19 nt, Artificial Sequence
  Description of Artificial Sequence: Synthetic oligonucleotide
cacagagugauacccuagu

SEQ ID NO: 2022389 - RNA, 19 nt, Artificial Sequence
  Description of Artificial Sequence: Synthetic oligonucleotide
ugguuucaaauggguccga

SEQ ID NO: 2022390 - RNA, 19 nt, Artificial Sequence
  Description of Artificial Sequence: Synthetic oligonucleotide
uucguuccuuuaugauuuu

SEQ ID NO: 2022391 - RNA, 19 nt, Artificial Sequence
  Description of Artificial Sequence: Synthetic oligonucleotide
caguccgaacaguuucaca

SEQ ID NO: 2022392 - RNA, 19 nt, Artificial Sequence
  Description of Artificial Sequence: Synthetic oligonucleotide
ucuugaagccgggcacaaa

SEQ ID NO: 2022393 - RNA, 19 nt, Artificial Sequence
  Description of Artificial Sequence: Synthetic oligonucleotide
augaugugaccaguucaua

SEQ ID NO: 2022394 - RNA, 19 nt, Artificial Sequence
  Description of Artificial Sequence: Synthetic oligonucleotide
guacacaacuuugcaguua

SEQ ID NO: 2022395 - RNA, 19 nt, Artificial Sequence
  Description of Artificial Sequence: Synthetic oligonucleotide
uugugcggugauggccaag

SEQ ID NO: 2022396 - RNA, 19 nt, Artificial Sequence
  Description of Artificial Sequence: Synthetic oligonucleotide
aagcagccgucauggcauu

SEQ ID NO: 2022397 - RNA, 19 nt, Artificial Sequence
  Description of Artificial Sequence: Synthetic oligonucleotide
ccguguaagcaaaccucag

SEQ ID NO: 2022398 - RNA, 19 nt, Artificial Sequence
  Description of Artificial Sequence: Synthetic oligonucleotide
caggugcagucuccucacc

SEQ ID NO: 2022399 - RNA, 19 nt, Artificial Sequence
  Description of Artificial Sequence: Synthetic oligonucleotide
gccaccguguaagcaaacc

SEQ ID NO: 2022400 - RNA, 19 nt, Artificial Sequence
  Description of Artificial Sequence: Synthetic oligonucleotide
cuuggucuaucuccuuaua

SEQ ID NO: 2022401 - RNA, 19 nt, Artificial Sequence
  Description of Artificial Sequence: Synthetic oligonucleotide
agcugaccacaagacgccu

SEQ ID NO: 2022402 - RNA, 19 nt, Artificial Sequence
  Description of Artificial Sequence: Synthetic oligonucleotide
gaccgaaguuccuuccuuu

SEQ ID NO: 2022403 - RNA, 19 nt, Artificial Sequence
  Description of Artificial Sequence: Synthetic oligonucleotide
ccgccacagagugauaccc

SEQ ID NO: 2022404 - RNA, 19 nt, Artificial Sequence
  Description of Artificial Sequence: Synthetic oligonucleotide
acccuaguaaugacuucaa

SEQ ID NO: 2022405 - RNA, 19 nt, Artificial Sequence
  Description of Artificial Sequence: Synthetic oligonucleotide
cgcucacuagcacuguggc

SEQ ID NO: 2022406 - RNA, 19 nt, Artificial Sequence
  Description of Artificial Sequence: Synthetic oligonucleotide
cccuaguaaugacuucaac

SEQ ID NO: 2022407 - RNA, 19 nt, Artificial Sequence
  Description of Artificial Sequence: Synthetic oligonucleotide
ggacucagcacagauucua

SEQ ID NO: 2022408 - RNA, 19 nt, Artificial Sequence
  Description of Artificial Sequence: Synthetic oligonucleotide
gcggugauggccaagugcu

SEQ ID NO: 2022409 - RNA, 19 nt, Artificial Sequence
  Description of Artificial Sequence: Synthetic oligonucleotide
gugcggugauggccaagug

SEQ ID NO: 2022410 - RNA, 19 nt, Artificial Sequence
  Description of Artificial Sequence: Synthetic oligonucleotide
cuugcaaagcagccgucau

SEQ ID NO: 2022411 - RNA, 19 nt, Artificial Sequence
  Description of Artificial Sequence: Synthetic oligonucleotide
cccacuguucacaaugucu

SEQ ID NO: 2022412 - RNA, 19 nt, Artificial Sequence
  Description of Artificial Sequence: Synthetic oligonucleotide
uccuccucauguggucuuc

SEQ ID NO: 2022413 - RNA, 19 nt, Artificial Sequence
  Description of Artificial Sequence: Synthetic oligonucleotide
cgucagcaaagcgaucugg

SEQ ID NO: 2022414 - RNA, 19 nt, Artificial Sequence
  Description of Artificial Sequence: Synthetic oligonucleotide
cccgccacagagugauacc

SEQ ID NO: 2022415 - RNA, 19 nt, Artificial Sequence
  Description of Artificial Sequence: Synthetic oligonucleotide
gcugaccacaagacgccug

SEQ ID NO: 2022416 - RNA, 19 nt, Artificial Sequence
  Description of Artificial Sequence: Synthetic oligonucleotide
gacuaaugucuagugucuu

SEQ ID NO: 2022417 - RNA, 19 nt, Artificial Sequence
  Description of Artificial Sequence: Synthetic oligonucleotide
ccaugucccugaaaagcca

SEQ ID NO: 2022418 - RNA, 19 nt, Artificial Sequence
  Description of Artificial Sequence: Synthetic oligonucleotide
ggagacagugauccacgcu

SEQ ID NO: 2022419 - RNA, 19 nt, Artificial Sequence
  Description of Artificial Sequence: Synthetic oligonucleotide
caaagcgaucuggaucaaa

SEQ ID NO: 2022420 - RNA, 19 nt, Artificial Sequence
  Description of Artificial Sequence: Synthetic oligonucleotide
cacacucccgccacagagu

SEQ ID NO: 2022421 - RNA, 19 nt, Artificial Sequence
  Description of Artificial Sequence: Synthetic oligonucleotide
gccgucauggcauuuccau

SEQ ID NO: 2022422 - RNA, 19 nt, Artificial Sequence
  Description of Artificial Sequence: Synthetic oligonucleotide
ggcaguccgaacaguuuca

SEQ ID NO: 2022423 - RNA, 19 nt, Artificial Sequence
  Description of Artificial Sequence: Synthetic oligonucleotide
gguuucaaauggguccgaa

SEQ ID NO: 2022424 - RNA, 19 nt, Artificial Sequence
  Description of Artificial Sequence: Synthetic oligonucleotide
agccgucauggcauuucca

SEQ ID NO: 2022425 - RNA, 19 nt, Artificial Sequence
  Description of Artificial Sequence: Synthetic oligonucleotide
caguucugggcauucccau

SEQ ID NO: 2022426 - RNA, 19 nt, Artificial Sequence
  Description of Artificial Sequence: Synthetic oligonucleotide
gguacacaacuuugcaguu

SEQ ID NO: 2022427 - RNA, 19 nt, Artificial Sequence
  Description of Artificial Sequence: Synthetic oligonucleotide
gggguuagucuggcagucc

SEQ ID NO: 2022428 - RNA, 19 nt, Artificial Sequence
  Description of Artificial Sequence: Synthetic oligonucleotide
gcaguccgaacaguuucac

SEQ ID NO: 2022429 - RNA, 19 nt, Artificial Sequence
  Description of Artificial Sequence: Synthetic oligonucleotide
gauccacgcuucuucccuu

SEQ ID NO: 2022430 - RNA, 19 nt, Artificial Sequence
  Description of Artificial Sequence: Synthetic oligonucleotide
gguuagucuggcaguccga

SEQ ID NO: 2022431 - RNA, 19 nt, Artificial Sequence
  Description of Artificial Sequence: Synthetic oligonucleotide
cacuagcacuguggccacc

SEQ ID NO: 2022432 - RNA, 19 nt, Artificial Sequence
  Description of Artificial Sequence: Synthetic oligonucleotide
gggcacaaacugggguuag

SEQ ID NO: 2022433 - RNA, 19 nt, Artificial Sequence
  Description of Artificial Sequence: Synthetic oligonucleotide
cagauucuacauaggcauu

SEQ ID NO: 2022434 - RNA, 19 nt, Artificial Sequence
  Description of Artificial Sequence: Synthetic oligonucleotide
cuggaagguuaccaucuuu

SEQ ID NO: 2022435 - RNA, 19 nt, Artificial Sequence
  Description of Artificial Sequence: Synthetic oligonucleotide
gcagccgucauggcauuuc

SEQ ID NO: 2022436 - RNA, 19 nt, Artificial Sequence
  Description of Artificial Sequence: Synthetic oligonucleotide
cuugugcggugauggccaa

SEQ ID NO: 2022437 - RNA, 19 nt, Artificial Sequence
  Description of Artificial Sequence: Synthetic oligonucleotide
gggcauaaaggacgagggu

SEQ ID NO: 2022438 - RNA, 19 nt, Artificial Sequence
  Description of Artificial Sequence: Synthetic oligonucleotide
gccaagugaggaaaacacu

SEQ ID NO: 2022439 - RNA, 19 nt, Artificial Sequence
  Description of Artificial Sequence: Synthetic oligonucleotide
caggcccauaucuuuucau

SEQ ID NO: 2022440 - RNA, 19 nt, Artificial Sequence
  Description of Artificial Sequence: Synthetic oligonucleotide
accacaccgagggcauaaa

SEQ ID NO: 2022441 - RNA, 19 nt, Artificial Sequence
  Description of Artificial Sequence: Synthetic oligonucleotide
gugcccaagcugaccacaa

SEQ ID NO: 2022442 - RNA, 19 nt, Artificial Sequence
  Description of Artificial Sequence: Synthetic oligonucleotide
guguugaccgaaguuccuu

SEQ ID NO: 2022443 - RNA, 19 nt, Artificial Sequence
  Description of Artificial Sequence: Synthetic oligonucleotide
cuggcaguccgaacaguuu

SEQ ID NO: 2022444 - RNA, 19 nt, Artificial Sequence
  Description of Artificial Sequence: Synthetic oligonucleotide
augcaaccggccagagaaa

SEQ ID NO: 2022445 - RNA, 19 nt, Artificial Sequence
  Description of Artificial Sequence: Synthetic oligonucleotide
gggccaaccuuuccuucaa

SEQ ID NO: 2022446 - RNA, 19 nt, Artificial Sequence
  Description of Artificial Sequence: Synthetic oligonucleotide
ccaccguguaagcaaaccu

SEQ ID NO: 2022447 - RNA, 19 nt, Artificial Sequence
  Description of Artificial Sequence: Synthetic oligonucleotide
cgaucuggaucaaacuugu

SEQ ID NO: 2022448 - RNA, 19 nt, Artificial Sequence
  Description of Artificial Sequence: Synthetic oligonucleotide
gcugcucauugagguuucc

SEQ ID NO: 2022449 - RNA, 19 nt, Artificial Sequence
  Description of Artificial Sequence: Synthetic oligonucleotide
cugaaguaauaggacccuu

SEQ ID NO: 2022450 - RNA, 19 nt, Artificial Sequence
  Description of Artificial Sequence: Synthetic oligonucleotide
gccgggcacaaacuggggu

SEQ ID NO: 2022451 - RNA, 19 nt, Artificial Sequence
  Description of Artificial Sequence: Synthetic oligonucleotide
ccacaagacgccugccaaa

SEQ ID NO: 2022452 - RNA, 19 nt, Artificial Sequence
  Description of Artificial Sequence: Synthetic oligonucleotide
gggucuccuuaggaauaac

SEQ ID NO: 2022453 - RNA, 19 nt, Artificial Sequence
  Description of Artificial Sequence: Synthetic oligonucleotide
gaaccacaccgagggcaua

SEQ ID NO: 2022454 - RNA, 19 nt, Artificial Sequence
  Description of Artificial Sequence: Synthetic oligonucleotide
agcagccgucauggcauuu

SEQ ID NO: 2022455 - RNA, 19 nt, Artificial Sequence
  Description of Artificial Sequence: Synthetic oligonucleotide
ccgucauggcauuuccaua

SEQ ID NO: 2022456 - RNA, 19 nt, Artificial Sequence
  Description of Artificial Sequence: Synthetic oligonucleotide
gcuucaggacgucggcagu

SEQ ID NO: 2022457 - RNA, 19 nt, Artificial Sequence
  Description of Artificial Sequence: Synthetic oligonucleotide
ccgaaguuuuauugggguu

SEQ ID NO: 2022458 - RNA, 19 nt, Artificial Sequence
  Description of Artificial Sequence: Synthetic oligonucleotide
cggugauggccaagugcug

SEQ ID NO: 2022459 - RNA, 19 nt, Artificial Sequence
  Description of Artificial Sequence: Synthetic oligonucleotide
ggccaccguguaagcaaac

SEQ ID NO: 2022460 - RNA, 19 nt, Artificial Sequence
  Description of Artificial Sequence: Synthetic oligonucleotide
ccgggcacaaacugggguu

SEQ ID NO: 2022461 - RNA, 19 nt, Artificial Sequence
  Description of Artificial Sequence: Synthetic oligonucleotide
gccaagugcugggguccug

SEQ ID NO: 2022462 - RNA, 19 nt, Artificial Sequence
  Description of Artificial Sequence: Synthetic oligonucleotide
ccacaggcccauaucuuuu

SEQ ID NO: 2022463 - RNA, 19 nt, Artificial Sequence
  Description of Artificial Sequence: Synthetic oligonucleotide
gcaaagcgaucuggaucaa

SEQ ID NO: 2022464 - RNA, 19 nt, Artificial Sequence
  Description of Artificial Sequence: Synthetic oligonucleotide
gcaaccggccagagaaaau

SEQ ID NO: 2022465 - RNA, 19 nt, Artificial Sequence
  Description of Artificial Sequence: Synthetic oligonucleotide
cgccacagagugauacccu

SEQ ID NO: 2022466 - RNA, 19 nt, Artificial Sequence
  Description of Artificial Sequence: Synthetic oligonucleotide
ggacgucggcagugcccaa

SEQ ID NO: 2022467 - RNA, 19 nt, Artificial Sequence
  Description of Artificial Sequence: Synthetic oligonucleotide
ggccaagugcugggguccu

SEQ ID NO: 2022468 - RNA, 19 nt, Artificial Sequence
  Description of Artificial Sequence: Synthetic oligonucleotide
ccacgcuucuucccuugau

SEQ ID NO: 2022469 - RNA, 19 nt, Artificial Sequence
  Description of Artificial Sequence: Synthetic oligonucleotide
gcacgcucacuagcacugu

SEQ ID NO: 2022470 - RNA, 19 nt, Artificial Sequence
  Description of Artificial Sequence: Synthetic oligonucleotide
cgggcacaaacugggguua

SEQ ID NO: 2022471 - RNA, 19 nt, Artificial Sequence
  Description of Artificial Sequence: Synthetic oligonucleotide
auuugcaaaacguaaaugc

SEQ ID NO: 2022472 - RNA, 19 nt, Artificial Sequence
  Description of Artificial Sequence: Synthetic oligonucleotide
aaaguagucauauccauac

SEQ ID NO: 2022473 - RNA, 19 nt, Artificial Sequence
  Description of Artificial Sequence: Synthetic oligonucleotide
agcuauuaaagcuauaacc

SEQ ID NO: 2022474 - RNA, 19 nt, Artificial Sequence
  Description of Artificial Sequence: Synthetic oligonucleotide
agaaacaucacggauaccc

SEQ ID NO: 2022475 - RNA, 19 nt, Artificial Sequence
  Description of Artificial Sequence: Synthetic oligonucleotide
aaagcuauaaccugauuug

SEQ ID NO: 2022476 - RNA, 19 nt, Artificial Sequence
  Description of Artificial Sequence: Synthetic oligonucleotide
uccauuuagaaacaucacg

SEQ ID NO: 2022477 - RNA, 19 nt, Artificial Sequence
  Description of Artificial Sequence: Synthetic oligonucleotide
aaaacguaaaugcagauua

SEQ ID NO: 2022478 - RNA, 19 nt, Artificial Sequence
  Description of Artificial Sequence: Synthetic oligonucleotide
acugguaacagacaaggac

SEQ ID NO: 2022479 - RNA, 19 nt, Artificial Sequence
  Description of Artificial Sequence: Synthetic oligonucleotide
acagacaaggacaugaucc

SEQ ID NO: 2022480 - RNA, 19 nt, Artificial Sequence
  Description of Artificial Sequence: Synthetic oligonucleotide
gauccuucaauacagauuc

SEQ ID NO: 2022481 - RNA, 19 nt, Artificial Sequence
  Description of Artificial Sequence: Synthetic oligonucleotide
aaaacgugggaccaauggg

SEQ ID NO: 2022482 - RNA, 19 nt, Artificial Sequence
  Description of Artificial Sequence: Synthetic oligonucleotide
ucuccgugcacaaugaggg

SEQ ID NO: 2022483 - RNA, 19 nt, Artificial Sequence
  Description of Artificial Sequence: Synthetic oligonucleotide
cuucaauacagauucaccc

SEQ ID NO: 2022484 - RNA, 19 nt, Artificial Sequence
  Description of Artificial Sequence: Synthetic oligonucleotide
gauaucaugggaaauguag

SEQ ID NO: 2022485 - RNA, 19 nt, Artificial Sequence
  Description of Artificial Sequence: Synthetic oligonucleotide
gaggauaaaagcaaggaag

SEQ ID NO: 2022486 - RNA, 19 nt, Artificial Sequence
  Description of Artificial Sequence: Synthetic oligonucleotide
uauuaaagcuauaaccuga

SEQ ID NO: 2022487 - RNA, 19 nt, Artificial Sequence
  Description of Artificial Sequence: Synthetic oligonucleotide
gaaaacgugggaccaaugg

SEQ ID NO: 2022488 - RNA, 19 nt, Artificial Sequence
  Description of Artificial Sequence: Synthetic oligonucleotide
uggcaaaguagucauaucc

SEQ ID NO: 2022489 - RNA, 19 nt, Artificial Sequence
  Description of Artificial Sequence: Synthetic oligonucleotide
ugaauucauuugcaaaacg

SEQ ID NO: 2022490 - RNA, 19 nt, Artificial Sequence
  Description of Artificial Sequence: Synthetic oligonucleotide
uuuagaaacaucacggaua

SEQ ID NO: 2022491 - RNA, 19 nt, Artificial Sequence
  Description of Artificial Sequence: Synthetic oligonucleotide
agcaugaaaacgugggacc

SEQ ID NO: 2022492 - RNA, 19 nt, Artificial Sequence
  Description of Artificial Sequence: Synthetic oligonucleotide
uguguacugaggauaaaag

SEQ ID NO: 2022493 - RNA, 19 nt, Artificial Sequence
  Description of Artificial Sequence: Synthetic oligonucleotide
aaaugcagauuaugcuugc

SEQ ID NO: 2022494 - RNA, 19 nt, Artificial Sequence
  Description of Artificial Sequence: Synthetic oligonucleotide
ucaauacagauucacccag

SEQ ID NO: 2022495 - RNA, 19 nt, Artificial Sequence
  Description of Artificial Sequence: Synthetic oligonucleotide
uugcaaaacguaaaugcag

SEQ ID NO: 2022496 - RNA, 19 nt, Artificial Sequence
  Description of Artificial Sequence: Synthetic oligonucleotide
uccuauaauuucauuguag

SEQ ID NO: 2022497 - RNA, 19 nt, Artificial Sequence
  Description of Artificial Sequence: Synthetic oligonucleotide
accauuaacagccaccuug

SEQ ID NO: 2022498 - RNA, 19 nt, Artificial Sequence
  Description of Artificial Sequence: Synthetic oligonucleotide
uggacuguccauauccucg

SEQ ID NO: 2022499 - RNA, 19 nt, Artificial Sequence
  Description of Artificial Sequence: Synthetic oligonucleotide
aauccugcuaucuuccuca

SEQ ID NO: 2022500 - RNA, 19 nt, Artificial Sequence
  Description of Artificial Sequence: Synthetic oligonucleotide
guuuaaacugguuuaugcc

SEQ ID NO: 2022501 - RNA, 19 nt, Artificial Sequence
  Description of Artificial Sequence: Synthetic oligonucleotide
uguacgauggguacuuugc

SEQ ID NO: 2022502 - RNA, 19 nt, Artificial Sequence
  Description of Artificial Sequence: Synthetic oligonucleotide
acgauggguacuuugcagc

SEQ ID NO: 2022503 - RNA, 19 nt, Artificial Sequence
  Description of Artificial Sequence: Synthetic oligonucleotide
uggcagauguuuaaacugg

SEQ ID NO: 2022504 - RNA, 19 nt, Artificial Sequence
  Description of Artificial Sequence: Synthetic oligonucleotide
gaagcguuucuuauuaagg

SEQ ID NO: 2022505 - RNA, 19 nt, Artificial Sequence
  Description of Artificial Sequence: Synthetic oligonucleotide
aaggaagucagcaugaaaa

SEQ ID NO: 2022506 - RNA, 19 nt, Artificial Sequence
  Description of Artificial Sequence: Synthetic oligonucleotide
ugcaaaacguaaaugcaga

SEQ ID NO: 2022507 - RNA, 19 nt, Artificial Sequence
  Description of Artificial Sequence: Synthetic oligonucleotide
gauuaugcuugccuucugg

SEQ ID NO: 2022508 - RNA, 19 nt, Artificial Sequence
  Description of Artificial Sequence: Synthetic oligonucleotide
guuacugcagugccgaagg

SEQ ID NO: 2022509 - RNA, 19 nt, Artificial Sequence
  Description of Artificial Sequence: Synthetic oligonucleotide
acguaaaugcagauuaugc

SEQ ID NO: 2022510 - RNA, 19 nt, Artificial Sequence
  Description of Artificial Sequence: Synthetic oligonucleotide
ccauuuagaaacaucacgg

SEQ ID NO: 2022511 - RNA, 19 nt, Artificial Sequence
  Description of Artificial Sequence: Synthetic oligonucleotide
aaaucggugcuuccgcuuc

SEQ ID NO: 2022512 - RNA, 19 nt, Artificial Sequence
  Description of Artificial Sequence: Synthetic oligonucleotide
ugaagcguuucuuauuaag

SEQ ID NO: 2022513 - RNA, 19 nt, Artificial Sequence
  Description of Artificial Sequence: Synthetic oligonucleotide
ucagaugcagccgugaccc

SEQ ID NO: 2022514 - RNA, 19 nt, Artificial Sequence
  Description of Artificial Sequence: Synthetic oligonucleotide
uucaauacagauucaccca

SEQ ID NO: 2022515 - RNA, 19 nt, Artificial Sequence
  Description of Artificial Sequence: Synthetic oligonucleotide
cuguccauauccucgaggg

SEQ ID NO: 2022516 - RNA, 19 nt, Artificial Sequence
  Description of Artificial Sequence: Synthetic oligonucleotide
gauguuaccaucuggcaga

SEQ ID NO: 2022517 - RNA, 19 nt, Artificial Sequence
  Description of Artificial Sequence: Synthetic oligonucleotide
aaacugguuuaugccaucc

SEQ ID NO: 2022518 - RNA, 19 nt, Artificial Sequence
  Description of Artificial Sequence: Synthetic oligonucleotide
gauaaaagcaaggaaggca

SEQ ID NO: 2022519 - RNA, 19 nt, Artificial Sequence
  Description of Artificial Sequence: Synthetic oligonucleotide
ucagauaucaugggaaaug

SEQ ID NO: 2022520 - RNA, 19 nt, Artificial Sequence
  Description of Artificial Sequence: Synthetic oligonucleotide
uagcuguggugcaaaaucg

SEQ ID NO: 2022521 - RNA, 19 nt, Artificial Sequence
  Description of Artificial Sequence: Synthetic oligonucleotide
cuauuaaagcuauaaccug

SEQ ID NO: 2022522 - RNA, 19 nt, Artificial Sequence
  Description of Artificial Sequence: Synthetic oligonucleotide
aggauaaaagcaaggaagg

SEQ ID NO: 2022523 - RNA, 19 nt, Artificial Sequence
  Description of Artificial Sequence: Synthetic oligonucleotide
acacugguaacagacaagg

SEQ ID NO: 2022524 - RNA, 19 nt, Artificial Sequence
  Description of Artificial Sequence: Synthetic oligonucleotide
ugaggauaaaagcaaggaa

SEQ ID NO: 2022525 - RNA, 19 nt, Artificial Sequence
  Description of Artificial Sequence: Synthetic oligonucleotide
uguagaaagucuucugcca

SEQ ID NO: 2022526 - RNA, 19 nt, Artificial Sequence
  Description of Artificial Sequence: Synthetic oligonucleotide
aauacagauucacccagaa

SEQ ID NO: 2022527 - RNA, 19 nt, Artificial Sequence
  Description of Artificial Sequence: Synthetic oligonucleotide
ugacguaggcauuugcucc

SEQ ID NO: 2022528 - RNA, 19 nt, Artificial Sequence
  Description of Artificial Sequence: Synthetic oligonucleotide
ucagcuauuaaagcuauaa

SEQ ID NO: 2022529 - RNA, 19 nt, Artificial Sequence
  Description of Artificial Sequence: Synthetic oligonucleotide
gacagauguuaccaucugg

SEQ ID NO: 2022530 - RNA, 19 nt, Artificial Sequence
  Description of Artificial Sequence: Synthetic oligonucleotide
aagacuuccuauaauuuca

SEQ ID NO: 2022531 - RNA, 19 nt, Artificial Sequence
  Description of Artificial Sequence: Synthetic oligonucleotide
ugugaagcguuucuuauua

SEQ ID NO: 2022532 - RNA, 19 nt, Artificial Sequence
  Description of Artificial Sequence: Synthetic oligonucleotide
aguagucauauccauacaa

SEQ ID NO: 2022533 - RNA, 19 nt, Artificial Sequence
  Description of Artificial Sequence: Synthetic oligonucleotide
uuauuaaggcucuguagcu

SEQ ID NO: 2022534 - RNA, 19 nt, Artificial Sequence
  Description of Artificial Sequence: Synthetic oligonucleotide
aaaccaaagacuuccuaua

SEQ ID NO: 2022535 - RNA, 19 nt, Artificial Sequence
  Description of Artificial Sequence: Synthetic oligonucleotide
uauaaccugauuuggguau

SEQ ID NO: 2022536 - RNA, 19 nt, Artificial Sequence
  Description of Artificial Sequence: Synthetic oligonucleotide
agugccgacagauguuacc

SEQ ID NO: 2022537 - RNA, 19 nt, Artificial Sequence
  Description of Artificial Sequence: Synthetic oligonucleotide
ugcuugugaaggaagucag

SEQ ID NO: 2022538 - RNA, 19 nt, Artificial Sequence
  Description of Artificial Sequence: Synthetic oligonucleotide
aagcuauaaccugauuugg

SEQ ID NO: 2022539 - RNA, 19 nt, Artificial Sequence
  Description of Artificial Sequence: Synthetic oligonucleotide
ucauuugcaaaacguaaau

SEQ ID NO: 2022540 - RNA, 19 nt, Artificial Sequence
  Description of Artificial Sequence: Synthetic oligonucleotide
aacguaaaugcagauuaug

SEQ ID NO: 2022541 - RNA, 19 nt, Artificial Sequence
  Description of Artificial Sequence: Synthetic oligonucleotide
agauguuuaaacugguuua

SEQ ID NO: 2022542 - RNA, 19 nt, Artificial Sequence
  Description of Artificial Sequence: Synthetic oligonucleotide
gucagcaugaaaacguggg

SEQ ID NO: 2022543 - RNA, 19 nt, Artificial Sequence
  Description of Artificial Sequence: Synthetic oligonucleotide
uaucaugggaaauguagaa

SEQ ID NO: 2022544 - RNA, 19 nt, Artificial Sequence
  Description of Artificial Sequence: Synthetic oligonucleotide
agcaagugccgacagaugu

SEQ ID NO: 2022545 - RNA, 19 nt, Artificial Sequence
  Description of Artificial Sequence: Synthetic oligonucleotide
ugcacaaugaggguugggc

SEQ ID NO: 2022546 - RNA, 19 nt, Artificial Sequence
  Description of Artificial Sequence: Synthetic oligonucleotide
agggagaccugcuugaacu

SEQ ID NO: 2022547 - RNA, 19 nt, Artificial Sequence
  Description of Artificial Sequence: Synthetic oligonucleotide
augagugcaguuauacccc

SEQ ID NO: 2022548 - RNA, 19 nt, Artificial Sequence
  Description of Artificial Sequence: Synthetic oligonucleotide
guaacagacaaggacauga

SEQ ID NO: 2022549 - RNA, 19 nt, Artificial Sequence
  Description of Artificial Sequence: Synthetic oligonucleotide
auuaaggcucuguagcugu

SEQ ID NO: 2022550 - RNA, 19 nt, Artificial Sequence
  Description of Artificial Sequence: Synthetic oligonucleotide
auccauacaaggcuuccag

SEQ ID NO: 2022551 - RNA, 19 nt, Artificial Sequence
  Description of Artificial Sequence: Synthetic oligonucleotide
aaucggugcuuccgcuucc

SEQ ID NO: 2022552 - RNA, 19 nt, Artificial Sequence
  Description of Artificial Sequence: Synthetic oligonucleotide
acaugauccuucaauacag

SEQ ID NO: 2022553 - RNA, 19 nt, Artificial Sequence
  Description of Artificial Sequence: Synthetic oligonucleotide
cugguaacagacaaggaca

SEQ ID NO: 2022554 - RNA, 19 nt, Artificial Sequence
  Description of Artificial Sequence: Synthetic oligonucleotide
guagcuguggugcaaaauc

SEQ ID NO: 2022555 - RNA, 19 nt, Artificial Sequence
  Description of Artificial Sequence: Synthetic oligonucleotide
uacgauggguacuuugcag

SEQ ID NO: 2022556 - RNA, 19 nt, Artificial Sequence
  Description of Artificial Sequence: Synthetic oligonucleotide
ucgcugguaaugcagguga

SEQ ID NO: 2022557 - RNA, 19 nt, Artificial Sequence
  Description of Artificial Sequence: Synthetic oligonucleotide
ugacccuuucacaugcuug

SEQ ID NO: 2022558 - RNA, 19 nt, Artificial Sequence
  Description of Artificial Sequence: Synthetic oligonucleotide
aaacgugggaccaaugggu

SEQ ID NO: 2022559 - RNA, 19 nt, Artificial Sequence
  Description of Artificial Sequence: Synthetic oligonucleotide
auuugcuccccagaucacc

SEQ ID NO: 2022560 - RNA, 19 nt, Artificial Sequence
  Description of Artificial Sequence: Synthetic oligonucleotide
auauccauacaaggcuucc

SEQ ID NO: 2022561 - RNA, 19 nt, Artificial Sequence
  Description of Artificial Sequence: Synthetic oligonucleotide
guagucauauccauacaag

SEQ ID NO: 2022562 - RNA, 19 nt, Artificial Sequence
  Description of Artificial Sequence: Synthetic oligonucleotide
cagaaguuacugcagugcc

SEQ ID NO: 2022563 - RNA, 19 nt, Artificial Sequence
  Description of Artificial Sequence: Synthetic oligonucleotide
agcguuucuuauuaaggcu

SEQ ID NO: 2022564 - RNA, 19 nt, Artificial Sequence
  Description of Artificial Sequence: Synthetic oligonucleotide
ugauccuucaauacagauu

SEQ ID NO: 2022565 - RNA, 19 nt, Artificial Sequence
  Description of Artificial Sequence: Synthetic oligonucleotide
aucacggauacccugguaa

SEQ ID NO: 2022566 - RNA, 19 nt, Artificial Sequence
  Description of Artificial Sequence: Synthetic oligonucleotide
gaucuggaggucuggacug

SEQ ID NO: 2022567 - RNA, 19 nt, Artificial Sequence
  Description of Artificial Sequence: Synthetic oligonucleotide
cuuggcagaaguuacugca

SEQ ID NO: 2022568 - RNA, 19 nt, Artificial Sequence
  Description of Artificial Sequence: Synthetic oligonucleotide
uuaugcuugccuucuggca

SEQ ID NO: 2022569 - RNA, 19 nt, Artificial Sequence
  Description of Artificial Sequence: Synthetic oligonucleotide
ggcauuuuggagcacacug

SEQ ID NO: 2022570 - RNA, 19 nt, Artificial Sequence
  Description of Artificial Sequence: Synthetic oligonucleotide
cucuccgugcacaaugagg

SEQ ID NO: 2022571 - RNA, 19 nt, Artificial Sequence
  Description of Artificial Sequence: Synthetic oligonucleotide
cuuccgcuucccaacaucc

SEQ ID NO: 2022572 - RNA, 19 nt, Artificial Sequence
  Description of Artificial Sequence: Synthetic oligonucleotide
uucacccagaaaccaaaga

SEQ ID NO: 2022573 - RNA, 19 nt, Artificial Sequence
  Description of Artificial Sequence: Synthetic oligonucleotide
caaugagugcaguuauacc

SEQ ID NO: 2022574 - RNA, 19 nt, Artificial Sequence
  Description of Artificial Sequence: Synthetic oligonucleotide
aaccugauuuggguaugcc

SEQ ID NO: 2022575 - RNA, 19 nt, Artificial Sequence
  Description of Artificial Sequence: Synthetic oligonucleotide
uguagaaagccugguaggu

SEQ ID NO: 2022576 - RNA, 19 nt, Artificial Sequence
  Description of Artificial Sequence: Synthetic oligonucleotide
gaagucucgaucuggaggu

SEQ ID NO: 2022577 - RNA, 19 nt, Artificial Sequence
  Description of Artificial Sequence: Synthetic oligonucleotide
gaaguuacugcagugccga

SEQ ID NO: 2022578 - RNA, 19 nt, Artificial Sequence
  Description of Artificial Sequence: Synthetic oligonucleotide
auccucgagggucccaggc

SEQ ID NO: 2022579 - RNA, 19 nt, Artificial Sequence
  Description of Artificial Sequence: Synthetic oligonucleotide
gguaaauccugcuaucuuc

SEQ ID NO: 2022580 - RNA, 19 nt, Artificial Sequence
  Description of Artificial Sequence: Synthetic oligonucleotide
uaugccauccacccacuuc

SEQ ID NO: 2022581 - RNA, 19 nt, Artificial Sequence
  Description of Artificial Sequence: Synthetic oligonucleotide
cacaaugaggguugggcac

SEQ ID NO: 2022582 - RNA, 19 nt, Artificial Sequence
  Description of Artificial Sequence: Synthetic oligonucleotide
aaguagucauauccauaca

SEQ ID NO: 2022583 - RNA, 19 nt, Artificial Sequence
  Description of Artificial Sequence: Synthetic oligonucleotide
uccuucaauacagauucac

SEQ ID NO: 2022584 - RNA, 19 nt, Artificial Sequence
  Description of Artificial Sequence: Synthetic oligonucleotide
ugguaacagacaaggacau

SEQ ID NO: 2022585 - RNA, 19 nt, Artificial Sequence
  Description of Artificial Sequence: Synthetic oligonucleotide
agcaaggaaggcauuuugg

SEQ ID NO: 2022586 - RNA, 19 nt, Artificial Sequence
  Description of Artificial Sequence: Synthetic oligonucleotide
ugguaaugcaggugaacac

SEQ ID NO: 2022587 - RNA, 19 nt, Artificial Sequence
  Description of Artificial Sequence: Synthetic oligonucleotide
uccgcuucccaacauccca

SEQ ID NO: 2022588 - RNA, 19 nt, Artificial Sequence
  Description of Artificial Sequence: Synthetic oligonucleotide
gacguaggcauuugcuccc

SEQ ID NO: 2022589 - RNA, 19 nt, Artificial Sequence
  Description of Artificial Sequence: Synthetic oligonucleotide
cauuugcaaaacguaaaug

SEQ ID NO: 2022590 - RNA, 19 nt, Artificial Sequence
  Description of Artificial Sequence: Synthetic oligonucleotide
aauggguccuucucuccgu

SEQ ID NO: 2022591 - RNA, 19 nt, Artificial Sequence
  Description of Artificial Sequence: Synthetic oligonucleotide
aacgugggaccaauggguc

SEQ ID NO: 2022592 - RNA, 19 nt, Artificial Sequence
  Description of Artificial Sequence: Synthetic oligonucleotide
ugcagauuaugcuugccuu

SEQ ID NO: 2022593 - RNA, 19 nt, Artificial Sequence
  Description of Artificial Sequence: Synthetic oligonucleotide
auaucaugggaaauguaga

SEQ ID NO: 2022594 - RNA, 19 nt, Artificial Sequence
  Description of Artificial Sequence: Synthetic oligonucleotide
uuccuauaauuucauugua

SEQ ID NO: 2022595 - RNA, 19 nt, Artificial Sequence
  Description of Artificial Sequence: Synthetic oligonucleotide
cauaguuccaggucgcaca

SEQ ID NO: 2022596 - RNA, 19 nt, Artificial Sequence
  Description of Artificial Sequence: Synthetic oligonucleotide
aaaaucggugcuuccgcuu

SEQ ID NO: 2022597 - RNA, 19 nt, Artificial Sequence
  Description of Artificial Sequence: Synthetic oligonucleotide
ugaaaacgugggaccaaug

SEQ ID NO: 2022598 - RNA, 19 nt, Artificial Sequence
  Description of Artificial Sequence: Synthetic oligonucleotide
agucagauaucaugggaaa

SEQ ID NO: 2022599 - RNA, 19 nt, Artificial Sequence
  Description of Artificial Sequence: Synthetic oligonucleotide
cuuccuauaauuucauugu

SEQ ID NO: 2022600 - RNA, 19 nt, Artificial Sequence
  Description of Artificial Sequence: Synthetic oligonucleotide
acggauacccugguaaauc

SEQ ID NO: 2022601 - RNA, 19 nt, Artificial Sequence
  Description of Artificial Sequence: Synthetic oligonucleotide
uagaaagucuucugccaac

SEQ ID NO: 2022602 - RNA, 19 nt, Artificial Sequence
  Description of Artificial Sequence: Synthetic oligonucleotide
acgugggaccaaugggucc

SEQ ID NO: 2022603 - RNA, 19 nt, Artificial Sequence
  Description of Artificial Sequence: Synthetic oligonucleotide
ucuggacuguccauauccu

SEQ ID NO: 2022604 - RNA, 19 nt, Artificial Sequence
  Description of Artificial Sequence: Synthetic oligonucleotide
agaaguuacugcagugccg

SEQ ID NO: 2022605 - RNA, 19 nt, Artificial Sequence
  Description of Artificial Sequence: Synthetic oligonucleotide
ggaagucagcaugaaaacg

SEQ ID NO: 2022606 - RNA, 19 nt, Artificial Sequence
  Description of Artificial Sequence: Synthetic oligonucleotide
cuguggugcaaaaucggug

SEQ ID NO: 2022607 - RNA, 19 nt, Artificial Sequence
  Description of Artificial Sequence: Synthetic oligonucleotide
acaccauuaacagccaccu

SEQ ID NO: 2022608 - RNA, 19 nt, Artificial Sequence
  Description of Artificial Sequence: Synthetic oligonucleotide
accugauuuggguaugcca

SEQ ID NO: 2022609 - RNA, 19 nt, Artificial Sequence
  Description of Artificial Sequence: Synthetic oligonucleotide
auguacgauggguacuuug

SEQ ID NO: 2022610 - RNA, 19 nt, Artificial Sequence
  Description of Artificial Sequence: Synthetic oligonucleotide
aaguccugugggaagucuc

SEQ ID NO: 2022611 - RNA, 19 nt, Artificial Sequence
  Description of Artificial Sequence: Synthetic oligonucleotide
accaucuuguggauguacg

SEQ ID NO: 2022612 - RNA, 19 nt, Artificial Sequence
  Description of Artificial Sequence: Synthetic oligonucleotide
uuccugcuugcacaaaguc

SEQ ID NO: 2022613 - RNA, 19 nt, Artificial Sequence
  Description of Artificial Sequence: Synthetic oligonucleotide
uucucuccgugcacaauga

SEQ ID NO: 2022614 - RNA, 19 nt, Artificial Sequence
  Description of Artificial Sequence: Synthetic oligonucleotide
cuuucacaugcuugugaag

SEQ ID NO: 2022615 - RNA, 19 nt, Artificial Sequence
  Description of Artificial Sequence: Synthetic oligonucleotide
cagcaugaaaacgugggac

SEQ ID NO: 2022616 - RNA, 19 nt, Artificial Sequence
  Description of Artificial Sequence: Synthetic oligonucleotide
aaagccugguaggucuguc

SEQ ID NO: 2022617 - RNA, 19 nt, Artificial Sequence
  Description of Artificial Sequence: Synthetic oligonucleotide
uggaccaggggcagcaagu

SEQ ID NO: 2022618 - RNA, 19 nt, Artificial Sequence
  Description of Artificial Sequence: Synthetic oligonucleotide
cacacugguaacagacaag

SEQ ID NO: 2022619 - RNA, 19 nt, Artificial Sequence
  Description of Artificial Sequence: Synthetic oligonucleotide
aguuacugcagugccgaag

SEQ ID NO: 2022620 - RNA, 19 nt, Artificial Sequence
  Description of Artificial Sequence: Synthetic oligonucleotide
ucgacagcauccuuugcau

SEQ ID NO: 2022621 - RNA, 19 nt, Artificial Sequence
  Description of Artificial Sequence: Synthetic oligonucleotide
gugacguaggcauuugcuc

SEQ ID NO: 2022622 - RNA, 19 nt, Artificial Sequence
  Description of Artificial Sequence: Synthetic oligonucleotide
aaggacugcgugcuccccu

SEQ ID NO: 2022623 - RNA, 19 nt, Artificial Sequence
  Description of Artificial Sequence: Synthetic oligonucleotide
guggauguacgauggguac

SEQ ID NO: 2022624 - RNA, 19 nt, Artificial Sequence
  Description of Artificial Sequence: Synthetic oligonucleotide
ccuucaauacagauucacc

SEQ ID NO: 2022625 - RNA, 19 nt, Artificial Sequence
  Description of Artificial Sequence: Synthetic oligonucleotide
ugguaaauccugcuaucuu

SEQ ID NO: 2022626 - RNA, 19 nt, Artificial Sequence
  Description of Artificial Sequence: Synthetic oligonucleotide
agucgacagcauccuuugc

SEQ ID NO: 2022627 - RNA, 19 nt, Artificial Sequence
  Description of Artificial Sequence: Synthetic oligonucleotide
uuaaggcucuguagcugug

SEQ ID NO: 2022628 - RNA, 19 nt, Artificial Sequence
  Description of Artificial Sequence: Synthetic oligonucleotide
ugguaggucugucugugua

SEQ ID NO: 2022629 - RNA, 19 nt, Artificial Sequence
  Description of Artificial Sequence: Synthetic oligonucleotide
auuaaagcuauaaccugau

SEQ ID NO: 2022630 - RNA, 19 nt, Artificial Sequence
  Description of Artificial Sequence: Synthetic oligonucleotide
ucucuccgugcacaaugag

SEQ ID NO: 2022631 - RNA, 19 nt, Artificial Sequence
  Description of Artificial Sequence: Synthetic oligonucleotide
cugaggauaaaagcaagga

SEQ ID NO: 2022632 - RNA, 19 nt, Artificial Sequence
  Description of Artificial Sequence: Synthetic oligonucleotide
guaggcauuugcuccccag

SEQ ID NO: 2022633 - RNA, 19 nt, Artificial Sequence
  Description of Artificial Sequence: Synthetic oligonucleotide
guccauauccucgaggguc

SEQ ID NO: 2022634 - RNA, 19 nt, Artificial Sequence
  Description of Artificial Sequence: Synthetic oligonucleotide
agaaaccaaagacuuccua

SEQ ID NO: 2022635 - RNA, 19 nt, Artificial Sequence
  Description of Artificial Sequence: Synthetic oligonucleotide
gccuucuggcaucagaugc

SEQ ID NO: 2022636 - RNA, 19 nt, Artificial Sequence
  Description of Artificial Sequence: Synthetic oligonucleotide
agcagaaggacugcgugcu

SEQ ID NO: 2022637 - RNA, 19 nt, Artificial Sequence
  Description of Artificial Sequence: Synthetic oligonucleotide
uuaaagcuauaaccugauu

SEQ ID NO: 2022638 - RNA, 19 nt, Artificial Sequence
  Description of Artificial Sequence: Synthetic oligonucleotide
auauccucgagggucccag

SEQ ID NO: 2022639 - RNA, 19 nt, Artificial Sequence
  Description of Artificial Sequence: Synthetic oligonucleotide
aggaagcagaaggacugcg

SEQ ID NO: 2022640 - RNA, 19 nt, Artificial Sequence
  Description of Artificial Sequence: Synthetic oligonucleotide
cugguaaugcaggugaaca

SEQ ID NO: 2022641 - RNA, 19 nt, Artificial Sequence
  Description of Artificial Sequence: Synthetic oligonucleotide
gcgccauaguuccaggucg

SEQ ID NO: 2022642 - RNA, 19 nt, Artificial Sequence
  Description of Artificial Sequence: Synthetic oligonucleotide
agcuguggugcaaaaucgg

SEQ ID NO: 2022643 - RNA, 19 nt, Artificial Sequence
  Description of Artificial Sequence: Synthetic oligonucleotide
ucacggauacccugguaaa

SEQ ID NO: 2022644 - RNA, 19 nt, Artificial Sequence
  Description of Artificial Sequence: Synthetic oligonucleotide
gaccucaggggagagagga

SEQ ID NO: 2022645 - RNA, 19 nt, Artificial Sequence
  Description of Artificial Sequence: Synthetic oligonucleotide
gauucacccagaaaccaaa

SEQ ID NO: 2022646 - RNA, 19 nt, Artificial Sequence
  Description of Artificial Sequence: Synthetic oligonucleotide
cagaaggacugcgugcucc

SEQ ID NO: 2022647 - RNA, 19 nt, Artificial Sequence
  Description of Artificial Sequence: Synthetic oligonucleotide
gcaaaaucggugcuuccgc

SEQ ID NO: 2022648 - RNA, 19 nt, Artificial Sequence
  Description of Artificial Sequence: Synthetic oligonucleotide
aggguugggcacuggacca

SEQ ID NO: 2022649 - RNA, 19 nt, Artificial Sequence
  Description of Artificial Sequence: Synthetic oligonucleotide
agccgugacccuuucacau

SEQ ID NO: 2022650 - RNA, 19 nt, Artificial Sequence
  Description of Artificial Sequence: Synthetic oligonucleotide
aaacguaaaugcagauuau

SEQ ID NO: 2022651 - RNA, 19 nt, Artificial Sequence
  Description of Artificial Sequence: Synthetic oligonucleotide
cuauaaccugauuugggua

SEQ ID NO: 2022652 - RNA, 19 nt, Artificial Sequence
  Description of Artificial Sequence: Synthetic oligonucleotide
uucgcugguaaugcaggug

SEQ ID NO: 2022653 - RNA, 19 nt, Artificial Sequence
  Description of Artificial Sequence: Synthetic oligonucleotide
auacagauucacccagaaa

SEQ ID NO: 2022654 - RNA, 19 nt, Artificial Sequence
  Description of Artificial Sequence: Synthetic oligonucleotide
ucccaacaucccaggaagc

SEQ ID NO: 2022655 - RNA, 19 nt, Artificial Sequence
  Description of Artificial Sequence: Synthetic oligonucleotide
guacugaggauaaaagcaa

SEQ ID NO: 2022656 - RNA, 19 nt, Artificial Sequence
  Description of Artificial Sequence: Synthetic oligonucleotide
gcaaugagugcaguuauac

SEQ ID NO: 2022657 - RNA, 19 nt, Artificial Sequence
  Description of Artificial Sequence: Synthetic oligonucleotide
uuggcaaaguagucauauc

SEQ ID NO: 2022658 - RNA, 19 nt, Artificial Sequence
  Description of Artificial Sequence: Synthetic oligonucleotide
gacccuuucacaugcuugu

SEQ ID NO: 2022659 - RNA, 19 nt, Artificial Sequence
  Description of Artificial Sequence: Synthetic oligonucleotide
uacccugguaaauccugcu

SEQ ID NO: 2022660 - RNA, 19 nt, Artificial Sequence
  Description of Artificial Sequence: Synthetic oligonucleotide
gcaaggaaggcauuuugga

SEQ ID NO: 2022661 - RNA, 19 nt, Artificial Sequence
  Description of Artificial Sequence: Synthetic oligonucleotide
caucagaugcagccgugac

SEQ ID NO: 2022662 - RNA, 19 nt, Artificial Sequence
  Description of Artificial Sequence: Synthetic oligonucleotide
auaaccugauuuggguaug

SEQ ID NO: 2022663 - RNA, 19 nt, Artificial Sequence
  Description of Artificial Sequence: Synthetic oligonucleotide
aggcauuugcuccccagau

SEQ ID NO: 2022664 - RNA, 19 nt, Artificial Sequence
  Description of Artificial Sequence: Synthetic oligonucleotide
aagugccgacagauguuac

SEQ ID NO: 2022665 - RNA, 19 nt, Artificial Sequence
  Description of Artificial Sequence: Synthetic oligonucleotide
ucacaugcuugugaaggaa

SEQ ID NO: 2022666 - RNA, 19 nt, Artificial Sequence
  Description of Artificial Sequence: Synthetic oligonucleotide
gauguuuaaacugguuuau

SEQ ID NO: 2022667 - RNA, 19 nt, Artificial Sequence
  Description of Artificial Sequence: Synthetic oligonucleotide
ugccuucucacuccauuua

SEQ ID NO: 2022668 - RNA, 19 nt, Artificial Sequence
  Description of Artificial Sequence: Synthetic oligonucleotide
ugcgugcuccccuucuccc

SEQ ID NO: 2022669 - RNA, 19 nt, Artificial Sequence
  Description of Artificial Sequence: Synthetic oligonucleotide
uauccucgagggucccagg

SEQ ID NO: 2022670 - RNA, 19 nt, Artificial Sequence
  Description of Artificial Sequence: Synthetic oligonucleotide
ucccguucgcugguaaugc

SEQ ID NO: 2022671 - RNA, 19 nt, Artificial Sequence
  Description of Artificial Sequence: Synthetic oligonucleotide
cagauguuaccaucuggca

SEQ ID NO: 2022672 - RNA, 19 nt, Artificial Sequence
  Description of Artificial Sequence: Synthetic oligonucleotide
gcuaucuuccucagugacg

SEQ ID NO: 2022673 - RNA, 19 nt, Artificial Sequence
  Description of Artificial Sequence: Synthetic oligonucleotide
guacgauggguacuuugca

SEQ ID NO: 2022674 - RNA, 19 nt, Artificial Sequence
  Description of Artificial Sequence: Synthetic oligonucleotide
uugccuucucacuccauuu

SEQ ID NO: 2022675 - RNA, 19 nt, Artificial Sequence
  Description of Artificial Sequence: Synthetic oligonucleotide
uaaugcaggugaacaccau

SEQ ID NO: 2022676 - RNA, 19 nt, Artificial Sequence
  Description of Artificial Sequence: Synthetic oligonucleotide
ggugcuuccgcuucccaac

SEQ ID NO: 2022677 - RNA, 19 nt, Artificial Sequence
  Description of Artificial Sequence: Synthetic oligonucleotide
auucacccagaaaccaaag

SEQ ID NO: 2022678 - RNA, 19 nt, Artificial Sequence
  Description of Artificial Sequence: Synthetic oligonucleotide
ucucgaucuggaggucugg

SEQ ID NO: 2022679 - RNA, 19 nt, Artificial Sequence
  Description of Artificial Sequence: Synthetic oligonucleotide
ggucugucuguguacugag

SEQ ID NO: 2022680 - RNA, 19 nt, Artificial Sequence
  Description of Artificial Sequence: Synthetic oligonucleotide
uguagcuguggugcaaaau

SEQ ID NO: 2022681 - RNA, 19 nt, Artificial Sequence
  Description of Artificial Sequence: Synthetic oligonucleotide
uucuggcaucagaugcagc

SEQ ID NO: 2022682 - RNA, 19 nt, Artificial Sequence
  Description of Artificial Sequence: Synthetic oligonucleotide
aaggcggcugcaggcuucg

SEQ ID NO: 2022683 - RNA, 19 nt, Artificial Sequence
  Description of Artificial Sequence: Synthetic oligonucleotide
cuucgucugaggcgcgggg

SEQ ID NO: 2022684 - RNA, 19 nt, Artificial Sequence
  Description of Artificial Sequence: Synthetic oligonucleotide
cuggacuguccauauccuc

SEQ ID NO: 2022685 - RNA, 19 nt, Artificial Sequence
  Description of Artificial Sequence: Synthetic oligonucleotide
caugcuugugaaggaaguc

SEQ ID NO: 2022686 - RNA, 19 nt, Artificial Sequence
  Description of Artificial Sequence: Synthetic oligonucleotide
gaaauguagaaagccuggu

SEQ ID NO: 2022687 - RNA, 19 nt, Artificial Sequence
  Description of Artificial Sequence: Synthetic oligonucleotide
cagauguuuaaacugguuu

SEQ ID NO: 2022688 - RNA, 19 nt, Artificial Sequence
  Description of Artificial Sequence: Synthetic oligonucleotide
augaaaacgugggaccaau

SEQ ID NO: 2022689 - RNA, 19 nt, Artificial Sequence
  Description of Artificial Sequence: Synthetic oligonucleotide
ucagugacguaggcauuug

SEQ ID NO: 2022690 - RNA, 19 nt, Artificial Sequence
  Description of Artificial Sequence: Synthetic oligonucleotide
aagucucgaucuggagguc

SEQ ID NO: 2022691 - RNA, 19 nt, Artificial Sequence
  Description of Artificial Sequence: Synthetic oligonucleotide
aggucugucuguguacuga

SEQ ID NO: 2022692 - RNA, 19 nt, Artificial Sequence
  Description of Artificial Sequence: Synthetic oligonucleotide
cagugacguaggcauuugc

SEQ ID NO: 2022693 - RNA, 19 nt, Artificial Sequence
  Description of Artificial Sequence: Synthetic oligonucleotide
gcuauaaccugauuugggu

SEQ ID NO: 2022694 - RNA, 19 nt, Artificial Sequence
  Description of Artificial Sequence: Synthetic oligonucleotide
gguaggucugucuguguac

SEQ ID NO: 2022695 - RNA, 19 nt, Artificial Sequence
  Description of Artificial Sequence: Synthetic oligonucleotide
uccgugcacaaugaggguu

SEQ ID NO: 2022696 - RNA, 19 nt, Artificial Sequence
  Description of Artificial Sequence: Synthetic oligonucleotide
gccuucucacuccauuuag

SEQ ID NO: 2022697 - RNA, 19 nt, Artificial Sequence
  Description of Artificial Sequence: Synthetic oligonucleotide
gugccgacagauguuacca

SEQ ID NO: 2022698 - RNA, 19 nt, Artificial Sequence
  Description of Artificial Sequence: Synthetic oligonucleotide
acguaggcauuugcucccc

SEQ ID NO: 2022699 - RNA, 19 nt, Artificial Sequence
  Description of Artificial Sequence: Synthetic oligonucleotide
cuguguacugaggauaaaa

SEQ ID NO: 2022700 - RNA, 19 nt, Artificial Sequence
  Description of Artificial Sequence: Synthetic oligonucleotide
cagauucacccagaaacca

SEQ ID NO: 2022701 - RNA, 19 nt, Artificial Sequence
  Description of Artificial Sequence: Synthetic oligonucleotide
gaccaauggguccuucucu

SEQ ID NO: 2022702 - RNA, 19 nt, Artificial Sequence
  Description of Artificial Sequence: Synthetic oligonucleotide
cugcgugcuccccuucucc

SEQ ID NO: 2022703 - RNA, 19 nt, Artificial Sequence
  Description of Artificial Sequence: Synthetic oligonucleotide
aggucuggacuguccauau

SEQ ID NO: 2022704 - RNA, 19 nt, Artificial Sequence
  Description of Artificial Sequence: Synthetic oligonucleotide
gcagauuaugcuugccuuc

SEQ ID NO: 2022705 - RNA, 19 nt, Artificial Sequence
  Description of Artificial Sequence: Synthetic oligonucleotide
agauucacccagaaaccaa

SEQ ID NO: 2022706 - RNA, 19 nt, Artificial Sequence
  Description of Artificial Sequence: Synthetic oligonucleotide
gaaacaucacggauacccu

SEQ ID NO: 2022707 - RNA, 19 nt, Artificial Sequence
  Description of Artificial Sequence: Synthetic oligonucleotide
cauuugcuccccagaucac

SEQ ID NO: 2022708 - RNA, 19 nt, Artificial Sequence
  Description of Artificial Sequence: Synthetic oligonucleotide
uucgucugaggcgcgggga

SEQ ID NO: 2022709 - RNA, 19 nt, Artificial Sequence
  Description of Artificial Sequence: Synthetic oligonucleotide
gcguuucuuauuaaggcuc

SEQ ID NO: 2022710 - RNA, 19 nt, Artificial Sequence
  Description of Artificial Sequence: Synthetic oligonucleotide
gguacuuugcagcagcaau

SEQ ID NO: 2022711 - RNA, 19 nt, Artificial Sequence
  Description of Artificial Sequence: Synthetic oligonucleotide
aaguuacugcagugccgaa

SEQ ID NO: 2022712 - RNA, 19 nt, Artificial Sequence
  Description of Artificial Sequence: Synthetic oligonucleotide
cugugggaagucucgaucu

SEQ ID NO: 2022713 - RNA, 19 nt, Artificial Sequence
  Description of Artificial Sequence: Synthetic oligonucleotide
uccugcuaucuuccucagu

SEQ ID NO: 2022714 - RNA, 19 nt, Artificial Sequence
  Description of Artificial Sequence: Synthetic oligonucleotide
gcacaaugaggguugggca

SEQ ID NO: 2022715 - RNA, 19 nt, Artificial Sequence
  Description of Artificial Sequence: Synthetic oligonucleotide
uucucccguucgcugguaa

SEQ ID NO: 2022716 - RNA, 19 nt, Artificial Sequence
  Description of Artificial Sequence: Synthetic oligonucleotide
cagacaaggacaugauccu

SEQ ID NO: 2022717 - RNA, 19 nt, Artificial Sequence
  Description of Artificial Sequence: Synthetic oligonucleotide
gucugaggcgcggggaucc

SEQ ID NO: 2022718 - RNA, 19 nt, Artificial Sequence
  Description of Artificial Sequence: Synthetic oligonucleotide
uuaugccauccacccacuu

SEQ ID NO: 2022719 - RNA, 19 nt, Artificial Sequence
  Description of Artificial Sequence: Synthetic oligonucleotide
acccugguaaauccugcua

SEQ ID NO: 2022720 - RNA, 19 nt, Artificial Sequence
  Description of Artificial Sequence: Synthetic oligonucleotide
uccuucucuccgugcacaa

SEQ ID NO: 2022721 - RNA, 19 nt, Artificial Sequence
  Description of Artificial Sequence: Synthetic oligonucleotide
ccuuggcagaaguuacugc

SEQ ID NO: 2022722 - RNA, 19 nt, Artificial Sequence
  Description of Artificial Sequence: Synthetic oligonucleotide
caggaagcagaaggacugc

SEQ ID NO: 2022723 - RNA, 19 nt, Artificial Sequence
  Description of Artificial Sequence: Synthetic oligonucleotide
cguucgcugguaaugcagg

SEQ ID NO: 2022724 - RNA, 19 nt, Artificial Sequence
  Description of Artificial Sequence: Synthetic oligonucleotide
ugcagugccgaaggcggcu

SEQ ID NO: 2022725 - RNA, 19 nt, Artificial Sequence
  Description of Artificial Sequence: Synthetic oligonucleotide
cacugugaagcguuucuua

SEQ ID NO: 2022726 - RNA, 19 nt, Artificial Sequence
  Description of Artificial Sequence: Synthetic oligonucleotide
cagcaagugccgacagaug

SEQ ID NO: 2022727 - RNA, 19 nt, Artificial Sequence
  Description of Artificial Sequence: Synthetic oligonucleotide
ggaccaauggguccuucuc

SEQ ID NO: 2022728 - RNA, 19 nt, Artificial Sequence
  Description of Artificial Sequence: Synthetic oligonucleotide
agacuuccuauaauuucau

SEQ ID NO: 2022729 - RNA, 19 nt, Artificial Sequence
  Description of Artificial Sequence: Synthetic oligonucleotide
ucucccguucgcugguaau

SEQ ID NO: 2022730 - RNA, 19 nt, Artificial Sequence
  Description of Artificial Sequence: Synthetic oligonucleotide
ugcagccgugacccuuuca

SEQ ID NO: 2022731 - RNA, 19 nt, Artificial Sequence
  Description of Artificial Sequence: Synthetic oligonucleotide
aggcgccauaguuccaggu

SEQ ID NO: 2022732 - RNA, 19 nt, Artificial Sequence
  Description of Artificial Sequence: Synthetic oligonucleotide
cagauaucaugggaaaugu

SEQ ID NO: 2022733 - RNA, 19 nt, Artificial Sequence
  Description of Artificial Sequence: Synthetic oligonucleotide
cggauacccugguaaaucc

SEQ ID NO: 2022734 - RNA, 19 nt, Artificial Sequence
  Description of Artificial Sequence: Synthetic oligonucleotide
ugccgacagauguuaccau

SEQ ID NO: 2022735 - RNA, 19 nt, Artificial Sequence
  Description of Artificial Sequence: Synthetic oligonucleotide
ccgugacccuuucacaugc

SEQ ID NO: 2022736 - RNA, 19 nt, Artificial Sequence
  Description of Artificial Sequence: Synthetic oligonucleotide
cuccccuucucccguucgc

SEQ ID NO: 2022737 - RNA, 19 nt, Artificial Sequence
  Description of Artificial Sequence: Synthetic oligonucleotide
gaaggacugcgugcucccc

SEQ ID NO: 2022738 - RNA, 19 nt, Artificial Sequence
  Description of Artificial Sequence: Synthetic oligonucleotide
ggagaccugcuugaacugc

SEQ ID NO: 2022739 - RNA, 19 nt, Artificial Sequence
  Description of Artificial Sequence: Synthetic oligonucleotide
cacugguaacagacaagga

SEQ ID NO: 2022740 - RNA, 19 nt, Artificial Sequence
  Description of Artificial Sequence: Synthetic oligonucleotide
ggcgccauaguuccagguc

SEQ ID NO: 2022741 - RNA, 19 nt, Artificial Sequence
  Description of Artificial Sequence: Synthetic oligonucleotide
caagucgacagcauccuuu

SEQ ID NO: 2022742 - RNA, 19 nt, Artificial Sequence
  Description of Artificial Sequence: Synthetic oligonucleotide
ucuguguacugaggauaaa

SEQ ID NO: 2022743 - RNA, 19 nt, Artificial Sequence
  Description of Artificial Sequence: Synthetic oligonucleotide
agauaucaugggaaaugua

SEQ ID NO: 2022744 - RNA, 19 nt, Artificial Sequence
  Description of Artificial Sequence: Synthetic oligonucleotide
caaaaucggugcuuccgcu

SEQ ID NO: 2022745 - RNA, 19 nt, Artificial Sequence
  Description of Artificial Sequence: Synthetic oligonucleotide
gccgacagauguuaccauc

SEQ ID NO: 2022746 - RNA, 19 nt, Artificial Sequence
  Description of Artificial Sequence: Synthetic oligonucleotide
ccaauggguccuucucucc

SEQ ID NO: 2022747 - RNA, 19 nt, Artificial Sequence
  Description of Artificial Sequence: Synthetic oligonucleotide
gguuuaugccauccaccca

SEQ ID NO: 2022748 - RNA, 19 nt, Artificial Sequence
  Description of Artificial Sequence: Synthetic oligonucleotide
ggcauuugcuccccagauc

SEQ ID NO: 2022749 - RNA, 19 nt, Artificial Sequence
  Description of Artificial Sequence: Synthetic oligonucleotide
ugcuuccgcuucccaacau

SEQ ID NO: 2022750 - RNA, 19 nt, Artificial Sequence
  Description of Artificial Sequence: Synthetic oligonucleotide
ccgugcacaaugaggguug

SEQ ID NO: 2022751 - RNA, 19 nt, Artificial Sequence
  Description of Artificial Sequence: Synthetic oligonucleotide
gugaagcguuucuuauuaa

SEQ ID NO: 2022752 - RNA, 19 nt, Artificial Sequence
  Description of Artificial Sequence: Synthetic oligonucleotide
caagugccgacagauguua

SEQ ID NO: 2022753 - RNA, 19 nt, Artificial Sequence
  Description of Artificial Sequence: Synthetic oligonucleotide
guaggucugucuguguacu

SEQ ID NO: 2022754 - RNA, 19 nt, Artificial Sequence
  Description of Artificial Sequence: Synthetic oligonucleotide
auuuuggagcacacuggua

SEQ ID NO: 2022755 - RNA, 19 nt, Artificial Sequence
  Description of Artificial Sequence: Synthetic oligonucleotide
gugcacaaugaggguuggg

SEQ ID NO: 2022756 - RNA, 19 nt, Artificial Sequence
  Description of Artificial Sequence: Synthetic oligonucleotide
caaaacguaaaugcagauu

SEQ ID NO: 2022757 - RNA, 19 nt, Artificial Sequence
  Description of Artificial Sequence: Synthetic oligonucleotide
ugcaggcgccauaguucca

SEQ ID NO: 2022758 - RNA, 19 nt, Artificial Sequence
  Description of Artificial Sequence: Synthetic oligonucleotide
cugguaaauccugcuaucu

SEQ ID NO: 2022759 - RNA, 19 nt, Artificial Sequence
  Description of Artificial Sequence: Synthetic oligonucleotide
cagauuaugcuugccuucu

SEQ ID NO: 2022760 - RNA, 19 nt, Artificial Sequence
  Description of Artificial Sequence: Synthetic oligonucleotide
augcagccgugacccuuuc

SEQ ID NO: 2022761 - RNA, 19 nt, Artificial Sequence
  Description of Artificial Sequence: Synthetic oligonucleotide
gcuugcacaaagucagaua

SEQ ID NO: 2022762 - RNA, 19 nt, Artificial Sequence
  Description of Artificial Sequence: Synthetic oligonucleotide
ccaggggcagcaagugccg

SEQ ID NO: 2022763 - RNA, 19 nt, Artificial Sequence
  Description of Artificial Sequence: Synthetic oligonucleotide
gauuuggguaugccauuuu

SEQ ID NO: 2022764 - RNA, 19 nt, Artificial Sequence
  Description of Artificial Sequence: Synthetic oligonucleotide
ccugguaggucugucugug

SEQ ID NO: 2022765 - RNA, 19 nt, Artificial Sequence
  Description of Artificial Sequence: Synthetic oligonucleotide
gcuuccgcuucccaacauc

SEQ ID NO: 2022766 - RNA, 19 nt, Artificial Sequence
  Description of Artificial Sequence: Synthetic oligonucleotide
gccgugacccuuucacaug

SEQ ID NO: 2022767 - RNA, 19 nt, Artificial Sequence
  Description of Artificial Sequence: Synthetic oligonucleotide
agugccgaaggcggcugca

SEQ ID NO: 2022768 - RNA, 19 nt, Artificial Sequence
  Description of Artificial Sequence: Synthetic oligonucleotide
gcgugcuccccuucucccg

SEQ ID NO: 2022769 - RNA, 19 nt, Artificial Sequence
  Description of Artificial Sequence: Synthetic oligonucleotide
gacuuccuauaauuucauu

SEQ ID NO: 2022770 - RNA, 19 nt, Artificial Sequence
  Description of Artificial Sequence: Synthetic oligonucleotide
cagccgugacccuuucaca

SEQ ID NO: 2022771 - RNA, 19 nt, Artificial Sequence
  Description of Artificial Sequence: Synthetic oligonucleotide
guucgcugguaaugcaggu

SEQ ID NO: 2022772 - RNA, 19 nt, Artificial Sequence
  Description of Artificial Sequence: Synthetic oligonucleotide
ccgcuucccaacaucccag

SEQ ID NO: 2022773 - RNA, 19 nt, Artificial Sequence
  Description of Artificial Sequence: Synthetic oligonucleotide
gcuccccuucucccguucg

SEQ ID NO: 2022774 - RNA, 19 nt, Artificial Sequence
  Description of Artificial Sequence: Synthetic oligonucleotide
agcaaugagugcaguuaua

SEQ ID NO: 2022775 - RNA, 19 nt, Artificial Sequence
  Description of Artificial Sequence: Synthetic oligonucleotide
ggugggccgcugcaggcgc

SEQ ID NO: 2022776 - RNA, 19 nt, Artificial Sequence
  Description of Artificial Sequence: Synthetic oligonucleotide
cagugccgaaggcggcugc

SEQ ID NO: 2022777 - RNA, 19 nt, Artificial Sequence
  Description of Artificial Sequence: Synthetic oligonucleotide
gucagauaucaugggaaau

SEQ ID NO: 2022778 - RNA, 19 nt, Artificial Sequence
  Description of Artificial Sequence: Synthetic oligonucleotide
uaucuuccucagugacgua

SEQ ID NO: 2022779 - RNA, 19 nt, Artificial Sequence
  Description of Artificial Sequence: Synthetic oligonucleotide
cucgaucuggaggucugga

SEQ ID NO: 2022780 - RNA, 19 nt, Artificial Sequence
  Description of Artificial Sequence: Synthetic oligonucleotide
gacugcgugcuccccuucu

SEQ ID NO: 2022781 - RNA, 19 nt, Artificial Sequence
  Description of Artificial Sequence: Synthetic oligonucleotide
gcaaaacguaaaugcagau

SEQ ID NO: 2022782 - RNA, 19 nt, Artificial Sequence
  Description of Artificial Sequence: Synthetic oligonucleotide
auccuucaauacagauuca

SEQ ID NO: 2022783 - RNA, 19 nt, Artificial Sequence
  Description of Artificial Sequence: Synthetic oligonucleotide
gcuucgucugaggcgcggg

SEQ ID NO: 2022784 - RNA, 19 nt, Artificial Sequence
  Description of Artificial Sequence: Synthetic oligonucleotide
ccccagaucaccaucuugu

SEQ ID NO: 2022785 - RNA, 19 nt, Artificial Sequence
  Description of Artificial Sequence: Synthetic oligonucleotide
gugccgaaggcggcugcag

SEQ ID NO: 2022786 - RNA, 19 nt, Artificial Sequence
  Description of Artificial Sequence: Synthetic oligonucleotide
ccauaguuccaggucgcac

SEQ ID NO: 2022787 - RNA, 19 nt, Artificial Sequence
  Description of Artificial Sequence: Synthetic oligonucleotide
caaggacaugauccuucaa

SEQ ID NO: 2022788 - RNA, 19 nt, Artificial Sequence
  Description of Artificial Sequence: Synthetic oligonucleotide
gggugggccgcugcaggcg

SEQ ID NO: 2022789 - RNA, 19 nt, Artificial Sequence
  Description of Artificial Sequence: Synthetic oligonucleotide
guccugugggaagucucga

SEQ ID NO: 2022790 - RNA, 19 nt, Artificial Sequence
  Description of Artificial Sequence: Synthetic oligonucleotide
caccuuggcagaaguuacu

SEQ ID NO: 2022791 - RNA, 19 nt, Artificial Sequence
  Description of Artificial Sequence: Synthetic oligonucleotide
ccgacagauguuaccaucu

SEQ ID NO: 2022792 - RNA, 19 nt, Artificial Sequence
  Description of Artificial Sequence: Synthetic oligonucleotide
ggcuucgucugaggcgcgg

SEQ ID NO: 2022793 - RNA, 19 nt, Artificial Sequence
  Description of Artificial Sequence: Synthetic oligonucleotide
ggguugggcacuggaccag

SEQ ID NO: 2022794 - RNA, 19 nt, Artificial Sequence
  Description of Artificial Sequence: Synthetic oligonucleotide
gaugcagccgugacccuuu

SEQ ID NO: 2022795 - RNA, 19 nt, Artificial Sequence
  Description of Artificial Sequence: Synthetic oligonucleotide
cauauccucgaggguccca

SEQ ID NO: 2022796 - RNA, 19 nt, Artificial Sequence
  Description of Artificial Sequence: Synthetic oligonucleotide
gaggcgcggggauccugga

SEQ ID NO: 2022797 - RNA, 19 nt, Artificial Sequence
  Description of Artificial Sequence: Synthetic oligonucleotide
cgccauaguuccaggucgc

SEQ ID NO: 2022798 - RNA, 19 nt, Artificial Sequence
  Description of Artificial Sequence: Synthetic oligonucleotide
cgauggguacuuugcagca

SEQ ID NO: 2022799 - RNA, 19 nt, Artificial Sequence
  Description of Artificial Sequence: Synthetic oligonucleotide
caucacggauacccuggua

SEQ ID NO: 2022800 - RNA, 19 nt, Artificial Sequence
  Description of Artificial Sequence: Synthetic oligonucleotide
agcauccuuugcaucccuu

SEQ ID NO: 2022801 - RNA, 19 nt, Artificial Sequence
  Description of Artificial Sequence: Synthetic oligonucleotide
cucuguagcuguggugcaa

SEQ ID NO: 2022802 - RNA, 19 nt, Artificial Sequence
  Description of Artificial Sequence: Synthetic oligonucleotide
ggauguacgauggguacuu

SEQ ID NO: 2022803 - RNA, 19 nt, Artificial Sequence
  Description of Artificial Sequence: Synthetic oligonucleotide
gcuguggugcaaaaucggu

SEQ ID NO: 2022804 - RNA, 19 nt, Artificial Sequence
  Description of Artificial Sequence: Synthetic oligonucleotide
ggcagauguuuaaacuggu

SEQ ID NO: 2022805 - RNA, 19 nt, Artificial Sequence
  Description of Artificial Sequence: Synthetic oligonucleotide
cugaggcgcggggauccug

SEQ ID NO: 2022806 - RNA, 19 nt, Artificial Sequence
  Description of Artificial Sequence: Synthetic oligonucleotide
gggaccaauggguccuucu

SEQ ID NO: 2022807 - RNA, 19 nt, Artificial Sequence
  Description of Artificial Sequence: Synthetic oligonucleotide
ggauacccugguaaauccu

SEQ ID NO: 2022808 - RNA, 19 nt, Artificial Sequence
  Description of Artificial Sequence: Synthetic oligonucleotide
caccuucaucaagucgaca

SEQ ID NO: 2022809 - RNA, 19 nt, Artificial Sequence
  Description of Artificial Sequence: Synthetic oligonucleotide
ccccuucucccguucgcug

SEQ ID NO: 2022810 - RNA, 19 nt, Artificial Sequence
  Description of Artificial Sequence: Synthetic oligonucleotide
aggcuucgucugaggcgcg

SEQ ID NO: 2022811 - RNA, 19 nt, Artificial Sequence
  Description of Artificial Sequence: Synthetic oligonucleotide
ggguacuuugcagcagcaa

SEQ ID NO: 2022812 - RNA, 19 nt, Artificial Sequence
  Description of Artificial Sequence: Synthetic oligonucleotide
gcagugccgaaggcggcug

SEQ ID NO: 2022813 - RNA, 19 nt, Artificial Sequence
  Description of Artificial Sequence: Synthetic oligonucleotide
gcggggauccuggaccuca

SEQ ID NO: 2022814 - RNA, 19 nt, Artificial Sequence
  Description of Artificial Sequence: Synthetic oligonucleotide
cacuccagcccaggaggga

SEQ ID NO: 2022815 - RNA, 19 nt, Artificial Sequence
  Description of Artificial Sequence: Synthetic oligonucleotide
cuccgugcacaaugagggu

SEQ ID NO: 2022816 - RNA, 19 nt, Artificial Sequence
  Description of Artificial Sequence: Synthetic oligonucleotide
gauguacgauggguacuuu

SEQ ID NO: 2022817 - RNA, 19 nt, Artificial Sequence
  Description of Artificial Sequence: Synthetic oligonucleotide
cacggauacccugguaaau

SEQ ID NO: 2022818 - RNA, 19 nt, Artificial Sequence
  Description of Artificial Sequence: Synthetic oligonucleotide
ccauauccucgaggguccc

SEQ ID NO: 2022819 - RNA, 19 nt, Artificial Sequence
  Description of Artificial Sequence: Synthetic oligonucleotide
cccgucacuccagcccagg

SEQ ID NO: 2022820 - RNA, 19 nt, Artificial Sequence
  Description of Artificial Sequence: Synthetic oligonucleotide
gcagauguuuaaacugguu

SEQ ID NO: 2022821 - RNA, 19 nt, Artificial Sequence
  Description of Artificial Sequence: Synthetic oligonucleotide
gccaccacugugaagcguu

SEQ ID NO: 2022822 - RNA, 19 nt, Artificial Sequence
  Description of Artificial Sequence: Synthetic oligonucleotide
cccguucgcugguaaugca

SEQ ID NO: 2022823 - RNA, 19 nt, Artificial Sequence
  Description of Artificial Sequence: Synthetic oligonucleotide
gcaagugccgacagauguu

SEQ ID NO: 2022824 - RNA, 19 nt, Artificial Sequence
  Description of Artificial Sequence: Synthetic oligonucleotide
cagaugcagccgugacccu

SEQ ID NO: 2022825 - RNA, 19 nt, Artificial Sequence
  Description of Artificial Sequence: Synthetic oligonucleotide
cccacuucucacagguuuu

SEQ ID NO: 2022826 - RNA, 19 nt, Artificial Sequence
  Description of Artificial Sequence: Synthetic oligonucleotide
ccgcagggugggccgcugc

SEQ ID NO: 2022827 - RNA, 19 nt, Artificial Sequence
  Description of Artificial Sequence: Synthetic oligonucleotide
cuucucccguucgcuggua

SEQ ID NO: 2022828 - RNA, 19 nt, Artificial Sequence
  Description of Artificial Sequence: Synthetic oligonucleotide
cccaggccaccacugugaa

SEQ ID NO: 2022829 - RNA, 19 nt, Artificial Sequence
  Description of Artificial Sequence: Synthetic oligonucleotide
cuccccagaucaccaucuu

SEQ ID NO: 2022830 - RNA, 19 nt, Artificial Sequence
  Description of Artificial Sequence: Synthetic oligonucleotide
gcgcggggauccuggaccu

SEQ ID NO: 2022831 - RNA, 19 nt, Artificial Sequence
  Description of Artificial Sequence: Synthetic oligonucleotide
cgugggaccaauggguccu

SEQ ID NO: 2022832 - RNA, 19 nt, Artificial Sequence
  Description of Artificial Sequence: Synthetic oligonucleotide
cacccacuucucacagguu

SEQ ID NO: 2022833 - RNA, 19 nt, Artificial Sequence
  Description of Artificial Sequence: Synthetic oligonucleotide
cgcugguaaugcaggugaa

SEQ ID NO: 2022834 - RNA, 19 nt, Artificial Sequence
  Description of Artificial Sequence: Synthetic oligonucleotide
cguaggcauuugcucccca

SEQ ID NO: 2022835 - RNA, 19 nt, Artificial Sequence
  Description of Artificial Sequence: Synthetic oligonucleotide
ggccaccacugugaagcgu

SEQ ID NO: 2022836 - RNA, 19 nt, Artificial Sequence
  Description of Artificial Sequence: Synthetic oligonucleotide
gggccgcagggugggccgc

SEQ ID NO: 2022837 - RNA, 19 nt, Artificial Sequence
  Description of Artificial Sequence: Synthetic oligonucleotide
ccacugugaagcguuucuu

SEQ ID NO: 2022838 - RNA, 19 nt, Artificial Sequence
  Description of Artificial Sequence: Synthetic oligonucleotide
cgugcuccccuucucccgu

SEQ ID NO: 2022839 - RNA, 19 nt, Artificial Sequence
  Description of Artificial Sequence: Synthetic oligonucleotide
cgugacccuuucacaugcu

SEQ ID NO: 2022840 - RNA, 19 nt, Artificial Sequence
  Description of Artificial Sequence: Synthetic oligonucleotide
ccuugccuucucacuccau

SEQ ID NO: 2022841 - RNA, 19 nt, Artificial Sequence
  Description of Artificial Sequence: Synthetic oligonucleotide
ccuucucuccgugcacaau

SEQ ID NO: 2022842 - RNA, 19 nt, Artificial Sequence
  Description of Artificial Sequence: Synthetic oligonucleotide
cgcggggauccuggaccuc

SEQ ID NO: 2022843 - RNA, 19 nt, Artificial Sequence
  Description of Artificial Sequence: Synthetic oligonucleotide
aaaguaguagcauuugagc

SEQ ID NO: 2022844 - RNA, 19 nt, Artificial Sequence
  Description of Artificial Sequence: Synthetic oligonucleotide
aaguauagcuuucagcggg

SEQ ID NO: 2022845 - RNA, 19 nt, Artificial Sequence
  Description of Artificial Sequence: Synthetic oligonucleotide
agaaaguauagcuuucagc

SEQ ID NO: 2022846 - RNA, 19 nt, Artificial Sequence
  Description of Artificial Sequence: Synthetic oligonucleotide
uguuuggucaguuuggucc

SEQ ID NO: 2022847 - RNA, 19 nt, Artificial Sequence
  Description of Artificial Sequence: Synthetic oligonucleotide
uguaguaguuguuaggucc

SEQ ID NO: 2022848 - RNA, 19 nt, Artificial Sequence
  Description of Artificial Sequence: Synthetic oligonucleotide
aagaagagaauccggguag

SEQ ID NO: 2022849 - RNA, 19 nt, Artificial Sequence
  Description of Artificial Sequence: Synthetic oligonucleotide
uguuggacuagucaugucc

SEQ ID NO: 2022850 - RNA, 19 nt, Artificial Sequence
  Description of Artificial Sequence: Synthetic oligonucleotide
aaguaguagcauuugagcu

SEQ ID NO: 2022851 - RNA, 19 nt, Artificial Sequence
  Description of Artificial Sequence: Synthetic oligonucleotide
auugagcuccagcagaacc

SEQ ID NO: 2022852 - RNA, 19 nt, Artificial Sequence
  Description of Artificial Sequence: Synthetic oligonucleotide
gaaaaggauuuucucauag

SEQ ID NO: 2022853 - RNA, 19 nt, Artificial Sequence
  Description of Artificial Sequence: Synthetic oligonucleotide
auagacauuggucuggaug

SEQ ID NO: 2022854 - RNA, 19 nt, Artificial Sequence
  Description of Artificial Sequence: Synthetic oligonucleotide
uacucgaugaccuguuugg

SEQ ID NO: 2022855 - RNA, 19 nt, Artificial Sequence
  Description of Artificial Sequence: Synthetic oligonucleotide
uucuguauggaacuccgcc

SEQ ID NO: 2022856 - RNA, 19 nt, Artificial Sequence
  Description of Artificial Sequence: Synthetic oligonucleotide
aauccgccuuuauugaagg

SEQ ID NO: 2022857 - RNA, 19 nt, Artificial Sequence
  Description of Artificial Sequence: Synthetic oligonucleotide
guuguuaggucccaggacc

SEQ ID NO: 2022858 - RNA, 19 nt, Artificial Sequence
  Description of Artificial Sequence: Synthetic oligonucleotide
aauucuguauggaacuccg

SEQ ID NO: 2022859 - RNA, 19 nt, Artificial Sequence
  Description of Artificial Sequence: Synthetic oligonucleotide
agagaauccggguagccuc

SEQ ID NO: 2022860 - RNA, 19 nt, Artificial Sequence
  Description of Artificial Sequence: Synthetic oligonucleotide
gagacuagggcccauaaga

SEQ ID NO: 2022861 - RNA, 19 nt, Artificial Sequence
  Description of Artificial Sequence: Synthetic oligonucleotide
gguuaauccgccuuuauug

SEQ ID NO: 2022862 - RNA, 19 nt, Artificial Sequence
  Description of Artificial Sequence: Synthetic oligonucleotide
guagcuacccuccaucagg

SEQ ID NO: 2022863 - RNA, 19 nt, Artificial Sequence
  Description of Artificial Sequence: Synthetic oligonucleotide
cauaggaugcuccacuggg

SEQ ID NO: 2022864 - RNA, 19 nt, Artificial Sequence
  Description of Artificial Sequence: Synthetic oligonucleotide
uuucccuuggccaggaaca

SEQ ID NO: 2022865 - RNA, 19 nt, Artificial Sequence
  Description of Artificial Sequence: Synthetic oligonucleotide
ucagcgaaaaggauuuucu

SEQ ID NO: 2022866 - RNA, 19 nt, Artificial Sequence
  Description of Artificial Sequence: Synthetic oligonucleotide
aagaucgcgcccgaagugc

SEQ ID NO: 2022867 - RNA, 19 nt, Artificial Sequence
  Description of Artificial Sequence: Synthetic oligonucleotide
ugucaaugaagaaaguaua

SEQ ID NO: 2022868 - RNA, 19 nt, Artificial Sequence
  Description of Artificial Sequence: Synthetic oligonucleotide
uuacauaggaugcuccacu

SEQ ID NO: 2022869 - RNA, 19 nt, Artificial Sequence
  Description of Artificial Sequence: Synthetic oligonucleotide
aucagguauuguucgaggg

SEQ ID NO: 2022870 - RNA, 19 nt, Artificial Sequence
  Description of Artificial Sequence: Synthetic oligonucleotide
uaauccgccuuuauugaag

SEQ ID NO: 2022871 - RNA, 19 nt, Artificial Sequence
  Description of Artificial Sequence: Synthetic oligonucleotide
agcgaaaaggauuuucuca

SEQ ID NO: 2022872 - RNA, 19 nt, Artificial Sequence
  Description of Artificial Sequence: Synthetic oligonucleotide
aguuguuaggucccaggac

SEQ ID NO: 2022873 - RNA, 19 nt, Artificial Sequence
  Description of Artificial Sequence: Synthetic oligonucleotide
cauaagagguuaauccgcc

SEQ ID NO: 2022874 - RNA, 19 nt, Artificial Sequence
  Description of Artificial Sequence: Synthetic oligonucleotide
auugaaggccagccuauac

SEQ ID NO: 2022875 - RNA, 19 nt, Artificial Sequence
  Description of Artificial Sequence: Synthetic oligonucleotide
gagaugcucguacaugccg

SEQ ID NO: 2022876 - RNA, 19 nt, Artificial Sequence
  Description of Artificial Sequence: Synthetic oligonucleotide
ucacgggccagaaugagcu

SEQ ID NO: 2022877 - RNA, 19 nt, Artificial Sequence
  Description of Artificial Sequence: Synthetic oligonucleotide
guagcauuugagcugggcc

SEQ ID NO: 2022878 - RNA, 19 nt, Artificial Sequence
  Description of Artificial Sequence: Synthetic oligonucleotide
uccgugacgcggcaaaccg

SEQ ID NO: 2022879 - RNA, 19 nt, Artificial Sequence
  Description of Artificial Sequence: Synthetic oligonucleotide
ucagacaaucaucuccagc

SEQ ID NO: 2022880 - RNA, 19 nt, Artificial Sequence
  Description of Artificial Sequence: Synthetic oligonucleotide
ucgaugaccuguuuggcca

SEQ ID NO: 2022881 - RNA, 19 nt, Artificial Sequence
  Description of Artificial Sequence: Synthetic oligonucleotide
aggggauguccuuacauag

SEQ ID NO: 2022882 - RNA, 19 nt, Artificial Sequence
  Description of Artificial Sequence: Synthetic oligonucleotide
agcguucuaauucuguaug

SEQ ID NO: 2022883 - RNA, 19 nt, Artificial Sequence
  Description of Artificial Sequence: Synthetic oligonucleotide
ucuguauggaacuccgcca

SEQ ID NO: 2022884 - RNA, 19 nt, Artificial Sequence
  Description of Artificial Sequence: Synthetic oligonucleotide
ucagguauuguucgaggga

SEQ ID NO: 2022885 - RNA, 19 nt, Artificial Sequence
  Description of Artificial Sequence: Synthetic oligonucleotide
gacuagggcccauaagagg

SEQ ID NO: 2022886 - RNA, 19 nt, Artificial Sequence
  Description of Artificial Sequence: Synthetic oligonucleotide
uugaaggccagccuauacu

SEQ ID NO: 2022887 - RNA, 19 nt, Artificial Sequence
  Description of Artificial Sequence: Synthetic oligonucleotide
ccugauaguauccagcagg

SEQ ID NO: 2022888 - RNA, 19 nt, Artificial Sequence
  Description of Artificial Sequence: Synthetic oligonucleotide
uaguuguuaggucccagga

SEQ ID NO: 2022889 - RNA, 19 nt, Artificial Sequence
  Description of Artificial Sequence: Synthetic oligonucleotide
ugcucguacaugccggccg

SEQ ID NO: 2022890 - RNA, 19 nt, Artificial Sequence
  Description of Artificial Sequence: Synthetic oligonucleotide
aacuccgccacucgguucu

SEQ ID NO: 2022891 - RNA, 19 nt, Artificial Sequence
  Description of Artificial Sequence: Synthetic oligonucleotide
uccgccuuuauugaaggcc

SEQ ID NO: 2022892 - RNA, 19 nt, Artificial Sequence
  Description of Artificial Sequence: Synthetic oligonucleotide
aggccuucucaaugcaucc

SEQ ID NO: 2022893 - RNA, 19 nt, Artificial Sequence
  Description of Artificial Sequence: Synthetic oligonucleotide
caaugaagaaaguauagcu

SEQ ID NO: 2022894 - RNA, 19 nt, Artificial Sequence
  Description of Artificial Sequence: Synthetic oligonucleotide
ugguuggcaggaaauugag

SEQ ID NO: 2022895 - RNA, 19 nt, Artificial Sequence
  Description of Artificial Sequence: Synthetic oligonucleotide
aagcguucuaauucuguau

SEQ ID NO: 2022896 - RNA, 19 nt, Artificial Sequence
  Description of Artificial Sequence: Synthetic oligonucleotide
ucucccaccguuccacggg

SEQ ID NO: 2022897 - RNA, 19 nt, Artificial Sequence
  Description of Artificial Sequence: Synthetic oligonucleotide
caucagguauuguucgagg

SEQ ID NO: 2022898 - RNA, 19 nt, Artificial Sequence
  Description of Artificial Sequence: Synthetic oligonucleotide
augucaaugaagaaaguau

SEQ ID NO: 2022899 - RNA, 19 nt, Artificial Sequence
  Description of Artificial Sequence: Synthetic oligonucleotide
aguagcauuugagcugggc

SEQ ID NO: 2022900 - RNA, 19 nt, Artificial Sequence
  Description of Artificial Sequence: Synthetic oligonucleotide
uuauugaaggccagccuau

SEQ ID NO: 2022901 - RNA, 19 nt, Artificial Sequence
  Description of Artificial Sequence: Synthetic oligonucleotide
uuccacucguccuugagau

SEQ ID NO: 2022902 - RNA, 19 nt, Artificial Sequence
  Description of Artificial Sequence: Synthetic oligonucleotide
uuguuaggucccaggaccc

SEQ ID NO: 2022903 - RNA, 19 nt, Artificial Sequence
  Description of Artificial Sequence: Synthetic oligonucleotide
uaagagguuaauccgccuu

SEQ ID NO: 2022904 - RNA, 19 nt, Artificial Sequence
  Description of Artificial Sequence: Synthetic oligonucleotide
uauacuggguuuguuggac

SEQ ID NO: 2022905 - RNA, 19 nt, Artificial Sequence
  Description of Artificial Sequence: Synthetic oligonucleotide
aucccugauaguauccagc

SEQ ID NO: 2022906 - RNA, 19 nt, Artificial Sequence
  Description of Artificial Sequence: Synthetic oligonucleotide
agaagagaauccggguagc

SEQ ID NO: 2022907 - RNA, 19 nt, Artificial Sequence
  Description of Artificial Sequence: Synthetic oligonucleotide
aagagguuaauccgccuuu

SEQ ID NO: 2022908 - RNA, 19 nt, Artificial Sequence
  Description of Artificial Sequence: Synthetic oligonucleotide
ggcucagacaaucaucucc

SEQ ID NO: 2022909 - RNA, 19 nt, Artificial Sequence
  Description of Artificial Sequence: Synthetic oligonucleotide
  modified_base (16)..(16): a, c, u, g, unknown or other
gaagccgggaggcggngcc

SEQ ID NO: 2022910 - RNA, 19 nt, Artificial Sequence
  Description of Artificial Sequence: Synthetic oligonucleotide
acuagggcccauaagaggu

SEQ ID NO: 2022911 - RNA, 19 nt, Artificial Sequence
  Description of Artificial Sequence: Synthetic oligonucleotide
guuaauccgccuuuauuga

SEQ ID NO: 2022912 - RNA, 19 nt, Artificial Sequence
  Description of Artificial Sequence: Synthetic oligonucleotide
cuuucagcggggauguuuc

SEQ ID NO: 2022913 - RNA, 19 nt, Artificial Sequence
  Description of Artificial Sequence: Synthetic oligonucleotide
gaugucaaugaagaaagua

SEQ ID NO: 2022914 - RNA, 19 nt, Artificial Sequence
  Description of Artificial Sequence: Synthetic oligonucleotide
cuugcgguuccacucgucc

SEQ ID NO: 2022915 - RNA, 19 nt, Artificial Sequence
  Description of Artificial Sequence: Synthetic oligonucleotide
cccauaagagguuaauccg

SEQ ID NO: 2022916 - RNA, 19 nt, Artificial Sequence
  Description of Artificial Sequence: Synthetic oligonucleotide
ggaaauugagcuccagcag

SEQ ID NO: 2022917 - RNA, 19 nt, Artificial Sequence
  Description of Artificial Sequence: Synthetic oligonucleotide
gagguucgggcucuugcgg

SEQ ID NO: 2022918 - RNA, 19 nt, Artificial Sequence
  Description of Artificial Sequence: Synthetic oligonucleotide
auggaacuccgccacucgg

SEQ ID NO: 2022919 - RNA, 19 nt, Artificial Sequence
  Description of Artificial Sequence: Synthetic oligonucleotide
uuguagcuacccuccauca

SEQ ID NO: 2022920 - RNA, 19 nt, Artificial Sequence
  Description of Artificial Sequence: Synthetic oligonucleotide
guaacugcuccuuguaauc

SEQ ID NO: 2022921 - RNA, 19 nt, Artificial Sequence
  Description of Artificial Sequence: Synthetic oligonucleotide
uuaauccgccuuuauugaa

SEQ ID NO: 2022922 - RNA, 19 nt, Artificial Sequence
  Description of Artificial Sequence: Synthetic oligonucleotide
ucgaaggaggggauguccu

SEQ ID NO: 2022923 - RNA, 19 nt, Artificial Sequence
  Description of Artificial Sequence: Synthetic oligonucleotide
cuguauggaacuccgccac

SEQ ID NO: 2022924 - RNA, 19 nt, Artificial Sequence
  Description of Artificial Sequence: Synthetic oligonucleotide
gguguguugaagaagagaa

SEQ ID NO: 2022925 - RNA, 19 nt, Artificial Sequence
  Description of Artificial Sequence: Synthetic oligonucleotide
gauguuucccuuggccagg

SEQ ID NO: 2022926 - RNA, 19 nt, Artificial Sequence
  Description of Artificial Sequence: Synthetic oligonucleotide
acgggccagaaugagcugc

SEQ ID NO: 2022927 - RNA, 19 nt, Artificial Sequence
  Description of Artificial Sequence: Synthetic oligonucleotide
ccauaagagguuaauccgc

SEQ ID NO: 2022928 - RNA, 19 nt, Artificial Sequence
  Description of Artificial Sequence: Synthetic oligonucleotide
agaugcucguacaugccgg

SEQ ID NO: 2022929 - RNA, 19 nt, Artificial Sequence
  Description of Artificial Sequence: Synthetic oligonucleotide
cagguauuguucgagggac

SEQ ID NO: 2022930 - RNA, 19 nt, Artificial Sequence
  Description of Artificial Sequence: Synthetic oligonucleotide
ucuuccgugacgcggcaaa

SEQ ID NO: 2022931 - RNA, 19 nt, Artificial Sequence
  Description of Artificial Sequence: Synthetic oligonucleotide
uucgagggacacagggugc

SEQ ID NO: 2022932 - RNA, 19 nt, Artificial Sequence
  Description of Artificial Sequence: Synthetic oligonucleotide
gaugcucguacaugccggc

SEQ ID NO: 2022933 - RNA, 19 nt, Artificial Sequence
  Description of Artificial Sequence: Synthetic oligonucleotide
guuuguuggacuagucaug

SEQ ID NO: 2022934 - RNA, 19 nt, Artificial Sequence
  Description of Artificial Sequence: Synthetic oligonucleotide
aggcaagcguucuaauucu

SEQ ID NO: 2022935 - RNA, 19 nt, Artificial Sequence
  Description of Artificial Sequence: Synthetic oligonucleotide
ugacuuacggcagcgccgc

SEQ ID NO: 2022936 - RNA, 19 nt, Artificial Sequence
  Description of Artificial Sequence: Synthetic oligonucleotide
auccgccuuuauugaaggc

SEQ ID NO: 2022937 - RNA, 19 nt, Artificial Sequence
  Description of Artificial Sequence: Synthetic oligonucleotide
cuuacauaggaugcuccac

SEQ ID NO: 2022938 - RNA, 19 nt, Artificial Sequence
  Description of Artificial Sequence: Synthetic oligonucleotide
guagccucagcgaaaagga

SEQ ID NO: 2022939 - RNA, 19 nt, Artificial Sequence
  Description of Artificial Sequence: Synthetic oligonucleotide
ucuucgccgcacuugcuga

SEQ ID NO: 2022940 - RNA, 19 nt, Artificial Sequence
  Description of Artificial Sequence: Synthetic oligonucleotide
cugauaguauccagcagga

SEQ ID NO: 2022941 - RNA, 19 nt, Artificial Sequence
  Description of Artificial Sequence: Synthetic oligonucleotide
auaagagguuaauccgccu

SEQ ID NO: 2022942 - RNA, 19 nt, Artificial Sequence
  Description of Artificial Sequence: Synthetic oligonucleotide
ucagcggggauguuucccu

SEQ ID NO: 2022943 - RNA, 19 nt, Artificial Sequence
  Description of Artificial Sequence: Synthetic oligonucleotide
gacacagggugcuugauau

SEQ ID NO: 2022944 - RNA, 19 nt, Artificial Sequence
  Description of Artificial Sequence: Synthetic oligonucleotide
uggaacuccgccacucggu

SEQ ID NO: 2022945 - RNA, 19 nt, Artificial Sequence
  Description of Artificial Sequence: Synthetic oligonucleotide
aguauagcuuucagcgggg

SEQ ID NO: 2022946 - RNA, 19 nt, Artificial Sequence
  Description of Artificial Sequence: Synthetic oligonucleotide
agacuagggcccauaagag

SEQ ID NO: 2022947 - RNA, 19 nt, Artificial Sequence
  Description of Artificial Sequence: Synthetic oligonucleotide
uaucucccaccguuccacg

SEQ ID NO: 2022948 - RNA, 19 nt, Artificial Sequence
  Description of Artificial Sequence: Synthetic oligonucleotide
ggugcauguaggcugacuc

SEQ ID NO: 2022949 - RNA, 19 nt, Artificial Sequence
  Description of Artificial Sequence: Synthetic oligonucleotide
uagcuacccuccaucaggu

SEQ ID NO: 2022950 - RNA, 19 nt, Artificial Sequence
  Description of Artificial Sequence: Synthetic oligonucleotide
uguauggaacuccgccacu

SEQ ID NO: 2022951 - RNA, 19 nt, Artificial Sequence
  Description of Artificial Sequence: Synthetic oligonucleotide
cacuugcugagguucgggc

SEQ ID NO: 2022952 - RNA, 19 nt, Artificial Sequence
  Description of Artificial Sequence: Synthetic oligonucleotide
  modified_base (19)..(19): a, c, u, g, unknown or other
aaugaagccgggaggcggn

SEQ ID NO: 2022953 - RNA, 19 nt, Artificial Sequence
  Description of Artificial Sequence: Synthetic oligonucleotide
uccggguagccucagcgaa

SEQ ID NO: 2022954 - RNA, 19 nt, Artificial Sequence
  Description of Artificial Sequence: Synthetic oligonucleotide
cucgcuucuuggcauaguc

SEQ ID NO: 2022955 - RNA, 19 nt, Artificial Sequence
  Description of Artificial Sequence: Synthetic oligonucleotide
gaaccagcuucagacggcc

SEQ ID NO: 2022956 - RNA, 19 nt, Artificial Sequence
  Description of Artificial Sequence: Synthetic oligonucleotide
uccaucagguauuguucga

SEQ ID NO: 2022957 - RNA, 19 nt, Artificial Sequence
  Description of Artificial Sequence: Synthetic oligonucleotide
agguuaauccgccuuuauu

SEQ ID NO: 2022958 - RNA, 19 nt, Artificial Sequence
  Description of Artificial Sequence: Synthetic oligonucleotide
  modified_base (8)..(8): a, c, u, g, unknown or other
gaggcggngcccgaagccg

SEQ ID NO: 2022959 - RNA, 19 nt, Artificial Sequence
  Description of Artificial Sequence: Synthetic oligonucleotide
cagcgaaaaggauuuucuc

SEQ ID NO: 2022960 - RNA, 19 nt, Artificial Sequence
  Description of Artificial Sequence: Synthetic oligonucleotide
gcguucuaauucuguaugg

SEQ ID NO: 2022961 - RNA, 19 nt, Artificial Sequence
  Description of Artificial Sequence: Synthetic oligonucleotide
auacuggguuuguuggacu

SEQ ID NO: 2022962 - RNA, 19 nt, Artificial Sequence
  Description of Artificial Sequence: Synthetic oligonucleotide
uucagcggggauguuuccc

SEQ ID NO: 2022963 - RNA, 19 nt, Artificial Sequence
  Description of Artificial Sequence: Synthetic oligonucleotide
guuggacuagucaugucca

SEQ ID NO: 2022964 - RNA, 19 nt, Artificial Sequence
  Description of Artificial Sequence: Synthetic oligonucleotide
cucgaaggaggggaugucc

SEQ ID NO: 2022965 - RNA, 19 nt, Artificial Sequence
  Description of Artificial Sequence: Synthetic oligonucleotide
caagaucgcgcccgaagug

SEQ ID NO: 2022966 - RNA, 19 nt, Artificial Sequence
  Description of Artificial Sequence: Synthetic oligonucleotide
uagcuuucagcggggaugu

SEQ ID NO: 2022967 - RNA, 19 nt, Artificial Sequence
  Description of Artificial Sequence: Synthetic oligonucleotide
cuucagacggcccagcucu

SEQ ID NO: 2022968 - RNA, 19 nt, Artificial Sequence
  Description of Artificial Sequence: Synthetic oligonucleotide
cucuucgccgcacuugcug

SEQ ID NO: 2022969 - RNA, 19 nt, Artificial Sequence
  Description of Artificial Sequence: Synthetic oligonucleotide
cucagcgaaaaggauuuuc

SEQ ID NO: 2022970 - RNA, 19 nt, Artificial Sequence
  Description of Artificial Sequence: Synthetic oligonucleotide
ccgaucuccaguaugucac

SEQ ID NO: 2022971 - RNA, 19 nt, Artificial Sequence
  Description of Artificial Sequence: Synthetic oligonucleotide
ugacgcggcaaaccgccga

SEQ ID NO: 2022972 - RNA, 19 nt, Artificial Sequence
  Description of Artificial Sequence: Synthetic oligonucleotide
agaucgcgcccgaagugcc

SEQ ID NO: 2022973 - RNA, 19 nt, Artificial Sequence
  Description of Artificial Sequence: Synthetic oligonucleotide
uacuggguuuguuggacua

SEQ ID NO: 2022974 - RNA, 19 nt, Artificial Sequence
  Description of Artificial Sequence: Synthetic oligonucleotide
uuggacuagucauguccac

SEQ ID NO: 2022975 - RNA, 19 nt, Artificial Sequence
  Description of Artificial Sequence: Synthetic oligonucleotide
ugucacgggccagaaugag

SEQ ID NO: 2022976 - RNA, 19 nt, Artificial Sequence
  Description of Artificial Sequence: Synthetic oligonucleotide
gaggggauguccuuacaua

SEQ ID NO: 2022977 - RNA, 19 nt, Artificial Sequence
  Description of Artificial Sequence: Synthetic oligonucleotide
ucguacaugccggccgccg

SEQ ID NO: 2022978 - RNA, 19 nt, Artificial Sequence
  Description of Artificial Sequence: Synthetic oligonucleotide
gagcucgcgacgccgccgg

SEQ ID NO: 2022979 - RNA, 19 nt, Artificial Sequence
  Description of Artificial Sequence: Synthetic oligonucleotide
uggguuuguuggacuaguc

SEQ ID NO: 2022980 - RNA, 19 nt, Artificial Sequence
  Description of Artificial Sequence: Synthetic oligonucleotide
cuauacuggguuuguugga

SEQ ID NO: 2022981 - RNA, 19 nt, Artificial Sequence
  Description of Artificial Sequence: Synthetic oligonucleotide
uaggcugacucagguaacu

SEQ ID NO: 2022982 - RNA, 19 nt, Artificial Sequence
  Description of Artificial Sequence: Synthetic oligonucleotide
cucagacaaucaucuccag

SEQ ID NO: 2022983 - RNA, 19 nt, Artificial Sequence
  Description of Artificial Sequence: Synthetic oligonucleotide
gguuuguuggacuagucau

SEQ ID NO: 2022984 - RNA, 19 nt, Artificial Sequence
  Description of Artificial Sequence: Synthetic oligonucleotide
gccgccgccugcaagaucg

SEQ ID NO: 2022985 - RNA, 19 nt, Artificial Sequence
  Description of Artificial Sequence: Synthetic oligonucleotide
aaaccgccgaccugacuua

SEQ ID NO: 2022986 - RNA, 19 nt, Artificial Sequence
  Description of Artificial Sequence: Synthetic oligonucleotide
uuccgugacgcggcaaacc

SEQ ID NO: 2022987 - RNA, 19 nt, Artificial Sequence
  Description of Artificial Sequence: Synthetic oligonucleotide
ccacucguccuugagaugc

SEQ ID NO: 2022988 - RNA, 19 nt, Artificial Sequence
  Description of Artificial Sequence: Synthetic oligonucleotide
gcucuugcgguuccacucg

SEQ ID NO: 2022989 - RNA, 19 nt, Artificial Sequence
  Description of Artificial Sequence: Synthetic oligonucleotide
aaccgccgaccugacuuac

SEQ ID NO: 2022990 - RNA, 19 nt, Artificial Sequence
  Description of Artificial Sequence: Synthetic oligonucleotide
caagcguucuaauucugua

SEQ ID NO: 2022991 - RNA, 19 nt, Artificial Sequence
  Description of Artificial Sequence: Synthetic oligonucleotide
agacauuggucuggauguc

SEQ ID NO: 2022992 - RNA, 19 nt, Artificial Sequence
  Description of Artificial Sequence: Synthetic oligonucleotide
gguauuguucgagggacac

SEQ ID NO: 2022993 - RNA, 19 nt, Artificial Sequence
  Description of Artificial Sequence: Synthetic oligonucleotide
uucgccgcacuugcugagg

SEQ ID NO: 2022994 - RNA, 19 nt, Artificial Sequence
  Description of Artificial Sequence: Synthetic oligonucleotide
ggagacuagggcccauaag

SEQ ID NO: 2022995 - RNA, 19 nt, Artificial Sequence
  Description of Artificial Sequence: Synthetic oligonucleotide
cuuacggcagcgccgccuc

SEQ ID NO: 2022996 - RNA, 19 nt, Artificial Sequence
  Description of Artificial Sequence: Synthetic oligonucleotide
cucgcgacgccgccgggcg

SEQ ID NO: 2022997 - RNA, 19 nt, Artificial Sequence
  Description of Artificial Sequence: Synthetic oligonucleotide
guauggaacuccgccacuc

SEQ ID NO: 2022998 - RNA, 19 nt, Artificial Sequence
  Description of Artificial Sequence: Synthetic oligonucleotide
uguuaggucccaggaccca

SEQ ID NO: 2022999 - RNA, 19 nt, Artificial Sequence
  Description of Artificial Sequence: Synthetic oligonucleotide
accugacuuacggcagcgc

SEQ ID NO: 2023000 - RNA, 19 nt, Artificial Sequence
  Description of Artificial Sequence: Synthetic oligonucleotide
agcggggauguuucccuug

SEQ ID NO: 2023001 - RNA, 19 nt, Artificial Sequence
  Description of Artificial Sequence: Synthetic oligonucleotide
uauagacauuggucuggau

SEQ ID NO: 2023002 - RNA, 19 nt, Artificial Sequence
  Description of Artificial Sequence: Synthetic oligonucleotide
ggcaaagcuguaguaguug

SEQ ID NO: 2023003 - RNA, 19 nt, Artificial Sequence
  Description of Artificial Sequence: Synthetic oligonucleotide
gacgcggcaaaccgccgac

SEQ ID NO: 2023004 - RNA, 19 nt, Artificial Sequence
  Description of Artificial Sequence: Synthetic oligonucleotide
uccacucguccuugagaug

SEQ ID NO: 2023005 - RNA, 19 nt, Artificial Sequence
  Description of Artificial Sequence: Synthetic oligonucleotide
auuguucgagggacacagg

SEQ ID NO: 2023006 - RNA, 19 nt, Artificial Sequence
  Description of Artificial Sequence: Synthetic oligonucleotide
ggggauguccuuacauagg

SEQ ID NO: 2023007 - RNA, 19 nt, Artificial Sequence
  Description of Artificial Sequence: Synthetic oligonucleotide
cuucgccgcacuugcugag

SEQ ID NO: 2023008 - RNA, 19 nt, Artificial Sequence
  Description of Artificial Sequence: Synthetic oligonucleotide
aucgcgcccgaagugcccg

SEQ ID NO: 2023009 - RNA, 19 nt, Artificial Sequence
  Description of Artificial Sequence: Synthetic oligonucleotide
guuccacggggagacuagg

SEQ ID NO: 2023010 - RNA, 19 nt, Artificial Sequence
  Description of Artificial Sequence: Synthetic oligonucleotide
ucgccgcacuugcugaggu

SEQ ID NO: 2023011 - RNA, 19 nt, Artificial Sequence
  Description of Artificial Sequence: Synthetic oligonucleotide
caaaccgccgaccugacuu

SEQ ID NO: 2023012 - RNA, 19 nt, Artificial Sequence
  Description of Artificial Sequence: Synthetic oligonucleotide
gucacgggccagaaugagc

SEQ ID NO: 2023013 - RNA, 19 nt, Artificial Sequence
  Description of Artificial Sequence: Synthetic oligonucleotide
gcucagacaaucaucucca

SEQ ID NO: 2023014 - RNA, 19 nt, Artificial Sequence
  Description of Artificial Sequence: Synthetic oligonucleotide
  modified_base (2)..(2): a, c, u, g, unknown or other
gngcccgaagccggggcgg

SEQ ID NO: 2023015 - RNA, 19 nt, Artificial Sequence
  Description of Artificial Sequence: Synthetic oligonucleotide
uuguuggacuagucauguc

SEQ ID NO: 2023016 - RNA, 19 nt, Artificial Sequence
  Description of Artificial Sequence: Synthetic oligonucleotide
uauugaaggccagccuaua

SEQ ID NO: 2023017 - RNA, 19 nt, Artificial Sequence
  Description of Artificial Sequence: Synthetic oligonucleotide
aaccucgcuucuuggcaua

SEQ ID NO: 2023018 - RNA, 19 nt, Artificial Sequence
  Description of Artificial Sequence: Synthetic oligonucleotide
  modified_base (3)..(3): a, c, u, g, unknown or other
ggngcccgaagccggggcg

SEQ ID NO: 2023019 - RNA, 19 nt, Artificial Sequence
  Description of Artificial Sequence: Synthetic oligonucleotide
gaugaccuguuuggccagc

SEQ ID NO: 2023020 - RNA, 19 nt, Artificial Sequence
  Description of Artificial Sequence: Synthetic oligonucleotide
ugauaguauccagcaggau

SEQ ID NO: 2023021 - RNA, 19 nt, Artificial Sequence
  Description of Artificial Sequence: Synthetic oligonucleotide
  modified_base (9)..(9): a, c, u, g, unknown or other
ggaggcggngcccgaagcc

SEQ ID NO: 2023022 - RNA, 19 nt, Artificial Sequence
  Description of Artificial Sequence: Synthetic oligonucleotide
ucuugcgguuccacucguc

SEQ ID NO: 2023023 - RNA, 19 nt, Artificial Sequence
  Description of Artificial Sequence: Synthetic oligonucleotide
gaacuccgccacucgguuc

SEQ ID NO: 2023024 - RNA, 19 nt, Artificial Sequence
  Description of Artificial Sequence: Synthetic oligonucleotide
agccucagcgaaaaggauu

SEQ ID NO: 2023025 - RNA, 19 nt, Artificial Sequence
  Description of Artificial Sequence: Synthetic oligonucleotide
cgugacgcggcaaaccgcc

SEQ ID NO: 2023026 - RNA, 19 nt, Artificial Sequence
  Description of Artificial Sequence: Synthetic oligonucleotide
gcggggauguuucccuugg

SEQ ID NO: 2023027 - RNA, 19 nt, Artificial Sequence
  Description of Artificial Sequence: Synthetic oligonucleotide
  modified_base (7)..(7): a, c, u, g, unknown or other
aggcggngcccgaagccgg

SEQ ID NO: 2023028 - RNA, 19 nt, Artificial Sequence
  Description of Artificial Sequence: Synthetic oligonucleotide
gagaauccggguagccuca

SEQ ID NO: 2023029 - RNA, 19 nt, Artificial Sequence
  Description of Artificial Sequence: Synthetic oligonucleotide
gcuguaguaguuguuaggu

SEQ ID NO: 2023030 - RNA, 19 nt, Artificial Sequence
  Description of Artificial Sequence: Synthetic oligonucleotide
uacggcagcgccgccuccc

SEQ ID NO: 2023031 - RNA, 19 nt, Artificial Sequence
  Description of Artificial Sequence: Synthetic oligonucleotide
ccaucagguauuguucgag

SEQ ID NO: 2023032 - RNA, 19 nt, Artificial Sequence
  Description of Artificial Sequence: Synthetic oligonucleotide
uggugcauguaggcugacu

SEQ ID NO: 2023033 - RNA, 19 nt, Artificial Sequence
  Description of Artificial Sequence: Synthetic oligonucleotide
aggaggggauguccuuaca

SEQ ID NO: 2023034 - RNA, 19 nt, Artificial Sequence
  Description of Artificial Sequence: Synthetic oligonucleotide
guaggcugacucagguaac

SEQ ID NO: 2023035 - RNA, 19 nt, Artificial Sequence
  Description of Artificial Sequence: Synthetic oligonucleotide
augucacgggccagaauga

SEQ ID NO: 2023036 - RNA, 19 nt, Artificial Sequence
  Description of Artificial Sequence: Synthetic oligonucleotide
uagggcccauaagagguua

SEQ ID NO: 2023037 - RNA, 19 nt, Artificial Sequence
  Description of Artificial Sequence: Synthetic oligonucleotide
agguauuguucgagggaca

SEQ ID NO: 2023038 - RNA, 19 nt, Artificial Sequence
  Description of Artificial Sequence: Synthetic oligonucleotide
agaauccggguagccucag

SEQ ID NO: 2023039 - RNA, 19 nt, Artificial Sequence
  Description of Artificial Sequence: Synthetic oligonucleotide
gacgccgccgggcgccccg

SEQ ID NO: 2023040 - RNA, 19 nt, Artificial Sequence
  Description of Artificial Sequence: Synthetic oligonucleotide
gcucguacaugccggccgc

SEQ ID NO: 2023041 - RNA, 19 nt, Artificial Sequence
  Description of Artificial Sequence: Synthetic oligonucleotide
gaucgcgcccgaagugccc

SEQ ID NO: 2023042 - RNA, 19 nt, Artificial Sequence
  Description of Artificial Sequence: Synthetic oligonucleotide
accucgcuucuuggcauag

SEQ ID NO: 2023043 - RNA, 19 nt, Artificial Sequence
  Description of Artificial Sequence: Synthetic oligonucleotide
guuaggucccaggacccaa

SEQ ID NO: 2023044 - RNA, 19 nt, Artificial Sequence
  Description of Artificial Sequence: Synthetic oligonucleotide
uguuucccuuggccaggaa

SEQ ID NO: 2023045 - RNA, 19 nt, Artificial Sequence
  Description of Artificial Sequence: Synthetic oligonucleotide
cuuccgugacgcggcaaac

SEQ ID NO: 2023046 - RNA, 19 nt, Artificial Sequence
  Description of Artificial Sequence: Synthetic oligonucleotide
gagguuaauccgccuuuau

SEQ ID NO: 2023047 - RNA, 19 nt, Artificial Sequence
  Description of Artificial Sequence: Synthetic oligonucleotide
  modified_base (18)..(18): a, c, u, g, unknown or other
augaagccgggaggcggng

SEQ ID NO: 2023048 - RNA, 19 nt, Artificial Sequence
  Description of Artificial Sequence: Synthetic oligonucleotide
ccgggcauacucgaugacc

SEQ ID NO: 2023049 - RNA, 19 nt, Artificial Sequence
  Description of Artificial Sequence: Synthetic oligonucleotide
gaagccggggcggggcuac

SEQ ID NO: 2023050 - RNA, 19 nt, Artificial Sequence
  Description of Artificial Sequence: Synthetic oligonucleotide
ccgaccugacuuacggcag

SEQ ID NO: 2023051 - RNA, 19 nt, Artificial Sequence
  Description of Artificial Sequence: Synthetic oligonucleotide
gaagugcccgcgggccccg

SEQ ID NO: 2023052 - RNA, 19 nt, Artificial Sequence
  Description of Artificial Sequence: Synthetic oligonucleotide
ccagccuauacuggguuug

SEQ ID NO: 2023053 - RNA, 19 nt, Artificial Sequence
  Description of Artificial Sequence: Synthetic oligonucleotide
ggcccauaagagguuaauc

SEQ ID NO: 2023054 - RNA, 19 nt, Artificial Sequence
  Description of Artificial Sequence: Synthetic oligonucleotide
gcaagaucgcgcccgaagu

SEQ ID NO: 2023055 - RNA, 19 nt, Artificial Sequence
  Description of Artificial Sequence: Synthetic oligonucleotide
ggccccgaucuccaguaug

SEQ ID NO: 2023056 - RNA, 19 nt, Artificial Sequence
  Description of Artificial Sequence: Synthetic oligonucleotide
auguuucccuuggccagga

SEQ ID NO: 2023057 - RNA, 19 nt, Artificial Sequence
  Description of Artificial Sequence: Synthetic oligonucleotide
ccuuguaaucaaaguagua

SEQ ID NO: 2023058 - RNA, 19 nt, Artificial Sequence
  Description of Artificial Sequence: Synthetic oligonucleotide
gacuuacggcagcgccgcc

SEQ ID NO: 2023059 - RNA, 19 nt, Artificial Sequence
  Description of Artificial Sequence: Synthetic oligonucleotide
accgccgaccugacuuacg

SEQ ID NO: 2023060 - RNA, 19 nt, Artificial Sequence
  Description of Artificial Sequence: Synthetic oligonucleotide
gugacgcggcaaaccgccg

SEQ ID NO: 2023061 - RNA, 19 nt, Artificial Sequence
  Description of Artificial Sequence: Synthetic oligonucleotide
ggcaagcguucuaauucug

SEQ ID NO: 2023062 - RNA, 19 nt, Artificial Sequence
  Description of Artificial Sequence: Synthetic oligonucleotide
gccgcacuugcugagguuc

SEQ ID NO: 2023063 - RNA, 19 nt, Artificial Sequence
  Description of Artificial Sequence: Synthetic oligonucleotide
cccgaucuccaguauguca

SEQ ID NO: 2023064 - RNA, 19 nt, Artificial Sequence
  Description of Artificial Sequence: Synthetic oligonucleotide
gccgccugcaagaucgcgc

SEQ ID NO: 2023065 - RNA, 19 nt, Artificial Sequence
  Description of Artificial Sequence: Synthetic oligonucleotide
gcaggaaauugagcuccag

SEQ ID NO: 2023066 - RNA, 19 nt, Artificial Sequence
  Description of Artificial Sequence: Synthetic oligonucleotide
ucccggcacgggccucccg

SEQ ID NO: 2023067 - RNA, 19 nt, Artificial Sequence
  Description of Artificial Sequence: Synthetic oligonucleotide
ggaggggauguccuuacau

SEQ ID NO: 2023068 - RNA, 19 nt, Artificial Sequence
  Description of Artificial Sequence: Synthetic oligonucleotide
ggacacagggugcuugaua

SEQ ID NO: 2023069 - RNA, 19 nt, Artificial Sequence
  Description of Artificial Sequence: Synthetic oligonucleotide
ccggccgaggcucagacaa

SEQ ID NO: 2023070 - RNA, 19 nt, Artificial Sequence
  Description of Artificial Sequence: Synthetic oligonucleotide
ggcauacucgaugaccugu

SEQ ID NO: 2023071 - RNA, 19 nt, Artificial Sequence
  Description of Artificial Sequence: Synthetic oligonucleotide
cagcucaguggaggggaug

SEQ ID NO: 2023072 - RNA, 19 nt, Artificial Sequence
  Description of Artificial Sequence: Synthetic oligonucleotide
gggagacuagggcccauaa

SEQ ID NO: 2023073 - RNA, 19 nt, Artificial Sequence
  Description of Artificial Sequence: Synthetic oligonucleotide
cguuccacggggagacuag

SEQ ID NO: 2023074 - RNA, 19 nt, Artificial Sequence
  Description of Artificial Sequence: Synthetic oligonucleotide
caaccucgcuucuuggcau

SEQ ID NO: 2023075 - RNA, 19 nt, Artificial Sequence
  Description of Artificial Sequence: Synthetic oligonucleotide
cauuugagcugggccaugu

SEQ ID NO: 2023076 - RNA, 19 nt, Artificial Sequence
  Description of Artificial Sequence: Synthetic oligonucleotide
agcuacccuccaucaggua

SEQ ID NO: 2023077 - RNA, 19 nt, Artificial Sequence
  Description of Artificial Sequence: Synthetic oligonucleotide
agcucgcgacgccgccggg

SEQ ID NO: 2023078 - RNA, 19 nt, Artificial Sequence
  Description of Artificial Sequence: Synthetic oligonucleotide
cacucgguucugggagagc

SEQ ID NO: 2023079 - RNA, 19 nt, Artificial Sequence
  Description of Artificial Sequence: Synthetic oligonucleotide
gccagaaugagcugcuguu

SEQ ID NO: 2023080 - RNA, 19 nt, Artificial Sequence
  Description of Artificial Sequence: Synthetic oligonucleotide
ccgugacgcggcaaaccgc

SEQ ID NO: 2023081 - RNA, 19 nt, Artificial Sequence
  Description of Artificial Sequence: Synthetic oligonucleotide
cuggguuuguuggacuagu

SEQ ID NO: 2023082 - RNA, 19 nt, Artificial Sequence
  Description of Artificial Sequence: Synthetic oligonucleotide
ucgcgcccgaagugcccgc

SEQ ID NO: 2023083 - RNA, 19 nt, Artificial Sequence
  Description of Artificial Sequence: Synthetic oligonucleotide
cccgaagugcccgcgggcc

SEQ ID NO: 2023084 - RNA, 19 nt, Artificial Sequence
  Description of Artificial Sequence: Synthetic oligonucleotide
agccuauacuggguuuguu

SEQ ID NO: 2023085 - RNA, 19 nt, Artificial Sequence
  Description of Artificial Sequence: Synthetic oligonucleotide
caucuuccgugacgcggca

SEQ ID NO: 2023086 - RNA, 19 nt, Artificial Sequence
  Description of Artificial Sequence: Synthetic oligonucleotide
ggguagccucagcgaaaag

SEQ ID NO: 2023087 - RNA, 19 nt, Artificial Sequence
  Description of Artificial Sequence: Synthetic oligonucleotide
cgaccugacuuacggcagc

SEQ ID NO: 2023088 - RNA, 19 nt, Artificial Sequence
  Description of Artificial Sequence: Synthetic oligonucleotide
ucgggcucuugcgguucca

SEQ ID NO: 2023089 - RNA, 19 nt, Artificial Sequence
  Description of Artificial Sequence: Synthetic oligonucleotide
gcaagcguucuaauucugu

SEQ ID NO: 2023090 - RNA, 19 nt, Artificial Sequence
  Description of Artificial Sequence: Synthetic oligonucleotide
gccacucgguucugggaga

SEQ ID NO: 2023091 - RNA, 19 nt, Artificial Sequence
  Description of Artificial Sequence: Synthetic oligonucleotide
guaugucacgggccagaau

SEQ ID NO: 2023092 - RNA, 19 nt, Artificial Sequence
  Description of Artificial Sequence: Synthetic oligonucleotide
aucuuccgugacgcggcaa

SEQ ID NO: 2023093 - RNA, 19 nt, Artificial Sequence
  Description of Artificial Sequence: Synthetic oligonucleotide
  modified_base (6)..(6): a, c, u, g, unknown or other
ggcggngcccgaagccggg

SEQ ID NO: 2023094 - RNA, 19 nt, Artificial Sequence
  Description of Artificial Sequence: Synthetic oligonucleotide
agggcccauaagagguuaa

SEQ ID NO: 2023095 - RNA, 19 nt, Artificial Sequence
  Description of Artificial Sequence: Synthetic oligonucleotide
gcccgaagugcccgcgggc

SEQ ID NO: 2023096 - RNA, 19 nt, Artificial Sequence
  Description of Artificial Sequence: Synthetic oligonucleotide
accgccgccgccgccgcca

SEQ ID NO: 2023097 - RNA, 19 nt, Artificial Sequence
  Description of Artificial Sequence: Synthetic oligonucleotide
ccacucgguucugggagag

SEQ ID NO: 2023098 - RNA, 19 nt, Artificial Sequence
  Description of Artificial Sequence: Synthetic oligonucleotide
cauacucgaugaccuguuu

SEQ ID NO: 2023099 - RNA, 19 nt, Artificial Sequence
  Description of Artificial Sequence: Synthetic oligonucleotide
cugcaauuucaucccugau

SEQ ID NO: 2023100 - RNA, 19 nt, Artificial Sequence
  Description of Artificial Sequence: Synthetic oligonucleotide
ggccccgagcucgcgacgc

SEQ ID NO: 2023101 - RNA, 19 nt, Artificial Sequence
  Description of Artificial Sequence: Synthetic oligonucleotide
gcauuugagcugggccaug

SEQ ID NO: 2023102 - RNA, 19 nt, Artificial Sequence
  Description of Artificial Sequence: Synthetic oligonucleotide
cuggugcauguaggcugac

SEQ ID NO: 2023103 - RNA, 19 nt, Artificial Sequence
  Description of Artificial Sequence: Synthetic oligonucleotide
uccccggccgaggcucaga

SEQ ID NO: 2023104 - RNA, 19 nt, Artificial Sequence
  Description of Artificial Sequence: Synthetic oligonucleotide
cuagggcccauaagagguu

SEQ ID NO: 2023105 - RNA, 19 nt, Artificial Sequence
  Description of Artificial Sequence: Synthetic oligonucleotide
cgggcauacucgaugaccu

SEQ ID NO: 2023106 - RNA, 19 nt, Artificial Sequence
  Description of Artificial Sequence: Synthetic oligonucleotide
ucccugugguuggcaggaa

SEQ ID NO: 2023107 - RNA, 19 nt, Artificial Sequence
  Description of Artificial Sequence: Synthetic oligonucleotide
gcgguuccacucguccuug

SEQ ID NO: 2023108 - RNA, 19 nt, Artificial Sequence
  Description of Artificial Sequence: Synthetic oligonucleotide
gggccccgagcucgcgacg

SEQ ID NO: 2023109 - RNA, 19 nt, Artificial Sequence
  Description of Artificial Sequence: Synthetic oligonucleotide
ggccucccggcggaaauga

SEQ ID NO: 2023110 - RNA, 19 nt, Artificial Sequence
  Description of Artificial Sequence: Synthetic oligonucleotide
cacucguccuugagaugcu

SEQ ID NO: 2023111 - RNA, 19 nt, Artificial Sequence
  Description of Artificial Sequence: Synthetic oligonucleotide
gccgggcauacucgaugac

SEQ ID NO: 2023112 - RNA, 19 nt, Artificial Sequence
  Description of Artificial Sequence: Synthetic oligonucleotide
gcucgcgacgccgccgggc

SEQ ID NO: 2023113 - RNA, 19 nt, Artificial Sequence
  Description of Artificial Sequence: Synthetic oligonucleotide
gcucgaaggaggggauguc

SEQ ID NO: 2023114 - RNA, 19 nt, Artificial Sequence
  Description of Artificial Sequence: Synthetic oligonucleotide
  modified_base (4)..(4): a, c, u, g, unknown or other
cggngcccgaagccggggc

SEQ ID NO: 2023115 - RNA, 19 nt, Artificial Sequence
  Description of Artificial Sequence: Synthetic oligonucleotide
gggcucuugcgguuccacu

SEQ ID NO: 2023116 - RNA, 19 nt, Artificial Sequence
  Description of Artificial Sequence: Synthetic oligonucleotide
ccgagcucgcgacgccgcc

SEQ ID NO: 2023117 - RNA, 19 nt, Artificial Sequence
  Description of Artificial Sequence: Synthetic oligonucleotide
aagugcccgcgggccccga

SEQ ID NO: 2023118 - RNA, 19 nt, Artificial Sequence
  Description of Artificial Sequence: Synthetic oligonucleotide
ggcaggcaagcguucuaau

SEQ ID NO: 2023119 - RNA, 19 nt, Artificial Sequence
  Description of Artificial Sequence: Synthetic oligonucleotide
gcgcucgaaggaggggaug

SEQ ID NO: 2023120 - RNA, 19 nt, Artificial Sequence
  Description of Artificial Sequence: Synthetic oligonucleotide
cuccccggccgaggcucag

SEQ ID NO: 2023121 - RNA, 19 nt, Artificial Sequence
  Description of Artificial Sequence: Synthetic oligonucleotide
gccccgagcucgcgacgcc

SEQ ID NO: 2023122 - RNA, 19 nt, Artificial Sequence
  Description of Artificial Sequence: Synthetic oligonucleotide
gcauacucgaugaccuguu

SEQ ID NO: 2023123 - RNA, 19 nt, Artificial Sequence
  Description of Artificial Sequence: Synthetic oligonucleotide
ccggguagccucagcgaaa

SEQ ID NO: 2023124 - RNA, 19 nt, Artificial Sequence
  Description of Artificial Sequence: Synthetic oligonucleotide
  modified_base (11)..(11): a, c, u, g, unknown or other
cgggaggcggngcccgaag

SEQ ID NO: 2023125 - RNA, 19 nt, Artificial Sequence
  Description of Artificial Sequence: Synthetic oligonucleotide
cugcaagaucgcgcccgaa

SEQ ID NO: 2023126 - RNA, 19 nt, Artificial Sequence
  Description of Artificial Sequence: Synthetic oligonucleotide
ccccgaucuccaguauguc

SEQ ID NO: 2023127 - RNA, 19 nt, Artificial Sequence
  Description of Artificial Sequence: Synthetic oligonucleotide
ggggagacuagggcccaua

SEQ ID NO: 2023128 - RNA, 19 nt, Artificial Sequence
  Description of Artificial Sequence: Synthetic oligonucleotide
gggcccauaagagguuaau

SEQ ID NO: 2023129 - RNA, 19 nt, Artificial Sequence
  Description of Artificial Sequence: Synthetic oligonucleotide
caccgccgccgccgccgcc

SEQ ID NO: 2023130 - RNA, 19 nt, Artificial Sequence
  Description of Artificial Sequence: Synthetic oligonucleotide
ccagaaugagcugcuguuu

SEQ ID NO: 2023131 - RNA, 19 nt, Artificial Sequence
  Description of Artificial Sequence: Synthetic oligonucleotide
ccccgcucaccgccgccgc

SEQ ID NO: 2023132 - RNA, 19 nt, Artificial Sequence
  Description of Artificial Sequence: Synthetic oligonucleotide
cagcggggauguuucccuu

SEQ ID NO: 2023133 - RNA, 19 nt, Artificial Sequence
  Description of Artificial Sequence: Synthetic oligonucleotide
gcgggccccgagcucgcga

SEQ ID NO: 2023134 - RNA, 19 nt, Artificial Sequence
  Description of Artificial Sequence: Synthetic oligonucleotide
cggguagccucagcgaaaa

SEQ ID NO: 2023135 - RNA, 19 nt, Artificial Sequence
  Description of Artificial Sequence: Synthetic oligonucleotide
cgcgcccgaagugcccgcg

SEQ ID NO: 2023136 - RNA, 19 nt, Artificial Sequence
  Description of Artificial Sequence: Synthetic oligonucleotide
cgcggcaaaccgccgaccu

SEQ ID NO: 2023137 - RNA, 19 nt, Artificial Sequence
  Description of Artificial Sequence: Synthetic oligonucleotide
cccggccgaggcucagaca

SEQ ID NO: 2023138 - RNA, 19 nt, Artificial Sequence
  Description of Artificial Sequence: Synthetic oligonucleotide
gccgccgggcgccccgcuc

SEQ ID NO: 2023139 - RNA, 19 nt, Artificial Sequence
  Description of Artificial Sequence: Synthetic oligonucleotide
gcucuucgccgcacuugcu

SEQ ID NO: 2023140 - RNA, 19 nt, Artificial Sequence
  Description of Artificial Sequence: Synthetic oligonucleotide
gccgggcgccccgcucacc

SEQ ID NO: 2023141 - RNA, 19 nt, Artificial Sequence
  Description of Artificial Sequence: Synthetic oligonucleotide
ccucgcuucuuggcauagu

SEQ ID NO: 2023142 - RNA, 19 nt, Artificial Sequence
  Description of Artificial Sequence: Synthetic oligonucleotide
ccucagcgaaaaggauuuu

SEQ ID NO: 2023143 - RNA, 19 nt, Artificial Sequence
  Description of Artificial Sequence: Synthetic oligonucleotide
cgccgcacuugcugagguu

SEQ ID NO: 2023144 - RNA, 19 nt, Artificial Sequence
  Description of Artificial Sequence: Synthetic oligonucleotide
cggggagacuagggcccau

SEQ ID NO: 2023145 - RNA, 19 nt, Artificial Sequence
  Description of Artificial Sequence: Synthetic oligonucleotide
ccgccgccgccgccgccau

SEQ ID NO: 2023146 - RNA, 19 nt, Artificial Sequence
  Description of Artificial Sequence: Synthetic oligonucleotide
caugauauaaaauagcagc

SEQ ID NO: 2023147 - RNA, 19 nt, Artificial Sequence
  Description of Artificial Sequence: Synthetic oligonucleotide
aaacuuuaauuccuuaggc

SEQ ID NO: 2023148 - RNA, 19 nt, Artificial Sequence
  Description of Artificial Sequence: Synthetic oligonucleotide
uuuaggguuguuaaaaugg

SEQ ID NO: 2023149 - RNA, 19 nt, Artificial Sequence
  Description of Artificial Sequence: Synthetic oligonucleotide
ucuagauuuuaucagaucc

SEQ ID NO: 2023150 - RNA, 19 nt, Artificial Sequence
  Description of Artificial Sequence: Synthetic oligonucleotide
aauauuaagagaucuagau

SEQ ID NO: 2023151 - RNA, 19 nt, Artificial Sequence
  Description of Artificial Sequence: Synthetic oligonucleotide
aaugaauuguguuuuagca

SEQ ID NO: 2023152 - RNA, 19 nt, Artificial Sequence
  Description of Artificial Sequence: Synthetic oligonucleotide
aaaauauuaagagaucuag

SEQ ID NO: 2023153 - RNA, 19 nt, Artificial Sequence
  Description of Artificial Sequence: Synthetic oligonucleotide
aauuuauuaacccuuucca

SEQ ID NO: 2023154 - RNA, 19 nt, Artificial Sequence
  Description of Artificial Sequence: Synthetic oligonucleotide
aauucaauuugccucguuc

SEQ ID NO: 2023155 - RNA, 19 nt, Artificial Sequence
  Description of Artificial Sequence: Synthetic oligonucleotide
uauuaagagaucuagauuu

SEQ ID NO: 2023156 - RNA, 19 nt, Artificial Sequence
  Description of Artificial Sequence: Synthetic oligonucleotide
agauaaggcgcacacacgc

SEQ ID NO: 2023157 - RNA, 19 nt, Artificial Sequence
  Description of Artificial Sequence: Synthetic oligonucleotide
ucuaagaauuuauuaaccc

SEQ ID NO: 2023158 - RNA, 19 nt, Artificial Sequence
  Description of Artificial Sequence: Synthetic oligonucleotide
gaauuuauuaacccuuucc

SEQ ID NO: 2023159 - RNA, 19 nt, Artificial Sequence
  Description of Artificial Sequence: Synthetic oligonucleotide
aagagaucuagauuuuauc

SEQ ID NO: 2023160 - RNA, 19 nt, Artificial Sequence
  Description of Artificial Sequence: Synthetic oligonucleotide
ugguuuguaaacauguuca

SEQ ID NO: 2023161 - RNA, 19 nt, Artificial Sequence
  Description of Artificial Sequence: Synthetic oligonucleotide
aauaccagagauguuguuc

SEQ ID NO: 2023162 - RNA, 19 nt, Artificial Sequence
  Description of Artificial Sequence: Synthetic oligonucleotide
ugagauaaggcgcacacac

SEQ ID NO: 2023163 - RNA, 19 nt, Artificial Sequence
  Description of Artificial Sequence: Synthetic oligonucleotide
ucaugauauaaaauagcag

SEQ ID NO: 2023164 - RNA, 19 nt, Artificial Sequence
  Description of Artificial Sequence: Synthetic oligonucleotide
caaacuuuaauuccuuagg

SEQ ID NO: 2023165 - RNA, 19 nt, Artificial Sequence
  Description of Artificial Sequence: Synthetic oligonucleotide
aacuuuaauuccuuaggcu

SEQ ID NO: 2023166 - RNA, 19 nt, Artificial Sequence
  Description of Artificial Sequence: Synthetic oligonucleotide
agagaucuagauuuuauca

SEQ ID NO: 2023167 - RNA, 19 nt, Artificial Sequence
  Description of Artificial Sequence: Synthetic oligonucleotide
aacuagucagacugucugc

SEQ ID NO: 2023168 - RNA, 19 nt, Artificial Sequence
  Description of Artificial Sequence: Synthetic oligonucleotide
ugaauuguguuuuagcaaa

SEQ ID NO: 2023169 - RNA, 19 nt, Artificial Sequence
  Description of Artificial Sequence: Synthetic oligonucleotide
uguucugugaaccaccuuc

SEQ ID NO: 2023170 - RNA, 19 nt, Artificial Sequence
  Description of Artificial Sequence: Synthetic oligonucleotide
cucaauucaauuugccucg

SEQ ID NO: 2023171 - RNA, 19 nt, Artificial Sequence
  Description of Artificial Sequence: Synthetic oligonucleotide
aaaauagcagcuccuguga

SEQ ID NO: 2023172 - RNA, 19 nt, Artificial Sequence
  Description of Artificial Sequence: Synthetic oligonucleotide
uuacuuuuagguucuaaga

SEQ ID NO: 2023173 - RNA, 19 nt, Artificial Sequence
  Description of Artificial Sequence: Synthetic oligonucleotide
ugaacuuuaggguuguuaa

SEQ ID NO: 2023174 - RNA, 19 nt, Artificial Sequence
  Description of Artificial Sequence: Synthetic oligonucleotide
aaagcuucagccagucucc

SEQ ID NO: 2023175 - RNA, 19 nt, Artificial Sequence
  Description of Artificial Sequence: Synthetic oligonucleotide
agucaugauauaaaauagc

SEQ ID NO: 2023176 - RNA, 19 nt, Artificial Sequence
  Description of Artificial Sequence: Synthetic oligonucleotide
accccuaacuucuuuaagg

SEQ ID NO: 2023177 - RNA, 19 nt, Artificial Sequence
  Description of Artificial Sequence: Synthetic oligonucleotide
ucaaaauucuccaccagau

SEQ ID NO: 2023178 - RNA, 19 nt, Artificial Sequence
  Description of Artificial Sequence: Synthetic oligonucleotide
uuguuaaaauggaucacug

SEQ ID NO: 2023179 - RNA, 19 nt, Artificial Sequence
  Description of Artificial Sequence: Synthetic oligonucleotide
uuugggcaaagcuucagcc

SEQ ID NO: 2023180 - RNA, 19 nt, Artificial Sequence
  Description of Artificial Sequence: Synthetic oligonucleotide
uuaauuugcugcaaagaau

SEQ ID NO: 2023181 - RNA, 19 nt, Artificial Sequence
  Description of Artificial Sequence: Synthetic oligonucleotide
uucaugaucguuucuuuca

SEQ ID NO: 2023182 - RNA, 19 nt, Artificial Sequence
  Description of Artificial Sequence: Synthetic oligonucleotide
cagucaugauauaaaauag

SEQ ID NO: 2023183 - RNA, 19 nt, Artificial Sequence
  Description of Artificial Sequence: Synthetic oligonucleotide
aauggaucacuguuccuug

SEQ ID NO: 2023184 - RNA, 19 nt, Artificial Sequence
  Description of Artificial Sequence: Synthetic oligonucleotide
uauaaaauagcagcuccug

SEQ ID NO: 2023185 - RNA, 19 nt, Artificial Sequence
  Description of Artificial Sequence: Synthetic oligonucleotide
uuagguucuaagaauuuau

SEQ ID NO: 2023186 - RNA, 19 nt, Artificial Sequence
  Description of Artificial Sequence: Synthetic oligonucleotide
aacugaaaagagcugcagu

SEQ ID NO: 2023187 - RNA, 19 nt, Artificial Sequence
  Description of Artificial Sequence: Synthetic oligonucleotide
accgaugcgcacuugugcc

SEQ ID NO: 2023188 - RNA, 19 nt, Artificial Sequence
  Description of Artificial Sequence: Synthetic oligonucleotide
uugguuuguaaacauguuc

SEQ ID NO: 2023189 - RNA, 19 nt, Artificial Sequence
  Description of Artificial Sequence: Synthetic oligonucleotide
ucagaagucgccucaauuc

SEQ ID NO: 2023190 - RNA, 19 nt, Artificial Sequence
  Description of Artificial Sequence: Synthetic oligonucleotide
ucagauccauaacaaaaga

SEQ ID NO: 2023191 - RNA, 19 nt, Artificial Sequence
  Description of Artificial Sequence: Synthetic oligonucleotide
uguaaacauguucaccucu

SEQ ID NO: 2023192 - RNA, 19 nt, Artificial Sequence
  Description of Artificial Sequence: Synthetic oligonucleotide
uuugccucguucuuagaag

SEQ ID NO: 2023193 - RNA, 19 nt, Artificial Sequence
  Description of Artificial Sequence: Synthetic oligonucleotide
ugggcaaagcuucagccag

SEQ ID NO: 2023194 - RNA, 19 nt, Artificial Sequence
  Description of Artificial Sequence: Synthetic oligonucleotide
agaucuagauuuuaucaga

SEQ ID NO: 2023195 - RNA, 19 nt, Artificial Sequence
  Description of Artificial Sequence: Synthetic oligonucleotide
acuagucagacugucugcc

SEQ ID NO: 2023196 - RNA, 19 nt, Artificial Sequence
  Description of Artificial Sequence: Synthetic oligonucleotide
uguuccuugguuuguaaac

SEQ ID NO: 2023197 - RNA, 19 nt, Artificial Sequence
  Description of Artificial Sequence: Synthetic oligonucleotide
uuuaaggagaacugcaguu

SEQ ID NO: 2023198 - RNA, 19 nt, Artificial Sequence
  Description of Artificial Sequence: Synthetic oligonucleotide
agaauuuauuaacccuuuc

SEQ ID NO: 2023199 - RNA, 19 nt, Artificial Sequence
  Description of Artificial Sequence: Synthetic oligonucleotide
ugucggaguggaaaugggg

SEQ ID NO: 2023200 - RNA, 19 nt, Artificial Sequence
  Description of Artificial Sequence: Synthetic oligonucleotide
auaccagagauguuguuca

SEQ ID NO: 2023201 - RNA, 19 nt, Artificial Sequence
  Description of Artificial Sequence: Synthetic oligonucleotide
gagaaguggaggaagagac

SEQ ID NO: 2023202 - RNA, 19 nt, Artificial Sequence
  Description of Artificial Sequence: Synthetic oligonucleotide
agauuguuugggcaaagcu

SEQ ID NO: 2023203 - RNA, 19 nt, Artificial Sequence
  Description of Artificial Sequence: Synthetic oligonucleotide
aacuuuaggguuguuaaaa

SEQ ID NO: 2023204 - RNA, 19 nt, Artificial Sequence
  Description of Artificial Sequence: Synthetic oligonucleotide
cuaggguucgcgcucaggg

SEQ ID NO: 2023205 - RNA, 19 nt, Artificial Sequence
  Description of Artificial Sequence: Synthetic oligonucleotide
uuguucaccccuaacuucu

SEQ ID NO: 2023206 - RNA, 19 nt, Artificial Sequence
  Description of Artificial Sequence: Synthetic oligonucleotide
agcaguuccuuucccaccg

SEQ ID NO: 2023207 - RNA, 19 nt, Artificial Sequence
  Description of Artificial Sequence: Synthetic oligonucleotide
auguuguucaccccuaacu

SEQ ID NO: 2023208 - RNA, 19 nt, Artificial Sequence
  Description of Artificial Sequence: Synthetic oligonucleotide
uaagagaucuagauuuuau

SEQ ID NO: 2023209 - RNA, 19 nt, Artificial Sequence
  Description of Artificial Sequence: Synthetic oligonucleotide
cuuuaggguuguuaaaaug

SEQ ID NO: 2023210 - RNA, 19 nt, Artificial Sequence
  Description of Artificial Sequence: Synthetic oligonucleotide
cuuaauuugcugcaaagaa

SEQ ID NO: 2023211 - RNA, 19 nt, Artificial Sequence
  Description of Artificial Sequence: Synthetic oligonucleotide
aggguuguuaaaauggauc

SEQ ID NO: 2023212 - RNA, 19 nt, Artificial Sequence
  Description of Artificial Sequence: Synthetic oligonucleotide
agugucaccuucuucagaa

SEQ ID NO: 2023213 - RNA, 19 nt, Artificial Sequence
  Description of Artificial Sequence: Synthetic oligonucleotide
gaucguuucuuucaucuga

SEQ ID NO: 2023214 - RNA, 19 nt, Artificial Sequence
  Description of Artificial Sequence: Synthetic oligonucleotide
ugggaagcauuucugucag

SEQ ID NO: 2023215 - RNA, 19 nt, Artificial Sequence
  Description of Artificial Sequence: Synthetic oligonucleotide
uggccuguaauggugaaag

SEQ ID NO: 2023216 - RNA, 19 nt, Artificial Sequence
  Description of Artificial Sequence: Synthetic oligonucleotide
ugaaccaccuucuucuuuc

SEQ ID NO: 2023217 - RNA, 19 nt, Artificial Sequence
  Description of Artificial Sequence: Synthetic oligonucleotide
aaauggaucacuguuccuu

SEQ ID NO: 2023218 - RNA, 19 nt, Artificial Sequence
  Description of Artificial Sequence: Synthetic oligonucleotide
auauuaagagaucuagauu

SEQ ID NO: 2023219 - RNA, 19 nt, Artificial Sequence
  Description of Artificial Sequence: Synthetic oligonucleotide
aaacugaaaagagcugcag

SEQ ID NO: 2023220 - RNA, 19 nt, Artificial Sequence
  Description of Artificial Sequence: Synthetic oligonucleotide
aucagauccauaacaaaag

SEQ ID NO: 2023221 - RNA, 19 nt, Artificial Sequence
  Description of Artificial Sequence: Synthetic oligonucleotide
aaaagagcugcagugucca

SEQ ID NO: 2023222 - RNA, 19 nt, Artificial Sequence
  Description of Artificial Sequence: Synthetic oligonucleotide
auccacagauuguuugggc

SEQ ID NO: 2023223 - RNA, 19 nt, Artificial Sequence
  Description of Artificial Sequence: Synthetic oligonucleotide
ucagcguggccuguaaugg

SEQ ID NO: 2023224 - RNA, 19 nt, Artificial Sequence
  Description of Artificial Sequence: Synthetic oligonucleotide
uguuguucaccccuaacuu

SEQ ID NO: 2023225 - RNA, 19 nt, Artificial Sequence
  Description of Artificial Sequence: Synthetic oligonucleotide
uccacagauuguuugggca

SEQ ID NO: 2023226 - RNA, 19 nt, Artificial Sequence
  Description of Artificial Sequence: Synthetic oligonucleotide
gguucuaagaauuuauuaa

SEQ ID NO: 2023227 - RNA, 19 nt, Artificial Sequence
  Description of Artificial Sequence: Synthetic oligonucleotide
uauuaacccuuuccaaacu

SEQ ID NO: 2023228 - RNA, 19 nt, Artificial Sequence
  Description of Artificial Sequence: Synthetic oligonucleotide
uagucagacugucugcccc

SEQ ID NO: 2023229 - RNA, 19 nt, Artificial Sequence
  Description of Artificial Sequence: Synthetic oligonucleotide
augaauuguguuuuagcaa

SEQ ID NO: 2023230 - RNA, 19 nt, Artificial Sequence
  Description of Artificial Sequence: Synthetic oligonucleotide
caauuugccucguucuuag

SEQ ID NO: 2023231 - RNA, 19 nt, Artificial Sequence
  Description of Artificial Sequence: Synthetic oligonucleotide
cugcaaagaaugaauugug

SEQ ID NO: 2023232 - RNA, 19 nt, Artificial Sequence
  Description of Artificial Sequence: Synthetic oligonucleotide
cuugucggaguggaaaugg

SEQ ID NO: 2023233 - RNA, 19 nt, Artificial Sequence
  Description of Artificial Sequence: Synthetic oligonucleotide
cuuagaagccucaucaaaa

SEQ ID NO: 2023234 - RNA, 19 nt, Artificial Sequence
  Description of Artificial Sequence: Synthetic oligonucleotide
uguuugcugccagagacgc

SEQ ID NO: 2023235 - RNA, 19 nt, Artificial Sequence
  Description of Artificial Sequence: Synthetic oligonucleotide
agaaugaauuguguuuuag

SEQ ID NO: 2023236 - RNA, 19 nt, Artificial Sequence
  Description of Artificial Sequence: Synthetic oligonucleotide
aaaauggaucacuguuccu

SEQ ID NO: 2023237 - RNA, 19 nt, Artificial Sequence
  Description of Artificial Sequence: Synthetic oligonucleotide
uguggcuguucugugaacc

SEQ ID NO: 2023238 - RNA, 19 nt, Artificial Sequence
  Description of Artificial Sequence: Synthetic oligonucleotide
ccgagagucagccugagcg

SEQ ID NO: 2023239 - RNA, 19 nt, Artificial Sequence
  Description of Artificial Sequence: Synthetic oligonucleotide
uccuuaggcuucuucagcu

SEQ ID NO: 2023240 - RNA, 19 nt, Artificial Sequence
  Description of Artificial Sequence: Synthetic oligonucleotide
cuuucccauccacagauug

SEQ ID NO: 2023241 - RNA, 19 nt, Artificial Sequence
  Description of Artificial Sequence: Synthetic oligonucleotide
uugucggaguggaaauggg

SEQ ID NO: 2023242 - RNA, 19 nt, Artificial Sequence
  Description of Artificial Sequence: Synthetic oligonucleotide
agaccagcugagauaaggc

SEQ ID NO: 2023243 - RNA, 19 nt, Artificial Sequence
  Description of Artificial Sequence: Synthetic oligonucleotide
ucggguuccgccgagaagu

SEQ ID NO: 2023244 - RNA, 19 nt, Artificial Sequence
  Description of Artificial Sequence: Synthetic oligonucleotide
ucucgggcagaccagcuga

SEQ ID NO: 2023245 - RNA, 19 nt, Artificial Sequence
  Description of Artificial Sequence: Synthetic oligonucleotide
ggugcuuucccauccacag

SEQ ID NO: 2023246 - RNA, 19 nt, Artificial Sequence
  Description of Artificial Sequence: Synthetic oligonucleotide
auuugccucguucuuagaa

SEQ ID NO: 2023247 - RNA, 19 nt, Artificial Sequence
  Description of Artificial Sequence: Synthetic oligonucleotide
gcagucaugauauaaaaua

SEQ ID NO: 2023248 - RNA, 19 nt, Artificial Sequence
  Description of Artificial Sequence: Synthetic oligonucleotide
uccuugguuuguaaacaug

SEQ ID NO: 2023249 - RNA, 19 nt, Artificial Sequence
  Description of Artificial Sequence: Synthetic oligonucleotide
uggaaauggggccgcgcgg

SEQ ID NO: 2023250 - RNA, 19 nt, Artificial Sequence
  Description of Artificial Sequence: Synthetic oligonucleotide
cuaagaauuuauuaacccu

SEQ ID NO: 2023251 - RNA, 19 nt, Artificial Sequence
  Description of Artificial Sequence: Synthetic oligonucleotide
guggaaauggggccgcgcg

SEQ ID NO: 2023252 - RNA, 19 nt, Artificial Sequence
  Description of Artificial Sequence: Synthetic oligonucleotide
ucugcgagcaguuccuuuc

SEQ ID NO: 2023253 - RNA, 19 nt, Artificial Sequence
  Description of Artificial Sequence: Synthetic oligonucleotide
cagaccagcugagauaagg

SEQ ID NO: 2023254 - RNA, 19 nt, Artificial Sequence
  Description of Artificial Sequence: Synthetic oligonucleotide
uagcaaguggugcuuuccc

SEQ ID NO: 2023255 - RNA, 19 nt, Artificial Sequence
  Description of Artificial Sequence: Synthetic oligonucleotide
uugggcaaagcuucagcca

SEQ ID NO: 2023256 - RNA, 19 nt, Artificial Sequence
  Description of Artificial Sequence: Synthetic oligonucleotide
gauaaggcgcacacacgcg

SEQ ID NO: 2023257 - RNA, 19 nt, Artificial Sequence
  Description of Artificial Sequence: Synthetic oligonucleotide
aucgcuuuccucuccucag

SEQ ID NO: 2023258 - RNA, 19 nt, Artificial Sequence
  Description of Artificial Sequence: Synthetic oligonucleotide
uuuaggaugcugggaagca

SEQ ID NO: 2023259 - RNA, 19 nt, Artificial Sequence
  Description of Artificial Sequence: Synthetic oligonucleotide
uaaggagaacugcaguuuu

SEQ ID NO: 2023260 - RNA, 19 nt, Artificial Sequence
  Description of Artificial Sequence: Synthetic oligonucleotide
ccucaauucaauuugccuc

SEQ ID NO: 2023261 - RNA, 19 nt, Artificial Sequence
  Description of Artificial Sequence: Synthetic oligonucleotide
ucaugaucguuucuuucau

SEQ ID NO: 2023262 - RNA, 19 nt, Artificial Sequence
  Description of Artificial Sequence: Synthetic oligonucleotide
ggguuguuaaaauggauca

SEQ ID NO: 2023263 - RNA, 19 nt, Artificial Sequence
  Description of Artificial Sequence: Synthetic oligonucleotide
agucuccuuaaacuaguca

SEQ ID NO: 2023264 - RNA, 19 nt, Artificial Sequence
  Description of Artificial Sequence: Synthetic oligonucleotide
uguaauggugaaaguguuu

SEQ ID NO: 2023265 - RNA, 19 nt, Artificial Sequence
  Description of Artificial Sequence: Synthetic oligonucleotide
cagacugucugccccaagc

SEQ ID NO: 2023266 - RNA, 19 nt, Artificial Sequence
  Description of Artificial Sequence: Synthetic oligonucleotide
ugaucguuucuuucaucug

SEQ ID NO: 2023267 - RNA, 19 nt, Artificial Sequence
  Description of Artificial Sequence: Synthetic oligonucleotide
auauaaaauagcagcuccu

SEQ ID NO: 2023268 - RNA, 19 nt, Artificial Sequence
  Description of Artificial Sequence: Synthetic oligonucleotide
ucguuucuuucaucugagg

SEQ ID NO: 2023269 - RNA, 19 nt, Artificial Sequence
  Description of Artificial Sequence: Synthetic oligonucleotide
uagguucuaagaauuuauu

SEQ ID NO: 2023270 - RNA, 19 nt, Artificial Sequence
  Description of Artificial Sequence: Synthetic oligonucleotide
accuucuucagaagucgcc

SEQ ID NO: 2023271 - RNA, 19 nt, Artificial Sequence
  Description of Artificial Sequence: Synthetic oligonucleotide
auuaacccuuuccaaacuu

SEQ ID NO: 2023272 - RNA, 19 nt, Artificial Sequence
  Description of Artificial Sequence: Synthetic oligonucleotide
cucagcguggccuguaaug

SEQ ID NO: 2023273 - RNA, 19 nt, Artificial Sequence
  Description of Artificial Sequence: Synthetic oligonucleotide
uaggguucgcgcucagggg

SEQ ID NO: 2023274 - RNA, 19 nt, Artificial Sequence
  Description of Artificial Sequence: Synthetic oligonucleotide
uccugguucaugaucguuu

SEQ ID NO: 2023275 - RNA, 19 nt, Artificial Sequence
  Description of Artificial Sequence: Synthetic oligonucleotide
gagagucagccugagcggg

SEQ ID NO: 2023276 - RNA, 19 nt, Artificial Sequence
  Description of Artificial Sequence: Synthetic oligonucleotide
gagauaaggcgcacacacg

SEQ ID NO: 2023277 - RNA, 19 nt, Artificial Sequence
  Description of Artificial Sequence: Synthetic oligonucleotide
guuguucaccccuaacuuc

SEQ ID NO: 2023278 - RNA, 19 nt, Artificial Sequence
  Description of Artificial Sequence: Synthetic oligonucleotide
uugcugcaaagaaugaauu

SEQ ID NO: 2023279 - RNA, 19 nt, Artificial Sequence
  Description of Artificial Sequence: Synthetic oligonucleotide
uccgccgagaaguggagga

SEQ ID NO: 2023280 - RNA, 19 nt, Artificial Sequence
  Description of Artificial Sequence: Synthetic oligonucleotide
uccuuucccaccgaugcgc

SEQ ID NO: 2023281 - RNA, 19 nt, Artificial Sequence
  Description of Artificial Sequence: Synthetic oligonucleotide
uccuuaaacuagucagacu

SEQ ID NO: 2023282 - RNA, 19 nt, Artificial Sequence
  Description of Artificial Sequence: Synthetic oligonucleotide
gucggaguggaaauggggc

SEQ ID NO: 2023283 - RNA, 19 nt, Artificial Sequence
  Description of Artificial Sequence: Synthetic oligonucleotide
ucgccucaauucaauuugc

SEQ ID NO: 2023284 - RNA, 19 nt, Artificial Sequence
  Description of Artificial Sequence: Synthetic oligonucleotide
gagacgccugaacuuuagg

SEQ ID NO: 2023285 - RNA, 19 nt, Artificial Sequence
  Description of Artificial Sequence: Synthetic oligonucleotide
uggaucacuguuccuuggu

SEQ ID NO: 2023286 - RNA, 19 nt, Artificial Sequence
  Description of Artificial Sequence: Synthetic oligonucleotide
caaaauucuccaccagauc

SEQ ID NO: 2023287 - RNA, 19 nt, Artificial Sequence
  Description of Artificial Sequence: Synthetic oligonucleotide
uccagccgggaacugcccg

SEQ ID NO: 2023288 - RNA, 19 nt, Artificial Sequence
  Description of Artificial Sequence: Synthetic oligonucleotide
caagugucaccuucuucag

SEQ ID NO: 2023289 - RNA, 19 nt, Artificial Sequence
  Description of Artificial Sequence: Synthetic oligonucleotide
uuuuacuuuuagguucuaa

SEQ ID NO: 2023290 - RNA, 19 nt, Artificial Sequence
  Description of Artificial Sequence: Synthetic oligonucleotide
agaucugggaccucaucau

SEQ ID NO: 2023291 - RNA, 19 nt, Artificial Sequence
  Description of Artificial Sequence: Synthetic oligonucleotide
caucauccucuccaguagc

SEQ ID NO: 2023292 - RNA, 19 nt, Artificial Sequence
  Description of Artificial Sequence: Synthetic oligonucleotide
cacgccggcguccacagcc

SEQ ID NO: 2023293 - RNA, 19 nt, Artificial Sequence
  Description of Artificial Sequence: Synthetic oligonucleotide
uuaagagaucuagauuuua

SEQ ID NO: 2023294 - RNA, 19 nt, Artificial Sequence
  Description of Artificial Sequence: Synthetic oligonucleotide
cuagucagacugucugccc

SEQ ID NO: 2023295 - RNA, 19 nt, Artificial Sequence
  Description of Artificial Sequence: Synthetic oligonucleotide
gaaaguguuugcugccaga

SEQ ID NO: 2023296 - RNA, 19 nt, Artificial Sequence
  Description of Artificial Sequence: Synthetic oligonucleotide
ucucgcuccagccgggaac

SEQ ID NO: 2023297 - RNA, 19 nt, Artificial Sequence
  Description of Artificial Sequence: Synthetic oligonucleotide
cagauccauaacaaaagaa

SEQ ID NO: 2023298 - RNA, 19 nt, Artificial Sequence
  Description of Artificial Sequence: Synthetic oligonucleotide
caaagaaugaauuguguuu

SEQ ID NO: 2023299 - RNA, 19 nt, Artificial Sequence
  Description of Artificial Sequence: Synthetic oligonucleotide
ugccucguucuuagaagcc

SEQ ID NO: 2023300 - RNA, 19 nt, Artificial Sequence
  Description of Artificial Sequence: Synthetic oligonucleotide
gacggcgucgccucgcccc

SEQ ID NO: 2023301 - RNA, 19 nt, Artificial Sequence
  Description of Artificial Sequence: Synthetic oligonucleotide
ggugaaaguguuugcugcc

SEQ ID NO: 2023302 - RNA, 19 nt, Artificial Sequence
  Description of Artificial Sequence: Synthetic oligonucleotide
ugcaagugucaccuucuuc

SEQ ID NO: 2023303 - RNA, 19 nt, Artificial Sequence
  Description of Artificial Sequence: Synthetic oligonucleotide
agacugucugccccaagcu

SEQ ID NO: 2023304 - RNA, 19 nt, Artificial Sequence
  Description of Artificial Sequence: Synthetic oligonucleotide
gacgccugaacuuuagggu

SEQ ID NO: 2023305 - RNA, 19 nt, Artificial Sequence
  Description of Artificial Sequence: Synthetic oligonucleotide
aucguuucuuucaucugag

SEQ ID NO: 2023306 - RNA, 19 nt, Artificial Sequence
  Description of Artificial Sequence: Synthetic oligonucleotide
aggguucgcgcucaggggu

SEQ ID NO: 2023307 - RNA, 19 nt, Artificial Sequence
  Description of Artificial Sequence: Synthetic oligonucleotide
gagcaguuccuuucccacc

SEQ ID NO: 2023308 - RNA, 19 nt, Artificial Sequence
  Description of Artificial Sequence: Synthetic oligonucleotide
gcugguuuaggaugcuggg

SEQ ID NO: 2023309 - RNA, 19 nt, Artificial Sequence
  Description of Artificial Sequence: Synthetic oligonucleotide
agcaaguggugcuuuccca

SEQ ID NO: 2023310 - RNA, 19 nt, Artificial Sequence
  Description of Artificial Sequence: Synthetic oligonucleotide
uuccaaacuuuaauuccuu

SEQ ID NO: 2023311 - RNA, 19 nt, Artificial Sequence
  Description of Artificial Sequence: Synthetic oligonucleotide
aagagacggcgucgccucg

SEQ ID NO: 2023312 - RNA, 19 nt, Artificial Sequence
  Description of Artificial Sequence: Synthetic oligonucleotide
ugcuuugucucagcguggc

SEQ ID NO: 2023313 - RNA, 19 nt, Artificial Sequence
  Description of Artificial Sequence: Synthetic oligonucleotide
uaccuugucggaguggaaa

SEQ ID NO: 2023314 - RNA, 19 nt, Artificial Sequence
  Description of Artificial Sequence: Synthetic oligonucleotide
aauuugccucguucuuaga

SEQ ID NO: 2023315 - RNA, 19 nt, Artificial Sequence
  Description of Artificial Sequence: Synthetic oligonucleotide
gaacuuuaggguuguuaaa

SEQ ID NO: 2023316 - RNA, 19 nt, Artificial Sequence
  Description of Artificial Sequence: Synthetic oligonucleotide
gucagccugagcgggagcg

SEQ ID NO: 2023317 - RNA, 19 nt, Artificial Sequence
  Description of Artificial Sequence: Synthetic oligonucleotide
ugguucaugaucguuucuu

SEQ ID NO: 2023318 - RNA, 19 nt, Artificial Sequence
  Description of Artificial Sequence: Synthetic oligonucleotide
caccgaugcgcacuugugc

SEQ ID NO: 2023319 - RNA, 19 nt, Artificial Sequence
  Description of Artificial Sequence: Synthetic oligonucleotide
uuucccaccgaugcgcacu

SEQ ID NO: 2023320 - RNA, 19 nt, Artificial Sequence
  Description of Artificial Sequence: Synthetic oligonucleotide
ugagcgggagcgccugucc

SEQ ID NO: 2023321 - RNA, 19 nt, Artificial Sequence
  Description of Artificial Sequence: Synthetic oligonucleotide
cagaagucgccucaauuca

SEQ ID NO: 2023322 - RNA, 19 nt, Artificial Sequence
  Description of Artificial Sequence: Synthetic oligonucleotide
ucgcuuuccucuccucagc

SEQ ID NO: 2023323 - RNA, 19 nt, Artificial Sequence
  Description of Artificial Sequence: Synthetic oligonucleotide
gaaauggggccgcgcgggg

SEQ ID NO: 2023324 - RNA, 19 nt, Artificial Sequence
  Description of Artificial Sequence: Synthetic oligonucleotide
gcugagauaaggcgcacac

SEQ ID NO: 2023325 - RNA, 19 nt, Artificial Sequence
  Description of Artificial Sequence: Synthetic oligonucleotide
gauuguuugggcaaagcuu

SEQ ID NO: 2023326 - RNA, 19 nt, Artificial Sequence
  Description of Artificial Sequence: Synthetic oligonucleotide
acgccugaacuuuaggguu

SEQ ID NO: 2023327 - RNA, 19 nt, Artificial Sequence
  Description of Artificial Sequence: Synthetic oligonucleotide
guagcaaguggugcuuucc

SEQ ID NO: 2023328 - RNA, 19 nt, Artificial Sequence
  Description of Artificial Sequence: Synthetic oligonucleotide
aagucgccucaauucaauu

SEQ ID NO: 2023329 - RNA, 19 nt, Artificial Sequence
  Description of Artificial Sequence: Synthetic oligonucleotide
guguuugcugccagagacg

SEQ ID NO: 2023330 - RNA, 19 nt, Artificial Sequence
  Description of Artificial Sequence: Synthetic oligonucleotide
ugcgagcaguuccuuuccc

SEQ ID NO: 2023331 - RNA, 19 nt, Artificial Sequence
  Description of Artificial Sequence: Synthetic oligonucleotide
uuguaccuugucggagugg

SEQ ID NO: 2023332 - RNA, 19 nt, Artificial Sequence
  Description of Artificial Sequence: Synthetic oligonucleotide
cuccugugacuucugcaag

SEQ ID NO: 2023333 - RNA, 19 nt, Artificial Sequence
  Description of Artificial Sequence: Synthetic oligonucleotide
accuugucggaguggaaau

SEQ ID NO: 2023334 - RNA, 19 nt, Artificial Sequence
  Description of Artificial Sequence: Synthetic oligonucleotide
cagauuguuugggcaaagc

SEQ ID NO: 2023335 - RNA, 19 nt, Artificial Sequence
  Description of Artificial Sequence: Synthetic oligonucleotide
uugugccugcagcuuggcc

SEQ ID NO: 2023336 - RNA, 19 nt, Artificial Sequence
  Description of Artificial Sequence: Synthetic oligonucleotide
acagauuguuugggcaaag

SEQ ID NO: 2023337 - RNA, 19 nt, Artificial Sequence
  Description of Artificial Sequence: Synthetic oligonucleotide
ggaaauggggccgcgcggg

SEQ ID NO: 2023338 - RNA, 19 nt, Artificial Sequence
  Description of Artificial Sequence: Synthetic oligonucleotide
agagacggcgucgccucgc

SEQ ID NO: 2023339 - RNA, 19 nt, Artificial Sequence
  Description of Artificial Sequence: Synthetic oligonucleotide
auuaagagaucuagauuuu

SEQ ID NO: 2023340 - RNA, 19 nt, Artificial Sequence
  Description of Artificial Sequence: Synthetic oligonucleotide
ugacuucugcaagugucac

SEQ ID NO: 2023341 - RNA, 19 nt, Artificial Sequence
  Description of Artificial Sequence: Synthetic oligonucleotide
caaguggugcuuucccauc

SEQ ID NO: 2023342 - RNA, 19 nt, Artificial Sequence
  Description of Artificial Sequence: Synthetic oligonucleotide
acuugugccugcagcuugg

SEQ ID NO: 2023343 - RNA, 19 nt, Artificial Sequence
  Description of Artificial Sequence: Synthetic oligonucleotide
aacccuuuccaaacuuuaa

SEQ ID NO: 2023344 - RNA, 19 nt, Artificial Sequence
  Description of Artificial Sequence: Synthetic oligonucleotide
cucuccaguagcaaguggu

SEQ ID NO: 2023345 - RNA, 19 nt, Artificial Sequence
  Description of Artificial Sequence: Synthetic oligonucleotide
uuuccugguucaugaucgu

SEQ ID NO: 2023346 - RNA, 19 nt, Artificial Sequence
  Description of Artificial Sequence: Synthetic oligonucleotide
caccccuaacuucuuuaag

SEQ ID NO: 2023347 - RNA, 19 nt, Artificial Sequence
  Description of Artificial Sequence: Synthetic oligonucleotide
aguggugcuuucccaucca

SEQ ID NO: 2023348 - RNA, 19 nt, Artificial Sequence
  Description of Artificial Sequence: Synthetic oligonucleotide
uguccucggguuccgccga

SEQ ID NO: 2023349 - RNA, 19 nt, Artificial Sequence
  Description of Artificial Sequence: Synthetic oligonucleotide
ucaauucaauuugccucgu

SEQ ID NO: 2023350 - RNA, 19 nt, Artificial Sequence
  Description of Artificial Sequence: Synthetic oligonucleotide
uccucuccaguagcaagug

SEQ ID NO: 2023351 - RNA, 19 nt, Artificial Sequence
  Description of Artificial Sequence: Synthetic oligonucleotide
cugcgagcaguuccuuucc

SEQ ID NO: 2023352 - RNA, 19 nt, Artificial Sequence
  Description of Artificial Sequence: Synthetic oligonucleotide
ccugucucgcuccagccgg

SEQ ID NO: 2023353 - RNA, 19 nt, Artificial Sequence
  Description of Artificial Sequence: Synthetic oligonucleotide
agauguuguucaccccuaa

SEQ ID NO: 2023354 - RNA, 19 nt, Artificial Sequence
  Description of Artificial Sequence: Synthetic oligonucleotide
ugcgcacuugugccugcag

SEQ ID NO: 2023355 - RNA, 19 nt, Artificial Sequence
  Description of Artificial Sequence: Synthetic oligonucleotide
gguuguuaaaauggaucac

SEQ ID NO: 2023356 - RNA, 19 nt, Artificial Sequence
  Description of Artificial Sequence: Synthetic oligonucleotide
ugccccaagcugguuuagg

SEQ ID NO: 2023357 - RNA, 19 nt, Artificial Sequence
  Description of Artificial Sequence: Synthetic oligonucleotide
gugacuucugcaaguguca

SEQ ID NO: 2023358 - RNA, 19 nt, Artificial Sequence
  Description of Artificial Sequence: Synthetic oligonucleotide
agagacgccugaacuuuag

SEQ ID NO: 2023359 - RNA, 19 nt, Artificial Sequence
  Description of Artificial Sequence: Synthetic oligonucleotide
gaugcgcacuugugccugc

SEQ ID NO: 2023360 - RNA, 19 nt, Artificial Sequence
  Description of Artificial Sequence: Synthetic oligonucleotide
acuaggguucgcgcucagg

SEQ ID NO: 2023361 - RNA, 19 nt, Artificial Sequence
  Description of Artificial Sequence: Synthetic oligonucleotide
caucgcuuuccucuccuca

SEQ ID NO: 2023362 - RNA, 19 nt, Artificial Sequence
  Description of Artificial Sequence: Synthetic oligonucleotide
agcguggccuguaauggug

SEQ ID NO: 2023363 - RNA, 19 nt, Artificial Sequence
  Description of Artificial Sequence: Synthetic oligonucleotide
cccuaacuucuuuaaggag

SEQ ID NO: 2023364 - RNA, 19 nt, Artificial Sequence
  Description of Artificial Sequence: Synthetic oligonucleotide
uucgcgcucaggggucucg

SEQ ID NO: 2023365 - RNA, 19 nt, Artificial Sequence
  Description of Artificial Sequence: Synthetic oligonucleotide
ucgcaucgcuuuccucucc

SEQ ID NO: 2023366 - RNA, 19 nt, Artificial Sequence
  Description of Artificial Sequence: Synthetic oligonucleotide
uguccgucgcaucgcuuuc

SEQ ID NO: 2023367 - RNA, 19 nt, Artificial Sequence
  Description of Artificial Sequence: Synthetic oligonucleotide
guggcuguucugugaacca

SEQ ID NO: 2023368 - RNA, 19 nt, Artificial Sequence
  Description of Artificial Sequence: Synthetic oligonucleotide
ucucagcguggccuguaau

SEQ ID NO: 2023369 - RNA, 19 nt, Artificial Sequence
  Description of Artificial Sequence: Synthetic oligonucleotide
cucguucuuagaagccuca

SEQ ID NO: 2023370 - RNA, 19 nt, Artificial Sequence
  Description of Artificial Sequence: Synthetic oligonucleotide
gcugggaagcauuucuguc

SEQ ID NO: 2023371 - RNA, 19 nt, Artificial Sequence
  Description of Artificial Sequence: Synthetic oligonucleotide
uucagccagucuccuuaaa

SEQ ID NO: 2023372 - RNA, 19 nt, Artificial Sequence
  Description of Artificial Sequence: Synthetic oligonucleotide
cugaacuuuaggguuguua

SEQ ID NO: 2023373 - RNA, 19 nt, Artificial Sequence
  Description of Artificial Sequence: Synthetic oligonucleotide
ugucccucccugucucgcu

SEQ ID NO: 2023374 - RNA, 19 nt, Artificial Sequence
  Description of Artificial Sequence: Synthetic oligonucleotide
cucgggcagaccagcugag

SEQ ID NO: 2023375 - RNA, 19 nt, Artificial Sequence
  Description of Artificial Sequence: Synthetic oligonucleotide
agauuuuaucagauccaua

SEQ ID NO: 2023376 - RNA, 19 nt, Artificial Sequence
  Description of Artificial Sequence: Synthetic oligonucleotide
cucggguuccgccgagaag

SEQ ID NO: 2023377 - RNA, 19 nt, Artificial Sequence
  Description of Artificial Sequence: Synthetic oligonucleotide
gucgcaucgcuuuccucuc

SEQ ID NO: 2023378 - RNA, 19 nt, Artificial Sequence
  Description of Artificial Sequence: Synthetic oligonucleotide
gcgccuguccgucgcaucg

SEQ ID NO: 2023379 - RNA, 19 nt, Artificial Sequence
  Description of Artificial Sequence: Synthetic oligonucleotide
ccugguucaugaucguuuc

SEQ ID NO: 2023380 - RNA, 19 nt, Artificial Sequence
  Description of Artificial Sequence: Synthetic oligonucleotide
agaagucgccucaauucaa

SEQ ID NO: 2023381 - RNA, 19 nt, Artificial Sequence
  Description of Artificial Sequence: Synthetic oligonucleotide
gaguggaaauggggccgcg

SEQ ID NO: 2023382 - RNA, 19 nt, Artificial Sequence
  Description of Artificial Sequence: Synthetic oligonucleotide
agccgggaacugcccgccc

SEQ ID NO: 2023383 - RNA, 19 nt, Artificial Sequence
  Description of Artificial Sequence: Synthetic oligonucleotide
agcgggagcgccuguccgu

SEQ ID NO: 2023384 - RNA, 19 nt, Artificial Sequence
  Description of Artificial Sequence: Synthetic oligonucleotide
cuuucccaccgaugcgcac

SEQ ID NO: 2023385 - RNA, 19 nt, Artificial Sequence
  Description of Artificial Sequence: Synthetic oligonucleotide
ucguucuuagaagccucau

SEQ ID NO: 2023386 - RNA, 19 nt, Artificial Sequence
  Description of Artificial Sequence: Synthetic oligonucleotide
cugguuuaggaugcuggga

SEQ ID NO: 2023387 - RNA, 19 nt, Artificial Sequence
  Description of Artificial Sequence: Synthetic oligonucleotide
ccccuaacuucuuuaagga

SEQ ID NO: 2023388 - RNA, 19 nt, Artificial Sequence
  Description of Artificial Sequence: Synthetic oligonucleotide
cgagagucagccugagcgg

SEQ ID NO: 2023389 - RNA, 19 nt, Artificial Sequence
  Description of Artificial Sequence: Synthetic oligonucleotide
gacuaggguucgcgcucag

SEQ ID NO: 2023390 - RNA, 19 nt, Artificial Sequence
  Description of Artificial Sequence: Synthetic oligonucleotide
cuguaauggugaaaguguu

SEQ ID NO: 2023391 - RNA, 19 nt, Artificial Sequence
  Description of Artificial Sequence: Synthetic oligonucleotide
ucgcgcucaggggucucgg

SEQ ID NO: 2023392 - RNA, 19 nt, Artificial Sequence
  Description of Artificial Sequence: Synthetic oligonucleotide
gggacuaggguucgcgcuc

SEQ ID NO: 2023393 - RNA, 19 nt, Artificial Sequence
  Description of Artificial Sequence: Synthetic oligonucleotide
guuccgccgagaaguggag

SEQ ID NO: 2023394 - RNA, 19 nt, Artificial Sequence
  Description of Artificial Sequence: Synthetic oligonucleotide
cagccugagcgggagcgcc

SEQ ID NO: 2023395 - RNA, 19 nt, Artificial Sequence
  Description of Artificial Sequence: Synthetic oligonucleotide
gagauguuguucaccccua

SEQ ID NO: 2023396 - RNA, 19 nt, Artificial Sequence
  Description of Artificial Sequence: Synthetic oligonucleotide
gugcuuucccauccacaga

SEQ ID NO: 2023397 - RNA, 19 nt, Artificial Sequence
  Description of Artificial Sequence: Synthetic oligonucleotide
guucugugaaccaccuucu

SEQ ID NO: 2023398 - RNA, 19 nt, Artificial Sequence
  Description of Artificial Sequence: Synthetic oligonucleotide
gccucaauucaauuugccu

SEQ ID NO: 2023399 - RNA, 19 nt, Artificial Sequence
  Description of Artificial Sequence: Synthetic oligonucleotide
cuccagccgggaacugccc

SEQ ID NO: 2023400 - RNA, 19 nt, Artificial Sequence
  Description of Artificial Sequence: Synthetic oligonucleotide
gaagucgccucaauucaau

SEQ ID NO: 2023401 - RNA, 19 nt, Artificial Sequence
  Description of Artificial Sequence: Synthetic oligonucleotide
cugagauaaggcgcacaca

SEQ ID NO: 2023402 - RNA, 19 nt, Artificial Sequence
  Description of Artificial Sequence: Synthetic oligonucleotide
ucccacgccggcguccaca

SEQ ID NO: 2023403 - RNA, 19 nt, Artificial Sequence
  Description of Artificial Sequence: Synthetic oligonucleotide
gaaccaccuucuucuuucu

SEQ ID NO: 2023404 - RNA, 19 nt, Artificial Sequence
  Description of Artificial Sequence: Synthetic oligonucleotide
guuugcugccagagacgcc

SEQ ID NO: 2023405 - RNA, 19 nt, Artificial Sequence
  Description of Artificial Sequence: Synthetic oligonucleotide
ggaguggaaauggggccgc

SEQ ID NO: 2023406 - RNA, 19 nt, Artificial Sequence
  Description of Artificial Sequence: Synthetic oligonucleotide
ucgggcagaccagcugaga

SEQ ID NO: 2023407 - RNA, 19 nt, Artificial Sequence
  Description of Artificial Sequence: Synthetic oligonucleotide
gccccaagcugguuuagga

SEQ ID NO: 2023408 - RNA, 19 nt, Artificial Sequence
  Description of Artificial Sequence: Synthetic oligonucleotide
cuucagccagucuccuuaa

SEQ ID NO: 2023409 - RNA, 19 nt, Artificial Sequence
  Description of Artificial Sequence: Synthetic oligonucleotide
gcgagcaguuccuuuccca

SEQ ID NO: 2023410 - RNA, 19 nt, Artificial Sequence
  Description of Artificial Sequence: Synthetic oligonucleotide
cguucuuagaagccucauc

SEQ ID NO: 2023411 - RNA, 19 nt, Artificial Sequence
  Description of Artificial Sequence: Synthetic oligonucleotide
cgccucaauucaauuugcc

SEQ ID NO: 2023412 - RNA, 19 nt, Artificial Sequence
  Description of Artificial Sequence: Synthetic oligonucleotide
guccgucgcaucgcuuucc

SEQ ID NO: 2023413 - RNA, 19 nt, Artificial Sequence
  Description of Artificial Sequence: Synthetic oligonucleotide
ccacagauuguuugggcaa

SEQ ID NO: 2023414 - RNA, 19 nt, Artificial Sequence
  Description of Artificial Sequence: Synthetic oligonucleotide
uuucugcgagcaguuccuu

SEQ ID NO: 2023415 - RNA, 19 nt, Artificial Sequence
  Description of Artificial Sequence: Synthetic oligonucleotide
ccagccgggaacugcccgc

SEQ ID NO: 2023416 - RNA, 19 nt, Artificial Sequence
  Description of Artificial Sequence: Synthetic oligonucleotide
gcuuugucucagcguggcc

SEQ ID NO: 2023417 - RNA, 19 nt, Artificial Sequence
  Description of Artificial Sequence: Synthetic oligonucleotide
cggaguggaaauggggccg

SEQ ID NO: 2023418 - RNA, 19 nt, Artificial Sequence
  Description of Artificial Sequence: Synthetic oligonucleotide
uugucucagcguggccugu

SEQ ID NO: 2023419 - RNA, 19 nt, Artificial Sequence
  Description of Artificial Sequence: Synthetic oligonucleotide
gggagcgccuguccgucgc

SEQ ID NO: 2023420 - RNA, 19 nt, Artificial Sequence
  Description of Artificial Sequence: Synthetic oligonucleotide
ccaccgaugcgcacuugug

SEQ ID NO: 2023421 - RNA, 19 nt, Artificial Sequence
  Description of Artificial Sequence: Synthetic oligonucleotide
ccgagaaguggaggaagag

SEQ ID NO: 2023422 - RNA, 19 nt, Artificial Sequence
  Description of Artificial Sequence: Synthetic oligonucleotide
gcucccguccuccucccac

SEQ ID NO: 2023423 - RNA, 19 nt, Artificial Sequence
  Description of Artificial Sequence: Synthetic oligonucleotide
gucucagcguggccuguaa

SEQ ID NO: 2023424 - RNA, 19 nt, Artificial Sequence
  Description of Artificial Sequence: Synthetic oligonucleotide
cugagcgggagcgccuguc

SEQ ID NO: 2023425 - RNA, 19 nt, Artificial Sequence
  Description of Artificial Sequence: Synthetic oligonucleotide
cuguccgucgcaucgcuuu

SEQ ID NO: 2023426 - RNA, 19 nt, Artificial Sequence
  Description of Artificial Sequence: Synthetic oligonucleotide
gccgggaacugcccgcccc

SEQ ID NO: 2023427 - RNA, 19 nt, Artificial Sequence
  Description of Artificial Sequence: Synthetic oligonucleotide
ggguuccgccgagaagugg

SEQ ID NO: 2023428 - RNA, 19 nt, Artificial Sequence
  Description of Artificial Sequence: Synthetic oligonucleotide
ggaagagacggcgucgccu

SEQ ID NO: 2023429 - RNA, 19 nt, Artificial Sequence
  Description of Artificial Sequence: Synthetic oligonucleotide
ccuugucggaguggaaaug

SEQ ID NO: 2023430 - RNA, 19 nt, Artificial Sequence
  Description of Artificial Sequence: Synthetic oligonucleotide
guccucggguuccgccgag

SEQ ID NO: 2023431 - RNA, 19 nt, Artificial Sequence
  Description of Artificial Sequence: Synthetic oligonucleotide
cgccugaacuuuaggguug

SEQ ID NO: 2023432 - RNA, 19 nt, Artificial Sequence
  Description of Artificial Sequence: Synthetic oligonucleotide
gggcagaccagcugagaua

SEQ ID NO: 2023433 - RNA, 19 nt, Artificial Sequence
  Description of Artificial Sequence: Synthetic oligonucleotide
cagagacgccugaacuuua

SEQ ID NO: 2023434 - RNA, 19 nt, Artificial Sequence
  Description of Artificial Sequence: Synthetic oligonucleotide
uccucggguuccgccgaga

SEQ ID NO: 2023435 - RNA, 19 nt, Artificial Sequence
  Description of Artificial Sequence: Synthetic oligonucleotide
gggucucgggcagaccagc

SEQ ID NO: 2023436 - RNA, 19 nt, Artificial Sequence
  Description of Artificial Sequence: Synthetic oligonucleotide
guggccuguaauggugaaa

SEQ ID NO: 2023437 - RNA, 19 nt, Artificial Sequence
  Description of Artificial Sequence: Synthetic oligonucleotide
cagcugagauaaggcgcac

SEQ ID NO: 2023438 - RNA, 19 nt, Artificial Sequence
  Description of Artificial Sequence: Synthetic oligonucleotide
caucugcuguggcuguucu

SEQ ID NO: 2023439 - RNA, 19 nt, Artificial Sequence
  Description of Artificial Sequence: Synthetic oligonucleotide
cugccccaagcugguuuag

SEQ ID NO: 2023440 - RNA, 19 nt, Artificial Sequence
  Description of Artificial Sequence: Synthetic oligonucleotide
augcgcacuugugccugca

SEQ ID NO: 2023441 - RNA, 19 nt, Artificial Sequence
  Description of Artificial Sequence: Synthetic oligonucleotide
caauaccagagauguuguu

SEQ ID NO: 2023442 - RNA, 19 nt, Artificial Sequence
  Description of Artificial Sequence: Synthetic oligonucleotide
ccagucuccuuaaacuagu

SEQ ID NO: 2023443 - RNA, 19 nt, Artificial Sequence
  Description of Artificial Sequence: Synthetic oligonucleotide
cccacgccggcguccacag

SEQ ID NO: 2023444 - RNA, 19 nt, Artificial Sequence
  Description of Artificial Sequence: Synthetic oligonucleotide
cugguucaugaucguuucu

SEQ ID NO: 2023445 - RNA, 19 nt, Artificial Sequence
  Description of Artificial Sequence: Synthetic oligonucleotide
ggaucacuguuccuugguu

SEQ ID NO: 2023446 - RNA, 19 nt, Artificial Sequence
  Description of Artificial Sequence: Synthetic oligonucleotide
cuucagaagucgccucaau

SEQ ID NO: 2023447 - RNA, 19 nt, Artificial Sequence
  Description of Artificial Sequence: Synthetic oligonucleotide
cucgcuccagccgggaacu

SEQ ID NO: 2023448 - RNA, 19 nt, Artificial Sequence
  Description of Artificial Sequence: Synthetic oligonucleotide
ggacuaggguucgcgcuca

SEQ ID NO: 2023449 - RNA, 19 nt, Artificial Sequence
  Description of Artificial Sequence: Synthetic oligonucleotide
gcaucgcuuuccucuccuc

SEQ ID NO: 2023450 - RNA, 19 nt, Artificial Sequence
  Description of Artificial Sequence: Synthetic oligonucleotide
ccuuucccaccgaugcgca

SEQ ID NO: 2023451 - RNA, 19 nt, Artificial Sequence
  Description of Artificial Sequence: Synthetic oligonucleotide
uccaggggcuugggcuuaa

SEQ ID NO: 2023452 - RNA, 19 nt, Artificial Sequence
  Description of Artificial Sequence: Synthetic oligonucleotide
agccugagcgggagcgccu

SEQ ID NO: 2023453 - RNA, 19 nt, Artificial Sequence
  Description of Artificial Sequence: Synthetic oligonucleotide
ucccaccgaugcgcacuug

SEQ ID NO: 2023454 - RNA, 19 nt, Artificial Sequence
  Description of Artificial Sequence: Synthetic oligonucleotide
ucgcuccagccgggaacug

SEQ ID NO: 2023455 - RNA, 19 nt, Artificial Sequence
  Description of Artificial Sequence: Synthetic oligonucleotide
caauucaauuugccucguu

SEQ ID NO: 2023456 - RNA, 19 nt, Artificial Sequence
  Description of Artificial Sequence: Synthetic oligonucleotide
cccgagagucagccugagc

SEQ ID NO: 2023457 - RNA, 19 nt, Artificial Sequence
  Description of Artificial Sequence: Synthetic oligonucleotide
ugucugccccaagcugguu

SEQ ID NO: 2023458 - RNA, 19 nt, Artificial Sequence
  Description of Artificial Sequence: Synthetic oligonucleotide
gcaguuccuuucccaccga

SEQ ID NO: 2023459 - RNA, 19 nt, Artificial Sequence
  Description of Artificial Sequence: Synthetic oligonucleotide
caguuccuuucccaccgau

SEQ ID NO: 2023460 - RNA, 19 nt, Artificial Sequence
  Description of Artificial Sequence: Synthetic oligonucleotide
gcguggccuguaaugguga

SEQ ID NO: 2023461 - RNA, 19 nt, Artificial Sequence
  Description of Artificial Sequence: Synthetic oligonucleotide
acgccggcguccacagccu

SEQ ID NO: 2023462 - RNA, 19 nt, Artificial Sequence
  Description of Artificial Sequence: Synthetic oligonucleotide
ggccuguaauggugaaagu

SEQ ID NO: 2023463 - RNA, 19 nt, Artificial Sequence
  Description of Artificial Sequence: Synthetic oligonucleotide
gggcagccgccccuggcuc

SEQ ID NO: 2023464 - RNA, 19 nt, Artificial Sequence
  Description of Artificial Sequence: Synthetic oligonucleotide
ggguucgcgcucagggguc

SEQ ID NO: 2023465 - RNA, 19 nt, Artificial Sequence
  Description of Artificial Sequence: Synthetic oligonucleotide
gcaaagcuucagccagucu

SEQ ID NO: 2023466 - RNA, 19 nt, Artificial Sequence
  Description of Artificial Sequence: Synthetic oligonucleotide
gccugagcgggagcgccug

SEQ ID NO: 2023467 - RNA, 19 nt, Artificial Sequence
  Description of Artificial Sequence: Synthetic oligonucleotide
gcagaccagcugagauaag

SEQ ID NO: 2023468 - RNA, 19 nt, Artificial Sequence
  Description of Artificial Sequence: Synthetic oligonucleotide
cucaggggucucgggcaga

SEQ ID NO: 2023469 - RNA, 19 nt, Artificial Sequence
  Description of Artificial Sequence: Synthetic oligonucleotide
cugcaagugucaccuucuu

SEQ ID NO: 2023470 - RNA, 19 nt, Artificial Sequence
  Description of Artificial Sequence: Synthetic oligonucleotide
guucgcgcucaggggucuc

SEQ ID NO: 2023471 - RNA, 19 nt, Artificial Sequence
  Description of Artificial Sequence: Synthetic oligonucleotide
cuguucugugaaccaccuu

SEQ ID NO: 2023472 - RNA, 19 nt, Artificial Sequence
  Description of Artificial Sequence: Synthetic oligonucleotide
cggguuccgccgagaagug

SEQ ID NO: 2023473 - RNA, 19 nt, Artificial Sequence
  Description of Artificial Sequence: Synthetic oligonucleotide
ccucggguuccgccgagaa

SEQ ID NO: 2023474 - RNA, 19 nt, Artificial Sequence
  Description of Artificial Sequence: Synthetic oligonucleotide
gcgggagcgccuguccguc

SEQ ID NO: 2023475 - RNA, 19 nt, Artificial Sequence
  Description of Artificial Sequence: Synthetic oligonucleotide
ccagagacgccugaacuuu

SEQ ID NO: 2023476 - RNA, 19 nt, Artificial Sequence
  Description of Artificial Sequence: Synthetic oligonucleotide
gccugaacuuuaggguugu

SEQ ID NO: 2023477 - RNA, 19 nt, Artificial Sequence
  Description of Artificial Sequence: Synthetic oligonucleotide
ccccaagcugguuuaggau

SEQ ID NO: 2023478 - RNA, 19 nt, Artificial Sequence
  Description of Artificial Sequence: Synthetic oligonucleotide
cucccacgccggcguccac

SEQ ID NO: 2023479 - RNA, 19 nt, Artificial Sequence
  Description of Artificial Sequence: Synthetic oligonucleotide
gagcgccuguccgucgcau

SEQ ID NO: 2023480 - RNA, 19 nt, Artificial Sequence
  Description of Artificial Sequence: Synthetic oligonucleotide
gccuguccgucgcaucgcu

SEQ ID NO: 2023481 - RNA, 19 nt, Artificial Sequence
  Description of Artificial Sequence: Synthetic oligonucleotide
cgggagcgccuguccgucg

SEQ ID NO: 2023482 - RNA, 19 nt, Artificial Sequence
  Description of Artificial Sequence: Synthetic oligonucleotide
ggucucgggcagaccagcu

SEQ ID NO: 2023483 - RNA, 19 nt, Artificial Sequence
  Description of Artificial Sequence: Synthetic oligonucleotide
ccgaugcgcacuugugccu

SEQ ID NO: 2023484 - RNA, 19 nt, Artificial Sequence
  Description of Artificial Sequence: Synthetic oligonucleotide
ccuuaggcuucuucagcuu

SEQ ID NO: 2023485 - RNA, 19 nt, Artificial Sequence
  Description of Artificial Sequence: Synthetic oligonucleotide
ccccgagagucagccugag

SEQ ID NO: 2023486 - RNA, 19 nt, Artificial Sequence
  Description of Artificial Sequence: Synthetic oligonucleotide
cguggccuguaauggugaa

SEQ ID NO: 2023487 - RNA, 19 nt, Artificial Sequence
  Description of Artificial Sequence: Synthetic oligonucleotide
cgccuguccgucgcaucgc

SEQ ID NO: 2023488 - RNA, 19 nt, Artificial Sequence
  Description of Artificial Sequence: Synthetic oligonucleotide
ccggggcagccgccccugg

SEQ ID NO: 2023489 - RNA, 19 nt, Artificial Sequence
  Description of Artificial Sequence: Synthetic oligonucleotide
ccgccccuggcucgcccug

SEQ ID NO: 2023490 - RNA, 19 nt, Artificial Sequence
  Description of Artificial Sequence: Synthetic oligonucleotide
ccgccgagaaguggaggaa

SEQ ID NO: 2023491 - RNA, 19 nt, Artificial Sequence
  Description of Artificial Sequence: Synthetic oligonucleotide
cgcaucgcuuuccucuccu

SEQ ID NO: 2023492 - RNA, 19 nt, Artificial Sequence
  Description of Artificial Sequence: Synthetic oligonucleotide
cgccccuggcucgcccugc

SEQ ID NO: 2023493 - RNA, 19 nt, Artificial Sequence
  Description of Artificial Sequence: Synthetic oligonucleotide
ccuguccgucgcaucgcuu

SEQ ID NO: 2023494 - RNA, 19 nt, Artificial Sequence
  Description of Artificial Sequence: Synthetic oligonucleotide
ccggcguccacagccuuuu

SEQ ID NO: 2023495 - RNA, 19 nt, Artificial Sequence
  Description of Artificial Sequence: Synthetic oligonucleotide
ccugagcgggagcgccugu

SEQ ID NO: 2023496 - RNA, 19 nt, Artificial Sequence
  Description of Artificial Sequence: Synthetic oligonucleotide
gccggcguccacagccuuu

SEQ ID NO: 2023497 - RNA, 19 nt, Artificial Sequence
  Description of Artificial Sequence: Synthetic oligonucleotide
cgcucccguccuccuccca

SEQ ID NO: 2023498 - RNA, 19 nt, Artificial Sequence
  Description of Artificial Sequence: Synthetic oligonucleotide
cgccggcguccacagccuu

SEQ ID NO: 2023499 - RNA, 19 nt, Artificial Sequence
  Description of Artificial Sequence: Synthetic oligonucleotide
aggaguaucauucucagac

SEQ ID NO: 2023500 - RNA, 19 nt, Artificial Sequence
  Description of Artificial Sequence: Synthetic oligonucleotide
aaugucaggauaucagugg

SEQ ID NO: 2023501 - RNA, 19 nt, Artificial Sequence
  Description of Artificial Sequence: Synthetic oligonucleotide
aacgcuguguaaucgaagg

SEQ ID NO: 2023502 - RNA, 19 nt, Artificial Sequence
  Description of Artificial Sequence: Synthetic oligonucleotide
cugugaauagcucaggugg

SEQ ID NO: 2023503 - RNA, 19 nt, Artificial Sequence
  Description of Artificial Sequence: Synthetic oligonucleotide
ucugacacuccucauauug

SEQ ID NO: 2023504 - RNA, 19 nt, Artificial Sequence
  Description of Artificial Sequence: Synthetic oligonucleotide
ugucagaaagucuugagga

SEQ ID NO: 2023505 - RNA, 19 nt, Artificial Sequence
  Description of Artificial Sequence: Synthetic oligonucleotide
uguauuuuauaucuuaguu

SEQ ID NO: 2023506 - RNA, 19 nt, Artificial Sequence
  Description of Artificial Sequence: Synthetic oligonucleotide
ugcuuuuagcuuuaugugg

SEQ ID NO: 2023507 - RNA, 19 nt, Artificial Sequence
  Description of Artificial Sequence: Synthetic oligonucleotide
aaauaauggcauuuguggu

SEQ ID NO: 2023508 - RNA, 19 nt, Artificial Sequence
  Description of Artificial Sequence: Synthetic oligonucleotide
aaggaacugaaguucuugg

SEQ ID NO: 2023509 - RNA, 19 nt, Artificial Sequence
  Description of Artificial Sequence: Synthetic oligonucleotide
cugaacacaaccuccaugc

SEQ ID NO: 2023510 - RNA, 19 nt, Artificial Sequence
  Description of Artificial Sequence: Synthetic oligonucleotide
ucuuccugaguuuacggcg

SEQ ID NO: 2023511 - RNA, 19 nt, Artificial Sequence
  Description of Artificial Sequence: Synthetic oligonucleotide
aaugaggugaacuccuucu

SEQ ID NO: 2023512 - RNA, 19 nt, Artificial Sequence
  Description of Artificial Sequence: Synthetic oligonucleotide
uauaucuuaguuguguuug

SEQ ID NO: 2023513 - RNA, 19 nt, Artificial Sequence
  Description of Artificial Sequence: Synthetic oligonucleotide
uuuacggcgccucuugugg

SEQ ID NO: 2023514 - RNA, 19 nt, Artificial Sequence
  Description of Artificial Sequence: Synthetic oligonucleotide
ucuuaguuguguuugaaaa

SEQ ID NO: 2023515 - RNA, 19 nt, Artificial Sequence
  Description of Artificial Sequence: Synthetic oligonucleotide
gaaaacaucaaaauaaaua

SEQ ID NO: 2023516 - RNA, 19 nt, Artificial Sequence
  Description of Artificial Sequence: Synthetic oligonucleotide
uuuaaggaacugaaguucu

SEQ ID NO: 2023517 - RNA, 19 nt, Artificial Sequence
  Description of Artificial Sequence: Synthetic oligonucleotide
ugugggaauagguauaaac

SEQ ID NO: 2023518 - RNA, 19 nt, Artificial Sequence
  Description of Artificial Sequence: Synthetic oligonucleotide
uuuuauaucuuaguugugu

SEQ ID NO: 2023519 - RNA, 19 nt, Artificial Sequence
  Description of Artificial Sequence: Synthetic oligonucleotide
auacugugagccuaugugg

SEQ ID NO: 2023520 - RNA, 19 nt, Artificial Sequence
  Description of Artificial Sequence: Synthetic oligonucleotide
aauaauggcauuuguggua

SEQ ID NO: 2023521 - RNA, 19 nt, Artificial Sequence
  Description of Artificial Sequence: Synthetic oligonucleotide
ugggaauagguauaaaccu

SEQ ID NO: 2023522 - RNA, 19 nt, Artificial Sequence
  Description of Artificial Sequence: Synthetic oligonucleotide
auaucaguggcuucauuuc

SEQ ID NO: 2023523 - RNA, 19 nt, Artificial Sequence
  Description of Artificial Sequence: Synthetic oligonucleotide
uuugcagaacaguuggugc

SEQ ID NO: 2023524 - RNA, 19 nt, Artificial Sequence
  Description of Artificial Sequence: Synthetic oligonucleotide
augucaggauaucaguggc

SEQ ID NO: 2023525 - RNA, 19 nt, Artificial Sequence
  Description of Artificial Sequence: Synthetic oligonucleotide
uauguggugaccagccagg

SEQ ID NO: 2023526 - RNA, 19 nt, Artificial Sequence
  Description of Artificial Sequence: Synthetic oligonucleotide
aaacuuguugaugugccuc

SEQ ID NO: 2023527 - RNA, 19 nt, Artificial Sequence
  Description of Artificial Sequence: Synthetic oligonucleotide
auuugugguauauacugug

SEQ ID NO: 2023528 - RNA, 19 nt, Artificial Sequence
  Description of Artificial Sequence: Synthetic oligonucleotide
uugugguccauuuuggucu

SEQ ID NO: 2023529 - RNA, 19 nt, Artificial Sequence
  Description of Artificial Sequence: Synthetic oligonucleotide
ugugaauagcucagguggg

SEQ ID NO: 2023530 - RNA, 19 nt, Artificial Sequence
  Description of Artificial Sequence: Synthetic oligonucleotide
uugugguauauacugugag

SEQ ID NO: 2023531 - RNA, 19 nt, Artificial Sequence
  Description of Artificial Sequence: Synthetic oligonucleotide
ugaguuugcagaacaguug

SEQ ID NO: 2023532 - RNA, 19 nt, Artificial Sequence
  Description of Artificial Sequence: Synthetic oligonucleotide
uugcagaacaguuggugcg

SEQ ID NO: 2023533 - RNA, 19 nt, Artificial Sequence
  Description of Artificial Sequence: Synthetic oligonucleotide
aaagcucgcacaucaggag

SEQ ID NO: 2023534 - RNA, 19 nt, Artificial Sequence
  Description of Artificial Sequence: Synthetic oligonucleotide
auauugaugaagugcucuc

SEQ ID NO: 2023535 - RNA, 19 nt, Artificial Sequence
  Description of Artificial Sequence: Synthetic oligonucleotide
gaugcuacaucagcaaggg

SEQ ID NO: 2023536 - RNA, 19 nt, Artificial Sequence
  Description of Artificial Sequence: Synthetic oligonucleotide
aaagcuguucucuggccag

SEQ ID NO: 2023537 - RNA, 19 nt, Artificial Sequence
  Description of Artificial Sequence: Synthetic oligonucleotide
gaauuucuuggucaaugag

SEQ ID NO: 2023538 - RNA, 19 nt, Artificial Sequence
  Description of Artificial Sequence: Synthetic oligonucleotide
ugugcaguaggcaggcagg

SEQ ID NO: 2023539 - RNA, 19 nt, Artificial Sequence
  Description of Artificial Sequence: Synthetic oligonucleotide
ugcucuggaaacuuguuga

SEQ ID NO: 2023540 - RNA, 19 nt, Artificial Sequence
  Description of Artificial Sequence: Synthetic oligonucleotide
agauagcccaucuccgucc

SEQ ID NO: 2023541 - RNA, 19 nt, Artificial Sequence
  Description of Artificial Sequence: Synthetic oligonucleotide
ugugguauauacugugagc

SEQ ID NO: 2023542 - RNA, 19 nt, Artificial Sequence
  Description of Artificial Sequence: Synthetic oligonucleotide
acacuccucauauugauga

SEQ ID NO: 2023543 - RNA, 19 nt, Artificial Sequence
  Description of Artificial Sequence: Synthetic oligonucleotide
ugaguguugggcagaagcc

SEQ ID NO: 2023544 - RNA, 19 nt, Artificial Sequence
  Description of Artificial Sequence: Synthetic oligonucleotide
uguaaucgaaggccgagga

SEQ ID NO: 2023545 - RNA, 19 nt, Artificial Sequence
  Description of Artificial Sequence: Synthetic oligonucleotide
ugaggaguaucauucucag

SEQ ID NO: 2023546 - RNA, 19 nt, Artificial Sequence
  Description of Artificial Sequence: Synthetic oligonucleotide
uguuuaaggaacugaaguu

SEQ ID NO: 2023547 - RNA, 19 nt, Artificial Sequence
  Description of Artificial Sequence: Synthetic oligonucleotide
agaccugaagcucuggcag

SEQ ID NO: 2023548 - RNA, 19 nt, Artificial Sequence
  Description of Artificial Sequence: Synthetic oligonucleotide
ucugaacacaaccuccaug

SEQ ID NO: 2023549 - RNA, 19 nt, Artificial Sequence
  Description of Artificial Sequence: Synthetic oligonucleotide
augcuuuuagcuuuaugug

SEQ ID NO: 2023550 - RNA, 19 nt, Artificial Sequence
  Description of Artificial Sequence: Synthetic oligonucleotide
ucugugaauagcucaggug

SEQ ID NO: 2023551 - RNA, 19 nt, Artificial Sequence
  Description of Artificial Sequence: Synthetic oligonucleotide
ugaauuucuuggucaauga

SEQ ID NO: 2023552 - RNA, 19 nt, Artificial Sequence
  Description of Artificial Sequence: Synthetic oligonucleotide
uugugcaguaggcaggcag

SEQ ID NO: 2023553 - RNA, 19 nt, Artificial Sequence
  Description of Artificial Sequence: Synthetic oligonucleotide
cuucuugugcaguaggcag

SEQ ID NO: 2023554 - RNA, 19 nt, Artificial Sequence
  Description of Artificial Sequence: Synthetic oligonucleotide
uuugugguauauacuguga

SEQ ID NO: 2023555 - RNA, 19 nt, Artificial Sequence
  Description of Artificial Sequence: Synthetic oligonucleotide
gugggaauagguauaaacc

SEQ ID NO: 2023556 - RNA, 19 nt, Artificial Sequence
  Description of Artificial Sequence: Synthetic oligonucleotide
gugaguguugggcagaagc

SEQ ID NO: 2023557 - RNA, 19 nt, Artificial Sequence
  Description of Artificial Sequence: Synthetic oligonucleotide
aaagucuugaggaguauca

SEQ ID NO: 2023558 - RNA, 19 nt, Artificial Sequence
  Description of Artificial Sequence: Synthetic oligonucleotide
uggcauuugugguauauac

SEQ ID NO: 2023559 - RNA, 19 nt, Artificial Sequence
  Description of Artificial Sequence: Synthetic oligonucleotide
gagaggaaucuucaauucc

SEQ ID NO: 2023560 - RNA, 19 nt, Artificial Sequence
  Description of Artificial Sequence: Synthetic oligonucleotide
aaaugcuuuuagcuuuaug

SEQ ID NO: 2023561 - RNA, 19 nt, Artificial Sequence
  Description of Artificial Sequence: Synthetic oligonucleotide
gaggugaacuccuucuucc

SEQ ID NO: 2023562 - RNA, 19 nt, Artificial Sequence
  Description of Artificial Sequence: Synthetic oligonucleotide
aggaacugaaguucuuggg

SEQ ID NO: 2023563 - RNA, 19 nt, Artificial Sequence
  Description of Artificial Sequence: Synthetic oligonucleotide
uugggugugccucagcaca

SEQ ID NO: 2023564 - RNA, 19 nt, Artificial Sequence
  Description of Artificial Sequence: Synthetic oligonucleotide
guuuugaucuuugaaaaca

SEQ ID NO: 2023565 - RNA, 19 nt, Artificial Sequence
  Description of Artificial Sequence: Synthetic oligonucleotide
acgauguguggcucgaacg

SEQ ID NO: 2023566 - RNA, 19 nt, Artificial Sequence
  Description of Artificial Sequence: Synthetic oligonucleotide
aacuuguugaugugccuca

SEQ ID NO: 2023567 - RNA, 19 nt, Artificial Sequence
  Description of Artificial Sequence: Synthetic oligonucleotide
ugcggauucuuugugcugg

SEQ ID NO: 2023568 - RNA, 19 nt, Artificial Sequence
  Description of Artificial Sequence: Synthetic oligonucleotide
aucuccguccauguggucc

SEQ ID NO: 2023569 - RNA, 19 nt, Artificial Sequence
  Description of Artificial Sequence: Synthetic oligonucleotide
caaugucaggauaucagug

SEQ ID NO: 2023570 - RNA, 19 nt, Artificial Sequence
  Description of Artificial Sequence: Synthetic oligonucleotide
uuaugcuguauuuuauauc

SEQ ID NO: 2023571 - RNA, 19 nt, Artificial Sequence
  Description of Artificial Sequence: Synthetic oligonucleotide
uuuauaucuuaguuguguu

SEQ ID NO: 2023572 - RNA, 19 nt, Artificial Sequence
  Description of Artificial Sequence: Synthetic oligonucleotide
ucaaggauccuccuucauc

SEQ ID NO: 2023573 - RNA, 19 nt, Artificial Sequence
  Description of Artificial Sequence: Synthetic oligonucleotide
uucuuccugaguuuacggc

SEQ ID NO: 2023574 - RNA, 19 nt, Artificial Sequence
  Description of Artificial Sequence: Synthetic oligonucleotide
guuuaaggaacugaaguuc

SEQ ID NO: 2023575 - RNA, 19 nt, Artificial Sequence
  Description of Artificial Sequence: Synthetic oligonucleotide
cuucaucacuggaagcugg

SEQ ID NO: 2023576 - RNA, 19 nt, Artificial Sequence
  Description of Artificial Sequence: Synthetic oligonucleotide
ugaugauggcucuugaauu

SEQ ID NO: 2023577 - RNA, 19 nt, Artificial Sequence
  Description of Artificial Sequence: Synthetic oligonucleotide
ugucaucgcucaaggaucc

SEQ ID NO: 2023578 - RNA, 19 nt, Artificial Sequence
  Description of Artificial Sequence: Synthetic oligonucleotide
uccauuuuggucucucuuc

SEQ ID NO: 2023579 - RNA, 19 nt, Artificial Sequence
  Description of Artificial Sequence: Synthetic oligonucleotide
caaggauccuccuucauca

SEQ ID NO: 2023580 - RNA, 19 nt, Artificial Sequence
  Description of Artificial Sequence: Synthetic oligonucleotide
uacugugagccuauguggu

SEQ ID NO: 2023581 - RNA, 19 nt, Artificial Sequence
  Description of Artificial Sequence: Synthetic oligonucleotide
uguugccaucuucugaaca

SEQ ID NO: 2023582 - RNA, 19 nt, Artificial Sequence
  Description of Artificial Sequence: Synthetic oligonucleotide
ggaacugaaguucuugggc

SEQ ID NO: 2023583 - RNA, 19 nt, Artificial Sequence
  Description of Artificial Sequence: Synthetic oligonucleotide
cucaggaugcuacaucagc

SEQ ID NO: 2023584 - RNA, 19 nt, Artificial Sequence
  Description of Artificial Sequence: Synthetic oligonucleotide
uccuucaucacuggaagcu

SEQ ID NO: 2023585 - RNA, 19 nt, Artificial Sequence
  Description of Artificial Sequence: Synthetic oligonucleotide
uggucaaugaggugaacuc

SEQ ID NO: 2023586 - RNA, 19 nt, Artificial Sequence
  Description of Artificial Sequence: Synthetic oligonucleotide
acagagaggaaucuucaau

SEQ ID NO: 2023587 - RNA, 19 nt, Artificial Sequence
  Description of Artificial Sequence: Synthetic oligonucleotide
uguguaaucgaaggccgag

SEQ ID NO: 2023588 - RNA, 19 nt, Artificial Sequence
  Description of Artificial Sequence: Synthetic oligonucleotide
aaggauccuccuucaucac

SEQ ID NO: 2023589 - RNA, 19 nt, Artificial Sequence
  Description of Artificial Sequence: Synthetic oligonucleotide
ucucuugacugcuuuggcu

SEQ ID NO: 2023590 - RNA, 19 nt, Artificial Sequence
  Description of Artificial Sequence: Synthetic oligonucleotide
acgcuguguaaucgaaggc

SEQ ID NO: 2023591 - RNA, 19 nt, Artificial Sequence
  Description of Artificial Sequence: Synthetic oligonucleotide
cucauauugaugaagugcu

SEQ ID NO: 2023592 - RNA, 19 nt, Artificial Sequence
  Description of Artificial Sequence: Synthetic oligonucleotide
uuauaucuuaguuguguuu

SEQ ID NO: 2023593 - RNA, 19 nt, Artificial Sequence
  Description of Artificial Sequence: Synthetic oligonucleotide
agcuuuaugugggaauagg

SEQ ID NO: 2023594 - RNA, 19 nt, Artificial Sequence
  Description of Artificial Sequence: Synthetic oligonucleotide
gcuuuuagcuuuauguggg

SEQ ID NO: 2023595 - RNA, 19 nt, Artificial Sequence
  Description of Artificial Sequence: Synthetic oligonucleotide
aguuggugcggauucuuug

SEQ ID NO: 2023596 - RNA, 19 nt, Artificial Sequence
  Description of Artificial Sequence: Synthetic oligonucleotide
auaccuccggccuugggug

SEQ ID NO: 2023597 - RNA, 19 nt, Artificial Sequence
  Description of Artificial Sequence: Synthetic oligonucleotide
gcaacaaacagccaauguc

SEQ ID NO: 2023598 - RNA, 19 nt, Artificial Sequence
  Description of Artificial Sequence: Synthetic oligonucleotide
cuuccugaguuuacggcgc

SEQ ID NO: 2023599 - RNA, 19 nt, Artificial Sequence
  Description of Artificial Sequence: Synthetic oligonucleotide
uuggucaaugaggugaacu

SEQ ID NO: 2023600 - RNA, 19 nt, Artificial Sequence
  Description of Artificial Sequence: Synthetic oligonucleotide
uguucucuggccagauagc

SEQ ID NO: 2023601 - RNA, 19 nt, Artificial Sequence
  Description of Artificial Sequence: Synthetic oligonucleotide
ugguacuucuugccgcggg

SEQ ID NO: 2023602 - RNA, 19 nt, Artificial Sequence
  Description of Artificial Sequence: Synthetic oligonucleotide
ggaaagcucgcacaucagg

SEQ ID NO: 2023603 - RNA, 19 nt, Artificial Sequence
  Description of Artificial Sequence: Synthetic oligonucleotide
uguggugaccagccagggg

SEQ ID NO: 2023604 - RNA, 19 nt, Artificial Sequence
  Description of Artificial Sequence: Synthetic oligonucleotide
cugucaucgcucaaggauc

SEQ ID NO: 2023605 - RNA, 19 nt, Artificial Sequence
  Description of Artificial Sequence: Synthetic oligonucleotide
ucagcacaugcucuggaaa

SEQ ID NO: 2023606 - RNA, 19 nt, Artificial Sequence
  Description of Artificial Sequence: Synthetic oligonucleotide
ccaucuucugaacacaacc

SEQ ID NO: 2023607 - RNA, 19 nt, Artificial Sequence
  Description of Artificial Sequence: Synthetic oligonucleotide
caucgcucaaggauccucc

SEQ ID NO: 2023608 - RNA, 19 nt, Artificial Sequence
  Description of Artificial Sequence: Synthetic oligonucleotide
uccuccuucaucacuggaa

SEQ ID NO: 2023609 - RNA, 19 nt, Artificial Sequence
  Description of Artificial Sequence: Synthetic oligonucleotide
augcucuggaaacuuguug

SEQ ID NO: 2023610 - RNA, 19 nt, Artificial Sequence
  Description of Artificial Sequence: Synthetic oligonucleotide
ugagccuauguggugacca

SEQ ID NO: 2023611 - RNA, 19 nt, Artificial Sequence
  Description of Artificial Sequence: Synthetic oligonucleotide
gaaagcucgcacaucagga

SEQ ID NO: 2023612 - RNA, 19 nt, Artificial Sequence
  Description of Artificial Sequence: Synthetic oligonucleotide
auauacugugagccuaugu

SEQ ID NO: 2023613 - RNA, 19 nt, Artificial Sequence
  Description of Artificial Sequence: Synthetic oligonucleotide
cacucugggcaacaaacag

SEQ ID NO: 2023614 - RNA, 19 nt, Artificial Sequence
  Description of Artificial Sequence: Synthetic oligonucleotide
ugaacacaaccuccaugcc

SEQ ID NO: 2023615 - RNA, 19 nt, Artificial Sequence
  Description of Artificial Sequence: Synthetic oligonucleotide
uauugaugaagugcucucu

SEQ ID NO: 2023616 - RNA, 19 nt, Artificial Sequence
  Description of Artificial Sequence: Synthetic oligonucleotide
uccucauauugaugaagug

SEQ ID NO: 2023617 - RNA, 19 nt, Artificial Sequence
  Description of Artificial Sequence: Synthetic oligonucleotide
aguuagggagcagcgcacc

SEQ ID NO: 2023618 - RNA, 19 nt, Artificial Sequence
  Description of Artificial Sequence: Synthetic oligonucleotide
ugaagugcucucugauacc

SEQ ID NO: 2023619 - RNA, 19 nt, Artificial Sequence
  Description of Artificial Sequence: Synthetic oligonucleotide
ugguauauacugugagccu

SEQ ID NO: 2023620 - RNA, 19 nt, Artificial Sequence
  Description of Artificial Sequence: Synthetic oligonucleotide
gaaucuucaauucccugcu

SEQ ID NO: 2023621 - RNA, 19 nt, Artificial Sequence
  Description of Artificial Sequence: Synthetic oligonucleotide
auaucuuaguuguguuuga

SEQ ID NO: 2023622 - RNA, 19 nt, Artificial Sequence
  Description of Artificial Sequence: Synthetic oligonucleotide
uuggucucucuucucuccc

SEQ ID NO: 2023623 - RNA, 19 nt, Artificial Sequence
  Description of Artificial Sequence: Synthetic oligonucleotide
gagcagcgcaccuugugag

SEQ ID NO: 2023624 - RNA, 19 nt, Artificial Sequence
  Description of Artificial Sequence: Synthetic oligonucleotide
ugacacuccucauauugau

SEQ ID NO: 2023625 - RNA, 19 nt, Artificial Sequence
  Description of Artificial Sequence: Synthetic oligonucleotide
guaaucgaaggccgaggag

SEQ ID NO: 2023626 - RNA, 19 nt, Artificial Sequence
  Description of Artificial Sequence: Synthetic oligonucleotide
cagcacaugcucuggaaac

SEQ ID NO: 2023627 - RNA, 19 nt, Artificial Sequence
  Description of Artificial Sequence: Synthetic oligonucleotide
aacagccaaugucaggaua

SEQ ID NO: 2023628 - RNA, 19 nt, Artificial Sequence
  Description of Artificial Sequence: Synthetic oligonucleotide
acuccucauauugaugaag

SEQ ID NO: 2023629 - RNA, 19 nt, Artificial Sequence
  Description of Artificial Sequence: Synthetic oligonucleotide
ucugauaccuccggccuug

SEQ ID NO: 2023630 - RNA, 19 nt, Artificial Sequence
  Description of Artificial Sequence: Synthetic oligonucleotide
ucagguggguauaggucug

SEQ ID NO: 2023631 - RNA, 19 nt, Artificial Sequence
  Description of Artificial Sequence: Synthetic oligonucleotide
ugauggcucuugaauuucu

SEQ ID NO: 2023632 - RNA, 19 nt, Artificial Sequence
  Description of Artificial Sequence: Synthetic oligonucleotide
uuggugcggauucuuugug

SEQ ID NO: 2023633 - RNA, 19 nt, Artificial Sequence
  Description of Artificial Sequence: Synthetic oligonucleotide
ucgaacgcuguguaaucga

SEQ ID NO: 2023634 - RNA, 19 nt, Artificial Sequence
  Description of Artificial Sequence: Synthetic oligonucleotide
caccuugugaguguugggc

SEQ ID NO: 2023635 - RNA, 19 nt, Artificial Sequence
  Description of Artificial Sequence: Synthetic oligonucleotide
ugaagcucuggcagacggc

SEQ ID NO: 2023636 - RNA, 19 nt, Artificial Sequence
  Description of Artificial Sequence: Synthetic oligonucleotide
uuggucugucagaaagucu

SEQ ID NO: 2023637 - RNA, 19 nt, Artificial Sequence
  Description of Artificial Sequence: Synthetic oligonucleotide
ucagggugaguuugcagaa

SEQ ID NO: 2023638 - RNA, 19 nt, Artificial Sequence
  Description of Artificial Sequence: Synthetic oligonucleotide
ucauuucccagcuguuuaa

SEQ ID NO: 2023639 - RNA, 19 nt, Artificial Sequence
  Description of Artificial Sequence: Synthetic oligonucleotide
caggaaagcucgcacauca

SEQ ID NO: 2023640 - RNA, 19 nt, Artificial Sequence
  Description of Artificial Sequence: Synthetic oligonucleotide
ggccagauagcccaucucc

SEQ ID NO: 2023641 - RNA, 19 nt, Artificial Sequence
  Description of Artificial Sequence: Synthetic oligonucleotide
uuuuagcuuuaugugggaa

SEQ ID NO: 2023642 - RNA, 19 nt, Artificial Sequence
  Description of Artificial Sequence: Synthetic oligonucleotide
cuuggucugucagaaaguc

SEQ ID NO: 2023643 - RNA, 19 nt, Artificial Sequence
  Description of Artificial Sequence: Synthetic oligonucleotide
ucuggacagccgcugguac

SEQ ID NO: 2023644 - RNA, 19 nt, Artificial Sequence
  Description of Artificial Sequence: Synthetic oligonucleotide
uggugcggauucuuugugc

SEQ ID NO: 2023645 - RNA, 19 nt, Artificial Sequence
  Description of Artificial Sequence: Synthetic oligonucleotide
ggcaggguagcucauggcc

SEQ ID NO: 2023646 - RNA, 19 nt, Artificial Sequence
  Description of Artificial Sequence: Synthetic oligonucleotide
augcuacaucagcaagggc

SEQ ID NO: 2023647 - RNA, 19 nt, Artificial Sequence
  Description of Artificial Sequence: Synthetic oligonucleotide
uucucucuugacugcuuug

SEQ ID NO: 2023648 - RNA, 19 nt, Artificial Sequence
  Description of Artificial Sequence: Synthetic oligonucleotide
uucucagacuuguccauau

SEQ ID NO: 2023649 - RNA, 19 nt, Artificial Sequence
  Description of Artificial Sequence: Synthetic oligonucleotide
ggacauacuccacaccuug

SEQ ID NO: 2023650 - RNA, 19 nt, Artificial Sequence
  Description of Artificial Sequence: Synthetic oligonucleotide
gugaacuccuucuuccuga

SEQ ID NO: 2023651 - RNA, 19 nt, Artificial Sequence
  Description of Artificial Sequence: Synthetic oligonucleotide
uuucuuggucaaugaggug

SEQ ID NO: 2023652 - RNA, 19 nt, Artificial Sequence
  Description of Artificial Sequence: Synthetic oligonucleotide
aguaucauucucagacuug

SEQ ID NO: 2023653 - RNA, 19 nt, Artificial Sequence
  Description of Artificial Sequence: Synthetic oligonucleotide
gauaccuccggccuugggu

SEQ ID NO: 2023654 - RNA, 19 nt, Artificial Sequence
  Description of Artificial Sequence: Synthetic oligonucleotide
guuuacggcgccucuugug

SEQ ID NO: 2023655 - RNA, 19 nt, Artificial Sequence
  Description of Artificial Sequence: Synthetic oligonucleotide
cucgaacgcuguguaaucg

SEQ ID NO: 2023656 - RNA, 19 nt, Artificial Sequence
  Description of Artificial Sequence: Synthetic oligonucleotide
acugugagccuauguggug

SEQ ID NO: 2023657 - RNA, 19 nt, Artificial Sequence
  Description of Artificial Sequence: Synthetic oligonucleotide
gaagcucuggcagacggca

SEQ ID NO: 2023658 - RNA, 19 nt, Artificial Sequence
  Description of Artificial Sequence: Synthetic oligonucleotide
ucucucuucucuccccagu

SEQ ID NO: 2023659 - RNA, 19 nt, Artificial Sequence
  Description of Artificial Sequence: Synthetic oligonucleotide
agucuugaggaguaucauu

SEQ ID NO: 2023660 - RNA, 19 nt, Artificial Sequence
  Description of Artificial Sequence: Synthetic oligonucleotide
agccuauguggugaccagc

SEQ ID NO: 2023661 - RNA, 19 nt, Artificial Sequence
  Description of Artificial Sequence: Synthetic oligonucleotide
gaacgcuguguaaucgaag

SEQ ID NO: 2023662 - RNA, 19 nt, Artificial Sequence
  Description of Artificial Sequence: Synthetic oligonucleotide
uagcuuuaugugggaauag

SEQ ID NO: 2023663 - RNA, 19 nt, Artificial Sequence
  Description of Artificial Sequence: Synthetic oligonucleotide
ugggcuuguggugaugaug

SEQ ID NO: 2023664 - RNA, 19 nt, Artificial Sequence
  Description of Artificial Sequence: Synthetic oligonucleotide
ggaauagguauaaaccuca

SEQ ID NO: 2023665 - RNA, 19 nt, Artificial Sequence
  Description of Artificial Sequence: Synthetic oligonucleotide
agugcccuucucucuugac

SEQ ID NO: 2023666 - RNA, 19 nt, Artificial Sequence
  Description of Artificial Sequence: Synthetic oligonucleotide
guguaaucgaaggccgagg

SEQ ID NO: 2023667 - RNA, 19 nt, Artificial Sequence
  Description of Artificial Sequence: Synthetic oligonucleotide
cucgcacaucaggagaugg

SEQ ID NO: 2023668 - RNA, 19 nt, Artificial Sequence
  Description of Artificial Sequence: Synthetic oligonucleotide
ugauaccuccggccuuggg

SEQ ID NO: 2023669 - RNA, 19 nt, Artificial Sequence
  Description of Artificial Sequence: Synthetic oligonucleotide
aauagcucagguggguaua

SEQ ID NO: 2023670 - RNA, 19 nt, Artificial Sequence
  Description of Artificial Sequence: Synthetic oligonucleotide
guuucugacacuccucaua

SEQ ID NO: 2023671 - RNA, 19 nt, Artificial Sequence
  Description of Artificial Sequence: Synthetic oligonucleotide
ucuugacugcuuuggcuuc

SEQ ID NO: 2023672 - RNA, 19 nt, Artificial Sequence
  Description of Artificial Sequence: Synthetic oligonucleotide
ugaugugccucagggugag

SEQ ID NO: 2023673 - RNA, 19 nt, Artificial Sequence
  Description of Artificial Sequence: Synthetic oligonucleotide
uggccaguuagggagcagc

SEQ ID NO: 2023674 - RNA, 19 nt, Artificial Sequence
  Description of Artificial Sequence: Synthetic oligonucleotide
auuuuauaucuuaguugug

SEQ ID NO: 2023675 - RNA, 19 nt, Artificial Sequence
  Description of Artificial Sequence: Synthetic oligonucleotide
aagucuugaggaguaucau

SEQ ID NO: 2023676 - RNA, 19 nt, Artificial Sequence
  Description of Artificial Sequence: Synthetic oligonucleotide
ucgcacaucaggagauggu

SEQ ID NO: 2023677 - RNA, 19 nt, Artificial Sequence
  Description of Artificial Sequence: Synthetic oligonucleotide
cuugccgcggguguagacc

SEQ ID NO: 2023678 - RNA, 19 nt, Artificial Sequence
  Description of Artificial Sequence: Synthetic oligonucleotide
uauauacugugagccuaug

SEQ ID NO: 2023679 - RNA, 19 nt, Artificial Sequence
  Description of Artificial Sequence: Synthetic oligonucleotide
gagccuauguggugaccag

SEQ ID NO: 2023680 - RNA, 19 nt, Artificial Sequence
  Description of Artificial Sequence: Synthetic oligonucleotide
uguguggcucgaacgcugu

SEQ ID NO: 2023681 - RNA, 19 nt, Artificial Sequence
  Description of Artificial Sequence: Synthetic oligonucleotide
gaugauggcucuugaauuu

SEQ ID NO: 2023682 - RNA, 19 nt, Artificial Sequence
  Description of Artificial Sequence: Synthetic oligonucleotide
caggcagggacauacucca

SEQ ID NO: 2023683 - RNA, 19 nt, Artificial Sequence
  Description of Artificial Sequence: Synthetic oligonucleotide
uggugaugauggcucuuga

SEQ ID NO: 2023684 - RNA, 19 nt, Artificial Sequence
  Description of Artificial Sequence: Synthetic oligonucleotide
cuccuucaucacuggaagc

SEQ ID NO: 2023685 - RNA, 19 nt, Artificial Sequence
  Description of Artificial Sequence: Synthetic oligonucleotide
uucugaacacaaccuccau

SEQ ID NO: 2023686 - RNA, 19 nt, Artificial Sequence
  Description of Artificial Sequence: Synthetic oligonucleotide
acugaaguucuugggcuug

SEQ ID NO: 2023687 - RNA, 19 nt, Artificial Sequence
  Description of Artificial Sequence: Synthetic oligonucleotide
cacgauguguggcucgaac

SEQ ID NO: 2023688 - RNA, 19 nt, Artificial Sequence
  Description of Artificial Sequence: Synthetic oligonucleotide
gcugguacuucuugccgcg

SEQ ID NO: 2023689 - RNA, 19 nt, Artificial Sequence
  Description of Artificial Sequence: Synthetic oligonucleotide
gugaugauggcucuugaau

SEQ ID NO: 2023690 - RNA, 19 nt, Artificial Sequence
  Description of Artificial Sequence: Synthetic oligonucleotide
cuugggugugccucagcac

SEQ ID NO: 2023691 - RNA, 19 nt, Artificial Sequence
  Description of Artificial Sequence: Synthetic oligonucleotide
uuccugaguuuacggcgcc

SEQ ID NO: 2023692 - RNA, 19 nt, Artificial Sequence
  Description of Artificial Sequence: Synthetic oligonucleotide
uccucuucuugugcaguag

SEQ ID NO: 2023693 - RNA, 19 nt, Artificial Sequence
  Description of Artificial Sequence: Synthetic oligonucleotide
ggauucuuugugcugggca

SEQ ID NO: 2023694 - RNA, 19 nt, Artificial Sequence
  Description of Artificial Sequence: Synthetic oligonucleotide
cacaugcucuggaaacuug

SEQ ID NO: 2023695 - RNA, 19 nt, Artificial Sequence
  Description of Artificial Sequence: Synthetic oligonucleotide
cucagguggguauaggucu

SEQ ID NO: 2023696 - RNA, 19 nt, Artificial Sequence
  Description of Artificial Sequence: Synthetic oligonucleotide
ggucaaugaggugaacucc

SEQ ID NO: 2023697 - RNA, 19 nt, Artificial Sequence
  Description of Artificial Sequence: Synthetic oligonucleotide
cuguauuuuauaucuuagu

SEQ ID NO: 2023698 - RNA, 19 nt, Artificial Sequence
  Description of Artificial Sequence: Synthetic oligonucleotide
aggugaacuccuucuuccu

SEQ ID NO: 2023699 - RNA, 19 nt, Artificial Sequence
  Description of Artificial Sequence: Synthetic oligonucleotide
uugccgcggguguagaccu

SEQ ID NO: 2023700 - RNA, 19 nt, Artificial Sequence
  Description of Artificial Sequence: Synthetic oligonucleotide
cccacucugggcaacaaac

SEQ ID NO: 2023701 - RNA, 19 nt, Artificial Sequence
  Description of Artificial Sequence: Synthetic oligonucleotide
uccuucuuccugaguuuac

SEQ ID NO: 2023702 - RNA, 19 nt, Artificial Sequence
  Description of Artificial Sequence: Synthetic oligonucleotide
ugaauagcucaggugggua

SEQ ID NO: 2023703 - RNA, 19 nt, Artificial Sequence
  Description of Artificial Sequence: Synthetic oligonucleotide
caggauaucaguggcuuca

SEQ ID NO: 2023704 - RNA, 19 nt, Artificial Sequence
  Description of Artificial Sequence: Synthetic oligonucleotide
cagacggcaggguagcuca

SEQ ID NO: 2023705 - RNA, 19 nt, Artificial Sequence
  Description of Artificial Sequence: Synthetic oligonucleotide
cagauagcccaucuccguc

SEQ ID NO: 2023706 - RNA, 19 nt, Artificial Sequence
  Description of Artificial Sequence: Synthetic oligonucleotide
cauuucccagcuguuuaag

SEQ ID NO: 2023707 - RNA, 19 nt, Artificial Sequence
  Description of Artificial Sequence: Synthetic oligonucleotide
gaguaucauucucagacuu

SEQ ID NO: 2023708 - RNA, 19 nt, Artificial Sequence
  Description of Artificial Sequence: Synthetic oligonucleotide
cugacacuccucauauuga

SEQ ID NO: 2023709 - RNA, 19 nt, Artificial Sequence
  Description of Artificial Sequence: Synthetic oligonucleotide
guaucauucucagacuugu

SEQ ID NO: 2023710 - RNA, 19 nt, Artificial Sequence
  Description of Artificial Sequence: Synthetic oligonucleotide
uuguggugaugauggcucu

SEQ ID NO: 2023711 - RNA, 19 nt, Artificial Sequence
  Description of Artificial Sequence: Synthetic oligonucleotide
uguuucugacacuccucau

SEQ ID NO: 2023712 - RNA, 19 nt, Artificial Sequence
  Description of Artificial Sequence: Synthetic oligonucleotide
cauuuuggucucucuucuc

SEQ ID NO: 2023713 - RNA, 19 nt, Artificial Sequence
  Description of Artificial Sequence: Synthetic oligonucleotide
cuccucauauugaugaagu

SEQ ID NO: 2023714 - RNA, 19 nt, Artificial Sequence
  Description of Artificial Sequence: Synthetic oligonucleotide
guugggcagaagccucagg

SEQ ID NO: 2023715 - RNA, 19 nt, Artificial Sequence
  Description of Artificial Sequence: Synthetic oligonucleotide
aguuuacggcgccucuugu

SEQ ID NO: 2023716 - RNA, 19 nt, Artificial Sequence
  Description of Artificial Sequence: Synthetic oligonucleotide
uucuuugugcugggcacga

SEQ ID NO: 2023717 - RNA, 19 nt, Artificial Sequence
  Description of Artificial Sequence: Synthetic oligonucleotide
guggguauaggucugucau

SEQ ID NO: 2023718 - RNA, 19 nt, Artificial Sequence
  Description of Artificial Sequence: Synthetic oligonucleotide
accuuguuucugacacucc

SEQ ID NO: 2023719 - RNA, 19 nt, Artificial Sequence
  Description of Artificial Sequence: Synthetic oligonucleotide
gaagugcucucugauaccu

SEQ ID NO: 2023720 - RNA, 19 nt, Artificial Sequence
  Description of Artificial Sequence: Synthetic oligonucleotide
cuuuuagcuuuauguggga

SEQ ID NO: 2023721 - RNA, 19 nt, Artificial Sequence
  Description of Artificial Sequence: Synthetic oligonucleotide
gggcagaagccucaggcug

SEQ ID NO: 2023722 - RNA, 19 nt, Artificial Sequence
  Description of Artificial Sequence: Synthetic oligonucleotide
caguuagggagcagcgcac

SEQ ID NO: 2023723 - RNA, 19 nt, Artificial Sequence
  Description of Artificial Sequence: Synthetic oligonucleotide
ucgaaggccgaggaggcuc

SEQ ID NO: 2023724 - RNA, 19 nt, Artificial Sequence
  Description of Artificial Sequence: Synthetic oligonucleotide
aaaaugcuuuuagcuuuau

SEQ ID NO: 2023725 - RNA, 19 nt, Artificial Sequence
  Description of Artificial Sequence: Synthetic oligonucleotide
ucaucgcucaaggauccuc

SEQ ID NO: 2023726 - RNA, 19 nt, Artificial Sequence
  Description of Artificial Sequence: Synthetic oligonucleotide
augaggugaacuccuucuu

SEQ ID NO: 2023727 - RNA, 19 nt, Artificial Sequence
  Description of Artificial Sequence: Synthetic oligonucleotide
gggaauagguauaaaccuc

SEQ ID NO: 2023728 - RNA, 19 nt, Artificial Sequence
  Description of Artificial Sequence: Synthetic oligonucleotide
ugcugucaucgcucaagga

SEQ ID NO: 2023729 - RNA, 19 nt, Artificial Sequence
  Description of Artificial Sequence: Synthetic oligonucleotide
uguugggcagaagccucag

SEQ ID NO: 2023730 - RNA, 19 nt, Artificial Sequence
  Description of Artificial Sequence: Synthetic oligonucleotide
agaacaguuggugcggauu

SEQ ID NO: 2023731 - RNA, 19 nt, Artificial Sequence
  Description of Artificial Sequence: Synthetic oligonucleotide
gaggaguaucauucucaga

SEQ ID NO: 2023732 - RNA, 19 nt, Artificial Sequence
  Description of Artificial Sequence: Synthetic oligonucleotide
ucugggcaacaaacagcca

SEQ ID NO: 2023733 - RNA, 19 nt, Artificial Sequence
  Description of Artificial Sequence: Synthetic oligonucleotide
uccccagugcccuucucuc

SEQ ID NO: 2023734 - RNA, 19 nt, Artificial Sequence
  Description of Artificial Sequence: Synthetic oligonucleotide
auguggugaccagccaggg

SEQ ID NO: 2023735 - RNA, 19 nt, Artificial Sequence
  Description of Artificial Sequence: Synthetic oligonucleotide
caugugguccucccucuuc

SEQ ID NO: 2023736 - RNA, 19 nt, Artificial Sequence
  Description of Artificial Sequence: Synthetic oligonucleotide
agccaaugucaggauauca

SEQ ID NO: 2023737 - RNA, 19 nt, Artificial Sequence
  Description of Artificial Sequence: Synthetic oligonucleotide
gaauagcucagguggguau

SEQ ID NO: 2023738 - RNA, 19 nt, Artificial Sequence
  Description of Artificial Sequence: Synthetic oligonucleotide
gucaugcugucaucgcuca

SEQ ID NO: 2023739 - RNA, 19 nt, Artificial Sequence
  Description of Artificial Sequence: Synthetic oligonucleotide
uuacggcgccucuuguggu

SEQ ID NO: 2023740 - RNA, 19 nt, Artificial Sequence
  Description of Artificial Sequence: Synthetic oligonucleotide
guuggugcggauucuuugu

SEQ ID NO: 2023741 - RNA, 19 nt, Artificial Sequence
  Description of Artificial Sequence: Synthetic oligonucleotide
gaccugaagcucuggcaga

SEQ ID NO: 2023742 - RNA, 19 nt, Artificial Sequence
  Description of Artificial Sequence: Synthetic oligonucleotide
caggaugcuacaucagcaa

SEQ ID NO: 2023743 - RNA, 19 nt, Artificial Sequence
  Description of Artificial Sequence: Synthetic oligonucleotide
agcccaucuccguccaugu

SEQ ID NO: 2023744 - RNA, 19 nt, Artificial Sequence
  Description of Artificial Sequence: Synthetic oligonucleotide
aucgcucaaggauccuccu

SEQ ID NO: 2023745 - RNA, 19 nt, Artificial Sequence
  Description of Artificial Sequence: Synthetic oligonucleotide
ugugccucagggugaguuu

SEQ ID NO: 2023746 - RNA, 19 nt, Artificial Sequence
  Description of Artificial Sequence: Synthetic oligonucleotide
cauuugugguauauacugu

SEQ ID NO: 2023747 - RNA, 19 nt, Artificial Sequence
  Description of Artificial Sequence: Synthetic oligonucleotide
ggcagaagccucaggcugg

SEQ ID NO: 2023748 - RNA, 19 nt, Artificial Sequence
  Description of Artificial Sequence: Synthetic oligonucleotide
agcagcgcaccuugugagu

SEQ ID NO: 2023749 - RNA, 19 nt, Artificial Sequence
  Description of Artificial Sequence: Synthetic oligonucleotide
gguauauacugugagccua

SEQ ID NO: 2023750 - RNA, 19 nt, Artificial Sequence
  Description of Artificial Sequence: Synthetic oligonucleotide
cuucuugccgcggguguag

SEQ ID NO: 2023751 - RNA, 19 nt, Artificial Sequence
  Description of Artificial Sequence: Synthetic oligonucleotide
aggagaugguucguccaug

SEQ ID NO: 2023752 - RNA, 19 nt, Artificial Sequence
  Description of Artificial Sequence: Synthetic oligonucleotide
ugggugugccucagcacau

SEQ ID NO: 2023753 - RNA, 19 nt, Artificial Sequence
  Description of Artificial Sequence: Synthetic oligonucleotide
gcugucaucgcucaaggau

SEQ ID NO: 2023754 - RNA, 19 nt, Artificial Sequence
  Description of Artificial Sequence: Synthetic oligonucleotide
cuugggcuuguggugauga

SEQ ID NO: 2023755 - RNA, 19 nt, Artificial Sequence
  Description of Artificial Sequence: Synthetic oligonucleotide
ccuugugaguguugggcag

SEQ ID NO: 2023756 - RNA, 19 nt, Artificial Sequence
  Description of Artificial Sequence: Synthetic oligonucleotide
auguguggcucgaacgcug

SEQ ID NO: 2023757 - RNA, 19 nt, Artificial Sequence
  Description of Artificial Sequence: Synthetic oligonucleotide
ugugaguguugggcagaag

SEQ ID NO: 2023758 - RNA, 19 nt, Artificial Sequence
  Description of Artificial Sequence: Synthetic oligonucleotide
ugaguuuacggcgccucuu

SEQ ID NO: 2023759 - RNA, 19 nt, Artificial Sequence
  Description of Artificial Sequence: Synthetic oligonucleotide
ggagaugguucguccauga

SEQ ID NO: 2023760 - RNA, 19 nt, Artificial Sequence
  Description of Artificial Sequence: Synthetic oligonucleotide
guacuucuugccgcgggug

SEQ ID NO: 2023761 - RNA, 19 nt, Artificial Sequence
  Description of Artificial Sequence: Synthetic oligonucleotide
uggccagauagcccaucuc

SEQ ID NO: 2023762 - RNA, 19 nt, Artificial Sequence
  Description of Artificial Sequence: Synthetic oligonucleotide
uggcagacggcaggguagc

SEQ ID NO: 2023763 - RNA, 19 nt, Artificial Sequence
  Description of Artificial Sequence: Synthetic oligonucleotide
gugcggauucuuugugcug

SEQ ID NO: 2023764 - RNA, 19 nt, Artificial Sequence
  Description of Artificial Sequence: Synthetic oligonucleotide
cgauguguggcucgaacgc

SEQ ID NO: 2023765 - RNA, 19 nt, Artificial Sequence
  Description of Artificial Sequence: Synthetic oligonucleotide
uggacagccgcugguacuu

SEQ ID NO: 2023766 - RNA, 19 nt, Artificial Sequence
  Description of Artificial Sequence: Synthetic oligonucleotide
ucuugccgcggguguagac

SEQ ID NO: 2023767 - RNA, 19 nt, Artificial Sequence
  Description of Artificial Sequence: Synthetic oligonucleotide
ggagcagcgcaccuuguga

SEQ ID NO: 2023768 - RNA, 19 nt, Artificial Sequence
  Description of Artificial Sequence: Synthetic oligonucleotide
cugugagccuaugugguga

SEQ ID NO: 2023769 - RNA, 19 nt, Artificial Sequence
  Description of Artificial Sequence: Synthetic oligonucleotide
gguggguauaggucuguca

SEQ ID NO: 2023770 - RNA, 19 nt, Artificial Sequence
  Description of Artificial Sequence: Synthetic oligonucleotide
gccuauguggugaccagcc

SEQ ID NO: 2023771 - RNA, 19 nt, Artificial Sequence
  Description of Artificial Sequence: Synthetic oligonucleotide
cgcuguguaaucgaaggcc

SEQ ID NO: 2023772 - RNA, 19 nt, Artificial Sequence
  Description of Artificial Sequence: Synthetic oligonucleotide
uuagggagcagcgcaccuu

SEQ ID NO: 2023773 - RNA, 19 nt, Artificial Sequence
  Description of Artificial Sequence: Synthetic oligonucleotide
ugcaguaggcaggcaggga

SEQ ID NO: 2023774 - RNA, 19 nt, Artificial Sequence
  Description of Artificial Sequence: Synthetic oligonucleotide
cuguguaaucgaaggccga

SEQ ID NO: 2023775 - RNA, 19 nt, Artificial Sequence
  Description of Artificial Sequence: Synthetic oligonucleotide
gccgcugguacuucuugcc

SEQ ID NO: 2023776 - RNA, 19 nt, Artificial Sequence
  Description of Artificial Sequence: Synthetic oligonucleotide
gaguguugggcagaagccu

SEQ ID NO: 2023777 - RNA, 19 nt, Artificial Sequence
  Description of Artificial Sequence: Synthetic oligonucleotide
ccaguuagggagcagcgca

SEQ ID NO: 2023778 - RNA, 19 nt, Artificial Sequence
  Description of Artificial Sequence: Synthetic oligonucleotide
augugccucagggugaguu

SEQ ID NO: 2023779 - RNA, 19 nt, Artificial Sequence
  Description of Artificial Sequence: Synthetic oligonucleotide
uacggcgccucuugugguc

SEQ ID NO: 2023780 - RNA, 19 nt, Artificial Sequence
  Description of Artificial Sequence: Synthetic oligonucleotide
ucgcucaaggauccuccuu

SEQ ID NO: 2023781 - RNA, 19 nt, Artificial Sequence
  Description of Artificial Sequence: Synthetic oligonucleotide
gugaguuugcagaacaguu

SEQ ID NO: 2023782 - RNA, 19 nt, Artificial Sequence
  Description of Artificial Sequence: Synthetic oligonucleotide
cacagagaggaaucuucaa

SEQ ID NO: 2023783 - RNA, 19 nt, Artificial Sequence
  Description of Artificial Sequence: Synthetic oligonucleotide
aguaggcaggcagggacau

SEQ ID NO: 2023784 - RNA, 19 nt, Artificial Sequence
  Description of Artificial Sequence: Synthetic oligonucleotide
caguaggcaggcagggaca

SEQ ID NO: 2023785 - RNA, 19 nt, Artificial Sequence
  Description of Artificial Sequence: Synthetic oligonucleotide
ggugaugauggcucuugaa

SEQ ID NO: 2023786 - RNA, 19 nt, Artificial Sequence
  Description of Artificial Sequence: Synthetic oligonucleotide
auucucagacuuguccaua

SEQ ID NO: 2023787 - RNA, 19 nt, Artificial Sequence
  Description of Artificial Sequence: Synthetic oligonucleotide
ggcgcaggaaagcucgcac

SEQ ID NO: 2023788 - RNA, 19 nt, Artificial Sequence
  Description of Artificial Sequence: Synthetic oligonucleotide
gugaccagccagggguggg

SEQ ID NO: 2023789 - RNA, 19 nt, Artificial Sequence
  Description of Artificial Sequence: Synthetic oligonucleotide
gauguguggcucgaacgcu

SEQ ID NO: 2023790 - RNA, 19 nt, Artificial Sequence
  Description of Artificial Sequence: Synthetic oligonucleotide
agcucgcacaucaggagau

SEQ ID NO: 2023791 - RNA, 19 nt, Artificial Sequence
  Description of Artificial Sequence: Synthetic oligonucleotide
acaucaggagaugguucgu

SEQ ID NO: 2023792 - RNA, 19 nt, Artificial Sequence
  Description of Artificial Sequence: Synthetic oligonucleotide
gccgaggaggcucuggaca

SEQ ID NO: 2023793 - RNA, 19 nt, Artificial Sequence
  Description of Artificial Sequence: Synthetic oligonucleotide
ccgaggaggcucuggacag

SEQ ID NO: 2023794 - RNA, 19 nt, Artificial Sequence
  Description of Artificial Sequence: Synthetic oligonucleotide
ucuugggcuuguggugaug

SEQ ID NO: 2023795 - RNA, 19 nt, Artificial Sequence
  Description of Artificial Sequence: Synthetic oligonucleotide
auggcauuugugguauaua

SEQ ID NO: 2023796 - RNA, 19 nt, Artificial Sequence
  Description of Artificial Sequence: Synthetic oligonucleotide
acuccacaccuuguuucug

SEQ ID NO: 2023797 - RNA, 19 nt, Artificial Sequence
  Description of Artificial Sequence: Synthetic oligonucleotide
gcaccuugugaguguuggg

SEQ ID NO: 2023798 - RNA, 19 nt, Artificial Sequence
  Description of Artificial Sequence: Synthetic oligonucleotide
cagccgcugguacuucuug

SEQ ID NO: 2023799 - RNA, 19 nt, Artificial Sequence
  Description of Artificial Sequence: Synthetic oligonucleotide
ggugcggauucuuugugcu

SEQ ID NO: 2023800 - RNA, 19 nt, Artificial Sequence
  Description of Artificial Sequence: Synthetic oligonucleotide
uugggcuuguggugaugau

SEQ ID NO: 2023801 - RNA, 19 nt, Artificial Sequence
  Description of Artificial Sequence: Synthetic oligonucleotide
gccaagcucaggaugcuac

SEQ ID NO: 2023802 - RNA, 19 nt, Artificial Sequence
  Description of Artificial Sequence: Synthetic oligonucleotide
uggcgcaggaaagcucgca

SEQ ID NO: 2023803 - RNA, 19 nt, Artificial Sequence
  Description of Artificial Sequence: Synthetic oligonucleotide
gugcccuucucucuugacu

SEQ ID NO: 2023804 - RNA, 19 nt, Artificial Sequence
  Description of Artificial Sequence: Synthetic oligonucleotide
cugguacuucuugccgcgg

SEQ ID NO: 2023805 - RNA, 19 nt, Artificial Sequence
  Description of Artificial Sequence: Synthetic oligonucleotide
acaguuggugcggauucuu

SEQ ID NO: 2023806 - RNA, 19 nt, Artificial Sequence
  Description of Artificial Sequence: Synthetic oligonucleotide
gggagcagcgcaccuugug

SEQ ID NO: 2023807 - RNA, 19 nt, Artificial Sequence
  Description of Artificial Sequence: Synthetic oligonucleotide
gggcacgauguguggcucg

SEQ ID NO: 2023808 - RNA, 19 nt, Artificial Sequence
  Description of Artificial Sequence: Synthetic oligonucleotide
cuggaagcuggcucccaga

SEQ ID NO: 2023809 - RNA, 19 nt, Artificial Sequence
  Description of Artificial Sequence: Synthetic oligonucleotide
uggcucgaacgcuguguaa

SEQ ID NO: 2023810 - RNA, 19 nt, Artificial Sequence
  Description of Artificial Sequence: Synthetic oligonucleotide
gcggauucuuugugcuggg

SEQ ID NO: 2023811 - RNA, 19 nt, Artificial Sequence
  Description of Artificial Sequence: Synthetic oligonucleotide
guggcucgaacgcugugua

SEQ ID NO: 2023812 - RNA, 19 nt, Artificial Sequence
  Description of Artificial Sequence: Synthetic oligonucleotide
cuggcgcaggaaagcucgc

SEQ ID NO: 2023813 - RNA, 19 nt, Artificial Sequence
  Description of Artificial Sequence: Synthetic oligonucleotide
cagggugaguuugcagaac

SEQ ID NO: 2023814 - RNA, 19 nt, Artificial Sequence
  Description of Artificial Sequence: Synthetic oligonucleotide
cuuggucaaugaggugaac

SEQ ID NO: 2023815 - RNA, 19 nt, Artificial Sequence
  Description of Artificial Sequence: Synthetic oligonucleotide
cugucaugcugucaucgcu

SEQ ID NO: 2023816 - RNA, 19 nt, Artificial Sequence
  Description of Artificial Sequence: Synthetic oligonucleotide
uaauggcauuugugguaua

SEQ ID NO: 2023817 - RNA, 19 nt, Artificial Sequence
  Description of Artificial Sequence: Synthetic oligonucleotide
gcagcgcaccuugugagug

SEQ ID NO: 2023818 - RNA, 19 nt, Artificial Sequence
  Description of Artificial Sequence: Synthetic oligonucleotide
ggucugucagaaagucuug

SEQ ID NO: 2023819 - RNA, 19 nt, Artificial Sequence
  Description of Artificial Sequence: Synthetic oligonucleotide
cgcucaaggauccuccuuc

SEQ ID NO: 2023820 - RNA, 19 nt, Artificial Sequence
  Description of Artificial Sequence: Synthetic oligonucleotide
gcucagguggguauagguc

SEQ ID NO: 2023821 - RNA, 19 nt, Artificial Sequence
  Description of Artificial Sequence: Synthetic oligonucleotide
cgcaccuugugaguguugg

SEQ ID NO: 2023822 - RNA, 19 nt, Artificial Sequence
  Description of Artificial Sequence: Synthetic oligonucleotide
ccgcugguacuucuugccg

SEQ ID NO: 2023823 - RNA, 19 nt, Artificial Sequence
  Description of Artificial Sequence: Synthetic oligonucleotide
gcacagagaggaaucuuca

SEQ ID NO: 2023824 - RNA, 19 nt, Artificial Sequence
  Description of Artificial Sequence: Synthetic oligonucleotide
gcucgaacgcuguguaauc

SEQ ID NO: 2023825 - RNA, 19 nt, Artificial Sequence
  Description of Artificial Sequence: Synthetic oligonucleotide
guauauacugugagccuau

SEQ ID NO: 2023826 - RNA, 19 nt, Artificial Sequence
  Description of Artificial Sequence: Synthetic oligonucleotide
ggugaccagccaggggugg

SEQ ID NO: 2023827 - RNA, 19 nt, Artificial Sequence
  Description of Artificial Sequence: Synthetic oligonucleotide
ugggcacgauguguggcuc

SEQ ID NO: 2023828 - RNA, 19 nt, Artificial Sequence
  Description of Artificial Sequence: Synthetic oligonucleotide
cauacuccacaccuuguuu

SEQ ID NO: 2023829 - RNA, 19 nt, Artificial Sequence
  Description of Artificial Sequence: Synthetic oligonucleotide
guuagggagcagcgcaccu

SEQ ID NO: 2023830 - RNA, 19 nt, Artificial Sequence
  Description of Artificial Sequence: Synthetic oligonucleotide
cuacaucagcaagggccac

SEQ ID NO: 2023831 - RNA, 19 nt, Artificial Sequence
  Description of Artificial Sequence: Synthetic oligonucleotide
augcacagagaggaaucuu

SEQ ID NO: 2023832 - RNA, 19 nt, Artificial Sequence
  Description of Artificial Sequence: Synthetic oligonucleotide
cacuccucauauugaugaa

SEQ ID NO: 2023833 - RNA, 19 nt, Artificial Sequence
  Description of Artificial Sequence: Synthetic oligonucleotide
guguggcucgaacgcugug

SEQ ID NO: 2023834 - RNA, 19 nt, Artificial Sequence
  Description of Artificial Sequence: Synthetic oligonucleotide
caugcacagagaggaaucu

SEQ ID NO: 2023835 - RNA, 19 nt, Artificial Sequence
  Description of Artificial Sequence: Synthetic oligonucleotide
gcucaaggauccuccuuca

SEQ ID NO: 2023836 - RNA, 19 nt, Artificial Sequence
  Description of Artificial Sequence: Synthetic oligonucleotide
cagccaaugucaggauauc

SEQ ID NO: 2023837 - RNA, 19 nt, Artificial Sequence
  Description of Artificial Sequence: Synthetic oligonucleotide
uggccaagcucaggaugcu

SEQ ID NO: 2023838 - RNA, 19 nt, Artificial Sequence
  Description of Artificial Sequence: Synthetic oligonucleotide
gugaauagcucaggugggu

SEQ ID NO: 2023839 - RNA, 19 nt, Artificial Sequence
  Description of Artificial Sequence: Synthetic oligonucleotide
aggaggcucuggacagccg

SEQ ID NO: 2023840 - RNA, 19 nt, Artificial Sequence
  Description of Artificial Sequence: Synthetic oligonucleotide
acuucuugccgcgggugua

SEQ ID NO: 2023841 - RNA, 19 nt, Artificial Sequence
  Description of Artificial Sequence: Synthetic oligonucleotide
ggcauuugugguauauacu

SEQ ID NO: 2023842 - RNA, 19 nt, Artificial Sequence
  Description of Artificial Sequence: Synthetic oligonucleotide
gugagccuauguggugacc

SEQ ID NO: 2023843 - RNA, 19 nt, Artificial Sequence
  Description of Artificial Sequence: Synthetic oligonucleotide
gagaugguucguccaugau

SEQ ID NO: 2023844 - RNA, 19 nt, Artificial Sequence
  Description of Artificial Sequence: Synthetic oligonucleotide
cugggcacgauguguggcu

SEQ ID NO: 2023845 - RNA, 19 nt, Artificial Sequence
  Description of Artificial Sequence: Synthetic oligonucleotide
ucuuugugcugggcacgau

SEQ ID NO: 2023846 - RNA, 19 nt, Artificial Sequence
  Description of Artificial Sequence: Synthetic oligonucleotide
ugccgcggguguagaccug

SEQ ID NO: 2023847 - RNA, 19 nt, Artificial Sequence
  Description of Artificial Sequence: Synthetic oligonucleotide
gcgcaggaaagcucgcaca

SEQ ID NO: 2023848 - RNA, 19 nt, Artificial Sequence
  Description of Artificial Sequence: Synthetic oligonucleotide
cauggccaguuagggagca

SEQ ID NO: 2023849 - RNA, 19 nt, Artificial Sequence
  Description of Artificial Sequence: Synthetic oligonucleotide
ccugaguuuacggcgccuc

SEQ ID NO: 2023850 - RNA, 19 nt, Artificial Sequence
  Description of Artificial Sequence: Synthetic oligonucleotide
uccggccuugggugugccu

SEQ ID NO: 2023851 - RNA, 19 nt, Artificial Sequence
  Description of Artificial Sequence: Synthetic oligonucleotide
gauggcucuugaauuucuu

SEQ ID NO: 2023852 - RNA, 19 nt, Artificial Sequence
  Description of Artificial Sequence: Synthetic oligonucleotide
ccguccaugugguccuccc

SEQ ID NO: 2023853 - RNA, 19 nt, Artificial Sequence
  Description of Artificial Sequence: Synthetic oligonucleotide
caugcucuggaaacuuguu

SEQ ID NO: 2023854 - RNA, 19 nt, Artificial Sequence
  Description of Artificial Sequence: Synthetic oligonucleotide
caucuccguccaugugguc

SEQ ID NO: 2023855 - RNA, 19 nt, Artificial Sequence
  Description of Artificial Sequence: Synthetic oligonucleotide
agcgcaccuugugaguguu

SEQ ID NO: 2023856 - RNA, 19 nt, Artificial Sequence
  Description of Artificial Sequence: Synthetic oligonucleotide
gaccaugcacagagaggaa

SEQ ID NO: 2023857 - RNA, 19 nt, Artificial Sequence
  Description of Artificial Sequence: Synthetic oligonucleotide
cugaguuuacggcgccucu

SEQ ID NO: 2023858 - RNA, 19 nt, Artificial Sequence
  Description of Artificial Sequence: Synthetic oligonucleotide
cuugaauuucuuggucaau

SEQ ID NO: 2023859 - RNA, 19 nt, Artificial Sequence
  Description of Artificial Sequence: Synthetic oligonucleotide
caggagaugguucguccau

SEQ ID NO: 2023860 - RNA, 19 nt, Artificial Sequence
  Description of Artificial Sequence: Synthetic oligonucleotide
gguauaggucugucaugcu

SEQ ID NO: 2023861 - RNA, 19 nt, Artificial Sequence
  Description of Artificial Sequence: Synthetic oligonucleotide
gguccauuuuggucucucu

SEQ ID NO: 2023862 - RNA, 19 nt, Artificial Sequence
  Description of Artificial Sequence: Synthetic oligonucleotide
gcagacggcaggguagcuc

SEQ ID NO: 2023863 - RNA, 19 nt, Artificial Sequence
  Description of Artificial Sequence: Synthetic oligonucleotide
ggccgaggaggcucuggac

SEQ ID NO: 2023864 - RNA, 19 nt, Artificial Sequence
  Description of Artificial Sequence: Synthetic oligonucleotide
ggcucgaacgcuguguaau

SEQ ID NO: 2023865 - RNA, 19 nt, Artificial Sequence
  Description of Artificial Sequence: Synthetic oligonucleotide
cuugacugcuuuggcuucu

SEQ ID NO: 2023866 - RNA, 19 nt, Artificial Sequence
  Description of Artificial Sequence: Synthetic oligonucleotide
acagccgcugguacuucuu

SEQ ID NO: 2023867 - RNA, 19 nt, Artificial Sequence
  Description of Artificial Sequence: Synthetic oligonucleotide
ccuauguggugaccagcca

SEQ ID NO: 2023868 - RNA, 19 nt, Artificial Sequence
  Description of Artificial Sequence: Synthetic oligonucleotide
ggcacgauguguggcucga

SEQ ID NO: 2023869 - RNA, 19 nt, Artificial Sequence
  Description of Artificial Sequence: Synthetic oligonucleotide
gcucgcacaucaggagaug

SEQ ID NO: 2023870 - RNA, 19 nt, Artificial Sequence
  Description of Artificial Sequence: Synthetic oligonucleotide
cucaaggauccuccuucau

SEQ ID NO: 2023871 - RNA, 19 nt, Artificial Sequence
  Description of Artificial Sequence: Synthetic oligonucleotide
ccagauagcccaucuccgu

SEQ ID NO: 2023872 - RNA, 19 nt, Artificial Sequence
  Description of Artificial Sequence: Synthetic oligonucleotide
cgaacgcuguguaaucgaa

SEQ ID NO: 2023873 - RNA, 19 nt, Artificial Sequence
  Description of Artificial Sequence: Synthetic oligonucleotide
gugugccucagcacaugcu

SEQ ID NO: 2023874 - RNA, 19 nt, Artificial Sequence
  Description of Artificial Sequence: Synthetic oligonucleotide
ccaucuccguccauguggu

SEQ ID NO: 2023875 - RNA, 19 nt, Artificial Sequence
  Description of Artificial Sequence: Synthetic oligonucleotide
cuccggccuugggugugcc

SEQ ID NO: 2023876 - RNA, 19 nt, Artificial Sequence
  Description of Artificial Sequence: Synthetic oligonucleotide
cucugauaccuccggccuu

SEQ ID NO: 2023877 - RNA, 19 nt, Artificial Sequence
  Description of Artificial Sequence: Synthetic oligonucleotide
gcuguucucuggccagaua

SEQ ID NO: 2023878 - RNA, 19 nt, Artificial Sequence
  Description of Artificial Sequence: Synthetic oligonucleotide
cagcgcaccuugugagugu

SEQ ID NO: 2023879 - RNA, 19 nt, Artificial Sequence
  Description of Artificial Sequence: Synthetic oligonucleotide
cggauucuuugugcugggc

SEQ ID NO: 2023880 - RNA, 19 nt, Artificial Sequence
  Description of Artificial Sequence: Synthetic oligonucleotide
gccgcggguguagaccuga

SEQ ID NO: 2023881 - RNA, 19 nt, Artificial Sequence
  Description of Artificial Sequence: Synthetic oligonucleotide
gucaucgcucaaggauccu

SEQ ID NO: 2023882 - RNA, 19 nt, Artificial Sequence
  Description of Artificial Sequence: Synthetic oligonucleotide
cacaaccuccaugcccacu

SEQ ID NO: 2023883 - RNA, 19 nt, Artificial Sequence
  Description of Artificial Sequence: Synthetic oligonucleotide
gaugugccucagggugagu

SEQ ID NO: 2023884 - RNA, 19 nt, Artificial Sequence
  Description of Artificial Sequence: Synthetic oligonucleotide
ggacagccgcugguacuuc

SEQ ID NO: 2023885 - RNA, 19 nt, Artificial Sequence
  Description of Artificial Sequence: Synthetic oligonucleotide
ccucuuggucugucagaaa

SEQ ID NO: 2023886 - RNA, 19 nt, Artificial Sequence
  Description of Artificial Sequence: Synthetic oligonucleotide
ccuccggccuugggugugc

SEQ ID NO: 2023887 - RNA, 19 nt, Artificial Sequence
  Description of Artificial Sequence: Synthetic oligonucleotide
cucuggccagauagcccau

SEQ ID NO: 2023888 - RNA, 19 nt, Artificial Sequence
  Description of Artificial Sequence: Synthetic oligonucleotide
gcgcaccuugugaguguug

SEQ ID NO: 2023889 - RNA, 19 nt, Artificial Sequence
  Description of Artificial Sequence: Synthetic oligonucleotide
ccaugcccacucugggcaa

SEQ ID NO: 2023890 - RNA, 19 nt, Artificial Sequence
  Description of Artificial Sequence: Synthetic oligonucleotide
cccagugcccuucucucuu

SEQ ID NO: 2023891 - RNA, 19 nt, Artificial Sequence
  Description of Artificial Sequence: Synthetic oligonucleotide
gcacgauguguggcucgaa

SEQ ID NO: 2023892 - RNA, 19 nt, Artificial Sequence
  Description of Artificial Sequence: Synthetic oligonucleotide
ggcagacggcaggguagcu

SEQ ID NO: 2023893 - RNA, 19 nt, Artificial Sequence
  Description of Artificial Sequence: Synthetic oligonucleotide
ccgcggguguagaccugaa

SEQ ID NO: 2023894 - RNA, 19 nt, Artificial Sequence
  Description of Artificial Sequence: Synthetic oligonucleotide
cgccucuugugguccauuu

SEQ ID NO: 2023895 - RNA, 19 nt, Artificial Sequence
  Description of Artificial Sequence: Synthetic oligonucleotide
agaacaauaaacugcaucg

SEQ ID NO: 2023896 - RNA, 19 nt, Artificial Sequence
  Description of Artificial Sequence: Synthetic oligonucleotide
auucauaacauccagagug

SEQ ID NO: 2023897 - RNA, 19 nt, Artificial Sequence
  Description of Artificial Sequence: Synthetic oligonucleotide
acauauucuacucuuacgc

SEQ ID NO: 2023898 - RNA, 19 nt, Artificial Sequence
  Description of Artificial Sequence: Synthetic oligonucleotide
augacuuccaauucgaccc

SEQ ID NO: 2023899 - RNA, 19 nt, Artificial Sequence
  Description of Artificial Sequence: Synthetic oligonucleotide
guuguaaccagcuuaaggg

SEQ ID NO: 2023900 - RNA, 19 nt, Artificial Sequence
  Description of Artificial Sequence: Synthetic oligonucleotide
aaggugaccaaguaagugg

SEQ ID NO: 2023901 - RNA, 19 nt, Artificial Sequence
  Description of Artificial Sequence: Synthetic oligonucleotide
uuagguagaacauaucugc

SEQ ID NO: 2023902 - RNA, 19 nt, Artificial Sequence
  Description of Artificial Sequence: Synthetic oligonucleotide
aauagcaguccucucauag

SEQ ID NO: 2023903 - RNA, 19 nt, Artificial Sequence
  Description of Artificial Sequence: Synthetic oligonucleotide
uggaagaacaauaaacugc

SEQ ID NO: 2023904 - RNA, 19 nt, Artificial Sequence
  Description of Artificial Sequence: Synthetic oligonucleotide
aaacccuugacugaaguac

SEQ ID NO: 2023905 - RNA, 19 nt, Artificial Sequence
  Description of Artificial Sequence: Synthetic oligonucleotide
uguuguaaccagcuuaagg

SEQ ID NO: 2023906 - RNA, 19 nt, Artificial Sequence
  Description of Artificial Sequence: Synthetic oligonucleotide
aacauauucuacucuuacg

SEQ ID NO: 2023907 - RNA, 19 nt, Artificial Sequence
  Description of Artificial Sequence: Synthetic oligonucleotide
aaccugaauucuuuguggc

SEQ ID NO: 2023908 - RNA, 19 nt, Artificial Sequence
  Description of Artificial Sequence: Synthetic oligonucleotide
aaaaugguaaaacuggaua

SEQ ID NO: 2023909 - RNA, 19 nt, Artificial Sequence
  Description of Artificial Sequence: Synthetic oligonucleotide
aguaagugggcagugaugc

SEQ ID NO: 2023910 - RNA, 19 nt, Artificial Sequence
  Description of Artificial Sequence: Synthetic oligonucleotide
gauagauaaaccugaauuc

SEQ ID NO: 2023911 - RNA, 19 nt, Artificial Sequence
  Description of Artificial Sequence: Synthetic oligonucleotide
uaugguauaugguacagcu

SEQ ID NO: 2023912 - RNA, 19 nt, Artificial Sequence
  Description of Artificial Sequence: Synthetic oligonucleotide
uuuagguagaacauaucug

SEQ ID NO: 2023913 - RNA, 19 nt, Artificial Sequence
  Description of Artificial Sequence: Synthetic oligonucleotide
ucgugaggaaaacaaaagg

SEQ ID NO: 2023914 - RNA, 19 nt, Artificial Sequence
  Description of Artificial Sequence: Synthetic oligonucleotide
ugguauaugguacagcugu

SEQ ID NO: 2023915 - RNA, 19 nt, Artificial Sequence
  Description of Artificial Sequence: Synthetic oligonucleotide
uggccaaugaguauggaag

SEQ ID NO: 2023916 - RNA, 19 nt, Artificial Sequence
  Description of Artificial Sequence: Synthetic oligonucleotide
uucguagacauguacauga

SEQ ID NO: 2023917 - RNA, 19 nt, Artificial Sequence
  Description of Artificial Sequence: Synthetic oligonucleotide
uguaguaaggaguggagug

SEQ ID NO: 2023918 - RNA, 19 nt, Artificial Sequence
  Description of Artificial Sequence: Synthetic oligonucleotide
ucaauaugguauaugguac

SEQ ID NO: 2023919 - RNA, 19 nt, Artificial Sequence
  Description of Artificial Sequence: Synthetic oligonucleotide
ugugauucauaacauccag

SEQ ID NO: 2023920 - RNA, 19 nt, Artificial Sequence
  Description of Artificial Sequence: Synthetic oligonucleotide
cugaaggugaccaaguaag

SEQ ID NO: 2023921 - RNA, 19 nt, Artificial Sequence
  Description of Artificial Sequence: Synthetic oligonucleotide
uuaaucuucguucguagac

SEQ ID NO: 2023922 - RNA, 19 nt, Artificial Sequence
  Description of Artificial Sequence: Synthetic oligonucleotide
uccaauucgacccucuggc

SEQ ID NO: 2023923 - RNA, 19 nt, Artificial Sequence
  Description of Artificial Sequence: Synthetic oligonucleotide
ucuuuguggcccaacaugc

SEQ ID NO: 2023924 - RNA, 19 nt, Artificial Sequence
  Description of Artificial Sequence: Synthetic oligonucleotide
ugaacacuauggaagaaca

SEQ ID NO: 2023925 - RNA, 19 nt, Artificial Sequence
  Description of Artificial Sequence: Synthetic oligonucleotide
aguuaugccaacuucucug

SEQ ID NO: 2023926 - RNA, 19 nt, Artificial Sequence
  Description of Artificial Sequence: Synthetic oligonucleotide
uauaugguacagcuguacc

SEQ ID NO: 2023927 - RNA, 19 nt, Artificial Sequence
  Description of Artificial Sequence: Synthetic oligonucleotide
uggcaaggcaucaugauga

SEQ ID NO: 2023928 - RNA, 19 nt, Artificial Sequence
  Description of Artificial Sequence: Synthetic oligonucleotide
uucacgaaucaccugaagu

SEQ ID NO: 2023929 - RNA, 19 nt, Artificial Sequence
  Description of Artificial Sequence: Synthetic oligonucleotide
uacucuuacgcuuuugucu

SEQ ID NO: 2023930 - RNA, 19 nt, Artificial Sequence
  Description of Artificial Sequence: Synthetic oligonucleotide
aaguuucccucaguuaugc

SEQ ID NO: 2023931 - RNA, 19 nt, Artificial Sequence
  Description of Artificial Sequence: Synthetic oligonucleotide
auaaacugcaucgugagga

SEQ ID NO: 2023932 - RNA, 19 nt, Artificial Sequence
  Description of Artificial Sequence: Synthetic oligonucleotide
acucuuacgcuuuugucuc

SEQ ID NO: 2023933 - RNA, 19 nt, Artificial Sequence
  Description of Artificial Sequence: Synthetic oligonucleotide
aauucuuuguggcccaaca

SEQ ID NO: 2023934 - RNA, 19 nt, Artificial Sequence
  Description of Artificial Sequence: Synthetic oligonucleotide
uccucuaacauauucuacu

SEQ ID NO: 2023935 - RNA, 19 nt, Artificial Sequence
  Description of Artificial Sequence: Synthetic oligonucleotide
auaacauccagagugccuc

SEQ ID NO: 2023936 - RNA, 19 nt, Artificial Sequence
  Description of Artificial Sequence: Synthetic oligonucleotide
ugaacauggcuguaguaag

SEQ ID NO: 2023937 - RNA, 19 nt, Artificial Sequence
  Description of Artificial Sequence: Synthetic oligonucleotide
agaacuugcugacuuguuc

SEQ ID NO: 2023938 - RNA, 19 nt, Artificial Sequence
  Description of Artificial Sequence: Synthetic oligonucleotide
gcuuaagggauuuagguag

SEQ ID NO: 2023939 - RNA, 19 nt, Artificial Sequence
  Description of Artificial Sequence: Synthetic oligonucleotide
cacuggagaaaccucaugg

SEQ ID NO: 2023940 - RNA, 19 nt, Artificial Sequence
  Description of Artificial Sequence: Synthetic oligonucleotide
uacagcuguacccaguggc

SEQ ID NO: 2023941 - RNA, 19 nt, Artificial Sequence
  Description of Artificial Sequence: Synthetic oligonucleotide
uaacauauucuacucuuac

SEQ ID NO: 2023942 - RNA, 19 nt, Artificial Sequence
  Description of Artificial Sequence: Synthetic oligonucleotide
uguaagaacuugcugacuu

SEQ ID NO: 2023943 - RNA, 19 nt, Artificial Sequence
  Description of Artificial Sequence: Synthetic oligonucleotide
ucuuguuguaaccagcuua

SEQ ID NO: 2023944 - RNA, 19 nt, Artificial Sequence
  Description of Artificial Sequence: Synthetic oligonucleotide
uucauaacauccagagugc

SEQ ID NO: 2023945 - RNA, 19 nt, Artificial Sequence
  Description of Artificial Sequence: Synthetic oligonucleotide
uggagaaaccucauggaca

SEQ ID NO: 2023946 - RNA, 19 nt, Artificial Sequence
  Description of Artificial Sequence: Synthetic oligonucleotide
ucuaacauauucuacucuu

SEQ ID NO: 2023947 - RNA, 19 nt, Artificial Sequence
  Description of Artificial Sequence: Synthetic oligonucleotide
uguuuucucagaaugccuc

SEQ ID NO: 2023948 - RNA, 19 nt, Artificial Sequence
  Description of Artificial Sequence: Synthetic oligonucleotide
caccugaacacuauggaag

SEQ ID NO: 2023949 - RNA, 19 nt, Artificial Sequence
  Description of Artificial Sequence: Synthetic oligonucleotide
gauaaaccugaauucuuug

SEQ ID NO: 2023950 - RNA, 19 nt, Artificial Sequence
  Description of Artificial Sequence: Synthetic oligonucleotide
caauaaacugcaucgugag

SEQ ID NO: 2023951 - RNA, 19 nt, Artificial Sequence
  Description of Artificial Sequence: Synthetic oligonucleotide
aacucuuguuguaaccagc

SEQ ID NO: 2023952 - RNA, 19 nt, Artificial Sequence
  Description of Artificial Sequence: Synthetic oligonucleotide
aacacugaaggugaccaag

SEQ ID NO: 2023953 - RNA, 19 nt, Artificial Sequence
  Description of Artificial Sequence: Synthetic oligonucleotide
uguguaagaacuugcugac

SEQ ID NO: 2023954 - RNA, 19 nt, Artificial Sequence
  Description of Artificial Sequence: Synthetic oligonucleotide
aaugguaaaacuggauaga

SEQ ID NO: 2023955 - RNA, 19 nt, Artificial Sequence
  Description of Artificial Sequence: Synthetic oligonucleotide
auagauaaaccugaauucu

SEQ ID NO: 2023956 - RNA, 19 nt, Artificial Sequence
  Description of Artificial Sequence: Synthetic oligonucleotide
ucuacucuuacgcuuuugu

SEQ ID NO: 2023957 - RNA, 19 nt, Artificial Sequence
  Description of Artificial Sequence: Synthetic oligonucleotide
cuugacugaaguaccagug

SEQ ID NO: 2023958 - RNA, 19 nt, Artificial Sequence
  Description of Artificial Sequence: Synthetic oligonucleotide
gaacuaggccaguauagag

SEQ ID NO: 2023959 - RNA, 19 nt, Artificial Sequence
  Description of Artificial Sequence: Synthetic oligonucleotide
guaccagugccauggaugg

SEQ ID NO: 2023960 - RNA, 19 nt, Artificial Sequence
  Description of Artificial Sequence: Synthetic oligonucleotide
ugaaugugauucauaacau

SEQ ID NO: 2023961 - RNA, 19 nt, Artificial Sequence
  Description of Artificial Sequence: Synthetic oligonucleotide
cuucaggugggcuagugag

SEQ ID NO: 2023962 - RNA, 19 nt, Artificial Sequence
  Description of Artificial Sequence: Synthetic oligonucleotide
cuugagugagcugagcugg

SEQ ID NO: 2023963 - RNA, 19 nt, Artificial Sequence
  Description of Artificial Sequence: Synthetic oligonucleotide
uugacugaaguaccagugc

SEQ ID NO: 2023964 - RNA, 19 nt, Artificial Sequence
  Description of Artificial Sequence: Synthetic oligonucleotide
cagccgugaaugaagaagg

SEQ ID NO: 2023965 - RNA, 19 nt, Artificial Sequence
  Description of Artificial Sequence: Synthetic oligonucleotide
aguauggaagaaaauagca

SEQ ID NO: 2023966 - RNA, 19 nt, Artificial Sequence
  Description of Artificial Sequence: Synthetic oligonucleotide
accugaauucuuuguggcc

SEQ ID NO: 2023967 - RNA, 19 nt, Artificial Sequence
  Description of Artificial Sequence: Synthetic oligonucleotide
aacccuugacugaaguacc

SEQ ID NO: 2023968 - RNA, 19 nt, Artificial Sequence
  Description of Artificial Sequence: Synthetic oligonucleotide
cuugugaacgcucuugcac

SEQ ID NO: 2023969 - RNA, 19 nt, Artificial Sequence
  Description of Artificial Sequence: Synthetic oligonucleotide
gccucaauaugguauaugg

SEQ ID NO: 2023970 - RNA, 19 nt, Artificial Sequence
  Description of Artificial Sequence: Synthetic oligonucleotide
aaugccucaauaugguaua

SEQ ID NO: 2023971 - RNA, 19 nt, Artificial Sequence
  Description of Artificial Sequence: Synthetic oligonucleotide
agcacauuugacaaaagca

SEQ ID NO: 2023972 - RNA, 19 nt, Artificial Sequence
  Description of Artificial Sequence: Synthetic oligonucleotide
cucagaaugccucaauaug

SEQ ID NO: 2023973 - RNA, 19 nt, Artificial Sequence
  Description of Artificial Sequence: Synthetic oligonucleotide
uuuguggcccaacaugcug

SEQ ID NO: 2023974 - RNA, 19 nt, Artificial Sequence
  Description of Artificial Sequence: Synthetic oligonucleotide
aaucaccugaaguuucccu

SEQ ID NO: 2023975 - RNA, 19 nt, Artificial Sequence
  Description of Artificial Sequence: Synthetic oligonucleotide
ucguucguagacauguaca

SEQ ID NO: 2023976 - RNA, 19 nt, Artificial Sequence
  Description of Artificial Sequence: Synthetic oligonucleotide
uggaagaaaauagcagucc

SEQ ID NO: 2023977 - RNA, 19 nt, Artificial Sequence
  Description of Artificial Sequence: Synthetic oligonucleotide
uugugaacgcucuugcaca

SEQ ID NO: 2023978 - RNA, 19 nt, Artificial Sequence
  Description of Artificial Sequence: Synthetic oligonucleotide
cauuucacgaaucaccuga

SEQ ID NO: 2023979 - RNA, 19 nt, Artificial Sequence
  Description of Artificial Sequence: Synthetic oligonucleotide
uuguaaccagcuuaaggga

SEQ ID NO: 2023980 - RNA, 19 nt, Artificial Sequence
  Description of Artificial Sequence: Synthetic oligonucleotide
ggagaaaccucauggacag

SEQ ID NO: 2023981 - RNA, 19 nt, Artificial Sequence
  Description of Artificial Sequence: Synthetic oligonucleotide
guauccacagaacaccaug

SEQ ID NO: 2023982 - RNA, 19 nt, Artificial Sequence
  Description of Artificial Sequence: Synthetic oligonucleotide
uguaaccagcuuaagggau

SEQ ID NO: 2023983 - RNA, 19 nt, Artificial Sequence
  Description of Artificial Sequence: Synthetic oligonucleotide
cauagcucccugaagugag

SEQ ID NO: 2023984 - RNA, 19 nt, Artificial Sequence
  Description of Artificial Sequence: Synthetic oligonucleotide
auggaagaaaauagcaguc

SEQ ID NO: 2023985 - RNA, 19 nt, Artificial Sequence
  Description of Artificial Sequence: Synthetic oligonucleotide
aacgcucuugcacaccuga

SEQ ID NO: 2023986 - RNA, 19 nt, Artificial Sequence
  Description of Artificial Sequence: Synthetic oligonucleotide
augaguauggaagaaaaua

SEQ ID NO: 2023987 - RNA, 19 nt, Artificial Sequence
  Description of Artificial Sequence: Synthetic oligonucleotide
ugaccaaguaagugggcag

SEQ ID NO: 2023988 - RNA, 19 nt, Artificial Sequence
  Description of Artificial Sequence: Synthetic oligonucleotide
guaguaaggaguggagugg

SEQ ID NO: 2023989 - RNA, 19 nt, Artificial Sequence
  Description of Artificial Sequence: Synthetic oligonucleotide
ugaacgcucuugcacaccu

SEQ ID NO: 2023990 - RNA, 19 nt, Artificial Sequence
  Description of Artificial Sequence: Synthetic oligonucleotide
auauucuacucuuacgcuu

SEQ ID NO: 2023991 - RNA, 19 nt, Artificial Sequence
  Description of Artificial Sequence: Synthetic oligonucleotide
uucguucguagacauguac

SEQ ID NO: 2023992 - RNA, 19 nt, Artificial Sequence
  Description of Artificial Sequence: Synthetic oligonucleotide
ucaagagcccauuggcuug

SEQ ID NO: 2023993 - RNA, 19 nt, Artificial Sequence
  Description of Artificial Sequence: Synthetic oligonucleotide
ugagcacggagacggaagc

SEQ ID NO: 2023994 - RNA, 19 nt, Artificial Sequence
  Description of Artificial Sequence: Synthetic oligonucleotide
uaaucuucguucguagaca

SEQ ID NO: 2023995 - RNA, 19 nt, Artificial Sequence
  Description of Artificial Sequence: Synthetic oligonucleotide
acuggauagauaaaccuga

SEQ ID NO: 2023996 - RNA, 19 nt, Artificial Sequence
  Description of Artificial Sequence: Synthetic oligonucleotide
aauucgacccucuggccaa

SEQ ID NO: 2023997 - RNA, 19 nt, Artificial Sequence
  Description of Artificial Sequence: Synthetic oligonucleotide
aguaccagugccauggaug

SEQ ID NO: 2023998 - RNA, 19 nt, Artificial Sequence
  Description of Artificial Sequence: Synthetic oligonucleotide
gcugguuaaucuucguucg

SEQ ID NO: 2023999 - RNA, 19 nt, Artificial Sequence
  Description of Artificial Sequence: Synthetic oligonucleotide
ucaaaucugguguucgcau

SEQ ID NO: 2024000 - RNA, 19 nt, Artificial Sequence
  Description of Artificial Sequence: Synthetic oligonucleotide
uggcccaacaugcuguaca

SEQ ID NO: 2024001 - RNA, 19 nt, Artificial Sequence
  Description of Artificial Sequence: Synthetic oligonucleotide
ugugcaguauggcuugagu

SEQ ID NO: 2024002 - RNA, 19 nt, Artificial Sequence
  Description of Artificial Sequence: Synthetic oligonucleotide
uucgcauuaguguuuucuc

SEQ ID NO: 2024003 - RNA, 19 nt, Artificial Sequence
  Description of Artificial Sequence: Synthetic oligonucleotide
cuggagaaaccucauggac

SEQ ID NO: 2024004 - RNA, 19 nt, Artificial Sequence
  Description of Artificial Sequence: Synthetic oligonucleotide
cucucugaugaacuaggcc

SEQ ID NO: 2024005 - RNA, 19 nt, Artificial Sequence
  Description of Artificial Sequence: Synthetic oligonucleotide
ucgcauuaguguuuucuca

SEQ ID NO: 2024006 - RNA, 19 nt, Artificial Sequence
  Description of Artificial Sequence: Synthetic oligonucleotide
ugaacuaggccaguauaga

SEQ ID NO: 2024007 - RNA, 19 nt, Artificial Sequence
  Description of Artificial Sequence: Synthetic oligonucleotide
gguagaacauaucugcuuc

SEQ ID NO: 2024008 - RNA, 19 nt, Artificial Sequence
  Description of Artificial Sequence: Synthetic oligonucleotide
auuaguguuuucucagaau

SEQ ID NO: 2024009 - RNA, 19 nt, Artificial Sequence
  Description of Artificial Sequence: Synthetic oligonucleotide
ggaucaagagcccauuggc

SEQ ID NO: 2024010 - RNA, 19 nt, Artificial Sequence
  Description of Artificial Sequence: Synthetic oligonucleotide
gacuuguucuugugaacgc

SEQ ID NO: 2024011 - RNA, 19 nt, Artificial Sequence
  Description of Artificial Sequence: Synthetic oligonucleotide
uucaaaucugguguucgca

SEQ ID NO: 2024012 - RNA, 19 nt, Artificial Sequence
  Description of Artificial Sequence: Synthetic oligonucleotide
augcauugcuucgaaacuc

SEQ ID NO: 2024013 - RNA, 19 nt, Artificial Sequence
  Description of Artificial Sequence: Synthetic oligonucleotide
caaugaguauggaagaaaa

SEQ ID NO: 2024014 - RNA, 19 nt, Artificial Sequence
  Description of Artificial Sequence: Synthetic oligonucleotide
cauugcuucgaaacucuug

SEQ ID NO: 2024015 - RNA, 19 nt, Artificial Sequence
  Description of Artificial Sequence: Synthetic oligonucleotide
ggaagaacaauaaacugca

SEQ ID NO: 2024016 - RNA, 19 nt, Artificial Sequence
  Description of Artificial Sequence: Synthetic oligonucleotide
gguuaaucuucguucguag

SEQ ID NO: 2024017 - RNA, 19 nt, Artificial Sequence
  Description of Artificial Sequence: Synthetic oligonucleotide
acauuugacaaaagcagga

SEQ ID NO: 2024018 - RNA, 19 nt, Artificial Sequence
  Description of Artificial Sequence: Synthetic oligonucleotide
ucaccugaaguuucccuca

SEQ ID NO: 2024019 - RNA, 19 nt, Artificial Sequence
  Description of Artificial Sequence: Synthetic oligonucleotide
cucccugaagugaggaagg

SEQ ID NO: 2024020 - RNA, 19 nt, Artificial Sequence
  Description of Artificial Sequence: Synthetic oligonucleotide
accugaacacuauggaaga

SEQ ID NO: 2024021 - RNA, 19 nt, Artificial Sequence
  Description of Artificial Sequence: Synthetic oligonucleotide
aucaagagcccauuggcuu

SEQ ID NO: 2024022 - RNA, 19 nt, Artificial Sequence
  Description of Artificial Sequence: Synthetic oligonucleotide
cagagugccucucugauga

SEQ ID NO: 2024023 - RNA, 19 nt, Artificial Sequence
  Description of Artificial Sequence: Synthetic oligonucleotide
uuguggcccaacaugcugu

SEQ ID NO: 2024024 - RNA, 19 nt, Artificial Sequence
  Description of Artificial Sequence: Synthetic oligonucleotide
ugacucugcugguuaaucu

SEQ ID NO: 2024025 - RNA, 19 nt, Artificial Sequence
  Description of Artificial Sequence: Synthetic oligonucleotide
cuccagaacacugaaggug

SEQ ID NO: 2024026 - RNA, 19 nt, Artificial Sequence
  Description of Artificial Sequence: Synthetic oligonucleotide
ucgaaacucuuguuguaac

SEQ ID NO: 2024027 - RNA, 19 nt, Artificial Sequence
  Description of Artificial Sequence: Synthetic oligonucleotide
agcuuaagggauuuaggua

SEQ ID NO: 2024028 - RNA, 19 nt, Artificial Sequence
  Description of Artificial Sequence: Synthetic oligonucleotide
uagacauguacaugacuuc

SEQ ID NO: 2024029 - RNA, 19 nt, Artificial Sequence
  Description of Artificial Sequence: Synthetic oligonucleotide
uggauagauaaaccugaau

SEQ ID NO: 2024030 - RNA, 19 nt, Artificial Sequence
  Description of Artificial Sequence: Synthetic oligonucleotide
ggauagauaaaccugaauu

SEQ ID NO: 2024031 - RNA, 19 nt, Artificial Sequence
  Description of Artificial Sequence: Synthetic oligonucleotide
ucauaacauccagagugcc

SEQ ID NO: 2024032 - RNA, 19 nt, Artificial Sequence
  Description of Artificial Sequence: Synthetic oligonucleotide
ucucuguagacgucuuuac

SEQ ID NO: 2024033 - RNA, 19 nt, Artificial Sequence
  Description of Artificial Sequence: Synthetic oligonucleotide
cuuguucuugugaacgcuc

SEQ ID NO: 2024034 - RNA, 19 nt, Artificial Sequence
  Description of Artificial Sequence: Synthetic oligonucleotide
acuggaaacccuugacuga

SEQ ID NO: 2024035 - RNA, 19 nt, Artificial Sequence
  Description of Artificial Sequence: Synthetic oligonucleotide
aaugaguauggaagaaaau

SEQ ID NO: 2024036 - RNA, 19 nt, Artificial Sequence
  Description of Artificial Sequence: Synthetic oligonucleotide
aggugaccaaguaaguggg

SEQ ID NO: 2024037 - RNA, 19 nt, Artificial Sequence
  Description of Artificial Sequence: Synthetic oligonucleotide
gggaucaagagcccauugg

SEQ ID NO: 2024038 - RNA, 19 nt, Artificial Sequence
  Description of Artificial Sequence: Synthetic oligonucleotide
aguauggcuugagugagcu

SEQ ID NO: 2024039 - RNA, 19 nt, Artificial Sequence
  Description of Artificial Sequence: Synthetic oligonucleotide
ugguaaaacuggauagaua

SEQ ID NO: 2024040 - RNA, 19 nt, Artificial Sequence
  Description of Artificial Sequence: Synthetic oligonucleotide
agcuguacccaguggcuuc

SEQ ID NO: 2024041 - RNA, 19 nt, Artificial Sequence
  Description of Artificial Sequence: Synthetic oligonucleotide
ugggcuagugaguauccac

SEQ ID NO: 2024042 - RNA, 19 nt, Artificial Sequence
  Description of Artificial Sequence: Synthetic oligonucleotide
uaguaaggaguggaguggc

SEQ ID NO: 2024043 - RNA, 19 nt, Artificial Sequence
  Description of Artificial Sequence: Synthetic oligonucleotide
aguucaguucccuccugug

SEQ ID NO: 2024044 - RNA, 19 nt, Artificial Sequence
  Description of Artificial Sequence: Synthetic oligonucleotide
ucuugugaacgcucuugca

SEQ ID NO: 2024045 - RNA, 19 nt, Artificial Sequence
  Description of Artificial Sequence: Synthetic oligonucleotide
acaccugaacacuauggaa

SEQ ID NO: 2024046 - RNA, 19 nt, Artificial Sequence
  Description of Artificial Sequence: Synthetic oligonucleotide
aaguaagugggcagugaug

SEQ ID NO: 2024047 - RNA, 19 nt, Artificial Sequence
  Description of Artificial Sequence: Synthetic oligonucleotide
uucgaaacucuuguuguaa

SEQ ID NO: 2024048 - RNA, 19 nt, Artificial Sequence
  Description of Artificial Sequence: Synthetic oligonucleotide
acgucuuuacaguucaguu

SEQ ID NO: 2024049 - RNA, 19 nt, Artificial Sequence
  Description of Artificial Sequence: Synthetic oligonucleotide
cagcaauguccacagcacg

SEQ ID NO: 2024050 - RNA, 19 nt, Artificial Sequence
  Description of Artificial Sequence: Synthetic oligonucleotide
aacugcaucgugaggaaaa

SEQ ID NO: 2024051 - RNA, 19 nt, Artificial Sequence
  Description of Artificial Sequence: Synthetic oligonucleotide
acugcaucgugaggaaaac

SEQ ID NO: 2024052 - RNA, 19 nt, Artificial Sequence
  Description of Artificial Sequence: Synthetic oligonucleotide
cuacucuuacgcuuuuguc

SEQ ID NO: 2024053 - RNA, 19 nt, Artificial Sequence
  Description of Artificial Sequence: Synthetic oligonucleotide
guuaaucuucguucguaga

SEQ ID NO: 2024054 - RNA, 19 nt, Artificial Sequence
  Description of Artificial Sequence: Synthetic oligonucleotide
uccagagugccucucugau

SEQ ID NO: 2024055 - RNA, 19 nt, Artificial Sequence
  Description of Artificial Sequence: Synthetic oligonucleotide
ucuuuacaguucaguuccc

SEQ ID NO: 2024056 - RNA, 19 nt, Artificial Sequence
  Description of Artificial Sequence: Synthetic oligonucleotide
ugugaacgcucuugcacac

SEQ ID NO: 2024057 - RNA, 19 nt, Artificial Sequence
  Description of Artificial Sequence: Synthetic oligonucleotide
uaagugggcagugaugcau

SEQ ID NO: 2024058 - RNA, 19 nt, Artificial Sequence
  Description of Artificial Sequence: Synthetic oligonucleotide
aggugugcaguauggcuug

SEQ ID NO: 2024059 - RNA, 19 nt, Artificial Sequence
  Description of Artificial Sequence: Synthetic oligonucleotide
ucguagacauguacaugac

SEQ ID NO: 2024060 - RNA, 19 nt, Artificial Sequence
  Description of Artificial Sequence: Synthetic oligonucleotide
cauuggcuuguguaagaac

SEQ ID NO: 2024061 - RNA, 19 nt, Artificial Sequence
  Description of Artificial Sequence: Synthetic oligonucleotide
gugaacauggcuguaguaa

SEQ ID NO: 2024062 - RNA, 19 nt, Artificial Sequence
  Description of Artificial Sequence: Synthetic oligonucleotide
ugcuguacaccagcaaugu

SEQ ID NO: 2024063 - RNA, 19 nt, Artificial Sequence
  Description of Artificial Sequence: Synthetic oligonucleotide
augguaaaacuggauagau

SEQ ID NO: 2024064 - RNA, 19 nt, Artificial Sequence
  Description of Artificial Sequence: Synthetic oligonucleotide
uaagggauuuagguagaac

SEQ ID NO: 2024065 - RNA, 19 nt, Artificial Sequence
  Description of Artificial Sequence: Synthetic oligonucleotide
cuccucuaacauauucuac

SEQ ID NO: 2024066 - RNA, 19 nt, Artificial Sequence
  Description of Artificial Sequence: Synthetic oligonucleotide
aggugggcuagugaguauc

SEQ ID NO: 2024067 - RNA, 19 nt, Artificial Sequence
  Description of Artificial Sequence: Synthetic oligonucleotide
cugacuuguucuugugaac

SEQ ID NO: 2024068 - RNA, 19 nt, Artificial Sequence
  Description of Artificial Sequence: Synthetic oligonucleotide
aacuugcugacuuguucuu

SEQ ID NO: 2024069 - RNA, 19 nt, Artificial Sequence
  Description of Artificial Sequence: Synthetic oligonucleotide
gguacagcuguacccagug

SEQ ID NO: 2024070 - RNA, 19 nt, Artificial Sequence
  Description of Artificial Sequence: Synthetic oligonucleotide
aacucacagcugccuuccg

SEQ ID NO: 2024071 - RNA, 19 nt, Artificial Sequence
  Description of Artificial Sequence: Synthetic oligonucleotide
gagugagcugagcugggac

SEQ ID NO: 2024072 - RNA, 19 nt, Artificial Sequence
  Description of Artificial Sequence: Synthetic oligonucleotide
gauuuagguagaacauauc

SEQ ID NO: 2024073 - RNA, 19 nt, Artificial Sequence
  Description of Artificial Sequence: Synthetic oligonucleotide
augugauucauaacaucca

SEQ ID NO: 2024074 - RNA, 19 nt, Artificial Sequence
  Description of Artificial Sequence: Synthetic oligonucleotide
uggaaacccuugacugaag

SEQ ID NO: 2024075 - RNA, 19 nt, Artificial Sequence
  Description of Artificial Sequence: Synthetic oligonucleotide
acucuuguuguaaccagcu

SEQ ID NO: 2024076 - RNA, 19 nt, Artificial Sequence
  Description of Artificial Sequence: Synthetic oligonucleotide
ccagcuuaagggauuuagg

SEQ ID NO: 2024077 - RNA, 19 nt, Artificial Sequence
  Description of Artificial Sequence: Synthetic oligonucleotide
gcagccgugaaugaagaag

SEQ ID NO: 2024078 - RNA, 19 nt, Artificial Sequence
  Description of Artificial Sequence: Synthetic oligonucleotide
uguugacucugcugguuaa

SEQ ID NO: 2024079 - RNA, 19 nt, Artificial Sequence
  Description of Artificial Sequence: Synthetic oligonucleotide
caauucgacccucuggcca

SEQ ID NO: 2024080 - RNA, 19 nt, Artificial Sequence
  Description of Artificial Sequence: Synthetic oligonucleotide
ucauggacagagggcagug

SEQ ID NO: 2024081 - RNA, 19 nt, Artificial Sequence
  Description of Artificial Sequence: Synthetic oligonucleotide
agauaaaccugaauucuuu

SEQ ID NO: 2024082 - RNA, 19 nt, Artificial Sequence
  Description of Artificial Sequence: Synthetic oligonucleotide
gcaguccucucauagcucc

SEQ ID NO: 2024083 - RNA, 19 nt, Artificial Sequence
  Description of Artificial Sequence: Synthetic oligonucleotide
agugccucucugaugaacu

SEQ ID NO: 2024084 - RNA, 19 nt, Artificial Sequence
  Description of Artificial Sequence: Synthetic oligonucleotide
cauuaguguuuucucagaa

SEQ ID NO: 2024085 - RNA, 19 nt, Artificial Sequence
  Description of Artificial Sequence: Synthetic oligonucleotide
acggaagcugggucaggac

SEQ ID NO: 2024086 - RNA, 19 nt, Artificial Sequence
  Description of Artificial Sequence: Synthetic oligonucleotide
guagacauguacaugacuu

SEQ ID NO: 2024087 - RNA, 19 nt, Artificial Sequence
  Description of Artificial Sequence: Synthetic oligonucleotide
acuuguucuugugaacgcu

SEQ ID NO: 2024088 - RNA, 19 nt, Artificial Sequence
  Description of Artificial Sequence: Synthetic oligonucleotide
gaaacccuugacugaagua

SEQ ID NO: 2024089 - RNA, 19 nt, Artificial Sequence
  Description of Artificial Sequence: Synthetic oligonucleotide
cuuaagggauuuagguaga

SEQ ID NO: 2024090 - RNA, 19 nt, Artificial Sequence
  Description of Artificial Sequence: Synthetic oligonucleotide
ugguuaaucuucguucgua

SEQ ID NO: 2024091 - RNA, 19 nt, Artificial Sequence
  Description of Artificial Sequence: Synthetic oligonucleotide
gaaugccucaauaugguau

SEQ ID NO: 2024092 - RNA, 19 nt, Artificial Sequence
  Description of Artificial Sequence: Synthetic oligonucleotide
cacaccugaacacuaugga

SEQ ID NO: 2024093 - RNA, 19 nt, Artificial Sequence
  Description of Artificial Sequence: Synthetic oligonucleotide
caguauagagggccagcag

SEQ ID NO: 2024094 - RNA, 19 nt, Artificial Sequence
  Description of Artificial Sequence: Synthetic oligonucleotide
ucugcugguuaaucuucgu

SEQ ID NO: 2024095 - RNA, 19 nt, Artificial Sequence
  Description of Artificial Sequence: Synthetic oligonucleotide
agggauuuagguagaacau

SEQ ID NO: 2024096 - RNA, 19 nt, Artificial Sequence
  Description of Artificial Sequence: Synthetic oligonucleotide
agcccauuggcuuguguaa

SEQ ID NO: 2024097 - RNA, 19 nt, Artificial Sequence
  Description of Artificial Sequence: Synthetic oligonucleotide
ugccucaauaugguauaug

SEQ ID NO: 2024098 - RNA, 19 nt, Artificial Sequence
  Description of Artificial Sequence: Synthetic oligonucleotide
guucguagacauguacaug

SEQ ID NO: 2024099 - RNA, 19 nt, Artificial Sequence
  Description of Artificial Sequence: Synthetic oligonucleotide
cagcuuaagggauuuaggu

SEQ ID NO: 2024100 - RNA, 19 nt, Artificial Sequence
  Description of Artificial Sequence: Synthetic oligonucleotide
ccgugaaugaagaagggca

SEQ ID NO: 2024101 - RNA, 19 nt, Artificial Sequence
  Description of Artificial Sequence: Synthetic oligonucleotide
aguucccuccuguguugac

SEQ ID NO: 2024102 - RNA, 19 nt, Artificial Sequence
  Description of Artificial Sequence: Synthetic oligonucleotide
caguaguaugugcagccuc

SEQ ID NO: 2024103 - RNA, 19 nt, Artificial Sequence
  Description of Artificial Sequence: Synthetic oligonucleotide
gaguauccacagaacacca

SEQ ID NO: 2024104 - RNA, 19 nt, Artificial Sequence
  Description of Artificial Sequence: Synthetic oligonucleotide
augagcacggagacggaag

SEQ ID NO: 2024105 - RNA, 19 nt, Artificial Sequence
  Description of Artificial Sequence: Synthetic oligonucleotide
gagacggaagcugggucag

SEQ ID NO: 2024106 - RNA, 19 nt, Artificial Sequence
  Description of Artificial Sequence: Synthetic oligonucleotide
cuaacauauucuacucuua

SEQ ID NO: 2024107 - RNA, 19 nt, Artificial Sequence
  Description of Artificial Sequence: Synthetic oligonucleotide
gugaccaaguaagugggca

SEQ ID NO: 2024108 - RNA, 19 nt, Artificial Sequence
  Description of Artificial Sequence: Synthetic oligonucleotide
acggucagcaguaguaugu

SEQ ID NO: 2024109 - RNA, 19 nt, Artificial Sequence
  Description of Artificial Sequence: Synthetic oligonucleotide
uugcugacuuguucuugug

SEQ ID NO: 2024110 - RNA, 19 nt, Artificial Sequence
  Description of Artificial Sequence: Synthetic oligonucleotide
agaaugccucaauauggua

SEQ ID NO: 2024111 - RNA, 19 nt, Artificial Sequence
  Description of Artificial Sequence: Synthetic oligonucleotide
agugaacauggcuguagua

SEQ ID NO: 2024112 - RNA, 19 nt, Artificial Sequence
  Description of Artificial Sequence: Synthetic oligonucleotide
cauauucuacucuuacgcu

SEQ ID NO: 2024113 - RNA, 19 nt, Artificial Sequence
  Description of Artificial Sequence: Synthetic oligonucleotide
ugguacagcuguacccagu

SEQ ID NO: 2024114 - RNA, 19 nt, Artificial Sequence
  Description of Artificial Sequence: Synthetic oligonucleotide
uuaagggauuuagguagaa

SEQ ID NO: 2024115 - RNA, 19 nt, Artificial Sequence
  Description of Artificial Sequence: Synthetic oligonucleotide
uuguuguaaccagcuuaag

SEQ ID NO: 2024116 - RNA, 19 nt, Artificial Sequence
  Description of Artificial Sequence: Synthetic oligonucleotide
gugauucauaacauccaga

SEQ ID NO: 2024117 - RNA, 19 nt, Artificial Sequence
  Description of Artificial Sequence: Synthetic oligonucleotide
aguggguucccaggacaac

SEQ ID NO: 2024118 - RNA, 19 nt, Artificial Sequence
  Description of Artificial Sequence: Synthetic oligonucleotide
acuugcugacuuguucuug

SEQ ID NO: 2024119 - RNA, 19 nt, Artificial Sequence
  Description of Artificial Sequence: Synthetic oligonucleotide
guuaugccaacuucucugu

SEQ ID NO: 2024120 - RNA, 19 nt, Artificial Sequence
  Description of Artificial Sequence: Synthetic oligonucleotide
cacggucagcaguaguaug

SEQ ID NO: 2024121 - RNA, 19 nt, Artificial Sequence
  Description of Artificial Sequence: Synthetic oligonucleotide
uucuacucuuacgcuuuug

SEQ ID NO: 2024122 - RNA, 19 nt, Artificial Sequence
  Description of Artificial Sequence: Synthetic oligonucleotide
augguauaugguacagcug

SEQ ID NO: 2024123 - RNA, 19 nt, Artificial Sequence
  Description of Artificial Sequence: Synthetic oligonucleotide
accaaguaagugggcagug

SEQ ID NO: 2024124 - RNA, 19 nt, Artificial Sequence
  Description of Artificial Sequence: Synthetic oligonucleotide
caguauggcuugagugagc

SEQ ID NO: 2024125 - RNA, 19 nt, Artificial Sequence
  Description of Artificial Sequence: Synthetic oligonucleotide
ggagacggaagcuggguca

SEQ ID NO: 2024126 - RNA, 19 nt, Artificial Sequence
  Description of Artificial Sequence: Synthetic oligonucleotide
cuggccaaugaguauggaa

SEQ ID NO: 2024127 - RNA, 19 nt, Artificial Sequence
  Description of Artificial Sequence: Synthetic oligonucleotide
aaacugcaucgugaggaaa

SEQ ID NO: 2024128 - RNA, 19 nt, Artificial Sequence
  Description of Artificial Sequence: Synthetic oligonucleotide
cauuugacaaaagcaggaa

SEQ ID NO: 2024129 - RNA, 19 nt, Artificial Sequence
  Description of Artificial Sequence: Synthetic oligonucleotide
gaauucuuuguggcccaac

SEQ ID NO: 2024130 - RNA, 19 nt, Artificial Sequence
  Description of Artificial Sequence: Synthetic oligonucleotide
aaguggguucccaggacaa

SEQ ID NO: 2024131 - RNA, 19 nt, Artificial Sequence
  Description of Artificial Sequence: Synthetic oligonucleotide
augccuucaggugggcuag

SEQ ID NO: 2024132 - RNA, 19 nt, Artificial Sequence
  Description of Artificial Sequence: Synthetic oligonucleotide
gaucaagagcccauuggcu

SEQ ID NO: 2024133 - RNA, 19 nt, Artificial Sequence
  Description of Artificial Sequence: Synthetic oligonucleotide
cugaauucuuuguggccca

SEQ ID NO: 2024134 - RNA, 19 nt, Artificial Sequence
  Description of Artificial Sequence: Synthetic oligonucleotide
ugaugagcacggagacgga

SEQ ID NO: 2024135 - RNA, 19 nt, Artificial Sequence
  Description of Artificial Sequence: Synthetic oligonucleotide
agccgugaaugaagaaggg

SEQ ID NO: 2024136 - RNA, 19 nt, Artificial Sequence
  Description of Artificial Sequence: Synthetic oligonucleotide
cugaaguaccagugccaug

SEQ ID NO: 2024137 - RNA, 19 nt, Artificial Sequence
  Description of Artificial Sequence: Synthetic oligonucleotide
uguguugacucugcugguu

SEQ ID NO: 2024138 - RNA, 19 nt, Artificial Sequence
  Description of Artificial Sequence: Synthetic oligonucleotide
cgaaacucuuguuguaacc

SEQ ID NO: 2024139 - RNA, 19 nt, Artificial Sequence
  Description of Artificial Sequence: Synthetic oligonucleotide
guucgcauuaguguuuucu

SEQ ID NO: 2024140 - RNA, 19 nt, Artificial Sequence
  Description of Artificial Sequence: Synthetic oligonucleotide
aucugguguucgcauuagu

SEQ ID NO: 2024141 - RNA, 19 nt, Artificial Sequence
  Description of Artificial Sequence: Synthetic oligonucleotide
ugagugagcugagcuggga

SEQ ID NO: 2024142 - RNA, 19 nt, Artificial Sequence
  Description of Artificial Sequence: Synthetic oligonucleotide
uguacccaguggcuuccuc

SEQ ID NO: 2024143 - RNA, 19 nt, Artificial Sequence
  Description of Artificial Sequence: Synthetic oligonucleotide
cuugcugacuuguucuugu

SEQ ID NO: 2024144 - RNA, 19 nt, Artificial Sequence
  Description of Artificial Sequence: Synthetic oligonucleotide
gacggaagcugggucagga

SEQ ID NO: 2024145 - RNA, 19 nt, Artificial Sequence
  Description of Artificial Sequence: Synthetic oligonucleotide
gacgucuuuacaguucagu

SEQ ID NO: 2024146 - RNA, 19 nt, Artificial Sequence
  Description of Artificial Sequence: Synthetic oligonucleotide
uaaccagcuuaagggauuu

SEQ ID NO: 2024147 - RNA, 19 nt, Artificial Sequence
  Description of Artificial Sequence: Synthetic oligonucleotide
gagugccucucugaugaac

SEQ ID NO: 2024148 - RNA, 19 nt, Artificial Sequence
  Description of Artificial Sequence: Synthetic oligonucleotide
agcaguccucucauagcuc

SEQ ID NO: 2024149 - RNA, 19 nt, Artificial Sequence
  Description of Artificial Sequence: Synthetic oligonucleotide
ccacagaacaccaugcaaa

SEQ ID NO: 2024150 - RNA, 19 nt, Artificial Sequence
  Description of Artificial Sequence: Synthetic oligonucleotide
ggccaaugaguauggaaga

SEQ ID NO: 2024151 - RNA, 19 nt, Artificial Sequence
  Description of Artificial Sequence: Synthetic oligonucleotide
cugggacucuccucuaaca

SEQ ID NO: 2024152 - RNA, 19 nt, Artificial Sequence
  Description of Artificial Sequence: Synthetic oligonucleotide
gaugagcacggagacggaa

SEQ ID NO: 2024153 - RNA, 19 nt, Artificial Sequence
  Description of Artificial Sequence: Synthetic oligonucleotide
uguggcccaacaugcugua

SEQ ID NO: 2024154 - RNA, 19 nt, Artificial Sequence
  Description of Artificial Sequence: Synthetic oligonucleotide
guaagugggcagugaugca

SEQ ID NO: 2024155 - RNA, 19 nt, Artificial Sequence
  Description of Artificial Sequence: Synthetic oligonucleotide
ccgccaugccuucaggugg

SEQ ID NO: 2024156 - RNA, 19 nt, Artificial Sequence
  Description of Artificial Sequence: Synthetic oligonucleotide
cuucgaaacucuuguugua

SEQ ID NO: 2024157 - RNA, 19 nt, Artificial Sequence
  Description of Artificial Sequence: Synthetic oligonucleotide
aagugggcagugaugcauu

SEQ ID NO: 2024158 - RNA, 19 nt, Artificial Sequence
  Description of Artificial Sequence: Synthetic oligonucleotide
ggauuuagguagaacauau

SEQ ID NO: 2024159 - RNA, 19 nt, Artificial Sequence
  Description of Artificial Sequence: Synthetic oligonucleotide
cuggaaacccuugacugaa

SEQ ID NO: 2024160 - RNA, 19 nt, Artificial Sequence
  Description of Artificial Sequence: Synthetic oligonucleotide
gcauuaguguuuucucaga

SEQ ID NO: 2024161 - RNA, 19 nt, Artificial Sequence
  Description of Artificial Sequence: Synthetic oligonucleotide
gaccccuagggcaggcuug

SEQ ID NO: 2024162 - RNA, 19 nt, Artificial Sequence
  Description of Artificial Sequence: Synthetic oligonucleotide
auuucacgaaucaccugaa

SEQ ID NO: 2024163 - RNA, 19 nt, Artificial Sequence
  Description of Artificial Sequence: Synthetic oligonucleotide
agagcccauuggcuugugu

SEQ ID NO: 2024164 - RNA, 19 nt, Artificial Sequence
  Description of Artificial Sequence: Synthetic oligonucleotide
guguugacucugcugguua

SEQ ID NO: 2024165 - RNA, 19 nt, Artificial Sequence
  Description of Artificial Sequence: Synthetic oligonucleotide
cgaaucaccugaaguuucc

SEQ ID NO: 2024166 - RNA, 19 nt, Artificial Sequence
  Description of Artificial Sequence: Synthetic oligonucleotide
ccucaguuaugccaacuuc

SEQ ID NO: 2024167 - RNA, 19 nt, Artificial Sequence
  Description of Artificial Sequence: Synthetic oligonucleotide
acuuccaauucgacccucu

SEQ ID NO: 2024168 - RNA, 19 nt, Artificial Sequence
  Description of Artificial Sequence: Synthetic oligonucleotide
ggggaucaagagcccauug

SEQ ID NO: 2024169 - RNA, 19 nt, Artificial Sequence
  Description of Artificial Sequence: Synthetic oligonucleotide
gccgugaaugaagaagggc

SEQ ID NO: 2024170 - RNA, 19 nt, Artificial Sequence
  Description of Artificial Sequence: Synthetic oligonucleotide
caaguaagugggcagugau

SEQ ID NO: 2024171 - RNA, 19 nt, Artificial Sequence
  Description of Artificial Sequence: Synthetic oligonucleotide
ggcccaacaugcuguacac

SEQ ID NO: 2024172 - RNA, 19 nt, Artificial Sequence
  Description of Artificial Sequence: Synthetic oligonucleotide
ugaauucuuuguggcccaa

SEQ ID NO: 2024173 - RNA, 19 nt, Artificial Sequence
  Description of Artificial Sequence: Synthetic oligonucleotide
aguaaggaguggaguggca

SEQ ID NO: 2024174 - RNA, 19 nt, Artificial Sequence
  Description of Artificial Sequence: Synthetic oligonucleotide
ccucuggccaaugaguaug

SEQ ID NO: 2024175 - RNA, 19 nt, Artificial Sequence
  Description of Artificial Sequence: Synthetic oligonucleotide
aguauccacagaacaccau

SEQ ID NO: 2024176 - RNA, 19 nt, Artificial Sequence
  Description of Artificial Sequence: Synthetic oligonucleotide
ccuagggcaggcuugcuga

SEQ ID NO: 2024177 - RNA, 19 nt, Artificial Sequence
  Description of Artificial Sequence: Synthetic oligonucleotide
cuucaucaagauacugagu

SEQ ID NO: 2024178 - RNA, 19 nt, Artificial Sequence
  Description of Artificial Sequence: Synthetic oligonucleotide
gcacggagacggaagcugg

SEQ ID NO: 2024179 - RNA, 19 nt, Artificial Sequence
  Description of Artificial Sequence: Synthetic oligonucleotide
uggcuugagugagcugagc

SEQ ID NO: 2024180 - RNA, 19 nt, Artificial Sequence
  Description of Artificial Sequence: Synthetic oligonucleotide
gaccaaguaagugggcagu

SEQ ID NO: 2024181 - RNA, 19 nt, Artificial Sequence
  Description of Artificial Sequence: Synthetic oligonucleotide
gugugcaguauggcuugag

SEQ ID NO: 2024182 - RNA, 19 nt, Artificial Sequence
  Description of Artificial Sequence: Synthetic oligonucleotide
gcuagugaguauccacaga

SEQ ID NO: 2024183 - RNA, 19 nt, Artificial Sequence
  Description of Artificial Sequence: Synthetic oligonucleotide
acggagacggaagcugggu

SEQ ID NO: 2024184 - RNA, 19 nt, Artificial Sequence
  Description of Artificial Sequence: Synthetic oligonucleotide
uguucgcauuaguguuuuc

SEQ ID NO: 2024185 - RNA, 19 nt, Artificial Sequence
  Description of Artificial Sequence: Synthetic oligonucleotide
gggcuagugaguauccaca

SEQ ID NO: 2024186 - RNA, 19 nt, Artificial Sequence
  Description of Artificial Sequence: Synthetic oligonucleotide
gcugggacucuccucuaac

SEQ ID NO: 2024187 - RNA, 19 nt, Artificial Sequence
  Description of Artificial Sequence: Synthetic oligonucleotide
ggaaacccuugacugaagu

SEQ ID NO: 2024188 - RNA, 19 nt, Artificial Sequence
  Description of Artificial Sequence: Synthetic oligonucleotide
uggaguggcaaggcaucau

SEQ ID NO: 2024189 - RNA, 19 nt, Artificial Sequence
  Description of Artificial Sequence: Synthetic oligonucleotide
acccuugacugaaguacca

SEQ ID NO: 2024190 - RNA, 19 nt, Artificial Sequence
  Description of Artificial Sequence: Synthetic oligonucleotide
gacuuccaauucgacccuc

SEQ ID NO: 2024191 - RNA, 19 nt, Artificial Sequence
  Description of Artificial Sequence: Synthetic oligonucleotide
gggauuuagguagaacaua

SEQ ID NO: 2024192 - RNA, 19 nt, Artificial Sequence
  Description of Artificial Sequence: Synthetic oligonucleotide
gugaacgcucuugcacacc

SEQ ID NO: 2024193 - RNA, 19 nt, Artificial Sequence
  Description of Artificial Sequence: Synthetic oligonucleotide
agacggaagcugggucagg

SEQ ID NO: 2024194 - RNA, 19 nt, Artificial Sequence
  Description of Artificial Sequence: Synthetic oligonucleotide
ccucuucauuucacgaauc

SEQ ID NO: 2024195 - RNA, 19 nt, Artificial Sequence
  Description of Artificial Sequence: Synthetic oligonucleotide
acccucuggccaaugagua

SEQ ID NO: 2024196 - RNA, 19 nt, Artificial Sequence
  Description of Artificial Sequence: Synthetic oligonucleotide
ccuuggggccagaaagcag

SEQ ID NO: 2024197 - RNA, 19 nt, Artificial Sequence
  Description of Artificial Sequence: Synthetic oligonucleotide
cauguacaugacuuccaau

SEQ ID NO: 2024198 - RNA, 19 nt, Artificial Sequence
  Description of Artificial Sequence: Synthetic oligonucleotide
caguuaugccaacuucucu

SEQ ID NO: 2024199 - RNA, 19 nt, Artificial Sequence
  Description of Artificial Sequence: Synthetic oligonucleotide
agacgucuuuacaguucag

SEQ ID NO: 2024200 - RNA, 19 nt, Artificial Sequence
  Description of Artificial Sequence: Synthetic oligonucleotide
cuuuguggcccaacaugcu

SEQ ID NO: 2024201 - RNA, 19 nt, Artificial Sequence
  Description of Artificial Sequence: Synthetic oligonucleotide
ggacaacuggaaacccuug

SEQ ID NO: 2024202 - RNA, 19 nt, Artificial Sequence
  Description of Artificial Sequence: Synthetic oligonucleotide
guggguucccaggacaacu

SEQ ID NO: 2024203 - RNA, 19 nt, Artificial Sequence
  Description of Artificial Sequence: Synthetic oligonucleotide
gcaggcuugcugaauguga

SEQ ID NO: 2024204 - RNA, 19 nt, Artificial Sequence
  Description of Artificial Sequence: Synthetic oligonucleotide
cagugaugcauugcuucga

SEQ ID NO: 2024205 - RNA, 19 nt, Artificial Sequence
  Description of Artificial Sequence: Synthetic oligonucleotide
aagagcccauuggcuugug

SEQ ID NO: 2024206 - RNA, 19 nt, Artificial Sequence
  Description of Artificial Sequence: Synthetic oligonucleotide
cagugaacauggcuguagu

SEQ ID NO: 2024207 - RNA, 19 nt, Artificial Sequence
  Description of Artificial Sequence: Synthetic oligonucleotide
ccagagugccucucugaug

SEQ ID NO: 2024208 - RNA, 19 nt, Artificial Sequence
  Description of Artificial Sequence: Synthetic oligonucleotide
gacagagggcagugaacau

SEQ ID NO: 2024209 - RNA, 19 nt, Artificial Sequence
  Description of Artificial Sequence: Synthetic oligonucleotide
gguucccaggacaacugga

SEQ ID NO: 2024210 - RNA, 19 nt, Artificial Sequence
  Description of Artificial Sequence: Synthetic oligonucleotide
guggaguggcaaggcauca

SEQ ID NO: 2024211 - RNA, 19 nt, Artificial Sequence
  Description of Artificial Sequence: Synthetic oligonucleotide
augccucaauaugguauau

SEQ ID NO: 2024212 - RNA, 19 nt, Artificial Sequence
  Description of Artificial Sequence: Synthetic oligonucleotide
ccaggacaacuggaaaccc

SEQ ID NO: 2024213 - RNA, 19 nt, Artificial Sequence
  Description of Artificial Sequence: Synthetic oligonucleotide
ggggccagaaagcagccgu

SEQ ID NO: 2024214 - RNA, 19 nt, Artificial Sequence
  Description of Artificial Sequence: Synthetic oligonucleotide
cugaugaacuaggccagua

SEQ ID NO: 2024215 - RNA, 19 nt, Artificial Sequence
  Description of Artificial Sequence: Synthetic oligonucleotide
cuucguucguagacaugua

SEQ ID NO: 2024216 - RNA, 19 nt, Artificial Sequence
  Description of Artificial Sequence: Synthetic oligonucleotide
caaaucugguguucgcauu

SEQ ID NO: 2024217 - RNA, 19 nt, Artificial Sequence
  Description of Artificial Sequence: Synthetic oligonucleotide
gcuguacccaguggcuucc

SEQ ID NO: 2024218 - RNA, 19 nt, Artificial Sequence
  Description of Artificial Sequence: Synthetic oligonucleotide
agagugccucucugaugaa

SEQ ID NO: 2024219 - RNA, 19 nt, Artificial Sequence
  Description of Artificial Sequence: Synthetic oligonucleotide
gacacuggagaaaccucau

SEQ ID NO: 2024220 - RNA, 19 nt, Artificial Sequence
  Description of Artificial Sequence: Synthetic oligonucleotide
ccaaugaguauggaagaaa

SEQ ID NO: 2024221 - RNA, 19 nt, Artificial Sequence
  Description of Artificial Sequence: Synthetic oligonucleotide
aggccaguauagagggcca

SEQ ID NO: 2024222 - RNA, 19 nt, Artificial Sequence
  Description of Artificial Sequence: Synthetic oligonucleotide
guaaccagcuuaagggauu

SEQ ID NO: 2024223 - RNA, 19 nt, Artificial Sequence
  Description of Artificial Sequence: Synthetic oligonucleotide
aaccagcuuaagggauuua

SEQ ID NO: 2024224 - RNA, 19 nt, Artificial Sequence
  Description of Artificial Sequence: Synthetic oligonucleotide
gcagcacauuugacaaaag

SEQ ID NO: 2024225 - RNA, 19 nt, Artificial Sequence
  Description of Artificial Sequence: Synthetic oligonucleotide
cuuacgcuuuugucucucu

SEQ ID NO: 2024226 - RNA, 19 nt, Artificial Sequence
  Description of Artificial Sequence: Synthetic oligonucleotide
cugguuaaucuucguucgu

SEQ ID NO: 2024227 - RNA, 19 nt, Artificial Sequence
  Description of Artificial Sequence: Synthetic oligonucleotide
cacgaaucaccugaaguuu

SEQ ID NO: 2024228 - RNA, 19 nt, Artificial Sequence
  Description of Artificial Sequence: Synthetic oligonucleotide
cccuugacugaaguaccag

SEQ ID NO: 2024229 - RNA, 19 nt, Artificial Sequence
  Description of Artificial Sequence: Synthetic oligonucleotide
gcaucgugaggaaaacaaa

SEQ ID NO: 2024230 - RNA, 19 nt, Artificial Sequence
  Description of Artificial Sequence: Synthetic oligonucleotide
ggccaguauagagggccag

SEQ ID NO: 2024231 - RNA, 19 nt, Artificial Sequence
  Description of Artificial Sequence: Synthetic oligonucleotide
gugccucucugaugaacua

SEQ ID NO: 2024232 - RNA, 19 nt, Artificial Sequence
  Description of Artificial Sequence: Synthetic oligonucleotide
cccuagggcaggcuugcug

SEQ ID NO: 2024233 - RNA, 19 nt, Artificial Sequence
  Description of Artificial Sequence: Synthetic oligonucleotide
ccucaauaugguauauggu

SEQ ID NO: 2024234 - RNA, 19 nt, Artificial Sequence
  Description of Artificial Sequence: Synthetic oligonucleotide
guaguaugugcagccuccu

SEQ ID NO: 2024235 - RNA, 19 nt, Artificial Sequence
  Description of Artificial Sequence: Synthetic oligonucleotide
guguaagaacuugcugacu

SEQ ID NO: 2024236 - RNA, 19 nt, Artificial Sequence
  Description of Artificial Sequence: Synthetic oligonucleotide
cagcagcacauuugacaaa

SEQ ID NO: 2024237 - RNA, 19 nt, Artificial Sequence
  Description of Artificial Sequence: Synthetic oligonucleotide
ccuugacugaaguaccagu

SEQ ID NO: 2024238 - RNA, 19 nt, Artificial Sequence
  Description of Artificial Sequence: Synthetic oligonucleotide
gguauaugguacagcugua

SEQ ID NO: 2024239 - RNA, 19 nt, Artificial Sequence
  Description of Artificial Sequence: Synthetic oligonucleotide
cugcugguuaaucuucguu

SEQ ID NO: 2024240 - RNA, 19 nt, Artificial Sequence
  Description of Artificial Sequence: Synthetic oligonucleotide
gccagaaagcagccgugaa

SEQ ID NO: 2024241 - RNA, 19 nt, Artificial Sequence
  Description of Artificial Sequence: Synthetic oligonucleotide
ccucucauagcucccugaa

SEQ ID NO: 2024242 - RNA, 19 nt, Artificial Sequence
  Description of Artificial Sequence: Synthetic oligonucleotide
ccugaaguuucccucaguu

SEQ ID NO: 2024243 - RNA, 19 nt, Artificial Sequence
  Description of Artificial Sequence: Synthetic oligonucleotide
caguucccuccuguguuga

SEQ ID NO: 2024244 - RNA, 19 nt, Artificial Sequence
  Description of Artificial Sequence: Synthetic oligonucleotide
guugacucugcugguuaau

SEQ ID NO: 2024245 - RNA, 19 nt, Artificial Sequence
  Description of Artificial Sequence: Synthetic oligonucleotide
gagcacggagacggaagcu

SEQ ID NO: 2024246 - RNA, 19 nt, Artificial Sequence
  Description of Artificial Sequence: Synthetic oligonucleotide
gcccaacaugcuguacacc

SEQ ID NO: 2024247 - RNA, 19 nt, Artificial Sequence
  Description of Artificial Sequence: Synthetic oligonucleotide
ccaaguaagugggcaguga

SEQ ID NO: 2024248 - RNA, 19 nt, Artificial Sequence
  Description of Artificial Sequence: Synthetic oligonucleotide
gagcugggacucuccucua

SEQ ID NO: 2024249 - RNA, 19 nt, Artificial Sequence
  Description of Artificial Sequence: Synthetic oligonucleotide
cucuuguuguaaccagcuu

SEQ ID NO: 2024250 - RNA, 19 nt, Artificial Sequence
  Description of Artificial Sequence: Synthetic oligonucleotide
cguucguagacauguacau

SEQ ID NO: 2024251 - RNA, 19 nt, Artificial Sequence
  Description of Artificial Sequence: Synthetic oligonucleotide
auucgacccucuggccaau

SEQ ID NO: 2024252 - RNA, 19 nt, Artificial Sequence
  Description of Artificial Sequence: Synthetic oligonucleotide
cggagacggaagcuggguc

SEQ ID NO: 2024253 - RNA, 19 nt, Artificial Sequence
  Description of Artificial Sequence: Synthetic oligonucleotide
ccagaaagcagccgugaau

SEQ ID NO: 2024254 - RNA, 19 nt, Artificial Sequence
  Description of Artificial Sequence: Synthetic oligonucleotide
ccauuggcuuguguaagaa

SEQ ID NO: 2024255 - RNA, 19 nt, Artificial Sequence
  Description of Artificial Sequence: Synthetic oligonucleotide
gguguucgcauuaguguuu

SEQ ID NO: 2024256 - RNA, 19 nt, Artificial Sequence
  Description of Artificial Sequence: Synthetic oligonucleotide
gccuccuuggggccagaaa

SEQ ID NO: 2024257 - RNA, 19 nt, Artificial Sequence
  Description of Artificial Sequence: Synthetic oligonucleotide
ggugugcaguauggcuuga

SEQ ID NO: 2024258 - RNA, 19 nt, Artificial Sequence
  Description of Artificial Sequence: Synthetic oligonucleotide
ggaccccuagggcaggcuu

SEQ ID NO: 2024259 - RNA, 19 nt, Artificial Sequence
  Description of Artificial Sequence: Synthetic oligonucleotide
gcauugcuucgaaacucuu

SEQ ID NO: 2024260 - RNA, 19 nt, Artificial Sequence
  Description of Artificial Sequence: Synthetic oligonucleotide
cuguacccaguggcuuccu

SEQ ID NO: 2024261 - RNA, 19 nt, Artificial Sequence
  Description of Artificial Sequence: Synthetic oligonucleotide
cccucuggccaaugaguau

SEQ ID NO: 2024262 - RNA, 19 nt, Artificial Sequence
  Description of Artificial Sequence: Synthetic oligonucleotide
ucuaaagagucuaaaaccc

SEQ ID NO: 2024263 - RNA, 19 nt, Artificial Sequence
  Description of Artificial Sequence: Synthetic oligonucleotide
agcaggauaggcuucaucc

SEQ ID NO: 2024264 - RNA, 19 nt, Artificial Sequence
  Description of Artificial Sequence: Synthetic oligonucleotide
cucuucaaaagccagaugg

SEQ ID NO: 2024265 - RNA, 19 nt, Artificial Sequence
  Description of Artificial Sequence: Synthetic oligonucleotide
cuaauuuauuucuaaagag

SEQ ID NO: 2024266 - RNA, 19 nt, Artificial Sequence
  Description of Artificial Sequence: Synthetic oligonucleotide
aaacucaaaguacugcggg

SEQ ID NO: 2024267 - RNA, 19 nt, Artificial Sequence
  Description of Artificial Sequence: Synthetic oligonucleotide
aaggcaacacuguugauag

SEQ ID NO: 2024268 - RNA, 19 nt, Artificial Sequence
  Description of Artificial Sequence: Synthetic oligonucleotide
aaagccacagguucggacg

SEQ ID NO: 2024269 - RNA, 19 nt, Artificial Sequence
  Description of Artificial Sequence: Synthetic oligonucleotide
acuaauuuauuucuaaaga

SEQ ID NO: 2024270 - RNA, 19 nt, Artificial Sequence
  Description of Artificial Sequence: Synthetic oligonucleotide
aauggaugcggacguaacc

SEQ ID NO: 2024271 - RNA, 19 nt, Artificial Sequence
  Description of Artificial Sequence: Synthetic oligonucleotide
agcaugaugauguuacccc

SEQ ID NO: 2024272 - RNA, 19 nt, Artificial Sequence
  Description of Artificial Sequence: Synthetic oligonucleotide
uguugauagguccaaagug

SEQ ID NO: 2024273 - RNA, 19 nt, Artificial Sequence
  Description of Artificial Sequence: Synthetic oligonucleotide
uuaacgcucaccaacaccu

SEQ ID NO: 2024274 - RNA, 19 nt, Artificial Sequence
  Description of Artificial Sequence: Synthetic oligonucleotide
ugaaaggcaacacuguuga

SEQ ID NO: 2024275 - RNA, 19 nt, Artificial Sequence
  Description of Artificial Sequence: Synthetic oligonucleotide
gacguaaccaucuucacca

SEQ ID NO: 2024276 - RNA, 19 nt, Artificial Sequence
  Description of Artificial Sequence: Synthetic oligonucleotide
uucacaaucccagagacga

SEQ ID NO: 2024277 - RNA, 19 nt, Artificial Sequence
  Description of Artificial Sequence: Synthetic oligonucleotide
agaucgaagaagcucacag

SEQ ID NO: 2024278 - RNA, 19 nt, Artificial Sequence
  Description of Artificial Sequence: Synthetic oligonucleotide
gaaguaauggaugcggacg

SEQ ID NO: 2024279 - RNA, 19 nt, Artificial Sequence
  Description of Artificial Sequence: Synthetic oligonucleotide
aaacuccucuucaaaagcc

SEQ ID NO: 2024280 - RNA, 19 nt, Artificial Sequence
  Description of Artificial Sequence: Synthetic oligonucleotide
guugauagguccaaagugg

SEQ ID NO: 2024281 - RNA, 19 nt, Artificial Sequence
  Description of Artificial Sequence: Synthetic oligonucleotide
ugaguuggucuucaguagg

SEQ ID NO: 2024282 - RNA, 19 nt, Artificial Sequence
  Description of Artificial Sequence: Synthetic oligonucleotide
uggucaugucucuagauag

SEQ ID NO: 2024283 - RNA, 19 nt, Artificial Sequence
  Description of Artificial Sequence: Synthetic oligonucleotide
ugauggaccgcucauggcc

SEQ ID NO: 2024284 - RNA, 19 nt, Artificial Sequence
  Description of Artificial Sequence: Synthetic oligonucleotide
aacauggucaugucucuag

SEQ ID NO: 2024285 - RNA, 19 nt, Artificial Sequence
  Description of Artificial Sequence: Synthetic oligonucleotide
gagucaaagagcuuagcug

SEQ ID NO: 2024286 - RNA, 19 nt, Artificial Sequence
  Description of Artificial Sequence: Synthetic oligonucleotide
agcuguuaucagcugagcc

SEQ ID NO: 2024287 - RNA, 19 nt, Artificial Sequence
  Description of Artificial Sequence: Synthetic oligonucleotide
uuuuaccaaacuaauuuau

SEQ ID NO: 2024288 - RNA, 19 nt, Artificial Sequence
  Description of Artificial Sequence: Synthetic oligonucleotide
ugaucugcgugauggaccg

SEQ ID NO: 2024289 - RNA, 19 nt, Artificial Sequence
  Description of Artificial Sequence: Synthetic oligonucleotide
gcuuggaucccguagaucg

SEQ ID NO: 2024290 - RNA, 19 nt, Artificial Sequence
  Description of Artificial Sequence: Synthetic oligonucleotide
uuggccacggugaagagga

SEQ ID NO: 2024291 - RNA, 19 nt, Artificial Sequence
  Description of Artificial Sequence: Synthetic oligonucleotide
ucauguccugcaauaaugc

SEQ ID NO: 2024292 - RNA, 19 nt, Artificial Sequence
  Description of Artificial Sequence: Synthetic oligonucleotide
ucggaaagucuucugaugu

SEQ ID NO: 2024293 - RNA, 19 nt, Artificial Sequence
  Description of Artificial Sequence: Synthetic oligonucleotide
gagucuaaaacccucuuga

SEQ ID NO: 2024294 - RNA, 19 nt, Artificial Sequence
  Description of Artificial Sequence: Synthetic oligonucleotide
uuaccaaacuaauuuauuu

SEQ ID NO: 2024295 - RNA, 19 nt, Artificial Sequence
  Description of Artificial Sequence: Synthetic oligonucleotide
uguagcucuugccaucagg

SEQ ID NO: 2024296 - RNA, 19 nt, Artificial Sequence
  Description of Artificial Sequence: Synthetic oligonucleotide
uguucggaaagucuucuga

SEQ ID NO: 2024297 - RNA, 19 nt, Artificial Sequence
  Description of Artificial Sequence: Synthetic oligonucleotide
ugacgggacguucuguucg

SEQ ID NO: 2024298 - RNA, 19 nt, Artificial Sequence
  Description of Artificial Sequence: Synthetic oligonucleotide
aaaagccagauggaagaac

SEQ ID NO: 2024299 - RNA, 19 nt, Artificial Sequence
  Description of Artificial Sequence: Synthetic oligonucleotide
aaguaauggaugcggacgu

SEQ ID NO: 2024300 - RNA, 19 nt, Artificial Sequence
  Description of Artificial Sequence: Synthetic oligonucleotide
aguaaggacaugcuuggug

SEQ ID NO: 2024301 - RNA, 19 nt, Artificial Sequence
  Description of Artificial Sequence: Synthetic oligonucleotide
aagaggaggucuccuucgc

SEQ ID NO: 2024302 - RNA, 19 nt, Artificial Sequence
  Description of Artificial Sequence: Synthetic oligonucleotide
cagaguaccacacauugac

SEQ ID NO: 2024303 - RNA, 19 nt, Artificial Sequence
  Description of Artificial Sequence: Synthetic oligonucleotide
uuccuuaacgcucaccaac

SEQ ID NO: 2024304 - RNA, 19 nt, Artificial Sequence
  Description of Artificial Sequence: Synthetic oligonucleotide
uaccaaacuaauuuauuuc

SEQ ID NO: 2024305 - RNA, 19 nt, Artificial Sequence
  Description of Artificial Sequence: Synthetic oligonucleotide
uugauagguccaaaguggc

SEQ ID NO: 2024306 - RNA, 19 nt, Artificial Sequence
  Description of Artificial Sequence: Synthetic oligonucleotide
ucccguagaucgaagaagc

SEQ ID NO: 2024307 - RNA, 19 nt, Artificial Sequence
  Description of Artificial Sequence: Synthetic oligonucleotide
gauggaagaaccuggcuuc

SEQ ID NO: 2024308 - RNA, 19 nt, Artificial Sequence
  Description of Artificial Sequence: Synthetic oligonucleotide
gaagaggaggucuccuucg

SEQ ID NO: 2024309 - RNA, 19 nt, Artificial Sequence
  Description of Artificial Sequence: Synthetic oligonucleotide
uguggucacauccauggcu

SEQ ID NO: 2024310 - RNA, 19 nt, Artificial Sequence
  Description of Artificial Sequence: Synthetic oligonucleotide
aaagagcuuagcuguguug

SEQ ID NO: 2024311 - RNA, 19 nt, Artificial Sequence
  Description of Artificial Sequence: Synthetic oligonucleotide
agcuucaggccucaaacuc

SEQ ID NO: 2024312 - RNA, 19 nt, Artificial Sequence
  Description of Artificial Sequence: Synthetic oligonucleotide
caaacucaaaguacugcgg

SEQ ID NO: 2024313 - RNA, 19 nt, Artificial Sequence
  Description of Artificial Sequence: Synthetic oligonucleotide
ucucuagauagcuggaugu

SEQ ID NO: 2024314 - RNA, 19 nt, Artificial Sequence
  Description of Artificial Sequence: Synthetic oligonucleotide
uuucacaaucccagagacg

SEQ ID NO: 2024315 - RNA, 19 nt, Artificial Sequence
  Description of Artificial Sequence: Synthetic oligonucleotide
aaucccagagacgacagcu

SEQ ID NO: 2024316 - RNA, 19 nt, Artificial Sequence
  Description of Artificial Sequence: Synthetic oligonucleotide
ugagccaguaaggacaugc

SEQ ID NO: 2024317 - RNA, 19 nt, Artificial Sequence
  Description of Artificial Sequence: Synthetic oligonucleotide
aagagcuuagcuguguugu

SEQ ID NO: 2024318 - RNA, 19 nt, Artificial Sequence
  Description of Artificial Sequence: Synthetic oligonucleotide
ucuucaaaagccagaugga

SEQ ID NO: 2024319 - RNA, 19 nt, Artificial Sequence
  Description of Artificial Sequence: Synthetic oligonucleotide
gagagcaugaugauguuac

SEQ ID NO: 2024320 - RNA, 19 nt, Artificial Sequence
  Description of Artificial Sequence: Synthetic oligonucleotide
cacagaguaccacacauug

SEQ ID NO: 2024321 - RNA, 19 nt, Artificial Sequence
  Description of Artificial Sequence: Synthetic oligonucleotide
auguucaagacucguggag

SEQ ID NO: 2024322 - RNA, 19 nt, Artificial Sequence
  Description of Artificial Sequence: Synthetic oligonucleotide
gaagaaccuggcuucaaac

SEQ ID NO: 2024323 - RNA, 19 nt, Artificial Sequence
  Description of Artificial Sequence: Synthetic oligonucleotide
ucgccauucacagaguacc

SEQ ID NO: 2024324 - RNA, 19 nt, Artificial Sequence
  Description of Artificial Sequence: Synthetic oligonucleotide
caggggaucuucauguagg

SEQ ID NO: 2024325 - RNA, 19 nt, Artificial Sequence
  Description of Artificial Sequence: Synthetic oligonucleotide
auguccugcaauaaugcac

SEQ ID NO: 2024326 - RNA, 19 nt, Artificial Sequence
  Description of Artificial Sequence: Synthetic oligonucleotide
cagacuuggcgcuauacug

SEQ ID NO: 2024327 - RNA, 19 nt, Artificial Sequence
  Description of Artificial Sequence: Synthetic oligonucleotide
ugucaaucuggcuuggauc

SEQ ID NO: 2024328 - RNA, 19 nt, Artificial Sequence
  Description of Artificial Sequence: Synthetic oligonucleotide
agagucuaaaacccucuug

SEQ ID NO: 2024329 - RNA, 19 nt, Artificial Sequence
  Description of Artificial Sequence: Synthetic oligonucleotide
uccuuaacgcucaccaaca

SEQ ID NO: 2024330 - RNA, 19 nt, Artificial Sequence
  Description of Artificial Sequence: Synthetic oligonucleotide
aagccacagguucggacgg

SEQ ID NO: 2024331 - RNA, 19 nt, Artificial Sequence
  Description of Artificial Sequence: Synthetic oligonucleotide
gagacgacagcuguuauca

SEQ ID NO: 2024332 - RNA, 19 nt, Artificial Sequence
  Description of Artificial Sequence: Synthetic oligonucleotide
agucuaaaacccucuugag

SEQ ID NO: 2024333 - RNA, 19 nt, Artificial Sequence
  Description of Artificial Sequence: Synthetic oligonucleotide
agcucuugccaucaggaug

SEQ ID NO: 2024334 - RNA, 19 nt, Artificial Sequence
  Description of Artificial Sequence: Synthetic oligonucleotide
aacccucuugagcagccuc

SEQ ID NO: 2024335 - RNA, 19 nt, Artificial Sequence
  Description of Artificial Sequence: Synthetic oligonucleotide
auggagauccagcuucagg

SEQ ID NO: 2024336 - RNA, 19 nt, Artificial Sequence
  Description of Artificial Sequence: Synthetic oligonucleotide
caggauaggcuucaucccg

SEQ ID NO: 2024337 - RNA, 19 nt, Artificial Sequence
  Description of Artificial Sequence: Synthetic oligonucleotide
aagaagcucacagaacacu

SEQ ID NO: 2024338 - RNA, 19 nt, Artificial Sequence
  Description of Artificial Sequence: Synthetic oligonucleotide
ucgcgguuguacuugaucu

SEQ ID NO: 2024339 - RNA, 19 nt, Artificial Sequence
  Description of Artificial Sequence: Synthetic oligonucleotide
acugguugagcucaccacu

SEQ ID NO: 2024340 - RNA, 19 nt, Artificial Sequence
  Description of Artificial Sequence: Synthetic oligonucleotide
guucggacggcugaguugg

SEQ ID NO: 2024341 - RNA, 19 nt, Artificial Sequence
  Description of Artificial Sequence: Synthetic oligonucleotide
uugacgguagggucuuugg

SEQ ID NO: 2024342 - RNA, 19 nt, Artificial Sequence
  Description of Artificial Sequence: Synthetic oligonucleotide
uucggaaagucuucugaug

SEQ ID NO: 2024343 - RNA, 19 nt, Artificial Sequence
  Description of Artificial Sequence: Synthetic oligonucleotide
ucauugaucugccgggagu

SEQ ID NO: 2024344 - RNA, 19 nt, Artificial Sequence
  Description of Artificial Sequence: Synthetic oligonucleotide
gaucuuggagucauugcag

SEQ ID NO: 2024345 - RNA, 19 nt, Artificial Sequence
  Description of Artificial Sequence: Synthetic oligonucleotide
caccacauggucauaguug

SEQ ID NO: 2024346 - RNA, 19 nt, Artificial Sequence
  Description of Artificial Sequence: Synthetic oligonucleotide
aaagagucuaaaacccucu

SEQ ID NO: 2024347 - RNA, 19 nt, Artificial Sequence
  Description of Artificial Sequence: Synthetic oligonucleotide
cucaaaguacugcgggucg

SEQ ID NO: 2024348 - RNA, 19 nt, Artificial Sequence
  Description of Artificial Sequence: Synthetic oligonucleotide
uaccccaucugcuugucug

SEQ ID NO: 2024349 - RNA, 19 nt, Artificial Sequence
  Description of Artificial Sequence: Synthetic oligonucleotide
gaagcucacagaacacugg

SEQ ID NO: 2024350 - RNA, 19 nt, Artificial Sequence
  Description of Artificial Sequence: Synthetic oligonucleotide
accuccccagacuuggcgc

SEQ ID NO: 2024351 - RNA, 19 nt, Artificial Sequence
  Description of Artificial Sequence: Synthetic oligonucleotide
auuuauuucuaaagagucu

SEQ ID NO: 2024352 - RNA, 19 nt, Artificial Sequence
  Description of Artificial Sequence: Synthetic oligonucleotide
aacacuguugauaggucca

SEQ ID NO: 2024353 - RNA, 19 nt, Artificial Sequence
  Description of Artificial Sequence: Synthetic oligonucleotide
gagcaugaugauguuaccc

SEQ ID NO: 2024354 - RNA, 19 nt, Artificial Sequence
  Description of Artificial Sequence: Synthetic oligonucleotide
ccugcaauaaugcacuccc

SEQ ID NO: 2024355 - RNA, 19 nt, Artificial Sequence
  Description of Artificial Sequence: Synthetic oligonucleotide
ucagcugagccaguaagga

SEQ ID NO: 2024356 - RNA, 19 nt, Artificial Sequence
  Description of Artificial Sequence: Synthetic oligonucleotide
uguguuguccuuggacgcg

SEQ ID NO: 2024357 - RNA, 19 nt, Artificial Sequence
  Description of Artificial Sequence: Synthetic oligonucleotide
auacugguugagcucacca

SEQ ID NO: 2024358 - RNA, 19 nt, Artificial Sequence
  Description of Artificial Sequence: Synthetic oligonucleotide
agacuuggcgcuauacugg

SEQ ID NO: 2024359 - RNA, 19 nt, Artificial Sequence
  Description of Artificial Sequence: Synthetic oligonucleotide
gauguucaagacucgugga

SEQ ID NO: 2024360 - RNA, 19 nt, Artificial Sequence
  Description of Artificial Sequence: Synthetic oligonucleotide
gucucuagauagcuggaug

SEQ ID NO: 2024361 - RNA, 19 nt, Artificial Sequence
  Description of Artificial Sequence: Synthetic oligonucleotide
gauaggcuucaucccggcg

SEQ ID NO: 2024362 - RNA, 19 nt, Artificial Sequence
  Description of Artificial Sequence: Synthetic oligonucleotide
ugcgggucgaaguaaugga

SEQ ID NO: 2024363 - RNA, 19 nt, Artificial Sequence
  Description of Artificial Sequence: Synthetic oligonucleotide
ucucauguccugcaauaau

SEQ ID NO: 2024364 - RNA, 19 nt, Artificial Sequence
  Description of Artificial Sequence: Synthetic oligonucleotide
ucugauguucaagacucgu

SEQ ID NO: 2024365 - RNA, 19 nt, Artificial Sequence
  Description of Artificial Sequence: Synthetic oligonucleotide
uccuagcaccacaugguca

SEQ ID NO: 2024366 - RNA, 19 nt, Artificial Sequence
  Description of Artificial Sequence: Synthetic oligonucleotide
guaaggacaugcuuggugu

SEQ ID NO: 2024367 - RNA, 19 nt, Artificial Sequence
  Description of Artificial Sequence: Synthetic oligonucleotide
augaaaggcaacacuguug

SEQ ID NO: 2024368 - RNA, 19 nt, Artificial Sequence
  Description of Artificial Sequence: Synthetic oligonucleotide
agaagcucacagaacacug

SEQ ID NO: 2024369 - RNA, 19 nt, Artificial Sequence
  Description of Artificial Sequence: Synthetic oligonucleotide
aagagucuaaaacccucuu

SEQ ID NO: 2024370 - RNA, 19 nt, Artificial Sequence
  Description of Artificial Sequence: Synthetic oligonucleotide
ucuccuucgcgguuguacu

SEQ ID NO: 2024371 - RNA, 19 nt, Artificial Sequence
  Description of Artificial Sequence: Synthetic oligonucleotide
uuggacgcggugacaaaca

SEQ ID NO: 2024372 - RNA, 19 nt, Artificial Sequence
  Description of Artificial Sequence: Synthetic oligonucleotide
aguacugcgggucgaagua

SEQ ID NO: 2024373 - RNA, 19 nt, Artificial Sequence
  Description of Artificial Sequence: Synthetic oligonucleotide
uggcccuugacucuuccaa

SEQ ID NO: 2024374 - RNA, 19 nt, Artificial Sequence
  Description of Artificial Sequence: Synthetic oligonucleotide
uguccuuggacgcggugac

SEQ ID NO: 2024375 - RNA, 19 nt, Artificial Sequence
  Description of Artificial Sequence: Synthetic oligonucleotide
aucccguagaucgaagaag

SEQ ID NO: 2024376 - RNA, 19 nt, Artificial Sequence
  Description of Artificial Sequence: Synthetic oligonucleotide
auggaugcggacguaacca

SEQ ID NO: 2024377 - RNA, 19 nt, Artificial Sequence
  Description of Artificial Sequence: Synthetic oligonucleotide
uucgcgguuguacuugauc

SEQ ID NO: 2024378 - RNA, 19 nt, Artificial Sequence
  Description of Artificial Sequence: Synthetic oligonucleotide
auggucaugucucuagaua

SEQ ID NO: 2024379 - RNA, 19 nt, Artificial Sequence
  Description of Artificial Sequence: Synthetic oligonucleotide
caaagccacagguucggac

SEQ ID NO: 2024380 - RNA, 19 nt, Artificial Sequence
  Description of Artificial Sequence: Synthetic oligonucleotide
ucuguucggaaagucuucu

SEQ ID NO: 2024381 - RNA, 19 nt, Artificial Sequence
  Description of Artificial Sequence: Synthetic oligonucleotide
ccaguaaggacaugcuugg

SEQ ID NO: 2024382 - RNA, 19 nt, Artificial Sequence
  Description of Artificial Sequence: Synthetic oligonucleotide
uucuguucggaaagucuuc

SEQ ID NO: 2024383 - RNA, 19 nt, Artificial Sequence
  Description of Artificial Sequence: Synthetic oligonucleotide
cacauccauggcuuccugg

SEQ ID NO: 2024384 - RNA, 19 nt, Artificial Sequence
  Description of Artificial Sequence: Synthetic oligonucleotide
uccugcaauaaugcacucc

SEQ ID NO: 2024385 - RNA, 19 nt, Artificial Sequence
  Description of Artificial Sequence: Synthetic oligonucleotide
agaguaccacacauugacg

SEQ ID NO: 2024386 - RNA, 19 nt, Artificial Sequence
  Description of Artificial Sequence: Synthetic oligonucleotide
gacgggacguucuguucgg

SEQ ID NO: 2024387 - RNA, 19 nt, Artificial Sequence
  Description of Artificial Sequence: Synthetic oligonucleotide
cugcgggucgaaguaaugg

SEQ ID NO: 2024388 - RNA, 19 nt, Artificial Sequence
  Description of Artificial Sequence: Synthetic oligonucleotide
ucauugcaggggaucuuca

SEQ ID NO: 2024389 - RNA, 19 nt, Artificial Sequence
  Description of Artificial Sequence: Synthetic oligonucleotide
guucaagacucguggaguc

SEQ ID NO: 2024390 - RNA, 19 nt, Artificial Sequence
  Description of Artificial Sequence: Synthetic oligonucleotide
uagcaccacauggucauag

SEQ ID NO: 2024391 - RNA, 19 nt, Artificial Sequence
  Description of Artificial Sequence: Synthetic oligonucleotide
cauugaucugccgggagug

SEQ ID NO: 2024392 - RNA, 19 nt, Artificial Sequence
  Description of Artificial Sequence: Synthetic oligonucleotide
gauggaccgcucauggccc

SEQ ID NO: 2024393 - RNA, 19 nt, Artificial Sequence
  Description of Artificial Sequence: Synthetic oligonucleotide
acgacagcuguuaucagcu

SEQ ID NO: 2024394 - RNA, 19 nt, Artificial Sequence
  Description of Artificial Sequence: Synthetic oligonucleotide
uucaucccggcggugacgc

SEQ ID NO: 2024395 - RNA, 19 nt, Artificial Sequence
  Description of Artificial Sequence: Synthetic oligonucleotide
acucucauguccugcaaua

SEQ ID NO: 2024396 - RNA, 19 nt, Artificial Sequence
  Description of Artificial Sequence: Synthetic oligonucleotide
ggacguaaccaucuucacc

SEQ ID NO: 2024397 - RNA, 19 nt, Artificial Sequence
  Description of Artificial Sequence: Synthetic oligonucleotide
gccaguaaggacaugcuug

SEQ ID NO: 2024398 - RNA, 19 nt, Artificial Sequence
  Description of Artificial Sequence: Synthetic oligonucleotide
ucaagacucguggagucaa

SEQ ID NO: 2024399 - RNA, 19 nt, Artificial Sequence
  Description of Artificial Sequence: Synthetic oligonucleotide
cuuggugucccagucagca

SEQ ID NO: 2024400 - RNA, 19 nt, Artificial Sequence
  Description of Artificial Sequence: Synthetic oligonucleotide
gucauugaucugccgggag

SEQ ID NO: 2024401 - RNA, 19 nt, Artificial Sequence
  Description of Artificial Sequence: Synthetic oligonucleotide
acguaaccaucuucaccac

SEQ ID NO: 2024402 - RNA, 19 nt, Artificial Sequence
  Description of Artificial Sequence: Synthetic oligonucleotide
gacggcacuggugaucuug

SEQ ID NO: 2024403 - RNA, 19 nt, Artificial Sequence
  Description of Artificial Sequence: Synthetic oligonucleotide
caaucuggcuuggaucccg

SEQ ID NO: 2024404 - RNA, 19 nt, Artificial Sequence
  Description of Artificial Sequence: Synthetic oligonucleotide
uggaucccguagaucgaag

SEQ ID NO: 2024405 - RNA, 19 nt, Artificial Sequence
  Description of Artificial Sequence: Synthetic oligonucleotide
guaggugcccagccucucg

SEQ ID NO: 2024406 - RNA, 19 nt, Artificial Sequence
  Description of Artificial Sequence: Synthetic oligonucleotide
ucacagaguaccacacauu

SEQ ID NO: 2024407 - RNA, 19 nt, Artificial Sequence
  Description of Artificial Sequence: Synthetic oligonucleotide
uauacugguugagcucacc

SEQ ID NO: 2024408 - RNA, 19 nt, Artificial Sequence
  Description of Artificial Sequence: Synthetic oligonucleotide
cucgccauucacagaguac

SEQ ID NO: 2024409 - RNA, 19 nt, Artificial Sequence
  Description of Artificial Sequence: Synthetic oligonucleotide
ucaaaguacugcgggucga

SEQ ID NO: 2024410 - RNA, 19 nt, Artificial Sequence
  Description of Artificial Sequence: Synthetic oligonucleotide
cuuggacgcggugacaaac

SEQ ID NO: 2024411 - RNA, 19 nt, Artificial Sequence
  Description of Artificial Sequence: Synthetic oligonucleotide
ugcggacguaaccaucuuc

SEQ ID NO: 2024412 - RNA, 19 nt, Artificial Sequence
  Description of Artificial Sequence: Synthetic oligonucleotide
cugcaauaaugcacucccc

SEQ ID NO: 2024413 - RNA, 19 nt, Artificial Sequence
  Description of Artificial Sequence: Synthetic oligonucleotide
ugacaaacauggucauguc

SEQ ID NO: 2024414 - RNA, 19 nt, Artificial Sequence
  Description of Artificial Sequence: Synthetic oligonucleotide
uucaagacucguggaguca

SEQ ID NO: 2024415 - RNA, 19 nt, Artificial Sequence
  Description of Artificial Sequence: Synthetic oligonucleotide
gccagauggaagaaccugg

SEQ ID NO: 2024416 - RNA, 19 nt, Artificial Sequence
  Description of Artificial Sequence: Synthetic oligonucleotide
auugacgguagggucuuug

SEQ ID NO: 2024417 - RNA, 19 nt, Artificial Sequence
  Description of Artificial Sequence: Synthetic oligonucleotide
ugucauugaucugccggga

SEQ ID NO: 2024418 - RNA, 19 nt, Artificial Sequence
  Description of Artificial Sequence: Synthetic oligonucleotide
ugacucuuccaaacuccuc

SEQ ID NO: 2024419 - RNA, 19 nt, Artificial Sequence
  Description of Artificial Sequence: Synthetic oligonucleotide
gagggcagccgaguugacg

SEQ ID NO: 2024420 - RNA, 19 nt, Artificial Sequence
  Description of Artificial Sequence: Synthetic oligonucleotide
gaguugacgggacguucug

SEQ ID NO: 2024421 - RNA, 19 nt, Artificial Sequence
  Description of Artificial Sequence: Synthetic oligonucleotide
uccuucgcgguuguacuug

SEQ ID NO: 2024422 - RNA, 19 nt, Artificial Sequence
  Description of Artificial Sequence: Synthetic oligonucleotide
cauguccugcaauaaugca

SEQ ID NO: 2024423 - RNA, 19 nt, Artificial Sequence
  Description of Artificial Sequence: Synthetic oligonucleotide
acguucuguucggaaaguc

SEQ ID NO: 2024424 - RNA, 19 nt, Artificial Sequence
  Description of Artificial Sequence: Synthetic oligonucleotide
aaaguggcccuugacucuu

SEQ ID NO: 2024425 - RNA, 19 nt, Artificial Sequence
  Description of Artificial Sequence: Synthetic oligonucleotide
uuggcgcuauacugguuga

SEQ ID NO: 2024426 - RNA, 19 nt, Artificial Sequence
  Description of Artificial Sequence: Synthetic oligonucleotide
agauccagcuucaggccuc

SEQ ID NO: 2024427 - RNA, 19 nt, Artificial Sequence
  Description of Artificial Sequence: Synthetic oligonucleotide
cguagaucgaagaagcuca

SEQ ID NO: 2024428 - RNA, 19 nt, Artificial Sequence
  Description of Artificial Sequence: Synthetic oligonucleotide
gaucugccgggaguguucc

SEQ ID NO: 2024429 - RNA, 19 nt, Artificial Sequence
  Description of Artificial Sequence: Synthetic oligonucleotide
uggccaauguaggugccca

SEQ ID NO: 2024430 - RNA, 19 nt, Artificial Sequence
  Description of Artificial Sequence: Synthetic oligonucleotide
ucacaaucccagagacgac

SEQ ID NO: 2024431 - RNA, 19 nt, Artificial Sequence
  Description of Artificial Sequence: Synthetic oligonucleotide
cugguaccccaucugcuug

SEQ ID NO: 2024432 - RNA, 19 nt, Artificial Sequence
  Description of Artificial Sequence: Synthetic oligonucleotide
uacugcgggucgaaguaau

SEQ ID NO: 2024433 - RNA, 19 nt, Artificial Sequence
  Description of Artificial Sequence: Synthetic oligonucleotide
ccgggaguguuccuuaacg

SEQ ID NO: 2024434 - RNA, 19 nt, Artificial Sequence
  Description of Artificial Sequence: Synthetic oligonucleotide
uugacgggacguucuguuc

SEQ ID NO: 2024435 - RNA, 19 nt, Artificial Sequence
  Description of Artificial Sequence: Synthetic oligonucleotide
ugucucuagauagcuggau

SEQ ID NO: 2024436 - RNA, 19 nt, Artificial Sequence
  Description of Artificial Sequence: Synthetic oligonucleotide
gaugcggacguaaccaucu

SEQ ID NO: 2024437 - RNA, 19 nt, Artificial Sequence
  Description of Artificial Sequence: Synthetic oligonucleotide
uggaaguuguggucacauc

SEQ ID NO: 2024438 - RNA, 19 nt, Artificial Sequence
  Description of Artificial Sequence: Synthetic oligonucleotide
uggacgcggugacaaacau

SEQ ID NO: 2024439 - RNA, 19 nt, Artificial Sequence
  Description of Artificial Sequence: Synthetic oligonucleotide
uggaugcggacguaaccau

SEQ ID NO: 2024440 - RNA, 19 nt, Artificial Sequence
  Description of Artificial Sequence: Synthetic oligonucleotide
aucugcgugauggaccgcu

SEQ ID NO: 2024441 - RNA, 19 nt, Artificial Sequence
  Description of Artificial Sequence: Synthetic oligonucleotide
aagccagauggaagaaccu

SEQ ID NO: 2024442 - RNA, 19 nt, Artificial Sequence
  Description of Artificial Sequence: Synthetic oligonucleotide
agccaguaaggacaugcuu

SEQ ID NO: 2024443 - RNA, 19 nt, Artificial Sequence
  Description of Artificial Sequence: Synthetic oligonucleotide
uuggaucccguagaucgaa

SEQ ID NO: 2024444 - RNA, 19 nt, Artificial Sequence
  Description of Artificial Sequence: Synthetic oligonucleotide
cucuagauagcuggauguc

SEQ ID NO: 2024445 - RNA, 19 nt, Artificial Sequence
  Description of Artificial Sequence: Synthetic oligonucleotide
ugguaccccaucugcuugu

SEQ ID NO: 2024446 - RNA, 19 nt, Artificial Sequence
  Description of Artificial Sequence: Synthetic oligonucleotide
gcucauuggugucaaucug

SEQ ID NO: 2024447 - RNA, 19 nt, Artificial Sequence
  Description of Artificial Sequence: Synthetic oligonucleotide
cuguucggaaagucuucug

SEQ ID NO: 2024448 - RNA, 19 nt, Artificial Sequence
  Description of Artificial Sequence: Synthetic oligonucleotide
gcaggggaucuucauguag

SEQ ID NO: 2024449 - RNA, 19 nt, Artificial Sequence
  Description of Artificial Sequence: Synthetic oligonucleotide
cuggcuuggaucccguaga

SEQ ID NO: 2024450 - RNA, 19 nt, Artificial Sequence
  Description of Artificial Sequence: Synthetic oligonucleotide
ccaauguaggugcccagcc

SEQ ID NO: 2024451 - RNA, 19 nt, Artificial Sequence
  Description of Artificial Sequence: Synthetic oligonucleotide
agcucaccacucucauguc

SEQ ID NO: 2024452 - RNA, 19 nt, Artificial Sequence
  Description of Artificial Sequence: Synthetic oligonucleotide
cacauugacgguagggucu

SEQ ID NO: 2024453 - RNA, 19 nt, Artificial Sequence
  Description of Artificial Sequence: Synthetic oligonucleotide
aguuguggucacauccaug

SEQ ID NO: 2024454 - RNA, 19 nt, Artificial Sequence
  Description of Artificial Sequence: Synthetic oligonucleotide
cgugauggaccgcucaugg

SEQ ID NO: 2024455 - RNA, 19 nt, Artificial Sequence
  Description of Artificial Sequence: Synthetic oligonucleotide
caaucccagagacgacagc

SEQ ID NO: 2024456 - RNA, 19 nt, Artificial Sequence
  Description of Artificial Sequence: Synthetic oligonucleotide
augcuuggugucccaguca

SEQ ID NO: 2024457 - RNA, 19 nt, Artificial Sequence
  Description of Artificial Sequence: Synthetic oligonucleotide
cuauacugguugagcucac

SEQ ID NO: 2024458 - RNA, 19 nt, Artificial Sequence
  Description of Artificial Sequence: Synthetic oligonucleotide
acagguucggacggcugag

SEQ ID NO: 2024459 - RNA, 19 nt, Artificial Sequence
  Description of Artificial Sequence: Synthetic oligonucleotide
ggaguguuccuuaacgcuc

SEQ ID NO: 2024460 - RNA, 19 nt, Artificial Sequence
  Description of Artificial Sequence: Synthetic oligonucleotide
cuguugauagguccaaagu

SEQ ID NO: 2024461 - RNA, 19 nt, Artificial Sequence
  Description of Artificial Sequence: Synthetic oligonucleotide
uaacgcucaccaacaccuc

SEQ ID NO: 2024462 - RNA, 19 nt, Artificial Sequence
  Description of Artificial Sequence: Synthetic oligonucleotide
cuagauagcuggaugucau

SEQ ID NO: 2024463 - RNA, 19 nt, Artificial Sequence
  Description of Artificial Sequence: Synthetic oligonucleotide
cuucaggccucaaacucaa

SEQ ID NO: 2024464 - RNA, 19 nt, Artificial Sequence
  Description of Artificial Sequence: Synthetic oligonucleotide
gguucggacggcugaguug

SEQ ID NO: 2024465 - RNA, 19 nt, Artificial Sequence
  Description of Artificial Sequence: Synthetic oligonucleotide
accccaucugcuugucugu

SEQ ID NO: 2024466 - RNA, 19 nt, Artificial Sequence
  Description of Artificial Sequence: Synthetic oligonucleotide
gcucaccacucucaugucc

SEQ ID NO: 2024467 - RNA, 19 nt, Artificial Sequence
  Description of Artificial Sequence: Synthetic oligonucleotide
uggugucaaucuggcuugg

SEQ ID NO: 2024468 - RNA, 19 nt, Artificial Sequence
  Description of Artificial Sequence: Synthetic oligonucleotide
guucggaaagucuucugau

SEQ ID NO: 2024469 - RNA, 19 nt, Artificial Sequence
  Description of Artificial Sequence: Synthetic oligonucleotide
ggucaugucucuagauagc

SEQ ID NO: 2024470 - RNA, 19 nt, Artificial Sequence
  Description of Artificial Sequence: Synthetic oligonucleotide
cuuggaucccguagaucga

SEQ ID NO: 2024471 - RNA, 19 nt, Artificial Sequence
  Description of Artificial Sequence: Synthetic oligonucleotide
ggcgcuauacugguugagc

SEQ ID NO: 2024472 - RNA, 19 nt, Artificial Sequence
  Description of Artificial Sequence: Synthetic oligonucleotide
cuucaucccggcggugacg

SEQ ID NO: 2024473 - RNA, 19 nt, Artificial Sequence
  Description of Artificial Sequence: Synthetic oligonucleotide
guagaucgaagaagcucac

SEQ ID NO: 2024474 - RNA, 19 nt, Artificial Sequence
  Description of Artificial Sequence: Synthetic oligonucleotide
ucugcgugauggaccgcuc

SEQ ID NO: 2024475 - RNA, 19 nt, Artificial Sequence
  Description of Artificial Sequence: Synthetic oligonucleotide
uggcgcuauacugguugag

SEQ ID NO: 2024476 - RNA, 19 nt, Artificial Sequence
  Description of Artificial Sequence: Synthetic oligonucleotide
guuccuuaacgcucaccaa

SEQ ID NO: 2024477 - RNA, 19 nt, Artificial Sequence
  Description of Artificial Sequence: Synthetic oligonucleotide
cacagguucggacggcuga

SEQ ID NO: 2024478 - RNA, 19 nt, Artificial Sequence
  Description of Artificial Sequence: Synthetic oligonucleotide
uggagucauugcaggggau

SEQ ID NO: 2024479 - RNA, 19 nt, Artificial Sequence
  Description of Artificial Sequence: Synthetic oligonucleotide
gcgguuguacuugaucugc

SEQ ID NO: 2024480 - RNA, 19 nt, Artificial Sequence
  Description of Artificial Sequence: Synthetic oligonucleotide
guccaaaguggcccuugac

SEQ ID NO: 2024481 - RNA, 19 nt, Artificial Sequence
  Description of Artificial Sequence: Synthetic oligonucleotide
ucugccgggaguguuccuu

SEQ ID NO: 2024482 - RNA, 19 nt, Artificial Sequence
  Description of Artificial Sequence: Synthetic oligonucleotide
guacuugaucugcgugaug

SEQ ID NO: 2024483 - RNA, 19 nt, Artificial Sequence
  Description of Artificial Sequence: Synthetic oligonucleotide
ggcaacacuguugauaggu

SEQ ID NO: 2024484 - RNA, 19 nt, Artificial Sequence
  Description of Artificial Sequence: Synthetic oligonucleotide
agguucggacggcugaguu

SEQ ID NO: 2024485 - RNA, 19 nt, Artificial Sequence
  Description of Artificial Sequence: Synthetic oligonucleotide
aguugacgggacguucugu

SEQ ID NO: 2024486 - RNA, 19 nt, Artificial Sequence
  Description of Artificial Sequence: Synthetic oligonucleotide
cacacauugacgguagggu

SEQ ID NO: 2024487 - RNA, 19 nt, Artificial Sequence
  Description of Artificial Sequence: Synthetic oligonucleotide
ggaucccguagaucgaaga

SEQ ID NO: 2024488 - RNA, 19 nt, Artificial Sequence
  Description of Artificial Sequence: Synthetic oligonucleotide
gagucauugcaggggaucu

SEQ ID NO: 2024489 - RNA, 19 nt, Artificial Sequence
  Description of Artificial Sequence: Synthetic oligonucleotide
auugaucugccgggagugu

SEQ ID NO: 2024490 - RNA, 19 nt, Artificial Sequence
  Description of Artificial Sequence: Synthetic oligonucleotide
ccgaagucaaagccacagg

SEQ ID NO: 2024491 - RNA, 19 nt, Artificial Sequence
  Description of Artificial Sequence: Synthetic oligonucleotide
cgaaguaauggaugcggac

SEQ ID NO: 2024492 - RNA, 19 nt, Artificial Sequence
  Description of Artificial Sequence: Synthetic oligonucleotide
ugcaggggaucuucaugua

SEQ ID NO: 2024493 - RNA, 19 nt, Artificial Sequence
  Description of Artificial Sequence: Synthetic oligonucleotide
caccacucucauguccugc

SEQ ID NO: 2024494 - RNA, 19 nt, Artificial Sequence
  Description of Artificial Sequence: Synthetic oligonucleotide
gcggacguaaccaucuuca

SEQ ID NO: 2024495 - RNA, 19 nt, Artificial Sequence
  Description of Artificial Sequence: Synthetic oligonucleotide
ggucacauccauggcuucc

SEQ ID NO: 2024496 - RNA, 19 nt, Artificial Sequence
  Description of Artificial Sequence: Synthetic oligonucleotide
guaccacacauugacggua

SEQ ID NO: 2024497 - RNA, 19 nt, Artificial Sequence
  Description of Artificial Sequence: Synthetic oligonucleotide
cugcuugucuguggagagc

SEQ ID NO: 2024498 - RNA, 19 nt, Artificial Sequence
  Description of Artificial Sequence: Synthetic oligonucleotide
gggaguguuccuuaacgcu

SEQ ID NO: 2024499 - RNA, 19 nt, Artificial Sequence
  Description of Artificial Sequence: Synthetic oligonucleotide
cagcuguuaucagcugagc

SEQ ID NO: 2024500 - RNA, 19 nt, Artificial Sequence
  Description of Artificial Sequence: Synthetic oligonucleotide
uggagagcaugaugauguu

SEQ ID NO: 2024501 - RNA, 19 nt, Artificial Sequence
  Description of Artificial Sequence: Synthetic oligonucleotide
cugcuucccuguuucacaa

SEQ ID NO: 2024502 - RNA, 19 nt, Artificial Sequence
  Description of Artificial Sequence: Synthetic oligonucleotide
agccgaguugacgggacgu

SEQ ID NO: 2024503 - RNA, 19 nt, Artificial Sequence
  Description of Artificial Sequence: Synthetic oligonucleotide
augucucuagauagcugga

SEQ ID NO: 2024504 - RNA, 19 nt, Artificial Sequence
  Description of Artificial Sequence: Synthetic oligonucleotide
gugucaaucuggcuuggau

SEQ ID NO: 2024505 - RNA, 19 nt, Artificial Sequence
  Description of Artificial Sequence: Synthetic oligonucleotide
gggacguucuguucggaaa

SEQ ID NO: 2024506 - RNA, 19 nt, Artificial Sequence
  Description of Artificial Sequence: Synthetic oligonucleotide
cagcaggauaggcuucauc

SEQ ID NO: 2024507 - RNA, 19 nt, Artificial Sequence
  Description of Artificial Sequence: Synthetic oligonucleotide
ggccacggugaagaggagg

SEQ ID NO: 2024508 - RNA, 19 nt, Artificial Sequence
  Description of Artificial Sequence: Synthetic oligonucleotide
guugacgggacguucuguu

SEQ ID NO: 2024509 - RNA, 19 nt, Artificial Sequence
  Description of Artificial Sequence: Synthetic oligonucleotide
ccguagaucgaagaagcuc

SEQ ID NO: 2024510 - RNA, 19 nt, Artificial Sequence
  Description of Artificial Sequence: Synthetic oligonucleotide
aaguggcccuugacucuuc

SEQ ID NO: 2024511 - RNA, 19 nt, Artificial Sequence
  Description of Artificial Sequence: Synthetic oligonucleotide
uguaggugcccagccucuc

SEQ ID NO: 2024512 - RNA, 19 nt, Artificial Sequence
  Description of Artificial Sequence: Synthetic oligonucleotide
cgggaguguuccuuaacgc

SEQ ID NO: 2024513 - RNA, 19 nt, Artificial Sequence
  Description of Artificial Sequence: Synthetic oligonucleotide
uucaggccucaaacucaaa

SEQ ID NO: 2024514 - RNA, 19 nt, Artificial Sequence
  Description of Artificial Sequence: Synthetic oligonucleotide
auguaggugcccagccucu

SEQ ID NO: 2024515 - RNA, 19 nt, Artificial Sequence
  Description of Artificial Sequence: Synthetic oligonucleotide
gcuucaggccucaaacuca

SEQ ID NO: 2024516 - RNA, 19 nt, Artificial Sequence
  Description of Artificial Sequence: Synthetic oligonucleotide
auggaccgcucauggcccu

SEQ ID NO: 2024517 - RNA, 19 nt, Artificial Sequence
  Description of Artificial Sequence: Synthetic oligonucleotide
aguaauggaugcggacgua

SEQ ID NO: 2024518 - RNA, 19 nt, Artificial Sequence
  Description of Artificial Sequence: Synthetic oligonucleotide
cgcggugacaaacaugguc

SEQ ID NO: 2024519 - RNA, 19 nt, Artificial Sequence
  Description of Artificial Sequence: Synthetic oligonucleotide
acugcgggucgaaguaaug

SEQ ID NO: 2024520 - RNA, 19 nt, Artificial Sequence
  Description of Artificial Sequence: Synthetic oligonucleotide
ggccucaaacucaaacuca

SEQ ID NO: 2024521 - RNA, 19 nt, Artificial Sequence
  Description of Artificial Sequence: Synthetic oligonucleotide
ugcuucccuguuucacaau

SEQ ID NO: 2024522 - RNA, 19 nt, Artificial Sequence
  Description of Artificial Sequence: Synthetic oligonucleotide
ugccgggaguguuccuuaa

SEQ ID NO: 2024523 - RNA, 19 nt, Artificial Sequence
  Description of Artificial Sequence: Synthetic oligonucleotide
ggcuucaaacuugccaauc

SEQ ID NO: 2024524 - RNA, 19 nt, Artificial Sequence
  Description of Artificial Sequence: Synthetic oligonucleotide
ucguggagucaaagagcuu

SEQ ID NO: 2024525 - RNA, 19 nt, Artificial Sequence
  Description of Artificial Sequence: Synthetic oligonucleotide
ccuuaacgcucaccaacac

SEQ ID NO: 2024526 - RNA, 19 nt, Artificial Sequence
  Description of Artificial Sequence: Synthetic oligonucleotide
cucucauguccugcaauaa

SEQ ID NO: 2024527 - RNA, 19 nt, Artificial Sequence
  Description of Artificial Sequence: Synthetic oligonucleotide
caauguaggugcccagccu

SEQ ID NO: 2024528 - RNA, 19 nt, Artificial Sequence
  Description of Artificial Sequence: Synthetic oligonucleotide
cgguuguacuugaucugcg

SEQ ID NO: 2024529 - RNA, 19 nt, Artificial Sequence
  Description of Artificial Sequence: Synthetic oligonucleotide
guccugcaauaaugcacuc

SEQ ID NO: 2024530 - RNA, 19 nt, Artificial Sequence
  Description of Artificial Sequence: Synthetic oligonucleotide
cgguggauggagauccagc

SEQ ID NO: 2024531 - RNA, 19 nt, Artificial Sequence
  Description of Artificial Sequence: Synthetic oligonucleotide
gcaacacuguugauagguc

SEQ ID NO: 2024532 - RNA, 19 nt, Artificial Sequence
  Description of Artificial Sequence: Synthetic oligonucleotide
gcgcuauacugguugagcu

SEQ ID NO: 2024533 - RNA, 19 nt, Artificial Sequence
  Description of Artificial Sequence: Synthetic oligonucleotide
gguccaaaguggcccuuga

SEQ ID NO: 2024534 - RNA, 19 nt, Artificial Sequence
  Description of Artificial Sequence: Synthetic oligonucleotide
cagauggaagaaccuggcu

SEQ ID NO: 2024535 - RNA, 19 nt, Artificial Sequence
  Description of Artificial Sequence: Synthetic oligonucleotide
gagccaguaaggacaugcu

SEQ ID NO: 2024536 - RNA, 19 nt, Artificial Sequence
  Description of Artificial Sequence: Synthetic oligonucleotide
gaaaggcaacacuguugau

SEQ ID NO: 2024537 - RNA, 19 nt, Artificial Sequence
  Description of Artificial Sequence: Synthetic oligonucleotide
cagacggcacuggugaucu

SEQ ID NO: 2024538 - RNA, 19 nt, Artificial Sequence
  Description of Artificial Sequence: Synthetic oligonucleotide
gugaagaggaggucuccuu

SEQ ID NO: 2024539 - RNA, 19 nt, Artificial Sequence
  Description of Artificial Sequence: Synthetic oligonucleotide
uucggacggcugaguuggu

SEQ ID NO: 2024540 - RNA, 19 nt, Artificial Sequence
  Description of Artificial Sequence: Synthetic oligonucleotide
caaagagcuuagcuguguu

SEQ ID NO: 2024541 - RNA, 19 nt, Artificial Sequence
  Description of Artificial Sequence: Synthetic oligonucleotide
uccccgguggauggagauc

SEQ ID NO: 2024542 - RNA, 19 nt, Artificial Sequence
  Description of Artificial Sequence: Synthetic oligonucleotide
gaucugcgugauggaccgc

SEQ ID NO: 2024543 - RNA, 19 nt, Artificial Sequence
  Description of Artificial Sequence: Synthetic oligonucleotide
gggagagagggcagccgag

SEQ ID NO: 2024544 - RNA, 19 nt, Artificial Sequence
  Description of Artificial Sequence: Synthetic oligonucleotide
guacugcgggucgaaguaa

SEQ ID NO: 2024545 - RNA, 19 nt, Artificial Sequence
  Description of Artificial Sequence: Synthetic oligonucleotide
ggauggagauccagcuuca

SEQ ID NO: 2024546 - RNA, 19 nt, Artificial Sequence
  Description of Artificial Sequence: Synthetic oligonucleotide
aucuggcuuggaucccgua

SEQ ID NO: 2024547 - RNA, 19 nt, Artificial Sequence
  Description of Artificial Sequence: Synthetic oligonucleotide
agagggcagccgaguugac

SEQ ID NO: 2024548 - RNA, 19 nt, Artificial Sequence
  Description of Artificial Sequence: Synthetic oligonucleotide
cguggagucaaagagcuua

SEQ ID NO: 2024549 - RNA, 19 nt, Artificial Sequence
  Description of Artificial Sequence: Synthetic oligonucleotide
ggaugcggacguaaccauc

SEQ ID NO: 2024550 - RNA, 19 nt, Artificial Sequence
  Description of Artificial Sequence: Synthetic oligonucleotide
cagggguccccagacggca

SEQ ID NO: 2024551 - RNA, 19 nt, Artificial Sequence
  Description of Artificial Sequence: Synthetic oligonucleotide
ccuagcaccacauggucau

SEQ ID NO: 2024552 - RNA, 19 nt, Artificial Sequence
  Description of Artificial Sequence: Synthetic oligonucleotide
cggugacgcgagcagagag

SEQ ID NO: 2024553 - RNA, 19 nt, Artificial Sequence
  Description of Artificial Sequence: Synthetic oligonucleotide
ggagagcaugaugauguua

SEQ ID NO: 2024554 - RNA, 19 nt, Artificial Sequence
  Description of Artificial Sequence: Synthetic oligonucleotide
uccccagacuuggcgcuau

SEQ ID NO: 2024555 - RNA, 19 nt, Artificial Sequence
  Description of Artificial Sequence: Synthetic oligonucleotide
gaccgcucauggcccugca

SEQ ID NO: 2024556 - RNA, 19 nt, Artificial Sequence
  Description of Artificial Sequence: Synthetic oligonucleotide
gcgugauggaccgcucaug

SEQ ID NO: 2024557 - RNA, 19 nt, Artificial Sequence
  Description of Artificial Sequence: Synthetic oligonucleotide
ccucuugagcagccucccc

SEQ ID NO: 2024558 - RNA, 19 nt, Artificial Sequence
  Description of Artificial Sequence: Synthetic oligonucleotide
gccgggaguguuccuuaac

SEQ ID NO: 2024559 - RNA, 19 nt, Artificial Sequence
  Description of Artificial Sequence: Synthetic oligonucleotide
cuguggagagcaugaugau

SEQ ID NO: 2024560 - RNA, 19 nt, Artificial Sequence
  Description of Artificial Sequence: Synthetic oligonucleotide
cggacguaaccaucuucac

SEQ ID NO: 2024561 - RNA, 19 nt, Artificial Sequence
  Description of Artificial Sequence: Synthetic oligonucleotide
cugccgggaguguuccuua

SEQ ID NO: 2024562 - RNA, 19 nt, Artificial Sequence
  Description of Artificial Sequence: Synthetic oligonucleotide
ccagacuuggcgcuauacu

SEQ ID NO: 2024563 - RNA, 19 nt, Artificial Sequence
  Description of Artificial Sequence: Synthetic oligonucleotide
ccagacggcacuggugauc

SEQ ID NO: 2024564 - RNA, 19 nt, Artificial Sequence
  Description of Artificial Sequence: Synthetic oligonucleotide
ccagagacgacagcuguua

SEQ ID NO: 2024565 - RNA, 19 nt, Artificial Sequence
  Description of Artificial Sequence: Synthetic oligonucleotide
acgggacguucuguucgga

SEQ ID NO: 2024566 - RNA, 19 nt, Artificial Sequence
  Description of Artificial Sequence: Synthetic oligonucleotide
ggcuuggaucccguagauc

SEQ ID NO: 2024567 - RNA, 19 nt, Artificial Sequence
  Description of Artificial Sequence: Synthetic oligonucleotide
guaccccaucugcuugucu

SEQ ID NO: 2024568 - RNA, 19 nt, Artificial Sequence
  Description of Artificial Sequence: Synthetic oligonucleotide
cugagccaguaaggacaug

SEQ ID NO: 2024569 - RNA, 19 nt, Artificial Sequence
  Description of Artificial Sequence: Synthetic oligonucleotide
ccgaguugacgggacguuc

SEQ ID NO: 2024570 - RNA, 19 nt, Artificial Sequence
  Description of Artificial Sequence: Synthetic oligonucleotide
ccgguggauggagauccag

SEQ ID NO: 2024571 - RNA, 19 nt, Artificial Sequence
  Description of Artificial Sequence: Synthetic oligonucleotide
gcaccacauggucauaguu

SEQ ID NO: 2024572 - RNA, 19 nt, Artificial Sequence
  Description of Artificial Sequence: Synthetic oligonucleotide
gguaccccaucugcuuguc

SEQ ID NO: 2024573 - RNA, 19 nt, Artificial Sequence
  Description of Artificial Sequence: Synthetic oligonucleotide
ccuucgcgguuguacuuga

SEQ ID NO: 2024574 - RNA, 19 nt, Artificial Sequence
  Description of Artificial Sequence: Synthetic oligonucleotide
cuucaccaccgcugcugua

SEQ ID NO: 2024575 - RNA, 19 nt, Artificial Sequence
  Description of Artificial Sequence: Synthetic oligonucleotide
ccaacaccuccccagacuu

SEQ ID NO: 2024576 - RNA, 19 nt, Artificial Sequence
  Description of Artificial Sequence: Synthetic oligonucleotide
cagagacgacagcuguuau

SEQ ID NO: 2024577 - RNA, 19 nt, Artificial Sequence
  Description of Artificial Sequence: Synthetic oligonucleotide
acgcggugacaaacauggu

SEQ ID NO: 2024578 - RNA, 19 nt, Artificial Sequence
  Description of Artificial Sequence: Synthetic oligonucleotide
cucucgccauucacagagu

SEQ ID NO: 2024579 - RNA, 19 nt, Artificial Sequence
  Description of Artificial Sequence: Synthetic oligonucleotide
cgacagcuguuaucagcug

SEQ ID NO: 2024580 - RNA, 19 nt, Artificial Sequence
  Description of Artificial Sequence: Synthetic oligonucleotide
ggguccccagacggcacug

SEQ ID NO: 2024581 - RNA, 19 nt, Artificial Sequence
  Description of Artificial Sequence: Synthetic oligonucleotide
gccucucgccauucacaga

SEQ ID NO: 2024582 - RNA, 19 nt, Artificial Sequence
  Description of Artificial Sequence: Synthetic oligonucleotide
cuccuucgcgguuguacuu

SEQ ID NO: 2024583 - RNA, 19 nt, Artificial Sequence
  Description of Artificial Sequence: Synthetic oligonucleotide
ccccaucugcuugucugug

SEQ ID NO: 2024584 - RNA, 19 nt, Artificial Sequence
  Description of Artificial Sequence: Synthetic oligonucleotide
caguaaggacaugcuuggu

SEQ ID NO: 2024585 - RNA, 19 nt, Artificial Sequence
  Description of Artificial Sequence: Synthetic oligonucleotide
cgccauucacagaguacca

SEQ ID NO: 2024586 - RNA, 19 nt, Artificial Sequence
  Description of Artificial Sequence: Synthetic oligonucleotide
cgaguugacgggacguucu

SEQ ID NO: 2024587 - RNA, 19 nt, Artificial Sequence
  Description of Artificial Sequence: Synthetic oligonucleotide
cuagcaccacauggucaua

SEQ ID NO: 2024588 - RNA, 19 nt, Artificial Sequence
  Description of Artificial Sequence: Synthetic oligonucleotide
gcugagccaguaaggacau

SEQ ID NO: 2024589 - RNA, 19 nt, Artificial Sequence
  Description of Artificial Sequence: Synthetic oligonucleotide
gcgggucgaaguaauggau

SEQ ID NO: 2024590 - RNA, 19 nt, Artificial Sequence
  Description of Artificial Sequence: Synthetic oligonucleotide
cuucgcgguuguacuugau

SEQ ID NO: 2024591 - RNA, 19 nt, Artificial Sequence
  Description of Artificial Sequence: Synthetic oligonucleotide
agccuccccgguggaugga

SEQ ID NO: 2024592 - RNA, 19 nt, Artificial Sequence
  Description of Artificial Sequence: Synthetic oligonucleotide
cccguagaucgaagaagcu

SEQ ID NO: 2024593 - RNA, 19 nt, Artificial Sequence
  Description of Artificial Sequence: Synthetic oligonucleotide
ccuuggacgcggugacaaa

SEQ ID NO: 2024594 - RNA, 19 nt, Artificial Sequence
  Description of Artificial Sequence: Synthetic oligonucleotide
gggguccccagacggcacu

SEQ ID NO: 2024595 - RNA, 19 nt, Artificial Sequence
  Description of Artificial Sequence: Synthetic oligonucleotide
ccuccccagacuuggcgcu

SEQ ID NO: 2024596 - RNA, 19 nt, Artificial Sequence
  Description of Artificial Sequence: Synthetic oligonucleotide
gcggugacgcgagcagaga

SEQ ID NO: 2024597 - RNA, 19 nt, Artificial Sequence
  Description of Artificial Sequence: Synthetic oligonucleotide
cagguucggacggcugagu

SEQ ID NO: 2024598 - RNA, 19 nt, Artificial Sequence
  Description of Artificial Sequence: Synthetic oligonucleotide
ccaccuccuagcaccacau

SEQ ID NO: 2024599 - RNA, 19 nt, Artificial Sequence
  Description of Artificial Sequence: Synthetic oligonucleotide
cuccccagacuuggcgcua

SEQ ID NO: 2024600 - RNA, 19 nt, Artificial Sequence
  Description of Artificial Sequence: Synthetic oligonucleotide
cgggacguucuguucggaa

SEQ ID NO: 2024601 - RNA, 19 nt, Artificial Sequence
  Description of Artificial Sequence: Synthetic oligonucleotide
ccccgaagucaaagccaca

SEQ ID NO: 2024602 - RNA, 19 nt, Artificial Sequence
  Description of Artificial Sequence: Synthetic oligonucleotide
gccgaguugacgggacguu

SEQ ID NO: 2024603 - RNA, 19 nt, Artificial Sequence
  Description of Artificial Sequence: Synthetic oligonucleotide
cauugacgguagggucuuu

SEQ ID NO: 2024604 - RNA, 19 nt, Artificial Sequence
  Description of Artificial Sequence: Synthetic oligonucleotide
cggcggugacgcgagcaga

SEQ ID NO: 2024605 - RNA, 19 nt, Artificial Sequence
  Description of Artificial Sequence: Synthetic oligonucleotide
ccccagacuuggcgcuaua

SEQ ID NO: 2024606 - RNA, 19 nt, Artificial Sequence
  Description of Artificial Sequence: Synthetic oligonucleotide
aaaacaacacuguugagag

SEQ ID NO: 2024607 - RNA, 19 nt, Artificial Sequence
  Description of Artificial Sequence: Synthetic oligonucleotide
uguacauuaagacugcacg

SEQ ID NO: 2024608 - RNA, 19 nt, Artificial Sequence
  Description of Artificial Sequence: Synthetic oligonucleotide
uuuaaugaaaagaucauaa

SEQ ID NO: 2024609 - RNA, 19 nt, Artificial Sequence
  Description of Artificial Sequence: Synthetic oligonucleotide
aaaauaacaguuucucauc

SEQ ID NO: 2024610 - RNA, 19 nt, Artificial Sequence
  Description of Artificial Sequence: Synthetic oligonucleotide
uuuauguaaaacaaugaga

SEQ ID NO: 2024611 - RNA, 19 nt, Artificial Sequence
  Description of Artificial Sequence: Synthetic oligonucleotide
aagaucauaaaauaacagu

SEQ ID NO: 2024612 - RNA, 19 nt, Artificial Sequence
  Description of Artificial Sequence: Synthetic oligonucleotide
ugagauaaauauauuaagu

SEQ ID NO: 2024613 - RNA, 19 nt, Artificial Sequence
  Description of Artificial Sequence: Synthetic oligonucleotide
aaacuguaaaaguuuaugu

SEQ ID NO: 2024614 - RNA, 19 nt, Artificial Sequence
  Description of Artificial Sequence: Synthetic oligonucleotide
agagcucuaaccugaaugc

SEQ ID NO: 2024615 - RNA, 19 nt, Artificial Sequence
  Description of Artificial Sequence: Synthetic oligonucleotide
aauacugacaguaugggca

SEQ ID NO: 2024616 - RNA, 19 nt, Artificial Sequence
  Description of Artificial Sequence: Synthetic oligonucleotide
caucacugcacaaacaugg

SEQ ID NO: 2024617 - RNA, 19 nt, Artificial Sequence
  Description of Artificial Sequence: Synthetic oligonucleotide
ucauggauaaaucacucug

SEQ ID NO: 2024618 - RNA, 19 nt, Artificial Sequence
  Description of Artificial Sequence: Synthetic oligonucleotide
aacaacacuguugagagug

SEQ ID NO: 2024619 - RNA, 19 nt, Artificial Sequence
  Description of Artificial Sequence: Synthetic oligonucleotide
ugagcuucaauaaagcuuc

SEQ ID NO: 2024620 - RNA, 19 nt, Artificial Sequence
  Description of Artificial Sequence: Synthetic oligonucleotide
augagauaaauauauuaag

SEQ ID NO: 2024621 - RNA, 19 nt, Artificial Sequence
  Description of Artificial Sequence: Synthetic oligonucleotide
aauaacaguuucucaucac

SEQ ID NO: 2024622 - RNA, 19 nt, Artificial Sequence
  Description of Artificial Sequence: Synthetic oligonucleotide
cuuaaucaagcuuuuaaug

SEQ ID NO: 2024623 - RNA, 19 nt, Artificial Sequence
  Description of Artificial Sequence: Synthetic oligonucleotide
agauaaauauauuaaguau

SEQ ID NO: 2024624 - RNA, 19 nt, Artificial Sequence
  Description of Artificial Sequence: Synthetic oligonucleotide
aagucugcgucuuacaugu

SEQ ID NO: 2024625 - RNA, 19 nt, Artificial Sequence
  Description of Artificial Sequence: Synthetic oligonucleotide
aaugagauaaauauauuaa

SEQ ID NO: 2024626 - RNA, 19 nt, Artificial Sequence
  Description of Artificial Sequence: Synthetic oligonucleotide
cuuggauccagccaggagg

SEQ ID NO: 2024627 - RNA, 19 nt, Artificial Sequence
  Description of Artificial Sequence: Synthetic oligonucleotide
aauauauuaaguaucuuuu

SEQ ID NO: 2024628 - RNA, 19 nt, Artificial Sequence
  Description of Artificial Sequence: Synthetic oligonucleotide
gacggaaacacacuucccg

SEQ ID NO: 2024629 - RNA, 19 nt, Artificial Sequence
  Description of Artificial Sequence: Synthetic oligonucleotide
ugaacucggaagaaccugg

SEQ ID NO: 2024630 - RNA, 19 nt, Artificial Sequence
  Description of Artificial Sequence: Synthetic oligonucleotide
agucagacccuucugcugc

SEQ ID NO: 2024631 - RNA, 19 nt, Artificial Sequence
  Description of Artificial Sequence: Synthetic oligonucleotide
aguagcucgguccaguggg

SEQ ID NO: 2024632 - RNA, 19 nt, Artificial Sequence
  Description of Artificial Sequence: Synthetic oligonucleotide
aacuguaaaaguuuaugua

SEQ ID NO: 2024633 - RNA, 19 nt, Artificial Sequence
  Description of Artificial Sequence: Synthetic oligonucleotide
agguguauggcuaugcugc

SEQ ID NO: 2024634 - RNA, 19 nt, Artificial Sequence
  Description of Artificial Sequence: Synthetic oligonucleotide
auggauaaaucacucugac

SEQ ID NO: 2024635 - RNA, 19 nt, Artificial Sequence
  Description of Artificial Sequence: Synthetic oligonucleotide
uucuuaaucaagcuuuuaa

SEQ ID NO: 2024636 - RNA, 19 nt, Artificial Sequence
  Description of Artificial Sequence: Synthetic oligonucleotide
ucauaaaauaacaguuucu

SEQ ID NO: 2024637 - RNA, 19 nt, Artificial Sequence
  Description of Artificial Sequence: Synthetic oligonucleotide
gacaucaccccuuggaucc

SEQ ID NO: 2024638 - RNA, 19 nt, Artificial Sequence
  Description of Artificial Sequence: Synthetic oligonucleotide
ugugugagaugauagaguc

SEQ ID NO: 2024639 - RNA, 19 nt, Artificial Sequence
  Description of Artificial Sequence: Synthetic oligonucleotide
uggacggaaacacacuucc

SEQ ID NO: 2024640 - RNA, 19 nt, Artificial Sequence
  Description of Artificial Sequence: Synthetic oligonucleotide
ugaauacugacaguauggg

SEQ ID NO: 2024641 - RNA, 19 nt, Artificial Sequence
  Description of Artificial Sequence: Synthetic oligonucleotide
ucuuaaucaagcuuuuaau

SEQ ID NO: 2024642 - RNA, 19 nt, Artificial Sequence
  Description of Artificial Sequence: Synthetic oligonucleotide
uuaaugaaaagaucauaaa

SEQ ID NO: 2024643 - RNA, 19 nt, Artificial Sequence
  Description of Artificial Sequence: Synthetic oligonucleotide
uugauggacggaaacacac

SEQ ID NO: 2024644 - RNA, 19 nt, Artificial Sequence
  Description of Artificial Sequence: Synthetic oligonucleotide
gacugcacgcuuuugaaug

SEQ ID NO: 2024645 - RNA, 19 nt, Artificial Sequence
  Description of Artificial Sequence: Synthetic oligonucleotide
uuuugaauggagagaucag

SEQ ID NO: 2024646 - RNA, 19 nt, Artificial Sequence
  Description of Artificial Sequence: Synthetic oligonucleotide
acucggaagaaccugggag

SEQ ID NO: 2024647 - RNA, 19 nt, Artificial Sequence
  Description of Artificial Sequence: Synthetic oligonucleotide
aacaguuucucaucacugu

SEQ ID NO: 2024648 - RNA, 19 nt, Artificial Sequence
  Description of Artificial Sequence: Synthetic oligonucleotide
auaacaguuucucaucacu

SEQ ID NO: 2024649 - RNA, 19 nt, Artificial Sequence
  Description of Artificial Sequence: Synthetic oligonucleotide
aagcuuuuaaugaaaagau

SEQ ID NO: 2024650 - RNA, 19 nt, Artificial Sequence
  Description of Artificial Sequence: Synthetic oligonucleotide
gugaauacugacaguaugg

SEQ ID NO: 2024651 - RNA, 19 nt, Artificial Sequence
  Description of Artificial Sequence: Synthetic oligonucleotide
uaagacugcacgcuuuuga

SEQ ID NO: 2024652 - RNA, 19 nt, Artificial Sequence
  Description of Artificial Sequence: Synthetic oligonucleotide
guuggugaggaccagacuc

SEQ ID NO: 2024653 - RNA, 19 nt, Artificial Sequence
  Description of Artificial Sequence: Synthetic oligonucleotide
uugaauggagagaucaguc

SEQ ID NO: 2024654 - RNA, 19 nt, Artificial Sequence
  Description of Artificial Sequence: Synthetic oligonucleotide
uugagugacucucacagua

SEQ ID NO: 2024655 - RNA, 19 nt, Artificial Sequence
  Description of Artificial Sequence: Synthetic oligonucleotide
ugagaugauagagucagcu

SEQ ID NO: 2024656 - RNA, 19 nt, Artificial Sequence
  Description of Artificial Sequence: Synthetic oligonucleotide
ugauagagucagcugagcu

SEQ ID NO: 2024657 - RNA, 19 nt, Artificial Sequence
  Description of Artificial Sequence: Synthetic oligonucleotide
uguaaaaguuuauguaaaa

SEQ ID NO: 2024658 - RNA, 19 nt, Artificial Sequence
  Description of Artificial Sequence: Synthetic oligonucleotide
aacccuaagucugagaaau

SEQ ID NO: 2024659 - RNA, 19 nt, Artificial Sequence
  Description of Artificial Sequence: Synthetic oligonucleotide
uguucgcaccaucuguugg

SEQ ID NO: 2024660 - RNA, 19 nt, Artificial Sequence
  Description of Artificial Sequence: Synthetic oligonucleotide
aggucugaaacuguaaaag

SEQ ID NO: 2024661 - RNA, 19 nt, Artificial Sequence
  Description of Artificial Sequence: Synthetic oligonucleotide
gaauacugacaguaugggc

SEQ ID NO: 2024662 - RNA, 19 nt, Artificial Sequence
  Description of Artificial Sequence: Synthetic oligonucleotide
agaucauaaaauaacaguu

SEQ ID NO: 2024663 - RNA, 19 nt, Artificial Sequence
  Description of Artificial Sequence: Synthetic oligonucleotide
cucggaagaaccugggagg

SEQ ID NO: 2024664 - RNA, 19 nt, Artificial Sequence
  Description of Artificial Sequence: Synthetic oligonucleotide
cacgcuuuugaauggagag

SEQ ID NO: 2024665 - RNA, 19 nt, Artificial Sequence
  Description of Artificial Sequence: Synthetic oligonucleotide
ggugcaugcucuuuggugg

SEQ ID NO: 2024666 - RNA, 19 nt, Artificial Sequence
  Description of Artificial Sequence: Synthetic oligonucleotide
guacauuaagacugcacgc

SEQ ID NO: 2024667 - RNA, 19 nt, Artificial Sequence
  Description of Artificial Sequence: Synthetic oligonucleotide
cuaguccuuacccagcacc

SEQ ID NO: 2024668 - RNA, 19 nt, Artificial Sequence
  Description of Artificial Sequence: Synthetic oligonucleotide
acacuguugagaguguucg

SEQ ID NO: 2024669 - RNA, 19 nt, Artificial Sequence
  Description of Artificial Sequence: Synthetic oligonucleotide
gcuugagugacucucacag

SEQ ID NO: 2024670 - RNA, 19 nt, Artificial Sequence
  Description of Artificial Sequence: Synthetic oligonucleotide
ugagguccagugaauacug

SEQ ID NO: 2024671 - RNA, 19 nt, Artificial Sequence
  Description of Artificial Sequence: Synthetic oligonucleotide
cagagcucuaaccugaaug

SEQ ID NO: 2024672 - RNA, 19 nt, Artificial Sequence
  Description of Artificial Sequence: Synthetic oligonucleotide
ucuuacauguccacaaguu

SEQ ID NO: 2024673 - RNA, 19 nt, Artificial Sequence
  Description of Artificial Sequence: Synthetic oligonucleotide
ugaggucugaaacuguaaa

SEQ ID NO: 2024674 - RNA, 19 nt, Artificial Sequence
  Description of Artificial Sequence: Synthetic oligonucleotide
uuugaauggagagaucagu

SEQ ID NO: 2024675 - RNA, 19 nt, Artificial Sequence
  Description of Artificial Sequence: Synthetic oligonucleotide
auuagggcucaggugaagc

SEQ ID NO: 2024676 - RNA, 19 nt, Artificial Sequence
  Description of Artificial Sequence: Synthetic oligonucleotide
acggaaacacacuucccgg

SEQ ID NO: 2024677 - RNA, 19 nt, Artificial Sequence
  Description of Artificial Sequence: Synthetic oligonucleotide
ccagacucaagucagaccc

SEQ ID NO: 2024678 - RNA, 19 nt, Artificial Sequence
  Description of Artificial Sequence: Synthetic oligonucleotide
caaugagauaaauauauua

SEQ ID NO: 2024679 - RNA, 19 nt, Artificial Sequence
  Description of Artificial Sequence: Synthetic oligonucleotide
agcguugauggacggaaac

SEQ ID NO: 2024680 - RNA, 19 nt, Artificial Sequence
  Description of Artificial Sequence: Synthetic oligonucleotide
uacauuaagacugcacgcu

SEQ ID NO: 2024681 - RNA, 19 nt, Artificial Sequence
  Description of Artificial Sequence: Synthetic oligonucleotide
auggcuaugcugcaagucu

SEQ ID NO: 2024682 - RNA, 19 nt, Artificial Sequence
  Description of Artificial Sequence: Synthetic oligonucleotide
cccaaaauggggauuaggg

SEQ ID NO: 2024683 - RNA, 19 nt, Artificial Sequence
  Description of Artificial Sequence: Synthetic oligonucleotide
aacacaaggcucacaggcg

SEQ ID NO: 2024684 - RNA, 19 nt, Artificial Sequence
  Description of Artificial Sequence: Synthetic oligonucleotide
gaugauagagucagcugag

SEQ ID NO: 2024685 - RNA, 19 nt, Artificial Sequence
  Description of Artificial Sequence: Synthetic oligonucleotide
aguuucucaucacuguaca

SEQ ID NO: 2024686 - RNA, 19 nt, Artificial Sequence
  Description of Artificial Sequence: Synthetic oligonucleotide
acugcacaaacauggauaa

SEQ ID NO: 2024687 - RNA, 19 nt, Artificial Sequence
  Description of Artificial Sequence: Synthetic oligonucleotide
ucugcgucuuacaugucca

SEQ ID NO: 2024688 - RNA, 19 nt, Artificial Sequence
  Description of Artificial Sequence: Synthetic oligonucleotide
  modified_base (16)..(16): a, c, u, g, unknown or other
cagguggggaccuggnucc

SEQ ID NO: 2024689 - RNA, 19 nt, Artificial Sequence
  Description of Artificial Sequence: Synthetic oligonucleotide
aagacugcacgcuuuugaa

SEQ ID NO: 2024690 - RNA, 19 nt, Artificial Sequence
  Description of Artificial Sequence: Synthetic oligonucleotide
aagaaccugggagggaggg

SEQ ID NO: 2024691 - RNA, 19 nt, Artificial Sequence
  Description of Artificial Sequence: Synthetic oligonucleotide
aucgcacuccugcacaagg

SEQ ID NO: 2024692 - RNA, 19 nt, Artificial Sequence
  Description of Artificial Sequence: Synthetic oligonucleotide
cuaacccuaagucugagaa

SEQ ID NO: 2024693 - RNA, 19 nt, Artificial Sequence
  Description of Artificial Sequence: Synthetic oligonucleotide
aagucagacccuucugcug

SEQ ID NO: 2024694 - RNA, 19 nt, Artificial Sequence
  Description of Artificial Sequence: Synthetic oligonucleotide
uaguccuuacccagcaccc

SEQ ID NO: 2024695 - RNA, 19 nt, Artificial Sequence
  Description of Artificial Sequence: Synthetic oligonucleotide
cacaguaacacaaggcuca

SEQ ID NO: 2024696 - RNA, 19 nt, Artificial Sequence
  Description of Artificial Sequence: Synthetic oligonucleotide
gagguguauggcuaugcug

SEQ ID NO: 2024697 - RNA, 19 nt, Artificial Sequence
  Description of Artificial Sequence: Synthetic oligonucleotide
uggauaaaucacucugaca

SEQ ID NO: 2024698 - RNA, 19 nt, Artificial Sequence
  Description of Artificial Sequence: Synthetic oligonucleotide
uucuaguccuuacccagca

SEQ ID NO: 2024699 - RNA, 19 nt, Artificial Sequence
  Description of Artificial Sequence: Synthetic oligonucleotide
ugaaacuguaaaaguuuau

SEQ ID NO: 2024700 - RNA, 19 nt, Artificial Sequence
  Description of Artificial Sequence: Synthetic oligonucleotide
aaacacacuucccgggcca

SEQ ID NO: 2024701 - RNA, 19 nt, Artificial Sequence
  Description of Artificial Sequence: Synthetic oligonucleotide
uggugcaugcucuuuggug

SEQ ID NO: 2024702 - RNA, 19 nt, Artificial Sequence
  Description of Artificial Sequence: Synthetic oligonucleotide
gaaacacacuucccgggcc

SEQ ID NO: 2024703 - RNA, 19 nt, Artificial Sequence
  Description of Artificial Sequence: Synthetic oligonucleotide
acugcacgcuuuugaaugg

SEQ ID NO: 2024704 - RNA, 19 nt, Artificial Sequence
  Description of Artificial Sequence: Synthetic oligonucleotide
cuuggugcaugcucuuugg

SEQ ID NO: 2024705 - RNA, 19 nt, Artificial Sequence
  Description of Artificial Sequence: Synthetic oligonucleotide
  modified_base (8)..(8): a, c, u, g, unknown or other
gaccuggnuccccucagcg

SEQ ID NO: 2024706 - RNA, 19 nt, Artificial Sequence
  Description of Artificial Sequence: Synthetic oligonucleotide
uuggugaggaccagacuca

SEQ ID NO: 2024707 - RNA, 19 nt, Artificial Sequence
  Description of Artificial Sequence: Synthetic oligonucleotide
gcuucaauaaagcuuccug

SEQ ID NO: 2024708 - RNA, 19 nt, Artificial Sequence
  Description of Artificial Sequence: Synthetic oligonucleotide
caguaugggcagcaggugg

SEQ ID NO: 2024709 - RNA, 19 nt, Artificial Sequence
  Description of Artificial Sequence: Synthetic oligonucleotide
acucaagucagacccuucu

SEQ ID NO: 2024710 - RNA, 19 nt, Artificial Sequence
  Description of Artificial Sequence: Synthetic oligonucleotide
gggauuagggcucagguga

SEQ ID NO: 2024711 - RNA, 19 nt, Artificial Sequence
  Description of Artificial Sequence: Synthetic oligonucleotide
cuguacauuaagacugcac

SEQ ID NO: 2024712 - RNA, 19 nt, Artificial Sequence
  Description of Artificial Sequence: Synthetic oligonucleotide
ucggaagaaccugggaggg

SEQ ID NO: 2024713 - RNA, 19 nt, Artificial Sequence
  Description of Artificial Sequence: Synthetic oligonucleotide
cugagcuugaagaggcccc

SEQ ID NO: 2024714 - RNA, 19 nt, Artificial Sequence
  Description of Artificial Sequence: Synthetic oligonucleotide
ugagguguauggcuaugcu

SEQ ID NO: 2024715 - RNA, 19 nt, Artificial Sequence
  Description of Artificial Sequence: Synthetic oligonucleotide
caagucugcgucuuacaug

SEQ ID NO: 2024716 - RNA, 19 nt, Artificial Sequence
  Description of Artificial Sequence: Synthetic oligonucleotide
uggcuaugcugcaagucug

SEQ ID NO: 2024717 - RNA, 19 nt, Artificial Sequence
  Description of Artificial Sequence: Synthetic oligonucleotide
gucugcgucuuacaugucc

SEQ ID NO: 2024718 - RNA, 19 nt, Artificial Sequence
  Description of Artificial Sequence: Synthetic oligonucleotide
augauagagucagcugagc

SEQ ID NO: 2024719 - RNA, 19 nt, Artificial Sequence
  Description of Artificial Sequence: Synthetic oligonucleotide
ugauggacggaaacacacu

SEQ ID NO: 2024720 - RNA, 19 nt, Artificial Sequence
  Description of Artificial Sequence: Synthetic oligonucleotide
uguggggucagaagccaca

SEQ ID NO: 2024721 - RNA, 19 nt, Artificial Sequence
  Description of Artificial Sequence: Synthetic oligonucleotide
agaguguucgcaccaucug

SEQ ID NO: 2024722 - RNA, 19 nt, Artificial Sequence
  Description of Artificial Sequence: Synthetic oligonucleotide
cucuaaccugaaugcaucc

SEQ ID NO: 2024723 - RNA, 19 nt, Artificial Sequence
  Description of Artificial Sequence: Synthetic oligonucleotide
uccuuacccagcacccagg

SEQ ID NO: 2024724 - RNA, 19 nt, Artificial Sequence
  Description of Artificial Sequence: Synthetic oligonucleotide
aguaugggcagcagguggg

SEQ ID NO: 2024725 - RNA, 19 nt, Artificial Sequence
  Description of Artificial Sequence: Synthetic oligonucleotide
agucagcugagcuucaaua

SEQ ID NO: 2024726 - RNA, 19 nt, Artificial Sequence
  Description of Artificial Sequence: Synthetic oligonucleotide
uaaccugaaugcauccauc

SEQ ID NO: 2024727 - RNA, 19 nt, Artificial Sequence
  Description of Artificial Sequence: Synthetic oligonucleotide
ugcacgcuuuugaauggag

SEQ ID NO: 2024728 - RNA, 19 nt, Artificial Sequence
  Description of Artificial Sequence: Synthetic oligonucleotide
ggugugugagaugauagag

SEQ ID NO: 2024729 - RNA, 19 nt, Artificial Sequence
  Description of Artificial Sequence: Synthetic oligonucleotide
cuucuaguccuuacccagc

SEQ ID NO: 2024730 - RNA, 19 nt, Artificial Sequence
  Description of Artificial Sequence: Synthetic oligonucleotide
aacucggaagaaccuggga

SEQ ID NO: 2024731 - RNA, 19 nt, Artificial Sequence
  Description of Artificial Sequence: Synthetic oligonucleotide
ucagcguugauggacggaa

SEQ ID NO: 2024732 - RNA, 19 nt, Artificial Sequence
  Description of Artificial Sequence: Synthetic oligonucleotide
gagugacucucacaguaac

SEQ ID NO: 2024733 - RNA, 19 nt, Artificial Sequence
  Description of Artificial Sequence: Synthetic oligonucleotide
ccagcuaacccuaagucug

SEQ ID NO: 2024734 - RNA, 19 nt, Artificial Sequence
  Description of Artificial Sequence: Synthetic oligonucleotide
gaagagcccuugcaguagc

SEQ ID NO: 2024735 - RNA, 19 nt, Artificial Sequence
  Description of Artificial Sequence: Synthetic oligonucleotide
uuagggcucaggugaagcu

SEQ ID NO: 2024736 - RNA, 19 nt, Artificial Sequence
  Description of Artificial Sequence: Synthetic oligonucleotide
ugacucucacaguaacaca

SEQ ID NO: 2024737 - RNA, 19 nt, Artificial Sequence
  Description of Artificial Sequence: Synthetic oligonucleotide
cuucaauaaagcuuccugu

SEQ ID NO: 2024738 - RNA, 19 nt, Artificial Sequence
  Description of Artificial Sequence: Synthetic oligonucleotide
cuguuggugaggaccagac

SEQ ID NO: 2024739 - RNA, 19 nt, Artificial Sequence
  Description of Artificial Sequence: Synthetic oligonucleotide
aggaccagacucaagucag

SEQ ID NO: 2024740 - RNA, 19 nt, Artificial Sequence
  Description of Artificial Sequence: Synthetic oligonucleotide
uggccuuauagcugcugag

SEQ ID NO: 2024741 - RNA, 19 nt, Artificial Sequence
  Description of Artificial Sequence: Synthetic oligonucleotide
ugggcacuggcagagccgg

SEQ ID NO: 2024742 - RNA, 19 nt, Artificial Sequence
  Description of Artificial Sequence: Synthetic oligonucleotide
ugaaugcauccauccagac

SEQ ID NO: 2024743 - RNA, 19 nt, Artificial Sequence
  Description of Artificial Sequence: Synthetic oligonucleotide
agggugaacucggaagaac

SEQ ID NO: 2024744 - RNA, 19 nt, Artificial Sequence
  Description of Artificial Sequence: Synthetic oligonucleotide
gaauggagagaucagucau

SEQ ID NO: 2024745 - RNA, 19 nt, Artificial Sequence
  Description of Artificial Sequence: Synthetic oligonucleotide
agcucggcagaucgcacuc

SEQ ID NO: 2024746 - RNA, 19 nt, Artificial Sequence
  Description of Artificial Sequence: Synthetic oligonucleotide
ucacaggcggggcugacau

SEQ ID NO: 2024747 - RNA, 19 nt, Artificial Sequence
  Description of Artificial Sequence: Synthetic oligonucleotide
ugaggaccagacucaaguc

SEQ ID NO: 2024748 - RNA, 19 nt, Artificial Sequence
  Description of Artificial Sequence: Synthetic oligonucleotide
gaacucggaagaaccuggg

SEQ ID NO: 2024749 - RNA, 19 nt, Artificial Sequence
  Description of Artificial Sequence: Synthetic oligonucleotide
gggcuggucagcuuggugc

SEQ ID NO: 2024750 - RNA, 19 nt, Artificial Sequence
  Description of Artificial Sequence: Synthetic oligonucleotide
caccagcuaacccuaaguc

SEQ ID NO: 2024751 - RNA, 19 nt, Artificial Sequence
  Description of Artificial Sequence: Synthetic oligonucleotide
uguuggugaggaccagacu

SEQ ID NO: 2024752 - RNA, 19 nt, Artificial Sequence
  Description of Artificial Sequence: Synthetic oligonucleotide
gugaggaccagacucaagu

SEQ ID NO: 2024753 - RNA, 19 nt, Artificial Sequence
  Description of Artificial Sequence: Synthetic oligonucleotide
cacugcacaaacauggaua

SEQ ID NO: 2024754 - RNA, 19 nt, Artificial Sequence
  Description of Artificial Sequence: Synthetic oligonucleotide
cugaaugcauccauccaga

SEQ ID NO: 2024755 - RNA, 19 nt, Artificial Sequence
  Description of Artificial Sequence: Synthetic oligonucleotide
uauggcuaugcugcaaguc

SEQ ID NO: 2024756 - RNA, 19 nt, Artificial Sequence
  Description of Artificial Sequence: Synthetic oligonucleotide
acauucaucacugcacaaa

SEQ ID NO: 2024757 - RNA, 19 nt, Artificial Sequence
  Description of Artificial Sequence: Synthetic oligonucleotide
acauuaagacugcacgcuu

SEQ ID NO: 2024758 - RNA, 19 nt, Artificial Sequence
  Description of Artificial Sequence: Synthetic oligonucleotide
ggaagaaccugggagggag

SEQ ID NO: 2024759 - RNA, 19 nt, Artificial Sequence
  Description of Artificial Sequence: Synthetic oligonucleotide
acaguaacacaaggcucac

SEQ ID NO: 2024760 - RNA, 19 nt, Artificial Sequence
  Description of Artificial Sequence: Synthetic oligonucleotide
uaacccuaagucugagaaa

SEQ ID NO: 2024761 - RNA, 19 nt, Artificial Sequence
  Description of Artificial Sequence: Synthetic oligonucleotide
  modified_base (2)..(2): a, c, u, g, unknown or other
gnuccccucagcguugaug

SEQ ID NO: 2024762 - RNA, 19 nt, Artificial Sequence
  Description of Artificial Sequence: Synthetic oligonucleotide
ggaaacacacuucccgggc

SEQ ID NO: 2024763 - RNA, 19 nt, Artificial Sequence
  Description of Artificial Sequence: Synthetic oligonucleotide
cuugcaguagcucggucca

SEQ ID NO: 2024764 - RNA, 19 nt, Artificial Sequence
  Description of Artificial Sequence: Synthetic oligonucleotide
ugcaagucugcgucuuaca

SEQ ID NO: 2024765 - RNA, 19 nt, Artificial Sequence
  Description of Artificial Sequence: Synthetic oligonucleotide
acaggcggggcugacauca

SEQ ID NO: 2024766 - RNA, 19 nt, Artificial Sequence
  Description of Artificial Sequence: Synthetic oligonucleotide
gucagcugagcuucaauaa

SEQ ID NO: 2024767 - RNA, 19 nt, Artificial Sequence
  Description of Artificial Sequence: Synthetic oligonucleotide
ucaccccuuggauccagcc

SEQ ID NO: 2024768 - RNA, 19 nt, Artificial Sequence
  Description of Artificial Sequence: Synthetic oligonucleotide
ugagaguguucgcaccauc

SEQ ID NO: 2024769 - RNA, 19 nt, Artificial Sequence
  Description of Artificial Sequence: Synthetic oligonucleotide
uuaagacugcacgcuuuug

SEQ ID NO: 2024770 - RNA, 19 nt, Artificial Sequence
  Description of Artificial Sequence: Synthetic oligonucleotide
ccuugcaguagcucggucc

SEQ ID NO: 2024771 - RNA, 19 nt, Artificial Sequence
  Description of Artificial Sequence: Synthetic oligonucleotide
uccagugaauacugacagu

SEQ ID NO: 2024772 - RNA, 19 nt, Artificial Sequence
  Description of Artificial Sequence: Synthetic oligonucleotide
gugaacucggaagaaccug

SEQ ID NO: 2024773 - RNA, 19 nt, Artificial Sequence
  Description of Artificial Sequence: Synthetic oligonucleotide
ggagagaucagucauggau

SEQ ID NO: 2024774 - RNA, 19 nt, Artificial Sequence
  Description of Artificial Sequence: Synthetic oligonucleotide
ucuaguccuuacccagcac

SEQ ID NO: 2024775 - RNA, 19 nt, Artificial Sequence
  Description of Artificial Sequence: Synthetic oligonucleotide
gacaguaugggcagcaggu

SEQ ID NO: 2024776 - RNA, 19 nt, Artificial Sequence
  Description of Artificial Sequence: Synthetic oligonucleotide
gaagaaccugggagggagg

SEQ ID NO: 2024777 - RNA, 19 nt, Artificial Sequence
  Description of Artificial Sequence: Synthetic oligonucleotide
ugcgucuuacauguccaca

SEQ ID NO: 2024778 - RNA, 19 nt, Artificial Sequence
  Description of Artificial Sequence: Synthetic oligonucleotide
auggacggaaacacacuuc

SEQ ID NO: 2024779 - RNA, 19 nt, Artificial Sequence
  Description of Artificial Sequence: Synthetic oligonucleotide
ccaucuguuggugaggacc

SEQ ID NO: 2024780 - RNA, 19 nt, Artificial Sequence
  Description of Artificial Sequence: Synthetic oligonucleotide
uuggugcaugcucuuuggu

SEQ ID NO: 2024781 - RNA, 19 nt, Artificial Sequence
  Description of Artificial Sequence: Synthetic oligonucleotide
uggucagcuuggugcaugc

SEQ ID NO: 2024782 - RNA, 19 nt, Artificial Sequence
  Description of Artificial Sequence: Synthetic oligonucleotide
  modified_base (7)..(7): a, c, u, g, unknown or other
accuggnuccccucagcgu

SEQ ID NO: 2024783 - RNA, 19 nt, Artificial Sequence
  Description of Artificial Sequence: Synthetic oligonucleotide
cugagguguauggcuaugc

SEQ ID NO: 2024784 - RNA, 19 nt, Artificial Sequence
  Description of Artificial Sequence: Synthetic oligonucleotide
gggcuucuaguccuuaccc

SEQ ID NO: 2024785 - RNA, 19 nt, Artificial Sequence
  Description of Artificial Sequence: Synthetic oligonucleotide
aggaccugagguccaguga

SEQ ID NO: 2024786 - RNA, 19 nt, Artificial Sequence
  Description of Artificial Sequence: Synthetic oligonucleotide
gucugagaaauaaauacau

SEQ ID NO: 2024787 - RNA, 19 nt, Artificial Sequence
  Description of Artificial Sequence: Synthetic oligonucleotide
agacugcacgcuuuugaau

SEQ ID NO: 2024788 - RNA, 19 nt, Artificial Sequence
  Description of Artificial Sequence: Synthetic oligonucleotide
gauuagggcucaggugaag

SEQ ID NO: 2024789 - RNA, 19 nt, Artificial Sequence
  Description of Artificial Sequence: Synthetic oligonucleotide
ggccuuauagcugcugagg

SEQ ID NO: 2024790 - RNA, 19 nt, Artificial Sequence
  Description of Artificial Sequence: Synthetic oligonucleotide
gacagcucggcagaucgca

SEQ ID NO: 2024791 - RNA, 19 nt, Artificial Sequence
  Description of Artificial Sequence: Synthetic oligonucleotide
acucucacaguaacacaag

SEQ ID NO: 2024792 - RNA, 19 nt, Artificial Sequence
  Description of Artificial Sequence: Synthetic oligonucleotide
cacuguugagaguguucgc

SEQ ID NO: 2024793 - RNA, 19 nt, Artificial Sequence
  Description of Artificial Sequence: Synthetic oligonucleotide
caugcucuuugguggcagc

SEQ ID NO: 2024794 - RNA, 19 nt, Artificial Sequence
  Description of Artificial Sequence: Synthetic oligonucleotide
gggagaguuucccugggac

SEQ ID NO: 2024795 - RNA, 19 nt, Artificial Sequence
  Description of Artificial Sequence: Synthetic oligonucleotide
uuuuggcuugagugacucu

SEQ ID NO: 2024796 - RNA, 19 nt, Artificial Sequence
  Description of Artificial Sequence: Synthetic oligonucleotide
gaguguucgcaccaucugu

SEQ ID NO: 2024797 - RNA, 19 nt, Artificial Sequence
  Description of Artificial Sequence: Synthetic oligonucleotide
ugacagcucggcagaucgc

SEQ ID NO: 2024798 - RNA, 19 nt, Artificial Sequence
  Description of Artificial Sequence: Synthetic oligonucleotide
cuuacccagcacccagggc

SEQ ID NO: 2024799 - RNA, 19 nt, Artificial Sequence
  Description of Artificial Sequence: Synthetic oligonucleotide
gacccuucugcugccuggg

SEQ ID NO: 2024800 - RNA, 19 nt, Artificial Sequence
  Description of Artificial Sequence: Synthetic oligonucleotide
agggcucaggugaagcuag

SEQ ID NO: 2024801 - RNA, 19 nt, Artificial Sequence
  Description of Artificial Sequence: Synthetic oligonucleotide
gguggggugugugagauga

SEQ ID NO: 2024802 - RNA, 19 nt, Artificial Sequence
  Description of Artificial Sequence: Synthetic oligonucleotide
uucgcaccaucuguuggug

SEQ ID NO: 2024803 - RNA, 19 nt, Artificial Sequence
  Description of Artificial Sequence: Synthetic oligonucleotide
guguucgcaccaucuguug

SEQ ID NO: 2024804 - RNA, 19 nt, Artificial Sequence
  Description of Artificial Sequence: Synthetic oligonucleotide
cugcacaaggaccugaggu

SEQ ID NO: 2024805 - RNA, 19 nt, Artificial Sequence
  Description of Artificial Sequence: Synthetic oligonucleotide
ggggugugugagaugauag

SEQ ID NO: 2024806 - RNA, 19 nt, Artificial Sequence
  Description of Artificial Sequence: Synthetic oligonucleotide
aagggugaacucggaagaa

SEQ ID NO: 2024807 - RNA, 19 nt, Artificial Sequence
  Description of Artificial Sequence: Synthetic oligonucleotide
agcucuaaccugaaugcau

SEQ ID NO: 2024808 - RNA, 19 nt, Artificial Sequence
  Description of Artificial Sequence: Synthetic oligonucleotide
ggggauuagggcucaggug

SEQ ID NO: 2024809 - RNA, 19 nt, Artificial Sequence
  Description of Artificial Sequence: Synthetic oligonucleotide
agcuucaauaaagcuuccu

SEQ ID NO: 2024810 - RNA, 19 nt, Artificial Sequence
  Description of Artificial Sequence: Synthetic oligonucleotide
acgcuuuugaauggagaga

SEQ ID NO: 2024811 - RNA, 19 nt, Artificial Sequence
  Description of Artificial Sequence: Synthetic oligonucleotide
ccauguggggucagaagcc

SEQ ID NO: 2024812 - RNA, 19 nt, Artificial Sequence
  Description of Artificial Sequence: Synthetic oligonucleotide
cuucccgggccaugugggg

SEQ ID NO: 2024813 - RNA, 19 nt, Artificial Sequence
  Description of Artificial Sequence: Synthetic oligonucleotide
gcugccucugcccuugagc

SEQ ID NO: 2024814 - RNA, 19 nt, Artificial Sequence
  Description of Artificial Sequence: Synthetic oligonucleotide
uggagagaucagucaugga

SEQ ID NO: 2024815 - RNA, 19 nt, Artificial Sequence
  Description of Artificial Sequence: Synthetic oligonucleotide
cuggccuuauagcugcuga

SEQ ID NO: 2024816 - RNA, 19 nt, Artificial Sequence
  Description of Artificial Sequence: Synthetic oligonucleotide
gucuuacauguccacaagu

SEQ ID NO: 2024817 - RNA, 19 nt, Artificial Sequence
  Description of Artificial Sequence: Synthetic oligonucleotide
acuguacauuaagacugca

SEQ ID NO: 2024818 - RNA, 19 nt, Artificial Sequence
  Description of Artificial Sequence: Synthetic oligonucleotide
gaucgcacuccugcacaag

SEQ ID NO: 2024819 - RNA, 19 nt, Artificial Sequence
  Description of Artificial Sequence: Synthetic oligonucleotide
uuucccugggacuggccuu

SEQ ID NO: 2024820 - RNA, 19 nt, Artificial Sequence
  Description of Artificial Sequence: Synthetic oligonucleotide
agaucgcacuccugcacaa

SEQ ID NO: 2024821 - RNA, 19 nt, Artificial Sequence
  Description of Artificial Sequence: Synthetic oligonucleotide
cagugugccugcugacagc

SEQ ID NO: 2024822 - RNA, 19 nt, Artificial Sequence
  Description of Artificial Sequence: Synthetic oligonucleotide
ggaccugagguccagugaa

SEQ ID NO: 2024823 - RNA, 19 nt, Artificial Sequence
  Description of Artificial Sequence: Synthetic oligonucleotide
gagcucuaaccugaaugca

SEQ ID NO: 2024824 - RNA, 19 nt, Artificial Sequence
  Description of Artificial Sequence: Synthetic oligonucleotide
aguuucccugggacuggcc

SEQ ID NO: 2024825 - RNA, 19 nt, Artificial Sequence
  Description of Artificial Sequence: Synthetic oligonucleotide
uggggugugugagaugaua

SEQ ID NO: 2024826 - RNA, 19 nt, Artificial Sequence
  Description of Artificial Sequence: Synthetic oligonucleotide
aguguucgcaccaucuguu

SEQ ID NO: 2024827 - RNA, 19 nt, Artificial Sequence
  Description of Artificial Sequence: Synthetic oligonucleotide
cagaucgcacuccugcaca

SEQ ID NO: 2024828 - RNA, 19 nt, Artificial Sequence
  Description of Artificial Sequence: Synthetic oligonucleotide
agcagugugccugcugaca

SEQ ID NO: 2024829 - RNA, 19 nt, Artificial Sequence
  Description of Artificial Sequence: Synthetic oligonucleotide
gagaguguucgcaccaucu

SEQ ID NO: 2024830 - RNA, 19 nt, Artificial Sequence
  Description of Artificial Sequence: Synthetic oligonucleotide
aauggggauuagggcucag

SEQ ID NO: 2024831 - RNA, 19 nt, Artificial Sequence
  Description of Artificial Sequence: Synthetic oligonucleotide
  modified_base (5)..(5): a, c, u, g, unknown or other
cuggnuccccucagcguug

SEQ ID NO: 2024832 - RNA, 19 nt, Artificial Sequence
  Description of Artificial Sequence: Synthetic oligonucleotide
cccucagcguugauggacg

SEQ ID NO: 2024833 - RNA, 19 nt, Artificial Sequence
  Description of Artificial Sequence: Synthetic oligonucleotide
gguccagugaauacugaca

SEQ ID NO: 2024834 - RNA, 19 nt, Artificial Sequence
  Description of Artificial Sequence: Synthetic oligonucleotide
agcuaacccuaagucugag

SEQ ID NO: 2024835 - RNA, 19 nt, Artificial Sequence
  Description of Artificial Sequence: Synthetic oligonucleotide
  modified_base (17)..(17): a, c, u, g, unknown or other
gcagguggggaccuggnuc

SEQ ID NO: 2024836 - RNA, 19 nt, Artificial Sequence
  Description of Artificial Sequence: Synthetic oligonucleotide
cuaaccugaaugcauccau

SEQ ID NO: 2024837 - RNA, 19 nt, Artificial Sequence
  Description of Artificial Sequence: Synthetic oligonucleotide
aucacugcacaaacaugga

SEQ ID NO: 2024838 - RNA, 19 nt, Artificial Sequence
  Description of Artificial Sequence: Synthetic oligonucleotide
uagcucgguccagugggag

SEQ ID NO: 2024839 - RNA, 19 nt, Artificial Sequence
  Description of Artificial Sequence: Synthetic oligonucleotide
agcucgguccagugggagu

SEQ ID NO: 2024840 - RNA, 19 nt, Artificial Sequence
  Description of Artificial Sequence: Synthetic oligonucleotide
ucgcaccaucuguugguga

SEQ ID NO: 2024841 - RNA, 19 nt, Artificial Sequence
  Description of Artificial Sequence: Synthetic oligonucleotide
ucgguccagugggaguggg

SEQ ID NO: 2024842 - RNA, 19 nt, Artificial Sequence
  Description of Artificial Sequence: Synthetic oligonucleotide
cugcgucuuacauguccac

SEQ ID NO: 2024843 - RNA, 19 nt, Artificial Sequence
  Description of Artificial Sequence: Synthetic oligonucleotide
acagagcucuaaccugaau

SEQ ID NO: 2024844 - RNA, 19 nt, Artificial Sequence
  Description of Artificial Sequence: Synthetic oligonucleotide
ggaagagcccuugcaguag

SEQ ID NO: 2024845 - RNA, 19 nt, Artificial Sequence
  Description of Artificial Sequence: Synthetic oligonucleotide
cugacaguaugggcagcag

SEQ ID NO: 2024846 - RNA, 19 nt, Artificial Sequence
  Description of Artificial Sequence: Synthetic oligonucleotide
ccuuauagcugcugagguc

SEQ ID NO: 2024847 - RNA, 19 nt, Artificial Sequence
  Description of Artificial Sequence: Synthetic oligonucleotide
aucaccccuuggauccagc

SEQ ID NO: 2024848 - RNA, 19 nt, Artificial Sequence
  Description of Artificial Sequence: Synthetic oligonucleotide
gaguuucccugggacuggc

SEQ ID NO: 2024849 - RNA, 19 nt, Artificial Sequence
  Description of Artificial Sequence: Synthetic oligonucleotide
ccuuacccagcacccaggg

SEQ ID NO: 2024850 - RNA, 19 nt, Artificial Sequence
  Description of Artificial Sequence: Synthetic oligonucleotide
cugaggucugaaacuguaa

SEQ ID NO: 2024851 - RNA, 19 nt, Artificial Sequence
  Description of Artificial Sequence: Synthetic oligonucleotide
acccuucugcugccugggg

SEQ ID NO: 2024852 - RNA, 19 nt, Artificial Sequence
  Description of Artificial Sequence: Synthetic oligonucleotide
cucaagggugaacucggaa

SEQ ID NO: 2024853 - RNA, 19 nt, Artificial Sequence
  Description of Artificial Sequence: Synthetic oligonucleotide
cugccucugcccuugagcu

SEQ ID NO: 2024854 - RNA, 19 nt, Artificial Sequence
  Description of Artificial Sequence: Synthetic oligonucleotide
acuggccuuauagcugcug

SEQ ID NO: 2024855 - RNA, 19 nt, Artificial Sequence
  Description of Artificial Sequence: Synthetic oligonucleotide
ccagugaauacugacagua

SEQ ID NO: 2024856 - RNA, 19 nt, Artificial Sequence
  Description of Artificial Sequence: Synthetic oligonucleotide
ugcaugcucuuugguggca

SEQ ID NO: 2024857 - RNA, 19 nt, Artificial Sequence
  Description of Artificial Sequence: Synthetic oligonucleotide
cggaaacacacuucccggg

SEQ ID NO: 2024858 - RNA, 19 nt, Artificial Sequence
  Description of Artificial Sequence: Synthetic oligonucleotide
aguccuuacccagcaccca

SEQ ID NO: 2024859 - RNA, 19 nt, Artificial Sequence
  Description of Artificial Sequence: Synthetic oligonucleotide
aacacacuucccgggccau

SEQ ID NO: 2024860 - RNA, 19 nt, Artificial Sequence
  Description of Artificial Sequence: Synthetic oligonucleotide
gcucuaaccugaaugcauc

SEQ ID NO: 2024861 - RNA, 19 nt, Artificial Sequence
  Description of Artificial Sequence: Synthetic oligonucleotide
caaggcucacaggcggggc

SEQ ID NO: 2024862 - RNA, 19 nt, Artificial Sequence
  Description of Artificial Sequence: Synthetic oligonucleotide
  modified_base (4)..(4): a, c, u, g, unknown or other
uggnuccccucagcguuga

SEQ ID NO: 2024863 - RNA, 19 nt, Artificial Sequence
  Description of Artificial Sequence: Synthetic oligonucleotide
gugugagaugauagaguca

SEQ ID NO: 2024864 - RNA, 19 nt, Artificial Sequence
  Description of Artificial Sequence: Synthetic oligonucleotide
acaacacuguugagagugu

SEQ ID NO: 2024865 - RNA, 19 nt, Artificial Sequence
  Description of Artificial Sequence: Synthetic oligonucleotide
cauguggggucagaagcca

SEQ ID NO: 2024866 - RNA, 19 nt, Artificial Sequence
  Description of Artificial Sequence: Synthetic oligonucleotide
cagagccgggccugcuucc

SEQ ID NO: 2024867 - RNA, 19 nt, Artificial Sequence
  Description of Artificial Sequence: Synthetic oligonucleotide
gcaaucuuggaagagcccu

SEQ ID NO: 2024868 - RNA, 19 nt, Artificial Sequence
  Description of Artificial Sequence: Synthetic oligonucleotide
  modified_base (15)..(15): a, c, u, g, unknown or other
agguggggaccuggnuccc

SEQ ID NO: 2024869 - RNA, 19 nt, Artificial Sequence
  Description of Artificial Sequence: Synthetic oligonucleotide
gugagaugauagagucagc

SEQ ID NO: 2024870 - RNA, 19 nt, Artificial Sequence
  Description of Artificial Sequence: Synthetic oligonucleotide
gcugcugaggucugaaacu

SEQ ID NO: 2024871 - RNA, 19 nt, Artificial Sequence
  Description of Artificial Sequence: Synthetic oligonucleotide
ucccgggccaugugggguc

SEQ ID NO: 2024872 - RNA, 19 nt, Artificial Sequence
  Description of Artificial Sequence: Synthetic oligonucleotide
cagcuaacccuaagucuga

SEQ ID NO: 2024873 - RNA, 19 nt, Artificial Sequence
  Description of Artificial Sequence: Synthetic oligonucleotide
cauuaagacugcacgcuuu

SEQ ID NO: 2024874 - RNA, 19 nt, Artificial Sequence
  Description of Artificial Sequence: Synthetic oligonucleotide
guccagugggagugggcac

SEQ ID NO: 2024875 - RNA, 19 nt, Artificial Sequence
  Description of Artificial Sequence: Synthetic oligonucleotide
gacucaagucagacccuuc

SEQ ID NO: 2024876 - RNA, 19 nt, Artificial Sequence
  Description of Artificial Sequence: Synthetic oligonucleotide
gcaguagcucgguccagug

SEQ ID NO: 2024877 - RNA, 19 nt, Artificial Sequence
  Description of Artificial Sequence: Synthetic oligonucleotide
gcucgguccagugggagug

SEQ ID NO: 2024878 - RNA, 19 nt, Artificial Sequence
  Description of Artificial Sequence: Synthetic oligonucleotide
gguguauggcuaugcugca

SEQ ID NO: 2024879 - RNA, 19 nt, Artificial Sequence
  Description of Artificial Sequence: Synthetic oligonucleotide
accugagguccagugaaua

SEQ ID NO: 2024880 - RNA, 19 nt, Artificial Sequence
  Description of Artificial Sequence: Synthetic oligonucleotide
cagcagugugccugcugac

SEQ ID NO: 2024881 - RNA, 19 nt, Artificial Sequence
  Description of Artificial Sequence: Synthetic oligonucleotide
ggcuaugcugcaagucugc

SEQ ID NO: 2024882 - RNA, 19 nt, Artificial Sequence
  Description of Artificial Sequence: Synthetic oligonucleotide
  modified_base (9)..(9): a, c, u, g, unknown or other
ggaccuggnuccccucagc

SEQ ID NO: 2024883 - RNA, 19 nt, Artificial Sequence
  Description of Artificial Sequence: Synthetic oligonucleotide
cugcacaaacauggauaac

SEQ ID NO: 2024884 - RNA, 19 nt, Artificial Sequence
  Description of Artificial Sequence: Synthetic oligonucleotide
caccccuuggauccagcca

SEQ ID NO: 2024885 - RNA, 19 nt, Artificial Sequence
  Description of Artificial Sequence: Synthetic oligonucleotide
gagguccagugaauacuga

SEQ ID NO: 2024886 - RNA, 19 nt, Artificial Sequence
  Description of Artificial Sequence: Synthetic oligonucleotide
ggagaguuucccugggacu

SEQ ID NO: 2024887 - RNA, 19 nt, Artificial Sequence
  Description of Artificial Sequence: Synthetic oligonucleotide
gcuaacccuaagucugaga

SEQ ID NO: 2024888 - RNA, 19 nt, Artificial Sequence
  Description of Artificial Sequence: Synthetic oligonucleotide
cggcagaucgcacuccugc

SEQ ID NO: 2024889 - RNA, 19 nt, Artificial Sequence
  Description of Artificial Sequence: Synthetic oligonucleotide
gccuuauagcugcugaggu

SEQ ID NO: 2024890 - RNA, 19 nt, Artificial Sequence
  Description of Artificial Sequence: Synthetic oligonucleotide
ccccaaaauggggauuagg

SEQ ID NO: 2024891 - RNA, 19 nt, Artificial Sequence
  Description of Artificial Sequence: Synthetic oligonucleotide
ggcuugagugacucucaca

SEQ ID NO: 2024892 - RNA, 19 nt, Artificial Sequence
  Description of Artificial Sequence: Synthetic oligonucleotide
cugcccuugagcugcucaa

SEQ ID NO: 2024893 - RNA, 19 nt, Artificial Sequence
  Description of Artificial Sequence: Synthetic oligonucleotide
cucgguccagugggagugg

SEQ ID NO: 2024894 - RNA, 19 nt, Artificial Sequence
  Description of Artificial Sequence: Synthetic oligonucleotide
ggacggaaacacacuuccc

SEQ ID NO: 2024895 - RNA, 19 nt, Artificial Sequence
  Description of Artificial Sequence: Synthetic oligonucleotide
gcaugcucuuugguggcag

SEQ ID NO: 2024896 - RNA, 19 nt, Artificial Sequence
  Description of Artificial Sequence: Synthetic oligonucleotide
gagucagcugagcuucaau

SEQ ID NO: 2024897 - RNA, 19 nt, Artificial Sequence
  Description of Artificial Sequence: Synthetic oligonucleotide
acuccugcacaaggaccug

SEQ ID NO: 2024898 - RNA, 19 nt, Artificial Sequence
  Description of Artificial Sequence: Synthetic oligonucleotide
cgucuuacauguccacaag

SEQ ID NO: 2024899 - RNA, 19 nt, Artificial Sequence
  Description of Artificial Sequence: Synthetic oligonucleotide
aggcugagguguauggcua

SEQ ID NO: 2024900 - RNA, 19 nt, Artificial Sequence
  Description of Artificial Sequence: Synthetic oligonucleotide
gcaagucugcgucuuacau

SEQ ID NO: 2024901 - RNA, 19 nt, Artificial Sequence
  Description of Artificial Sequence: Synthetic oligonucleotide
gcacuggcagagccgggcc

SEQ ID NO: 2024902 - RNA, 19 nt, Artificial Sequence
  Description of Artificial Sequence: Synthetic oligonucleotide
ggcugacaucaccccuugg

SEQ ID NO: 2024903 - RNA, 19 nt, Artificial Sequence
  Description of Artificial Sequence: Synthetic oligonucleotide
ccucagcguugauggacgg

SEQ ID NO: 2024904 - RNA, 19 nt, Artificial Sequence
  Description of Artificial Sequence: Synthetic oligonucleotide
gcacgcuuuugaauggaga

SEQ ID NO: 2024905 - RNA, 19 nt, Artificial Sequence
  Description of Artificial Sequence: Synthetic oligonucleotide
gcauccauccagacucuca

SEQ ID NO: 2024906 - RNA, 19 nt, Artificial Sequence
  Description of Artificial Sequence: Synthetic oligonucleotide
agucugcgucuuacauguc

SEQ ID NO: 2024907 - RNA, 19 nt, Artificial Sequence
  Description of Artificial Sequence: Synthetic oligonucleotide
ggugaacucggaagaaccu

SEQ ID NO: 2024908 - RNA, 19 nt, Artificial Sequence
  Description of Artificial Sequence: Synthetic oligonucleotide
gcugaggucugaaacugua

SEQ ID NO: 2024909 - RNA, 19 nt, Artificial Sequence
  Description of Artificial Sequence: Synthetic oligonucleotide
guagcucgguccaguggga

SEQ ID NO: 2024910 - RNA, 19 nt, Artificial Sequence
  Description of Artificial Sequence: Synthetic oligonucleotide
ugcugacagcucggcagau

SEQ ID NO: 2024911 - RNA, 19 nt, Artificial Sequence
  Description of Artificial Sequence: Synthetic oligonucleotide
cugcacgcuuuugaaugga

SEQ ID NO: 2024912 - RNA, 19 nt, Artificial Sequence
  Description of Artificial Sequence: Synthetic oligonucleotide
cucagcguugauggacgga

SEQ ID NO: 2024913 - RNA, 19 nt, Artificial Sequence
  Description of Artificial Sequence: Synthetic oligonucleotide
cagacucaagucagacccu

SEQ ID NO: 2024914 - RNA, 19 nt, Artificial Sequence
  Description of Artificial Sequence: Synthetic oligonucleotide
ccccucagcguugauggac

SEQ ID NO: 2024915 - RNA, 19 nt, Artificial Sequence
  Description of Artificial Sequence: Synthetic oligonucleotide
cucggcagaucgcacuccu

SEQ ID NO: 2024916 - RNA, 19 nt, Artificial Sequence
  Description of Artificial Sequence: Synthetic oligonucleotide
cagcguugauggacggaaa

SEQ ID NO: 2024917 - RNA, 19 nt, Artificial Sequence
  Description of Artificial Sequence: Synthetic oligonucleotide
cucacaggcggggcugaca

SEQ ID NO: 2024918 - RNA, 19 nt, Artificial Sequence
  Description of Artificial Sequence: Synthetic oligonucleotide
ccccuuggauccagccagg

SEQ ID NO: 2024919 - RNA, 19 nt, Artificial Sequence
  Description of Artificial Sequence: Synthetic oligonucleotide
cagcucggcagaucgcacu

SEQ ID NO: 2024920 - RNA, 19 nt, Artificial Sequence
  Description of Artificial Sequence: Synthetic oligonucleotide
ggauuagggcucaggugaa

SEQ ID NO: 2024921 - RNA, 19 nt, Artificial Sequence
  Description of Artificial Sequence: Synthetic oligonucleotide
agagcugcacagagcucua

SEQ ID NO: 2024922 - RNA, 19 nt, Artificial Sequence
  Description of Artificial Sequence: Synthetic oligonucleotide
acccuaagucugagaaaua

SEQ ID NO: 2024923 - RNA, 19 nt, Artificial Sequence
  Description of Artificial Sequence: Synthetic oligonucleotide
ggaccagacucaagucaga

SEQ ID NO: 2024924 - RNA, 19 nt, Artificial Sequence
  Description of Artificial Sequence: Synthetic oligonucleotide
gcucggcagaucgcacucc

SEQ ID NO: 2024925 - RNA, 19 nt, Artificial Sequence
  Description of Artificial Sequence: Synthetic oligonucleotide
ccaccagcuaacccuaagu

SEQ ID NO: 2024926 - RNA, 19 nt, Artificial Sequence
  Description of Artificial Sequence: Synthetic oligonucleotide
  modified_base (6)..(6): a, c, u, g, unknown or other
ccuggnuccccucagcguu

SEQ ID NO: 2024927 - RNA, 19 nt, Artificial Sequence
  Description of Artificial Sequence: Synthetic oligonucleotide
gaccugagguccagugaau

SEQ ID NO: 2024928 - RNA, 19 nt, Artificial Sequence
  Description of Artificial Sequence: Synthetic oligonucleotide
gcucaagggugaacucgga

SEQ ID NO: 2024929 - RNA, 19 nt, Artificial Sequence
  Description of Artificial Sequence: Synthetic oligonucleotide
gggccauguggggucagaa

SEQ ID NO: 2024930 - RNA, 19 nt, Artificial Sequence
  Description of Artificial Sequence: Synthetic oligonucleotide
gggguggggugugugagau

SEQ ID NO: 2024931 - RNA, 19 nt, Artificial Sequence
  Description of Artificial Sequence: Synthetic oligonucleotide
cccuugcaguagcucgguc

SEQ ID NO: 2024932 - RNA, 19 nt, Artificial Sequence
  Description of Artificial Sequence: Synthetic oligonucleotide
caaggaccugagguccagu

SEQ ID NO: 2024933 - RNA, 19 nt, Artificial Sequence
  Description of Artificial Sequence: Synthetic oligonucleotide
ggggcugacaucaccccuu

SEQ ID NO: 2024934 - RNA, 19 nt, Artificial Sequence
  Description of Artificial Sequence: Synthetic oligonucleotide
guggggugugugagaugau

SEQ ID NO: 2024935 - RNA, 19 nt, Artificial Sequence
  Description of Artificial Sequence: Synthetic oligonucleotide
ggccugcuuccaccagcua

SEQ ID NO: 2024936 - RNA, 19 nt, Artificial Sequence
  Description of Artificial Sequence: Synthetic oligonucleotide
gcuggucagcuuggugcau

SEQ ID NO: 2024937 - RNA, 19 nt, Artificial Sequence
  Description of Artificial Sequence: Synthetic oligonucleotide
  modified_base (3)..(3): a, c, u, g, unknown or other
ggnuccccucagcguugau

SEQ ID NO: 2024938 - RNA, 19 nt, Artificial Sequence
  Description of Artificial Sequence: Synthetic oligonucleotide
ccagcacccagggcugccu

SEQ ID NO: 2024939 - RNA, 19 nt, Artificial Sequence
  Description of Artificial Sequence: Synthetic oligonucleotide
cccugggacuggccuuaua

SEQ ID NO: 2024940 - RNA, 19 nt, Artificial Sequence
  Description of Artificial Sequence: Synthetic oligonucleotide
  modified_base (1)..(1): a, c, u, g, unknown or other
nuccccucagcguugaugg

SEQ ID NO: 2024941 - RNA, 19 nt, Artificial Sequence
  Description of Artificial Sequence: Synthetic oligonucleotide
uuuucauuaauccagagca

SEQ ID NO: 2024942 - RNA, 19 nt, Artificial Sequence
  Description of Artificial Sequence: Synthetic oligonucleotide
uaauuuacaaacaacuugc

SEQ ID NO: 2024943 - RNA, 19 nt, Artificial Sequence
  Description of Artificial Sequence: Synthetic oligonucleotide
uuuacaaacaacuugcugu

SEQ ID NO: 2024944 - RNA, 19 nt, Artificial Sequence
  Description of Artificial Sequence: Synthetic oligonucleotide
ugcaaugguauuaagagag

SEQ ID NO: 2024945 - RNA, 19 nt, Artificial Sequence
  Description of Artificial Sequence: Synthetic oligonucleotide
aaugaauagcaccacacag

SEQ ID NO: 2024946 - RNA, 19 nt, Artificial Sequence
  Description of Artificial Sequence: Synthetic oligonucleotide
auaauuuacaaacaacuug

SEQ ID NO: 2024947 - RNA, 19 nt, Artificial Sequence
  Description of Artificial Sequence: Synthetic oligonucleotide
ucauauagagccaaggagc

SEQ ID NO: 2024948 - RNA, 19 nt, Artificial Sequence
  Description of Artificial Sequence: Synthetic oligonucleotide
uguaaugacagcuuggcgc

SEQ ID NO: 2024949 - RNA, 19 nt, Artificial Sequence
  Description of Artificial Sequence: Synthetic oligonucleotide
uuucuuccgacaaagacag

SEQ ID NO: 2024950 - RNA, 19 nt, Artificial Sequence
  Description of Artificial Sequence: Synthetic oligonucleotide
aaagacagcaaucaguuaa

SEQ ID NO: 2024951 - RNA, 19 nt, Artificial Sequence
  Description of Artificial Sequence: Synthetic oligonucleotide
caugguggaaccuugaagg

SEQ ID NO: 2024952 - RNA, 19 nt, Artificial Sequence
  Description of Artificial Sequence: Synthetic oligonucleotide
aucaguuaaaaucagcuug

SEQ ID NO: 2024953 - RNA, 19 nt, Artificial Sequence
  Description of Artificial Sequence: Synthetic oligonucleotide
caauuugucaaucauuucc

SEQ ID NO: 2024954 - RNA, 19 nt, Artificial Sequence
  Description of Artificial Sequence: Synthetic oligonucleotide
auagacuucagucuccugg

SEQ ID NO: 2024955 - RNA, 19 nt, Artificial Sequence
  Description of Artificial Sequence: Synthetic oligonucleotide
ugucuuuguaacuuagugg

SEQ ID NO: 2024956 - RNA, 19 nt, Artificial Sequence
  Description of Artificial Sequence: Synthetic oligonucleotide
auuaauccagagcagcagc

SEQ ID NO: 2024957 - RNA, 19 nt, Artificial Sequence
  Description of Artificial Sequence: Synthetic oligonucleotide
aguuucuuccgacaaagac

SEQ ID NO: 2024958 - RNA, 19 nt, Artificial Sequence
  Description of Artificial Sequence: Synthetic oligonucleotide
aauuugucaaucauuuccg

SEQ ID NO: 2024959 - RNA, 19 nt, Artificial Sequence
  Description of Artificial Sequence: Synthetic oligonucleotide
aucauaaaugcucaugcuc

SEQ ID NO: 2024960 - RNA, 19 nt, Artificial Sequence
  Description of Artificial Sequence: Synthetic oligonucleotide
aaucaucacuucuuucccc

SEQ ID NO: 2024961 - RNA, 19 nt, Artificial Sequence
  Description of Artificial Sequence: Synthetic oligonucleotide
aaacuggucagagugaguc

SEQ ID NO: 2024962 - RNA, 19 nt, Artificial Sequence
  Description of Artificial Sequence: Synthetic oligonucleotide
aagguuugccaccucauuc

SEQ ID NO: 2024963 - RNA, 19 nt, Artificial Sequence
  Description of Artificial Sequence: Synthetic oligonucleotide
uaguaaaugagguuggcca

SEQ ID NO: 2024964 - RNA, 19 nt, Artificial Sequence
  Description of Artificial Sequence: Synthetic oligonucleotide
uaauaucuuucaaaguugc

SEQ ID NO: 2024965 - RNA, 19 nt, Artificial Sequence
  Description of Artificial Sequence: Synthetic oligonucleotide
uugucaaucauuuccgaag

SEQ ID NO: 2024966 - RNA, 19 nt, Artificial Sequence
  Description of Artificial Sequence: Synthetic oligonucleotide
uuuucuucaucguaaguug

SEQ ID NO: 2024967 - RNA, 19 nt, Artificial Sequence
  Description of Artificial Sequence: Synthetic oligonucleotide
aguccuauaaaguaugccu

SEQ ID NO: 2024968 - RNA, 19 nt, Artificial Sequence
  Description of Artificial Sequence: Synthetic oligonucleotide
ugauuuuaucaccaauucc

SEQ ID NO: 2024969 - RNA, 19 nt, Artificial Sequence
  Description of Artificial Sequence: Synthetic oligonucleotide
cauguuucgaacuuggguc

SEQ ID NO: 2024970 - RNA, 19 nt, Artificial Sequence
  Description of Artificial Sequence: Synthetic oligonucleotide
ugaaugaauagcaccacac

SEQ ID NO: 2024971 - RNA, 19 nt, Artificial Sequence
  Description of Artificial Sequence: Synthetic oligonucleotide
auuuccgaagcguucuugc

SEQ ID NO: 2024972 - RNA, 19 nt, Artificial Sequence
  Description of Artificial Sequence: Synthetic oligonucleotide
cuuguaggagauaacagac

SEQ ID NO: 2024973 - RNA, 19 nt, Artificial Sequence
  Description of Artificial Sequence: Synthetic oligonucleotide
uucauauccagaauuuaac

SEQ ID NO: 2024974 - RNA, 19 nt, Artificial Sequence
  Description of Artificial Sequence: Synthetic oligonucleotide
uguuccauacacacgagcu

SEQ ID NO: 2024975 - RNA, 19 nt, Artificial Sequence
  Description of Artificial Sequence: Synthetic oligonucleotide
guaaugacagcuuggcgcg

SEQ ID NO: 2024976 - RNA, 19 nt, Artificial Sequence
  Description of Artificial Sequence: Synthetic oligonucleotide
cucauauagagccaaggag

SEQ ID NO: 2024977 - RNA, 19 nt, Artificial Sequence
  Description of Artificial Sequence: Synthetic oligonucleotide
auguuucgaacuugggucc

SEQ ID NO: 2024978 - RNA, 19 nt, Artificial Sequence
  Description of Artificial Sequence: Synthetic oligonucleotide
gucuuuguaacuuagugga

SEQ ID NO: 2024979 - RNA, 19 nt, Artificial Sequence
  Description of Artificial Sequence: Synthetic oligonucleotide
ugucaaucauuuccgaagc

SEQ ID NO: 2024980 - RNA, 19 nt, Artificial Sequence
  Description of Artificial Sequence: Synthetic oligonucleotide
gagauaacagacuugaacu

SEQ ID NO: 2024981 - RNA, 19 nt, Artificial Sequence
  Description of Artificial Sequence: Synthetic oligonucleotide
ugaauagcaccacacaguc

SEQ ID NO: 2024982 - RNA, 19 nt, Artificial Sequence
  Description of Artificial Sequence: Synthetic oligonucleotide
uugauuuuaucaccaauuc

SEQ ID NO: 2024983 - RNA, 19 nt, Artificial Sequence
  Description of Artificial Sequence: Synthetic oligonucleotide
uccagaauuuaacaauuca

SEQ ID NO: 2024984 - RNA, 19 nt, Artificial Sequence
  Description of Artificial Sequence: Synthetic oligonucleotide
ucucauauagagccaagga

SEQ ID NO: 2024985 - RNA, 19 nt, Artificial Sequence
  Description of Artificial Sequence: Synthetic oligonucleotide
accaauaagaagguguuuc

SEQ ID NO: 2024986 - RNA, 19 nt, Artificial Sequence
  Description of Artificial Sequence: Synthetic oligonucleotide
uuuaccucuuauuugugga

SEQ ID NO: 2024987 - RNA, 19 nt, Artificial Sequence
  Description of Artificial Sequence: Synthetic oligonucleotide
aucucaaucaacuccuuug

SEQ ID NO: 2024988 - RNA, 19 nt, Artificial Sequence
  Description of Artificial Sequence: Synthetic oligonucleotide
cauauagagccaaggagcc

SEQ ID NO: 2024989 - RNA, 19 nt, Artificial Sequence
  Description of Artificial Sequence: Synthetic oligonucleotide
uuuguaaugacagcuuggc

SEQ ID NO: 2024990 - RNA, 19 nt, Artificial Sequence
  Description of Artificial Sequence: Synthetic oligonucleotide
ucaaucaacuccuuuguaa

SEQ ID NO: 2024991 - RNA, 19 nt, Artificial Sequence
  Description of Artificial Sequence: Synthetic oligonucleotide
ucuuauuuguggaugcaac

SEQ ID NO: 2024992 - RNA, 19 nt, Artificial Sequence
  Description of Artificial Sequence: Synthetic oligonucleotide
acuuaguggaccaaguuuc

SEQ ID NO: 2024993 - RNA, 19 nt, Artificial Sequence
  Description of Artificial Sequence: Synthetic oligonucleotide
aucuucauagacuugguaa

SEQ ID NO: 2024994 - RNA, 19 nt, Artificial Sequence
  Description of Artificial Sequence: Synthetic oligonucleotide
auauccagaauuuaacaau

SEQ ID NO: 2024995 - RNA, 19 nt, Artificial Sequence
  Description of Artificial Sequence: Synthetic oligonucleotide
accucuuauuuguggaugc

SEQ ID NO: 2024996 - RNA, 19 nt, Artificial Sequence
  Description of Artificial Sequence: Synthetic oligonucleotide
accaauuccaacaaucauc

SEQ ID NO: 2024997 - RNA, 19 nt, Artificial Sequence
  Description of Artificial Sequence: Synthetic oligonucleotide
uauaaaguaugccuuugau

SEQ ID NO: 2024998 - RNA, 19 nt, Artificial Sequence
  Description of Artificial Sequence: Synthetic oligonucleotide
auacacacgagcuggcuuc

SEQ ID NO: 2024999 - RNA, 19 nt, Artificial Sequence
  Description of Artificial Sequence: Synthetic oligonucleotide
uuccauacacacgagcugg

SEQ ID NO: 2025000 - RNA, 19 nt, Artificial Sequence
  Description of Artificial Sequence: Synthetic oligonucleotide
aacuuaguggaccaaguuu

SEQ ID NO: 2025001 - RNA, 19 nt, Artificial Sequence
  Description of Artificial Sequence: Synthetic oligonucleotide
gucaaugucaauuugucaa

SEQ ID NO: 2025002 - RNA, 19 nt, Artificial Sequence
  Description of Artificial Sequence: Synthetic oligonucleotide
uaaguuguuuauuguaaga

SEQ ID NO: 2025003 - RNA, 19 nt, Artificial Sequence
  Description of Artificial Sequence: Synthetic oligonucleotide
uguaagguuugccaccuca

SEQ ID NO: 2025004 - RNA, 19 nt, Artificial Sequence
  Description of Artificial Sequence: Synthetic oligonucleotide
guaaguuguuuauuguaag

SEQ ID NO: 2025005 - RNA, 19 nt, Artificial Sequence
  Description of Artificial Sequence: Synthetic oligonucleotide
aacagacuugaacugauua

SEQ ID NO: 2025006 - RNA, 19 nt, Artificial Sequence
  Description of Artificial Sequence: Synthetic oligonucleotide
ucuuccgacaaagacagca

SEQ ID NO: 2025007 - RNA, 19 nt, Artificial Sequence
  Description of Artificial Sequence: Synthetic oligonucleotide
uaggagauaacagacuuga

SEQ ID NO: 2025008 - RNA, 19 nt, Artificial Sequence
  Description of Artificial Sequence: Synthetic oligonucleotide
cuuuaccucuuauuugugg

SEQ ID NO: 2025009 - RNA, 19 nt, Artificial Sequence
  Description of Artificial Sequence: Synthetic oligonucleotide
uccgaagcguucuugcugg

SEQ ID NO: 2025010 - RNA, 19 nt, Artificial Sequence
  Description of Artificial Sequence: Synthetic oligonucleotide
cuugguaauuuucuggaug

SEQ ID NO: 2025011 - RNA, 19 nt, Artificial Sequence
  Description of Artificial Sequence: Synthetic oligonucleotide
cuuuguaacuuaguggacc

SEQ ID NO: 2025012 - RNA, 19 nt, Artificial Sequence
  Description of Artificial Sequence: Synthetic oligonucleotide
uuguaaugacagcuuggcg

SEQ ID NO: 2025013 - RNA, 19 nt, Artificial Sequence
  Description of Artificial Sequence: Synthetic oligonucleotide
uguaacuuaguggaccaag

SEQ ID NO: 2025014 - RNA, 19 nt, Artificial Sequence
  Description of Artificial Sequence: Synthetic oligonucleotide
caucguaaguuguuuauug

SEQ ID NO: 2025015 - RNA, 19 nt, Artificial Sequence
  Description of Artificial Sequence: Synthetic oligonucleotide
acaauucaagggcaaugac

SEQ ID NO: 2025016 - RNA, 19 nt, Artificial Sequence
  Description of Artificial Sequence: Synthetic oligonucleotide
aucaccaauuccaacaauc

SEQ ID NO: 2025017 - RNA, 19 nt, Artificial Sequence
  Description of Artificial Sequence: Synthetic oligonucleotide
ucgaucugaggacacacca

SEQ ID NO: 2025018 - RNA, 19 nt, Artificial Sequence
  Description of Artificial Sequence: Synthetic oligonucleotide
uucucauauagagccaagg

SEQ ID NO: 2025019 - RNA, 19 nt, Artificial Sequence
  Description of Artificial Sequence: Synthetic oligonucleotide
gguauuaagagagaagaug

SEQ ID NO: 2025020 - RNA, 19 nt, Artificial Sequence
  Description of Artificial Sequence: Synthetic oligonucleotide
agcacaucagcaucaaugu

SEQ ID NO: 2025021 - RNA, 19 nt, Artificial Sequence
  Description of Artificial Sequence: Synthetic oligonucleotide
ugaugcgucuccaaaagua

SEQ ID NO: 2025022 - RNA, 19 nt, Artificial Sequence
  Description of Artificial Sequence: Synthetic oligonucleotide
ggaguaguaaaugagguug

SEQ ID NO: 2025023 - RNA, 19 nt, Artificial Sequence
  Description of Artificial Sequence: Synthetic oligonucleotide
aaucauuuccgaagcguuc

SEQ ID NO: 2025024 - RNA, 19 nt, Artificial Sequence
  Description of Artificial Sequence: Synthetic oligonucleotide
ggagauaacagacuugaac

SEQ ID NO: 2025025 - RNA, 19 nt, Artificial Sequence
  Description of Artificial Sequence: Synthetic oligonucleotide
auaaaguaugccuuugauu

SEQ ID NO: 2025026 - RNA, 19 nt, Artificial Sequence
  Description of Artificial Sequence: Synthetic oligonucleotide
uacgguugaacgucaaugu

SEQ ID NO: 2025027 - RNA, 19 nt, Artificial Sequence
  Description of Artificial Sequence: Synthetic oligonucleotide
uagacuugguaauuuucug

SEQ ID NO: 2025028 - RNA, 19 nt, Artificial Sequence
  Description of Artificial Sequence: Synthetic oligonucleotide
uuugucaaucauuuccgaa

SEQ ID NO: 2025029 - RNA, 19 nt, Artificial Sequence
  Description of Artificial Sequence: Synthetic oligonucleotide
acaguccucgaucugagga

SEQ ID NO: 2025030 - RNA, 19 nt, Artificial Sequence
  Description of Artificial Sequence: Synthetic oligonucleotide
aguaguaaaugagguuggc

SEQ ID NO: 2025031 - RNA, 19 nt, Artificial Sequence
  Description of Artificial Sequence: Synthetic oligonucleotide
aggagccuguuccauacac

SEQ ID NO: 2025032 - RNA, 19 nt, Artificial Sequence
  Description of Artificial Sequence: Synthetic oligonucleotide
gaaugaauagcaccacaca

SEQ ID NO: 2025033 - RNA, 19 nt, Artificial Sequence
  Description of Artificial Sequence: Synthetic oligonucleotide
aaauucauauccagaauuu

SEQ ID NO: 2025034 - RNA, 19 nt, Artificial Sequence
  Description of Artificial Sequence: Synthetic oligonucleotide
ugauagagccuucaucaaa

SEQ ID NO: 2025035 - RNA, 19 nt, Artificial Sequence
  Description of Artificial Sequence: Synthetic oligonucleotide
caaucaucacuucuuuccc

SEQ ID NO: 2025036 - RNA, 19 nt, Artificial Sequence
  Description of Artificial Sequence: Synthetic oligonucleotide
gacagcuuggcgcguacgg

SEQ ID NO: 2025037 - RNA, 19 nt, Artificial Sequence
  Description of Artificial Sequence: Synthetic oligonucleotide
uugcaaugguauuaagaga

SEQ ID NO: 2025038 - RNA, 19 nt, Artificial Sequence
  Description of Artificial Sequence: Synthetic oligonucleotide
ugcucaugcucucagcacu

SEQ ID NO: 2025039 - RNA, 19 nt, Artificial Sequence
  Description of Artificial Sequence: Synthetic oligonucleotide
ugaguccuauaaaguaugc

SEQ ID NO: 2025040 - RNA, 19 nt, Artificial Sequence
  Description of Artificial Sequence: Synthetic oligonucleotide
ucagcccgggcauacuucg

SEQ ID NO: 2025041 - RNA, 19 nt, Artificial Sequence
  Description of Artificial Sequence: Synthetic oligonucleotide
uccccauugugguugcacg

SEQ ID NO: 2025042 - RNA, 19 nt, Artificial Sequence
  Description of Artificial Sequence: Synthetic oligonucleotide
gauaacagacuugaacuga

SEQ ID NO: 2025043 - RNA, 19 nt, Artificial Sequence
  Description of Artificial Sequence: Synthetic oligonucleotide
uuccgaagcguucuugcug

SEQ ID NO: 2025044 - RNA, 19 nt, Artificial Sequence
  Description of Artificial Sequence: Synthetic oligonucleotide
agggcaaugacugaugcgu

SEQ ID NO: 2025045 - RNA, 19 nt, Artificial Sequence
  Description of Artificial Sequence: Synthetic oligonucleotide
cauauccagaauuuaacaa

SEQ ID NO: 2025046 - RNA, 19 nt, Artificial Sequence
  Description of Artificial Sequence: Synthetic oligonucleotide
ucaaugucaauuugucaau

SEQ ID NO: 2025047 - RNA, 19 nt, Artificial Sequence
  Description of Artificial Sequence: Synthetic oligonucleotide
cuggcguuguccauagccg

SEQ ID NO: 2025048 - RNA, 19 nt, Artificial Sequence
  Description of Artificial Sequence: Synthetic oligonucleotide
gguggaaccuugaaggucg

SEQ ID NO: 2025049 - RNA, 19 nt, Artificial Sequence
  Description of Artificial Sequence: Synthetic oligonucleotide
uucaucguaaguuguuuau

SEQ ID NO: 2025050 - RNA, 19 nt, Artificial Sequence
  Description of Artificial Sequence: Synthetic oligonucleotide
uggaccaaguuucuuccga

SEQ ID NO: 2025051 - RNA, 19 nt, Artificial Sequence
  Description of Artificial Sequence: Synthetic oligonucleotide
cacugaugaaugaauagca

SEQ ID NO: 2025052 - RNA, 19 nt, Artificial Sequence
  Description of Artificial Sequence: Synthetic oligonucleotide
ugguaauaucuuucaaagu

SEQ ID NO: 2025053 - RNA, 19 nt, Artificial Sequence
  Description of Artificial Sequence: Synthetic oligonucleotide
augaaugaauagcaccaca

SEQ ID NO: 2025054 - RNA, 19 nt, Artificial Sequence
  Description of Artificial Sequence: Synthetic oligonucleotide
ucguaaguuguuuauugua

SEQ ID NO: 2025055 - RNA, 19 nt, Artificial Sequence
  Description of Artificial Sequence: Synthetic oligonucleotide
aaacaacuugcugucuuug

SEQ ID NO: 2025056 - RNA, 19 nt, Artificial Sequence
  Description of Artificial Sequence: Synthetic oligonucleotide
uggcgcguacgguugaacg

SEQ ID NO: 2025057 - RNA, 19 nt, Artificial Sequence
  Description of Artificial Sequence: Synthetic oligonucleotide
uucgcagcugccaccaucu

SEQ ID NO: 2025058 - RNA, 19 nt, Artificial Sequence
  Description of Artificial Sequence: Synthetic oligonucleotide
aucguaaguuguuuauugu

SEQ ID NO: 2025059 - RNA, 19 nt, Artificial Sequence
  Description of Artificial Sequence: Synthetic oligonucleotide
guacgguugaacgucaaug

SEQ ID NO: 2025060 - RNA, 19 nt, Artificial Sequence
  Description of Artificial Sequence: Synthetic oligonucleotide
gguaauaucuuucaaaguu

SEQ ID NO: 2025061 - RNA, 19 nt, Artificial Sequence
  Description of Artificial Sequence: Synthetic oligonucleotide
ugugguugcacggcgcagg

SEQ ID NO: 2025062 - RNA, 19 nt, Artificial Sequence
  Description of Artificial Sequence: Synthetic oligonucleotide
uccuugaaugacaccaaaa

SEQ ID NO: 2025063 - RNA, 19 nt, Artificial Sequence
  Description of Artificial Sequence: Synthetic oligonucleotide
gguugcacggcgcaggccg

SEQ ID NO: 2025064 - RNA, 19 nt, Artificial Sequence
  Description of Artificial Sequence: Synthetic oligonucleotide
ucuuuguaacuuaguggac

SEQ ID NO: 2025065 - RNA, 19 nt, Artificial Sequence
  Description of Artificial Sequence: Synthetic oligonucleotide
ugguauuaagagagaagau

SEQ ID NO: 2025066 - RNA, 19 nt, Artificial Sequence
  Description of Artificial Sequence: Synthetic oligonucleotide
gucaaucauuuccgaagcg

SEQ ID NO: 2025067 - RNA, 19 nt, Artificial Sequence
  Description of Artificial Sequence: Synthetic oligonucleotide
acuugcaaugguauuaaga

SEQ ID NO: 2025068 - RNA, 19 nt, Artificial Sequence
  Description of Artificial Sequence: Synthetic oligonucleotide
guaguaaaugagguuggcc

SEQ ID NO: 2025069 - RNA, 19 nt, Artificial Sequence
  Description of Artificial Sequence: Synthetic oligonucleotide
aacuuggguccccauugug

SEQ ID NO: 2025070 - RNA, 19 nt, Artificial Sequence
  Description of Artificial Sequence: Synthetic oligonucleotide
aacaugguggaaccuugaa

SEQ ID NO: 2025071 - RNA, 19 nt, Artificial Sequence
  Description of Artificial Sequence: Synthetic oligonucleotide
caaggagccuguuccauac

SEQ ID NO: 2025072 - RNA, 19 nt, Artificial Sequence
  Description of Artificial Sequence: Synthetic oligonucleotide
ucaugcucucagcacuugc

SEQ ID NO: 2025073 - RNA, 19 nt, Artificial Sequence
  Description of Artificial Sequence: Synthetic oligonucleotide
auuugucaaucauuuccga

SEQ ID NO: 2025074 - RNA, 19 nt, Artificial Sequence
  Description of Artificial Sequence: Synthetic oligonucleotide
uuagccacugaugaaugaa

SEQ ID NO: 2025075 - RNA, 19 nt, Artificial Sequence
  Description of Artificial Sequence: Synthetic oligonucleotide
gaacgucaaugucaauuug

SEQ ID NO: 2025076 - RNA, 19 nt, Artificial Sequence
  Description of Artificial Sequence: Synthetic oligonucleotide
auucauauccagaauuuaa

SEQ ID NO: 2025077 - RNA, 19 nt, Artificial Sequence
  Description of Artificial Sequence: Synthetic oligonucleotide
guuccauacacacgagcug

SEQ ID NO: 2025078 - RNA, 19 nt, Artificial Sequence
  Description of Artificial Sequence: Synthetic oligonucleotide
uaacuuaguggaccaaguu

SEQ ID NO: 2025079 - RNA, 19 nt, Artificial Sequence
  Description of Artificial Sequence: Synthetic oligonucleotide
gaguccuauaaaguaugcc

SEQ ID NO: 2025080 - RNA, 19 nt, Artificial Sequence
  Description of Artificial Sequence: Synthetic oligonucleotide
caccucauucuucaucugc

SEQ ID NO: 2025081 - RNA, 19 nt, Artificial Sequence
  Description of Artificial Sequence: Synthetic oligonucleotide
augaauagcaccacacagu

SEQ ID NO: 2025082 - RNA, 19 nt, Artificial Sequence
  Description of Artificial Sequence: Synthetic oligonucleotide
gucuuguaggagauaacag

SEQ ID NO: 2025083 - RNA, 19 nt, Artificial Sequence
  Description of Artificial Sequence: Synthetic oligonucleotide
aguugccauguuucgaacu

SEQ ID NO: 2025084 - RNA, 19 nt, Artificial Sequence
  Description of Artificial Sequence: Synthetic oligonucleotide
acuguacuccugguaauuc

SEQ ID NO: 2025085 - RNA, 19 nt, Artificial Sequence
  Description of Artificial Sequence: Synthetic oligonucleotide
uaccucuuauuuguggaug

SEQ ID NO: 2025086 - RNA, 19 nt, Artificial Sequence
  Description of Artificial Sequence: Synthetic oligonucleotide
agguuggccagacuguacu

SEQ ID NO: 2025087 - RNA, 19 nt, Artificial Sequence
  Description of Artificial Sequence: Synthetic oligonucleotide
ucauagacuugguaauuuu

SEQ ID NO: 2025088 - RNA, 19 nt, Artificial Sequence
  Description of Artificial Sequence: Synthetic oligonucleotide
aaguaugccuuugauuuua

SEQ ID NO: 2025089 - RNA, 19 nt, Artificial Sequence
  Description of Artificial Sequence: Synthetic oligonucleotide
uccuauaaaguaugccuuu

SEQ ID NO: 2025090 - RNA, 19 nt, Artificial Sequence
  Description of Artificial Sequence: Synthetic oligonucleotide
gugaguccuauaaaguaug

SEQ ID NO: 2025091 - RNA, 19 nt, Artificial Sequence
  Description of Artificial Sequence: Synthetic oligonucleotide
cuguuccauacacacgagc

SEQ ID NO: 2025092 - RNA, 19 nt, Artificial Sequence
  Description of Artificial Sequence: Synthetic oligonucleotide
cacaccaauaagaaggugu

SEQ ID NO: 2025093 - RNA, 19 nt, Artificial Sequence
  Description of Artificial Sequence: Synthetic oligonucleotide
gacaaagacagcaaucagu

SEQ ID NO: 2025094 - RNA, 19 nt, Artificial Sequence
  Description of Artificial Sequence: Synthetic oligonucleotide
auugugguugcacggcgca

SEQ ID NO: 2025095 - RNA, 19 nt, Artificial Sequence
  Description of Artificial Sequence: Synthetic oligonucleotide
cucgcccgcgagaacaugg

SEQ ID NO: 2025096 - RNA, 19 nt, Artificial Sequence
  Description of Artificial Sequence: Synthetic oligonucleotide
gcuggcguuguccauagcc

SEQ ID NO: 2025097 - RNA, 19 nt, Artificial Sequence
  Description of Artificial Sequence: Synthetic oligonucleotide
agagugaguccuauaaagu

SEQ ID NO: 2025098 - RNA, 19 nt, Artificial Sequence
  Description of Artificial Sequence: Synthetic oligonucleotide
cugcuguaagguuugccac

SEQ ID NO: 2025099 - RNA, 19 nt, Artificial Sequence
  Description of Artificial Sequence: Synthetic oligonucleotide
uuaccucuuauuuguggau

SEQ ID NO: 2025100 - RNA, 19 nt, Artificial Sequence
  Description of Artificial Sequence: Synthetic oligonucleotide
acuucagucuccugguaau

SEQ ID NO: 2025101 - RNA, 19 nt, Artificial Sequence
  Description of Artificial Sequence: Synthetic oligonucleotide
aacacucgcccgcgagaac

SEQ ID NO: 2025102 - RNA, 19 nt, Artificial Sequence
  Description of Artificial Sequence: Synthetic oligonucleotide
uuuccgaagcguucuugcu

SEQ ID NO: 2025103 - RNA, 19 nt, Artificial Sequence
  Description of Artificial Sequence: Synthetic oligonucleotide
auccagaauuuaacaauuc

SEQ ID NO: 2025104 - RNA, 19 nt, Artificial Sequence
  Description of Artificial Sequence: Synthetic oligonucleotide
uucuucaucguaaguuguu

SEQ ID NO: 2025105 - RNA, 19 nt, Artificial Sequence
  Description of Artificial Sequence: Synthetic oligonucleotide
uuccgacaaagacagcaau

SEQ ID NO: 2025106 - RNA, 19 nt, Artificial Sequence
  Description of Artificial Sequence: Synthetic oligonucleotide
uuuguggaugcaacuugau

SEQ ID NO: 2025107 - RNA, 19 nt, Artificial Sequence
  Description of Artificial Sequence: Synthetic oligonucleotide
uccauacacacgagcuggc

SEQ ID NO: 2025108 - RNA, 19 nt, Artificial Sequence
  Description of Artificial Sequence: Synthetic oligonucleotide
cuauaaaguaugccuuuga

SEQ ID NO: 2025109 - RNA, 19 nt, Artificial Sequence
  Description of Artificial Sequence: Synthetic oligonucleotide
cauugugguugcacggcgc

SEQ ID NO: 2025110 - RNA, 19 nt, Artificial Sequence
  Description of Artificial Sequence: Synthetic oligonucleotide
uucauagacuugguaauuu

SEQ ID NO: 2025111 - RNA, 19 nt, Artificial Sequence
  Description of Artificial Sequence: Synthetic oligonucleotide
ugauagacuucagucuccu

SEQ ID NO: 2025112 - RNA, 19 nt, Artificial Sequence
  Description of Artificial Sequence: Synthetic oligonucleotide
caauucaagggcaaugacu

SEQ ID NO: 2025113 - RNA, 19 nt, Artificial Sequence
  Description of Artificial Sequence: Synthetic oligonucleotide
cucgaucugaggacacacc

SEQ ID NO: 2025114 - RNA, 19 nt, Artificial Sequence
  Description of Artificial Sequence: Synthetic oligonucleotide
uaagguuugccaccucauu

SEQ ID NO: 2025115 - RNA, 19 nt, Artificial Sequence
  Description of Artificial Sequence: Synthetic oligonucleotide
gccacugaugaaugaauag

SEQ ID NO: 2025116 - RNA, 19 nt, Artificial Sequence
  Description of Artificial Sequence: Synthetic oligonucleotide
guccauagccgucauccug

SEQ ID NO: 2025117 - RNA, 19 nt, Artificial Sequence
  Description of Artificial Sequence: Synthetic oligonucleotide
acagcccggcaacacucgc

SEQ ID NO: 2025118 - RNA, 19 nt, Artificial Sequence
  Description of Artificial Sequence: Synthetic oligonucleotide
agaacaugguggaaccuug

SEQ ID NO: 2025119 - RNA, 19 nt, Artificial Sequence
  Description of Artificial Sequence: Synthetic oligonucleotide
gacugaugcgucuccaaaa

SEQ ID NO: 2025120 - RNA, 19 nt, Artificial Sequence
  Description of Artificial Sequence: Synthetic oligonucleotide
cagacuguacuccugguaa

SEQ ID NO: 2025121 - RNA, 19 nt, Artificial Sequence
  Description of Artificial Sequence: Synthetic oligonucleotide
augguggaaccuugaaggu

SEQ ID NO: 2025122 - RNA, 19 nt, Artificial Sequence
  Description of Artificial Sequence: Synthetic oligonucleotide
caaugacugaugcgucucc

SEQ ID NO: 2025123 - RNA, 19 nt, Artificial Sequence
  Description of Artificial Sequence: Synthetic oligonucleotide
uguuuugcuuuaccucuua

SEQ ID NO: 2025124 - RNA, 19 nt, Artificial Sequence
  Description of Artificial Sequence: Synthetic oligonucleotide
auaaaugcucaugcucuca

SEQ ID NO: 2025125 - RNA, 19 nt, Artificial Sequence
  Description of Artificial Sequence: Synthetic oligonucleotide
auuuuaucaccaauuccaa

SEQ ID NO: 2025126 - RNA, 19 nt, Artificial Sequence
  Description of Artificial Sequence: Synthetic oligonucleotide
aaaugagguuggccagacu

SEQ ID NO: 2025127 - RNA, 19 nt, Artificial Sequence
  Description of Artificial Sequence: Synthetic oligonucleotide
ucuucaucguaaguuguuu

SEQ ID NO: 2025128 - RNA, 19 nt, Artificial Sequence
  Description of Artificial Sequence: Synthetic oligonucleotide
ucaucacuucuuuccccgc

SEQ ID NO: 2025129 - RNA, 19 nt, Artificial Sequence
  Description of Artificial Sequence: Synthetic oligonucleotide
ucccacauccuugaaugac

SEQ ID NO: 2025130 - RNA, 19 nt, Artificial Sequence
  Description of Artificial Sequence: Synthetic oligonucleotide
gcugcuguaagguuugcca

SEQ ID NO: 2025131 - RNA, 19 nt, Artificial Sequence
  Description of Artificial Sequence: Synthetic oligonucleotide
gauagacuucagucuccug

SEQ ID NO: 2025132 - RNA, 19 nt, Artificial Sequence
  Description of Artificial Sequence: Synthetic oligonucleotide
cuuauuuguggaugcaacu

SEQ ID NO: 2025133 - RNA, 19 nt, Artificial Sequence
  Description of Artificial Sequence: Synthetic oligonucleotide
uaucaccaauuccaacaau

SEQ ID NO: 2025134 - RNA, 19 nt, Artificial Sequence
  Description of Artificial Sequence: Synthetic oligonucleotide
gauagagccuucaucaaau

SEQ ID NO: 2025135 - RNA, 19 nt, Artificial Sequence
  Description of Artificial Sequence: Synthetic oligonucleotide
guaggagauaacagacuug

SEQ ID NO: 2025136 - RNA, 19 nt, Artificial Sequence
  Description of Artificial Sequence: Synthetic oligonucleotide
augacagcuuggcgcguac

SEQ ID NO: 2025137 - RNA, 19 nt, Artificial Sequence
  Description of Artificial Sequence: Synthetic oligonucleotide
caguccucgaucugaggac

SEQ ID NO: 2025138 - RNA, 19 nt, Artificial Sequence
  Description of Artificial Sequence: Synthetic oligonucleotide
auaacagacuugaacugau

SEQ ID NO: 2025139 - RNA, 19 nt, Artificial Sequence
  Description of Artificial Sequence: Synthetic oligonucleotide
gaauagcaccacacagucc

SEQ ID NO: 2025140 - RNA, 19 nt, Artificial Sequence
  Description of Artificial Sequence: Synthetic oligonucleotide
uguuucgaacuuggguccc

SEQ ID NO: 2025141 - RNA, 19 nt, Artificial Sequence
  Description of Artificial Sequence: Synthetic oligonucleotide
guggaccaaguuucuuccg

SEQ ID NO: 2025142 - RNA, 19 nt, Artificial Sequence
  Description of Artificial Sequence: Synthetic oligonucleotide
uacuucgcagcugccacca

SEQ ID NO: 2025143 - RNA, 19 nt, Artificial Sequence
  Description of Artificial Sequence: Synthetic oligonucleotide
uucagucuccugguaauau

SEQ ID NO: 2025144 - RNA, 19 nt, Artificial Sequence
  Description of Artificial Sequence: Synthetic oligonucleotide
uggcguuguccauagccgu

SEQ ID NO: 2025145 - RNA, 19 nt, Artificial Sequence
  Description of Artificial Sequence: Synthetic oligonucleotide
gaagcguucuugcuggcgu

SEQ ID NO: 2025146 - RNA, 19 nt, Artificial Sequence
  Description of Artificial Sequence: Synthetic oligonucleotide
gccuucaucaaauucauau

SEQ ID NO: 2025147 - RNA, 19 nt, Artificial Sequence
  Description of Artificial Sequence: Synthetic oligonucleotide
auuucagccuucucauaua

SEQ ID NO: 2025148 - RNA, 19 nt, Artificial Sequence
  Description of Artificial Sequence: Synthetic oligonucleotide
ucaucguaaguuguuuauu

SEQ ID NO: 2025149 - RNA, 19 nt, Artificial Sequence
  Description of Artificial Sequence: Synthetic oligonucleotide
auucaagggcaaugacuga

SEQ ID NO: 2025150 - RNA, 19 nt, Artificial Sequence
  Description of Artificial Sequence: Synthetic oligonucleotide
ucgaacuuggguccccauu

SEQ ID NO: 2025151 - RNA, 19 nt, Artificial Sequence
  Description of Artificial Sequence: Synthetic oligonucleotide
uuguccucgggucccuuaa

SEQ ID NO: 2025152 - RNA, 19 nt, Artificial Sequence
  Description of Artificial Sequence: Synthetic oligonucleotide
ucccuuaauuucagccuuc

SEQ ID NO: 2025153 - RNA, 19 nt, Artificial Sequence
  Description of Artificial Sequence: Synthetic oligonucleotide
aaaacuggucagagugagu

SEQ ID NO: 2025154 - RNA, 19 nt, Artificial Sequence
  Description of Artificial Sequence: Synthetic oligonucleotide
cucgggucccuuaauuuca

SEQ ID NO: 2025155 - RNA, 19 nt, Artificial Sequence
  Description of Artificial Sequence: Synthetic oligonucleotide
cuccugguaauaucuuuca

SEQ ID NO: 2025156 - RNA, 19 nt, Artificial Sequence
  Description of Artificial Sequence: Synthetic oligonucleotide
uaacagacuugaacugauu

SEQ ID NO: 2025157 - RNA, 19 nt, Artificial Sequence
  Description of Artificial Sequence: Synthetic oligonucleotide
acacucgcccgcgagaaca

SEQ ID NO: 2025158 - RNA, 19 nt, Artificial Sequence
  Description of Artificial Sequence: Synthetic oligonucleotide
gcgagaacaugguggaacc

SEQ ID NO: 2025159 - RNA, 19 nt, Artificial Sequence
  Description of Artificial Sequence: Synthetic oligonucleotide
aaguuucuuccgacaaaga

SEQ ID NO: 2025160 - RNA, 19 nt, Artificial Sequence
  Description of Artificial Sequence: Synthetic oligonucleotide
gcaaucaguuaaaaucagc

SEQ ID NO: 2025161 - RNA, 19 nt, Artificial Sequence
  Description of Artificial Sequence: Synthetic oligonucleotide
acaccaauaagaagguguu

SEQ ID NO: 2025162 - RNA, 19 nt, Artificial Sequence
  Description of Artificial Sequence: Synthetic oligonucleotide
cugucuuguaggagauaac

SEQ ID NO: 2025163 - RNA, 19 nt, Artificial Sequence
  Description of Artificial Sequence: Synthetic oligonucleotide
cgucccacauccuugaaug

SEQ ID NO: 2025164 - RNA, 19 nt, Artificial Sequence
  Description of Artificial Sequence: Synthetic oligonucleotide
ugacagcuuggcgcguacg

SEQ ID NO: 2025165 - RNA, 19 nt, Artificial Sequence
  Description of Artificial Sequence: Synthetic oligonucleotide
cacuugcaaugguauuaag

SEQ ID NO: 2025166 - RNA, 19 nt, Artificial Sequence
  Description of Artificial Sequence: Synthetic oligonucleotide
gacagcccggcaacacucg

SEQ ID NO: 2025167 - RNA, 19 nt, Artificial Sequence
  Description of Artificial Sequence: Synthetic oligonucleotide
cauuuccgaagcguucuug

SEQ ID NO: 2025168 - RNA, 19 nt, Artificial Sequence
  Description of Artificial Sequence: Synthetic oligonucleotide
uuucgaacuugggucccca

SEQ ID NO: 2025169 - RNA, 19 nt, Artificial Sequence
  Description of Artificial Sequence: Synthetic oligonucleotide
aguccucgaucugaggaca

SEQ ID NO: 2025170 - RNA, 19 nt, Artificial Sequence
  Description of Artificial Sequence: Synthetic oligonucleotide
cuuuccccgcugcuguaag

SEQ ID NO: 2025171 - RNA, 19 nt, Artificial Sequence
  Description of Artificial Sequence: Synthetic oligonucleotide
cuucaucguaaguuguuua

SEQ ID NO: 2025172 - RNA, 19 nt, Artificial Sequence
  Description of Artificial Sequence: Synthetic oligonucleotide
cacaguccucgaucugagg

SEQ ID NO: 2025173 - RNA, 19 nt, Artificial Sequence
  Description of Artificial Sequence: Synthetic oligonucleotide
aaugacagcuuggcgcgua

SEQ ID NO: 2025174 - RNA, 19 nt, Artificial Sequence
  Description of Artificial Sequence: Synthetic oligonucleotide
cuuccgacaaagacagcaa

SEQ ID NO: 2025175 - RNA, 19 nt, Artificial Sequence
  Description of Artificial Sequence: Synthetic oligonucleotide
caaaguugccauguuucga

SEQ ID NO: 2025176 - RNA, 19 nt, Artificial Sequence
  Description of Artificial Sequence: Synthetic oligonucleotide
agccccagagaugaucuca

SEQ ID NO: 2025177 - RNA, 19 nt, Artificial Sequence
  Description of Artificial Sequence: Synthetic oligonucleotide
agcccgggcauacuucgca

SEQ ID NO: 2025178 - RNA, 19 nt, Artificial Sequence
  Description of Artificial Sequence: Synthetic oligonucleotide
auauagagccaaggagccu

SEQ ID NO: 2025179 - RNA, 19 nt, Artificial Sequence
  Description of Artificial Sequence: Synthetic oligonucleotide
cucagcacuugcaauggua

SEQ ID NO: 2025180 - RNA, 19 nt, Artificial Sequence
  Description of Artificial Sequence: Synthetic oligonucleotide
gggcuuccgucccacaucc

SEQ ID NO: 2025181 - RNA, 19 nt, Artificial Sequence
  Description of Artificial Sequence: Synthetic oligonucleotide
uagccgucauccuggcacu

SEQ ID NO: 2025182 - RNA, 19 nt, Artificial Sequence
  Description of Artificial Sequence: Synthetic oligonucleotide
ggaccaaguuucuuccgac

SEQ ID NO: 2025183 - RNA, 19 nt, Artificial Sequence
  Description of Artificial Sequence: Synthetic oligonucleotide
ucauuuccgaagcguucuu

SEQ ID NO: 2025184 - RNA, 19 nt, Artificial Sequence
  Description of Artificial Sequence: Synthetic oligonucleotide
aagcguucuugcuggcguu

SEQ ID NO: 2025185 - RNA, 19 nt, Artificial Sequence
  Description of Artificial Sequence: Synthetic oligonucleotide
acacaguccucgaucugag

SEQ ID NO: 2025186 - RNA, 19 nt, Artificial Sequence
  Description of Artificial Sequence: Synthetic oligonucleotide
ggcgcaggccgacagcccg

SEQ ID NO: 2025187 - RNA, 19 nt, Artificial Sequence
  Description of Artificial Sequence: Synthetic oligonucleotide
uggaugcaacuugauuuuc

SEQ ID NO: 2025188 - RNA, 19 nt, Artificial Sequence
  Description of Artificial Sequence: Synthetic oligonucleotide
uugugguugcacggcgcag

SEQ ID NO: 2025189 - RNA, 19 nt, Artificial Sequence
  Description of Artificial Sequence: Synthetic oligonucleotide
uuaguggaccaaguuucuu

SEQ ID NO: 2025190 - RNA, 19 nt, Artificial Sequence
  Description of Artificial Sequence: Synthetic oligonucleotide
gguugaacgucaaugucaa

SEQ ID NO: 2025191 - RNA, 19 nt, Artificial Sequence
  Description of Artificial Sequence: Synthetic oligonucleotide
gaacaugguggaaccuuga

SEQ ID NO: 2025192 - RNA, 19 nt, Artificial Sequence
  Description of Artificial Sequence: Synthetic oligonucleotide
cgaacuuggguccccauug

SEQ ID NO: 2025193 - RNA, 19 nt, Artificial Sequence
  Description of Artificial Sequence: Synthetic oligonucleotide
guaacuuaguggaccaagu

SEQ ID NO: 2025194 - RNA, 19 nt, Artificial Sequence
  Description of Artificial Sequence: Synthetic oligonucleotide
gugguugcacggcgcaggc

SEQ ID NO: 2025195 - RNA, 19 nt, Artificial Sequence
  Description of Artificial Sequence: Synthetic oligonucleotide
cagcccggcaacacucgcc

SEQ ID NO: 2025196 - RNA, 19 nt, Artificial Sequence
  Description of Artificial Sequence: Synthetic oligonucleotide
ccauugugguugcacggcg

SEQ ID NO: 2025197 - RNA, 19 nt, Artificial Sequence
  Description of Artificial Sequence: Synthetic oligonucleotide
ccuauaaaguaugccuuug

SEQ ID NO: 2025198 - RNA, 19 nt, Artificial Sequence
  Description of Artificial Sequence: Synthetic oligonucleotide
uucuuccgacaaagacagc

SEQ ID NO: 2025199 - RNA, 19 nt, Artificial Sequence
  Description of Artificial Sequence: Synthetic oligonucleotide
cacgagcuggcuucagcuc

SEQ ID NO: 2025200 - RNA, 19 nt, Artificial Sequence
  Description of Artificial Sequence: Synthetic oligonucleotide
guugccauguuucgaacuu

SEQ ID NO: 2025201 - RNA, 19 nt, Artificial Sequence
  Description of Artificial Sequence: Synthetic oligonucleotide
caaucauuuccgaagcguu

SEQ ID NO: 2025202 - RNA, 19 nt, Artificial Sequence
  Description of Artificial Sequence: Synthetic oligonucleotide
uacacacgagcuggcuuca

SEQ ID NO: 2025203 - RNA, 19 nt, Artificial Sequence
  Description of Artificial Sequence: Synthetic oligonucleotide
ucgcccgcgagaacauggu

SEQ ID NO: 2025204 - RNA, 19 nt, Artificial Sequence
  Description of Artificial Sequence: Synthetic oligonucleotide
cguaaguuguuuauuguaa

SEQ ID NO: 2025205 - RNA, 19 nt, Artificial Sequence
  Description of Artificial Sequence: Synthetic oligonucleotide
guuucgaacuugggucccc

SEQ ID NO: 2025206 - RNA, 19 nt, Artificial Sequence
  Description of Artificial Sequence: Synthetic oligonucleotide
acagcuuggcgcguacggu

SEQ ID NO: 2025207 - RNA, 19 nt, Artificial Sequence
  Description of Artificial Sequence: Synthetic oligonucleotide
gcgucuccaaaaguagggg

SEQ ID NO: 2025208 - RNA, 19 nt, Artificial Sequence
  Description of Artificial Sequence: Synthetic oligonucleotide
ucuuuccccgcugcuguaa

SEQ ID NO: 2025209 - RNA, 19 nt, Artificial Sequence
  Description of Artificial Sequence: Synthetic oligonucleotide
ccgacaaagacagcaauca

SEQ ID NO: 2025210 - RNA, 19 nt, Artificial Sequence
  Description of Artificial Sequence: Synthetic oligonucleotide
cuuaguggaccaaguuucu

SEQ ID NO: 2025211 - RNA, 19 nt, Artificial Sequence
  Description of Artificial Sequence: Synthetic oligonucleotide
ccccauugugguugcacgg

SEQ ID NO: 2025212 - RNA, 19 nt, Artificial Sequence
  Description of Artificial Sequence: Synthetic oligonucleotide
gagguuggccagacuguac

SEQ ID NO: 2025213 - RNA, 19 nt, Artificial Sequence
  Description of Artificial Sequence: Synthetic oligonucleotide
agccacugaugaaugaaua

SEQ ID NO: 2025214 - RNA, 19 nt, Artificial Sequence
  Description of Artificial Sequence: Synthetic oligonucleotide
gcuuagccacugaugaaug

SEQ ID NO: 2025215 - RNA, 19 nt, Artificial Sequence
  Description of Artificial Sequence: Synthetic oligonucleotide
gagaacaugguggaaccuu

SEQ ID NO: 2025216 - RNA, 19 nt, Artificial Sequence
  Description of Artificial Sequence: Synthetic oligonucleotide
uguccucgggucccuuaau

SEQ ID NO: 2025217 - RNA, 19 nt, Artificial Sequence
  Description of Artificial Sequence: Synthetic oligonucleotide
cuguacuccugguaauucu

SEQ ID NO: 2025218 - RNA, 19 nt, Artificial Sequence
  Description of Artificial Sequence: Synthetic oligonucleotide
ccucgggucccuuaauuuc

SEQ ID NO: 2025219 - RNA, 19 nt, Artificial Sequence
  Description of Artificial Sequence: Synthetic oligonucleotide
cucaaucaacuccuuugua

SEQ ID NO: 2025220 - RNA, 19 nt, Artificial Sequence
  Description of Artificial Sequence: Synthetic oligonucleotide
uucgaacuuggguccccau

SEQ ID NO: 2025221 - RNA, 19 nt, Artificial Sequence
  Description of Artificial Sequence: Synthetic oligonucleotide
agcuuggcgcguacgguug

SEQ ID NO: 2025222 - RNA, 19 nt, Artificial Sequence
  Description of Artificial Sequence: Synthetic oligonucleotide
gaacuuggguccccauugu

SEQ ID NO: 2025223 - RNA, 19 nt, Artificial Sequence
  Description of Artificial Sequence: Synthetic oligonucleotide
agacuucagucuccuggua

SEQ ID NO: 2025224 - RNA, 19 nt, Artificial Sequence
  Description of Artificial Sequence: Synthetic oligonucleotide
caaagacagcaaucaguua

SEQ ID NO: 2025225 - RNA, 19 nt, Artificial Sequence
  Description of Artificial Sequence: Synthetic oligonucleotide
gucccuuaauuucagccuu

SEQ ID NO: 2025226 - RNA, 19 nt, Artificial Sequence
  Description of Artificial Sequence: Synthetic oligonucleotide
guccuauaaaguaugccuu

SEQ ID NO: 2025227 - RNA, 19 nt, Artificial Sequence
  Description of Artificial Sequence: Synthetic oligonucleotide
uaaugacagcuuggcgcgu

SEQ ID NO: 2025228 - RNA, 19 nt, Artificial Sequence
  Description of Artificial Sequence: Synthetic oligonucleotide
guggaaccuugaaggucgg

SEQ ID NO: 2025229 - RNA, 19 nt, Artificial Sequence
  Description of Artificial Sequence: Synthetic oligonucleotide
gccauguuucgaacuuggg

SEQ ID NO: 2025230 - RNA, 19 nt, Artificial Sequence
  Description of Artificial Sequence: Synthetic oligonucleotide
uuggcgcguacgguugaac

SEQ ID NO: 2025231 - RNA, 19 nt, Artificial Sequence
  Description of Artificial Sequence: Synthetic oligonucleotide
aguaugccuuugauuuuau

SEQ ID NO: 2025232 - RNA, 19 nt, Artificial Sequence
  Description of Artificial Sequence: Synthetic oligonucleotide
gguuggccagacuguacuc

SEQ ID NO: 2025233 - RNA, 19 nt, Artificial Sequence
  Description of Artificial Sequence: Synthetic oligonucleotide
guuuugcuuuaccucuuau

SEQ ID NO: 2025234 - RNA, 19 nt, Artificial Sequence
  Description of Artificial Sequence: Synthetic oligonucleotide
cgacaaagacagcaaucag

SEQ ID NO: 2025235 - RNA, 19 nt, Artificial Sequence
  Description of Artificial Sequence: Synthetic oligonucleotide
ccuguuccauacacacgag

SEQ ID NO: 2025236 - RNA, 19 nt, Artificial Sequence
  Description of Artificial Sequence: Synthetic oligonucleotide
ugguugcacggcgcaggcc

SEQ ID NO: 2025237 - RNA, 19 nt, Artificial Sequence
  Description of Artificial Sequence: Synthetic oligonucleotide
caacacucgcccgcgagaa

SEQ ID NO: 2025238 - RNA, 19 nt, Artificial Sequence
  Description of Artificial Sequence: Synthetic oligonucleotide
ccauguuucgaacuugggu

SEQ ID NO: 2025239 - RNA, 19 nt, Artificial Sequence
  Description of Artificial Sequence: Synthetic oligonucleotide
gcauacuucgcagcugcca

SEQ ID NO: 2025240 - RNA, 19 nt, Artificial Sequence
  Description of Artificial Sequence: Synthetic oligonucleotide
cacggcgcaggccgacagc

SEQ ID NO: 2025241 - RNA, 19 nt, Artificial Sequence
  Description of Artificial Sequence: Synthetic oligonucleotide
ccaauaagaagguguuucu

SEQ ID NO: 2025242 - RNA, 19 nt, Artificial Sequence
  Description of Artificial Sequence: Synthetic oligonucleotide
cgcgagaacaugguggaac

SEQ ID NO: 2025243 - RNA, 19 nt, Artificial Sequence
  Description of Artificial Sequence: Synthetic oligonucleotide
caggccgacagcccggcaa

SEQ ID NO: 2025244 - RNA, 19 nt, Artificial Sequence
  Description of Artificial Sequence: Synthetic oligonucleotide
caucacuucuuuccccgcu

SEQ ID NO: 2025245 - RNA, 19 nt, Artificial Sequence
  Description of Artificial Sequence: Synthetic oligonucleotide
aggagauaacagacuugaa

SEQ ID NO: 2025246 - RNA, 19 nt, Artificial Sequence
  Description of Artificial Sequence: Synthetic oligonucleotide
gcaacacucgcccgcgaga

SEQ ID NO: 2025247 - RNA, 19 nt, Artificial Sequence
  Description of Artificial Sequence: Synthetic oligonucleotide
cccggcaacacucgcccgc

SEQ ID NO: 2025248 - RNA, 19 nt, Artificial Sequence
  Description of Artificial Sequence: Synthetic oligonucleotide
cuguaagguuugccaccuc

SEQ ID NO: 2025249 - RNA, 19 nt, Artificial Sequence
  Description of Artificial Sequence: Synthetic oligonucleotide
cugaugcgucuccaaaagu

SEQ ID NO: 2025250 - RNA, 19 nt, Artificial Sequence
  Description of Artificial Sequence: Synthetic oligonucleotide
ggagccuguuccauacaca

SEQ ID NO: 2025251 - RNA, 19 nt, Artificial Sequence
  Description of Artificial Sequence: Synthetic oligonucleotide
acacacgagcuggcuucag

SEQ ID NO: 2025252 - RNA, 19 nt, Artificial Sequence
  Description of Artificial Sequence: Synthetic oligonucleotide
ugcacggcgcaggccgaca

SEQ ID NO: 2025253 - RNA, 19 nt, Artificial Sequence
  Description of Artificial Sequence: Synthetic oligonucleotide
gggaguaguaaaugagguu

SEQ ID NO: 2025254 - RNA, 19 nt, Artificial Sequence
  Description of Artificial Sequence: Synthetic oligonucleotide
cauagccgucauccuggca

SEQ ID NO: 2025255 - RNA, 19 nt, Artificial Sequence
  Description of Artificial Sequence: Synthetic oligonucleotide
cccgcgagaacauggugga

SEQ ID NO: 2025256 - RNA, 19 nt, Artificial Sequence
  Description of Artificial Sequence: Synthetic oligonucleotide
cagccccagagaugaucuc

SEQ ID NO: 2025257 - RNA, 19 nt, Artificial Sequence
  Description of Artificial Sequence: Synthetic oligonucleotide
cuucagucuccugguaaua

SEQ ID NO: 2025258 - RNA, 19 nt, Artificial Sequence
  Description of Artificial Sequence: Synthetic oligonucleotide
ggcgcguacgguugaacgu

SEQ ID NO: 2025259 - RNA, 19 nt, Artificial Sequence
  Description of Artificial Sequence: Synthetic oligonucleotide
gcgcguacgguugaacguc

SEQ ID NO: 2025260 - RNA, 19 nt, Artificial Sequence
  Description of Artificial Sequence: Synthetic oligonucleotide
ccgucauccuggcacucug

SEQ ID NO: 2025261 - RNA, 19 nt, Artificial Sequence
  Description of Artificial Sequence: Synthetic oligonucleotide
cgacagcccggcaacacuc

SEQ ID NO: 2025262 - RNA, 19 nt, Artificial Sequence
  Description of Artificial Sequence: Synthetic oligonucleotide
acucgcccgcgagaacaug

SEQ ID NO: 2025263 - RNA, 19 nt, Artificial Sequence
  Description of Artificial Sequence: Synthetic oligonucleotide
gcguuguccauagccguca

SEQ ID NO: 2025264 - RNA, 19 nt, Artificial Sequence
  Description of Artificial Sequence: Synthetic oligonucleotide
acuucgcagcugccaccau

SEQ ID NO: 2025265 - RNA, 19 nt, Artificial Sequence
  Description of Artificial Sequence: Synthetic oligonucleotide
cgaagcguucuugcuggcg

SEQ ID NO: 2025266 - RNA, 19 nt, Artificial Sequence
  Description of Artificial Sequence: Synthetic oligonucleotide
ggcguuguccauagccguc

SEQ ID NO: 2025267 - RNA, 19 nt, Artificial Sequence
  Description of Artificial Sequence: Synthetic oligonucleotide
gggcaaugacugaugcguc

SEQ ID NO: 2025268 - RNA, 19 nt, Artificial Sequence
  Description of Artificial Sequence: Synthetic oligonucleotide
cagcucccgcucagcccgg

SEQ ID NO: 2025269 - RNA, 19 nt, Artificial Sequence
  Description of Artificial Sequence: Synthetic oligonucleotide
ccaccucauucuucaucug

SEQ ID NO: 2025270 - RNA, 19 nt, Artificial Sequence
  Description of Artificial Sequence: Synthetic oligonucleotide
ggucagagugaguccuaua

SEQ ID NO: 2025271 - RNA, 19 nt, Artificial Sequence
  Description of Artificial Sequence: Synthetic oligonucleotide
cagcuuggcgcguacgguu

SEQ ID NO: 2025272 - RNA, 19 nt, Artificial Sequence
  Description of Artificial Sequence: Synthetic oligonucleotide
guugcacggcgcaggccga

SEQ ID NO: 2025273 - RNA, 19 nt, Artificial Sequence
  Description of Artificial Sequence: Synthetic oligonucleotide
ccggcaacacucgcccgcg

SEQ ID NO: 2025274 - RNA, 19 nt, Artificial Sequence
  Description of Artificial Sequence: Synthetic oligonucleotide
guugaacgucaaugucaau

SEQ ID NO: 2025275 - RNA, 19 nt, Artificial Sequence
  Description of Artificial Sequence: Synthetic oligonucleotide
gcccggcaacacucgcccg

SEQ ID NO: 2025276 - RNA, 19 nt, Artificial Sequence
  Description of Artificial Sequence: Synthetic oligonucleotide
gcuuggcgcguacgguuga

SEQ ID NO: 2025277 - RNA, 19 nt, Artificial Sequence
  Description of Artificial Sequence: Synthetic oligonucleotide
ccgaagcguucuugcuggc

SEQ ID NO: 2025278 - RNA, 19 nt, Artificial Sequence
  Description of Artificial Sequence: Synthetic oligonucleotide
cuuggcgcguacgguugaa

SEQ ID NO: 2025279 - RNA, 19 nt, Artificial Sequence
  Description of Artificial Sequence: Synthetic oligonucleotide
cacucgcccgcgagaacau

SEQ ID NO: 2025280 - RNA, 19 nt, Artificial Sequence
  Description of Artificial Sequence: Synthetic oligonucleotide
cgcguacgguugaacguca

SEQ ID NO: 2025281 - RNA, 19 nt, Artificial Sequence
  Description of Artificial Sequence: Synthetic oligonucleotide
cccuuaauuucagccuucu

SEQ ID NO: 2025282 - RNA, 19 nt, Artificial Sequence
  Description of Artificial Sequence: Synthetic oligonucleotide
cgcccgcgagaacauggug

SEQ ID NO: 2025283 - RNA, 19 nt, Artificial Sequence
  Description of Artificial Sequence: Synthetic oligonucleotide
ccgcucagcccgggcauac

SEQ ID NO: 2025284 - RNA, 19 nt, Artificial Sequence
  Description of Artificial Sequence: Synthetic oligonucleotide
ccgacagcccggcaacacu

SEQ ID NO: 2025285 - RNA, 19 nt, Artificial Sequence
  Description of Artificial Sequence: Synthetic oligonucleotide
gcguacgguugaacgucaa

SEQ ID NO: 2025286 - RNA, 19 nt, Artificial Sequence
  Description of Artificial Sequence: Synthetic oligonucleotide
cggcgcaggccgacagccc

SEQ ID NO: 2025287 - RNA, 19 nt, Artificial Sequence
  Description of Artificial Sequence: Synthetic oligonucleotide
cguacgguugaacgucaau

SEQ ID NO: 2025288 - RNA, 19 nt, Artificial Sequence
  Description of Artificial Sequence: Synthetic oligonucleotide
cagcagccccagagaugau

SEQ ID NO: 2025289 - RNA, 19 nt, Artificial Sequence
  Description of Artificial Sequence: Synthetic oligonucleotide
ccgcgagaacaugguggaa

SEQ ID NO: 2025290 - RNA, 19 nt, Artificial Sequence
  Description of Artificial Sequence: Synthetic oligonucleotide
cggcaacacucgcccgcga

SEQ ID NO: 2025291 - RNA, 19 nt, Artificial Sequence
  Description of Artificial Sequence: Synthetic oligonucleotide
cccgcucagcccgggcaua

SEQ ID NO: 2025292 - RNA, 19 nt, Artificial Sequence
  Description of Artificial Sequence: Synthetic oligonucleotide
aaauccuauaaacacgagc

SEQ ID NO: 2025293 - RNA, 19 nt, Artificial Sequence
  Description of Artificial Sequence: Synthetic oligonucleotide
aauccuauaaacacgagcg

SEQ ID NO: 2025294 - RNA, 19 nt, Artificial Sequence
  Description of Artificial Sequence: Synthetic oligonucleotide
ugaaagaccaggcagaacu

SEQ ID NO: 2025295 - RNA, 19 nt, Artificial Sequence
  Description of Artificial Sequence: Synthetic oligonucleotide
aaaauguccacacaagggu

SEQ ID NO: 2025296 - RNA, 19 nt, Artificial Sequence
  Description of Artificial Sequence: Synthetic oligonucleotide
uuuaucucuaaacugguac

SEQ ID NO: 2025297 - RNA, 19 nt, Artificial Sequence
  Description of Artificial Sequence: Synthetic oligonucleotide
uuaacuacugaucacggcu

SEQ ID NO: 2025298 - RNA, 19 nt, Artificial Sequence
  Description of Artificial Sequence: Synthetic oligonucleotide
ugugcuuaacuacugauca

SEQ ID NO: 2025299 - RNA, 19 nt, Artificial Sequence
  Description of Artificial Sequence: Synthetic oligonucleotide
augauuuucuuucuacccc

SEQ ID NO: 2025300 - RNA, 19 nt, Artificial Sequence
  Description of Artificial Sequence: Synthetic oligonucleotide
aaggccaacuuccaggaac

SEQ ID NO: 2025301 - RNA, 19 nt, Artificial Sequence
  Description of Artificial Sequence: Synthetic oligonucleotide
agaaaauguccacacaagg

SEQ ID NO: 2025302 - RNA, 19 nt, Artificial Sequence
  Description of Artificial Sequence: Synthetic oligonucleotide
gaugauuuucuuucuaccc

SEQ ID NO: 2025303 - RNA, 19 nt, Artificial Sequence
  Description of Artificial Sequence: Synthetic oligonucleotide
aauccagaggccugaagcg

SEQ ID NO: 2025304 - RNA, 19 nt, Artificial Sequence
  Description of Artificial Sequence: Synthetic oligonucleotide
aauggcaucgaccacggga

SEQ ID NO: 2025305 - RNA, 19 nt, Artificial Sequence
  Description of Artificial Sequence: Synthetic oligonucleotide
gaaucaauggcaucgacca

SEQ ID NO: 2025306 - RNA, 19 nt, Artificial Sequence
  Description of Artificial Sequence: Synthetic oligonucleotide
caaauuuaucucuaaacug

SEQ ID NO: 2025307 - RNA, 19 nt, Artificial Sequence
  Description of Artificial Sequence: Synthetic oligonucleotide
auucccuacaccccaaggc

SEQ ID NO: 2025308 - RNA, 19 nt, Artificial Sequence
  Description of Artificial Sequence: Synthetic oligonucleotide
aaauaauggaagccuagga

SEQ ID NO: 2025309 - RNA, 19 nt, Artificial Sequence
  Description of Artificial Sequence: Synthetic oligonucleotide
gauguuaaguccccugugg

SEQ ID NO: 2025310 - RNA, 19 nt, Artificial Sequence
  Description of Artificial Sequence: Synthetic oligonucleotide
uaacucagcuguaaggcgg

SEQ ID NO: 2025311 - RNA, 19 nt, Artificial Sequence
  Description of Artificial Sequence: Synthetic oligonucleotide
acaaaaguggcucuguugu

SEQ ID NO: 2025312 - RNA, 19 nt, Artificial Sequence
  Description of Artificial Sequence: Synthetic oligonucleotide
auuuccagauuucuaacag

SEQ ID NO: 2025313 - RNA, 19 nt, Artificial Sequence
  Description of Artificial Sequence: Synthetic oligonucleotide
agauuucuaacagagguuc

SEQ ID NO: 2025314 - RNA, 19 nt, Artificial Sequence
  Description of Artificial Sequence: Synthetic oligonucleotide
ucuguuguaagggaagggg

SEQ ID NO: 2025315 - RNA, 19 nt, Artificial Sequence
  Description of Artificial Sequence: Synthetic oligonucleotide
aauggaggcugcuuagcgg

SEQ ID NO: 2025316 - RNA, 19 nt, Artificial Sequence
  Description of Artificial Sequence: Synthetic oligonucleotide
ucuaacucagcuguaaggc

SEQ ID NO: 2025317 - RNA, 19 nt, Artificial Sequence
  Description of Artificial Sequence: Synthetic oligonucleotide
ugcuuaacuacugaucacg

SEQ ID NO: 2025318 - RNA, 19 nt, Artificial Sequence
  Description of Artificial Sequence: Synthetic oligonucleotide
aauggaagccuaggaaacc

SEQ ID NO: 2025319 - RNA, 19 nt, Artificial Sequence
  Description of Artificial Sequence: Synthetic oligonucleotide
agaauuuccagauuucuaa

SEQ ID NO: 2025320 - RNA, 19 nt, Artificial Sequence
  Description of Artificial Sequence: Synthetic oligonucleotide
ugggugaaagaccaggcag

SEQ ID NO: 2025321 - RNA, 19 nt, Artificial Sequence
  Description of Artificial Sequence: Synthetic oligonucleotide
auaauggaagccuaggaaa

SEQ ID NO: 2025322 - RNA, 19 nt, Artificial Sequence
  Description of Artificial Sequence: Synthetic oligonucleotide
aagccuaggaaaccugagg

SEQ ID NO: 2025323 - RNA, 19 nt, Artificial Sequence
  Description of Artificial Sequence: Synthetic oligonucleotide
uagaaagugagcccuguug

SEQ ID NO: 2025324 - RNA, 19 nt, Artificial Sequence
  Description of Artificial Sequence: Synthetic oligonucleotide
auguuaaguccccuguggc

SEQ ID NO: 2025325 - RNA, 19 nt, Artificial Sequence
  Description of Artificial Sequence: Synthetic oligonucleotide
agaaucaauggcaucgacc

SEQ ID NO: 2025326 - RNA, 19 nt, Artificial Sequence
  Description of Artificial Sequence: Synthetic oligonucleotide
aaagcauauucugaccuag

SEQ ID NO: 2025327 - RNA, 19 nt, Artificial Sequence
  Description of Artificial Sequence: Synthetic oligonucleotide
agcggaaaucaauggaggc

SEQ ID NO: 2025328 - RNA, 19 nt, Artificial Sequence
  Description of Artificial Sequence: Synthetic oligonucleotide
cuuucuaccccucucuagg

SEQ ID NO: 2025329 - RNA, 19 nt, Artificial Sequence
  Description of Artificial Sequence: Synthetic oligonucleotide
auaaacacgagcggaaauc

SEQ ID NO: 2025330 - RNA, 19 nt, Artificial Sequence
  Description of Artificial Sequence: Synthetic oligonucleotide
ugucacgauguuaaguccc

SEQ ID NO: 2025331 - RNA, 19 nt, Artificial Sequence
  Description of Artificial Sequence: Synthetic oligonucleotide
guugucacgauguuaaguc

SEQ ID NO: 2025332 - RNA, 19 nt, Artificial Sequence
  Description of Artificial Sequence: Synthetic oligonucleotide
cuaacagagguucccaacc

SEQ ID NO: 2025333 - RNA, 19 nt, Artificial Sequence
  Description of Artificial Sequence: Synthetic oligonucleotide
uaauggaagccuaggaaac

SEQ ID NO: 2025334 - RNA, 19 nt, Artificial Sequence
  Description of Artificial Sequence: Synthetic oligonucleotide
ugguacuucagccuucuca

SEQ ID NO: 2025335 - RNA, 19 nt, Artificial Sequence
  Description of Artificial Sequence: Synthetic oligonucleotide
gucugucgaauccagaucc

SEQ ID NO: 2025336 - RNA, 19 nt, Artificial Sequence
  Description of Artificial Sequence: Synthetic oligonucleotide
uccacacaaggguagagcc

SEQ ID NO: 2025337 - RNA, 19 nt, Artificial Sequence
  Description of Artificial Sequence: Synthetic oligonucleotide
aagucugucgaauccagau

SEQ ID NO: 2025338 - RNA, 19 nt, Artificial Sequence
  Description of Artificial Sequence: Synthetic oligonucleotide
uuugcuucuagcaggcgcu

SEQ ID NO: 2025339 - RNA, 19 nt, Artificial Sequence
  Description of Artificial Sequence: Synthetic oligonucleotide
aaaucccugcugcuucccc

SEQ ID NO: 2025340 - RNA, 19 nt, Artificial Sequence
  Description of Artificial Sequence: Synthetic oligonucleotide
aagcauucuacugaagcug

SEQ ID NO: 2025341 - RNA, 19 nt, Artificial Sequence
  Description of Artificial Sequence: Synthetic oligonucleotide
cugagaaugggugaaagac

SEQ ID NO: 2025342 - RNA, 19 nt, Artificial Sequence
  Description of Artificial Sequence: Synthetic oligonucleotide
ucaauggcaucgaccacgg

SEQ ID NO: 2025343 - RNA, 19 nt, Artificial Sequence
  Description of Artificial Sequence: Synthetic oligonucleotide
ugaagagacugccuccucc

SEQ ID NO: 2025344 - RNA, 19 nt, Artificial Sequence
  Description of Artificial Sequence: Synthetic oligonucleotide
uauucgucaccacaaucug

SEQ ID NO: 2025345 - RNA, 19 nt, Artificial Sequence
  Description of Artificial Sequence: Synthetic oligonucleotide
aaggaagaguagcugagaa

SEQ ID NO: 2025346 - RNA, 19 nt, Artificial Sequence
  Description of Artificial Sequence: Synthetic oligonucleotide
aaucaauggaggcugcuua

SEQ ID NO: 2025347 - RNA, 19 nt, Artificial Sequence
  Description of Artificial Sequence: Synthetic oligonucleotide
cuaacucagcuguaaggcg

SEQ ID NO: 2025348 - RNA, 19 nt, Artificial Sequence
  Description of Artificial Sequence: Synthetic oligonucleotide
uucgucaccacaaucugaa

SEQ ID NO: 2025349 - RNA, 19 nt, Artificial Sequence
  Description of Artificial Sequence: Synthetic oligonucleotide
uccagauuucuaacagagg

SEQ ID NO: 2025350 - RNA, 19 nt, Artificial Sequence
  Description of Artificial Sequence: Synthetic oligonucleotide
uguaaggcggcuucagagc

SEQ ID NO: 2025351 - RNA, 19 nt, Artificial Sequence
  Description of Artificial Sequence: Synthetic oligonucleotide
uucugaccuagugagaaag

SEQ ID NO: 2025352 - RNA, 19 nt, Artificial Sequence
  Description of Artificial Sequence: Synthetic oligonucleotide
ucacccacagcauagccga

SEQ ID NO: 2025353 - RNA, 19 nt, Artificial Sequence
  Description of Artificial Sequence: Synthetic oligonucleotide
ucucuaacucagcuguaag

SEQ ID NO: 2025354 - RNA, 19 nt, Artificial Sequence
  Description of Artificial Sequence: Synthetic oligonucleotide
caaauaauggaagccuagg

SEQ ID NO: 2025355 - RNA, 19 nt, Artificial Sequence
  Description of Artificial Sequence: Synthetic oligonucleotide
ucuacugaagcugaagauc

SEQ ID NO: 2025356 - RNA, 19 nt, Artificial Sequence
  Description of Artificial Sequence: Synthetic oligonucleotide
uauucugaccuagugagaa

SEQ ID NO: 2025357 - RNA, 19 nt, Artificial Sequence
  Description of Artificial Sequence: Synthetic oligonucleotide
uucccuacaccccaaggca

SEQ ID NO: 2025358 - RNA, 19 nt, Artificial Sequence
  Description of Artificial Sequence: Synthetic oligonucleotide
cuguaaggcggcuucagag

SEQ ID NO: 2025359 - RNA, 19 nt, Artificial Sequence
  Description of Artificial Sequence: Synthetic oligonucleotide
uucccuccuagaaagugag

SEQ ID NO: 2025360 - RNA, 19 nt, Artificial Sequence
  Description of Artificial Sequence: Synthetic oligonucleotide
ggcagaaucaauggcaucg

SEQ ID NO: 2025361 - RNA, 19 nt, Artificial Sequence
  Description of Artificial Sequence: Synthetic oligonucleotide
auccuauaaacacgagcgg

SEQ ID NO: 2025362 - RNA, 19 nt, Artificial Sequence
  Description of Artificial Sequence: Synthetic oligonucleotide
aaacugguacacagggcgc

SEQ ID NO: 2025363 - RNA, 19 nt, Artificial Sequence
  Description of Artificial Sequence: Synthetic oligonucleotide
uguauucgucaccacaauc

SEQ ID NO: 2025364 - RNA, 19 nt, Artificial Sequence
  Description of Artificial Sequence: Synthetic oligonucleotide
guuugcuucuagcaggcgc

SEQ ID NO: 2025365 - RNA, 19 nt, Artificial Sequence
  Description of Artificial Sequence: Synthetic oligonucleotide
caaggguagagccuucucc

SEQ ID NO: 2025366 - RNA, 19 nt, Artificial Sequence
  Description of Artificial Sequence: Synthetic oligonucleotide
aagcgcuguagguauacca

SEQ ID NO: 2025367 - RNA, 19 nt, Artificial Sequence
  Description of Artificial Sequence: Synthetic oligonucleotide
aaagugagcccuguuguca

SEQ ID NO: 2025368 - RNA, 19 nt, Artificial Sequence
  Description of Artificial Sequence: Synthetic oligonucleotide
auaaggccaacuuccagga

SEQ ID NO: 2025369 - RNA, 19 nt, Artificial Sequence
  Description of Artificial Sequence: Synthetic oligonucleotide
cuguuguaagggaaggggc

SEQ ID NO: 2025370 - RNA, 19 nt, Artificial Sequence
  Description of Artificial Sequence: Synthetic oligonucleotide
aaguggcucuguuguaagg

SEQ ID NO: 2025371 - RNA, 19 nt, Artificial Sequence
  Description of Artificial Sequence: Synthetic oligonucleotide
uccuauaaacacgagcgga

SEQ ID NO: 2025372 - RNA, 19 nt, Artificial Sequence
  Description of Artificial Sequence: Synthetic oligonucleotide
ucccgacaaauaauggaag

SEQ ID NO: 2025373 - RNA, 19 nt, Artificial Sequence
  Description of Artificial Sequence: Synthetic oligonucleotide
cuuaacuacugaucacggc

SEQ ID NO: 2025374 - RNA, 19 nt, Artificial Sequence
  Description of Artificial Sequence: Synthetic oligonucleotide
ucaugggcuucagauaagg

SEQ ID NO: 2025375 - RNA, 19 nt, Artificial Sequence
  Description of Artificial Sequence: Synthetic oligonucleotide
uauaaacacgagcggaaau

SEQ ID NO: 2025376 - RNA, 19 nt, Artificial Sequence
  Description of Artificial Sequence: Synthetic oligonucleotide
uguugcuauucccuacacc

SEQ ID NO: 2025377 - RNA, 19 nt, Artificial Sequence
  Description of Artificial Sequence: Synthetic oligonucleotide
gcgcugauaauccagaggc

SEQ ID NO: 2025378 - RNA, 19 nt, Artificial Sequence
  Description of Artificial Sequence: Synthetic oligonucleotide
gaccuagugagaaagaaaa

SEQ ID NO: 2025379 - RNA, 19 nt, Artificial Sequence
  Description of Artificial Sequence: Synthetic oligonucleotide
uaaacacgagcggaaauca

SEQ ID NO: 2025380 - RNA, 19 nt, Artificial Sequence
  Description of Artificial Sequence: Synthetic oligonucleotide
ugcuauucccuacacccca

SEQ ID NO: 2025381 - RNA, 19 nt, Artificial Sequence
  Description of Artificial Sequence: Synthetic oligonucleotide
cugaucacggcuaagugga

SEQ ID NO: 2025382 - RNA, 19 nt, Artificial Sequence
  Description of Artificial Sequence: Synthetic oligonucleotide
uacugaucacggcuaagug

SEQ ID NO: 2025383 - RNA, 19 nt, Artificial Sequence
  Description of Artificial Sequence: Synthetic oligonucleotide
aaaaguggcucuguuguaa

SEQ ID NO: 2025384 - RNA, 19 nt, Artificial Sequence
  Description of Artificial Sequence: Synthetic oligonucleotide
uguuaaguccccuguggcu

SEQ ID NO: 2025385 - RNA, 19 nt, Artificial Sequence
  Description of Artificial Sequence: Synthetic oligonucleotide
uaacagagguucccaacca

SEQ ID NO: 2025386 - RNA, 19 nt, Artificial Sequence
  Description of Artificial Sequence: Synthetic oligonucleotide
uccucccgacaaauaaugg

SEQ ID NO: 2025387 - RNA, 19 nt, Artificial Sequence
  Description of Artificial Sequence: Synthetic oligonucleotide
cuguagguauaccaagagc

SEQ ID NO: 2025388 - RNA, 19 nt, Artificial Sequence
  Description of Artificial Sequence: Synthetic oligonucleotide
cuaaacugguacacagggc

SEQ ID NO: 2025389 - RNA, 19 nt, Artificial Sequence
  Description of Artificial Sequence: Synthetic oligonucleotide
uagguauaccaagagcuug

SEQ ID NO: 2025390 - RNA, 19 nt, Artificial Sequence
  Description of Artificial Sequence: Synthetic oligonucleotide
uugcaucugacggaugagg

SEQ ID NO: 2025391 - RNA, 19 nt, Artificial Sequence
  Description of Artificial Sequence: Synthetic oligonucleotide
aucaauggaggcugcuuag

SEQ ID NO: 2025392 - RNA, 19 nt, Artificial Sequence
  Description of Artificial Sequence: Synthetic oligonucleotide
ugagcagugguuccuguuc

SEQ ID NO: 2025393 - RNA, 19 nt, Artificial Sequence
  Description of Artificial Sequence: Synthetic oligonucleotide
uugucacgauguuaagucc

SEQ ID NO: 2025394 - RNA, 19 nt, Artificial Sequence
  Description of Artificial Sequence: Synthetic oligonucleotide
acagauugcaucugacgga

SEQ ID NO: 2025395 - RNA, 19 nt, Artificial Sequence
  Description of Artificial Sequence: Synthetic oligonucleotide
uguaagggaaggggcacgg

SEQ ID NO: 2025396 - RNA, 19 nt, Artificial Sequence
  Description of Artificial Sequence: Synthetic oligonucleotide
uagguuggagagcaaauuu

SEQ ID NO: 2025397 - RNA, 19 nt, Artificial Sequence
  Description of Artificial Sequence: Synthetic oligonucleotide
ugacggaugagggaagcag

SEQ ID NO: 2025398 - RNA, 19 nt, Artificial Sequence
  Description of Artificial Sequence: Synthetic oligonucleotide
agauaaggccaacuuccag

SEQ ID NO: 2025399 - RNA, 19 nt, Artificial Sequence
  Description of Artificial Sequence: Synthetic oligonucleotide
ugucgaauccagauccacu

SEQ ID NO: 2025400 - RNA, 19 nt, Artificial Sequence
  Description of Artificial Sequence: Synthetic oligonucleotide
uaucucuaaacugguacac

SEQ ID NO: 2025401 - RNA, 19 nt, Artificial Sequence
  Description of Artificial Sequence: Synthetic oligonucleotide
gagcggaaaucaauggagg

SEQ ID NO: 2025402 - RNA, 19 nt, Artificial Sequence
  Description of Artificial Sequence: Synthetic oligonucleotide
ucuagguuggagagcaaau

SEQ ID NO: 2025403 - RNA, 19 nt, Artificial Sequence
  Description of Artificial Sequence: Synthetic oligonucleotide
acaaauaauggaagccuag

SEQ ID NO: 2025404 - RNA, 19 nt, Artificial Sequence
  Description of Artificial Sequence: Synthetic oligonucleotide
ugcuuagcggccaggggag

SEQ ID NO: 2025405 - RNA, 19 nt, Artificial Sequence
  Description of Artificial Sequence: Synthetic oligonucleotide
ucagcuguaaggcggcuuc

SEQ ID NO: 2025406 - RNA, 19 nt, Artificial Sequence
  Description of Artificial Sequence: Synthetic oligonucleotide
uucuagcaggcgcugauaa

SEQ ID NO: 2025407 - RNA, 19 nt, Artificial Sequence
  Description of Artificial Sequence: Synthetic oligonucleotide
uucuacugaagcugaagau

SEQ ID NO: 2025408 - RNA, 19 nt, Artificial Sequence
  Description of Artificial Sequence: Synthetic oligonucleotide
uguugucacgauguuaagu

SEQ ID NO: 2025409 - RNA, 19 nt, Artificial Sequence
  Description of Artificial Sequence: Synthetic oligonucleotide
gucgaauccagauccacuc

SEQ ID NO: 2025410 - RNA, 19 nt, Artificial Sequence
  Description of Artificial Sequence: Synthetic oligonucleotide
ccaagcauucuacugaagc

SEQ ID NO: 2025411 - RNA, 19 nt, Artificial Sequence
  Description of Artificial Sequence: Synthetic oligonucleotide
cacgagcggaaaucaaugg

SEQ ID NO: 2025412 - RNA, 19 nt, Artificial Sequence
  Description of Artificial Sequence: Synthetic oligonucleotide
uacacagggcgcucuaccc

SEQ ID NO: 2025413 - RNA, 19 nt, Artificial Sequence
  Description of Artificial Sequence: Synthetic oligonucleotide
uugcuauucccuacacccc

SEQ ID NO: 2025414 - RNA, 19 nt, Artificial Sequence
  Description of Artificial Sequence: Synthetic oligonucleotide
uagcaggcgcugauaaucc

SEQ ID NO: 2025415 - RNA, 19 nt, Artificial Sequence
  Description of Artificial Sequence: Synthetic oligonucleotide
acgauguuaaguccccugu

SEQ ID NO: 2025416 - RNA, 19 nt, Artificial Sequence
  Description of Artificial Sequence: Synthetic oligonucleotide
agguauaccaagagcuugg

SEQ ID NO: 2025417 - RNA, 19 nt, Artificial Sequence
  Description of Artificial Sequence: Synthetic oligonucleotide
uggcaagggauuuuccugu

SEQ ID NO: 2025418 - RNA, 19 nt, Artificial Sequence
  Description of Artificial Sequence: Synthetic oligonucleotide
uaacuacugaucacggcua

SEQ ID NO: 2025419 - RNA, 19 nt, Artificial Sequence
  Description of Artificial Sequence: Synthetic oligonucleotide
agaaccugucucaacaaug

SEQ ID NO: 2025420 - RNA, 19 nt, Artificial Sequence
  Description of Artificial Sequence: Synthetic oligonucleotide
uggaacuguuugcuucuag

SEQ ID NO: 2025421 - RNA, 19 nt, Artificial Sequence
  Description of Artificial Sequence: Synthetic oligonucleotide
cuagcaggcgcugauaauc

SEQ ID NO: 2025422 - RNA, 19 nt, Artificial Sequence
  Description of Artificial Sequence: Synthetic oligonucleotide
cuguuugcuucuagcaggc

SEQ ID NO: 2025423 - RNA, 19 nt, Artificial Sequence
  Description of Artificial Sequence: Synthetic oligonucleotide
gcaaauuuaucucuaaacu

SEQ ID NO: 2025424 - RNA, 19 nt, Artificial Sequence
  Description of Artificial Sequence: Synthetic oligonucleotide
ggaacuguuugcuucuagc

SEQ ID NO: 2025425 - RNA, 19 nt, Artificial Sequence
  Description of Artificial Sequence: Synthetic oligonucleotide
cugugcuuaacuacugauc

SEQ ID NO: 2025426 - RNA, 19 nt, Artificial Sequence
  Description of Artificial Sequence: Synthetic oligonucleotide
ucccuacaccccaaggcag

SEQ ID NO: 2025427 - RNA, 19 nt, Artificial Sequence
  Description of Artificial Sequence: Synthetic oligonucleotide
cuccucccgacaaauaaug

SEQ ID NO: 2025428 - RNA, 19 nt, Artificial Sequence
  Description of Artificial Sequence: Synthetic oligonucleotide
uggagacuuccugaaaccc

SEQ ID NO: 2025429 - RNA, 19 nt, Artificial Sequence
  Description of Artificial Sequence: Synthetic oligonucleotide
ugauaauccagaggccuga

SEQ ID NO: 2025430 - RNA, 19 nt, Artificial Sequence
  Description of Artificial Sequence: Synthetic oligonucleotide
auccagaggccugaagcgc

SEQ ID NO: 2025431 - RNA, 19 nt, Artificial Sequence
  Description of Artificial Sequence: Synthetic oligonucleotide
acgagcggaaaucaaugga

SEQ ID NO: 2025432 - RNA, 19 nt, Artificial Sequence
  Description of Artificial Sequence: Synthetic oligonucleotide
cacuccaagcauucuacug

SEQ ID NO: 2025433 - RNA, 19 nt, Artificial Sequence
  Description of Artificial Sequence: Synthetic oligonucleotide
gaaccugucucaacaauga

SEQ ID NO: 2025434 - RNA, 19 nt, Artificial Sequence
  Description of Artificial Sequence: Synthetic oligonucleotide
cuggagacaaaaguggcuc

SEQ ID NO: 2025435 - RNA, 19 nt, Artificial Sequence
  Description of Artificial Sequence: Synthetic oligonucleotide
auggcaucgaccacgggag

SEQ ID NO: 2025436 - RNA, 19 nt, Artificial Sequence
  Description of Artificial Sequence: Synthetic oligonucleotide
aacacgagcggaaaucaau

SEQ ID NO: 2025437 - RNA, 19 nt, Artificial Sequence
  Description of Artificial Sequence: Synthetic oligonucleotide
aggggcggcccacagauug

SEQ ID NO: 2025438 - RNA, 19 nt, Artificial Sequence
  Description of Artificial Sequence: Synthetic oligonucleotide
cacggcuaaguggaaaucc

SEQ ID NO: 2025439 - RNA, 19 nt, Artificial Sequence
  Description of Artificial Sequence: Synthetic oligonucleotide
augaccucuaccucaccca

SEQ ID NO: 2025440 - RNA, 19 nt, Artificial Sequence
  Description of Artificial Sequence: Synthetic oligonucleotide
ugaccucuaccucacccac

SEQ ID NO: 2025441 - RNA, 19 nt, Artificial Sequence
  Description of Artificial Sequence: Synthetic oligonucleotide
agaggggcggcccacagau

SEQ ID NO: 2025442 - RNA, 19 nt, Artificial Sequence
  Description of Artificial Sequence: Synthetic oligonucleotide
uuguaagggaaggggcacg

SEQ ID NO: 2025443 - RNA, 19 nt, Artificial Sequence
  Description of Artificial Sequence: Synthetic oligonucleotide
aucacggcuaaguggaaau

SEQ ID NO: 2025444 - RNA, 19 nt, Artificial Sequence
  Description of Artificial Sequence: Synthetic oligonucleotide
cuacccucagggcacagug

SEQ ID NO: 2025445 - RNA, 19 nt, Artificial Sequence
  Description of Artificial Sequence: Synthetic oligonucleotide
gaaagugagcccuguuguc

SEQ ID NO: 2025446 - RNA, 19 nt, Artificial Sequence
  Description of Artificial Sequence: Synthetic oligonucleotide
agagcaaauuuaucucuaa

SEQ ID NO: 2025447 - RNA, 19 nt, Artificial Sequence
  Description of Artificial Sequence: Synthetic oligonucleotide
aggguagagccuucuccac

SEQ ID NO: 2025448 - RNA, 19 nt, Artificial Sequence
  Description of Artificial Sequence: Synthetic oligonucleotide
ucgaauccagauccacucu

SEQ ID NO: 2025449 - RNA, 19 nt, Artificial Sequence
  Description of Artificial Sequence: Synthetic oligonucleotide
aaaucaauggaggcugcuu

SEQ ID NO: 2025450 - RNA, 19 nt, Artificial Sequence
  Description of Artificial Sequence: Synthetic oligonucleotide
aacuacugaucacggcuaa

SEQ ID NO: 2025451 - RNA, 19 nt, Artificial Sequence
  Description of Artificial Sequence: Synthetic oligonucleotide
accugucucaacaaugaug

SEQ ID NO: 2025452 - RNA, 19 nt, Artificial Sequence
  Description of Artificial Sequence: Synthetic oligonucleotide
caugggcuucagauaaggc

SEQ ID NO: 2025453 - RNA, 19 nt, Artificial Sequence
  Description of Artificial Sequence: Synthetic oligonucleotide
ucuaccucacccacagcau

SEQ ID NO: 2025454 - RNA, 19 nt, Artificial Sequence
  Description of Artificial Sequence: Synthetic oligonucleotide
cucccgacaaauaauggaa

SEQ ID NO: 2025455 - RNA, 19 nt, Artificial Sequence
  Description of Artificial Sequence: Synthetic oligonucleotide
uuucuaccccucucuaggu

SEQ ID NO: 2025456 - RNA, 19 nt, Artificial Sequence
  Description of Artificial Sequence: Synthetic oligonucleotide
ucugucgaauccagaucca

SEQ ID NO: 2025457 - RNA, 19 nt, Artificial Sequence
  Description of Artificial Sequence: Synthetic oligonucleotide
uuccccgcaucucuaacuc

SEQ ID NO: 2025458 - RNA, 19 nt, Artificial Sequence
  Description of Artificial Sequence: Synthetic oligonucleotide
ugaaaccccagaaccuguc

SEQ ID NO: 2025459 - RNA, 19 nt, Artificial Sequence
  Description of Artificial Sequence: Synthetic oligonucleotide
guauucgucaccacaaucu

SEQ ID NO: 2025460 - RNA, 19 nt, Artificial Sequence
  Description of Artificial Sequence: Synthetic oligonucleotide
cacgauguuaaguccccug

SEQ ID NO: 2025461 - RNA, 19 nt, Artificial Sequence
  Description of Artificial Sequence: Synthetic oligonucleotide
gaaagcauauucugaccua

SEQ ID NO: 2025462 - RNA, 19 nt, Artificial Sequence
  Description of Artificial Sequence: Synthetic oligonucleotide
aagcagugagggagggccc

SEQ ID NO: 2025463 - RNA, 19 nt, Artificial Sequence
  Description of Artificial Sequence: Synthetic oligonucleotide
cuaccccucucuagguugg

SEQ ID NO: 2025464 - RNA, 19 nt, Artificial Sequence
  Description of Artificial Sequence: Synthetic oligonucleotide
aaccugucucaacaaugau

SEQ ID NO: 2025465 - RNA, 19 nt, Artificial Sequence
  Description of Artificial Sequence: Synthetic oligonucleotide
aggugcggauagcagcuuc

SEQ ID NO: 2025466 - RNA, 19 nt, Artificial Sequence
  Description of Artificial Sequence: Synthetic oligonucleotide
ggcgcugauaauccagagg

SEQ ID NO: 2025467 - RNA, 19 nt, Artificial Sequence
  Description of Artificial Sequence: Synthetic oligonucleotide
aggaaaccugaggggaggc

SEQ ID NO: 2025468 - RNA, 19 nt, Artificial Sequence
  Description of Artificial Sequence: Synthetic oligonucleotide
gauuuuccugugcuuaacu

SEQ ID NO: 2025469 - RNA, 19 nt, Artificial Sequence
  Description of Artificial Sequence: Synthetic oligonucleotide
acacgagcggaaaucaaug

SEQ ID NO: 2025470 - RNA, 19 nt, Artificial Sequence
  Description of Artificial Sequence: Synthetic oligonucleotide
gagacugccuccucccgac

SEQ ID NO: 2025471 - RNA, 19 nt, Artificial Sequence
  Description of Artificial Sequence: Synthetic oligonucleotide
uggguccaggugcggauag

SEQ ID NO: 2025472 - RNA, 19 nt, Artificial Sequence
  Description of Artificial Sequence: Synthetic oligonucleotide
gcagggaaaucccugcugc

SEQ ID NO: 2025473 - RNA, 19 nt, Artificial Sequence
  Description of Artificial Sequence: Synthetic oligonucleotide
uuagcggccaggggagagg

SEQ ID NO: 2025474 - RNA, 19 nt, Artificial Sequence
  Description of Artificial Sequence: Synthetic oligonucleotide
accaugaccucuaccucac

SEQ ID NO: 2025475 - RNA, 19 nt, Artificial Sequence
  Description of Artificial Sequence: Synthetic oligonucleotide
gacaaauaauggaagccua

SEQ ID NO: 2025476 - RNA, 19 nt, Artificial Sequence
  Description of Artificial Sequence: Synthetic oligonucleotide
cacucugagcagugguucc

SEQ ID NO: 2025477 - RNA, 19 nt, Artificial Sequence
  Description of Artificial Sequence: Synthetic oligonucleotide
uccagcccuguauucguca

SEQ ID NO: 2025478 - RNA, 19 nt, Artificial Sequence
  Description of Artificial Sequence: Synthetic oligonucleotide
cacuccagcccuguauucg

SEQ ID NO: 2025479 - RNA, 19 nt, Artificial Sequence
  Description of Artificial Sequence: Synthetic oligonucleotide
accauuuccccacuuuguu

SEQ ID NO: 2025480 - RNA, 19 nt, Artificial Sequence
  Description of Artificial Sequence: Synthetic oligonucleotide
ugaagcgcuguagguauac

SEQ ID NO: 2025481 - RNA, 19 nt, Artificial Sequence
  Description of Artificial Sequence: Synthetic oligonucleotide
ggaaagcauauucugaccu

SEQ ID NO: 2025482 - RNA, 19 nt, Artificial Sequence
  Description of Artificial Sequence: Synthetic oligonucleotide
ugcggauagcagcuucaga

SEQ ID NO: 2025483 - RNA, 19 nt, Artificial Sequence
  Description of Artificial Sequence: Synthetic oligonucleotide
acgcaccaugaccucuacc

SEQ ID NO: 2025484 - RNA, 19 nt, Artificial Sequence
  Description of Artificial Sequence: Synthetic oligonucleotide
uguccacacaaggguagag

SEQ ID NO: 2025485 - RNA, 19 nt, Artificial Sequence
  Description of Artificial Sequence: Synthetic oligonucleotide
auugcaucugacggaugag

SEQ ID NO: 2025486 - RNA, 19 nt, Artificial Sequence
  Description of Artificial Sequence: Synthetic oligonucleotide
cugcuuagcggccagggga

SEQ ID NO: 2025487 - RNA, 19 nt, Artificial Sequence
  Description of Artificial Sequence: Synthetic oligonucleotide
gggcgcucuacccucaggg

SEQ ID NO: 2025488 - RNA, 19 nt, Artificial Sequence
  Description of Artificial Sequence: Synthetic oligonucleotide
gcuuaacuacugaucacgg

SEQ ID NO: 2025489 - RNA, 19 nt, Artificial Sequence
  Description of Artificial Sequence: Synthetic oligonucleotide
cugugcuggcacuccaagc

SEQ ID NO: 2025490 - RNA, 19 nt, Artificial Sequence
  Description of Artificial Sequence: Synthetic oligonucleotide
ccacagauugcaucugacg

SEQ ID NO: 2025491 - RNA, 19 nt, Artificial Sequence
  Description of Artificial Sequence: Synthetic oligonucleotide
guuguaagggaaggggcac

SEQ ID NO: 2025492 - RNA, 19 nt, Artificial Sequence
  Description of Artificial Sequence: Synthetic oligonucleotide
cccgacaaauaauggaagc

SEQ ID NO: 2025493 - RNA, 19 nt, Artificial Sequence
  Description of Artificial Sequence: Synthetic oligonucleotide
caagcauucuacugaagcu

SEQ ID NO: 2025494 - RNA, 19 nt, Artificial Sequence
  Description of Artificial Sequence: Synthetic oligonucleotide
cuucccuccuagaaaguga

SEQ ID NO: 2025495 - RNA, 19 nt, Artificial Sequence
  Description of Artificial Sequence: Synthetic oligonucleotide
gauccacucugagcagugg

SEQ ID NO: 2025496 - RNA, 19 nt, Artificial Sequence
  Description of Artificial Sequence: Synthetic oligonucleotide
uguuugcuucuagcaggcg

SEQ ID NO: 2025497 - RNA, 19 nt, Artificial Sequence
  Description of Artificial Sequence: Synthetic oligonucleotide
uuccccacuuuguugcuau

SEQ ID NO: 2025498 - RNA, 19 nt, Artificial Sequence
  Description of Artificial Sequence: Synthetic oligonucleotide
gaggccugaagcgcuguag

SEQ ID NO: 2025499 - RNA, 19 nt, Artificial Sequence
  Description of Artificial Sequence: Synthetic oligonucleotide
caccaugaccucuaccuca

SEQ ID NO: 2025500 - RNA, 19 nt, Artificial Sequence
  Description of Artificial Sequence: Synthetic oligonucleotide
acacagggcgcucuacccu

SEQ ID NO: 2025501 - RNA, 19 nt, Artificial Sequence
  Description of Artificial Sequence: Synthetic oligonucleotide
cauagccgaagucugucga

SEQ ID NO: 2025502 - RNA, 19 nt, Artificial Sequence
  Description of Artificial Sequence: Synthetic oligonucleotide
cagaaucaauggcaucgac

SEQ ID NO: 2025503 - RNA, 19 nt, Artificial Sequence
  Description of Artificial Sequence: Synthetic oligonucleotide
ccgacaaauaauggaagcc

SEQ ID NO: 2025504 - RNA, 19 nt, Artificial Sequence
  Description of Artificial Sequence: Synthetic oligonucleotide
aggcgcugauaauccagag

SEQ ID NO: 2025505 - RNA, 19 nt, Artificial Sequence
  Description of Artificial Sequence: Synthetic oligonucleotide
cuauucccuacaccccaag

SEQ ID NO: 2025506 - RNA, 19 nt, Artificial Sequence
  Description of Artificial Sequence: Synthetic oligonucleotide
auagccgaagucugucgaa

SEQ ID NO: 2025507 - RNA, 19 nt, Artificial Sequence
  Description of Artificial Sequence: Synthetic oligonucleotide
guccacacaaggguagagc

SEQ ID NO: 2025508 - RNA, 19 nt, Artificial Sequence
  Description of Artificial Sequence: Synthetic oligonucleotide
ucgucaccacaaucugaag

SEQ ID NO: 2025509 - RNA, 19 nt, Artificial Sequence
  Description of Artificial Sequence: Synthetic oligonucleotide
gugcuuaacuacugaucac

SEQ ID NO: 2025510 - RNA, 19 nt, Artificial Sequence
  Description of Artificial Sequence: Synthetic oligonucleotide
uggcaucgaccacgggagg

SEQ ID NO: 2025511 - RNA, 19 nt, Artificial Sequence
  Description of Artificial Sequence: Synthetic oligonucleotide
cagaauuuccagauuucua

SEQ ID NO: 2025512 - RNA, 19 nt, Artificial Sequence
  Description of Artificial Sequence: Synthetic oligonucleotide
accacaaucugaagagacu

SEQ ID NO: 2025513 - RNA, 19 nt, Artificial Sequence
  Description of Artificial Sequence: Synthetic oligonucleotide
gcauagccgaagucugucg

SEQ ID NO: 2025514 - RNA, 19 nt, Artificial Sequence
  Description of Artificial Sequence: Synthetic oligonucleotide
ucuagcaggcgcugauaau

SEQ ID NO: 2025515 - RNA, 19 nt, Artificial Sequence
  Description of Artificial Sequence: Synthetic oligonucleotide
cccacuuuguugcuauucc

SEQ ID NO: 2025516 - RNA, 19 nt, Artificial Sequence
  Description of Artificial Sequence: Synthetic oligonucleotide
uagcggccaggggagaggg

SEQ ID NO: 2025517 - RNA, 19 nt, Artificial Sequence
  Description of Artificial Sequence: Synthetic oligonucleotide
aucucuaacucagcuguaa

SEQ ID NO: 2025518 - RNA, 19 nt, Artificial Sequence
  Description of Artificial Sequence: Synthetic oligonucleotide
ggagacuuccugaaacccc

SEQ ID NO: 2025519 - RNA, 19 nt, Artificial Sequence
  Description of Artificial Sequence: Synthetic oligonucleotide
ucacgcaccaugaccucua

SEQ ID NO: 2025520 - RNA, 19 nt, Artificial Sequence
  Description of Artificial Sequence: Synthetic oligonucleotide
cuguugucacgauguuaag

SEQ ID NO: 2025521 - RNA, 19 nt, Artificial Sequence
  Description of Artificial Sequence: Synthetic oligonucleotide
uucuaccccucucuagguu

SEQ ID NO: 2025522 - RNA, 19 nt, Artificial Sequence
  Description of Artificial Sequence: Synthetic oligonucleotide
gagagcaaauuuaucucua

SEQ ID NO: 2025523 - RNA, 19 nt, Artificial Sequence
  Description of Artificial Sequence: Synthetic oligonucleotide
gaaaucccugcugcuuccc

SEQ ID NO: 2025524 - RNA, 19 nt, Artificial Sequence
  Description of Artificial Sequence: Synthetic oligonucleotide
ggaaaucccugcugcuucc

SEQ ID NO: 2025525 - RNA, 19 nt, Artificial Sequence
  Description of Artificial Sequence: Synthetic oligonucleotide
ccaagagcuuggcaggugc

SEQ ID NO: 2025526 - RNA, 19 nt, Artificial Sequence
  Description of Artificial Sequence: Synthetic oligonucleotide
cacuuuguugcuauucccu

SEQ ID NO: 2025527 - RNA, 19 nt, Artificial Sequence
  Description of Artificial Sequence: Synthetic oligonucleotide
auuuccccacuuuguugcu

SEQ ID NO: 2025528 - RNA, 19 nt, Artificial Sequence
  Description of Artificial Sequence: Synthetic oligonucleotide
cagagagcucccuucccuc

SEQ ID NO: 2025529 - RNA, 19 nt, Artificial Sequence
  Description of Artificial Sequence: Synthetic oligonucleotide
aaacacgagcggaaaucaa

SEQ ID NO: 2025530 - RNA, 19 nt, Artificial Sequence
  Description of Artificial Sequence: Synthetic oligonucleotide
auucgucaccacaaucuga

SEQ ID NO: 2025531 - RNA, 19 nt, Artificial Sequence
  Description of Artificial Sequence: Synthetic oligonucleotide
cacagggcgcucuacccuc

SEQ ID NO: 2025532 - RNA, 19 nt, Artificial Sequence
  Description of Artificial Sequence: Synthetic oligonucleotide
gaagcgcuguagguauacc

SEQ ID NO: 2025533 - RNA, 19 nt, Artificial Sequence
  Description of Artificial Sequence: Synthetic oligonucleotide
acggcuaaguggaaauccu

SEQ ID NO: 2025534 - RNA, 19 nt, Artificial Sequence
  Description of Artificial Sequence: Synthetic oligonucleotide
cuuagcggccaggggagag

SEQ ID NO: 2025535 - RNA, 19 nt, Artificial Sequence
  Description of Artificial Sequence: Synthetic oligonucleotide
agcuguaaggcggcuucag

SEQ ID NO: 2025536 - RNA, 19 nt, Artificial Sequence
  Description of Artificial Sequence: Synthetic oligonucleotide
cugucgaauccagauccac

SEQ ID NO: 2025537 - RNA, 19 nt, Artificial Sequence
  Description of Artificial Sequence: Synthetic oligonucleotide
caagggauuuuccugugcu

SEQ ID NO: 2025538 - RNA, 19 nt, Artificial Sequence
  Description of Artificial Sequence: Synthetic oligonucleotide
agguuggagagcaaauuua

SEQ ID NO: 2025539 - RNA, 19 nt, Artificial Sequence
  Description of Artificial Sequence: Synthetic oligonucleotide
agcgcuguagguauaccaa

SEQ ID NO: 2025540 - RNA, 19 nt, Artificial Sequence
  Description of Artificial Sequence: Synthetic oligonucleotide
cccucucuagguuggagag

SEQ ID NO: 2025541 - RNA, 19 nt, Artificial Sequence
  Description of Artificial Sequence: Synthetic oligonucleotide
cuauaaacacgagcggaaa

SEQ ID NO: 2025542 - RNA, 19 nt, Artificial Sequence
  Description of Artificial Sequence: Synthetic oligonucleotide
gguucccaaccauuucccc

SEQ ID NO: 2025543 - RNA, 19 nt, Artificial Sequence
  Description of Artificial Sequence: Synthetic oligonucleotide
gaagucugucgaauccaga

SEQ ID NO: 2025544 - RNA, 19 nt, Artificial Sequence
  Description of Artificial Sequence: Synthetic oligonucleotide
ggcucuguuguaagggaag

SEQ ID NO: 2025545 - RNA, 19 nt, Artificial Sequence
  Description of Artificial Sequence: Synthetic oligonucleotide
gaaaccccagaaccugucu

SEQ ID NO: 2025546 - RNA, 19 nt, Artificial Sequence
  Description of Artificial Sequence: Synthetic oligonucleotide
gcgcuguagguauaccaag

SEQ ID NO: 2025547 - RNA, 19 nt, Artificial Sequence
  Description of Artificial Sequence: Synthetic oligonucleotide
gaucacggcuaaguggaaa

SEQ ID NO: 2025548 - RNA, 19 nt, Artificial Sequence
  Description of Artificial Sequence: Synthetic oligonucleotide
uccccgcaucucuaacuca

SEQ ID NO: 2025549 - RNA, 19 nt, Artificial Sequence
  Description of Artificial Sequence: Synthetic oligonucleotide
ccuauaaacacgagcggaa

SEQ ID NO: 2025550 - RNA, 19 nt, Artificial Sequence
  Description of Artificial Sequence: Synthetic oligonucleotide
ggcaucgaccacgggaggg

SEQ ID NO: 2025551 - RNA, 19 nt, Artificial Sequence
  Description of Artificial Sequence: Synthetic oligonucleotide
uagccgaagucugucgaau

SEQ ID NO: 2025552 - RNA, 19 nt, Artificial Sequence
  Description of Artificial Sequence: Synthetic oligonucleotide
ugaucacggcuaaguggaa

SEQ ID NO: 2025553 - RNA, 19 nt, Artificial Sequence
  Description of Artificial Sequence: Synthetic oligonucleotide
ucacggcuaaguggaaauc

SEQ ID NO: 2025554 - RNA, 19 nt, Artificial Sequence
  Description of Artificial Sequence: Synthetic oligonucleotide
gcugagaaugggugaaaga

SEQ ID NO: 2025555 - RNA, 19 nt, Artificial Sequence
  Description of Artificial Sequence: Synthetic oligonucleotide
agggcgcucuacccucagg

SEQ ID NO: 2025556 - RNA, 19 nt, Artificial Sequence
  Description of Artificial Sequence: Synthetic oligonucleotide
gguauaccaagagcuuggc

SEQ ID NO: 2025557 - RNA, 19 nt, Artificial Sequence
  Description of Artificial Sequence: Synthetic oligonucleotide
gcugcuuagcggccagggg

SEQ ID NO: 2025558 - RNA, 19 nt, Artificial Sequence
  Description of Artificial Sequence: Synthetic oligonucleotide
ucacgauguuaaguccccu

SEQ ID NO: 2025559 - RNA, 19 nt, Artificial Sequence
  Description of Artificial Sequence: Synthetic oligonucleotide
uucuccugugcuggcacuc

SEQ ID NO: 2025560 - RNA, 19 nt, Artificial Sequence
  Description of Artificial Sequence: Synthetic oligonucleotide
gcaagggauuuuccugugc

SEQ ID NO: 2025561 - RNA, 19 nt, Artificial Sequence
  Description of Artificial Sequence: Synthetic oligonucleotide
cagcccuguauucgucacc

SEQ ID NO: 2025562 - RNA, 19 nt, Artificial Sequence
  Description of Artificial Sequence: Synthetic oligonucleotide
gggcccaaggaagaguagc

SEQ ID NO: 2025563 - RNA, 19 nt, Artificial Sequence
  Description of Artificial Sequence: Synthetic oligonucleotide
gauaauccagaggccugaa

SEQ ID NO: 2025564 - RNA, 19 nt, Artificial Sequence
  Description of Artificial Sequence: Synthetic oligonucleotide
acugccuccucccgacaaa

SEQ ID NO: 2025565 - RNA, 19 nt, Artificial Sequence
  Description of Artificial Sequence: Synthetic oligonucleotide
gcaucgaccacgggagggg

SEQ ID NO: 2025566 - RNA, 19 nt, Artificial Sequence
  Description of Artificial Sequence: Synthetic oligonucleotide
uugcuucuagcaggcgcug

SEQ ID NO: 2025567 - RNA, 19 nt, Artificial Sequence
  Description of Artificial Sequence: Synthetic oligonucleotide
accuagugagaaagaaaau

SEQ ID NO: 2025568 - RNA, 19 nt, Artificial Sequence
  Description of Artificial Sequence: Synthetic oligonucleotide
gcuaaguggaaauccuaua

SEQ ID NO: 2025569 - RNA, 19 nt, Artificial Sequence
  Description of Artificial Sequence: Synthetic oligonucleotide
gcugauaauccagaggccu

SEQ ID NO: 2025570 - RNA, 19 nt, Artificial Sequence
  Description of Artificial Sequence: Synthetic oligonucleotide
ggcugcuuagcggccaggg

SEQ ID NO: 2025571 - RNA, 19 nt, Artificial Sequence
  Description of Artificial Sequence: Synthetic oligonucleotide
ugcuucuagcaggcgcuga

SEQ ID NO: 2025572 - RNA, 19 nt, Artificial Sequence
  Description of Artificial Sequence: Synthetic oligonucleotide
ccuaggaaaccugagggga

SEQ ID NO: 2025573 - RNA, 19 nt, Artificial Sequence
  Description of Artificial Sequence: Synthetic oligonucleotide
ccucccgacaaauaaugga

SEQ ID NO: 2025574 - RNA, 19 nt, Artificial Sequence
  Description of Artificial Sequence: Synthetic oligonucleotide
ggaaaucaauggaggcugc

SEQ ID NO: 2025575 - RNA, 19 nt, Artificial Sequence
  Description of Artificial Sequence: Synthetic oligonucleotide
guuaaguccccuguggcuu

SEQ ID NO: 2025576 - RNA, 19 nt, Artificial Sequence
  Description of Artificial Sequence: Synthetic oligonucleotide
cucuagguuggagagcaaa

SEQ ID NO: 2025577 - RNA, 19 nt, Artificial Sequence
  Description of Artificial Sequence: Synthetic oligonucleotide
ggcaagggauuuuccugug

SEQ ID NO: 2025578 - RNA, 19 nt, Artificial Sequence
  Description of Artificial Sequence: Synthetic oligonucleotide
gggugaaagaccaggcaga

SEQ ID NO: 2025579 - RNA, 19 nt, Artificial Sequence
  Description of Artificial Sequence: Synthetic oligonucleotide
gacggaugagggaagcagu

SEQ ID NO: 2025580 - RNA, 19 nt, Artificial Sequence
  Description of Artificial Sequence: Synthetic oligonucleotide
ggaagccuaggaaaccuga

SEQ ID NO: 2025581 - RNA, 19 nt, Artificial Sequence
  Description of Artificial Sequence: Synthetic oligonucleotide
cuccuagaaagugagcccu

SEQ ID NO: 2025582 - RNA, 19 nt, Artificial Sequence
  Description of Artificial Sequence: Synthetic oligonucleotide
caggcagaacuggagacaa

SEQ ID NO: 2025583 - RNA, 19 nt, Artificial Sequence
  Description of Artificial Sequence: Synthetic oligonucleotide
cagauuucuaacagagguu

SEQ ID NO: 2025584 - RNA, 19 nt, Artificial Sequence
  Description of Artificial Sequence: Synthetic oligonucleotide
caaaaguggcucuguugua

SEQ ID NO: 2025585 - RNA, 19 nt, Artificial Sequence
  Description of Artificial Sequence: Synthetic oligonucleotide
gugaaagaccaggcagaac

SEQ ID NO: 2025586 - RNA, 19 nt, Artificial Sequence
  Description of Artificial Sequence: Synthetic oligonucleotide
ggauuuuccugugcuuaac

SEQ ID NO: 2025587 - RNA, 19 nt, Artificial Sequence
  Description of Artificial Sequence: Synthetic oligonucleotide
cuaccucacccacagcaua

SEQ ID NO: 2025588 - RNA, 19 nt, Artificial Sequence
  Description of Artificial Sequence: Synthetic oligonucleotide
ggguagagccuucuccaca

SEQ ID NO: 2025589 - RNA, 19 nt, Artificial Sequence
  Description of Artificial Sequence: Synthetic oligonucleotide
cuuccccgcaucucuaacu

SEQ ID NO: 2025590 - RNA, 19 nt, Artificial Sequence
  Description of Artificial Sequence: Synthetic oligonucleotide
gagaggggcggcccacaga

SEQ ID NO: 2025591 - RNA, 19 nt, Artificial Sequence
  Description of Artificial Sequence: Synthetic oligonucleotide
accccucucuagguuggag

SEQ ID NO: 2025592 - RNA, 19 nt, Artificial Sequence
  Description of Artificial Sequence: Synthetic oligonucleotide
cuccagcccuguauucguc

SEQ ID NO: 2025593 - RNA, 19 nt, Artificial Sequence
  Description of Artificial Sequence: Synthetic oligonucleotide
gugagcccuguugucacga

SEQ ID NO: 2025594 - RNA, 19 nt, Artificial Sequence
  Description of Artificial Sequence: Synthetic oligonucleotide
agcucccuucccuccuaga

SEQ ID NO: 2025595 - RNA, 19 nt, Artificial Sequence
  Description of Artificial Sequence: Synthetic oligonucleotide
cugaaaccccagaaccugu

SEQ ID NO: 2025596 - RNA, 19 nt, Artificial Sequence
  Description of Artificial Sequence: Synthetic oligonucleotide
cagagguucccaaccauuu

SEQ ID NO: 2025597 - RNA, 19 nt, Artificial Sequence
  Description of Artificial Sequence: Synthetic oligonucleotide
gguuggagagcaaauuuau

SEQ ID NO: 2025598 - RNA, 19 nt, Artificial Sequence
  Description of Artificial Sequence: Synthetic oligonucleotide
agauugcaucugacggaug

SEQ ID NO: 2025599 - RNA, 19 nt, Artificial Sequence
  Description of Artificial Sequence: Synthetic oligonucleotide
guagguauaccaagagcuu

SEQ ID NO: 2025600 - RNA, 19 nt, Artificial Sequence
  Description of Artificial Sequence: Synthetic oligonucleotide
gcucccuucccuccuagaa

SEQ ID NO: 2025601 - RNA, 19 nt, Artificial Sequence
  Description of Artificial Sequence: Synthetic oligonucleotide
cacgcaccaugaccucuac

SEQ ID NO: 2025602 - RNA, 19 nt, Artificial Sequence
  Description of Artificial Sequence: Synthetic oligonucleotide
agacugccuccucccgaca

SEQ ID NO: 2025603 - RNA, 19 nt, Artificial Sequence
  Description of Artificial Sequence: Synthetic oligonucleotide
cagauugcaucugacggau

SEQ ID NO: 2025604 - RNA, 19 nt, Artificial Sequence
  Description of Artificial Sequence: Synthetic oligonucleotide
ggcggcuucagagcugcug

SEQ ID NO: 2025605 - RNA, 19 nt, Artificial Sequence
  Description of Artificial Sequence: Synthetic oligonucleotide
cacacaaggguagagccuu

SEQ ID NO: 2025606 - RNA, 19 nt, Artificial Sequence
  Description of Artificial Sequence: Synthetic oligonucleotide
cuagguuggagagcaaauu

SEQ ID NO: 2025607 - RNA, 19 nt, Artificial Sequence
  Description of Artificial Sequence: Synthetic oligonucleotide
gcagaaucaauggcaucga

SEQ ID NO: 2025608 - RNA, 19 nt, Artificial Sequence
  Description of Artificial Sequence: Synthetic oligonucleotide
cgcugauaauccagaggcc

SEQ ID NO: 2025609 - RNA, 19 nt, Artificial Sequence
  Description of Artificial Sequence: Synthetic oligonucleotide
caggaaguggagacuuccu

SEQ ID NO: 2025610 - RNA, 19 nt, Artificial Sequence
  Description of Artificial Sequence: Synthetic oligonucleotide
ccuacaccccaaggcaggg

SEQ ID NO: 2025611 - RNA, 19 nt, Artificial Sequence
  Description of Artificial Sequence: Synthetic oligonucleotide
caucucuaacucagcugua

SEQ ID NO: 2025612 - RNA, 19 nt, Artificial Sequence
  Description of Artificial Sequence: Synthetic oligonucleotide
ccugaggggaggcaggaaa

SEQ ID NO: 2025613 - RNA, 19 nt, Artificial Sequence
  Description of Artificial Sequence: Synthetic oligonucleotide
gcggaaaucaauggaggcu

SEQ ID NO: 2025614 - RNA, 19 nt, Artificial Sequence
  Description of Artificial Sequence: Synthetic oligonucleotide
cgcucuacccucagggcac

SEQ ID NO: 2025615 - RNA, 19 nt, Artificial Sequence
  Description of Artificial Sequence: Synthetic oligonucleotide
gggguggcaagggauuuuc

SEQ ID NO: 2025616 - RNA, 19 nt, Artificial Sequence
  Description of Artificial Sequence: Synthetic oligonucleotide
gcuuccccgcaucucuaac

SEQ ID NO: 2025617 - RNA, 19 nt, Artificial Sequence
  Description of Artificial Sequence: Synthetic oligonucleotide
cagggcgcucuacccucag

SEQ ID NO: 2025618 - RNA, 19 nt, Artificial Sequence
  Description of Artificial Sequence: Synthetic oligonucleotide
cuguauucgucaccacaau

SEQ ID NO: 2025619 - RNA, 19 nt, Artificial Sequence
  Description of Artificial Sequence: Synthetic oligonucleotide
uaccccucucuagguugga

SEQ ID NO: 2025620 - RNA, 19 nt, Artificial Sequence
  Description of Artificial Sequence: Synthetic oligonucleotide
cgcuguagguauaccaaga

SEQ ID NO: 2025621 - RNA, 19 nt, Artificial Sequence
  Description of Artificial Sequence: Synthetic oligonucleotide
ccccucucuagguuggaga

SEQ ID NO: 2025622 - RNA, 19 nt, Artificial Sequence
  Description of Artificial Sequence: Synthetic oligonucleotide
acgguggguccaggugcgg

SEQ ID NO: 2025623 - RNA, 19 nt, Artificial Sequence
  Description of Artificial Sequence: Synthetic oligonucleotide
gcuucagauaaggccaacu

SEQ ID NO: 2025624 - RNA, 19 nt, Artificial Sequence
  Description of Artificial Sequence: Synthetic oligonucleotide
cuagaaagugagcccuguu

SEQ ID NO: 2025625 - RNA, 19 nt, Artificial Sequence
  Description of Artificial Sequence: Synthetic oligonucleotide
cuucuagcaggcgcugaua

SEQ ID NO: 2025626 - RNA, 19 nt, Artificial Sequence
  Description of Artificial Sequence: Synthetic oligonucleotide
ggggaggcaggaaagcaua

SEQ ID NO: 2025627 - RNA, 19 nt, Artificial Sequence
  Description of Artificial Sequence: Synthetic oligonucleotide
uccccacuuuguugcuauu

SEQ ID NO: 2025628 - RNA, 19 nt, Artificial Sequence
  Description of Artificial Sequence: Synthetic oligonucleotide
cgacaaauaauggaagccu

SEQ ID NO: 2025629 - RNA, 19 nt, Artificial Sequence
  Description of Artificial Sequence: Synthetic oligonucleotide
cagauccacucugagcagu

SEQ ID NO: 2025630 - RNA, 19 nt, Artificial Sequence
  Description of Artificial Sequence: Synthetic oligonucleotide
cugaagcgcuguagguaua

SEQ ID NO: 2025631 - RNA, 19 nt, Artificial Sequence
  Description of Artificial Sequence: Synthetic oligonucleotide
acagggcgcucuacccuca

SEQ ID NO: 2025632 - RNA, 19 nt, Artificial Sequence
  Description of Artificial Sequence: Synthetic oligonucleotide
ccaggugcggauagcagcu

SEQ ID NO: 2025633 - RNA, 19 nt, Artificial Sequence
  Description of Artificial Sequence: Synthetic oligonucleotide
cuacaccccaaggcaggga

SEQ ID NO: 2025634 - RNA, 19 nt, Artificial Sequence
  Description of Artificial Sequence: Synthetic oligonucleotide
gcuucuagcaggcgcugau

SEQ ID NO: 2025635 - RNA, 19 nt, Artificial Sequence
  Description of Artificial Sequence: Synthetic oligonucleotide
ccccagaaccugucucaac

SEQ ID NO: 2025636 - RNA, 19 nt, Artificial Sequence
  Description of Artificial Sequence: Synthetic oligonucleotide
cugcuuccccgcaucucua

SEQ ID NO: 2025637 - RNA, 19 nt, Artificial Sequence
  Description of Artificial Sequence: Synthetic oligonucleotide
accugaggggaggcaggaa

SEQ ID NO: 2025638 - RNA, 19 nt, Artificial Sequence
  Description of Artificial Sequence: Synthetic oligonucleotide
caccccaaggcagggaaau

SEQ ID NO: 2025639 - RNA, 19 nt, Artificial Sequence
  Description of Artificial Sequence: Synthetic oligonucleotide
gguggguccaggugcggau

SEQ ID NO: 2025640 - RNA, 19 nt, Artificial Sequence
  Description of Artificial Sequence: Synthetic oligonucleotide
ccuguucaugggcuucaga

SEQ ID NO: 2025641 - RNA, 19 nt, Artificial Sequence
  Description of Artificial Sequence: Synthetic oligonucleotide
gcugguacuucagccuucu

SEQ ID NO: 2025642 - RNA, 19 nt, Artificial Sequence
  Description of Artificial Sequence: Synthetic oligonucleotide
cugucucaacaaugaugau

SEQ ID NO: 2025643 - RNA, 19 nt, Artificial Sequence
  Description of Artificial Sequence: Synthetic oligonucleotide
ccacacaaggguagagccu

SEQ ID NO: 2025644 - RNA, 19 nt, Artificial Sequence
  Description of Artificial Sequence: Synthetic oligonucleotide
cugcugcuuccccgcaucu

SEQ ID NO: 2025645 - RNA, 19 nt, Artificial Sequence
  Description of Artificial Sequence: Synthetic oligonucleotide
ccuccucccgacaaauaau

SEQ ID NO: 2025646 - RNA, 19 nt, Artificial Sequence
  Description of Artificial Sequence: Synthetic oligonucleotide
cucagcuguaaggcggcuu

SEQ ID NO: 2025647 - RNA, 19 nt, Artificial Sequence
  Description of Artificial Sequence: Synthetic oligonucleotide
cccuguggcuucacuggaa

SEQ ID NO: 2025648 - RNA, 19 nt, Artificial Sequence
  Description of Artificial Sequence: Synthetic oligonucleotide
cggcuaaguggaaauccua

SEQ ID NO: 2025649 - RNA, 19 nt, Artificial Sequence
  Description of Artificial Sequence: Synthetic oligonucleotide
gcuuagcggccaggggaga

SEQ ID NO: 2025650 - RNA, 19 nt, Artificial Sequence
  Description of Artificial Sequence: Synthetic oligonucleotide
cagcuucagagagcucccu

SEQ ID NO: 2025651 - RNA, 19 nt, Artificial Sequence
  Description of Artificial Sequence: Synthetic oligonucleotide
gggcacgguggguccaggu

SEQ ID NO: 2025652 - RNA, 19 nt, Artificial Sequence
  Description of Artificial Sequence: Synthetic oligonucleotide
gcccuguugucacgauguu

SEQ ID NO: 2025653 - RNA, 19 nt, Artificial Sequence
  Description of Artificial Sequence: Synthetic oligonucleotide
gaggggcggcccacagauu

SEQ ID NO: 2025654 - RNA, 19 nt, Artificial Sequence
  Description of Artificial Sequence: Synthetic oligonucleotide
cgguggguccaggugcgga

SEQ ID NO: 2025655 - RNA, 19 nt, Artificial Sequence
  Description of Artificial Sequence: Synthetic oligonucleotide
ggccaacuuccaggaacuu

SEQ ID NO: 2025656 - RNA, 19 nt, Artificial Sequence
  Description of Artificial Sequence: Synthetic oligonucleotide
ggcggcccacagauugcau

SEQ ID NO: 2025657 - RNA, 19 nt, Artificial Sequence
  Description of Artificial Sequence: Synthetic oligonucleotide
aauaaugugcuguuuggcg

SEQ ID NO: 2025658 - RNA, 19 nt, Artificial Sequence
  Description of Artificial Sequence: Synthetic oligonucleotide
agagcauaggcguagaccc

SEQ ID NO: 2025659 - RNA, 19 nt, Artificial Sequence
  Description of Artificial Sequence: Synthetic oligonucleotide
aguuuuaccaguaggaucc

SEQ ID NO: 2025660 - RNA, 19 nt, Artificial Sequence
  Description of Artificial Sequence: Synthetic oligonucleotide
aauucuaacuuucaugacu

SEQ ID NO: 2025661 - RNA, 19 nt, Artificial Sequence
  Description of Artificial Sequence: Synthetic oligonucleotide
gauccauacacacagcugg

SEQ ID NO: 2025662 - RNA, 19 nt, Artificial Sequence
  Description of Artificial Sequence: Synthetic oligonucleotide
aauugaacacauugaauag

SEQ ID NO: 2025663 - RNA, 19 nt, Artificial Sequence
  Description of Artificial Sequence: Synthetic oligonucleotide
uauaauucuaacuuucaug

SEQ ID NO: 2025664 - RNA, 19 nt, Artificial Sequence
  Description of Artificial Sequence: Synthetic oligonucleotide
auuaaacuuaauugaacac

SEQ ID NO: 2025665 - RNA, 19 nt, Artificial Sequence
  Description of Artificial Sequence: Synthetic oligonucleotide
uaauugaacacauugaaua

SEQ ID NO: 2025666 - RNA, 19 nt, Artificial Sequence
  Description of Artificial Sequence: Synthetic oligonucleotide
auaaugugcuguuuggcgc

SEQ ID NO: 2025667 - RNA, 19 nt, Artificial Sequence
  Description of Artificial Sequence: Synthetic oligonucleotide
aaaguuguaagcuuccuau

SEQ ID NO: 2025668 - RNA, 19 nt, Artificial Sequence
  Description of Artificial Sequence: Synthetic oligonucleotide
ucuaguuuuaccaguagga

SEQ ID NO: 2025669 - RNA, 19 nt, Artificial Sequence
  Description of Artificial Sequence: Synthetic oligonucleotide
uuuccaaucuacauuaaac

SEQ ID NO: 2025670 - RNA, 19 nt, Artificial Sequence
  Description of Artificial Sequence: Synthetic oligonucleotide
gaaauaaugugcuguuugg

SEQ ID NO: 2025671 - RNA, 19 nt, Artificial Sequence
  Description of Artificial Sequence: Synthetic oligonucleotide
ucgagaugcuuauagacgg

SEQ ID NO: 2025672 - RNA, 19 nt, Artificial Sequence
  Description of Artificial Sequence: Synthetic oligonucleotide
aaauaaugugcuguuuggc

SEQ ID NO: 2025673 - RNA, 19 nt, Artificial Sequence
  Description of Artificial Sequence: Synthetic oligonucleotide
uuaaacuuaauugaacaca

SEQ ID NO: 2025674 - RNA, 19 nt, Artificial Sequence
  Description of Artificial Sequence: Synthetic oligonucleotide
aaagcgucaagucuaguca

SEQ ID NO: 2025675 - RNA, 19 nt, Artificial Sequence
  Description of Artificial Sequence: Synthetic oligonucleotide
aaugauuuccaaucuacau

SEQ ID NO: 2025676 - RNA, 19 nt, Artificial Sequence
  Description of Artificial Sequence: Synthetic oligonucleotide
uggccuuaaaauuugagga

SEQ ID NO: 2025677 - RNA, 19 nt, Artificial Sequence
  Description of Artificial Sequence: Synthetic oligonucleotide
aacaauacacucauaauga

SEQ ID NO: 2025678 - RNA, 19 nt, Artificial Sequence
  Description of Artificial Sequence: Synthetic oligonucleotide
ucugaaaucaacuccucug

SEQ ID NO: 2025679 - RNA, 19 nt, Artificial Sequence
  Description of Artificial Sequence: Synthetic oligonucleotide
aacaaucagacagaagccg

SEQ ID NO: 2025680 - RNA, 19 nt, Artificial Sequence
  Description of Artificial Sequence: Synthetic oligonucleotide
agcaacgucaccuuuguag

SEQ ID NO: 2025681 - RNA, 19 nt, Artificial Sequence
  Description of Artificial Sequence: Synthetic oligonucleotide
uucuucugcuaccaaagcg

SEQ ID NO: 2025682 - RNA, 19 nt, Artificial Sequence
  Description of Artificial Sequence: Synthetic oligonucleotide
aguuugucaagccuggauc

SEQ ID NO: 2025683 - RNA, 19 nt, Artificial Sequence
  Description of Artificial Sequence: Synthetic oligonucleotide
aaugguuuccaguuggcgu

SEQ ID NO: 2025684 - RNA, 19 nt, Artificial Sequence
  Description of Artificial Sequence: Synthetic oligonucleotide
aauauagauggucuccaca

SEQ ID NO: 2025685 - RNA, 19 nt, Artificial Sequence
  Description of Artificial Sequence: Synthetic oligonucleotide
gaugguuacugucaccacg

SEQ ID NO: 2025686 - RNA, 19 nt, Artificial Sequence
  Description of Artificial Sequence: Synthetic oligonucleotide
uuagaugauuaccuuccgg

SEQ ID NO: 2025687 - RNA, 19 nt, Artificial Sequence
  Description of Artificial Sequence: Synthetic oligonucleotide
aaaguucucuacacuaggc

SEQ ID NO: 2025688 - RNA, 19 nt, Artificial Sequence
  Description of Artificial Sequence: Synthetic oligonucleotide
aaauuugacccauuuuccu

SEQ ID NO: 2025689 - RNA, 19 nt, Artificial Sequence
  Description of Artificial Sequence: Synthetic oligonucleotide
gucaagucuagucaguagg

SEQ ID NO: 2025690 - RNA, 19 nt, Artificial Sequence
  Description of Artificial Sequence: Synthetic oligonucleotide
uuccaaucuacauuaaacu

SEQ ID NO: 2025691 - RNA, 19 nt, Artificial Sequence
  Description of Artificial Sequence: Synthetic oligonucleotide
aagucuagucaguagguca

SEQ ID NO: 2025692 - RNA, 19 nt, Artificial Sequence
  Description of Artificial Sequence: Synthetic oligonucleotide
cuacauuaaacuuaauuga

SEQ ID NO: 2025693 - RNA, 19 nt, Artificial Sequence
  Description of Artificial Sequence: Synthetic oligonucleotide
aacacauugaauagugaag

SEQ ID NO: 2025694 - RNA, 19 nt, Artificial Sequence
  Description of Artificial Sequence: Synthetic oligonucleotide
agaacauucagcaacguca

SEQ ID NO: 2025695 - RNA, 19 nt, Artificial Sequence
  Description of Artificial Sequence: Synthetic oligonucleotide
uuuuccggacucaaaaucu

SEQ ID NO: 2025696 - RNA, 19 nt, Artificial Sequence
  Description of Artificial Sequence: Synthetic oligonucleotide
cuccauuucaauauagaug

SEQ ID NO: 2025697 - RNA, 19 nt, Artificial Sequence
  Description of Artificial Sequence: Synthetic oligonucleotide
uuuagaugauuaccuuccg

SEQ ID NO: 2025698 - RNA, 19 nt, Artificial Sequence
  Description of Artificial Sequence: Synthetic oligonucleotide
uaaagaaaucacuuccaca

SEQ ID NO: 2025699 - RNA, 19 nt, Artificial Sequence
  Description of Artificial Sequence: Synthetic oligonucleotide
guaggauccauguaaguug

SEQ ID NO: 2025700 - RNA, 19 nt, Artificial Sequence
  Description of Artificial Sequence: Synthetic oligonucleotide
ugucgucucauuuacaaaa

SEQ ID NO: 2025701 - RNA, 19 nt, Artificial Sequence
  Description of Artificial Sequence: Synthetic oligonucleotide
uuuaccaguaggauccaug

SEQ ID NO: 2025702 - RNA, 19 nt, Artificial Sequence
  Description of Artificial Sequence: Synthetic oligonucleotide
uuaauugaacacauugaau

SEQ ID NO: 2025703 - RNA, 19 nt, Artificial Sequence
  Description of Artificial Sequence: Synthetic oligonucleotide
uagcuuuagaugauuaccu

SEQ ID NO: 2025704 - RNA, 19 nt, Artificial Sequence
  Description of Artificial Sequence: Synthetic oligonucleotide
auucuaacuuucaugacuc

SEQ ID NO: 2025705 - RNA, 19 nt, Artificial Sequence
  Description of Artificial Sequence: Synthetic oligonucleotide
uacaguuugucaagccugg

SEQ ID NO: 2025706 - RNA, 19 nt, Artificial Sequence
  Description of Artificial Sequence: Synthetic oligonucleotide
aaguucucuacacuaggcu

SEQ ID NO: 2025707 - RNA, 19 nt, Artificial Sequence
  Description of Artificial Sequence: Synthetic oligonucleotide
uccuauaauucuaacuuuc

SEQ ID NO: 2025708 - RNA, 19 nt, Artificial Sequence
  Description of Artificial Sequence: Synthetic oligonucleotide
auugacacgacgucagcag

SEQ ID NO: 2025709 - RNA, 19 nt, Artificial Sequence
  Description of Artificial Sequence: Synthetic oligonucleotide
acauuaaacuuaauugaac

SEQ ID NO: 2025710 - RNA, 19 nt, Artificial Sequence
  Description of Artificial Sequence: Synthetic oligonucleotide
uucuuuuccggacucaaaa

SEQ ID NO: 2025711 - RNA, 19 nt, Artificial Sequence
  Description of Artificial Sequence: Synthetic oligonucleotide
uguaagcuuccuauaauuc

SEQ ID NO: 2025712 - RNA, 19 nt, Artificial Sequence
  Description of Artificial Sequence: Synthetic oligonucleotide
uugaaaguucucuacacua

SEQ ID NO: 2025713 - RNA, 19 nt, Artificial Sequence
  Description of Artificial Sequence: Synthetic oligonucleotide
cuaacuuucaugacucuuc

SEQ ID NO: 2025714 - RNA, 19 nt, Artificial Sequence
  Description of Artificial Sequence: Synthetic oligonucleotide
uugaugguuacugucacca

SEQ ID NO: 2025715 - RNA, 19 nt, Artificial Sequence
  Description of Artificial Sequence: Synthetic oligonucleotide
aaauucuccauccccuggu

SEQ ID NO: 2025716 - RNA, 19 nt, Artificial Sequence
  Description of Artificial Sequence: Synthetic oligonucleotide
aggaagggcacuucgaaug

SEQ ID NO: 2025717 - RNA, 19 nt, Artificial Sequence
  Description of Artificial Sequence: Synthetic oligonucleotide
ugggaugauugacacgacg

SEQ ID NO: 2025718 - RNA, 19 nt, Artificial Sequence
  Description of Artificial Sequence: Synthetic oligonucleotide
aacuccgcuagcuuuagau

SEQ ID NO: 2025719 - RNA, 19 nt, Artificial Sequence
  Description of Artificial Sequence: Synthetic oligonucleotide
auuucaauauagauggucu

SEQ ID NO: 2025720 - RNA, 19 nt, Artificial Sequence
  Description of Artificial Sequence: Synthetic oligonucleotide
guuacugucaccacgugug

SEQ ID NO: 2025721 - RNA, 19 nt, Artificial Sequence
  Description of Artificial Sequence: Synthetic oligonucleotide
auugaugguuacugucacc

SEQ ID NO: 2025722 - RNA, 19 nt, Artificial Sequence
  Description of Artificial Sequence: Synthetic oligonucleotide
aagcgucaagucuagucag

SEQ ID NO: 2025723 - RNA, 19 nt, Artificial Sequence
  Description of Artificial Sequence: Synthetic oligonucleotide
uguaaguuucacuguuucc

SEQ ID NO: 2025724 - RNA, 19 nt, Artificial Sequence
  Description of Artificial Sequence: Synthetic oligonucleotide
ucuccauuucaauauagau

SEQ ID NO: 2025725 - RNA, 19 nt, Artificial Sequence
  Description of Artificial Sequence: Synthetic oligonucleotide
ucaugacucuucuuuuccg

SEQ ID NO: 2025726 - RNA, 19 nt, Artificial Sequence
  Description of Artificial Sequence: Synthetic oligonucleotide
gagacgaaucuguugauuc

SEQ ID NO: 2025727 - RNA, 19 nt, Artificial Sequence
  Description of Artificial Sequence: Synthetic oligonucleotide
uuaccaguaggauccaugu

SEQ ID NO: 2025728 - RNA, 19 nt, Artificial Sequence
  Description of Artificial Sequence: Synthetic oligonucleotide
acaaucagacagaagccgc

SEQ ID NO: 2025729 - RNA, 19 nt, Artificial Sequence
  Description of Artificial Sequence: Synthetic oligonucleotide
uugguaaagaaaucacuuc

SEQ ID NO: 2025730 - RNA, 19 nt, Artificial Sequence
  Description of Artificial Sequence: Synthetic oligonucleotide
ucaagucuagucaguaggu

SEQ ID NO: 2025731 - RNA, 19 nt, Artificial Sequence
  Description of Artificial Sequence: Synthetic oligonucleotide
guaaagaaaucacuuccac

SEQ ID NO: 2025732 - RNA, 19 nt, Artificial Sequence
  Description of Artificial Sequence: Synthetic oligonucleotide
acgugugugguacaguuug

SEQ ID NO: 2025733 - RNA, 19 nt, Artificial Sequence
  Description of Artificial Sequence: Synthetic oligonucleotide
cuguaauauguucuucugc

SEQ ID NO: 2025734 - RNA, 19 nt, Artificial Sequence
  Description of Artificial Sequence: Synthetic oligonucleotide
uaguuuuaccaguaggauc

SEQ ID NO: 2025735 - RNA, 19 nt, Artificial Sequence
  Description of Artificial Sequence: Synthetic oligonucleotide
uccaaucuacauuaaacuu

SEQ ID NO: 2025736 - RNA, 19 nt, Artificial Sequence
  Description of Artificial Sequence: Synthetic oligonucleotide
uaacuuucaugacucuucu

SEQ ID NO: 2025737 - RNA, 19 nt, Artificial Sequence
  Description of Artificial Sequence: Synthetic oligonucleotide
cucuacacuaggcuguggg

SEQ ID NO: 2025738 - RNA, 19 nt, Artificial Sequence
  Description of Artificial Sequence: Synthetic oligonucleotide
gaugauuaccuuccggguc

SEQ ID NO: 2025739 - RNA, 19 nt, Artificial Sequence
  Description of Artificial Sequence: Synthetic oligonucleotide
aguuguaagcuuccuauaa

SEQ ID NO: 2025740 - RNA, 19 nt, Artificial Sequence
  Description of Artificial Sequence: Synthetic oligonucleotide
acucauaaugaagaguucu

SEQ ID NO: 2025741 - RNA, 19 nt, Artificial Sequence
  Description of Artificial Sequence: Synthetic oligonucleotide
guuggcguguuucagugcc

SEQ ID NO: 2025742 - RNA, 19 nt, Artificial Sequence
  Description of Artificial Sequence: Synthetic oligonucleotide
gauugucccuuccugguug

SEQ ID NO: 2025743 - RNA, 19 nt, Artificial Sequence
  Description of Artificial Sequence: Synthetic oligonucleotide
ucagacagaagccgcaguc

SEQ ID NO: 2025744 - RNA, 19 nt, Artificial Sequence
  Description of Artificial Sequence: Synthetic oligonucleotide
caucgaugagcccugcugg

SEQ ID NO: 2025745 - RNA, 19 nt, Artificial Sequence
  Description of Artificial Sequence: Synthetic oligonucleotide
caaagcgucaagucuaguc

SEQ ID NO: 2025746 - RNA, 19 nt, Artificial Sequence
  Description of Artificial Sequence: Synthetic oligonucleotide
uuucaauauagauggucuc

SEQ ID NO: 2025747 - RNA, 19 nt, Artificial Sequence
  Description of Artificial Sequence: Synthetic oligonucleotide
gucgagaugcuuauagacg

SEQ ID NO: 2025748 - RNA, 19 nt, Artificial Sequence
  Description of Artificial Sequence: Synthetic oligonucleotide
cuuuuccggacucaaaauc

SEQ ID NO: 2025749 - RNA, 19 nt, Artificial Sequence
  Description of Artificial Sequence: Synthetic oligonucleotide
aacuccucugaaauaaugu

SEQ ID NO: 2025750 - RNA, 19 nt, Artificial Sequence
  Description of Artificial Sequence: Synthetic oligonucleotide
ucugaaauaaugugcuguu

SEQ ID NO: 2025751 - RNA, 19 nt, Artificial Sequence
  Description of Artificial Sequence: Synthetic oligonucleotide
uaggauccauguaaguugu

SEQ ID NO: 2025752 - RNA, 19 nt, Artificial Sequence
  Description of Artificial Sequence: Synthetic oligonucleotide
cauuucaauauagaugguc

SEQ ID NO: 2025753 - RNA, 19 nt, Artificial Sequence
  Description of Artificial Sequence: Synthetic oligonucleotide
uaccaaagcgucaagucua

SEQ ID NO: 2025754 - RNA, 19 nt, Artificial Sequence
  Description of Artificial Sequence: Synthetic oligonucleotide
gaaugguuuccaguuggcg

SEQ ID NO: 2025755 - RNA, 19 nt, Artificial Sequence
  Description of Artificial Sequence: Synthetic oligonucleotide
ucggccuuacauuuucugc

SEQ ID NO: 2025756 - RNA, 19 nt, Artificial Sequence
  Description of Artificial Sequence: Synthetic oligonucleotide
uaggcguagacccuggcau

SEQ ID NO: 2025757 - RNA, 19 nt, Artificial Sequence
  Description of Artificial Sequence: Synthetic oligonucleotide
cuuggccuuaaaauuugag

SEQ ID NO: 2025758 - RNA, 19 nt, Artificial Sequence
  Description of Artificial Sequence: Synthetic oligonucleotide
uccguugaaaguucucuac

SEQ ID NO: 2025759 - RNA, 19 nt, Artificial Sequence
  Description of Artificial Sequence: Synthetic oligonucleotide
acuucgaaugguuuccagu

SEQ ID NO: 2025760 - RNA, 19 nt, Artificial Sequence
  Description of Artificial Sequence: Synthetic oligonucleotide
cacauugaauagugaaggc

SEQ ID NO: 2025761 - RNA, 19 nt, Artificial Sequence
  Description of Artificial Sequence: Synthetic oligonucleotide
aaucagacagaagccgcag

SEQ ID NO: 2025762 - RNA, 19 nt, Artificial Sequence
  Description of Artificial Sequence: Synthetic oligonucleotide
uucgaaugguuuccaguug

SEQ ID NO: 2025763 - RNA, 19 nt, Artificial Sequence
  Description of Artificial Sequence: Synthetic oligonucleotide
gaugauugacacgacguca

SEQ ID NO: 2025764 - RNA, 19 nt, Artificial Sequence
  Description of Artificial Sequence: Synthetic oligonucleotide
ucgucucauuuacaaaaca

SEQ ID NO: 2025765 - RNA, 19 nt, Artificial Sequence
  Description of Artificial Sequence: Synthetic oligonucleotide
ugauucuugguucuccauu

SEQ ID NO: 2025766 - RNA, 19 nt, Artificial Sequence
  Description of Artificial Sequence: Synthetic oligonucleotide
uaauucuaacuuucaugac

SEQ ID NO: 2025767 - RNA, 19 nt, Artificial Sequence
  Description of Artificial Sequence: Synthetic oligonucleotide
agaugauuaccuuccgggu

SEQ ID NO: 2025768 - RNA, 19 nt, Artificial Sequence
  Description of Artificial Sequence: Synthetic oligonucleotide
agcagauugucccuuccug

SEQ ID NO: 2025769 - RNA, 19 nt, Artificial Sequence
  Description of Artificial Sequence: Synthetic oligonucleotide
caaauucuccauccccugg

SEQ ID NO: 2025770 - RNA, 19 nt, Artificial Sequence
  Description of Artificial Sequence: Synthetic oligonucleotide
cauugaauagugaaggccu

SEQ ID NO: 2025771 - RNA, 19 nt, Artificial Sequence
  Description of Artificial Sequence: Synthetic oligonucleotide
uguuuggcgcucugagacg

SEQ ID NO: 2025772 - RNA, 19 nt, Artificial Sequence
  Description of Artificial Sequence: Synthetic oligonucleotide
aucaacuccucugaaauaa

SEQ ID NO: 2025773 - RNA, 19 nt, Artificial Sequence
  Description of Artificial Sequence: Synthetic oligonucleotide
uuaccuuccgggucgagau

SEQ ID NO: 2025774 - RNA, 19 nt, Artificial Sequence
  Description of Artificial Sequence: Synthetic oligonucleotide
ucuccgcagaagcaggcgc

SEQ ID NO: 2025775 - RNA, 19 nt, Artificial Sequence
  Description of Artificial Sequence: Synthetic oligonucleotide
uugguucuccauuucaaua

SEQ ID NO: 2025776 - RNA, 19 nt, Artificial Sequence
  Description of Artificial Sequence: Synthetic oligonucleotide
uacacuaggcugugggaug

SEQ ID NO: 2025777 - RNA, 19 nt, Artificial Sequence
  Description of Artificial Sequence: Synthetic oligonucleotide
accuuccgggucgagaugc

SEQ ID NO: 2025778 - RNA, 19 nt, Artificial Sequence
  Description of Artificial Sequence: Synthetic oligonucleotide
ucguggugcaaugaggaug

SEQ ID NO: 2025779 - RNA, 19 nt, Artificial Sequence
  Description of Artificial Sequence: Synthetic oligonucleotide
guacaguuugucaagccug

SEQ ID NO: 2025780 - RNA, 19 nt, Artificial Sequence
  Description of Artificial Sequence: Synthetic oligonucleotide
ucuacacuaggcuguggga

SEQ ID NO: 2025781 - RNA, 19 nt, Artificial Sequence
  Description of Artificial Sequence: Synthetic oligonucleotide
uagaaacuccgcuagcuuu

SEQ ID NO: 2025782 - RNA, 19 nt, Artificial Sequence
  Description of Artificial Sequence: Synthetic oligonucleotide
cuugucgucucauuuacaa

SEQ ID NO: 2025783 - RNA, 19 nt, Artificial Sequence
  Description of Artificial Sequence: Synthetic oligonucleotide
acaauacacucauaaugaa

SEQ ID NO: 2025784 - RNA, 19 nt, Artificial Sequence
  Description of Artificial Sequence: Synthetic oligonucleotide
acagaagccgcagucuccg

SEQ ID NO: 2025785 - RNA, 19 nt, Artificial Sequence
  Description of Artificial Sequence: Synthetic oligonucleotide
aguaggauccauguaaguu

SEQ ID NO: 2025786 - RNA, 19 nt, Artificial Sequence
  Description of Artificial Sequence: Synthetic oligonucleotide
gaagccgcagucuccgcag

SEQ ID NO: 2025787 - RNA, 19 nt, Artificial Sequence
  Description of Artificial Sequence: Synthetic oligonucleotide
augauugacacgacgucag

SEQ ID NO: 2025788 - RNA, 19 nt, Artificial Sequence
  Description of Artificial Sequence: Synthetic oligonucleotide
ucuuuuccggacucaaaau

SEQ ID NO: 2025789 - RNA, 19 nt, Artificial Sequence
  Description of Artificial Sequence: Synthetic oligonucleotide
gaacauucagcaacgucac

SEQ ID NO: 2025790 - RNA, 19 nt, Artificial Sequence
  Description of Artificial Sequence: Synthetic oligonucleotide
ggucgagaugcuuauagac

SEQ ID NO: 2025791 - RNA, 19 nt, Artificial Sequence
  Description of Artificial Sequence: Synthetic oligonucleotide
uucggccuuacauuuucug

SEQ ID NO: 2025792 - RNA, 19 nt, Artificial Sequence
  Description of Artificial Sequence: Synthetic oligonucleotide
ucagcagauugucccuucc

SEQ ID NO: 2025793 - RNA, 19 nt, Artificial Sequence
  Description of Artificial Sequence: Synthetic oligonucleotide
uugacacgacgucagcaga

SEQ ID NO: 2025794 - RNA, 19 nt, Artificial Sequence
  Description of Artificial Sequence: Synthetic oligonucleotide
agacgaaucuguugauucu

SEQ ID NO: 2025795 - RNA, 19 nt, Artificial Sequence
  Description of Artificial Sequence: Synthetic oligonucleotide
cugaaaucaacuccucuga

SEQ ID NO: 2025796 - RNA, 19 nt, Artificial Sequence
  Description of Artificial Sequence: Synthetic oligonucleotide
cagagcauaggcguagacc

SEQ ID NO: 2025797 - RNA, 19 nt, Artificial Sequence
  Description of Artificial Sequence: Synthetic oligonucleotide
guaagcuuccuauaauucu

SEQ ID NO: 2025798 - RNA, 19 nt, Artificial Sequence
  Description of Artificial Sequence: Synthetic oligonucleotide
cacaguccuccguugaaag

SEQ ID NO: 2025799 - RNA, 19 nt, Artificial Sequence
  Description of Artificial Sequence: Synthetic oligonucleotide
uccacuguaauauguucuu

SEQ ID NO: 2025800 - RNA, 19 nt, Artificial Sequence
  Description of Artificial Sequence: Synthetic oligonucleotide
ugauugacacgacgucagc

SEQ ID NO: 2025801 - RNA, 19 nt, Artificial Sequence
  Description of Artificial Sequence: Synthetic oligonucleotide
acuccgcuagcuuuagaug

SEQ ID NO: 2025802 - RNA, 19 nt, Artificial Sequence
  Description of Artificial Sequence: Synthetic oligonucleotide
ugacucuucuuuuccggac

SEQ ID NO: 2025803 - RNA, 19 nt, Artificial Sequence
  Description of Artificial Sequence: Synthetic oligonucleotide
aaguuucacuguuucccaa

SEQ ID NO: 2025804 - RNA, 19 nt, Artificial Sequence
  Description of Artificial Sequence: Synthetic oligonucleotide
cuccgcuagcuuuagauga

SEQ ID NO: 2025805 - RNA, 19 nt, Artificial Sequence
  Description of Artificial Sequence: Synthetic oligonucleotide
uguuucccaaguucuaguu

SEQ ID NO: 2025806 - RNA, 19 nt, Artificial Sequence
  Description of Artificial Sequence: Synthetic oligonucleotide
gcaacgucaccuuuguagc

SEQ ID NO: 2025807 - RNA, 19 nt, Artificial Sequence
  Description of Artificial Sequence: Synthetic oligonucleotide
gaugagcccugcuggaaac

SEQ ID NO: 2025808 - RNA, 19 nt, Artificial Sequence
  Description of Artificial Sequence: Synthetic oligonucleotide
gccaccacuagagacaccg

SEQ ID NO: 2025809 - RNA, 19 nt, Artificial Sequence
  Description of Artificial Sequence: Synthetic oligonucleotide
acacagcuggagaacauuc

SEQ ID NO: 2025810 - RNA, 19 nt, Artificial Sequence
  Description of Artificial Sequence: Synthetic oligonucleotide
caauauagauggucuccac

SEQ ID NO: 2025811 - RNA, 19 nt, Artificial Sequence
  Description of Artificial Sequence: Synthetic oligonucleotide
caguuggcguguuucagug

SEQ ID NO: 2025812 - RNA, 19 nt, Artificial Sequence
  Description of Artificial Sequence: Synthetic oligonucleotide
aaaacacggccaguguccu

SEQ ID NO: 2025813 - RNA, 19 nt, Artificial Sequence
  Description of Artificial Sequence: Synthetic oligonucleotide
auaggcguagacccuggca

SEQ ID NO: 2025814 - RNA, 19 nt, Artificial Sequence
  Description of Artificial Sequence: Synthetic oligonucleotide
acaccggcgccucucgugg

SEQ ID NO: 2025815 - RNA, 19 nt, Artificial Sequence
  Description of Artificial Sequence: Synthetic oligonucleotide
ucuaacuuucaugacucuu

SEQ ID NO: 2025816 - RNA, 19 nt, Artificial Sequence
  Description of Artificial Sequence: Synthetic oligonucleotide
augacucuucuuuuccgga

SEQ ID NO: 2025817 - RNA, 19 nt, Artificial Sequence
  Description of Artificial Sequence: Synthetic oligonucleotide
cuuugguaaagaaaucacu

SEQ ID NO: 2025818 - RNA, 19 nt, Artificial Sequence
  Description of Artificial Sequence: Synthetic oligonucleotide
uccggacucaaaaucuuuu

SEQ ID NO: 2025819 - RNA, 19 nt, Artificial Sequence
  Description of Artificial Sequence: Synthetic oligonucleotide
gccuuaaaauuugaggaag

SEQ ID NO: 2025820 - RNA, 19 nt, Artificial Sequence
  Description of Artificial Sequence: Synthetic oligonucleotide
uggguuucggccuuacauu

SEQ ID NO: 2025821 - RNA, 19 nt, Artificial Sequence
  Description of Artificial Sequence: Synthetic oligonucleotide
uuuccggacucaaaaucuu

SEQ ID NO: 2025822 - RNA, 19 nt, Artificial Sequence
  Description of Artificial Sequence: Synthetic oligonucleotide
ugacacgacgucagcagau

SEQ ID NO: 2025823 - RNA, 19 nt, Artificial Sequence
  Description of Artificial Sequence: Synthetic oligonucleotide
gucccuuccugguuguaag

SEQ ID NO: 2025824 - RNA, 19 nt, Artificial Sequence
  Description of Artificial Sequence: Synthetic oligonucleotide
uuacugucaccacgugugu

SEQ ID NO: 2025825 - RNA, 19 nt, Artificial Sequence
  Description of Artificial Sequence: Synthetic oligonucleotide
ucuagucaguaggucauuc

SEQ ID NO: 2025826 - RNA, 19 nt, Artificial Sequence
  Description of Artificial Sequence: Synthetic oligonucleotide
caacgucaccuuuguagcc

SEQ ID NO: 2025827 - RNA, 19 nt, Artificial Sequence
  Description of Artificial Sequence: Synthetic oligonucleotide
aaacacggccaguguccuc

SEQ ID NO: 2025828 - RNA, 19 nt, Artificial Sequence
  Description of Artificial Sequence: Synthetic oligonucleotide
ucuucuuuuccggacucaa

SEQ ID NO: 2025829 - RNA, 19 nt, Artificial Sequence
  Description of Artificial Sequence: Synthetic oligonucleotide
ugcuaccaaagcgucaagu

SEQ ID NO: 2025830 - RNA, 19 nt, Artificial Sequence
  Description of Artificial Sequence: Synthetic oligonucleotide
gucauucuuugguaaagaa

SEQ ID NO: 2025831 - RNA, 19 nt, Artificial Sequence
  Description of Artificial Sequence: Synthetic oligonucleotide
uuccaguuggcguguuuca

SEQ ID NO: 2025832 - RNA, 19 nt, Artificial Sequence
  Description of Artificial Sequence: Synthetic oligonucleotide
augguuacugucaccacgu

SEQ ID NO: 2025833 - RNA, 19 nt, Artificial Sequence
  Description of Artificial Sequence: Synthetic oligonucleotide
ucaacuccucugaaauaau

SEQ ID NO: 2025834 - RNA, 19 nt, Artificial Sequence
  Description of Artificial Sequence: Synthetic oligonucleotide
gucaccacgugugugguac

SEQ ID NO: 2025835 - RNA, 19 nt, Artificial Sequence
  Description of Artificial Sequence: Synthetic oligonucleotide
cagucuccgcagaagcagg

SEQ ID NO: 2025836 - RNA, 19 nt, Artificial Sequence
  Description of Artificial Sequence: Synthetic oligonucleotide
uccaguuggcguguuucag

SEQ ID NO: 2025837 - RNA, 19 nt, Artificial Sequence
  Description of Artificial Sequence: Synthetic oligonucleotide
uugucgucucauuuacaaa

SEQ ID NO: 2025838 - RNA, 19 nt, Artificial Sequence
  Description of Artificial Sequence: Synthetic oligonucleotide
agcuuuagaugauuaccuu

SEQ ID NO: 2025839 - RNA, 19 nt, Artificial Sequence
  Description of Artificial Sequence: Synthetic oligonucleotide
gcaaugaggaugugcacac

SEQ ID NO: 2025840 - RNA, 19 nt, Artificial Sequence
  Description of Artificial Sequence: Synthetic oligonucleotide
guugaaaguucucuacacu

SEQ ID NO: 2025841 - RNA, 19 nt, Artificial Sequence
  Description of Artificial Sequence: Synthetic oligonucleotide
gcuaccaaagcgucaaguc

SEQ ID NO: 2025842 - RNA, 19 nt, Artificial Sequence
  Description of Artificial Sequence: Synthetic oligonucleotide
gagacaccggcgccucucg

SEQ ID NO: 2025843 - RNA, 19 nt, Artificial Sequence
  Description of Artificial Sequence: Synthetic oligonucleotide
auuaccuuccgggucgaga

SEQ ID NO: 2025844 - RNA, 19 nt, Artificial Sequence
  Description of Artificial Sequence: Synthetic oligonucleotide
cuccgcagaagcaggcgcc

SEQ ID NO: 2025845 - RNA, 19 nt, Artificial Sequence
  Description of Artificial Sequence: Synthetic oligonucleotide
ugaugguuacugucaccac

SEQ ID NO: 2025846 - RNA, 19 nt, Artificial Sequence
  Description of Artificial Sequence: Synthetic oligonucleotide
agucuccgcagaagcaggc

SEQ ID NO: 2025847 - RNA, 19 nt, Artificial Sequence
  Description of Artificial Sequence: Synthetic oligonucleotide
gaaacuccgcuagcuuuag

SEQ ID NO: 2025848 - RNA, 19 nt, Artificial Sequence
  Description of Artificial Sequence: Synthetic oligonucleotide
aggcaguagccacccauug

SEQ ID NO: 2025849 - RNA, 19 nt, Artificial Sequence
  Description of Artificial Sequence: Synthetic oligonucleotide
gacaccggcgccucucgug

SEQ ID NO: 2025850 - RNA, 19 nt, Artificial Sequence
  Description of Artificial Sequence: Synthetic oligonucleotide
ucuccacaguccuccguug

SEQ ID NO: 2025851 - RNA, 19 nt, Artificial Sequence
  Description of Artificial Sequence: Synthetic oligonucleotide
ggcaguagccacccauugg

SEQ ID NO: 2025852 - RNA, 19 nt, Artificial Sequence
  Description of Artificial Sequence: Synthetic oligonucleotide
uuccgggucgagaugcuua

SEQ ID NO: 2025853 - RNA, 19 nt, Artificial Sequence
  Description of Artificial Sequence: Synthetic oligonucleotide
cacuguaauauguucuucu

SEQ ID NO: 2025854 - RNA, 19 nt, Artificial Sequence
  Description of Artificial Sequence: Synthetic oligonucleotide
cacugggaugauugacacg

SEQ ID NO: 2025855 - RNA, 19 nt, Artificial Sequence
  Description of Artificial Sequence: Synthetic oligonucleotide
agcauaggcguagacccug

SEQ ID NO: 2025856 - RNA, 19 nt, Artificial Sequence
  Description of Artificial Sequence: Synthetic oligonucleotide
ucaccuuuguagccaguuu

SEQ ID NO: 2025857 - RNA, 19 nt, Artificial Sequence
  Description of Artificial Sequence: Synthetic oligonucleotide
cacucauaaugaagaguuc

SEQ ID NO: 2025858 - RNA, 19 nt, Artificial Sequence
  Description of Artificial Sequence: Synthetic oligonucleotide
agagacaccggcgccucuc

SEQ ID NO: 2025859 - RNA, 19 nt, Artificial Sequence
  Description of Artificial Sequence: Synthetic oligonucleotide
uccgcuagcuuuagaugau

SEQ ID NO: 2025860 - RNA, 19 nt, Artificial Sequence
  Description of Artificial Sequence: Synthetic oligonucleotide
gucaagccuggauccauac

SEQ ID NO: 2025861 - RNA, 19 nt, Artificial Sequence
  Description of Artificial Sequence: Synthetic oligonucleotide
ccaaucuacauuaaacuua

SEQ ID NO: 2025862 - RNA, 19 nt, Artificial Sequence
  Description of Artificial Sequence: Synthetic oligonucleotide
aguucuaguuuuaccagua

SEQ ID NO: 2025863 - RNA, 19 nt, Artificial Sequence
  Description of Artificial Sequence: Synthetic oligonucleotide
uuccggacucaaaaucuuu

SEQ ID NO: 2025864 - RNA, 19 nt, Artificial Sequence
  Description of Artificial Sequence: Synthetic oligonucleotide
uggcguguuucagugccag

SEQ ID NO: 2025865 - RNA, 19 nt, Artificial Sequence
  Description of Artificial Sequence: Synthetic oligonucleotide
ugguuacugucaccacgug

SEQ ID NO: 2025866 - RNA, 19 nt, Artificial Sequence
  Description of Artificial Sequence: Synthetic oligonucleotide
aagcuuccuauaauucuaa

SEQ ID NO: 2025867 - RNA, 19 nt, Artificial Sequence
  Description of Artificial Sequence: Synthetic oligonucleotide
cuaccaaagcgucaagucu

SEQ ID NO: 2025868 - RNA, 19 nt, Artificial Sequence
  Description of Artificial Sequence: Synthetic oligonucleotide
ugagacgaaucuguugauu

SEQ ID NO: 2025869 - RNA, 19 nt, Artificial Sequence
  Description of Artificial Sequence: Synthetic oligonucleotide
uggcauccacuguaauaug

SEQ ID NO: 2025870 - RNA, 19 nt, Artificial Sequence
  Description of Artificial Sequence: Synthetic oligonucleotide
caagucuagucaguagguc

SEQ ID NO: 2025871 - RNA, 19 nt, Artificial Sequence
  Description of Artificial Sequence: Synthetic oligonucleotide
aagccuggauccauacaca

SEQ ID NO: 2025872 - RNA, 19 nt, Artificial Sequence
  Description of Artificial Sequence: Synthetic oligonucleotide
ugucaagccuggauccaua

SEQ ID NO: 2025873 - RNA, 19 nt, Artificial Sequence
  Description of Artificial Sequence: Synthetic oligonucleotide
ggaugauugacacgacguc

SEQ ID NO: 2025874 - RNA, 19 nt, Artificial Sequence
  Description of Artificial Sequence: Synthetic oligonucleotide
gagaugcuuauagacggaa

SEQ ID NO: 2025875 - RNA, 19 nt, Artificial Sequence
  Description of Artificial Sequence: Synthetic oligonucleotide
gcguguuucagugccagag

SEQ ID NO: 2025876 - RNA, 19 nt, Artificial Sequence
  Description of Artificial Sequence: Synthetic oligonucleotide
gucgucucauuuacaaaac

SEQ ID NO: 2025877 - RNA, 19 nt, Artificial Sequence
  Description of Artificial Sequence: Synthetic oligonucleotide
aaacuccgcuagcuuuaga

SEQ ID NO: 2025878 - RNA, 19 nt, Artificial Sequence
  Description of Artificial Sequence: Synthetic oligonucleotide
gccaguguccuccuuggcc

SEQ ID NO: 2025879 - RNA, 19 nt, Artificial Sequence
  Description of Artificial Sequence: Synthetic oligonucleotide
cucugaaauaaugugcugu

SEQ ID NO: 2025880 - RNA, 19 nt, Artificial Sequence
  Description of Artificial Sequence: Synthetic oligonucleotide
aaggccuugucgucucauu

SEQ ID NO: 2025881 - RNA, 19 nt, Artificial Sequence
  Description of Artificial Sequence: Synthetic oligonucleotide
ucccggcacccguagaaac

SEQ ID NO: 2025882 - RNA, 19 nt, Artificial Sequence
  Description of Artificial Sequence: Synthetic oligonucleotide
ccuuacauuuucugcauca

SEQ ID NO: 2025883 - RNA, 19 nt, Artificial Sequence
  Description of Artificial Sequence: Synthetic oligonucleotide
uaccaguaggauccaugua

SEQ ID NO: 2025884 - RNA, 19 nt, Artificial Sequence
  Description of Artificial Sequence: Synthetic oligonucleotide
acgaaucuguugauucuug

SEQ ID NO: 2025885 - RNA, 19 nt, Artificial Sequence
  Description of Artificial Sequence: Synthetic oligonucleotide
ucccaaguucuaguuuuac

SEQ ID NO: 2025886 - RNA, 19 nt, Artificial Sequence
  Description of Artificial Sequence: Synthetic oligonucleotide
agccaguuucuuccuccag

SEQ ID NO: 2025887 - RNA, 19 nt, Artificial Sequence
  Description of Artificial Sequence: Synthetic oligonucleotide
acccguagaaacuccgcua

SEQ ID NO: 2025888 - RNA, 19 nt, Artificial Sequence
  Description of Artificial Sequence: Synthetic oligonucleotide
gguacaguuugucaagccu

SEQ ID NO: 2025889 - RNA, 19 nt, Artificial Sequence
  Description of Artificial Sequence: Synthetic oligonucleotide
cacagcuggagaacauuca

SEQ ID NO: 2025890 - RNA, 19 nt, Artificial Sequence
  Description of Artificial Sequence: Synthetic oligonucleotide
cccguagaaacuccgcuag

SEQ ID NO: 2025891 - RNA, 19 nt, Artificial Sequence
  Description of Artificial Sequence: Synthetic oligonucleotide
ucucuacacuaggcugugg

SEQ ID NO: 2025892 - RNA, 19 nt, Artificial Sequence
  Description of Artificial Sequence: Synthetic oligonucleotide
uuggcguguuucagugcca

SEQ ID NO: 2025893 - RNA, 19 nt, Artificial Sequence
  Description of Artificial Sequence: Synthetic oligonucleotide
gaaaucacuuccacaaauu

SEQ ID NO: 2025894 - RNA, 19 nt, Artificial Sequence
  Description of Artificial Sequence: Synthetic oligonucleotide
agauugucccuuccugguu

SEQ ID NO: 2025895 - RNA, 19 nt, Artificial Sequence
  Description of Artificial Sequence: Synthetic oligonucleotide
ggccuuaaaauuugaggaa

SEQ ID NO: 2025896 - RNA, 19 nt, Artificial Sequence
  Description of Artificial Sequence: Synthetic oligonucleotide
aucaucgaugagcccugcu

SEQ ID NO: 2025897 - RNA, 19 nt, Artificial Sequence
  Description of Artificial Sequence: Synthetic oligonucleotide
caaugaggaugugcacacg

SEQ ID NO: 2025898 - RNA, 19 nt, Artificial Sequence
  Description of Artificial Sequence: Synthetic oligonucleotide
guuuggcgcucugagacga

SEQ ID NO: 2025899 - RNA, 19 nt, Artificial Sequence
  Description of Artificial Sequence: Synthetic oligonucleotide
uggcgcucugagacgaauc

SEQ ID NO: 2025900 - RNA, 19 nt, Artificial Sequence
  Description of Artificial Sequence: Synthetic oligonucleotide
uccgggucgagaugcuuau

SEQ ID NO: 2025901 - RNA, 19 nt, Artificial Sequence
  Description of Artificial Sequence: Synthetic oligonucleotide
ccacuagagacaccggcgc

SEQ ID NO: 2025902 - RNA, 19 nt, Artificial Sequence
  Description of Artificial Sequence: Synthetic oligonucleotide
cuaggcugugggaugugga

SEQ ID NO: 2025903 - RNA, 19 nt, Artificial Sequence
  Description of Artificial Sequence: Synthetic oligonucleotide
gaagcaggcgccaccacua

SEQ ID NO: 2025904 - RNA, 19 nt, Artificial Sequence
  Description of Artificial Sequence: Synthetic oligonucleotide
ugagcccugcuggaaacuc

SEQ ID NO: 2025905 - RNA, 19 nt, Artificial Sequence
  Description of Artificial Sequence: Synthetic oligonucleotide
acacuaggcugugggaugu

SEQ ID NO: 2025906 - RNA, 19 nt, Artificial Sequence
  Description of Artificial Sequence: Synthetic oligonucleotide
uugucaagccuggauccau

SEQ ID NO: 2025907 - RNA, 19 nt, Artificial Sequence
  Description of Artificial Sequence: Synthetic oligonucleotide
auugaauagugaaggccuu

SEQ ID NO: 2025908 - RNA, 19 nt, Artificial Sequence
  Description of Artificial Sequence: Synthetic oligonucleotide
gucuccgcagaagcaggcg

SEQ ID NO: 2025909 - RNA, 19 nt, Artificial Sequence
  Description of Artificial Sequence: Synthetic oligonucleotide
guucucuacacuaggcugu

SEQ ID NO: 2025910 - RNA, 19 nt, Artificial Sequence
  Description of Artificial Sequence: Synthetic oligonucleotide
ggaugugcacacguccucc

SEQ ID NO: 2025911 - RNA, 19 nt, Artificial Sequence
  Description of Artificial Sequence: Synthetic oligonucleotide
agaugcuuauagacggaaa

SEQ ID NO: 2025912 - RNA, 19 nt, Artificial Sequence
  Description of Artificial Sequence: Synthetic oligonucleotide
cucauaaugaagaguucuu

SEQ ID NO: 2025913 - RNA, 19 nt, Artificial Sequence
  Description of Artificial Sequence: Synthetic oligonucleotide
cuagucaguaggucauucu

SEQ ID NO: 2025914 - RNA, 19 nt, Artificial Sequence
  Description of Artificial Sequence: Synthetic oligonucleotide
cugcuggaaacuccaggca

SEQ ID NO: 2025915 - RNA, 19 nt, Artificial Sequence
  Description of Artificial Sequence: Synthetic oligonucleotide
cuaguuuuaccaguaggau

SEQ ID NO: 2025916 - RNA, 19 nt, Artificial Sequence
  Description of Artificial Sequence: Synthetic oligonucleotide
ggcacccguagaaacuccg

SEQ ID NO: 2025917 - RNA, 19 nt, Artificial Sequence
  Description of Artificial Sequence: Synthetic oligonucleotide
cugggaugauugacacgac

SEQ ID NO: 2025918 - RNA, 19 nt, Artificial Sequence
  Description of Artificial Sequence: Synthetic oligonucleotide
cuucuuuuccggacucaaa

SEQ ID NO: 2025919 - RNA, 19 nt, Artificial Sequence
  Description of Artificial Sequence: Synthetic oligonucleotide
gaugugcacacguccuccu

SEQ ID NO: 2025920 - RNA, 19 nt, Artificial Sequence
  Description of Artificial Sequence: Synthetic oligonucleotide
uccgcagaagcaggcgcca

SEQ ID NO: 2025921 - RNA, 19 nt, Artificial Sequence
  Description of Artificial Sequence: Synthetic oligonucleotide
ugauuaccuuccgggucga

SEQ ID NO: 2025922 - RNA, 19 nt, Artificial Sequence
  Description of Artificial Sequence: Synthetic oligonucleotide
cgggucgagaugcuuauag

SEQ ID NO: 2025923 - RNA, 19 nt, Artificial Sequence
  Description of Artificial Sequence: Synthetic oligonucleotide
ucaccacgugugugguaca

SEQ ID NO: 2025924 - RNA, 19 nt, Artificial Sequence
  Description of Artificial Sequence: Synthetic oligonucleotide
cuagagacaccggcgccuc

SEQ ID NO: 2025925 - RNA, 19 nt, Artificial Sequence
  Description of Artificial Sequence: Synthetic oligonucleotide
uuuggcgcucugagacgaa

SEQ ID NO: 2025926 - RNA, 19 nt, Artificial Sequence
  Description of Artificial Sequence: Synthetic oligonucleotide
agcaggcgccaccacuaga

SEQ ID NO: 2025927 - RNA, 19 nt, Artificial Sequence
  Description of Artificial Sequence: Synthetic oligonucleotide
gugggauguggaagggaug

SEQ ID NO: 2025928 - RNA, 19 nt, Artificial Sequence
  Description of Artificial Sequence: Synthetic oligonucleotide
ccucucguggugcaaugag

SEQ ID NO: 2025929 - RNA, 19 nt, Artificial Sequence
  Description of Artificial Sequence: Synthetic oligonucleotide
guagaaacuccgcuagcuu

SEQ ID NO: 2025930 - RNA, 19 nt, Artificial Sequence
  Description of Artificial Sequence: Synthetic oligonucleotide
caccacgugugugguacag

SEQ ID NO: 2025931 - RNA, 19 nt, Artificial Sequence
  Description of Artificial Sequence: Synthetic oligonucleotide
caccaucaucgaugagccc

SEQ ID NO: 2025932 - RNA, 19 nt, Artificial Sequence
  Description of Artificial Sequence: Synthetic oligonucleotide
gauuaccuuccgggucgag

SEQ ID NO: 2025933 - RNA, 19 nt, Artificial Sequence
  Description of Artificial Sequence: Synthetic oligonucleotide
acaguuugucaagccugga

SEQ ID NO: 2025934 - RNA, 19 nt, Artificial Sequence
  Description of Artificial Sequence: Synthetic oligonucleotide
agcgucaagucuagucagu

SEQ ID NO: 2025935 - RNA, 19 nt, Artificial Sequence
  Description of Artificial Sequence: Synthetic oligonucleotide
ggcguagacccuggcaucc

SEQ ID NO: 2025936 - RNA, 19 nt, Artificial Sequence
  Description of Artificial Sequence: Synthetic oligonucleotide
gguuacugucaccacgugu

SEQ ID NO: 2025937 - RNA, 19 nt, Artificial Sequence
  Description of Artificial Sequence: Synthetic oligonucleotide
gacgaaucuguugauucuu

SEQ ID NO: 2025938 - RNA, 19 nt, Artificial Sequence
  Description of Artificial Sequence: Synthetic oligonucleotide
gggucgagaugcuuauaga

SEQ ID NO: 2025939 - RNA, 19 nt, Artificial Sequence
  Description of Artificial Sequence: Synthetic oligonucleotide
uagagacaccggcgccucu

SEQ ID NO: 2025940 - RNA, 19 nt, Artificial Sequence
  Description of Artificial Sequence: Synthetic oligonucleotide
cugcuaccaaagcgucaag

SEQ ID NO: 2025941 - RNA, 19 nt, Artificial Sequence
  Description of Artificial Sequence: Synthetic oligonucleotide
uuggcgcucugagacgaau

SEQ ID NO: 2025942 - RNA, 19 nt, Artificial Sequence
  Description of Artificial Sequence: Synthetic oligonucleotide
ccauacacacagcuggaga

SEQ ID NO: 2025943 - RNA, 19 nt, Artificial Sequence
  Description of Artificial Sequence: Synthetic oligonucleotide
ccgcagucuccgcagaagc

SEQ ID NO: 2025944 - RNA, 19 nt, Artificial Sequence
  Description of Artificial Sequence: Synthetic oligonucleotide
uuugcagcacugggaugau

SEQ ID NO: 2025945 - RNA, 19 nt, Artificial Sequence
  Description of Artificial Sequence: Synthetic oligonucleotide
cguguuucagugccagagc

SEQ ID NO: 2025946 - RNA, 19 nt, Artificial Sequence
  Description of Artificial Sequence: Synthetic oligonucleotide
cagaagccgcagucuccgc

SEQ ID NO: 2025947 - RNA, 19 nt, Artificial Sequence
  Description of Artificial Sequence: Synthetic oligonucleotide
ugucaccacguguguggua

SEQ ID NO: 2025948 - RNA, 19 nt, Artificial Sequence
  Description of Artificial Sequence: Synthetic oligonucleotide
augagcccugcuggaaacu

SEQ ID NO: 2025949 - RNA, 19 nt, Artificial Sequence
  Description of Artificial Sequence: Synthetic oligonucleotide
cgaaugguuuccaguuggc

SEQ ID NO: 2025950 - RNA, 19 nt, Artificial Sequence
  Description of Artificial Sequence: Synthetic oligonucleotide
uccucccggcacccguaga

SEQ ID NO: 2025951 - RNA, 19 nt, Artificial Sequence
  Description of Artificial Sequence: Synthetic oligonucleotide
uccccugguuuggguuucg

SEQ ID NO: 2025952 - RNA, 19 nt, Artificial Sequence
  Description of Artificial Sequence: Synthetic oligonucleotide
guuuggguuucggccuuac

SEQ ID NO: 2025953 - RNA, 19 nt, Artificial Sequence
  Description of Artificial Sequence: Synthetic oligonucleotide
accacgugugugguacagu

SEQ ID NO: 2025954 - RNA, 19 nt, Artificial Sequence
  Description of Artificial Sequence: Synthetic oligonucleotide
ccguugaaaguucucuaca

SEQ ID NO: 2025955 - RNA, 19 nt, Artificial Sequence
  Description of Artificial Sequence: Synthetic oligonucleotide
cuccucccggcacccguag

SEQ ID NO: 2025956 - RNA, 19 nt, Artificial Sequence
  Description of Artificial Sequence: Synthetic oligonucleotide
caguuugucaagccuggau

SEQ ID NO: 2025957 - RNA, 19 nt, Artificial Sequence
  Description of Artificial Sequence: Synthetic oligonucleotide
gggucggaacugcuucacc

SEQ ID NO: 2025958 - RNA, 19 nt, Artificial Sequence
  Description of Artificial Sequence: Synthetic oligonucleotide
agacaccggcgccucucgu

SEQ ID NO: 2025959 - RNA, 19 nt, Artificial Sequence
  Description of Artificial Sequence: Synthetic oligonucleotide
gcauaggcguagacccugg

SEQ ID NO: 2025960 - RNA, 19 nt, Artificial Sequence
  Description of Artificial Sequence: Synthetic oligonucleotide
ggcauccacuguaauaugu

SEQ ID NO: 2025961 - RNA, 19 nt, Artificial Sequence
  Description of Artificial Sequence: Synthetic oligonucleotide
ggccuugucgucucauuua

SEQ ID NO: 2025962 - RNA, 19 nt, Artificial Sequence
  Description of Artificial Sequence: Synthetic oligonucleotide
ccguagaaacuccgcuagc

SEQ ID NO: 2025963 - RNA, 19 nt, Artificial Sequence
  Description of Artificial Sequence: Synthetic oligonucleotide
gaagggcacuucgaauggu

SEQ ID NO: 2025964 - RNA, 19 nt, Artificial Sequence
  Description of Artificial Sequence: Synthetic oligonucleotide
cucccgaagagcagcugcu

SEQ ID NO: 2025965 - RNA, 19 nt, Artificial Sequence
  Description of Artificial Sequence: Synthetic oligonucleotide
cccgaagagcagcugcuuc

SEQ ID NO: 2025966 - RNA, 19 nt, Artificial Sequence
  Description of Artificial Sequence: Synthetic oligonucleotide
agcucccgaagagcagcug

SEQ ID NO: 2025967 - RNA, 19 nt, Artificial Sequence
  Description of Artificial Sequence: Synthetic oligonucleotide
ccagagcauaggcguagac

SEQ ID NO: 2025968 - RNA, 19 nt, Artificial Sequence
  Description of Artificial Sequence: Synthetic oligonucleotide
gcacccguagaaacuccgc

SEQ ID NO: 2025969 - RNA, 19 nt, Artificial Sequence
  Description of Artificial Sequence: Synthetic oligonucleotide
gucaccuuuguagccaguu

SEQ ID NO: 2025970 - RNA, 19 nt, Artificial Sequence
  Description of Artificial Sequence: Synthetic oligonucleotide
ccacuguaauauguucuuc

SEQ ID NO: 2025971 - RNA, 19 nt, Artificial Sequence
  Description of Artificial Sequence: Synthetic oligonucleotide
cagcagauugucccuuccu

SEQ ID NO: 2025972 - RNA, 19 nt, Artificial Sequence
  Description of Artificial Sequence: Synthetic oligonucleotide
ggccuuacauuuucugcau

SEQ ID NO: 2025973 - RNA, 19 nt, Artificial Sequence
  Description of Artificial Sequence: Synthetic oligonucleotide
gacacgacgucagcagauu

SEQ ID NO: 2025974 - RNA, 19 nt, Artificial Sequence
  Description of Artificial Sequence: Synthetic oligonucleotide
ccuuggccuuaaaauuuga

SEQ ID NO: 2025975 - RNA, 19 nt, Artificial Sequence
  Description of Artificial Sequence: Synthetic oligonucleotide
cacuaggcugugggaugug

SEQ ID NO: 2025976 - RNA, 19 nt, Artificial Sequence
  Description of Artificial Sequence: Synthetic oligonucleotide
gcgcucugagacgaaucug

SEQ ID NO: 2025977 - RNA, 19 nt, Artificial Sequence
  Description of Artificial Sequence: Synthetic oligonucleotide
gaaggccuugucgucucau

SEQ ID NO: 2025978 - RNA, 19 nt, Artificial Sequence
  Description of Artificial Sequence: Synthetic oligonucleotide
ggggucggaacugcuucac

SEQ ID NO: 2025979 - RNA, 19 nt, Artificial Sequence
  Description of Artificial Sequence: Synthetic oligonucleotide
gcuggaaacuccaggcagu

SEQ ID NO: 2025980 - RNA, 19 nt, Artificial Sequence
  Description of Artificial Sequence: Synthetic oligonucleotide
caggcaguagccacccauu

SEQ ID NO: 2025981 - RNA, 19 nt, Artificial Sequence
  Description of Artificial Sequence: Synthetic oligonucleotide
ccuugucgucucauuuaca

SEQ ID NO: 2025982 - RNA, 19 nt, Artificial Sequence
  Description of Artificial Sequence: Synthetic oligonucleotide
ggcuuucaccaucaucgau

SEQ ID NO: 2025983 - RNA, 19 nt, Artificial Sequence
  Description of Artificial Sequence: Synthetic oligonucleotide
gcgucaagucuagucagua

SEQ ID NO: 2025984 - RNA, 19 nt, Artificial Sequence
  Description of Artificial Sequence: Synthetic oligonucleotide
cgcucugagacgaaucugu

SEQ ID NO: 2025985 - RNA, 19 nt, Artificial Sequence
  Description of Artificial Sequence: Synthetic oligonucleotide
ggcguguuucagugccaga

SEQ ID NO: 2025986 - RNA, 19 nt, Artificial Sequence
  Description of Artificial Sequence: Synthetic oligonucleotide
guuuccaguuggcguguuu

SEQ ID NO: 2025987 - RNA, 19 nt, Artificial Sequence
  Description of Artificial Sequence: Synthetic oligonucleotide
ccaguuggcguguuucagu

SEQ ID NO: 2025988 - RNA, 19 nt, Artificial Sequence
  Description of Artificial Sequence: Synthetic oligonucleotide
cacgugugugguacaguuu

SEQ ID NO: 2025989 - RNA, 19 nt, Artificial Sequence
  Description of Artificial Sequence: Synthetic oligonucleotide
cacacagcuggagaacauu

SEQ ID NO: 2025990 - RNA, 19 nt, Artificial Sequence
  Description of Artificial Sequence: Synthetic oligonucleotide
cgagaugcuuauagacgga

SEQ ID NO: 2025991 - RNA, 19 nt, Artificial Sequence
  Description of Artificial Sequence: Synthetic oligonucleotide
gcauccacuguaauauguu

SEQ ID NO: 2025992 - RNA, 19 nt, Artificial Sequence
  Description of Artificial Sequence: Synthetic oligonucleotide
gugccagagcauaggcgua

SEQ ID NO: 2025993 - RNA, 19 nt, Artificial Sequence
  Description of Artificial Sequence: Synthetic oligonucleotide
cagcucccgaagagcagcu

SEQ ID NO: 2025994 - RNA, 19 nt, Artificial Sequence
  Description of Artificial Sequence: Synthetic oligonucleotide
cucccggcacccguagaaa

SEQ ID NO: 2025995 - RNA, 19 nt, Artificial Sequence
  Description of Artificial Sequence: Synthetic oligonucleotide
ccacgugugugguacaguu

SEQ ID NO: 2025996 - RNA, 19 nt, Artificial Sequence
  Description of Artificial Sequence: Synthetic oligonucleotide
gccucucguggugcaauga

SEQ ID NO: 2025997 - RNA, 19 nt, Artificial Sequence
  Description of Artificial Sequence: Synthetic oligonucleotide
cggcacccguagaaacucc

SEQ ID NO: 2025998 - RNA, 19 nt, Artificial Sequence
  Description of Artificial Sequence: Synthetic oligonucleotide
cagcaacgucaccuuugua

SEQ ID NO: 2025999 - RNA, 19 nt, Artificial Sequence
  Description of Artificial Sequence: Synthetic oligonucleotide
cgaugagcccugcuggaaa

SEQ ID NO: 2026000 - RNA, 19 nt, Artificial Sequence
  Description of Artificial Sequence: Synthetic oligonucleotide
gccagagcauaggcguaga

SEQ ID NO: 2026001 - RNA, 19 nt, Artificial Sequence
  Description of Artificial Sequence: Synthetic oligonucleotide
ccccugguuuggguuucgg

SEQ ID NO: 2026002 - RNA, 19 nt, Artificial Sequence
  Description of Artificial Sequence: Synthetic oligonucleotide
cgccucucguggugcaaug

SEQ ID NO: 2026003 - RNA, 19 nt, Artificial Sequence
  Description of Artificial Sequence: Synthetic oligonucleotide
gcguagacccuggcaucca

SEQ ID NO: 2026004 - RNA, 19 nt, Artificial Sequence
  Description of Artificial Sequence: Synthetic oligonucleotide
ccgcagaagcaggcgccac

SEQ ID NO: 2026005 - RNA, 19 nt, Artificial Sequence
  Description of Artificial Sequence: Synthetic oligonucleotide
cuuccgggucgagaugcuu

SEQ ID NO: 2026006 - RNA, 19 nt, Artificial Sequence
  Description of Artificial Sequence: Synthetic oligonucleotide
caccggcgccucucguggu

SEQ ID NO: 2026007 - RNA, 19 nt, Artificial Sequence
  Description of Artificial Sequence: Synthetic oligonucleotide
ccuuccgggucgagaugcu

SEQ ID NO: 2026008 - RNA, 19 nt, Artificial Sequence
  Description of Artificial Sequence: Synthetic oligonucleotide
gcgccucucguggugcaau

SEQ ID NO: 2026009 - RNA, 19 nt, Artificial Sequence
  Description of Artificial Sequence: Synthetic oligonucleotide
gguuuccaguuggcguguu

SEQ ID NO: 2026010 - RNA, 19 nt, Artificial Sequence
  Description of Artificial Sequence: Synthetic oligonucleotide
ccgcuagcuuuagaugauu

SEQ ID NO: 2026011 - RNA, 19 nt, Artificial Sequence
  Description of Artificial Sequence: Synthetic oligonucleotide
cgucaccuuuguagccagu

SEQ ID NO: 2026012 - RNA, 19 nt, Artificial Sequence
  Description of Artificial Sequence: Synthetic oligonucleotide
ccgggucgagaugcuuaua

SEQ ID NO: 2026013 - RNA, 19 nt, Artificial Sequence
  Description of Artificial Sequence: Synthetic oligonucleotide
ucuauaucaaagaaggacg

SEQ ID NO: 2026014 - RNA, 19 nt, Artificial Sequence
  Description of Artificial Sequence: Synthetic oligonucleotide
gaaccuuuuagacuggagg

SEQ ID NO: 2026015 - RNA, 19 nt, Artificial Sequence
  Description of Artificial Sequence: Synthetic oligonucleotide
auaucaaagaaggacgcgc

SEQ ID NO: 2026016 - RNA, 19 nt, Artificial Sequence
  Description of Artificial Sequence: Synthetic oligonucleotide
auaaacagccacaucaggc

SEQ ID NO: 2026017 - RNA, 19 nt, Artificial Sequence
  Description of Artificial Sequence: Synthetic oligonucleotide
aauaugacaggcagugacc

SEQ ID NO: 2026018 - RNA, 19 nt, Artificial Sequence
  Description of Artificial Sequence: Synthetic oligonucleotide
gagucuaccagcuggaacc

SEQ ID NO: 2026019 - RNA, 19 nt, Artificial Sequence
  Description of Artificial Sequence: Synthetic oligonucleotide
guuaggaaguucaugaagg

SEQ ID NO: 2026020 - RNA, 19 nt, Artificial Sequence
  Description of Artificial Sequence: Synthetic oligonucleotide
ucuaguaugguaggaaggg

SEQ ID NO: 2026021 - RNA, 19 nt, Artificial Sequence
  Description of Artificial Sequence: Synthetic oligonucleotide
aacuaacugaaguuggugu

SEQ ID NO: 2026022 - RNA, 19 nt, Artificial Sequence
  Description of Artificial Sequence: Synthetic oligonucleotide
uccaguguagcuuugaaaa

SEQ ID NO: 2026023 - RNA, 19 nt, Artificial Sequence
  Description of Artificial Sequence: Synthetic oligonucleotide
caugaugcguccaacaccc

SEQ ID NO: 2026024 - RNA, 19 nt, Artificial Sequence
  Description of Artificial Sequence: Synthetic oligonucleotide
aaccuuuuagacuggaggu

SEQ ID NO: 2026025 - RNA, 19 nt, Artificial Sequence
  Description of Artificial Sequence: Synthetic oligonucleotide
cacuugaugaaccauagug

SEQ ID NO: 2026026 - RNA, 19 nt, Artificial Sequence
  Description of Artificial Sequence: Synthetic oligonucleotide
uucuaguaugguaggaagg

SEQ ID NO: 2026027 - RNA, 19 nt, Artificial Sequence
  Description of Artificial Sequence: Synthetic oligonucleotide
uuucuaguaugguaggaag

SEQ ID NO: 2026028 - RNA, 19 nt, Artificial Sequence
  Description of Artificial Sequence: Synthetic oligonucleotide
ucgguuaggaaguucauga

SEQ ID NO: 2026029 - RNA, 19 nt, Artificial Sequence
  Description of Artificial Sequence: Synthetic oligonucleotide
uguagcuuugaaaacggcu

SEQ ID NO: 2026030 - RNA, 19 nt, Artificial Sequence
  Description of Artificial Sequence: Synthetic oligonucleotide
uccgucguacaccacaacg

SEQ ID NO: 2026031 - RNA, 19 nt, Artificial Sequence
  Description of Artificial Sequence: Synthetic oligonucleotide
ucuucgguuaggaaguuca

SEQ ID NO: 2026032 - RNA, 19 nt, Artificial Sequence
  Description of Artificial Sequence: Synthetic oligonucleotide
uuaggaaguucaugaaggg

SEQ ID NO: 2026033 - RNA, 19 nt, Artificial Sequence
  Description of Artificial Sequence: Synthetic oligonucleotide
uggaauauggcacgcagcu

SEQ ID NO: 2026034 - RNA, 19 nt, Artificial Sequence
  Description of Artificial Sequence: Synthetic oligonucleotide
cuauaucaaagaaggacgc

SEQ ID NO: 2026035 - RNA, 19 nt, Artificial Sequence
  Description of Artificial Sequence: Synthetic oligonucleotide
aaaacggcuggcucuggac

SEQ ID NO: 2026036 - RNA, 19 nt, Artificial Sequence
  Description of Artificial Sequence: Synthetic oligonucleotide
ucucauaaggcgaagucgu

SEQ ID NO: 2026037 - RNA, 19 nt, Artificial Sequence
  Description of Artificial Sequence: Synthetic oligonucleotide
uagguuuugagaagggagc

SEQ ID NO: 2026038 - RNA, 19 nt, Artificial Sequence
  Description of Artificial Sequence: Synthetic oligonucleotide
uuugaaaacggcuggcucu

SEQ ID NO: 2026039 - RNA, 19 nt, Artificial Sequence
  Description of Artificial Sequence: Synthetic oligonucleotide
agaaggacgcgccaggcac

SEQ ID NO: 2026040 - RNA, 19 nt, Artificial Sequence
  Description of Artificial Sequence: Synthetic oligonucleotide
aaacuacccagguugucuc

SEQ ID NO: 2026041 - RNA, 19 nt, Artificial Sequence
  Description of Artificial Sequence: Synthetic oligonucleotide
ugcggaaccacuccgacca

SEQ ID NO: 2026042 - RNA, 19 nt, Artificial Sequence
  Description of Artificial Sequence: Synthetic oligonucleotide
ugcucauagguuuugagaa

SEQ ID NO: 2026043 - RNA, 19 nt, Artificial Sequence
  Description of Artificial Sequence: Synthetic oligonucleotide
aaacggcuggcucuggacg

SEQ ID NO: 2026044 - RNA, 19 nt, Artificial Sequence
  Description of Artificial Sequence: Synthetic oligonucleotide
cucuauaucaaagaaggac

SEQ ID NO: 2026045 - RNA, 19 nt, Artificial Sequence
  Description of Artificial Sequence: Synthetic oligonucleotide
ucuaaaauccugucagucu

SEQ ID NO: 2026046 - RNA, 19 nt, Artificial Sequence
  Description of Artificial Sequence: Synthetic oligonucleotide
uaucaaagaaggacgcgcc

SEQ ID NO: 2026047 - RNA, 19 nt, Artificial Sequence
  Description of Artificial Sequence: Synthetic oligonucleotide
gacugaaccacggaugugg

SEQ ID NO: 2026048 - RNA, 19 nt, Artificial Sequence
  Description of Artificial Sequence: Synthetic oligonucleotide
uuaagcacugacaccgugc

SEQ ID NO: 2026049 - RNA, 19 nt, Artificial Sequence
  Description of Artificial Sequence: Synthetic oligonucleotide
accauuaagcacugacacc

SEQ ID NO: 2026050 - RNA, 19 nt, Artificial Sequence
  Description of Artificial Sequence: Synthetic oligonucleotide
agggcaauaugacaggcag

SEQ ID NO: 2026051 - RNA, 19 nt, Artificial Sequence
  Description of Artificial Sequence: Synthetic oligonucleotide
caauaugacaggcagugac

SEQ ID NO: 2026052 - RNA, 19 nt, Artificial Sequence
  Description of Artificial Sequence: Synthetic oligonucleotide
aaagaaggacgcgccaggc

SEQ ID NO: 2026053 - RNA, 19 nt, Artificial Sequence
  Description of Artificial Sequence: Synthetic oligonucleotide
aaugaggggcugugaaagg

SEQ ID NO: 2026054 - RNA, 19 nt, Artificial Sequence
  Description of Artificial Sequence: Synthetic oligonucleotide
uauaucaaagaaggacgcg

SEQ ID NO: 2026055 - RNA, 19 nt, Artificial Sequence
  Description of Artificial Sequence: Synthetic oligonucleotide
acuaacugaaguuggugug

SEQ ID NO: 2026056 - RNA, 19 nt, Artificial Sequence
  Description of Artificial Sequence: Synthetic oligonucleotide
uuaguggagaccagagccc

SEQ ID NO: 2026057 - RNA, 19 nt, Artificial Sequence
  Description of Artificial Sequence: Synthetic oligonucleotide
uugacugaaccacggaugu

SEQ ID NO: 2026058 - RNA, 19 nt, Artificial Sequence
  Description of Artificial Sequence: Synthetic oligonucleotide
cauguugacugaaccacgg

SEQ ID NO: 2026059 - RNA, 19 nt, Artificial Sequence
  Description of Artificial Sequence: Synthetic oligonucleotide
aacuacccagguugucucc

SEQ ID NO: 2026060 - RNA, 19 nt, Artificial Sequence
  Description of Artificial Sequence: Synthetic oligonucleotide
agaaaaggacacuuuauuu

SEQ ID NO: 2026061 - RNA, 19 nt, Artificial Sequence
  Description of Artificial Sequence: Synthetic oligonucleotide
aucucauaaggcgaagucg

SEQ ID NO: 2026062 - RNA, 19 nt, Artificial Sequence
  Description of Artificial Sequence: Synthetic oligonucleotide
acaacgugugugucguugc

SEQ ID NO: 2026063 - RNA, 19 nt, Artificial Sequence
  Description of Artificial Sequence: Synthetic oligonucleotide
caccauuaagcacugacac

SEQ ID NO: 2026064 - RNA, 19 nt, Artificial Sequence
  Description of Artificial Sequence: Synthetic oligonucleotide
ugugugucguugcugauuc

SEQ ID NO: 2026065 - RNA, 19 nt, Artificial Sequence
  Description of Artificial Sequence: Synthetic oligonucleotide
ucagaugucacuggguggc

SEQ ID NO: 2026066 - RNA, 19 nt, Artificial Sequence
  Description of Artificial Sequence: Synthetic oligonucleotide
auaaggcgaagucgugucc

SEQ ID NO: 2026067 - RNA, 19 nt, Artificial Sequence
  Description of Artificial Sequence: Synthetic oligonucleotide
acggauguggcccgagucc

SEQ ID NO: 2026068 - RNA, 19 nt, Artificial Sequence
  Description of Artificial Sequence: Synthetic oligonucleotide
guagcuuugaaaacggcug

SEQ ID NO: 2026069 - RNA, 19 nt, Artificial Sequence
  Description of Artificial Sequence: Synthetic oligonucleotide
uuaagggaacuaacugaag

SEQ ID NO: 2026070 - RNA, 19 nt, Artificial Sequence
  Description of Artificial Sequence: Synthetic oligonucleotide
ucccagacugcccacguag

SEQ ID NO: 2026071 - RNA, 19 nt, Artificial Sequence
  Description of Artificial Sequence: Synthetic oligonucleotide
gaagcugugacagaucaca

SEQ ID NO: 2026072 - RNA, 19 nt, Artificial Sequence
  Description of Artificial Sequence: Synthetic oligonucleotide
aguccuacgauauccggcu

SEQ ID NO: 2026073 - RNA, 19 nt, Artificial Sequence
  Description of Artificial Sequence: Synthetic oligonucleotide
ccauuaagcacugacaccg

SEQ ID NO: 2026074 - RNA, 19 nt, Artificial Sequence
  Description of Artificial Sequence: Synthetic oligonucleotide
aaagccaucuucgguuagg

SEQ ID NO: 2026075 - RNA, 19 nt, Artificial Sequence
  Description of Artificial Sequence: Synthetic oligonucleotide
uccaguccuacgauauccg

SEQ ID NO: 2026076 - RNA, 19 nt, Artificial Sequence
  Description of Artificial Sequence: Synthetic oligonucleotide
uccgccagccacuuagugg

SEQ ID NO: 2026077 - RNA, 19 nt, Artificial Sequence
  Description of Artificial Sequence: Synthetic oligonucleotide
aacacccgcaggccgggcc

SEQ ID NO: 2026078 - RNA, 19 nt, Artificial Sequence
  Description of Artificial Sequence: Synthetic oligonucleotide
acucacagcaauucuaaaa

SEQ ID NO: 2026079 - RNA, 19 nt, Artificial Sequence
  Description of Artificial Sequence: Synthetic oligonucleotide
uuccugguacucuuugcgg

SEQ ID NO: 2026080 - RNA, 19 nt, Artificial Sequence
  Description of Artificial Sequence: Synthetic oligonucleotide
gacacuuuauuuucuagua

SEQ ID NO: 2026081 - RNA, 19 nt, Artificial Sequence
  Description of Artificial Sequence: Synthetic oligonucleotide
accacuccgaccaggagcc

SEQ ID NO: 2026082 - RNA, 19 nt, Artificial Sequence
  Description of Artificial Sequence: Synthetic oligonucleotide
uugaugaaccauaguggca

SEQ ID NO: 2026083 - RNA, 19 nt, Artificial Sequence
  Description of Artificial Sequence: Synthetic oligonucleotide
accgaaucgacuccgccag

SEQ ID NO: 2026084 - RNA, 19 nt, Artificial Sequence
  Description of Artificial Sequence: Synthetic oligonucleotide
uucuaaaauccugucaguc

SEQ ID NO: 2026085 - RNA, 19 nt, Artificial Sequence
  Description of Artificial Sequence: Synthetic oligonucleotide
acugacaccgugcgauggc

SEQ ID NO: 2026086 - RNA, 19 nt, Artificial Sequence
  Description of Artificial Sequence: Synthetic oligonucleotide
gacgugagggcucagaugu

SEQ ID NO: 2026087 - RNA, 19 nt, Artificial Sequence
  Description of Artificial Sequence: Synthetic oligonucleotide
ugugucguugcugauuccc

SEQ ID NO: 2026088 - RNA, 19 nt, Artificial Sequence
  Description of Artificial Sequence: Synthetic oligonucleotide
ugaugcguccaacacccgc

SEQ ID NO: 2026089 - RNA, 19 nt, Artificial Sequence
  Description of Artificial Sequence: Synthetic oligonucleotide
agaccgaaucgacuccgcc

SEQ ID NO: 2026090 - RNA, 19 nt, Artificial Sequence
  Description of Artificial Sequence: Synthetic oligonucleotide
uugccuaagaggugugaag

SEQ ID NO: 2026091 - RNA, 19 nt, Artificial Sequence
  Description of Artificial Sequence: Synthetic oligonucleotide
ccaaacacacggaacaucc

SEQ ID NO: 2026092 - RNA, 19 nt, Artificial Sequence
  Description of Artificial Sequence: Synthetic oligonucleotide
agaguaccaugaugcgucc

SEQ ID NO: 2026093 - RNA, 19 nt, Artificial Sequence
  Description of Artificial Sequence: Synthetic oligonucleotide
aggacacuuuauuuucuag

SEQ ID NO: 2026094 - RNA, 19 nt, Artificial Sequence
  Description of Artificial Sequence: Synthetic oligonucleotide
uccuacgauauccggcucc

SEQ ID NO: 2026095 - RNA, 19 nt, Artificial Sequence
  Description of Artificial Sequence: Synthetic oligonucleotide
uacgauauccggcuccggu

SEQ ID NO: 2026096 - RNA, 19 nt, Artificial Sequence
  Description of Artificial Sequence: Synthetic oligonucleotide
aaggcgaagucgugucccg

SEQ ID NO: 2026097 - RNA, 19 nt, Artificial Sequence
  Description of Artificial Sequence: Synthetic oligonucleotide
gaacuaacugaaguuggug

SEQ ID NO: 2026098 - RNA, 19 nt, Artificial Sequence
  Description of Artificial Sequence: Synthetic oligonucleotide
ccggagaguaccaugaugc

SEQ ID NO: 2026099 - RNA, 19 nt, Artificial Sequence
  Description of Artificial Sequence: Synthetic oligonucleotide
uuuagacuggagguucucc

SEQ ID NO: 2026100 - RNA, 19 nt, Artificial Sequence
  Description of Artificial Sequence: Synthetic oligonucleotide
agggaacuaacugaaguug

SEQ ID NO: 2026101 - RNA, 19 nt, Artificial Sequence
  Description of Artificial Sequence: Synthetic oligonucleotide
aaagugggccucacugggc

SEQ ID NO: 2026102 - RNA, 19 nt, Artificial Sequence
  Description of Artificial Sequence: Synthetic oligonucleotide
auuaagcacugacaccgug

SEQ ID NO: 2026103 - RNA, 19 nt, Artificial Sequence
  Description of Artificial Sequence: Synthetic oligonucleotide
cauaaggcgaagucguguc

SEQ ID NO: 2026104 - RNA, 19 nt, Artificial Sequence
  Description of Artificial Sequence: Synthetic oligonucleotide
guugacugaaccacggaug

SEQ ID NO: 2026105 - RNA, 19 nt, Artificial Sequence
  Description of Artificial Sequence: Synthetic oligonucleotide
cacuuaguggagaccagag

SEQ ID NO: 2026106 - RNA, 19 nt, Artificial Sequence
  Description of Artificial Sequence: Synthetic oligonucleotide
ugcggcauguggcaaugag

SEQ ID NO: 2026107 - RNA, 19 nt, Artificial Sequence
  Description of Artificial Sequence: Synthetic oligonucleotide
cuuucccugggacacgcgg

SEQ ID NO: 2026108 - RNA, 19 nt, Artificial Sequence
  Description of Artificial Sequence: Synthetic oligonucleotide
auucuaaaauccugucagu

SEQ ID NO: 2026109 - RNA, 19 nt, Artificial Sequence
  Description of Artificial Sequence: Synthetic oligonucleotide
cuuugaaaacggcuggcuc

SEQ ID NO: 2026110 - RNA, 19 nt, Artificial Sequence
  Description of Artificial Sequence: Synthetic oligonucleotide
agccagggcaauaugacag

SEQ ID NO: 2026111 - RNA, 19 nt, Artificial Sequence
  Description of Artificial Sequence: Synthetic oligonucleotide
uaaggcgaagucguguccc

SEQ ID NO: 2026112 - RNA, 19 nt, Artificial Sequence
  Description of Artificial Sequence: Synthetic oligonucleotide
caguccuacgauauccggc

SEQ ID NO: 2026113 - RNA, 19 nt, Artificial Sequence
  Description of Artificial Sequence: Synthetic oligonucleotide
aaggacacuuuauuuucua

SEQ ID NO: 2026114 - RNA, 19 nt, Artificial Sequence
  Description of Artificial Sequence: Synthetic oligonucleotide
ugcgauggccaaacacacg

SEQ ID NO: 2026115 - RNA, 19 nt, Artificial Sequence
  Description of Artificial Sequence: Synthetic oligonucleotide
acacacggaacauccacca

SEQ ID NO: 2026116 - RNA, 19 nt, Artificial Sequence
  Description of Artificial Sequence: Synthetic oligonucleotide
aagaaggacgcgccaggca

SEQ ID NO: 2026117 - RNA, 19 nt, Artificial Sequence
  Description of Artificial Sequence: Synthetic oligonucleotide
cuggaauauggcacgcagc

SEQ ID NO: 2026118 - RNA, 19 nt, Artificial Sequence
  Description of Artificial Sequence: Synthetic oligonucleotide
ugggugcauagaaacuacc

SEQ ID NO: 2026119 - RNA, 19 nt, Artificial Sequence
  Description of Artificial Sequence: Synthetic oligonucleotide
caucucauaaggcgaaguc

SEQ ID NO: 2026120 - RNA, 19 nt, Artificial Sequence
  Description of Artificial Sequence: Synthetic oligonucleotide
ucguugcugauucccagac

SEQ ID NO: 2026121 - RNA, 19 nt, Artificial Sequence
  Description of Artificial Sequence: Synthetic oligonucleotide
ucauaaggcgaagucgugu

SEQ ID NO: 2026122 - RNA, 19 nt, Artificial Sequence
  Description of Artificial Sequence: Synthetic oligonucleotide
acagcaauucuaaaauccu

SEQ ID NO: 2026123 - RNA, 19 nt, Artificial Sequence
  Description of Artificial Sequence: Synthetic oligonucleotide
uccccggagaguaccauga

SEQ ID NO: 2026124 - RNA, 19 nt, Artificial Sequence
  Description of Artificial Sequence: Synthetic oligonucleotide
ccggaagccaccauuaagc

SEQ ID NO: 2026125 - RNA, 19 nt, Artificial Sequence
  Description of Artificial Sequence: Synthetic oligonucleotide
uaccaugaugcguccaaca

SEQ ID NO: 2026126 - RNA, 19 nt, Artificial Sequence
  Description of Artificial Sequence: Synthetic oligonucleotide
aguaccaugaugcguccaa

SEQ ID NO: 2026127 - RNA, 19 nt, Artificial Sequence
  Description of Artificial Sequence: Synthetic oligonucleotide
aacggcuggcucuggacgu

SEQ ID NO: 2026128 - RNA, 19 nt, Artificial Sequence
  Description of Artificial Sequence: Synthetic oligonucleotide
auacucugggugcauagaa

SEQ ID NO: 2026129 - RNA, 19 nt, Artificial Sequence
  Description of Artificial Sequence: Synthetic oligonucleotide
uugaaaacggcuggcucug

SEQ ID NO: 2026130 - RNA, 19 nt, Artificial Sequence
  Description of Artificial Sequence: Synthetic oligonucleotide
uucgguuaggaaguucaug

SEQ ID NO: 2026131 - RNA, 19 nt, Artificial Sequence
  Description of Artificial Sequence: Synthetic oligonucleotide
cugugacagaucacacugg

SEQ ID NO: 2026132 - RNA, 19 nt, Artificial Sequence
  Description of Artificial Sequence: Synthetic oligonucleotide
guagagcacuugaugaacc

SEQ ID NO: 2026133 - RNA, 19 nt, Artificial Sequence
  Description of Artificial Sequence: Synthetic oligonucleotide
gaugaaccauaguggcagc

SEQ ID NO: 2026134 - RNA, 19 nt, Artificial Sequence
  Description of Artificial Sequence: Synthetic oligonucleotide
agcacugacaccgugcgau

SEQ ID NO: 2026135 - RNA, 19 nt, Artificial Sequence
  Description of Artificial Sequence: Synthetic oligonucleotide
ucaucucauaaggcgaagu

SEQ ID NO: 2026136 - RNA, 19 nt, Artificial Sequence
  Description of Artificial Sequence: Synthetic oligonucleotide
guaguccccaaagugggcc

SEQ ID NO: 2026137 - RNA, 19 nt, Artificial Sequence
  Description of Artificial Sequence: Synthetic oligonucleotide
acugaaccacggauguggc

SEQ ID NO: 2026138 - RNA, 19 nt, Artificial Sequence
  Description of Artificial Sequence: Synthetic oligonucleotide
gaccgaaucgacuccgcca

SEQ ID NO: 2026139 - RNA, 19 nt, Artificial Sequence
  Description of Artificial Sequence: Synthetic oligonucleotide
auuuucuaguaugguagga

SEQ ID NO: 2026140 - RNA, 19 nt, Artificial Sequence
  Description of Artificial Sequence: Synthetic oligonucleotide
uuuugagaagggagcgguc

SEQ ID NO: 2026141 - RNA, 19 nt, Artificial Sequence
  Description of Artificial Sequence: Synthetic oligonucleotide
guugucuccgucguacacc

SEQ ID NO: 2026142 - RNA, 19 nt, Artificial Sequence
  Description of Artificial Sequence: Synthetic oligonucleotide
uggacgugagggcucagau

SEQ ID NO: 2026143 - RNA, 19 nt, Artificial Sequence
  Description of Artificial Sequence: Synthetic oligonucleotide
ucauugccuaagaggugug

SEQ ID NO: 2026144 - RNA, 19 nt, Artificial Sequence
  Description of Artificial Sequence: Synthetic oligonucleotide
ucuccgucguacaccacaa

SEQ ID NO: 2026145 - RNA, 19 nt, Artificial Sequence
  Description of Artificial Sequence: Synthetic oligonucleotide
agaaacuacccagguuguc

SEQ ID NO: 2026146 - RNA, 19 nt, Artificial Sequence
  Description of Artificial Sequence: Synthetic oligonucleotide
gaugcguccaacacccgca

SEQ ID NO: 2026147 - RNA, 19 nt, Artificial Sequence
  Description of Artificial Sequence: Synthetic oligonucleotide
ucugugcccagguaccguc

SEQ ID NO: 2026148 - RNA, 19 nt, Artificial Sequence
  Description of Artificial Sequence: Synthetic oligonucleotide
gagaccagagcccgguaga

SEQ ID NO: 2026149 - RNA, 19 nt, Artificial Sequence
  Description of Artificial Sequence: Synthetic oligonucleotide
ggcauguugacugaaccac

SEQ ID NO: 2026150 - RNA, 19 nt, Artificial Sequence
  Description of Artificial Sequence: Synthetic oligonucleotide
ccagguaccguccuugggc

SEQ ID NO: 2026151 - RNA, 19 nt, Artificial Sequence
  Description of Artificial Sequence: Synthetic oligonucleotide
ucuuucccugggacacgcg

SEQ ID NO: 2026152 - RNA, 19 nt, Artificial Sequence
  Description of Artificial Sequence: Synthetic oligonucleotide
cucauaaggcgaagucgug

SEQ ID NO: 2026153 - RNA, 19 nt, Artificial Sequence
  Description of Artificial Sequence: Synthetic oligonucleotide
cacaacgugugugucguug

SEQ ID NO: 2026154 - RNA, 19 nt, Artificial Sequence
  Description of Artificial Sequence: Synthetic oligonucleotide
cacguggcguuccugguac

SEQ ID NO: 2026155 - RNA, 19 nt, Artificial Sequence
  Description of Artificial Sequence: Synthetic oligonucleotide
gaaccauaguggcagcucu

SEQ ID NO: 2026156 - RNA, 19 nt, Artificial Sequence
  Description of Artificial Sequence: Synthetic oligonucleotide
uugggcacgggagucuacc

SEQ ID NO: 2026157 - RNA, 19 nt, Artificial Sequence
  Description of Artificial Sequence: Synthetic oligonucleotide
gacacgcgggucuccgggg

SEQ ID NO: 2026158 - RNA, 19 nt, Artificial Sequence
  Description of Artificial Sequence: Synthetic oligonucleotide
gaaaacggcuggcucugga

SEQ ID NO: 2026159 - RNA, 19 nt, Artificial Sequence
  Description of Artificial Sequence: Synthetic oligonucleotide
gaaggacgcgccaggcacg

SEQ ID NO: 2026160 - RNA, 19 nt, Artificial Sequence
  Description of Artificial Sequence: Synthetic oligonucleotide
agucgugucccggcacucc

SEQ ID NO: 2026161 - RNA, 19 nt, Artificial Sequence
  Description of Artificial Sequence: Synthetic oligonucleotide
guacaccacaacgugugug

SEQ ID NO: 2026162 - RNA, 19 nt, Artificial Sequence
  Description of Artificial Sequence: Synthetic oligonucleotide
auugccuaagaggugugaa

SEQ ID NO: 2026163 - RNA, 19 nt, Artificial Sequence
  Description of Artificial Sequence: Synthetic oligonucleotide
auguugacugaaccacgga

SEQ ID NO: 2026164 - RNA, 19 nt, Artificial Sequence
  Description of Artificial Sequence: Synthetic oligonucleotide
cccaaagugggccucacug

SEQ ID NO: 2026165 - RNA, 19 nt, Artificial Sequence
  Description of Artificial Sequence: Synthetic oligonucleotide
cuaaaauccugucagucuu

SEQ ID NO: 2026166 - RNA, 19 nt, Artificial Sequence
  Description of Artificial Sequence: Synthetic oligonucleotide
aagucgugucccggcacuc

SEQ ID NO: 2026167 - RNA, 19 nt, Artificial Sequence
  Description of Artificial Sequence: Synthetic oligonucleotide
ugacaccgugcgauggcca

SEQ ID NO: 2026168 - RNA, 19 nt, Artificial Sequence
  Description of Artificial Sequence: Synthetic oligonucleotide
cauaguggcagcucugugu

SEQ ID NO: 2026169 - RNA, 19 nt, Artificial Sequence
  Description of Artificial Sequence: Synthetic oligonucleotide
ggagaccagagcccgguag

SEQ ID NO: 2026170 - RNA, 19 nt, Artificial Sequence
  Description of Artificial Sequence: Synthetic oligonucleotide
ggacgcgccaggcacgugg

SEQ ID NO: 2026171 - RNA, 19 nt, Artificial Sequence
  Description of Artificial Sequence: Synthetic oligonucleotide
ccuggaauauggcacgcag

SEQ ID NO: 2026172 - RNA, 19 nt, Artificial Sequence
  Description of Artificial Sequence: Synthetic oligonucleotide
gguuuugagaagggagcgg

SEQ ID NO: 2026173 - RNA, 19 nt, Artificial Sequence
  Description of Artificial Sequence: Synthetic oligonucleotide
cuaagaggugugaagcugu

SEQ ID NO: 2026174 - RNA, 19 nt, Artificial Sequence
  Description of Artificial Sequence: Synthetic oligonucleotide
caucaucucauaaggcgaa

SEQ ID NO: 2026175 - RNA, 19 nt, Artificial Sequence
  Description of Artificial Sequence: Synthetic oligonucleotide
agcccgguagagcacuuga

SEQ ID NO: 2026176 - RNA, 19 nt, Artificial Sequence
  Description of Artificial Sequence: Synthetic oligonucleotide
acagaucacacuggccucu

SEQ ID NO: 2026177 - RNA, 19 nt, Artificial Sequence
  Description of Artificial Sequence: Synthetic oligonucleotide
acgauauccggcuccgguu

SEQ ID NO: 2026178 - RNA, 19 nt, Artificial Sequence
  Description of Artificial Sequence: Synthetic oligonucleotide
ugaaaacggcuggcucugg

SEQ ID NO: 2026179 - RNA, 19 nt, Artificial Sequence
  Description of Artificial Sequence: Synthetic oligonucleotide
gguagagcacuugaugaac

SEQ ID NO: 2026180 - RNA, 19 nt, Artificial Sequence
  Description of Artificial Sequence: Synthetic oligonucleotide
ggcacgggagucuaccagc

SEQ ID NO: 2026181 - RNA, 19 nt, Artificial Sequence
  Description of Artificial Sequence: Synthetic oligonucleotide
cugcggaaccacuccgacc

SEQ ID NO: 2026182 - RNA, 19 nt, Artificial Sequence
  Description of Artificial Sequence: Synthetic oligonucleotide
guuuugagaagggagcggu

SEQ ID NO: 2026183 - RNA, 19 nt, Artificial Sequence
  Description of Artificial Sequence: Synthetic oligonucleotide
cacugacaccgugcgaugg

SEQ ID NO: 2026184 - RNA, 19 nt, Artificial Sequence
  Description of Artificial Sequence: Synthetic oligonucleotide
aagcacugacaccgugcga

SEQ ID NO: 2026185 - RNA, 19 nt, Artificial Sequence
  Description of Artificial Sequence: Synthetic oligonucleotide
caaagccaucuucgguuag

SEQ ID NO: 2026186 - RNA, 19 nt, Artificial Sequence
  Description of Artificial Sequence: Synthetic oligonucleotide
gaaucgacuccgccagcca

SEQ ID NO: 2026187 - RNA, 19 nt, Artificial Sequence
  Description of Artificial Sequence: Synthetic oligonucleotide
accauaguggcagcucugu

SEQ ID NO: 2026188 - RNA, 19 nt, Artificial Sequence
  Description of Artificial Sequence: Synthetic oligonucleotide
cacggauguggcccgaguc

SEQ ID NO: 2026189 - RNA, 19 nt, Artificial Sequence
  Description of Artificial Sequence: Synthetic oligonucleotide
cacuggguggcccuccuuc

SEQ ID NO: 2026190 - RNA, 19 nt, Artificial Sequence
  Description of Artificial Sequence: Synthetic oligonucleotide
ggacacuuuauuuucuagu

SEQ ID NO: 2026191 - RNA, 19 nt, Artificial Sequence
  Description of Artificial Sequence: Synthetic oligonucleotide
ggacacgcgggucuccggg

SEQ ID NO: 2026192 - RNA, 19 nt, Artificial Sequence
  Description of Artificial Sequence: Synthetic oligonucleotide
gugacagaucacacuggcc

SEQ ID NO: 2026193 - RNA, 19 nt, Artificial Sequence
  Description of Artificial Sequence: Synthetic oligonucleotide
agcgguccaguguagcuuu

SEQ ID NO: 2026194 - RNA, 19 nt, Artificial Sequence
  Description of Artificial Sequence: Synthetic oligonucleotide
cugacaccgugcgauggcc

SEQ ID NO: 2026195 - RNA, 19 nt, Artificial Sequence
  Description of Artificial Sequence: Synthetic oligonucleotide
ugauucccagacugcccac

SEQ ID NO: 2026196 - RNA, 19 nt, Artificial Sequence
  Description of Artificial Sequence: Synthetic oligonucleotide
gugcgauggccaaacacac

SEQ ID NO: 2026197 - RNA, 19 nt, Artificial Sequence
  Description of Artificial Sequence: Synthetic oligonucleotide
gaagggagcgguccagugu

SEQ ID NO: 2026198 - RNA, 19 nt, Artificial Sequence
  Description of Artificial Sequence: Synthetic oligonucleotide
agagcacuugaugaaccau

SEQ ID NO: 2026199 - RNA, 19 nt, Artificial Sequence
  Description of Artificial Sequence: Synthetic oligonucleotide
gucguugcugauucccaga

SEQ ID NO: 2026200 - RNA, 19 nt, Artificial Sequence
  Description of Artificial Sequence: Synthetic oligonucleotide
cagaccgaaucgacuccgc

SEQ ID NO: 2026201 - RNA, 19 nt, Artificial Sequence
  Description of Artificial Sequence: Synthetic oligonucleotide
cuaguaugguaggaaggga

SEQ ID NO: 2026202 - RNA, 19 nt, Artificial Sequence
  Description of Artificial Sequence: Synthetic oligonucleotide
ggccuucccacucuuuccc

SEQ ID NO: 2026203 - RNA, 19 nt, Artificial Sequence
  Description of Artificial Sequence: Synthetic oligonucleotide
accuuuuagacuggagguu

SEQ ID NO: 2026204 - RNA, 19 nt, Artificial Sequence
  Description of Artificial Sequence: Synthetic oligonucleotide
uccuggaauauggcacgca

SEQ ID NO: 2026205 - RNA, 19 nt, Artificial Sequence
  Description of Artificial Sequence: Synthetic oligonucleotide
ccuuuuagacuggagguuc

SEQ ID NO: 2026206 - RNA, 19 nt, Artificial Sequence
  Description of Artificial Sequence: Synthetic oligonucleotide
ggaaccuuuuagacuggag

SEQ ID NO: 2026207 - RNA, 19 nt, Artificial Sequence
  Description of Artificial Sequence: Synthetic oligonucleotide
gaagucgugucccggcacu

SEQ ID NO: 2026208 - RNA, 19 nt, Artificial Sequence
  Description of Artificial Sequence: Synthetic oligonucleotide
cuugcggcauguggcaaug

SEQ ID NO: 2026209 - RNA, 19 nt, Artificial Sequence
  Description of Artificial Sequence: Synthetic oligonucleotide
ccgguagagcacuugauga

SEQ ID NO: 2026210 - RNA, 19 nt, Artificial Sequence
  Description of Artificial Sequence: Synthetic oligonucleotide
gaccagagcccgguagagc

SEQ ID NO: 2026211 - RNA, 19 nt, Artificial Sequence
  Description of Artificial Sequence: Synthetic oligonucleotide
gacaccgugcgauggccaa

SEQ ID NO: 2026212 - RNA, 19 nt, Artificial Sequence
  Description of Artificial Sequence: Synthetic oligonucleotide
acuccgaccaggagccguc

SEQ ID NO: 2026213 - RNA, 19 nt, Artificial Sequence
  Description of Artificial Sequence: Synthetic oligonucleotide
ccuaagaggugugaagcug

SEQ ID NO: 2026214 - RNA, 19 nt, Artificial Sequence
  Description of Artificial Sequence: Synthetic oligonucleotide
gcggcauguggcaaugagg

SEQ ID NO: 2026215 - RNA, 19 nt, Artificial Sequence
  Description of Artificial Sequence: Synthetic oligonucleotide
agucuaccagcuggaaccu

SEQ ID NO: 2026216 - RNA, 19 nt, Artificial Sequence
  Description of Artificial Sequence: Synthetic oligonucleotide
gggcauguugacugaacca

SEQ ID NO: 2026217 - RNA, 19 nt, Artificial Sequence
  Description of Artificial Sequence: Synthetic oligonucleotide
gguugucuccgucguacac

SEQ ID NO: 2026218 - RNA, 19 nt, Artificial Sequence
  Description of Artificial Sequence: Synthetic oligonucleotide
guaccguccuugggcacgg

SEQ ID NO: 2026219 - RNA, 19 nt, Artificial Sequence
  Description of Artificial Sequence: Synthetic oligonucleotide
ggcgaagucgugucccggc

SEQ ID NO: 2026220 - RNA, 19 nt, Artificial Sequence
  Description of Artificial Sequence: Synthetic oligonucleotide
cgugcgauggccaaacaca

SEQ ID NO: 2026221 - RNA, 19 nt, Artificial Sequence
  Description of Artificial Sequence: Synthetic oligonucleotide
cuuuuagacuggagguucu

SEQ ID NO: 2026222 - RNA, 19 nt, Artificial Sequence
  Description of Artificial Sequence: Synthetic oligonucleotide
cccgguagagcacuugaug

SEQ ID NO: 2026223 - RNA, 19 nt, Artificial Sequence
  Description of Artificial Sequence: Synthetic oligonucleotide
ccuacgauauccggcuccg

SEQ ID NO: 2026224 - RNA, 19 nt, Artificial Sequence
  Description of Artificial Sequence: Synthetic oligonucleotide
ccaccauuaagcacugaca

SEQ ID NO: 2026225 - RNA, 19 nt, Artificial Sequence
  Description of Artificial Sequence: Synthetic oligonucleotide
gaucacacuggccucucuu

SEQ ID NO: 2026226 - RNA, 19 nt, Artificial Sequence
  Description of Artificial Sequence: Synthetic oligonucleotide
cauacucugggugcauaga

SEQ ID NO: 2026227 - RNA, 19 nt, Artificial Sequence
  Description of Artificial Sequence: Synthetic oligonucleotide
aggcgaagucgugucccgg

SEQ ID NO: 2026228 - RNA, 19 nt, Artificial Sequence
  Description of Artificial Sequence: Synthetic oligonucleotide
cuccgccagccacuuagug

SEQ ID NO: 2026229 - RNA, 19 nt, Artificial Sequence
  Description of Artificial Sequence: Synthetic oligonucleotide
gaguccaguccuacgauau

SEQ ID NO: 2026230 - RNA, 19 nt, Artificial Sequence
  Description of Artificial Sequence: Synthetic oligonucleotide
caccgugcgauggccaaac

SEQ ID NO: 2026231 - RNA, 19 nt, Artificial Sequence
  Description of Artificial Sequence: Synthetic oligonucleotide
ccgccagccacuuagugga

SEQ ID NO: 2026232 - RNA, 19 nt, Artificial Sequence
  Description of Artificial Sequence: Synthetic oligonucleotide
ccguccuugggcacgggag

SEQ ID NO: 2026233 - RNA, 19 nt, Artificial Sequence
  Description of Artificial Sequence: Synthetic oligonucleotide
cuugggcacgggagucuac

SEQ ID NO: 2026234 - RNA, 19 nt, Artificial Sequence
  Description of Artificial Sequence: Synthetic oligonucleotide
uauccggcuccgguucugu

SEQ ID NO: 2026235 - RNA, 19 nt, Artificial Sequence
  Description of Artificial Sequence: Synthetic oligonucleotide
cuacgauauccggcuccgg

SEQ ID NO: 2026236 - RNA, 19 nt, Artificial Sequence
  Description of Artificial Sequence: Synthetic oligonucleotide
gauauccggcuccgguucu

SEQ ID NO: 2026237 - RNA, 19 nt, Artificial Sequence
  Description of Artificial Sequence: Synthetic oligonucleotide
ggcagccagggcaauauga

SEQ ID NO: 2026238 - RNA, 19 nt, Artificial Sequence
  Description of Artificial Sequence: Synthetic oligonucleotide
ucccggcacuccucuauau

SEQ ID NO: 2026239 - RNA, 19 nt, Artificial Sequence
  Description of Artificial Sequence: Synthetic oligonucleotide
gccagaccgaaucgacucc

SEQ ID NO: 2026240 - RNA, 19 nt, Artificial Sequence
  Description of Artificial Sequence: Synthetic oligonucleotide
gugugucguugcugauucc

SEQ ID NO: 2026241 - RNA, 19 nt, Artificial Sequence
  Description of Artificial Sequence: Synthetic oligonucleotide
gugucguugcugauuccca

SEQ ID NO: 2026242 - RNA, 19 nt, Artificial Sequence
  Description of Artificial Sequence: Synthetic oligonucleotide
cgucguacaccacaacgug

SEQ ID NO: 2026243 - RNA, 19 nt, Artificial Sequence
  Description of Artificial Sequence: Synthetic oligonucleotide
gcaaugaggggcugugaaa

SEQ ID NO: 2026244 - RNA, 19 nt, Artificial Sequence
  Description of Artificial Sequence: Synthetic oligonucleotide
auauccggcuccgguucug

SEQ ID NO: 2026245 - RNA, 19 nt, Artificial Sequence
  Description of Artificial Sequence: Synthetic oligonucleotide
uggagaccagagcccggua

SEQ ID NO: 2026246 - RNA, 19 nt, Artificial Sequence
  Description of Artificial Sequence: Synthetic oligonucleotide
ccgugcgauggccaaacac

SEQ ID NO: 2026247 - RNA, 19 nt, Artificial Sequence
  Description of Artificial Sequence: Synthetic oligonucleotide
cacgggagucuaccagcug

SEQ ID NO: 2026248 - RNA, 19 nt, Artificial Sequence
  Description of Artificial Sequence: Synthetic oligonucleotide
uccgaccaggagccgucau

SEQ ID NO: 2026249 - RNA, 19 nt, Artificial Sequence
  Description of Artificial Sequence: Synthetic oligonucleotide
cggagaguaccaugaugcg

SEQ ID NO: 2026250 - RNA, 19 nt, Artificial Sequence
  Description of Artificial Sequence: Synthetic oligonucleotide
uuugcgggccuggcggguc

SEQ ID NO: 2026251 - RNA, 19 nt, Artificial Sequence
  Description of Artificial Sequence: Synthetic oligonucleotide
gaguaccaugaugcgucca

SEQ ID NO: 2026252 - RNA, 19 nt, Artificial Sequence
  Description of Artificial Sequence: Synthetic oligonucleotide
gcacgcagcuccucugggc

SEQ ID NO: 2026253 - RNA, 19 nt, Artificial Sequence
  Description of Artificial Sequence: Synthetic oligonucleotide
augaugcguccaacacccg

SEQ ID NO: 2026254 - RNA, 19 nt, Artificial Sequence
  Description of Artificial Sequence: Synthetic oligonucleotide
gagccgucauaaacagcca

SEQ ID NO: 2026255 - RNA, 19 nt, Artificial Sequence
  Description of Artificial Sequence: Synthetic oligonucleotide
cuccgucguacaccacaac

SEQ ID NO: 2026256 - RNA, 19 nt, Artificial Sequence
  Description of Artificial Sequence: Synthetic oligonucleotide
gcugccagaccgaaucgac

SEQ ID NO: 2026257 - RNA, 19 nt, Artificial Sequence
  Description of Artificial Sequence: Synthetic oligonucleotide
cguuccugguacucuuugc

SEQ ID NO: 2026258 - RNA, 19 nt, Artificial Sequence
  Description of Artificial Sequence: Synthetic oligonucleotide
ugucuccgucguacaccac

SEQ ID NO: 2026259 - RNA, 19 nt, Artificial Sequence
  Description of Artificial Sequence: Synthetic oligonucleotide
ccucuauaucaaagaagga

SEQ ID NO: 2026260 - RNA, 19 nt, Artificial Sequence
  Description of Artificial Sequence: Synthetic oligonucleotide
gcccagguaccguccuugg

SEQ ID NO: 2026261 - RNA, 19 nt, Artificial Sequence
  Description of Artificial Sequence: Synthetic oligonucleotide
gagcccgguagagcacuug

SEQ ID NO: 2026262 - RNA, 19 nt, Artificial Sequence
  Description of Artificial Sequence: Synthetic oligonucleotide
ggaacuaacugaaguuggu

SEQ ID NO: 2026263 - RNA, 19 nt, Artificial Sequence
  Description of Artificial Sequence: Synthetic oligonucleotide
accauacucugggugcaua

SEQ ID NO: 2026264 - RNA, 19 nt, Artificial Sequence
  Description of Artificial Sequence: Synthetic oligonucleotide
ggagaguaccaugaugcgu

SEQ ID NO: 2026265 - RNA, 19 nt, Artificial Sequence
  Description of Artificial Sequence: Synthetic oligonucleotide
cgaaucgacuccgccagcc

SEQ ID NO: 2026266 - RNA, 19 nt, Artificial Sequence
  Description of Artificial Sequence: Synthetic oligonucleotide
ccugcggaaccacuccgac

SEQ ID NO: 2026267 - RNA, 19 nt, Artificial Sequence
  Description of Artificial Sequence: Synthetic oligonucleotide
guccuacgauauccggcuc

SEQ ID NO: 2026268 - RNA, 19 nt, Artificial Sequence
  Description of Artificial Sequence: Synthetic oligonucleotide
acgugagggcucagauguc

SEQ ID NO: 2026269 - RNA, 19 nt, Artificial Sequence
  Description of Artificial Sequence: Synthetic oligonucleotide
cccgaguccaguccuacga

SEQ ID NO: 2026270 - RNA, 19 nt, Artificial Sequence
  Description of Artificial Sequence: Synthetic oligonucleotide
accgugcgauggccaaaca

SEQ ID NO: 2026271 - RNA, 19 nt, Artificial Sequence
  Description of Artificial Sequence: Synthetic oligonucleotide
ucgacuccgccagccacuu

SEQ ID NO: 2026272 - RNA, 19 nt, Artificial Sequence
  Description of Artificial Sequence: Synthetic oligonucleotide
cgauauccggcuccgguuc

SEQ ID NO: 2026273 - RNA, 19 nt, Artificial Sequence
  Description of Artificial Sequence: Synthetic oligonucleotide
gcccgaguccaguccuacg

SEQ ID NO: 2026274 - RNA, 19 nt, Artificial Sequence
  Description of Artificial Sequence: Synthetic oligonucleotide
ccauaguggcagcucugug

SEQ ID NO: 2026275 - RNA, 19 nt, Artificial Sequence
  Description of Artificial Sequence: Synthetic oligonucleotide
uugcggcauguggcaauga

SEQ ID NO: 2026276 - RNA, 19 nt, Artificial Sequence
  Description of Artificial Sequence: Synthetic oligonucleotide
gugcacacucaggccuucc

SEQ ID NO: 2026277 - RNA, 19 nt, Artificial Sequence
  Description of Artificial Sequence: Synthetic oligonucleotide
gugcccugcggaaccacuc

SEQ ID NO: 2026278 - RNA, 19 nt, Artificial Sequence
  Description of Artificial Sequence: Synthetic oligonucleotide
ggagcgguccaguguagcu

SEQ ID NO: 2026279 - RNA, 19 nt, Artificial Sequence
  Description of Artificial Sequence: Synthetic oligonucleotide
gccuaagaggugugaagcu

SEQ ID NO: 2026280 - RNA, 19 nt, Artificial Sequence
  Description of Artificial Sequence: Synthetic oligonucleotide
gcaauaugacaggcaguga

SEQ ID NO: 2026281 - RNA, 19 nt, Artificial Sequence
  Description of Artificial Sequence: Synthetic oligonucleotide
acguggcguuccugguacu

SEQ ID NO: 2026282 - RNA, 19 nt, Artificial Sequence
  Description of Artificial Sequence: Synthetic oligonucleotide
cuucgguuaggaaguucau

SEQ ID NO: 2026283 - RNA, 19 nt, Artificial Sequence
  Description of Artificial Sequence: Synthetic oligonucleotide
gucgugucccggcacuccu

SEQ ID NO: 2026284 - RNA, 19 nt, Artificial Sequence
  Description of Artificial Sequence: Synthetic oligonucleotide
gccacuuaguggagaccag

SEQ ID NO: 2026285 - RNA, 19 nt, Artificial Sequence
  Description of Artificial Sequence: Synthetic oligonucleotide
gcgaagucgugucccggca

SEQ ID NO: 2026286 - RNA, 19 nt, Artificial Sequence
  Description of Artificial Sequence: Synthetic oligonucleotide
cugggacacgcgggucucc

SEQ ID NO: 2026287 - RNA, 19 nt, Artificial Sequence
  Description of Artificial Sequence: Synthetic oligonucleotide
ccucucuuaagggaacuaa

SEQ ID NO: 2026288 - RNA, 19 nt, Artificial Sequence
  Description of Artificial Sequence: Synthetic oligonucleotide
caacgugugugucguugcu

SEQ ID NO: 2026289 - RNA, 19 nt, Artificial Sequence
  Description of Artificial Sequence: Synthetic oligonucleotide
uaccguccuugggcacggg

SEQ ID NO: 2026290 - RNA, 19 nt, Artificial Sequence
  Description of Artificial Sequence: Synthetic oligonucleotide
cauccaccauacucugggu

SEQ ID NO: 2026291 - RNA, 19 nt, Artificial Sequence
  Description of Artificial Sequence: Synthetic oligonucleotide
ccgucguacaccacaacgu

SEQ ID NO: 2026292 - RNA, 19 nt, Artificial Sequence
  Description of Artificial Sequence: Synthetic oligonucleotide
cccggcacuccucuauauc

SEQ ID NO: 2026293 - RNA, 19 nt, Artificial Sequence
  Description of Artificial Sequence: Synthetic oligonucleotide
ucccugggacacgcggguc

SEQ ID NO: 2026294 - RNA, 19 nt, Artificial Sequence
  Description of Artificial Sequence: Synthetic oligonucleotide
gagcgguccaguguagcuu

SEQ ID NO: 2026295 - RNA, 19 nt, Artificial Sequence
  Description of Artificial Sequence: Synthetic oligonucleotide
ggcugccagaccgaaucga

SEQ ID NO: 2026296 - RNA, 19 nt, Artificial Sequence
  Description of Artificial Sequence: Synthetic oligonucleotide
cgucauaaacagccacauc

SEQ ID NO: 2026297 - RNA, 19 nt, Artificial Sequence
  Description of Artificial Sequence: Synthetic oligonucleotide
acaccgugcgauggccaaa

SEQ ID NO: 2026298 - RNA, 19 nt, Artificial Sequence
  Description of Artificial Sequence: Synthetic oligonucleotide
ccacuuaguggagaccaga

SEQ ID NO: 2026299 - RNA, 19 nt, Artificial Sequence
  Description of Artificial Sequence: Synthetic oligonucleotide
ggcucuggacgugagggcu

SEQ ID NO: 2026300 - RNA, 19 nt, Artificial Sequence
  Description of Artificial Sequence: Synthetic oligonucleotide
ugcgggccuggcggguccc

SEQ ID NO: 2026301 - RNA, 19 nt, Artificial Sequence
  Description of Artificial Sequence: Synthetic oligonucleotide
gugugugucguugcugauu

SEQ ID NO: 2026302 - RNA, 19 nt, Artificial Sequence
  Description of Artificial Sequence: Synthetic oligonucleotide
cuacccagguugucuccgu

SEQ ID NO: 2026303 - RNA, 19 nt, Artificial Sequence
  Description of Artificial Sequence: Synthetic oligonucleotide
ggcggguccccggagagua

SEQ ID NO: 2026304 - RNA, 19 nt, Artificial Sequence
  Description of Artificial Sequence: Synthetic oligonucleotide
cgguagagcacuugaugaa

SEQ ID NO: 2026305 - RNA, 19 nt, Artificial Sequence
  Description of Artificial Sequence: Synthetic oligonucleotide
ccgaaucgacuccgccagc

SEQ ID NO: 2026306 - RNA, 19 nt, Artificial Sequence
  Description of Artificial Sequence: Synthetic oligonucleotide
cacccgcaggccgggcccc

SEQ ID NO: 2026307 - RNA, 19 nt, Artificial Sequence
  Description of Artificial Sequence: Synthetic oligonucleotide
gccagccacuuaguggaga

SEQ ID NO: 2026308 - RNA, 19 nt, Artificial Sequence
  Description of Artificial Sequence: Synthetic oligonucleotide
gcacguggcguuccuggua

SEQ ID NO: 2026309 - RNA, 19 nt, Artificial Sequence
  Description of Artificial Sequence: Synthetic oligonucleotide
ccccuugcggcauguggca

SEQ ID NO: 2026310 - RNA, 19 nt, Artificial Sequence
  Description of Artificial Sequence: Synthetic oligonucleotide
ccaguuccggaagccacca

SEQ ID NO: 2026311 - RNA, 19 nt, Artificial Sequence
  Description of Artificial Sequence: Synthetic oligonucleotide
cacuccgaccaggagccgu

SEQ ID NO: 2026312 - RNA, 19 nt, Artificial Sequence
  Description of Artificial Sequence: Synthetic oligonucleotide
ggcacguggcguuccuggu

SEQ ID NO: 2026313 - RNA, 19 nt, Artificial Sequence
  Description of Artificial Sequence: Synthetic oligonucleotide
agagcccgguagagcacuu

SEQ ID NO: 2026314 - RNA, 19 nt, Artificial Sequence
  Description of Artificial Sequence: Synthetic oligonucleotide
cuccgaccaggagccguca

SEQ ID NO: 2026315 - RNA, 19 nt, Artificial Sequence
  Description of Artificial Sequence: Synthetic oligonucleotide
gccuggcggguccccggag

SEQ ID NO: 2026316 - RNA, 19 nt, Artificial Sequence
  Description of Artificial Sequence: Synthetic oligonucleotide
cggguccccggagaguacc

SEQ ID NO: 2026317 - RNA, 19 nt, Artificial Sequence
  Description of Artificial Sequence: Synthetic oligonucleotide
ccgucauaaacagccacau

SEQ ID NO: 2026318 - RNA, 19 nt, Artificial Sequence
  Description of Artificial Sequence: Synthetic oligonucleotide
cgaguccaguccuacgaua

SEQ ID NO: 2026319 - RNA, 19 nt, Artificial Sequence
  Description of Artificial Sequence: Synthetic oligonucleotide
gcacgggagucuaccagcu

SEQ ID NO: 2026320 - RNA, 19 nt, Artificial Sequence
  Description of Artificial Sequence: Synthetic oligonucleotide
ggccuggcggguccccgga

SEQ ID NO: 2026321 - RNA, 19 nt, Artificial Sequence
  Description of Artificial Sequence: Synthetic oligonucleotide
ccgaccaggagccgucaua

SEQ ID NO: 2026322 - RNA, 19 nt, Artificial Sequence
  Description of Artificial Sequence: Synthetic oligonucleotide
ggugcccugcggaaccacu

SEQ ID NO: 2026323 - RNA, 19 nt, Artificial Sequence
  Description of Artificial Sequence: Synthetic oligonucleotide
cuuugcgggccuggcgggu

SEQ ID NO: 2026324 - RNA, 19 nt, Artificial Sequence
  Description of Artificial Sequence: Synthetic oligonucleotide
gcgguccaguguagcuuug

SEQ ID NO: 2026325 - RNA, 19 nt, Artificial Sequence
  Description of Artificial Sequence: Synthetic oligonucleotide
caucuucgguuaggaaguu

SEQ ID NO: 2026326 - RNA, 19 nt, Artificial Sequence
  Description of Artificial Sequence: Synthetic oligonucleotide
ccuugcggcauguggcaau

SEQ ID NO: 2026327 - RNA, 19 nt, Artificial Sequence
  Description of Artificial Sequence: Synthetic oligonucleotide
ccacuccgaccaggagccg

SEQ ID NO: 2026328 - RNA, 19 nt, Artificial Sequence
  Description of Artificial Sequence: Synthetic oligonucleotide
caccauacucugggugcau

SEQ ID NO: 2026329 - RNA, 19 nt, Artificial Sequence
  Description of Artificial Sequence: Synthetic oligonucleotide
ccgaguccaguccuacgau

SEQ ID NO: 2026330 - RNA, 19 nt, Artificial Sequence
  Description of Artificial Sequence: Synthetic oligonucleotide
gcggguccccggagaguac

SEQ ID NO: 2026331 - RNA, 19 nt, Artificial Sequence
  Description of Artificial Sequence: Synthetic oligonucleotide
gcgccaggcacguggcguu

SEQ ID NO: 2026332 - RNA, 19 nt, Artificial Sequence
  Description of Artificial Sequence: Synthetic oligonucleotide
gcccgguagagcacuugau

SEQ ID NO: 2026333 - RNA, 19 nt, Artificial Sequence
  Description of Artificial Sequence: Synthetic oligonucleotide
cccuugcggcauguggcaa

SEQ ID NO: 2026334 - RNA, 19 nt, Artificial Sequence
  Description of Artificial Sequence: Synthetic oligonucleotide
cgcgccaggcacguggcgu

SEQ ID NO: 2026335 - RNA, 19 nt, Artificial Sequence
  Description of Artificial Sequence: Synthetic oligonucleotide
ccccggagaguaccaugau

SEQ ID NO: 2026336 - RNA, 19 nt, Artificial Sequence
  Description of Artificial Sequence: Synthetic oligonucleotide
cgacuccgccagccacuua

SEQ ID NO: 2026337 - RNA, 19 nt, Artificial Sequence
  Description of Artificial Sequence: Synthetic oligonucleotide
aauuccaauaaccgaagcc

SEQ ID NO: 2026338 - RNA, 19 nt, Artificial Sequence
  Description of Artificial Sequence: Synthetic oligonucleotide
aaauguuccuugcucaucc

SEQ ID NO: 2026339 - RNA, 19 nt, Artificial Sequence
  Description of Artificial Sequence: Synthetic oligonucleotide
gaucaaaugacuuauggug

SEQ ID NO: 2026340 - RNA, 19 nt, Artificial Sequence
  Description of Artificial Sequence: Synthetic oligonucleotide
aaaagauugucucuaauga

SEQ ID NO: 2026341 - RNA, 19 nt, Artificial Sequence
  Description of Artificial Sequence: Synthetic oligonucleotide
ugaauaacgagccaccagg

SEQ ID NO: 2026342 - RNA, 19 nt, Artificial Sequence
  Description of Artificial Sequence: Synthetic oligonucleotide
acagccaacaucuauaauc

SEQ ID NO: 2026343 - RNA, 19 nt, Artificial Sequence
  Description of Artificial Sequence: Synthetic oligonucleotide
auucauagaauguagaggu

SEQ ID NO: 2026344 - RNA, 19 nt, Artificial Sequence
  Description of Artificial Sequence: Synthetic oligonucleotide
aacaaugaacuuuuaagca

SEQ ID NO: 2026345 - RNA, 19 nt, Artificial Sequence
  Description of Artificial Sequence: Synthetic oligonucleotide
auuccaauaaccgaagccc

SEQ ID NO: 2026346 - RNA, 19 nt, Artificial Sequence
  Description of Artificial Sequence: Synthetic oligonucleotide
uguaguaaugaauaacgag

SEQ ID NO: 2026347 - RNA, 19 nt, Artificial Sequence
  Description of Artificial Sequence: Synthetic oligonucleotide
gauuguagaacauuccugc

SEQ ID NO: 2026348 - RNA, 19 nt, Artificial Sequence
  Description of Artificial Sequence: Synthetic oligonucleotide
aaugccugcaauuugcucu

SEQ ID NO: 2026349 - RNA, 19 nt, Artificial Sequence
  Description of Artificial Sequence: Synthetic oligonucleotide
aagcauauuacuacugucc

SEQ ID NO: 2026350 - RNA, 19 nt, Artificial Sequence
  Description of Artificial Sequence: Synthetic oligonucleotide
aauguagaggugcaaaugu

SEQ ID NO: 2026351 - RNA, 19 nt, Artificial Sequence
  Description of Artificial Sequence: Synthetic oligonucleotide
uguaugaacauuucaaggu

SEQ ID NO: 2026352 - RNA, 19 nt, Artificial Sequence
  Description of Artificial Sequence: Synthetic oligonucleotide
aggugaaacaaacuucucc

SEQ ID NO: 2026353 - RNA, 19 nt, Artificial Sequence
  Description of Artificial Sequence: Synthetic oligonucleotide
ugcugucugaucuaaaccg

SEQ ID NO: 2026354 - RNA, 19 nt, Artificial Sequence
  Description of Artificial Sequence: Synthetic oligonucleotide
agguuuuaauacuugauag

SEQ ID NO: 2026355 - RNA, 19 nt, Artificial Sequence
  Description of Artificial Sequence: Synthetic oligonucleotide
acuguaguaaugaauaacg

SEQ ID NO: 2026356 - RNA, 19 nt, Artificial Sequence
  Description of Artificial Sequence: Synthetic oligonucleotide
aacaaugccugcaauuugc

SEQ ID NO: 2026357 - RNA, 19 nt, Artificial Sequence
  Description of Artificial Sequence: Synthetic oligonucleotide
uucaguuaauaaaccaccg

SEQ ID NO: 2026358 - RNA, 19 nt, Artificial Sequence
  Description of Artificial Sequence: Synthetic oligonucleotide
ucauucauagaauguagag

SEQ ID NO: 2026359 - RNA, 19 nt, Artificial Sequence
  Description of Artificial Sequence: Synthetic oligonucleotide
ucugaucuaaaccgcauag

SEQ ID NO: 2026360 - RNA, 19 nt, Artificial Sequence
  Description of Artificial Sequence: Synthetic oligonucleotide
uuaaucuguagauuccuag

SEQ ID NO: 2026361 - RNA, 19 nt, Artificial Sequence
  Description of Artificial Sequence: Synthetic oligonucleotide
ugaaguacuguauacgugu

SEQ ID NO: 2026362 - RNA, 19 nt, Artificial Sequence
  Description of Artificial Sequence: Synthetic oligonucleotide
ucgacaaucuccuccaggg

SEQ ID NO: 2026363 - RNA, 19 nt, Artificial Sequence
  Description of Artificial Sequence: Synthetic oligonucleotide
uauacguguuuccaagggg

SEQ ID NO: 2026364 - RNA, 19 nt, Artificial Sequence
  Description of Artificial Sequence: Synthetic oligonucleotide
ucagagauaucucacuucu

SEQ ID NO: 2026365 - RNA, 19 nt, Artificial Sequence
  Description of Artificial Sequence: Synthetic oligonucleotide
caguuaauaaaccaccgcc

SEQ ID NO: 2026366 - RNA, 19 nt, Artificial Sequence
  Description of Artificial Sequence: Synthetic oligonucleotide
caugcuuuguacucuaucc

SEQ ID NO: 2026367 - RNA, 19 nt, Artificial Sequence
  Description of Artificial Sequence: Synthetic oligonucleotide
aagucaugcugucugaucu

SEQ ID NO: 2026368 - RNA, 19 nt, Artificial Sequence
  Description of Artificial Sequence: Synthetic oligonucleotide
gaacugacaguccauuugg

SEQ ID NO: 2026369 - RNA, 19 nt, Artificial Sequence
  Description of Artificial Sequence: Synthetic oligonucleotide
uuuaugaauuuguaaacaa

SEQ ID NO: 2026370 - RNA, 19 nt, Artificial Sequence
  Description of Artificial Sequence: Synthetic oligonucleotide
ugaauuuguaaacaaugaa

SEQ ID NO: 2026371 - RNA, 19 nt, Artificial Sequence
  Description of Artificial Sequence: Synthetic oligonucleotide
ucugcgaaaacaauuccca

SEQ ID NO: 2026372 - RNA, 19 nt, Artificial Sequence
  Description of Artificial Sequence: Synthetic oligonucleotide
cuguaugaacauuucaagg

SEQ ID NO: 2026373 - RNA, 19 nt, Artificial Sequence
  Description of Artificial Sequence: Synthetic oligonucleotide
ugaccuuuuguucuucagg

SEQ ID NO: 2026374 - RNA, 19 nt, Artificial Sequence
  Description of Artificial Sequence: Synthetic oligonucleotide
uuuaagcauauuacuacug

SEQ ID NO: 2026375 - RNA, 19 nt, Artificial Sequence
  Description of Artificial Sequence: Synthetic oligonucleotide
uuucuggucaaacaggaaa

SEQ ID NO: 2026376 - RNA, 19 nt, Artificial Sequence
  Description of Artificial Sequence: Synthetic oligonucleotide
ugugcacuggauuucacag

SEQ ID NO: 2026377 - RNA, 19 nt, Artificial Sequence
  Description of Artificial Sequence: Synthetic oligonucleotide
aucuaaaccgcauaguccu

SEQ ID NO: 2026378 - RNA, 19 nt, Artificial Sequence
  Description of Artificial Sequence: Synthetic oligonucleotide
ucuguagauuccuagugag

SEQ ID NO: 2026379 - RNA, 19 nt, Artificial Sequence
  Description of Artificial Sequence: Synthetic oligonucleotide
uuaagcauauuacuacugu

SEQ ID NO: 2026380 - RNA, 19 nt, Artificial Sequence
  Description of Artificial Sequence: Synthetic oligonucleotide
aggaucaauuccaauaacc

SEQ ID NO: 2026381 - RNA, 19 nt, Artificial Sequence
  Description of Artificial Sequence: Synthetic oligonucleotide
uaaugaauaacgagccacc

SEQ ID NO: 2026382 - RNA, 19 nt, Artificial Sequence
  Description of Artificial Sequence: Synthetic oligonucleotide
ugaucuaaaccgcauaguc

SEQ ID NO: 2026383 - RNA, 19 nt, Artificial Sequence
  Description of Artificial Sequence: Synthetic oligonucleotide
uuuuaagcauauuacuacu

SEQ ID NO: 2026384 - RNA, 19 nt, Artificial Sequence
  Description of Artificial Sequence: Synthetic oligonucleotide
uucaaggucgaucacgugu

SEQ ID NO: 2026385 - RNA, 19 nt, Artificial Sequence
  Description of Artificial Sequence: Synthetic oligonucleotide
auuguagaacauuccugcc

SEQ ID NO: 2026386 - RNA, 19 nt, Artificial Sequence
  Description of Artificial Sequence: Synthetic oligonucleotide
guucacucaauucccaugg

SEQ ID NO: 2026387 - RNA, 19 nt, Artificial Sequence
  Description of Artificial Sequence: Synthetic oligonucleotide
gauugucucuaaugaaugg

SEQ ID NO: 2026388 - RNA, 19 nt, Artificial Sequence
  Description of Artificial Sequence: Synthetic oligonucleotide
ugaacugacaguccauuug

SEQ ID NO: 2026389 - RNA, 19 nt, Artificial Sequence
  Description of Artificial Sequence: Synthetic oligonucleotide
ugugaaguacuguauacgu

SEQ ID NO: 2026390 - RNA, 19 nt, Artificial Sequence
  Description of Artificial Sequence: Synthetic oligonucleotide
ucaguuaauaaaccaccgc

SEQ ID NO: 2026391 - RNA, 19 nt, Artificial Sequence
  Description of Artificial Sequence: Synthetic oligonucleotide
ucauagaauguagaggugc

SEQ ID NO: 2026392 - RNA, 19 nt, Artificial Sequence
  Description of Artificial Sequence: Synthetic oligonucleotide
aagggauuguagaacauuc

SEQ ID NO: 2026393 - RNA, 19 nt, Artificial Sequence
  Description of Artificial Sequence: Synthetic oligonucleotide
ugcgaaaacaauucccaag

SEQ ID NO: 2026394 - RNA, 19 nt, Artificial Sequence
  Description of Artificial Sequence: Synthetic oligonucleotide
uaaugaauggcacccucag

SEQ ID NO: 2026395 - RNA, 19 nt, Artificial Sequence
  Description of Artificial Sequence: Synthetic oligonucleotide
acaaacuucucccaugugu

SEQ ID NO: 2026396 - RNA, 19 nt, Artificial Sequence
  Description of Artificial Sequence: Synthetic oligonucleotide
cauucauagaauguagagg

SEQ ID NO: 2026397 - RNA, 19 nt, Artificial Sequence
  Description of Artificial Sequence: Synthetic oligonucleotide
uuaauacuugauagcagca

SEQ ID NO: 2026398 - RNA, 19 nt, Artificial Sequence
  Description of Artificial Sequence: Synthetic oligonucleotide
augcugucugaucuaaacc

SEQ ID NO: 2026399 - RNA, 19 nt, Artificial Sequence
  Description of Artificial Sequence: Synthetic oligonucleotide
uuuguugacuguaguaaug

SEQ ID NO: 2026400 - RNA, 19 nt, Artificial Sequence
  Description of Artificial Sequence: Synthetic oligonucleotide
ucaucccacacaaaggucu

SEQ ID NO: 2026401 - RNA, 19 nt, Artificial Sequence
  Description of Artificial Sequence: Synthetic oligonucleotide
aguacuguauacguguuuc

SEQ ID NO: 2026402 - RNA, 19 nt, Artificial Sequence
  Description of Artificial Sequence: Synthetic oligonucleotide
gauaucucacuucuuugcc

SEQ ID NO: 2026403 - RNA, 19 nt, Artificial Sequence
  Description of Artificial Sequence: Synthetic oligonucleotide
aauacucucuagcuuuuca

SEQ ID NO: 2026404 - RNA, 19 nt, Artificial Sequence
  Description of Artificial Sequence: Synthetic oligonucleotide
ucaauuccaauaaccgaag

SEQ ID NO: 2026405 - RNA, 19 nt, Artificial Sequence
  Description of Artificial Sequence: Synthetic oligonucleotide
ugcacuggauuucacagca

SEQ ID NO: 2026406 - RNA, 19 nt, Artificial Sequence
  Description of Artificial Sequence: Synthetic oligonucleotide
uacucucuagcuuuucagg

SEQ ID NO: 2026407 - RNA, 19 nt, Artificial Sequence
  Description of Artificial Sequence: Synthetic oligonucleotide
uguauacguguuuccaagg

SEQ ID NO: 2026408 - RNA, 19 nt, Artificial Sequence
  Description of Artificial Sequence: Synthetic oligonucleotide
aauaaaccaccgccacagc

SEQ ID NO: 2026409 - RNA, 19 nt, Artificial Sequence
  Description of Artificial Sequence: Synthetic oligonucleotide
ggugaaacaaacuucuccc

SEQ ID NO: 2026410 - RNA, 19 nt, Artificial Sequence
  Description of Artificial Sequence: Synthetic oligonucleotide
auagcagcacuguaugaac

SEQ ID NO: 2026411 - RNA, 19 nt, Artificial Sequence
  Description of Artificial Sequence: Synthetic oligonucleotide
uuaugaauuuguaaacaau

SEQ ID NO: 2026412 - RNA, 19 nt, Artificial Sequence
  Description of Artificial Sequence: Synthetic oligonucleotide
acugguuuucaaaagauug

SEQ ID NO: 2026413 - RNA, 19 nt, Artificial Sequence
  Description of Artificial Sequence: Synthetic oligonucleotide
gcuacuuuuacuccaaugc

SEQ ID NO: 2026414 - RNA, 19 nt, Artificial Sequence
  Description of Artificial Sequence: Synthetic oligonucleotide
ugacuuauggugcugugcu

SEQ ID NO: 2026415 - RNA, 19 nt, Artificial Sequence
  Description of Artificial Sequence: Synthetic oligonucleotide
ucaggucauucauagaaug

SEQ ID NO: 2026416 - RNA, 19 nt, Artificial Sequence
  Description of Artificial Sequence: Synthetic oligonucleotide
uucuacaacuucagaagcc

SEQ ID NO: 2026417 - RNA, 19 nt, Artificial Sequence
  Description of Artificial Sequence: Synthetic oligonucleotide
guuuuaauacuugauagca

SEQ ID NO: 2026418 - RNA, 19 nt, Artificial Sequence
  Description of Artificial Sequence: Synthetic oligonucleotide
uacacuugagcuacuggag

SEQ ID NO: 2026419 - RNA, 19 nt, Artificial Sequence
  Description of Artificial Sequence: Synthetic oligonucleotide
uacucuauccucuuaucca

SEQ ID NO: 2026420 - RNA, 19 nt, Artificial Sequence
  Description of Artificial Sequence: Synthetic oligonucleotide
uccauuugguuccagaaua

SEQ ID NO: 2026421 - RNA, 19 nt, Artificial Sequence
  Description of Artificial Sequence: Synthetic oligonucleotide
acaaaggucuuccuggaug

SEQ ID NO: 2026422 - RNA, 19 nt, Artificial Sequence
  Description of Artificial Sequence: Synthetic oligonucleotide
uuguagaacauuccugcca

SEQ ID NO: 2026423 - RNA, 19 nt, Artificial Sequence
  Description of Artificial Sequence: Synthetic oligonucleotide
ugccuuuuggaacaaugcc

SEQ ID NO: 2026424 - RNA, 19 nt, Artificial Sequence
  Description of Artificial Sequence: Synthetic oligonucleotide
uuuacuccaaugccagugc

SEQ ID NO: 2026425 - RNA, 19 nt, Artificial Sequence
  Description of Artificial Sequence: Synthetic oligonucleotide
cuacuuuuacuccaaugcc

SEQ ID NO: 2026426 - RNA, 19 nt, Artificial Sequence
  Description of Artificial Sequence: Synthetic oligonucleotide
guauacguguuuccaaggg

SEQ ID NO: 2026427 - RNA, 19 nt, Artificial Sequence
  Description of Artificial Sequence: Synthetic oligonucleotide
acaaugaacuuuuaagcau

SEQ ID NO: 2026428 - RNA, 19 nt, Artificial Sequence
  Description of Artificial Sequence: Synthetic oligonucleotide
uccagaauacucucuagcu

SEQ ID NO: 2026429 - RNA, 19 nt, Artificial Sequence
  Description of Artificial Sequence: Synthetic oligonucleotide
uauaaucuucaucccacac

SEQ ID NO: 2026430 - RNA, 19 nt, Artificial Sequence
  Description of Artificial Sequence: Synthetic oligonucleotide
ugugcuaccuuaauguuuu

SEQ ID NO: 2026431 - RNA, 19 nt, Artificial Sequence
  Description of Artificial Sequence: Synthetic oligonucleotide
uguagaggugcaaauguuc

SEQ ID NO: 2026432 - RNA, 19 nt, Artificial Sequence
  Description of Artificial Sequence: Synthetic oligonucleotide
ugcaaauguuccuugcuca

SEQ ID NO: 2026433 - RNA, 19 nt, Artificial Sequence
  Description of Artificial Sequence: Synthetic oligonucleotide
guucaguuaauaaaccacc

SEQ ID NO: 2026434 - RNA, 19 nt, Artificial Sequence
  Description of Artificial Sequence: Synthetic oligonucleotide
gcgaaaacaauucccaagg

SEQ ID NO: 2026435 - RNA, 19 nt, Artificial Sequence
  Description of Artificial Sequence: Synthetic oligonucleotide
caaacuucucccaugugug

SEQ ID NO: 2026436 - RNA, 19 nt, Artificial Sequence
  Description of Artificial Sequence: Synthetic oligonucleotide
acucuauccucuuauccag

SEQ ID NO: 2026437 - RNA, 19 nt, Artificial Sequence
  Description of Artificial Sequence: Synthetic oligonucleotide
ggaggcaucagcuugggcc

SEQ ID NO: 2026438 - RNA, 19 nt, Artificial Sequence
  Description of Artificial Sequence: Synthetic oligonucleotide
uccucauguacacuugagc

SEQ ID NO: 2026439 - RNA, 19 nt, Artificial Sequence
  Description of Artificial Sequence: Synthetic oligonucleotide
uggauuucacagcaugggc

SEQ ID NO: 2026440 - RNA, 19 nt, Artificial Sequence
  Description of Artificial Sequence: Synthetic oligonucleotide
gaucaauuccaauaaccga

SEQ ID NO: 2026441 - RNA, 19 nt, Artificial Sequence
  Description of Artificial Sequence: Synthetic oligonucleotide
gaucuaaaccgcauagucc

SEQ ID NO: 2026442 - RNA, 19 nt, Artificial Sequence
  Description of Artificial Sequence: Synthetic oligonucleotide
ggaucaauuccaauaaccg

SEQ ID NO: 2026443 - RNA, 19 nt, Artificial Sequence
  Description of Artificial Sequence: Synthetic oligonucleotide
aagauugucucuaaugaau

SEQ ID NO: 2026444 - RNA, 19 nt, Artificial Sequence
  Description of Artificial Sequence: Synthetic oligonucleotide
aaacuugugcagucucauc

SEQ ID NO: 2026445 - RNA, 19 nt, Artificial Sequence
  Description of Artificial Sequence: Synthetic oligonucleotide
ugugcagucucaucgacaa

SEQ ID NO: 2026446 - RNA, 19 nt, Artificial Sequence
  Description of Artificial Sequence: Synthetic oligonucleotide
cugacaguccauuugguuc

SEQ ID NO: 2026447 - RNA, 19 nt, Artificial Sequence
  Description of Artificial Sequence: Synthetic oligonucleotide
uuccaauaaccgaagcccc

SEQ ID NO: 2026448 - RNA, 19 nt, Artificial Sequence
  Description of Artificial Sequence: Synthetic oligonucleotide
cauuucaaggucgaucacg

SEQ ID NO: 2026449 - RNA, 19 nt, Artificial Sequence
  Description of Artificial Sequence: Synthetic oligonucleotide
guucuacaacuucagaagc

SEQ ID NO: 2026450 - RNA, 19 nt, Artificial Sequence
  Description of Artificial Sequence: Synthetic oligonucleotide
ucaaaugacuuauggugcu

SEQ ID NO: 2026451 - RNA, 19 nt, Artificial Sequence
  Description of Artificial Sequence: Synthetic oligonucleotide
agcauauuacuacuguccu

SEQ ID NO: 2026452 - RNA, 19 nt, Artificial Sequence
  Description of Artificial Sequence: Synthetic oligonucleotide
gagauaucucacuucuuug

SEQ ID NO: 2026453 - RNA, 19 nt, Artificial Sequence
  Description of Artificial Sequence: Synthetic oligonucleotide
ugugagugccuuuuggaac

SEQ ID NO: 2026454 - RNA, 19 nt, Artificial Sequence
  Description of Artificial Sequence: Synthetic oligonucleotide
uaagcuuuaugaauuugua

SEQ ID NO: 2026455 - RNA, 19 nt, Artificial Sequence
  Description of Artificial Sequence: Synthetic oligonucleotide
uggcuuaaucuguagauuc

SEQ ID NO: 2026456 - RNA, 19 nt, Artificial Sequence
  Description of Artificial Sequence: Synthetic oligonucleotide
cucugcgaaaacaauuccc

SEQ ID NO: 2026457 - RNA, 19 nt, Artificial Sequence
  Description of Artificial Sequence: Synthetic oligonucleotide
agagauaucucacuucuuu

SEQ ID NO: 2026458 - RNA, 19 nt, Artificial Sequence
  Description of Artificial Sequence: Synthetic oligonucleotide
acaggaucaauuccaauaa

SEQ ID NO: 2026459 - RNA, 19 nt, Artificial Sequence
  Description of Artificial Sequence: Synthetic oligonucleotide
cuguauacguguuuccaag

SEQ ID NO: 2026460 - RNA, 19 nt, Artificial Sequence
  Description of Artificial Sequence: Synthetic oligonucleotide
cuaccuuaauguuuucagc

SEQ ID NO: 2026461 - RNA, 19 nt, Artificial Sequence
  Description of Artificial Sequence: Synthetic oligonucleotide
uguccucagagauaucuca

SEQ ID NO: 2026462 - RNA, 19 nt, Artificial Sequence
  Description of Artificial Sequence: Synthetic oligonucleotide
ucaacgguuguuugugaag

SEQ ID NO: 2026463 - RNA, 19 nt, Artificial Sequence
  Description of Artificial Sequence: Synthetic oligonucleotide
uacuacuguccucagagau

SEQ ID NO: 2026464 - RNA, 19 nt, Artificial Sequence
  Description of Artificial Sequence: Synthetic oligonucleotide
uagcuuuucaggugaaaca

SEQ ID NO: 2026465 - RNA, 19 nt, Artificial Sequence
  Description of Artificial Sequence: Synthetic oligonucleotide
gguuuuaauacuugauagc

SEQ ID NO: 2026466 - RNA, 19 nt, Artificial Sequence
  Description of Artificial Sequence: Synthetic oligonucleotide
guacucuauccucuuaucc

SEQ ID NO: 2026467 - RNA, 19 nt, Artificial Sequence
  Description of Artificial Sequence: Synthetic oligonucleotide
aaugacuuauggugcugug

SEQ ID NO: 2026468 - RNA, 19 nt, Artificial Sequence
  Description of Artificial Sequence: Synthetic oligonucleotide
uguucacucaauucccaug

SEQ ID NO: 2026469 - RNA, 19 nt, Artificial Sequence
  Description of Artificial Sequence: Synthetic oligonucleotide
aauuugcucugcgaaaaca

SEQ ID NO: 2026470 - RNA, 19 nt, Artificial Sequence
  Description of Artificial Sequence: Synthetic oligonucleotide
auaacgagccaccagguuu

SEQ ID NO: 2026471 - RNA, 19 nt, Artificial Sequence
  Description of Artificial Sequence: Synthetic oligonucleotide
aaugaauaacgagccacca

SEQ ID NO: 2026472 - RNA, 19 nt, Artificial Sequence
  Description of Artificial Sequence: Synthetic oligonucleotide
augaauaacgagccaccag

SEQ ID NO: 2026473 - RNA, 19 nt, Artificial Sequence
  Description of Artificial Sequence: Synthetic oligonucleotide
guaugaacauuucaagguc

SEQ ID NO: 2026474 - RNA, 19 nt, Artificial Sequence
  Description of Artificial Sequence: Synthetic oligonucleotide
aucaauuccaauaaccgaa

SEQ ID NO: 2026475 - RNA, 19 nt, Artificial Sequence
  Description of Artificial Sequence: Synthetic oligonucleotide
ucuaaugaauggcacccuc

SEQ ID NO: 2026476 - RNA, 19 nt, Artificial Sequence
  Description of Artificial Sequence: Synthetic oligonucleotide
augacuuauggugcugugc

SEQ ID NO: 2026477 - RNA, 19 nt, Artificial Sequence
  Description of Artificial Sequence: Synthetic oligonucleotide
auaagcuuuaugaauuugu

SEQ ID NO: 2026478 - RNA, 19 nt, Artificial Sequence
  Description of Artificial Sequence: Synthetic oligonucleotide
uccugccacaguuugaacu

SEQ ID NO: 2026479 - RNA, 19 nt, Artificial Sequence
  Description of Artificial Sequence: Synthetic oligonucleotide
aggugcaaauguuccuugc

SEQ ID NO: 2026480 - RNA, 19 nt, Artificial Sequence
  Description of Artificial Sequence: Synthetic oligonucleotide
uguuugugaaguacuguau

SEQ ID NO: 2026481 - RNA, 19 nt, Artificial Sequence
  Description of Artificial Sequence: Synthetic oligonucleotide
uuguugacuguaguaauga

SEQ ID NO: 2026482 - RNA, 19 nt, Artificial Sequence
  Description of Artificial Sequence: Synthetic oligonucleotide
ugcuacuuuuacuccaaug

SEQ ID NO: 2026483 - RNA, 19 nt, Artificial Sequence
  Description of Artificial Sequence: Synthetic oligonucleotide
augugugagugccuuuugg

SEQ ID NO: 2026484 - RNA, 19 nt, Artificial Sequence
  Description of Artificial Sequence: Synthetic oligonucleotide
gcuaccuuaauguuuucag

SEQ ID NO: 2026485 - RNA, 19 nt, Artificial Sequence
  Description of Artificial Sequence: Synthetic oligonucleotide
ugggcugcauaguuaaggc

SEQ ID NO: 2026486 - RNA, 19 nt, Artificial Sequence
  Description of Artificial Sequence: Synthetic oligonucleotide
uuguacucuauccucuuau

SEQ ID NO: 2026487 - RNA, 19 nt, Artificial Sequence
  Description of Artificial Sequence: Synthetic oligonucleotide
uguuccuugcucaucccac

SEQ ID NO: 2026488 - RNA, 19 nt, Artificial Sequence
  Description of Artificial Sequence: Synthetic oligonucleotide
aaaugacuuauggugcugu

SEQ ID NO: 2026489 - RNA, 19 nt, Artificial Sequence
  Description of Artificial Sequence: Synthetic oligonucleotide
ucucccaugugugagugcc

SEQ ID NO: 2026490 - RNA, 19 nt, Artificial Sequence
  Description of Artificial Sequence: Synthetic oligonucleotide
ugagaagggauuguagaac

SEQ ID NO: 2026491 - RNA, 19 nt, Artificial Sequence
  Description of Artificial Sequence: Synthetic oligonucleotide
uaucucacuucuuugccuc

SEQ ID NO: 2026492 - RNA, 19 nt, Artificial Sequence
  Description of Artificial Sequence: Synthetic oligonucleotide
uuugccuccucauguacac

SEQ ID NO: 2026493 - RNA, 19 nt, Artificial Sequence
  Description of Artificial Sequence: Synthetic oligonucleotide
aaagcagacucaguaggcu

SEQ ID NO: 2026494 - RNA, 19 nt, Artificial Sequence
  Description of Artificial Sequence: Synthetic oligonucleotide
ugccagugcccugagaagg

SEQ ID NO: 2026495 - RNA, 19 nt, Artificial Sequence
  Description of Artificial Sequence: Synthetic oligonucleotide
ugcagucucaucgacaauc

SEQ ID NO: 2026496 - RNA, 19 nt, Artificial Sequence
  Description of Artificial Sequence: Synthetic oligonucleotide
cuagcuuuucaggugaaac

SEQ ID NO: 2026497 - RNA, 19 nt, Artificial Sequence
  Description of Artificial Sequence: Synthetic oligonucleotide
gaacauuucaaggucgauc

SEQ ID NO: 2026498 - RNA, 19 nt, Artificial Sequence
  Description of Artificial Sequence: Synthetic oligonucleotide
caucuauaaucuucauccc

SEQ ID NO: 2026499 - RNA, 19 nt, Artificial Sequence
  Description of Artificial Sequence: Synthetic oligonucleotide
uguguucacucaauuccca

SEQ ID NO: 2026500 - RNA, 19 nt, Artificial Sequence
  Description of Artificial Sequence: Synthetic oligonucleotide
agaauguagaggugcaaau

SEQ ID NO: 2026501 - RNA, 19 nt, Artificial Sequence
  Description of Artificial Sequence: Synthetic oligonucleotide
cuggauuucacagcauggg

SEQ ID NO: 2026502 - RNA, 19 nt, Artificial Sequence
  Description of Artificial Sequence: Synthetic oligonucleotide
guagaggugcaaauguucc

SEQ ID NO: 2026503 - RNA, 19 nt, Artificial Sequence
  Description of Artificial Sequence: Synthetic oligonucleotide
aguuaauaaaccaccgcca

SEQ ID NO: 2026504 - RNA, 19 nt, Artificial Sequence
  Description of Artificial Sequence: Synthetic oligonucleotide
acuguccucagagauaucu

SEQ ID NO: 2026505 - RNA, 19 nt, Artificial Sequence
  Description of Artificial Sequence: Synthetic oligonucleotide
auaucucacuucuuugccu

SEQ ID NO: 2026506 - RNA, 19 nt, Artificial Sequence
  Description of Artificial Sequence: Synthetic oligonucleotide
aaccgcauaguccuguguu

SEQ ID NO: 2026507 - RNA, 19 nt, Artificial Sequence
  Description of Artificial Sequence: Synthetic oligonucleotide
agcagacucaguaggcucc

SEQ ID NO: 2026508 - RNA, 19 nt, Artificial Sequence
  Description of Artificial Sequence: Synthetic oligonucleotide
agggauuguagaacauucc

SEQ ID NO: 2026509 - RNA, 19 nt, Artificial Sequence
  Description of Artificial Sequence: Synthetic oligonucleotide
uugaccuuuuguucuucag

SEQ ID NO: 2026510 - RNA, 19 nt, Artificial Sequence
  Description of Artificial Sequence: Synthetic oligonucleotide
acuggauuucacagcaugg

SEQ ID NO: 2026511 - RNA, 19 nt, Artificial Sequence
  Description of Artificial Sequence: Synthetic oligonucleotide
ucaucccaccacuugugag

SEQ ID NO: 2026512 - RNA, 19 nt, Artificial Sequence
  Description of Artificial Sequence: Synthetic oligonucleotide
acgguuguuugugaaguac

SEQ ID NO: 2026513 - RNA, 19 nt, Artificial Sequence
  Description of Artificial Sequence: Synthetic oligonucleotide
ucaaggucgaucacguguu

SEQ ID NO: 2026514 - RNA, 19 nt, Artificial Sequence
  Description of Artificial Sequence: Synthetic oligonucleotide
acuagcacugguuuucaaa

SEQ ID NO: 2026515 - RNA, 19 nt, Artificial Sequence
  Description of Artificial Sequence: Synthetic oligonucleotide
aauaacgagccaccagguu

SEQ ID NO: 2026516 - RNA, 19 nt, Artificial Sequence
  Description of Artificial Sequence: Synthetic oligonucleotide
ucuccuugcugucaacggu

SEQ ID NO: 2026517 - RNA, 19 nt, Artificial Sequence
  Description of Artificial Sequence: Synthetic oligonucleotide
uuugcucugcgaaaacaau

SEQ ID NO: 2026518 - RNA, 19 nt, Artificial Sequence
  Description of Artificial Sequence: Synthetic oligonucleotide
uacuguauacguguuucca

SEQ ID NO: 2026519 - RNA, 19 nt, Artificial Sequence
  Description of Artificial Sequence: Synthetic oligonucleotide
uagaauguagaggugcaaa

SEQ ID NO: 2026520 - RNA, 19 nt, Artificial Sequence
  Description of Artificial Sequence: Synthetic oligonucleotide
ugagcuacuggaggcauca

SEQ ID NO: 2026521 - RNA, 19 nt, Artificial Sequence
  Description of Artificial Sequence: Synthetic oligonucleotide
augcuuuguacucuauccu

SEQ ID NO: 2026522 - RNA, 19 nt, Artificial Sequence
  Description of Artificial Sequence: Synthetic oligonucleotide
gauagcagcacuguaugaa

SEQ ID NO: 2026523 - RNA, 19 nt, Artificial Sequence
  Description of Artificial Sequence: Synthetic oligonucleotide
gagguucaguuaauaaacc

SEQ ID NO: 2026524 - RNA, 19 nt, Artificial Sequence
  Description of Artificial Sequence: Synthetic oligonucleotide
auuucaaggucgaucacgu

SEQ ID NO: 2026525 - RNA, 19 nt, Artificial Sequence
  Description of Artificial Sequence: Synthetic oligonucleotide
acuguauacguguuuccaa

SEQ ID NO: 2026526 - RNA, 19 nt, Artificial Sequence
  Description of Artificial Sequence: Synthetic oligonucleotide
ucgaucacguguucuacaa

SEQ ID NO: 2026527 - RNA, 19 nt, Artificial Sequence
  Description of Artificial Sequence: Synthetic oligonucleotide
cacaggaucaauuccaaua

SEQ ID NO: 2026528 - RNA, 19 nt, Artificial Sequence
  Description of Artificial Sequence: Synthetic oligonucleotide
acucaguaggcuccgggug

SEQ ID NO: 2026529 - RNA, 19 nt, Artificial Sequence
  Description of Artificial Sequence: Synthetic oligonucleotide
ucacguguucuacaacuuc

SEQ ID NO: 2026530 - RNA, 19 nt, Artificial Sequence
  Description of Artificial Sequence: Synthetic oligonucleotide
cauaguccuguguucacuc

SEQ ID NO: 2026531 - RNA, 19 nt, Artificial Sequence
  Description of Artificial Sequence: Synthetic oligonucleotide
gaauggcacccucagguca

SEQ ID NO: 2026532 - RNA, 19 nt, Artificial Sequence
  Description of Artificial Sequence: Synthetic oligonucleotide
auaguuaaggcugcuacuu

SEQ ID NO: 2026533 - RNA, 19 nt, Artificial Sequence
  Description of Artificial Sequence: Synthetic oligonucleotide
aguuaaggcugcuacuuuu

SEQ ID NO: 2026534 - RNA, 19 nt, Artificial Sequence
  Description of Artificial Sequence: Synthetic oligonucleotide
caauuccaauaaccgaagc

SEQ ID NO: 2026535 - RNA, 19 nt, Artificial Sequence
  Description of Artificial Sequence: Synthetic oligonucleotide
uguacucuauccucuuauc

SEQ ID NO: 2026536 - RNA, 19 nt, Artificial Sequence
  Description of Artificial Sequence: Synthetic oligonucleotide
uccucagagauaucucacu

SEQ ID NO: 2026537 - RNA, 19 nt, Artificial Sequence
  Description of Artificial Sequence: Synthetic oligonucleotide
uugcucugcgaaaacaauu

SEQ ID NO: 2026538 - RNA, 19 nt, Artificial Sequence
  Description of Artificial Sequence: Synthetic oligonucleotide
uggaacaaugccugcaauu

SEQ ID NO: 2026539 - RNA, 19 nt, Artificial Sequence
  Description of Artificial Sequence: Synthetic oligonucleotide
agcuuuucaggugaaacaa

SEQ ID NO: 2026540 - RNA, 19 nt, Artificial Sequence
  Description of Artificial Sequence: Synthetic oligonucleotide
cauagaauguagaggugca

SEQ ID NO: 2026541 - RNA, 19 nt, Artificial Sequence
  Description of Artificial Sequence: Synthetic oligonucleotide
cucagagauaucucacuuc

SEQ ID NO: 2026542 - RNA, 19 nt, Artificial Sequence
  Description of Artificial Sequence: Synthetic oligonucleotide
uugugcagucucaucgaca

SEQ ID NO: 2026543 - RNA, 19 nt, Artificial Sequence
  Description of Artificial Sequence: Synthetic oligonucleotide
gcauaguuaaggcugcuac

SEQ ID NO: 2026544 - RNA, 19 nt, Artificial Sequence
  Description of Artificial Sequence: Synthetic oligonucleotide
gugagugccuuuuggaaca

SEQ ID NO: 2026545 - RNA, 19 nt, Artificial Sequence
  Description of Artificial Sequence: Synthetic oligonucleotide
cuuauggugcugugcuacc

SEQ ID NO: 2026546 - RNA, 19 nt, Artificial Sequence
  Description of Artificial Sequence: Synthetic oligonucleotide
uucacucaauucccauggc

SEQ ID NO: 2026547 - RNA, 19 nt, Artificial Sequence
  Description of Artificial Sequence: Synthetic oligonucleotide
ucuaaaccgcauaguccug

SEQ ID NO: 2026548 - RNA, 19 nt, Artificial Sequence
  Description of Artificial Sequence: Synthetic oligonucleotide
aguaggcuccggguguucc

SEQ ID NO: 2026549 - RNA, 19 nt, Artificial Sequence
  Description of Artificial Sequence: Synthetic oligonucleotide
aaaccgcauaguccugugu

SEQ ID NO: 2026550 - RNA, 19 nt, Artificial Sequence
  Description of Artificial Sequence: Synthetic oligonucleotide
gaggcaucagcuugggcca

SEQ ID NO: 2026551 - RNA, 19 nt, Artificial Sequence
  Description of Artificial Sequence: Synthetic oligonucleotide
uaacgagccaccagguuuu

SEQ ID NO: 2026552 - RNA, 19 nt, Artificial Sequence
  Description of Artificial Sequence: Synthetic oligonucleotide
cuguaguaaugaauaacga

SEQ ID NO: 2026553 - RNA, 19 nt, Artificial Sequence
  Description of Artificial Sequence: Synthetic oligonucleotide
gaggugcaaauguuccuug

SEQ ID NO: 2026554 - RNA, 19 nt, Artificial Sequence
  Description of Artificial Sequence: Synthetic oligonucleotide
aaguacuguauacguguuu

SEQ ID NO: 2026555 - RNA, 19 nt, Artificial Sequence
  Description of Artificial Sequence: Synthetic oligonucleotide
uucaucccacacaaagguc

SEQ ID NO: 2026556 - RNA, 19 nt, Artificial Sequence
  Description of Artificial Sequence: Synthetic oligonucleotide
uguugacuguaguaaugaa

SEQ ID NO: 2026557 - RNA, 19 nt, Artificial Sequence
  Description of Artificial Sequence: Synthetic oligonucleotide
uaaaccgcauaguccugug

SEQ ID NO: 2026558 - RNA, 19 nt, Artificial Sequence
  Description of Artificial Sequence: Synthetic oligonucleotide
uagaggugcaaauguuccu

SEQ ID NO: 2026559 - RNA, 19 nt, Artificial Sequence
  Description of Artificial Sequence: Synthetic oligonucleotide
uuuguucuucaggaucuca

SEQ ID NO: 2026560 - RNA, 19 nt, Artificial Sequence
  Description of Artificial Sequence: Synthetic oligonucleotide
aaaccaccgccacagccaa

SEQ ID NO: 2026561 - RNA, 19 nt, Artificial Sequence
  Description of Artificial Sequence: Synthetic oligonucleotide
cuagagguucaguuaauaa

SEQ ID NO: 2026562 - RNA, 19 nt, Artificial Sequence
  Description of Artificial Sequence: Synthetic oligonucleotide
uuuguacucuauccucuua

SEQ ID NO: 2026563 - RNA, 19 nt, Artificial Sequence
  Description of Artificial Sequence: Synthetic oligonucleotide
uuacuacuguccucagaga

SEQ ID NO: 2026564 - RNA, 19 nt, Artificial Sequence
  Description of Artificial Sequence: Synthetic oligonucleotide
cagggcacaugcuuuguac

SEQ ID NO: 2026565 - RNA, 19 nt, Artificial Sequence
  Description of Artificial Sequence: Synthetic oligonucleotide
uggugacuagcacugguuu

SEQ ID NO: 2026566 - RNA, 19 nt, Artificial Sequence
  Description of Artificial Sequence: Synthetic oligonucleotide
gacuggaucaaaugacuua

SEQ ID NO: 2026567 - RNA, 19 nt, Artificial Sequence
  Description of Artificial Sequence: Synthetic oligonucleotide
cuacaacuucagaagccac

SEQ ID NO: 2026568 - RNA, 19 nt, Artificial Sequence
  Description of Artificial Sequence: Synthetic oligonucleotide
uacuugauagcagcacugu

SEQ ID NO: 2026569 - RNA, 19 nt, Artificial Sequence
  Description of Artificial Sequence: Synthetic oligonucleotide
uuauugaccuuuuguucuu

SEQ ID NO: 2026570 - RNA, 19 nt, Artificial Sequence
  Description of Artificial Sequence: Synthetic oligonucleotide
agcacuguaugaacauuuc

SEQ ID NO: 2026571 - RNA, 19 nt, Artificial Sequence
  Description of Artificial Sequence: Synthetic oligonucleotide
ugaauggcacccucagguc

SEQ ID NO: 2026572 - RNA, 19 nt, Artificial Sequence
  Description of Artificial Sequence: Synthetic oligonucleotide
gugaaacaaacuucuccca

SEQ ID NO: 2026573 - RNA, 19 nt, Artificial Sequence
  Description of Artificial Sequence: Synthetic oligonucleotide
agccacaacagcaucaaaa

SEQ ID NO: 2026574 - RNA, 19 nt, Artificial Sequence
  Description of Artificial Sequence: Synthetic oligonucleotide
acugacaguccauuugguu

SEQ ID NO: 2026575 - RNA, 19 nt, Artificial Sequence
  Description of Artificial Sequence: Synthetic oligonucleotide
ggauuguagaacauuccug

SEQ ID NO: 2026576 - RNA, 19 nt, Artificial Sequence
  Description of Artificial Sequence: Synthetic oligonucleotide
auuugcucugcgaaaacaa

SEQ ID NO: 2026577 - RNA, 19 nt, Artificial Sequence
  Description of Artificial Sequence: Synthetic oligonucleotide
acuccaaugccagugcccu

SEQ ID NO: 2026578 - RNA, 19 nt, Artificial Sequence
  Description of Artificial Sequence: Synthetic oligonucleotide
cugucaacgguuguuugug

SEQ ID NO: 2026579 - RNA, 19 nt, Artificial Sequence
  Description of Artificial Sequence: Synthetic oligonucleotide
aaggucgaucacguguucu

SEQ ID NO: 2026580 - RNA, 19 nt, Artificial Sequence
  Description of Artificial Sequence: Synthetic oligonucleotide
gugaaguacuguauacgug

SEQ ID NO: 2026581 - RNA, 19 nt, Artificial Sequence
  Description of Artificial Sequence: Synthetic oligonucleotide
cuccucauguacacuugag

SEQ ID NO: 2026582 - RNA, 19 nt, Artificial Sequence
  Description of Artificial Sequence: Synthetic oligonucleotide
guuccuugcucaucccacc

SEQ ID NO: 2026583 - RNA, 19 nt, Artificial Sequence
  Description of Artificial Sequence: Synthetic oligonucleotide
uuggaacaaugccugcaau

SEQ ID NO: 2026584 - RNA, 19 nt, Artificial Sequence
  Description of Artificial Sequence: Synthetic oligonucleotide
ugucaacgguuguuuguga

SEQ ID NO: 2026585 - RNA, 19 nt, Artificial Sequence
  Description of Artificial Sequence: Synthetic oligonucleotide
uuucaaggucgaucacgug

SEQ ID NO: 2026586 - RNA, 19 nt, Artificial Sequence
  Description of Artificial Sequence: Synthetic oligonucleotide
aggacuggaucaaaugacu

SEQ ID NO: 2026587 - RNA, 19 nt, Artificial Sequence
  Description of Artificial Sequence: Synthetic oligonucleotide
auaguccuguguucacuca

SEQ ID NO: 2026588 - RNA, 19 nt, Artificial Sequence
  Description of Artificial Sequence: Synthetic oligonucleotide
uauggugcugugcuaccuu

SEQ ID NO: 2026589 - RNA, 19 nt, Artificial Sequence
  Description of Artificial Sequence: Synthetic oligonucleotide
uuauggugcugugcuaccu

SEQ ID NO: 2026590 - RNA, 19 nt, Artificial Sequence
  Description of Artificial Sequence: Synthetic oligonucleotide
uccucuuauccaggacugg

SEQ ID NO: 2026591 - RNA, 19 nt, Artificial Sequence
  Description of Artificial Sequence: Synthetic oligonucleotide
augccagugcccugagaag

SEQ ID NO: 2026592 - RNA, 19 nt, Artificial Sequence
  Description of Artificial Sequence: Synthetic oligonucleotide
gugacuagcacugguuuuc

SEQ ID NO: 2026593 - RNA, 19 nt, Artificial Sequence
  Description of Artificial Sequence: Synthetic oligonucleotide
uaggacagcuguguuuugu

SEQ ID NO: 2026594 - RNA, 19 nt, Artificial Sequence
  Description of Artificial Sequence: Synthetic oligonucleotide
cagccaacaucuauaaucu

SEQ ID NO: 2026595 - RNA, 19 nt, Artificial Sequence
  Description of Artificial Sequence: Synthetic oligonucleotide
augaacauuucaaggucga

SEQ ID NO: 2026596 - RNA, 19 nt, Artificial Sequence
  Description of Artificial Sequence: Synthetic oligonucleotide
ucgcccuagagguucaguu

SEQ ID NO: 2026597 - RNA, 19 nt, Artificial Sequence
  Description of Artificial Sequence: Synthetic oligonucleotide
acuugauagcagcacugua

SEQ ID NO: 2026598 - RNA, 19 nt, Artificial Sequence
  Description of Artificial Sequence: Synthetic oligonucleotide
auccucuuauccaggacug

SEQ ID NO: 2026599 - RNA, 19 nt, Artificial Sequence
  Description of Artificial Sequence: Synthetic oligonucleotide
cauggcuuaaucuguagau

SEQ ID NO: 2026600 - RNA, 19 nt, Artificial Sequence
  Description of Artificial Sequence: Synthetic oligonucleotide
gguuguuugugaaguacug

SEQ ID NO: 2026601 - RNA, 19 nt, Artificial Sequence
  Description of Artificial Sequence: Synthetic oligonucleotide
cagaauacucucuagcuuu

SEQ ID NO: 2026602 - RNA, 19 nt, Artificial Sequence
  Description of Artificial Sequence: Synthetic oligonucleotide
agaggugcaaauguuccuu

SEQ ID NO: 2026603 - RNA, 19 nt, Artificial Sequence
  Description of Artificial Sequence: Synthetic oligonucleotide
cucauguacacuugagcua

SEQ ID NO: 2026604 - RNA, 19 nt, Artificial Sequence
  Description of Artificial Sequence: Synthetic oligonucleotide
gauggugacuagcacuggu

SEQ ID NO: 2026605 - RNA, 19 nt, Artificial Sequence
  Description of Artificial Sequence: Synthetic oligonucleotide
cuguccucagagauaucuc

SEQ ID NO: 2026606 - RNA, 19 nt, Artificial Sequence
  Description of Artificial Sequence: Synthetic oligonucleotide
cuucucccaugugugagug

SEQ ID NO: 2026607 - RNA, 19 nt, Artificial Sequence
  Description of Artificial Sequence: Synthetic oligonucleotide
cacaguuugaacugacagu

SEQ ID NO: 2026608 - RNA, 19 nt, Artificial Sequence
  Description of Artificial Sequence: Synthetic oligonucleotide
ugaacauuucaaggucgau

SEQ ID NO: 2026609 - RNA, 19 nt, Artificial Sequence
  Description of Artificial Sequence: Synthetic oligonucleotide
gucaacgguuguuugugaa

SEQ ID NO: 2026610 - RNA, 19 nt, Artificial Sequence
  Description of Artificial Sequence: Synthetic oligonucleotide
ggcuuaaucuguagauucc

SEQ ID NO: 2026611 - RNA, 19 nt, Artificial Sequence
  Description of Artificial Sequence: Synthetic oligonucleotide
cugugcacuggauuucaca

SEQ ID NO: 2026612 - RNA, 19 nt, Artificial Sequence
  Description of Artificial Sequence: Synthetic oligonucleotide
uugagcuacuggaggcauc

SEQ ID NO: 2026613 - RNA, 19 nt, Artificial Sequence
  Description of Artificial Sequence: Synthetic oligonucleotide
caauucccauggcuuaauc

SEQ ID NO: 2026614 - RNA, 19 nt, Artificial Sequence
  Description of Artificial Sequence: Synthetic oligonucleotide
cagaagccacaacagcauc

SEQ ID NO: 2026615 - RNA, 19 nt, Artificial Sequence
  Description of Artificial Sequence: Synthetic oligonucleotide
auagaauguagaggugcaa

SEQ ID NO: 2026616 - RNA, 19 nt, Artificial Sequence
  Description of Artificial Sequence: Synthetic oligonucleotide
cauaguuaaggcugcuacu

SEQ ID NO: 2026617 - RNA, 19 nt, Artificial Sequence
  Description of Artificial Sequence: Synthetic oligonucleotide
gagccaccagguuuuaaua

SEQ ID NO: 2026618 - RNA, 19 nt, Artificial Sequence
  Description of Artificial Sequence: Synthetic oligonucleotide
auggcuuaaucuguagauu

SEQ ID NO: 2026619 - RNA, 19 nt, Artificial Sequence
  Description of Artificial Sequence: Synthetic oligonucleotide
auguuuucagccacaggau

SEQ ID NO: 2026620 - RNA, 19 nt, Artificial Sequence
  Description of Artificial Sequence: Synthetic oligonucleotide
caggugaaacaaacuucuc

SEQ ID NO: 2026621 - RNA, 19 nt, Artificial Sequence
  Description of Artificial Sequence: Synthetic oligonucleotide
gggauuguagaacauuccu

SEQ ID NO: 2026622 - RNA, 19 nt, Artificial Sequence
  Description of Artificial Sequence: Synthetic oligonucleotide
gcucugcgaaaacaauucc

SEQ ID NO: 2026623 - RNA, 19 nt, Artificial Sequence
  Description of Artificial Sequence: Synthetic oligonucleotide
auaggacagcuguguuuug

SEQ ID NO: 2026624 - RNA, 19 nt, Artificial Sequence
  Description of Artificial Sequence: Synthetic oligonucleotide
uggugcugugcuaccuuaa

SEQ ID NO: 2026625 - RNA, 19 nt, Artificial Sequence
  Description of Artificial Sequence: Synthetic oligonucleotide
cuugggccacuucuguguc

SEQ ID NO: 2026626 - RNA, 19 nt, Artificial Sequence
  Description of Artificial Sequence: Synthetic oligonucleotide
caugggcugcauaguuaag

SEQ ID NO: 2026627 - RNA, 19 nt, Artificial Sequence
  Description of Artificial Sequence: Synthetic oligonucleotide
uucucccaugugugagugc

SEQ ID NO: 2026628 - RNA, 19 nt, Artificial Sequence
  Description of Artificial Sequence: Synthetic oligonucleotide
uugcugucaacgguuguuu

SEQ ID NO: 2026629 - RNA, 19 nt, Artificial Sequence
  Description of Artificial Sequence: Synthetic oligonucleotide
uggaggcaucagcuugggc

SEQ ID NO: 2026630 - RNA, 19 nt, Artificial Sequence
  Description of Artificial Sequence: Synthetic oligonucleotide
acaaugccugcaauuugcu

SEQ ID NO: 2026631 - RNA, 19 nt, Artificial Sequence
  Description of Artificial Sequence: Synthetic oligonucleotide
agucaugcugucugaucua

SEQ ID NO: 2026632 - RNA, 19 nt, Artificial Sequence
  Description of Artificial Sequence: Synthetic oligonucleotide
gaauaacgagccaccaggu

SEQ ID NO: 2026633 - RNA, 19 nt, Artificial Sequence
  Description of Artificial Sequence: Synthetic oligonucleotide
auggugcugugcuaccuua

SEQ ID NO: 2026634 - RNA, 19 nt, Artificial Sequence
  Description of Artificial Sequence: Synthetic oligonucleotide
gucugaucuaaaccgcaua

SEQ ID NO: 2026635 - RNA, 19 nt, Artificial Sequence
  Description of Artificial Sequence: Synthetic oligonucleotide
gcauauuacuacuguccuc

SEQ ID NO: 2026636 - RNA, 19 nt, Artificial Sequence
  Description of Artificial Sequence: Synthetic oligonucleotide
gcacuguaugaacauuuca

SEQ ID NO: 2026637 - RNA, 19 nt, Artificial Sequence
  Description of Artificial Sequence: Synthetic oligonucleotide
cacuugugagccagggcca

SEQ ID NO: 2026638 - RNA, 19 nt, Artificial Sequence
  Description of Artificial Sequence: Synthetic oligonucleotide
ggcugcuacuuuuacucca

SEQ ID NO: 2026639 - RNA, 19 nt, Artificial Sequence
  Description of Artificial Sequence: Synthetic oligonucleotide
guuguuugugaaguacugu

SEQ ID NO: 2026640 - RNA, 19 nt, Artificial Sequence
  Description of Artificial Sequence: Synthetic oligonucleotide
guuaaggcugcuacuuuua

SEQ ID NO: 2026641 - RNA, 19 nt, Artificial Sequence
  Description of Artificial Sequence: Synthetic oligonucleotide
gcaugggcugcauaguuaa

SEQ ID NO: 2026642 - RNA, 19 nt, Artificial Sequence
  Description of Artificial Sequence: Synthetic oligonucleotide
gcugcauaguuaaggcugc

SEQ ID NO: 2026643 - RNA, 19 nt, Artificial Sequence
  Description of Artificial Sequence: Synthetic oligonucleotide
cugcgaaaacaauucccaa

SEQ ID NO: 2026644 - RNA, 19 nt, Artificial Sequence
  Description of Artificial Sequence: Synthetic oligonucleotide
uuccugugcacuggauuuc

SEQ ID NO: 2026645 - RNA, 19 nt, Artificial Sequence
  Description of Artificial Sequence: Synthetic oligonucleotide
gcaauuugcucugcgaaaa

SEQ ID NO: 2026646 - RNA, 19 nt, Artificial Sequence
  Description of Artificial Sequence: Synthetic oligonucleotide
caucgacaaucuccuccag

SEQ ID NO: 2026647 - RNA, 19 nt, Artificial Sequence
  Description of Artificial Sequence: Synthetic oligonucleotide
cauaggacagcuguguuuu

SEQ ID NO: 2026648 - RNA, 19 nt, Artificial Sequence
  Description of Artificial Sequence: Synthetic oligonucleotide
cuacuguccucagagauau

SEQ ID NO: 2026649 - RNA, 19 nt, Artificial Sequence
  Description of Artificial Sequence: Synthetic oligonucleotide
ggauuucacagcaugggcu

SEQ ID NO: 2026650 - RNA, 19 nt, Artificial Sequence
  Description of Artificial Sequence: Synthetic oligonucleotide
gccugcaauuugcucugcg

SEQ ID NO: 2026651 - RNA, 19 nt, Artificial Sequence
  Description of Artificial Sequence: Synthetic oligonucleotide
agaagggauuguagaacau

SEQ ID NO: 2026652 - RNA, 19 nt, Artificial Sequence
  Description of Artificial Sequence: Synthetic oligonucleotide
gacuuauggugcugugcua

SEQ ID NO: 2026653 - RNA, 19 nt, Artificial Sequence
  Description of Artificial Sequence: Synthetic oligonucleotide
ucccaugugugagugccuu

SEQ ID NO: 2026654 - RNA, 19 nt, Artificial Sequence
  Description of Artificial Sequence: Synthetic oligonucleotide
caacgguuguuugugaagu

SEQ ID NO: 2026655 - RNA, 19 nt, Artificial Sequence
  Description of Artificial Sequence: Synthetic oligonucleotide
agaauacucucuagcuuuu

SEQ ID NO: 2026656 - RNA, 19 nt, Artificial Sequence
  Description of Artificial Sequence: Synthetic oligonucleotide
gcuacuggaggcaucagcu

SEQ ID NO: 2026657 - RNA, 19 nt, Artificial Sequence
  Description of Artificial Sequence: Synthetic oligonucleotide
aucacguguucuacaacuu

SEQ ID NO: 2026658 - RNA, 19 nt, Artificial Sequence
  Description of Artificial Sequence: Synthetic oligonucleotide
gcccuagagguucaguuaa

SEQ ID NO: 2026659 - RNA, 19 nt, Artificial Sequence
  Description of Artificial Sequence: Synthetic oligonucleotide
gucaugcugucugaucuaa

SEQ ID NO: 2026660 - RNA, 19 nt, Artificial Sequence
  Description of Artificial Sequence: Synthetic oligonucleotide
uccagggcacaugcuuugu

SEQ ID NO: 2026661 - RNA, 19 nt, Artificial Sequence
  Description of Artificial Sequence: Synthetic oligonucleotide
aguccuguguucacucaau

SEQ ID NO: 2026662 - RNA, 19 nt, Artificial Sequence
  Description of Artificial Sequence: Synthetic oligonucleotide
augaacuuuuaagcauauu

SEQ ID NO: 2026663 - RNA, 19 nt, Artificial Sequence
  Description of Artificial Sequence: Synthetic oligonucleotide
cucaggucauucauagaau

SEQ ID NO: 2026664 - RNA, 19 nt, Artificial Sequence
  Description of Artificial Sequence: Synthetic oligonucleotide
gccuuuuggaacaaugccu

SEQ ID NO: 2026665 - RNA, 19 nt, Artificial Sequence
  Description of Artificial Sequence: Synthetic oligonucleotide
cucaauucccauggcuuaa

SEQ ID NO: 2026666 - RNA, 19 nt, Artificial Sequence
  Description of Artificial Sequence: Synthetic oligonucleotide
ucaguaggcuccggguguu

SEQ ID NO: 2026667 - RNA, 19 nt, Artificial Sequence
  Description of Artificial Sequence: Synthetic oligonucleotide
ggguguuccugugcacugg

SEQ ID NO: 2026668 - RNA, 19 nt, Artificial Sequence
  Description of Artificial Sequence: Synthetic oligonucleotide
aaccaccgccacagccaac

SEQ ID NO: 2026669 - RNA, 19 nt, Artificial Sequence
  Description of Artificial Sequence: Synthetic oligonucleotide
agcaugggcugcauaguua

SEQ ID NO: 2026670 - RNA, 19 nt, Artificial Sequence
  Description of Artificial Sequence: Synthetic oligonucleotide
cuccaaugccagugcccug

SEQ ID NO: 2026671 - RNA, 19 nt, Artificial Sequence
  Description of Artificial Sequence: Synthetic oligonucleotide
cuaaaccgcauaguccugu

SEQ ID NO: 2026672 - RNA, 19 nt, Artificial Sequence
  Description of Artificial Sequence: Synthetic oligonucleotide
gccaccagguuuuaauacu

SEQ ID NO: 2026673 - RNA, 19 nt, Artificial Sequence
  Description of Artificial Sequence: Synthetic oligonucleotide
ggauggugacuagcacugg

SEQ ID NO: 2026674 - RNA, 19 nt, Artificial Sequence
  Description of Artificial Sequence: Synthetic oligonucleotide
ggucgaucacguguucuac

SEQ ID NO: 2026675 - RNA, 19 nt, Artificial Sequence
  Description of Artificial Sequence: Synthetic oligonucleotide
cauuugguuccagaauacu

SEQ ID NO: 2026676 - RNA, 19 nt, Artificial Sequence
  Description of Artificial Sequence: Synthetic oligonucleotide
gagcuacuggaggcaucag

SEQ ID NO: 2026677 - RNA, 19 nt, Artificial Sequence
  Description of Artificial Sequence: Synthetic oligonucleotide
gaaguacuguauacguguu

SEQ ID NO: 2026678 - RNA, 19 nt, Artificial Sequence
  Description of Artificial Sequence: Synthetic oligonucleotide
gcugucaacgguuguuugu

SEQ ID NO: 2026679 - RNA, 19 nt, Artificial Sequence
  Description of Artificial Sequence: Synthetic oligonucleotide
cugaucuaaaccgcauagu

SEQ ID NO: 2026680 - RNA, 19 nt, Artificial Sequence
  Description of Artificial Sequence: Synthetic oligonucleotide
cacugguuuucaaaagauu

SEQ ID NO: 2026681 - RNA, 19 nt, Artificial Sequence
  Description of Artificial Sequence: Synthetic oligonucleotide
ggcacccucaggucauuca

SEQ ID NO: 2026682 - RNA, 19 nt, Artificial Sequence
  Description of Artificial Sequence: Synthetic oligonucleotide
aggcuccggguguuccugu

SEQ ID NO: 2026683 - RNA, 19 nt, Artificial Sequence
  Description of Artificial Sequence: Synthetic oligonucleotide
cucuagcuuuucaggugaa

SEQ ID NO: 2026684 - RNA, 19 nt, Artificial Sequence
  Description of Artificial Sequence: Synthetic oligonucleotide
cuccuugcugucaacgguu

SEQ ID NO: 2026685 - RNA, 19 nt, Artificial Sequence
  Description of Artificial Sequence: Synthetic oligonucleotide
gcuccggguguuccugugc

SEQ ID NO: 2026686 - RNA, 19 nt, Artificial Sequence
  Description of Artificial Sequence: Synthetic oligonucleotide
ccagguuuuaauacuugau

SEQ ID NO: 2026687 - RNA, 19 nt, Artificial Sequence
  Description of Artificial Sequence: Synthetic oligonucleotide
agucgcccuagagguucag

SEQ ID NO: 2026688 - RNA, 19 nt, Artificial Sequence
  Description of Artificial Sequence: Synthetic oligonucleotide
guaggcuccggguguuccu

SEQ ID NO: 2026689 - RNA, 19 nt, Artificial Sequence
  Description of Artificial Sequence: Synthetic oligonucleotide
aacgagccaccagguuuua

SEQ ID NO: 2026690 - RNA, 19 nt, Artificial Sequence
  Description of Artificial Sequence: Synthetic oligonucleotide
uggcacccucaggucauuc

SEQ ID NO: 2026691 - RNA, 19 nt, Artificial Sequence
  Description of Artificial Sequence: Synthetic oligonucleotide
ccaaggcauaggacagcug

SEQ ID NO: 2026692 - RNA, 19 nt, Artificial Sequence
  Description of Artificial Sequence: Synthetic oligonucleotide
caaugccagugcccugaga

SEQ ID NO: 2026693 - RNA, 19 nt, Artificial Sequence
  Description of Artificial Sequence: Synthetic oligonucleotide
ggcacaugcuuuguacucu

SEQ ID NO: 2026694 - RNA, 19 nt, Artificial Sequence
  Description of Artificial Sequence: Synthetic oligonucleotide
cucuaaugaauggcacccu

SEQ ID NO: 2026695 - RNA, 19 nt, Artificial Sequence
  Description of Artificial Sequence: Synthetic oligonucleotide
ccuccucauguacacuuga

SEQ ID NO: 2026696 - RNA, 19 nt, Artificial Sequence
  Description of Artificial Sequence: Synthetic oligonucleotide
ccccagucgcccuagaggu

SEQ ID NO: 2026697 - RNA, 19 nt, Artificial Sequence
  Description of Artificial Sequence: Synthetic oligonucleotide
cgaucacguguucuacaac

SEQ ID NO: 2026698 - RNA, 19 nt, Artificial Sequence
  Description of Artificial Sequence: Synthetic oligonucleotide
cauguacacuugagcuacu

SEQ ID NO: 2026699 - RNA, 19 nt, Artificial Sequence
  Description of Artificial Sequence: Synthetic oligonucleotide
gcugugcuaccuuaauguu

SEQ ID NO: 2026700 - RNA, 19 nt, Artificial Sequence
  Description of Artificial Sequence: Synthetic oligonucleotide
cacaaaggucuuccuggau

SEQ ID NO: 2026701 - RNA, 19 nt, Artificial Sequence
  Description of Artificial Sequence: Synthetic oligonucleotide
cguguucuacaacuucaga

SEQ ID NO: 2026702 - RNA, 19 nt, Artificial Sequence
  Description of Artificial Sequence: Synthetic oligonucleotide
ccagaauacucucuagcuu

SEQ ID NO: 2026703 - RNA, 19 nt, Artificial Sequence
  Description of Artificial Sequence: Synthetic oligonucleotide
ccuagagguucaguuaaua

SEQ ID NO: 2026704 - RNA, 19 nt, Artificial Sequence
  Description of Artificial Sequence: Synthetic oligonucleotide
ccgcauaguccuguguuca

SEQ ID NO: 2026705 - RNA, 19 nt, Artificial Sequence
  Description of Artificial Sequence: Synthetic oligonucleotide
gcauaguccuguguucacu

SEQ ID NO: 2026706 - RNA, 19 nt, Artificial Sequence
  Description of Artificial Sequence: Synthetic oligonucleotide
caguaggcuccggguguuc

SEQ ID NO: 2026707 - RNA, 19 nt, Artificial Sequence
  Description of Artificial Sequence: Synthetic oligonucleotide
ccucagagauaucucacuu

SEQ ID NO: 2026708 - RNA, 19 nt, Artificial Sequence
  Description of Artificial Sequence: Synthetic oligonucleotide
gucgcccuagagguucagu

SEQ ID NO: 2026709 - RNA, 19 nt, Artificial Sequence
  Description of Artificial Sequence: Synthetic oligonucleotide
cagcuguguuuuguugacu

SEQ ID NO: 2026710 - RNA, 19 nt, Artificial Sequence
  Description of Artificial Sequence: Synthetic oligonucleotide
gcccugagaagggauugua

SEQ ID NO: 2026711 - RNA, 19 nt, Artificial Sequence
  Description of Artificial Sequence: Synthetic oligonucleotide
auggcacccucaggucauu

SEQ ID NO: 2026712 - RNA, 19 nt, Artificial Sequence
  Description of Artificial Sequence: Synthetic oligonucleotide
cccaaggcauaggacagcu

SEQ ID NO: 2026713 - RNA, 19 nt, Artificial Sequence
  Description of Artificial Sequence: Synthetic oligonucleotide
cgcccuagagguucaguua

SEQ ID NO: 2026714 - RNA, 19 nt, Artificial Sequence
  Description of Artificial Sequence: Synthetic oligonucleotide
ccagggcacaugcuuugua

SEQ ID NO: 2026715 - RNA, 19 nt, Artificial Sequence
  Description of Artificial Sequence: Synthetic oligonucleotide
ccggguguuccugugcacu

SEQ ID NO: 2026716 - RNA, 19 nt, Artificial Sequence
  Description of Artificial Sequence: Synthetic oligonucleotide
cccuagagguucaguuaau

SEQ ID NO: 2026717 - RNA, 19 nt, Artificial Sequence
  Description of Artificial Sequence: Synthetic oligonucleotide
cgccacagccaacaucuau

SEQ ID NO: 2026718 - RNA, 19 nt, Artificial Sequence
  Description of Artificial Sequence: Synthetic oligonucleotide
cccaugugugagugccuuu

SEQ ID NO: 2026719 - RNA, 19 nt, Artificial Sequence
  Description of Artificial Sequence: Synthetic oligonucleotide
cccagucgcccuagagguu

SEQ ID NO: 2026720 - RNA, 19 nt, Artificial Sequence
  Description of Artificial Sequence: Synthetic oligonucleotide
cuaauuaucaacaugacac

SEQ ID NO: 2026721 - RNA, 19 nt, Artificial Sequence
  Description of Artificial Sequence: Synthetic oligonucleotide
aaauauacuacaaaggccg

SEQ ID NO: 2026722 - RNA, 19 nt, Artificial Sequence
  Description of Artificial Sequence: Synthetic oligonucleotide
cugguuacgaaauaaagcg

SEQ ID NO: 2026723 - RNA, 19 nt, Artificial Sequence
  Description of Artificial Sequence: Synthetic oligonucleotide
uccaaauauacuacaaagg

SEQ ID NO: 2026724 - RNA, 19 nt, Artificial Sequence
  Description of Artificial Sequence: Synthetic oligonucleotide
aaggcggaaaccugaaucc

SEQ ID NO: 2026725 - RNA, 19 nt, Artificial Sequence
  Description of Artificial Sequence: Synthetic oligonucleotide
aagaauuaaaacuccugag

SEQ ID NO: 2026726 - RNA, 19 nt, Artificial Sequence
  Description of Artificial Sequence: Synthetic oligonucleotide
ucaauucugauauucacgc

SEQ ID NO: 2026727 - RNA, 19 nt, Artificial Sequence
  Description of Artificial Sequence: Synthetic oligonucleotide
uguaauacuguuccgcagg

SEQ ID NO: 2026728 - RNA, 19 nt, Artificial Sequence
  Description of Artificial Sequence: Synthetic oligonucleotide
uuucagauugagaaggcgg

SEQ ID NO: 2026729 - RNA, 19 nt, Artificial Sequence
  Description of Artificial Sequence: Synthetic oligonucleotide
cuucuaaacucucaaaugg

SEQ ID NO: 2026730 - RNA, 19 nt, Artificial Sequence
  Description of Artificial Sequence: Synthetic oligonucleotide
aauacucucgagcaguuug

SEQ ID NO: 2026731 - RNA, 19 nt, Artificial Sequence
  Description of Artificial Sequence: Synthetic oligonucleotide
aguaucucaauucugauau

SEQ ID NO: 2026732 - RNA, 19 nt, Artificial Sequence
  Description of Artificial Sequence: Synthetic oligonucleotide
cuagcaagaauuaaaacuc

SEQ ID NO: 2026733 - RNA, 19 nt, Artificial Sequence
  Description of Artificial Sequence: Synthetic oligonucleotide
ugagagauaaucuuccaca

SEQ ID NO: 2026734 - RNA, 19 nt, Artificial Sequence
  Description of Artificial Sequence: Synthetic oligonucleotide
caaauauacuacaaaggcc

SEQ ID NO: 2026735 - RNA, 19 nt, Artificial Sequence
  Description of Artificial Sequence: Synthetic oligonucleotide
aacaugacacuucuaaacu

SEQ ID NO: 2026736 - RNA, 19 nt, Artificial Sequence
  Description of Artificial Sequence: Synthetic oligonucleotide
ugcaaaauacucucgagca

SEQ ID NO: 2026737 - RNA, 19 nt, Artificial Sequence
  Description of Artificial Sequence: Synthetic oligonucleotide
uguuucuuaaacuucugca

SEQ ID NO: 2026738 - RNA, 19 nt, Artificial Sequence
  Description of Artificial Sequence: Synthetic oligonucleotide
gaagacaagacgcuggagc

SEQ ID NO: 2026739 - RNA, 19 nt, Artificial Sequence
  Description of Artificial Sequence: Synthetic oligonucleotide
auucacgccacacagcugg

SEQ ID NO: 2026740 - RNA, 19 nt, Artificial Sequence
  Description of Artificial Sequence: Synthetic oligonucleotide
gauggaaagaucauagacc

SEQ ID NO: 2026741 - RNA, 19 nt, Artificial Sequence
  Description of Artificial Sequence: Synthetic oligonucleotide
aauuaaaacuccugagaga

SEQ ID NO: 2026742 - RNA, 19 nt, Artificial Sequence
  Description of Artificial Sequence: Synthetic oligonucleotide
caacuaauuaucaacauga

SEQ ID NO: 2026743 - RNA, 19 nt, Artificial Sequence
  Description of Artificial Sequence: Synthetic oligonucleotide
auggaaagaucauagacca

SEQ ID NO: 2026744 - RNA, 19 nt, Artificial Sequence
  Description of Artificial Sequence: Synthetic oligonucleotide
aaaaguaucucaauucuga

SEQ ID NO: 2026745 - RNA, 19 nt, Artificial Sequence
  Description of Artificial Sequence: Synthetic oligonucleotide
ucggauggaaagaucauag

SEQ ID NO: 2026746 - RNA, 19 nt, Artificial Sequence
  Description of Artificial Sequence: Synthetic oligonucleotide
gaagaucucgcucacagac

SEQ ID NO: 2026747 - RNA, 19 nt, Artificial Sequence
  Description of Artificial Sequence: Synthetic oligonucleotide
uucacaucguacuucaagc

SEQ ID NO: 2026748 - RNA, 19 nt, Artificial Sequence
  Description of Artificial Sequence: Synthetic oligonucleotide
uacgaaauaaagcgcagug

SEQ ID NO: 2026749 - RNA, 19 nt, Artificial Sequence
  Description of Artificial Sequence: Synthetic oligonucleotide
aagacgcuggagcacaaac

SEQ ID NO: 2026750 - RNA, 19 nt, Artificial Sequence
  Description of Artificial Sequence: Synthetic oligonucleotide
agaagcgcgucucacagac

SEQ ID NO: 2026751 - RNA, 19 nt, Artificial Sequence
  Description of Artificial Sequence: Synthetic oligonucleotide
uuaucaacaugacacuucu

SEQ ID NO: 2026752 - RNA, 19 nt, Artificial Sequence
  Description of Artificial Sequence: Synthetic oligonucleotide
aagcgcaguguuuagcaac

SEQ ID NO: 2026753 - RNA, 19 nt, Artificial Sequence
  Description of Artificial Sequence: Synthetic oligonucleotide
agauugagaaggcggaaac

SEQ ID NO: 2026754 - RNA, 19 nt, Artificial Sequence
  Description of Artificial Sequence: Synthetic oligonucleotide
acaacuaauuaucaacaug

SEQ ID NO: 2026755 - RNA, 19 nt, Artificial Sequence
  Description of Artificial Sequence: Synthetic oligonucleotide
aauggaauuacaacaccag

SEQ ID NO: 2026756 - RNA, 19 nt, Artificial Sequence
  Description of Artificial Sequence: Synthetic oligonucleotide
cuggcaaaugccuagucgg

SEQ ID NO: 2026757 - RNA, 19 nt, Artificial Sequence
  Description of Artificial Sequence: Synthetic oligonucleotide
uaaucuuccacauccagau

SEQ ID NO: 2026758 - RNA, 19 nt, Artificial Sequence
  Description of Artificial Sequence: Synthetic oligonucleotide
auuaaaacuccugagagau

SEQ ID NO: 2026759 - RNA, 19 nt, Artificial Sequence
  Description of Artificial Sequence: Synthetic oligonucleotide
aagacaagacgcuggagca

SEQ ID NO: 2026760 - RNA, 19 nt, Artificial Sequence
  Description of Artificial Sequence: Synthetic oligonucleotide
cuuauugaagccucggaug

SEQ ID NO: 2026761 - RNA, 19 nt, Artificial Sequence
  Description of Artificial Sequence: Synthetic oligonucleotide
aauaaagcgcaguguuuag

SEQ ID NO: 2026762 - RNA, 19 nt, Artificial Sequence
  Description of Artificial Sequence: Synthetic oligonucleotide
acuaauuaucaacaugaca

SEQ ID NO: 2026763 - RNA, 19 nt, Artificial Sequence
  Description of Artificial Sequence: Synthetic oligonucleotide
auauucacgccacacagcu

SEQ ID NO: 2026764 - RNA, 19 nt, Artificial Sequence
  Description of Artificial Sequence: Synthetic oligonucleotide
caacaugacacuucuaaac

SEQ ID NO: 2026765 - RNA, 19 nt, Artificial Sequence
  Description of Artificial Sequence: Synthetic oligonucleotide
aauauacuacaaaggccgc

SEQ ID NO: 2026766 - RNA, 19 nt, Artificial Sequence
  Description of Artificial Sequence: Synthetic oligonucleotide
uugacagacagccucgaca

SEQ ID NO: 2026767 - RNA, 19 nt, Artificial Sequence
  Description of Artificial Sequence: Synthetic oligonucleotide
gaagaagcgcgucucacag

SEQ ID NO: 2026768 - RNA, 19 nt, Artificial Sequence
  Description of Artificial Sequence: Synthetic oligonucleotide
uaaagcgcaguguuuagca

SEQ ID NO: 2026769 - RNA, 19 nt, Artificial Sequence
  Description of Artificial Sequence: Synthetic oligonucleotide
ucaagcaccgcuuuggaau

SEQ ID NO: 2026770 - RNA, 19 nt, Artificial Sequence
  Description of Artificial Sequence: Synthetic oligonucleotide
ucuaaacucucaaauggaa

SEQ ID NO: 2026771 - RNA, 19 nt, Artificial Sequence
  Description of Artificial Sequence: Synthetic oligonucleotide
aaagaucauagaccaccuc

SEQ ID NO: 2026772 - RNA, 19 nt, Artificial Sequence
  Description of Artificial Sequence: Synthetic oligonucleotide
uucuaaacucucaaaugga

SEQ ID NO: 2026773 - RNA, 19 nt, Artificial Sequence
  Description of Artificial Sequence: Synthetic oligonucleotide
caaggucucacucaauuag

SEQ ID NO: 2026774 - RNA, 19 nt, Artificial Sequence
  Description of Artificial Sequence: Synthetic oligonucleotide
acaugacacuucuaaacuc

SEQ ID NO: 2026775 - RNA, 19 nt, Artificial Sequence
  Description of Artificial Sequence: Synthetic oligonucleotide
uaauuaucaacaugacacu

SEQ ID NO: 2026776 - RNA, 19 nt, Artificial Sequence
  Description of Artificial Sequence: Synthetic oligonucleotide
aacucucaaauggaauuac

SEQ ID NO: 2026777 - RNA, 19 nt, Artificial Sequence
  Description of Artificial Sequence: Synthetic oligonucleotide
aacuaauuaucaacaugac

SEQ ID NO: 2026778 - RNA, 19 nt, Artificial Sequence
  Description of Artificial Sequence: Synthetic oligonucleotide
uguuccgcagggaacuugg

SEQ ID NO: 2026779 - RNA, 19 nt, Artificial Sequence
  Description of Artificial Sequence: Synthetic oligonucleotide
cucaauuagucaagcaagc

SEQ ID NO: 2026780 - RNA, 19 nt, Artificial Sequence
  Description of Artificial Sequence: Synthetic oligonucleotide
acgaagaucucgcucacag

SEQ ID NO: 2026781 - RNA, 19 nt, Artificial Sequence
  Description of Artificial Sequence: Synthetic oligonucleotide
uuuucagauugagaaggcg

SEQ ID NO: 2026782 - RNA, 19 nt, Artificial Sequence
  Description of Artificial Sequence: Synthetic oligonucleotide
uuauugucuuuacaagcca

SEQ ID NO: 2026783 - RNA, 19 nt, Artificial Sequence
  Description of Artificial Sequence: Synthetic oligonucleotide
aaugccuagucggcaaggc

SEQ ID NO: 2026784 - RNA, 19 nt, Artificial Sequence
  Description of Artificial Sequence: Synthetic oligonucleotide
gaaggcggaaaccugaauc

SEQ ID NO: 2026785 - RNA, 19 nt, Artificial Sequence
  Description of Artificial Sequence: Synthetic oligonucleotide
accuguaauacuguuccgc

SEQ ID NO: 2026786 - RNA, 19 nt, Artificial Sequence
  Description of Artificial Sequence: Synthetic oligonucleotide
aauuagucaagcaagccuu

SEQ ID NO: 2026787 - RNA, 19 nt, Artificial Sequence
  Description of Artificial Sequence: Synthetic oligonucleotide
uuuucggauuuccucucgg

SEQ ID NO: 2026788 - RNA, 19 nt, Artificial Sequence
  Description of Artificial Sequence: Synthetic oligonucleotide
gaugaaaguagagauguga

SEQ ID NO: 2026789 - RNA, 19 nt, Artificial Sequence
  Description of Artificial Sequence: Synthetic oligonucleotide
cugcaaaauacucucgagc

SEQ ID NO: 2026790 - RNA, 19 nt, Artificial Sequence
  Description of Artificial Sequence: Synthetic oligonucleotide
cuaacuagaggagaggcac

SEQ ID NO: 2026791 - RNA, 19 nt, Artificial Sequence
  Description of Artificial Sequence: Synthetic oligonucleotide
ugagaaggcggaaaccuga

SEQ ID NO: 2026792 - RNA, 19 nt, Artificial Sequence
  Description of Artificial Sequence: Synthetic oligonucleotide
ugguuacgaaauaaagcgc

SEQ ID NO: 2026793 - RNA, 19 nt, Artificial Sequence
  Description of Artificial Sequence: Synthetic oligonucleotide
agaggcacugugcuagccc

SEQ ID NO: 2026794 - RNA, 19 nt, Artificial Sequence
  Description of Artificial Sequence: Synthetic oligonucleotide
aguguuuagcaacuggcgu

SEQ ID NO: 2026795 - RNA, 19 nt, Artificial Sequence
  Description of Artificial Sequence: Synthetic oligonucleotide
auauacuacaaaggccgcc

SEQ ID NO: 2026796 - RNA, 19 nt, Artificial Sequence
  Description of Artificial Sequence: Synthetic oligonucleotide
auguucucgagcuuucaag

SEQ ID NO: 2026797 - RNA, 19 nt, Artificial Sequence
  Description of Artificial Sequence: Synthetic oligonucleotide
ucucacucaauuagucaag

SEQ ID NO: 2026798 - RNA, 19 nt, Artificial Sequence
  Description of Artificial Sequence: Synthetic oligonucleotide
auugucuuuacaagccagc

SEQ ID NO: 2026799 - RNA, 19 nt, Artificial Sequence
  Description of Artificial Sequence: Synthetic oligonucleotide
agagauaaucuuccacauc

SEQ ID NO: 2026800 - RNA, 19 nt, Artificial Sequence
  Description of Artificial Sequence: Synthetic oligonucleotide
uguccugcaaaauacucuc

SEQ ID NO: 2026801 - RNA, 19 nt, Artificial Sequence
  Description of Artificial Sequence: Synthetic oligonucleotide
uggaauguccugcaaaaua

SEQ ID NO: 2026802 - RNA, 19 nt, Artificial Sequence
  Description of Artificial Sequence: Synthetic oligonucleotide
ugaagccucggauggaaag

SEQ ID NO: 2026803 - RNA, 19 nt, Artificial Sequence
  Description of Artificial Sequence: Synthetic oligonucleotide
agcucauugaugaaaguag

SEQ ID NO: 2026804 - RNA, 19 nt, Artificial Sequence
  Description of Artificial Sequence: Synthetic oligonucleotide
cacaucguacuucaagccg

SEQ ID NO: 2026805 - RNA, 19 nt, Artificial Sequence
  Description of Artificial Sequence: Synthetic oligonucleotide
cucauugaugaaaguagag

SEQ ID NO: 2026806 - RNA, 19 nt, Artificial Sequence
  Description of Artificial Sequence: Synthetic oligonucleotide
caaauggaauuacaacacc

SEQ ID NO: 2026807 - RNA, 19 nt, Artificial Sequence
  Description of Artificial Sequence: Synthetic oligonucleotide
ggaaagaucauagaccacc

SEQ ID NO: 2026808 - RNA, 19 nt, Artificial Sequence
  Description of Artificial Sequence: Synthetic oligonucleotide
auaaagcgcaguguuuagc

SEQ ID NO: 2026809 - RNA, 19 nt, Artificial Sequence
  Description of Artificial Sequence: Synthetic oligonucleotide
aaacuaguuuuauugucuu

SEQ ID NO: 2026810 - RNA, 19 nt, Artificial Sequence
  Description of Artificial Sequence: Synthetic oligonucleotide
agcacaaaccgccagugcu

SEQ ID NO: 2026811 - RNA, 19 nt, Artificial Sequence
  Description of Artificial Sequence: Synthetic oligonucleotide
caguguuuagcaacuggcg

SEQ ID NO: 2026812 - RNA, 19 nt, Artificial Sequence
  Description of Artificial Sequence: Synthetic oligonucleotide
ugccuagucggcaaggcca

SEQ ID NO: 2026813 - RNA, 19 nt, Artificial Sequence
  Description of Artificial Sequence: Synthetic oligonucleotide
ucaauuagucaagcaagcc

SEQ ID NO: 2026814 - RNA, 19 nt, Artificial Sequence
  Description of Artificial Sequence: Synthetic oligonucleotide
cuuucaagcaccgcuuugg

SEQ ID NO: 2026815 - RNA, 19 nt, Artificial Sequence
  Description of Artificial Sequence: Synthetic oligonucleotide
ucacaucguacuucaagcc

SEQ ID NO: 2026816 - RNA, 19 nt, Artificial Sequence
  Description of Artificial Sequence: Synthetic oligonucleotide
auugagaaggcggaaaccu

SEQ ID NO: 2026817 - RNA, 19 nt, Artificial Sequence
  Description of Artificial Sequence: Synthetic oligonucleotide
uccugcaaaauacucucga

SEQ ID NO: 2026818 - RNA, 19 nt, Artificial Sequence
  Description of Artificial Sequence: Synthetic oligonucleotide
accugaauccagcucauug

SEQ ID NO: 2026819 - RNA, 19 nt, Artificial Sequence
  Description of Artificial Sequence: Synthetic oligonucleotide
aaguaucucaauucugaua

SEQ ID NO: 2026820 - RNA, 19 nt, Artificial Sequence
  Description of Artificial Sequence: Synthetic oligonucleotide
ggauggaaagaucauagac

SEQ ID NO: 2026821 - RNA, 19 nt, Artificial Sequence
  Description of Artificial Sequence: Synthetic oligonucleotide
agagaugugaggugugucu

SEQ ID NO: 2026822 - RNA, 19 nt, Artificial Sequence
  Description of Artificial Sequence: Synthetic oligonucleotide
ucucgagcuuucaagcacc

SEQ ID NO: 2026823 - RNA, 19 nt, Artificial Sequence
  Description of Artificial Sequence: Synthetic oligonucleotide
ugcuaacuagaggagaggc

SEQ ID NO: 2026824 - RNA, 19 nt, Artificial Sequence
  Description of Artificial Sequence: Synthetic oligonucleotide
aauguucucgagcuuucaa

SEQ ID NO: 2026825 - RNA, 19 nt, Artificial Sequence
  Description of Artificial Sequence: Synthetic oligonucleotide
aagcgcgucucacagacaa

SEQ ID NO: 2026826 - RNA, 19 nt, Artificial Sequence
  Description of Artificial Sequence: Synthetic oligonucleotide
aaccuguaauacuguuccg

SEQ ID NO: 2026827 - RNA, 19 nt, Artificial Sequence
  Description of Artificial Sequence: Synthetic oligonucleotide
uucucgagcuuucaagcac

SEQ ID NO: 2026828 - RNA, 19 nt, Artificial Sequence
  Description of Artificial Sequence: Synthetic oligonucleotide
uguuuagcaacuggcgugc

SEQ ID NO: 2026829 - RNA, 19 nt, Artificial Sequence
  Description of Artificial Sequence: Synthetic oligonucleotide
caagaaucucuguaaccgc

SEQ ID NO: 2026830 - RNA, 19 nt, Artificial Sequence
  Description of Artificial Sequence: Synthetic oligonucleotide
ugugaaggggccgagagua

SEQ ID NO: 2026831 - RNA, 19 nt, Artificial Sequence
  Description of Artificial Sequence: Synthetic oligonucleotide
ugcugucuccuuauugaag

SEQ ID NO: 2026832 - RNA, 19 nt, Artificial Sequence
  Description of Artificial Sequence: Synthetic oligonucleotide
auugaugaaaguagagaug

SEQ ID NO: 2026833 - RNA, 19 nt, Artificial Sequence
  Description of Artificial Sequence: Synthetic oligonucleotide
aaaugccuagucggcaagg

SEQ ID NO: 2026834 - RNA, 19 nt, Artificial Sequence
  Description of Artificial Sequence: Synthetic oligonucleotide
ccaagaaucucuguaaccg

SEQ ID NO: 2026835 - RNA, 19 nt, Artificial Sequence
  Description of Artificial Sequence: Synthetic oligonucleotide
ugugcuagcccucccuggc

SEQ ID NO: 2026836 - RNA, 19 nt, Artificial Sequence
  Description of Artificial Sequence: Synthetic oligonucleotide
uucccgauccgguucaaug

SEQ ID NO: 2026837 - RNA, 19 nt, Artificial Sequence
  Description of Artificial Sequence: Synthetic oligonucleotide
augccuagucggcaaggcc

SEQ ID NO: 2026838 - RNA, 19 nt, Artificial Sequence
  Description of Artificial Sequence: Synthetic oligonucleotide
aacuagaggagaggcacug

SEQ ID NO: 2026839 - RNA, 19 nt, Artificial Sequence
  Description of Artificial Sequence: Synthetic oligonucleotide
uuagcaacuggcgugcuaa

SEQ ID NO: 2026840 - RNA, 19 nt, Artificial Sequence
  Description of Artificial Sequence: Synthetic oligonucleotide
auucugauauucacgccac

SEQ ID NO: 2026841 - RNA, 19 nt, Artificial Sequence
  Description of Artificial Sequence: Synthetic oligonucleotide
uugccuuagccucuugugu

SEQ ID NO: 2026842 - RNA, 19 nt, Artificial Sequence
  Description of Artificial Sequence: Synthetic oligonucleotide
uacuuucuucacaucguac

SEQ ID NO: 2026843 - RNA, 19 nt, Artificial Sequence
  Description of Artificial Sequence: Synthetic oligonucleotide
ugccaagaaucucuguaac

SEQ ID NO: 2026844 - RNA, 19 nt, Artificial Sequence
  Description of Artificial Sequence: Synthetic oligonucleotide
ugucuuuacaagccagcaa

SEQ ID NO: 2026845 - RNA, 19 nt, Artificial Sequence
  Description of Artificial Sequence: Synthetic oligonucleotide
aggagaggcacugugcuag

SEQ ID NO: 2026846 - RNA, 19 nt, Artificial Sequence
  Description of Artificial Sequence: Synthetic oligonucleotide
agcuccacgaagaucucgc

SEQ ID NO: 2026847 - RNA, 19 nt, Artificial Sequence
  Description of Artificial Sequence: Synthetic oligonucleotide
cucacuagcaagaauuaaa

SEQ ID NO: 2026848 - RNA, 19 nt, Artificial Sequence
  Description of Artificial Sequence: Synthetic oligonucleotide
cuguugacagacagccucg

SEQ ID NO: 2026849 - RNA, 19 nt, Artificial Sequence
  Description of Artificial Sequence: Synthetic oligonucleotide
ucccgauccgguucaaugc

SEQ ID NO: 2026850 - RNA, 19 nt, Artificial Sequence
  Description of Artificial Sequence: Synthetic oligonucleotide
aaaccgccagugcucauga

SEQ ID NO: 2026851 - RNA, 19 nt, Artificial Sequence
  Description of Artificial Sequence: Synthetic oligonucleotide
cacuagcaagaauuaaaac

SEQ ID NO: 2026852 - RNA, 19 nt, Artificial Sequence
  Description of Artificial Sequence: Synthetic oligonucleotide
agaucucgcucacagacau

SEQ ID NO: 2026853 - RNA, 19 nt, Artificial Sequence
  Description of Artificial Sequence: Synthetic oligonucleotide
ugaugaaaguagagaugug

SEQ ID NO: 2026854 - RNA, 19 nt, Artificial Sequence
  Description of Artificial Sequence: Synthetic oligonucleotide
uuucaagcaccgcuuugga

SEQ ID NO: 2026855 - RNA, 19 nt, Artificial Sequence
  Description of Artificial Sequence: Synthetic oligonucleotide
agaguagucuccagcaguc

SEQ ID NO: 2026856 - RNA, 19 nt, Artificial Sequence
  Description of Artificial Sequence: Synthetic oligonucleotide
aaacucucaaauggaauua

SEQ ID NO: 2026857 - RNA, 19 nt, Artificial Sequence
  Description of Artificial Sequence: Synthetic oligonucleotide
uugucuuuacaagccagca

SEQ ID NO: 2026858 - RNA, 19 nt, Artificial Sequence
  Description of Artificial Sequence: Synthetic oligonucleotide
gucucacucaauuagucaa

SEQ ID NO: 2026859 - RNA, 19 nt, Artificial Sequence
  Description of Artificial Sequence: Synthetic oligonucleotide
gcagucacacuguugacag

SEQ ID NO: 2026860 - RNA, 19 nt, Artificial Sequence
  Description of Artificial Sequence: Synthetic oligonucleotide
cuagaggagaggcacugug

SEQ ID NO: 2026861 - RNA, 19 nt, Artificial Sequence
  Description of Artificial Sequence: Synthetic oligonucleotide
cacucaauuagucaagcaa

SEQ ID NO: 2026862 - RNA, 19 nt, Artificial Sequence
  Description of Artificial Sequence: Synthetic oligonucleotide
agcugguuacgaaauaaag

SEQ ID NO: 2026863 - RNA, 19 nt, Artificial Sequence
  Description of Artificial Sequence: Synthetic oligonucleotide
ucacucaauuagucaagca

SEQ ID NO: 2026864 - RNA, 19 nt, Artificial Sequence
  Description of Artificial Sequence: Synthetic oligonucleotide
caauucugauauucacgcc

SEQ ID NO: 2026865 - RNA, 19 nt, Artificial Sequence
  Description of Artificial Sequence: Synthetic oligonucleotide
cuguaauacuguuccgcag

SEQ ID NO: 2026866 - RNA, 19 nt, Artificial Sequence
  Description of Artificial Sequence: Synthetic oligonucleotide
gaacacaacuaauuaucaa

SEQ ID NO: 2026867 - RNA, 19 nt, Artificial Sequence
  Description of Artificial Sequence: Synthetic oligonucleotide
uuacgaaauaaagcgcagu

SEQ ID NO: 2026868 - RNA, 19 nt, Artificial Sequence
  Description of Artificial Sequence: Synthetic oligonucleotide
ucucuguaaccgccucucg

SEQ ID NO: 2026869 - RNA, 19 nt, Artificial Sequence
  Description of Artificial Sequence: Synthetic oligonucleotide
uucggauuuccucucggau

SEQ ID NO: 2026870 - RNA, 19 nt, Artificial Sequence
  Description of Artificial Sequence: Synthetic oligonucleotide
gcugguuacgaaauaaagc

SEQ ID NO: 2026871 - RNA, 19 nt, Artificial Sequence
  Description of Artificial Sequence: Synthetic oligonucleotide
uggcaaaugccuagucggc

SEQ ID NO: 2026872 - RNA, 19 nt, Artificial Sequence
  Description of Artificial Sequence: Synthetic oligonucleotide
ggaauguccugcaaaauac

SEQ ID NO: 2026873 - RNA, 19 nt, Artificial Sequence
  Description of Artificial Sequence: Synthetic oligonucleotide
guagagaugugaaggggcc

SEQ ID NO: 2026874 - RNA, 19 nt, Artificial Sequence
  Description of Artificial Sequence: Synthetic oligonucleotide
guuacgaaauaaagcgcag

SEQ ID NO: 2026875 - RNA, 19 nt, Artificial Sequence
  Description of Artificial Sequence: Synthetic oligonucleotide
uuucggauuuccucucgga

SEQ ID NO: 2026876 - RNA, 19 nt, Artificial Sequence
  Description of Artificial Sequence: Synthetic oligonucleotide
aaagcgcaguguuuagcaa

SEQ ID NO: 2026877 - RNA, 19 nt, Artificial Sequence
  Description of Artificial Sequence: Synthetic oligonucleotide
gauuuccucucggaugucc

SEQ ID NO: 2026878 - RNA, 19 nt, Artificial Sequence
  Description of Artificial Sequence: Synthetic oligonucleotide
uagagaugugaaggggccg

SEQ ID NO: 2026879 - RNA, 19 nt, Artificial Sequence
  Description of Artificial Sequence: Synthetic oligonucleotide
agucggcaaggccagccac

SEQ ID NO: 2026880 - RNA, 19 nt, Artificial Sequence
  Description of Artificial Sequence: Synthetic oligonucleotide
augccaagaaucucuguaa

SEQ ID NO: 2026881 - RNA, 19 nt, Artificial Sequence
  Description of Artificial Sequence: Synthetic oligonucleotide
cacaacuuuucggauuucc

SEQ ID NO: 2026882 - RNA, 19 nt, Artificial Sequence
  Description of Artificial Sequence: Synthetic oligonucleotide
uguaaccgccucucgaguc

SEQ ID NO: 2026883 - RNA, 19 nt, Artificial Sequence
  Description of Artificial Sequence: Synthetic oligonucleotide
aagccgucguagcgcuucc

SEQ ID NO: 2026884 - RNA, 19 nt, Artificial Sequence
  Description of Artificial Sequence: Synthetic oligonucleotide
caacuggcgugcuaacuag

SEQ ID NO: 2026885 - RNA, 19 nt, Artificial Sequence
  Description of Artificial Sequence: Synthetic oligonucleotide
uggagcacaaaccgccagu

SEQ ID NO: 2026886 - RNA, 19 nt, Artificial Sequence
  Description of Artificial Sequence: Synthetic oligonucleotide
gguuacgaaauaaagcgca

SEQ ID NO: 2026887 - RNA, 19 nt, Artificial Sequence
  Description of Artificial Sequence: Synthetic oligonucleotide
uaacuagaggagaggcacu

SEQ ID NO: 2026888 - RNA, 19 nt, Artificial Sequence
  Description of Artificial Sequence: Synthetic oligonucleotide
ucggauguccugcuccgca

SEQ ID NO: 2026889 - RNA, 19 nt, Artificial Sequence
  Description of Artificial Sequence: Synthetic oligonucleotide
ucuuaaacuucugcacaac

SEQ ID NO: 2026890 - RNA, 19 nt, Artificial Sequence
  Description of Artificial Sequence: Synthetic oligonucleotide
acgaaauaaagcgcagugu

SEQ ID NO: 2026891 - RNA, 19 nt, Artificial Sequence
  Description of Artificial Sequence: Synthetic oligonucleotide
ugucuccuuauugaagccu

SEQ ID NO: 2026892 - RNA, 19 nt, Artificial Sequence
  Description of Artificial Sequence: Synthetic oligonucleotide
caauuagucaagcaagccu

SEQ ID NO: 2026893 - RNA, 19 nt, Artificial Sequence
  Description of Artificial Sequence: Synthetic oligonucleotide
agaucauagaccaccuccu

SEQ ID NO: 2026894 - RNA, 19 nt, Artificial Sequence
  Description of Artificial Sequence: Synthetic oligonucleotide
uugaggccaugaauuugcc

SEQ ID NO: 2026895 - RNA, 19 nt, Artificial Sequence
  Description of Artificial Sequence: Synthetic oligonucleotide
caagcaccgcuuuggaaug

SEQ ID NO: 2026896 - RNA, 19 nt, Artificial Sequence
  Description of Artificial Sequence: Synthetic oligonucleotide
acgccacacagcugguuac

SEQ ID NO: 2026897 - RNA, 19 nt, Artificial Sequence
  Description of Artificial Sequence: Synthetic oligonucleotide
ugccuuagccucuugugua

SEQ ID NO: 2026898 - RNA, 19 nt, Artificial Sequence
  Description of Artificial Sequence: Synthetic oligonucleotide
gaucauagaccaccuccuc

SEQ ID NO: 2026899 - RNA, 19 nt, Artificial Sequence
  Description of Artificial Sequence: Synthetic oligonucleotide
gcaaaauacucucgagcag

SEQ ID NO: 2026900 - RNA, 19 nt, Artificial Sequence
  Description of Artificial Sequence: Synthetic oligonucleotide
gaacuuggucuucagagau

SEQ ID NO: 2026901 - RNA, 19 nt, Artificial Sequence
  Description of Artificial Sequence: Synthetic oligonucleotide
aggugugucuucacuguac

SEQ ID NO: 2026902 - RNA, 19 nt, Artificial Sequence
  Description of Artificial Sequence: Synthetic oligonucleotide
caaucagccagcgccgggg

SEQ ID NO: 2026903 - RNA, 19 nt, Artificial Sequence
  Description of Artificial Sequence: Synthetic oligonucleotide
uuagucaagcaagccuuga

SEQ ID NO: 2026904 - RNA, 19 nt, Artificial Sequence
  Description of Artificial Sequence: Synthetic oligonucleotide
ucuuguguaccugggaguu

SEQ ID NO: 2026905 - RNA, 19 nt, Artificial Sequence
  Description of Artificial Sequence: Synthetic oligonucleotide
acaaucagccagcgccggg

SEQ ID NO: 2026906 - RNA, 19 nt, Artificial Sequence
  Description of Artificial Sequence: Synthetic oligonucleotide
cugucuccuuauugaagcc

SEQ ID NO: 2026907 - RNA, 19 nt, Artificial Sequence
  Description of Artificial Sequence: Synthetic oligonucleotide
cucacagacauggcgccgg

SEQ ID NO: 2026908 - RNA, 19 nt, Artificial Sequence
  Description of Artificial Sequence: Synthetic oligonucleotide
uuaaaacuccugagagaua

SEQ ID NO: 2026909 - RNA, 19 nt, Artificial Sequence
  Description of Artificial Sequence: Synthetic oligonucleotide
uggaaagaucauagaccac

SEQ ID NO: 2026910 - RNA, 19 nt, Artificial Sequence
  Description of Artificial Sequence: Synthetic oligonucleotide
cugauauucacgccacaca

SEQ ID NO: 2026911 - RNA, 19 nt, Artificial Sequence
  Description of Artificial Sequence: Synthetic oligonucleotide
ggugugucuucacuguacc

SEQ ID NO: 2026912 - RNA, 19 nt, Artificial Sequence
  Description of Artificial Sequence: Synthetic oligonucleotide
agccucgacagcucacuag

SEQ ID NO: 2026913 - RNA, 19 nt, Artificial Sequence
  Description of Artificial Sequence: Synthetic oligonucleotide
cucgagcuuucaagcaccg

SEQ ID NO: 2026914 - RNA, 19 nt, Artificial Sequence
  Description of Artificial Sequence: Synthetic oligonucleotide
aagaagcgcgucucacaga

SEQ ID NO: 2026915 - RNA, 19 nt, Artificial Sequence
  Description of Artificial Sequence: Synthetic oligonucleotide
acacuucuaaacucucaaa

SEQ ID NO: 2026916 - RNA, 19 nt, Artificial Sequence
  Description of Artificial Sequence: Synthetic oligonucleotide
gaaucucuguaaccgccuc

SEQ ID NO: 2026917 - RNA, 19 nt, Artificial Sequence
  Description of Artificial Sequence: Synthetic oligonucleotide
guacuucaagccgucguag

SEQ ID NO: 2026918 - RNA, 19 nt, Artificial Sequence
  Description of Artificial Sequence: Synthetic oligonucleotide
uucugauauucacgccaca

SEQ ID NO: 2026919 - RNA, 19 nt, Artificial Sequence
  Description of Artificial Sequence: Synthetic oligonucleotide
uuuagcaacuggcgugcua

SEQ ID NO: 2026920 - RNA, 19 nt, Artificial Sequence
  Description of Artificial Sequence: Synthetic oligonucleotide
aaaauacucucgagcaguu

SEQ ID NO: 2026921 - RNA, 19 nt, Artificial Sequence
  Description of Artificial Sequence: Synthetic oligonucleotide
uuagccucuuguguaccug

SEQ ID NO: 2026922 - RNA, 19 nt, Artificial Sequence
  Description of Artificial Sequence: Synthetic oligonucleotide
cuagucggcaaggccagcc

SEQ ID NO: 2026923 - RNA, 19 nt, Artificial Sequence
  Description of Artificial Sequence: Synthetic oligonucleotide
agagaugugaaggggccga

SEQ ID NO: 2026924 - RNA, 19 nt, Artificial Sequence
  Description of Artificial Sequence: Synthetic oligonucleotide
gauccgguucaaugccaag

SEQ ID NO: 2026925 - RNA, 19 nt, Artificial Sequence
  Description of Artificial Sequence: Synthetic oligonucleotide
gagagauaaucuuccacau

SEQ ID NO: 2026926 - RNA, 19 nt, Artificial Sequence
  Description of Artificial Sequence: Synthetic oligonucleotide
ccuggcaaaugccuagucg

SEQ ID NO: 2026927 - RNA, 19 nt, Artificial Sequence
  Description of Artificial Sequence: Synthetic oligonucleotide
guucucgagcuuucaagca

SEQ ID NO: 2026928 - RNA, 19 nt, Artificial Sequence
  Description of Artificial Sequence: Synthetic oligonucleotide
cuccuuauugaagccucgg

SEQ ID NO: 2026929 - RNA, 19 nt, Artificial Sequence
  Description of Artificial Sequence: Synthetic oligonucleotide
accgccagugcucaugaaa

SEQ ID NO: 2026930 - RNA, 19 nt, Artificial Sequence
  Description of Artificial Sequence: Synthetic oligonucleotide
acuggcgugcuaacuagag

SEQ ID NO: 2026931 - RNA, 19 nt, Artificial Sequence
  Description of Artificial Sequence: Synthetic oligonucleotide
gccaagaaucucuguaacc

SEQ ID NO: 2026932 - RNA, 19 nt, Artificial Sequence
  Description of Artificial Sequence: Synthetic oligonucleotide
gagcacaaaccgccagugc

SEQ ID NO: 2026933 - RNA, 19 nt, Artificial Sequence
  Description of Artificial Sequence: Synthetic oligonucleotide
auuagucaagcaagccuug

SEQ ID NO: 2026934 - RNA, 19 nt, Artificial Sequence
  Description of Artificial Sequence: Synthetic oligonucleotide
auugaagccucggauggaa

SEQ ID NO: 2026935 - RNA, 19 nt, Artificial Sequence
  Description of Artificial Sequence: Synthetic oligonucleotide
cuuuacaagccagcaagga

SEQ ID NO: 2026936 - RNA, 19 nt, Artificial Sequence
  Description of Artificial Sequence: Synthetic oligonucleotide
auccgguucaaugccaaga

SEQ ID NO: 2026937 - RNA, 19 nt, Artificial Sequence
  Description of Artificial Sequence: Synthetic oligonucleotide
uuguguaccugggaguuuu

SEQ ID NO: 2026938 - RNA, 19 nt, Artificial Sequence
  Description of Artificial Sequence: Synthetic oligonucleotide
uagucggcaaggccagcca

SEQ ID NO: 2026939 - RNA, 19 nt, Artificial Sequence
  Description of Artificial Sequence: Synthetic oligonucleotide
gucguagcgcuuccucagg

SEQ ID NO: 2026940 - RNA, 19 nt, Artificial Sequence
  Description of Artificial Sequence: Synthetic oligonucleotide
uauugaagccucggaugga

SEQ ID NO: 2026941 - RNA, 19 nt, Artificial Sequence
  Description of Artificial Sequence: Synthetic oligonucleotide
aagccucggauggaaagau

SEQ ID NO: 2026942 - RNA, 19 nt, Artificial Sequence
  Description of Artificial Sequence: Synthetic oligonucleotide
cuaaacucucaaauggaau

SEQ ID NO: 2026943 - RNA, 19 nt, Artificial Sequence
  Description of Artificial Sequence: Synthetic oligonucleotide
ccugcaaaauacucucgag

SEQ ID NO: 2026944 - RNA, 19 nt, Artificial Sequence
  Description of Artificial Sequence: Synthetic oligonucleotide
guaaccgccucucgaguca

SEQ ID NO: 2026945 - RNA, 19 nt, Artificial Sequence
  Description of Artificial Sequence: Synthetic oligonucleotide
gccucgacagcucacuagc

SEQ ID NO: 2026946 - RNA, 19 nt, Artificial Sequence
  Description of Artificial Sequence: Synthetic oligonucleotide
acagcucacuagcaagaau

SEQ ID NO: 2026947 - RNA, 19 nt, Artificial Sequence
  Description of Artificial Sequence: Synthetic oligonucleotide
cgugcuaacuagaggagag

SEQ ID NO: 2026948 - RNA, 19 nt, Artificial Sequence
  Description of Artificial Sequence: Synthetic oligonucleotide
gaaagaucauagaccaccu

SEQ ID NO: 2026949 - RNA, 19 nt, Artificial Sequence
  Description of Artificial Sequence: Synthetic oligonucleotide
cauagaccaccuccucuac

SEQ ID NO: 2026950 - RNA, 19 nt, Artificial Sequence
  Description of Artificial Sequence: Synthetic oligonucleotide
aggggccgagaguagucuc

SEQ ID NO: 2026951 - RNA, 19 nt, Artificial Sequence
  Description of Artificial Sequence: Synthetic oligonucleotide
ugcuagcccucccuggcaa

SEQ ID NO: 2026952 - RNA, 19 nt, Artificial Sequence
  Description of Artificial Sequence: Synthetic oligonucleotide
cuggagcacaaaccgccag

SEQ ID NO: 2026953 - RNA, 19 nt, Artificial Sequence
  Description of Artificial Sequence: Synthetic oligonucleotide
augugaaggggccgagagu

SEQ ID NO: 2026954 - RNA, 19 nt, Artificial Sequence
  Description of Artificial Sequence: Synthetic oligonucleotide
acucucaaauggaauuaca

SEQ ID NO: 2026955 - RNA, 19 nt, Artificial Sequence
  Description of Artificial Sequence: Synthetic oligonucleotide
caaaccgccagugcucaug

SEQ ID NO: 2026956 - RNA, 19 nt, Artificial Sequence
  Description of Artificial Sequence: Synthetic oligonucleotide
augaaaccuguaauacugu

SEQ ID NO: 2026957 - RNA, 19 nt, Artificial Sequence
  Description of Artificial Sequence: Synthetic oligonucleotide
uguugacagacagccucga

SEQ ID NO: 2026958 - RNA, 19 nt, Artificial Sequence
  Description of Artificial Sequence: Synthetic oligonucleotide
ggaaaccugaauccagcuc

SEQ ID NO: 2026959 - RNA, 19 nt, Artificial Sequence
  Description of Artificial Sequence: Synthetic oligonucleotide
ccgcccaacaaucagccag

SEQ ID NO: 2026960 - RNA, 19 nt, Artificial Sequence
  Description of Artificial Sequence: Synthetic oligonucleotide
aaauacucucgagcaguuu

SEQ ID NO: 2026961 - RNA, 19 nt, Artificial Sequence
  Description of Artificial Sequence: Synthetic oligonucleotide
agacagccucgacagcuca

SEQ ID NO: 2026962 - RNA, 19 nt, Artificial Sequence
  Description of Artificial Sequence: Synthetic oligonucleotide
caucguacuucaagccguc

SEQ ID NO: 2026963 - RNA, 19 nt, Artificial Sequence
  Description of Artificial Sequence: Synthetic oligonucleotide
cucuguaaccgccucucga

SEQ ID NO: 2026964 - RNA, 19 nt, Artificial Sequence
  Description of Artificial Sequence: Synthetic oligonucleotide
guugacagacagccucgac

SEQ ID NO: 2026965 - RNA, 19 nt, Artificial Sequence
  Description of Artificial Sequence: Synthetic oligonucleotide
cagcucacuagcaagaauu

SEQ ID NO: 2026966 - RNA, 19 nt, Artificial Sequence
  Description of Artificial Sequence: Synthetic oligonucleotide
aucguacuucaagccgucg

SEQ ID NO: 2026967 - RNA, 19 nt, Artificial Sequence
  Description of Artificial Sequence: Synthetic oligonucleotide
agcgcaguguuuagcaacu

SEQ ID NO: 2026968 - RNA, 19 nt, Artificial Sequence
  Description of Artificial Sequence: Synthetic oligonucleotide
cgccaggaagacaagacgc

SEQ ID NO: 2026969 - RNA, 19 nt, Artificial Sequence
  Description of Artificial Sequence: Synthetic oligonucleotide
gccgagaguagucuccagc

SEQ ID NO: 2026970 - RNA, 19 nt, Artificial Sequence
  Description of Artificial Sequence: Synthetic oligonucleotide
agaaggcggaaaccugaau

SEQ ID NO: 2026971 - RNA, 19 nt, Artificial Sequence
  Description of Artificial Sequence: Synthetic oligonucleotide
agggagaggcuccuauuuu

SEQ ID NO: 2026972 - RNA, 19 nt, Artificial Sequence
  Description of Artificial Sequence: Synthetic oligonucleotide
acagccucgacagcucacu

SEQ ID NO: 2026973 - RNA, 19 nt, Artificial Sequence
  Description of Artificial Sequence: Synthetic oligonucleotide
acucucgagcaguuuguuu

SEQ ID NO: 2026974 - RNA, 19 nt, Artificial Sequence
  Description of Artificial Sequence: Synthetic oligonucleotide
aacuggcgugcuaacuaga

SEQ ID NO: 2026975 - RNA, 19 nt, Artificial Sequence
  Description of Artificial Sequence: Synthetic oligonucleotide
gaauguccugcaaaauacu

SEQ ID NO: 2026976 - RNA, 19 nt, Artificial Sequence
  Description of Artificial Sequence: Synthetic oligonucleotide
agcaccgcuuuggaauguc

SEQ ID NO: 2026977 - RNA, 19 nt, Artificial Sequence
  Description of Artificial Sequence: Synthetic oligonucleotide
caagccgucguagcgcuuc

SEQ ID NO: 2026978 - RNA, 19 nt, Artificial Sequence
  Description of Artificial Sequence: Synthetic oligonucleotide
ccaugaauuugccauccuc

SEQ ID NO: 2026979 - RNA, 19 nt, Artificial Sequence
  Description of Artificial Sequence: Synthetic oligonucleotide
agcaacuggcgugcuaacu

SEQ ID NO: 2026980 - RNA, 19 nt, Artificial Sequence
  Description of Artificial Sequence: Synthetic oligonucleotide
ccgccagugcucaugaaac

SEQ ID NO: 2026981 - RNA, 19 nt, Artificial Sequence
  Description of Artificial Sequence: Synthetic oligonucleotide
gaaggggccgagaguaguc

SEQ ID NO: 2026982 - RNA, 19 nt, Artificial Sequence
  Description of Artificial Sequence: Synthetic oligonucleotide
gguucaaugccaagaaucu

SEQ ID NO: 2026983 - RNA, 19 nt, Artificial Sequence
  Description of Artificial Sequence: Synthetic oligonucleotide
cagcucauugaugaaagua

SEQ ID NO: 2026984 - RNA, 19 nt, Artificial Sequence
  Description of Artificial Sequence: Synthetic oligonucleotide
acacagcugguuacgaaau

SEQ ID NO: 2026985 - RNA, 19 nt, Artificial Sequence
  Description of Artificial Sequence: Synthetic oligonucleotide
cagcuccacgaagaucucg

SEQ ID NO: 2026986 - RNA, 19 nt, Artificial Sequence
  Description of Artificial Sequence: Synthetic oligonucleotide
ccgccaggaagacaagacg

SEQ ID NO: 2026987 - RNA, 19 nt, Artificial Sequence
  Description of Artificial Sequence: Synthetic oligonucleotide
gcuuucaagcaccgcuuug

SEQ ID NO: 2026988 - RNA, 19 nt, Artificial Sequence
  Description of Artificial Sequence: Synthetic oligonucleotide
cucgacagcucacuagcaa

SEQ ID NO: 2026989 - RNA, 19 nt, Artificial Sequence
  Description of Artificial Sequence: Synthetic oligonucleotide
ggcggaaaccugaauccag

SEQ ID NO: 2026990 - RNA, 19 nt, Artificial Sequence
  Description of Artificial Sequence: Synthetic oligonucleotide
cagagaugugagguguguc

SEQ ID NO: 2026991 - RNA, 19 nt, Artificial Sequence
  Description of Artificial Sequence: Synthetic oligonucleotide
ucgagcuuucaagcaccgc

SEQ ID NO: 2026992 - RNA, 19 nt, Artificial Sequence
  Description of Artificial Sequence: Synthetic oligonucleotide
gccucggauggaaagauca

SEQ ID NO: 2026993 - RNA, 19 nt, Artificial Sequence
  Description of Artificial Sequence: Synthetic oligonucleotide
gcucauugaugaaaguaga

SEQ ID NO: 2026994 - RNA, 19 nt, Artificial Sequence
  Description of Artificial Sequence: Synthetic oligonucleotide
uucacgccacacagcuggu

SEQ ID NO: 2026995 - RNA, 19 nt, Artificial Sequence
  Description of Artificial Sequence: Synthetic oligonucleotide
acuagaggagaggcacugu

SEQ ID NO: 2026996 - RNA, 19 nt, Artificial Sequence
  Description of Artificial Sequence: Synthetic oligonucleotide
gacagcucacuagcaagaa

SEQ ID NO: 2026997 - RNA, 19 nt, Artificial Sequence
  Description of Artificial Sequence: Synthetic oligonucleotide
aaccgccucucgagucacc

SEQ ID NO: 2026998 - RNA, 19 nt, Artificial Sequence
  Description of Artificial Sequence: Synthetic oligonucleotide
aggcggaaaccugaaucca

SEQ ID NO: 2026999 - RNA, 19 nt, Artificial Sequence
  Description of Artificial Sequence: Synthetic oligonucleotide
gcaacuggcgugcuaacua

SEQ ID NO: 2027000 - RNA, 19 nt, Artificial Sequence
  Description of Artificial Sequence: Synthetic oligonucleotide
cagauugagaaggcggaaa

SEQ ID NO: 2027001 - RNA, 19 nt, Artificial Sequence
  Description of Artificial Sequence: Synthetic oligonucleotide
cgcaguguuuagcaacugg

SEQ ID NO: 2027002 - RNA, 19 nt, Artificial Sequence
  Description of Artificial Sequence: Synthetic oligonucleotide
gcaaaugccuagucggcaa

SEQ ID NO: 2027003 - RNA, 19 nt, Artificial Sequence
  Description of Artificial Sequence: Synthetic oligonucleotide
agaugugaaggggccgaga

SEQ ID NO: 2027004 - RNA, 19 nt, Artificial Sequence
  Description of Artificial Sequence: Synthetic oligonucleotide
cccgauccgguucaaugcc

SEQ ID NO: 2027005 - RNA, 19 nt, Artificial Sequence
  Description of Artificial Sequence: Synthetic oligonucleotide
gucuucacuguaccaaaau

SEQ ID NO: 2027006 - RNA, 19 nt, Artificial Sequence
  Description of Artificial Sequence: Synthetic oligonucleotide
ccgagaguagucuccagca

SEQ ID NO: 2027007 - RNA, 19 nt, Artificial Sequence
  Description of Artificial Sequence: Synthetic oligonucleotide
gcggaaaccugaauccagc

SEQ ID NO: 2027008 - RNA, 19 nt, Artificial Sequence
  Description of Artificial Sequence: Synthetic oligonucleotide
cucuuguguaccugggagu

SEQ ID NO: 2027009 - RNA, 19 nt, Artificial Sequence
  Description of Artificial Sequence: Synthetic oligonucleotide
uaaccgccucucgagucac

SEQ ID NO: 2027010 - RNA, 19 nt, Artificial Sequence
  Description of Artificial Sequence: Synthetic oligonucleotide
ggcacggccgaagaagcgc

SEQ ID NO: 2027011 - RNA, 19 nt, Artificial Sequence
  Description of Artificial Sequence: Synthetic oligonucleotide
ggaagacaagacgcuggag

SEQ ID NO: 2027012 - RNA, 19 nt, Artificial Sequence
  Description of Artificial Sequence: Synthetic oligonucleotide
gagaaggcggaaaccugaa

SEQ ID NO: 2027013 - RNA, 19 nt, Artificial Sequence
  Description of Artificial Sequence: Synthetic oligonucleotide
agcucacuagcaagaauua

SEQ ID NO: 2027014 - RNA, 19 nt, Artificial Sequence
  Description of Artificial Sequence: Synthetic oligonucleotide
gaucucgcucacagacaug

SEQ ID NO: 2027015 - RNA, 19 nt, Artificial Sequence
  Description of Artificial Sequence: Synthetic oligonucleotide
aagcaccgcuuuggaaugu

SEQ ID NO: 2027016 - RNA, 19 nt, Artificial Sequence
  Description of Artificial Sequence: Synthetic oligonucleotide
cacaaaccgccagugcuca

SEQ ID NO: 2027017 - RNA, 19 nt, Artificial Sequence
  Description of Artificial Sequence: Synthetic oligonucleotide
agccucggauggaaagauc

SEQ ID NO: 2027018 - RNA, 19 nt, Artificial Sequence
  Description of Artificial Sequence: Synthetic oligonucleotide
cucggauggaaagaucaua

SEQ ID NO: 2027019 - RNA, 19 nt, Artificial Sequence
  Description of Artificial Sequence: Synthetic oligonucleotide
ggcgugcuaacuagaggag

SEQ ID NO: 2027020 - RNA, 19 nt, Artificial Sequence
  Description of Artificial Sequence: Synthetic oligonucleotide
gccuuagccucuuguguac

SEQ ID NO: 2027021 - RNA, 19 nt, Artificial Sequence
  Description of Artificial Sequence: Synthetic oligonucleotide
cacgccacacagcugguua

SEQ ID NO: 2027022 - RNA, 19 nt, Artificial Sequence
  Description of Artificial Sequence: Synthetic oligonucleotide
uagcccucccuggcaaaug

SEQ ID NO: 2027023 - RNA, 19 nt, Artificial Sequence
  Description of Artificial Sequence: Synthetic oligonucleotide
uacucucgagcaguuuguu

SEQ ID NO: 2027024 - RNA, 19 nt, Artificial Sequence
  Description of Artificial Sequence: Synthetic oligonucleotide
cuguuccgcagggaacuug

SEQ ID NO: 2027025 - RNA, 19 nt, Artificial Sequence
  Description of Artificial Sequence: Synthetic oligonucleotide
ggccgcccaacaaucagcc

SEQ ID NO: 2027026 - RNA, 19 nt, Artificial Sequence
  Description of Artificial Sequence: Synthetic oligonucleotide
gcacggccgaagaagcgcg

SEQ ID NO: 2027027 - RNA, 19 nt, Artificial Sequence
  Description of Artificial Sequence: Synthetic oligonucleotide
ccgcuuuggaauguccugc

SEQ ID NO: 2027028 - RNA, 19 nt, Artificial Sequence
  Description of Artificial Sequence: Synthetic oligonucleotide
cuuagccucuuguguaccu

SEQ ID NO: 2027029 - RNA, 19 nt, Artificial Sequence
  Description of Artificial Sequence: Synthetic oligonucleotide
ggcacugugcuagcccucc

SEQ ID NO: 2027030 - RNA, 19 nt, Artificial Sequence
  Description of Artificial Sequence: Synthetic oligonucleotide
gucaccagggucucuguuu

SEQ ID NO: 2027031 - RNA, 19 nt, Artificial Sequence
  Description of Artificial Sequence: Synthetic oligonucleotide
cgucguagcgcuuccucag

SEQ ID NO: 2027032 - RNA, 19 nt, Artificial Sequence
  Description of Artificial Sequence: Synthetic oligonucleotide
aagcaagccuugaggccau

SEQ ID NO: 2027033 - RNA, 19 nt, Artificial Sequence
  Description of Artificial Sequence: Synthetic oligonucleotide
uuucccgauccgguucaau

SEQ ID NO: 2027034 - RNA, 19 nt, Artificial Sequence
  Description of Artificial Sequence: Synthetic oligonucleotide
aaccgccagugcucaugaa

SEQ ID NO: 2027035 - RNA, 19 nt, Artificial Sequence
  Description of Artificial Sequence: Synthetic oligonucleotide
ccuugaggccaugaauuug

SEQ ID NO: 2027036 - RNA, 19 nt, Artificial Sequence
  Description of Artificial Sequence: Synthetic oligonucleotide
caccgcuuuggaauguccu

SEQ ID NO: 2027037 - RNA, 19 nt, Artificial Sequence
  Description of Artificial Sequence: Synthetic oligonucleotide
ggggccgagaguagucucc

SEQ ID NO: 2027038 - RNA, 19 nt, Artificial Sequence
  Description of Artificial Sequence: Synthetic oligonucleotide
cucgagucaccagggucuc

SEQ ID NO: 2027039 - RNA, 19 nt, Artificial Sequence
  Description of Artificial Sequence: Synthetic oligonucleotide
ccuuauugaagccucggau

SEQ ID NO: 2027040 - RNA, 19 nt, Artificial Sequence
  Description of Artificial Sequence: Synthetic oligonucleotide
gcucacagacauggcgccg

SEQ ID NO: 2027041 - RNA, 19 nt, Artificial Sequence
  Description of Artificial Sequence: Synthetic oligonucleotide
gugcuagcccucccuggca

SEQ ID NO: 2027042 - RNA, 19 nt, Artificial Sequence
  Description of Artificial Sequence: Synthetic oligonucleotide
cgagaguagucuccagcag

SEQ ID NO: 2027043 - RNA, 19 nt, Artificial Sequence
  Description of Artificial Sequence: Synthetic oligonucleotide
cgcccaacaaucagccagc

SEQ ID NO: 2027044 - RNA, 19 nt, Artificial Sequence
  Description of Artificial Sequence: Synthetic oligonucleotide
gcacaaaccgccagugcuc

SEQ ID NO: 2027045 - RNA, 19 nt, Artificial Sequence
  Description of Artificial Sequence: Synthetic oligonucleotide
cccaacaaucagccagcgc

SEQ ID NO: 2027046 - RNA, 19 nt, Artificial Sequence
  Description of Artificial Sequence: Synthetic oligonucleotide
gccuagucggcaaggccag

SEQ ID NO: 2027047 - RNA, 19 nt, Artificial Sequence
  Description of Artificial Sequence: Synthetic oligonucleotide
acaaaccgccagugcucau

SEQ ID NO: 2027048 - RNA, 19 nt, Artificial Sequence
  Description of Artificial Sequence: Synthetic oligonucleotide
agcgcgucucacagacaag

SEQ ID NO: 2027049 - RNA, 19 nt, Artificial Sequence
  Description of Artificial Sequence: Synthetic oligonucleotide
cagcgccggggcacggccg

SEQ ID NO: 2027050 - RNA, 19 nt, Artificial Sequence
  Description of Artificial Sequence: Synthetic oligonucleotide
uuuucccgauccgguucaa

SEQ ID NO: 2027051 - RNA, 19 nt, Artificial Sequence
  Description of Artificial Sequence: Synthetic oligonucleotide
gagcuuucaagcaccgcuu

SEQ ID NO: 2027052 - RNA, 19 nt, Artificial Sequence
  Description of Artificial Sequence: Synthetic oligonucleotide
auggcgccggccgcccaac

SEQ ID NO: 2027053 - RNA, 19 nt, Artificial Sequence
  Description of Artificial Sequence: Synthetic oligonucleotide
ccuuagccucuuguguacc

SEQ ID NO: 2027054 - RNA, 19 nt, Artificial Sequence
  Description of Artificial Sequence: Synthetic oligonucleotide
caaugccaagaaucucugu

SEQ ID NO: 2027055 - RNA, 19 nt, Artificial Sequence
  Description of Artificial Sequence: Synthetic oligonucleotide
ucaagccgucguagcgcuu

SEQ ID NO: 2027056 - RNA, 19 nt, Artificial Sequence
  Description of Artificial Sequence: Synthetic oligonucleotide
gcccaacaaucagccagcg

SEQ ID NO: 2027057 - RNA, 19 nt, Artificial Sequence
  Description of Artificial Sequence: Synthetic oligonucleotide
cgagcuuucaagcaccgcu

SEQ ID NO: 2027058 - RNA, 19 nt, Artificial Sequence
  Description of Artificial Sequence: Synthetic oligonucleotide
gaagcgcgucucacagaca

SEQ ID NO: 2027059 - RNA, 19 nt, Artificial Sequence
  Description of Artificial Sequence: Synthetic oligonucleotide
ucacgccacacagcugguu

SEQ ID NO: 2027060 - RNA, 19 nt, Artificial Sequence
  Description of Artificial Sequence: Synthetic oligonucleotide
cagggagaggcuccuauuu

SEQ ID NO: 2027061 - RNA, 19 nt, Artificial Sequence
  Description of Artificial Sequence: Synthetic oligonucleotide
ucgagucaccagggucucu

SEQ ID NO: 2027062 - RNA, 19 nt, Artificial Sequence
  Description of Artificial Sequence: Synthetic oligonucleotide
gcgugcuaacuagaggaga

SEQ ID NO: 2027063 - RNA, 19 nt, Artificial Sequence
  Description of Artificial Sequence: Synthetic oligonucleotide
gcucacuagcaagaauuaa

SEQ ID NO: 2027064 - RNA, 19 nt, Artificial Sequence
  Description of Artificial Sequence: Synthetic oligonucleotide
gccucuuguguaccuggga

SEQ ID NO: 2027065 - RNA, 19 nt, Artificial Sequence
  Description of Artificial Sequence: Synthetic oligonucleotide
gccgucguagcgcuuccuc

SEQ ID NO: 2027066 - RNA, 19 nt, Artificial Sequence
  Description of Artificial Sequence: Synthetic oligonucleotide
ccgaagaagcgcgucucac

SEQ ID NO: 2027067 - RNA, 19 nt, Artificial Sequence
  Description of Artificial Sequence: Synthetic oligonucleotide
gggcacggccgaagaagcg

SEQ ID NO: 2027068 - RNA, 19 nt, Artificial Sequence
  Description of Artificial Sequence: Synthetic oligonucleotide
cgccagugcucaugaaacc

SEQ ID NO: 2027069 - RNA, 19 nt, Artificial Sequence
  Description of Artificial Sequence: Synthetic oligonucleotide
gccagugcucaugaaaccu

SEQ ID NO: 2027070 - RNA, 19 nt, Artificial Sequence
  Description of Artificial Sequence: Synthetic oligonucleotide
gcaccgcuuuggaaugucc

SEQ ID NO: 2027071 - RNA, 19 nt, Artificial Sequence
  Description of Artificial Sequence: Synthetic oligonucleotide
acaagacgcuggagcacaa

SEQ ID NO: 2027072 - RNA, 19 nt, Artificial Sequence
  Description of Artificial Sequence: Synthetic oligonucleotide
cgaagaagcgcgucucaca

SEQ ID NO: 2027073 - RNA, 19 nt, Artificial Sequence
  Description of Artificial Sequence: Synthetic oligonucleotide
cacugugcuagcccucccu

SEQ ID NO: 2027074 - RNA, 19 nt, Artificial Sequence
  Description of Artificial Sequence: Synthetic oligonucleotide
acuguuccgcagggaacuu

SEQ ID NO: 2027075 - RNA, 19 nt, Artificial Sequence
  Description of Artificial Sequence: Synthetic oligonucleotide
cacgaagaucucgcucaca

SEQ ID NO: 2027076 - RNA, 19 nt, Artificial Sequence
  Description of Artificial Sequence: Synthetic oligonucleotide
cagccagcgccggggcacg

SEQ ID NO: 2027077 - RNA, 19 nt, Artificial Sequence
  Description of Artificial Sequence: Synthetic oligonucleotide
ccagcgccggggcacggcc

SEQ ID NO: 2027078 - RNA, 19 nt, Artificial Sequence
  Description of Artificial Sequence: Synthetic oligonucleotide
cggccgcccaacaaucagc

SEQ ID NO: 2027079 - RNA, 19 nt, Artificial Sequence
  Description of Artificial Sequence: Synthetic oligonucleotide
cggggcacggccgaagaag

SEQ ID NO: 2027080 - RNA, 19 nt, Artificial Sequence
  Description of Artificial Sequence: Synthetic oligonucleotide
cggauggaaagaucauaga

SEQ ID NO: 2027081 - RNA, 19 nt, Artificial Sequence
  Description of Artificial Sequence: Synthetic oligonucleotide
cggauuuccucucggaugu

SEQ ID NO: 2027082 - RNA, 19 nt, Artificial Sequence
  Description of Artificial Sequence: Synthetic oligonucleotide
gcuggagcacaaaccgcca

SEQ ID NO: 2027083 - RNA, 19 nt, Artificial Sequence
  Description of Artificial Sequence: Synthetic oligonucleotide
gcacugugcuagcccuccc

SEQ ID NO: 2027084 - RNA, 19 nt, Artificial Sequence
  Description of Artificial Sequence: Synthetic oligonucleotide
caagacgcuggagcacaaa

SEQ ID NO: 2027085 - RNA, 19 nt, Artificial Sequence
  Description of Artificial Sequence: Synthetic oligonucleotide
gccaggaagacaagacgcu

SEQ ID NO: 2027086 - RNA, 19 nt, Artificial Sequence
  Description of Artificial Sequence: Synthetic oligonucleotide
cauggcgccggccgcccaa

SEQ ID NO: 2027087 - RNA, 19 nt, Artificial Sequence
  Description of Artificial Sequence: Synthetic oligonucleotide
ccgauccgguucaaugcca

SEQ ID NO: 2027088 - RNA, 19 nt, Artificial Sequence
  Description of Artificial Sequence: Synthetic oligonucleotide
ccucgacagcucacuagca

SEQ ID NO: 2027089 - RNA, 19 nt, Artificial Sequence
  Description of Artificial Sequence: Synthetic oligonucleotide
gccacacagcugguuacga

SEQ ID NO: 2027090 - RNA, 19 nt, Artificial Sequence
  Description of Artificial Sequence: Synthetic oligonucleotide
gggccgagaguagucucca

SEQ ID NO: 2027091 - RNA, 19 nt, Artificial Sequence
  Description of Artificial Sequence: Synthetic oligonucleotide
agccgucguagcgcuuccu

SEQ ID NO: 2027092 - RNA, 19 nt, Artificial Sequence
  Description of Artificial Sequence: Synthetic oligonucleotide
cgaagaucucgcucacaga

SEQ ID NO: 2027093 - RNA, 19 nt, Artificial Sequence
  Description of Artificial Sequence: Synthetic oligonucleotide
ccacacagcugguuacgaa

SEQ ID NO: 2027094 - RNA, 19 nt, Artificial Sequence
  Description of Artificial Sequence: Synthetic oligonucleotide
cagccucgacagcucacua

SEQ ID NO: 2027095 - RNA, 19 nt, Artificial Sequence
  Description of Artificial Sequence: Synthetic oligonucleotide
ccgccucucgagucaccag

SEQ ID NO: 2027096 - RNA, 19 nt, Artificial Sequence
  Description of Artificial Sequence: Synthetic oligonucleotide
gcuagcccucccuggcaaa

SEQ ID NO: 2027097 - RNA, 19 nt, Artificial Sequence
  Description of Artificial Sequence: Synthetic oligonucleotide
gccaugaauuugccauccu

SEQ ID NO: 2027098 - RNA, 19 nt, Artificial Sequence
  Description of Artificial Sequence: Synthetic oligonucleotide
ggauuuccucucggauguc

SEQ ID NO: 2027099 - RNA, 19 nt, Artificial Sequence
  Description of Artificial Sequence: Synthetic oligonucleotide
cuagcccucccuggcaaau

SEQ ID NO: 2027100 - RNA, 19 nt, Artificial Sequence
  Description of Artificial Sequence: Synthetic oligonucleotide
gccggggcacggccgaaga

SEQ ID NO: 2027101 - RNA, 19 nt, Artificial Sequence
  Description of Artificial Sequence: Synthetic oligonucleotide
cgauccgguucaaugccaa

SEQ ID NO: 2027102 - RNA, 19 nt, Artificial Sequence
  Description of Artificial Sequence: Synthetic oligonucleotide
gccgcccaacaaucagcca

SEQ ID NO: 2027103 - RNA, 19 nt, Artificial Sequence
  Description of Artificial Sequence: Synthetic oligonucleotide
ggcgccggccgcccaacaa

SEQ ID NO: 2027104 - RNA, 19 nt, Artificial Sequence
  Description of Artificial Sequence: Synthetic oligonucleotide
ccuagucggcaaggccagc

SEQ ID NO: 2027105 - RNA, 19 nt, Artificial Sequence
  Description of Artificial Sequence: Synthetic oligonucleotide
guuccgcagggaacuuggu

SEQ ID NO: 2027106 - RNA, 19 nt, Artificial Sequence
  Description of Artificial Sequence: Synthetic oligonucleotide
ccagcucauugaugaaagu

SEQ ID NO: 2027107 - RNA, 19 nt, Artificial Sequence
  Description of Artificial Sequence: Synthetic oligonucleotide
cuuguguaccugggaguuu

SEQ ID NO: 2027108 - RNA, 19 nt, Artificial Sequence
  Description of Artificial Sequence: Synthetic oligonucleotide
cacggccgaagaagcgcgu

SEQ ID NO: 2027109 - RNA, 19 nt, Artificial Sequence
  Description of Artificial Sequence: Synthetic oligonucleotide
cggaaaccugaauccagcu

SEQ ID NO: 2027110 - RNA, 19 nt, Artificial Sequence
  Description of Artificial Sequence: Synthetic oligonucleotide
ccucggauggaaagaucau

SEQ ID NO: 2027111 - RNA, 19 nt, Artificial Sequence
  Description of Artificial Sequence: Synthetic oligonucleotide
gccagcgccggggcacggc

SEQ ID NO: 2027112 - RNA, 19 nt, Artificial Sequence
  Description of Artificial Sequence: Synthetic oligonucleotide
ccgguucaaugccaagaau

SEQ ID NO: 2027113 - RNA, 19 nt, Artificial Sequence
  Description of Artificial Sequence: Synthetic oligonucleotide
ccucucgagucaccagggu

SEQ ID NO: 2027114 - RNA, 19 nt, Artificial Sequence
  Description of Artificial Sequence: Synthetic oligonucleotide
ccggggcacggccgaagaa

SEQ ID NO: 2027115 - RNA, 19 nt, Artificial Sequence
  Description of Artificial Sequence: Synthetic oligonucleotide
gcgccggggcacggccgaa

SEQ ID NO: 2027116 - RNA, 19 nt, Artificial Sequence
  Description of Artificial Sequence: Synthetic oligonucleotide
acugauaacacucuugccc

SEQ ID NO: 2027117 - RNA, 19 nt, Artificial Sequence
  Description of Artificial Sequence: Synthetic oligonucleotide
uaauggauuaagaacaucc

SEQ ID NO: 2027118 - RNA, 19 nt, Artificial Sequence
  Description of Artificial Sequence: Synthetic oligonucleotide
aauuccaaggcauccaaac

SEQ ID NO: 2027119 - RNA, 19 nt, Artificial Sequence
  Description of Artificial Sequence: Synthetic oligonucleotide
aacuagagagaucugcagc

SEQ ID NO: 2027120 - RNA, 19 nt, Artificial Sequence
  Description of Artificial Sequence: Synthetic oligonucleotide
acucuuuagacagagagcc

SEQ ID NO: 2027121 - RNA, 19 nt, Artificial Sequence
  Description of Artificial Sequence: Synthetic oligonucleotide
ucugcuaugacauccauug

SEQ ID NO: 2027122 - RNA, 19 nt, Artificial Sequence
  Description of Artificial Sequence: Synthetic oligonucleotide
ugagacaugaagcugagca

SEQ ID NO: 2027123 - RNA, 19 nt, Artificial Sequence
  Description of Artificial Sequence: Synthetic oligonucleotide
augugaaaggccuugaaac

SEQ ID NO: 2027124 - RNA, 19 nt, Artificial Sequence
  Description of Artificial Sequence: Synthetic oligonucleotide
ucuagcucaagucuugugg

SEQ ID NO: 2027125 - RNA, 19 nt, Artificial Sequence
  Description of Artificial Sequence: Synthetic oligonucleotide
ugauuaauggauuaagaac

SEQ ID NO: 2027126 - RNA, 19 nt, Artificial Sequence
  Description of Artificial Sequence: Synthetic oligonucleotide
uucuuuuaaauccaggggu

SEQ ID NO: 2027127 - RNA, 19 nt, Artificial Sequence
  Description of Artificial Sequence: Synthetic oligonucleotide
aauauucucugucuccgac

SEQ ID NO: 2027128 - RNA, 19 nt, Artificial Sequence
  Description of Artificial Sequence: Synthetic oligonucleotide
uguagaucgguucaucagg

SEQ ID NO: 2027129 - RNA, 19 nt, Artificial Sequence
  Description of Artificial Sequence: Synthetic oligonucleotide
acuaaggauagauuucacc

SEQ ID NO: 2027130 - RNA, 19 nt, Artificial Sequence
  Description of Artificial Sequence: Synthetic oligonucleotide
uggauuaagaacauccgcc

SEQ ID NO: 2027131 - RNA, 19 nt, Artificial Sequence
  Description of Artificial Sequence: Synthetic oligonucleotide
auggauuaagaacauccgc

SEQ ID NO: 2027132 - RNA, 19 nt, Artificial Sequence
  Description of Artificial Sequence: Synthetic oligonucleotide
uuuauuucacuuucucggg

SEQ ID NO: 2027133 - RNA, 19 nt, Artificial Sequence
  Description of Artificial Sequence: Synthetic oligonucleotide
cuugaaacucaucaaagag

SEQ ID NO: 2027134 - RNA, 19 nt, Artificial Sequence
  Description of Artificial Sequence: Synthetic oligonucleotide
augguuaccucauuggagg

SEQ ID NO: 2027135 - RNA, 19 nt, Artificial Sequence
  Description of Artificial Sequence: Synthetic oligonucleotide
aaacgcuucuuugagcugc

SEQ ID NO: 2027136 - RNA, 19 nt, Artificial Sequence
  Description of Artificial Sequence: Synthetic oligonucleotide
ugaaacucaucaaagagua

SEQ ID NO: 2027137 - RNA, 19 nt, Artificial Sequence
  Description of Artificial Sequence: Synthetic oligonucleotide
uauuucuugccauugcaag

SEQ ID NO: 2027138 - RNA, 19 nt, Artificial Sequence
  Description of Artificial Sequence: Synthetic oligonucleotide
uguggaacaguucaauuga

SEQ ID NO: 2027139 - RNA, 19 nt, Artificial Sequence
  Description of Artificial Sequence: Synthetic oligonucleotide
aguucuguuaucuccuugg

SEQ ID NO: 2027140 - RNA, 19 nt, Artificial Sequence
  Description of Artificial Sequence: Synthetic oligonucleotide
uggucuguaauucuucucc

SEQ ID NO: 2027141 - RNA, 19 nt, Artificial Sequence
  Description of Artificial Sequence: Synthetic oligonucleotide
agaucgguucaucaggccc

SEQ ID NO: 2027142 - RNA, 19 nt, Artificial Sequence
  Description of Artificial Sequence: Synthetic oligonucleotide
caaagaguagcccauaaug

SEQ ID NO: 2027143 - RNA, 19 nt, Artificial Sequence
  Description of Artificial Sequence: Synthetic oligonucleotide
aauggauuaagaacauccg

SEQ ID NO: 2027144 - RNA, 19 nt, Artificial Sequence
  Description of Artificial Sequence: Synthetic oligonucleotide
guucuuuuaaauccagggg

SEQ ID NO: 2027145 - RNA, 19 nt, Artificial Sequence
  Description of Artificial Sequence: Synthetic oligonucleotide
uugaaacucaucaaagagu

SEQ ID NO: 2027146 - RNA, 19 nt, Artificial Sequence
  Description of Artificial Sequence: Synthetic oligonucleotide
agaacauccgccuuuucuc

SEQ ID NO: 2027147 - RNA, 19 nt, Artificial Sequence
  Description of Artificial Sequence: Synthetic oligonucleotide
agagaucugcagcacaggc

SEQ ID NO: 2027148 - RNA, 19 nt, Artificial Sequence
  Description of Artificial Sequence: Synthetic oligonucleotide
ucugcuaagcuccggauug

SEQ ID NO: 2027149 - RNA, 19 nt, Artificial Sequence
  Description of Artificial Sequence: Synthetic oligonucleotide
ugcaaaugcauggauaucc

SEQ ID NO: 2027150 - RNA, 19 nt, Artificial Sequence
  Description of Artificial Sequence: Synthetic oligonucleotide
cugauaacacucuugcccg

SEQ ID NO: 2027151 - RNA, 19 nt, Artificial Sequence
  Description of Artificial Sequence: Synthetic oligonucleotide
ucuauugaacuucuuuuga

SEQ ID NO: 2027152 - RNA, 19 nt, Artificial Sequence
  Description of Artificial Sequence: Synthetic oligonucleotide
uucuagaugugaaaggccu

SEQ ID NO: 2027153 - RNA, 19 nt, Artificial Sequence
  Description of Artificial Sequence: Synthetic oligonucleotide
uuguggaacaguucaauug

SEQ ID NO: 2027154 - RNA, 19 nt, Artificial Sequence
  Description of Artificial Sequence: Synthetic oligonucleotide
aacucuuuagacagagagc

SEQ ID NO: 2027155 - RNA, 19 nt, Artificial Sequence
  Description of Artificial Sequence: Synthetic oligonucleotide
ugagcaugcagucaacucu

SEQ ID NO: 2027156 - RNA, 19 nt, Artificial Sequence
  Description of Artificial Sequence: Synthetic oligonucleotide
uaauucuucuccacuaaga

SEQ ID NO: 2027157 - RNA, 19 nt, Artificial Sequence
  Description of Artificial Sequence: Synthetic oligonucleotide
ucaacuagagagaucugca

SEQ ID NO: 2027158 - RNA, 19 nt, Artificial Sequence
  Description of Artificial Sequence: Synthetic oligonucleotide
uauugaacuucuuuugacu

SEQ ID NO: 2027159 - RNA, 19 nt, Artificial Sequence
  Description of Artificial Sequence: Synthetic oligonucleotide
uuccaaugaauuccaaggc

SEQ ID NO: 2027160 - RNA, 19 nt, Artificial Sequence
  Description of Artificial Sequence: Synthetic oligonucleotide
cuaagagaacuaaggauag

SEQ ID NO: 2027161 - RNA, 19 nt, Artificial Sequence
  Description of Artificial Sequence: Synthetic oligonucleotide
aaugccgcuguuuugugga

SEQ ID NO: 2027162 - RNA, 19 nt, Artificial Sequence
  Description of Artificial Sequence: Synthetic oligonucleotide
uccaugguuaccucauugg

SEQ ID NO: 2027163 - RNA, 19 nt, Artificial Sequence
  Description of Artificial Sequence: Synthetic oligonucleotide
aaagaguagcccauaauga

SEQ ID NO: 2027164 - RNA, 19 nt, Artificial Sequence
  Description of Artificial Sequence: Synthetic oligonucleotide
aaaugcauggauauccucu

SEQ ID NO: 2027165 - RNA, 19 nt, Artificial Sequence
  Description of Artificial Sequence: Synthetic oligonucleotide
uaaugaguuuucuugucug

SEQ ID NO: 2027166 - RNA, 19 nt, Artificial Sequence
  Description of Artificial Sequence: Synthetic oligonucleotide
ucuagaaacacugcaguga

SEQ ID NO: 2027167 - RNA, 19 nt, Artificial Sequence
  Description of Artificial Sequence: Synthetic oligonucleotide
ucuggcuccucucuaaggc

SEQ ID NO: 2027168 - RNA, 19 nt, Artificial Sequence
  Description of Artificial Sequence: Synthetic oligonucleotide
aacuccgccagggaaaacg

SEQ ID NO: 2027169 - RNA, 19 nt, Artificial Sequence
  Description of Artificial Sequence: Synthetic oligonucleotide
aaauccagggguccccuuc

SEQ ID NO: 2027170 - RNA, 19 nt, Artificial Sequence
  Description of Artificial Sequence: Synthetic oligonucleotide
uugacuuccucaauauucu

SEQ ID NO: 2027171 - RNA, 19 nt, Artificial Sequence
  Description of Artificial Sequence: Synthetic oligonucleotide
aagagaacuaaggauagau

SEQ ID NO: 2027172 - RNA, 19 nt, Artificial Sequence
  Description of Artificial Sequence: Synthetic oligonucleotide
guugagauggucgagagca

SEQ ID NO: 2027173 - RNA, 19 nt, Artificial Sequence
  Description of Artificial Sequence: Synthetic oligonucleotide
ucuuuuaaauccagggguc

SEQ ID NO: 2027174 - RNA, 19 nt, Artificial Sequence
  Description of Artificial Sequence: Synthetic oligonucleotide
augacugucaacugggaga

SEQ ID NO: 2027175 - RNA, 19 nt, Artificial Sequence
  Description of Artificial Sequence: Synthetic oligonucleotide
auaaugaguuuucuugucu

SEQ ID NO: 2027176 - RNA, 19 nt, Artificial Sequence
  Description of Artificial Sequence: Synthetic oligonucleotide
ugaacuucuuuugacuucc

SEQ ID NO: 2027177 - RNA, 19 nt, Artificial Sequence
  Description of Artificial Sequence: Synthetic oligonucleotide
agagcaucccgaaaggccc

SEQ ID NO: 2027178 - RNA, 19 nt, Artificial Sequence
  Description of Artificial Sequence: Synthetic oligonucleotide
uccugauccauucguaggc

SEQ ID NO: 2027179 - RNA, 19 nt, Artificial Sequence
  Description of Artificial Sequence: Synthetic oligonucleotide
ugugaaaggccuugaaacu

SEQ ID NO: 2027180 - RNA, 19 nt, Artificial Sequence
  Description of Artificial Sequence: Synthetic oligonucleotide
uggauauccucuauugaac

SEQ ID NO: 2027181 - RNA, 19 nt, Artificial Sequence
  Description of Artificial Sequence: Synthetic oligonucleotide
ugagcaaacaguucuguua

SEQ ID NO: 2027182 - RNA, 19 nt, Artificial Sequence
  Description of Artificial Sequence: Synthetic oligonucleotide
agcuucuagaugugaaagg

SEQ ID NO: 2027183 - RNA, 19 nt, Artificial Sequence
  Description of Artificial Sequence: Synthetic oligonucleotide
cuauugaacuucuuuugac

SEQ ID NO: 2027184 - RNA, 19 nt, Artificial Sequence
  Description of Artificial Sequence: Synthetic oligonucleotide
cucucuaaggcugucaccc

SEQ ID NO: 2027185 - RNA, 19 nt, Artificial Sequence
  Description of Artificial Sequence: Synthetic oligonucleotide
acugcuguugagauggucg

SEQ ID NO: 2027186 - RNA, 19 nt, Artificial Sequence
  Description of Artificial Sequence: Synthetic oligonucleotide
gaaaacgcuucuuugagcu

SEQ ID NO: 2027187 - RNA, 19 nt, Artificial Sequence
  Description of Artificial Sequence: Synthetic oligonucleotide
agcuccggauugcaaaugc

SEQ ID NO: 2027188 - RNA, 19 nt, Artificial Sequence
  Description of Artificial Sequence: Synthetic oligonucleotide
cucguaaaaccugugacag

SEQ ID NO: 2027189 - RNA, 19 nt, Artificial Sequence
  Description of Artificial Sequence: Synthetic oligonucleotide
auugcaaguuucucugguc

SEQ ID NO: 2027190 - RNA, 19 nt, Artificial Sequence
  Description of Artificial Sequence: Synthetic oligonucleotide
auaacacucuugcccgugc

SEQ ID NO: 2027191 - RNA, 19 nt, Artificial Sequence
  Description of Artificial Sequence: Synthetic oligonucleotide
uuauuucacuuucucggga

SEQ ID NO: 2027192 - RNA, 19 nt, Artificial Sequence
  Description of Artificial Sequence: Synthetic oligonucleotide
gcaguagugaggcaggugg

SEQ ID NO: 2027193 - RNA, 19 nt, Artificial Sequence
  Description of Artificial Sequence: Synthetic oligonucleotide
uugcaaguuucucuggucu

SEQ ID NO: 2027194 - RNA, 19 nt, Artificial Sequence
  Description of Artificial Sequence: Synthetic oligonucleotide
aguuucucuggucuggaug

SEQ ID NO: 2027195 - RNA, 19 nt, Artificial Sequence
  Description of Artificial Sequence: Synthetic oligonucleotide
uggaacaguucaauugagc

SEQ ID NO: 2027196 - RNA, 19 nt, Artificial Sequence
  Description of Artificial Sequence: Synthetic oligonucleotide
gugauuaauggauuaagaa

SEQ ID NO: 2027197 - RNA, 19 nt, Artificial Sequence
  Description of Artificial Sequence: Synthetic oligonucleotide
uaggcuguauuucuugcca

SEQ ID NO: 2027198 - RNA, 19 nt, Artificial Sequence
  Description of Artificial Sequence: Synthetic oligonucleotide
cuaaggauagauuucaccu

SEQ ID NO: 2027199 - RNA, 19 nt, Artificial Sequence
  Description of Artificial Sequence: Synthetic oligonucleotide
uguccugauccauucguag

SEQ ID NO: 2027200 - RNA, 19 nt, Artificial Sequence
  Description of Artificial Sequence: Synthetic oligonucleotide
ccuugguucuuuuaaaucc

SEQ ID NO: 2027201 - RNA, 19 nt, Artificial Sequence
  Description of Artificial Sequence: Synthetic oligonucleotide
uguaauucuucuccacuaa

SEQ ID NO: 2027202 - RNA, 19 nt, Artificial Sequence
  Description of Artificial Sequence: Synthetic oligonucleotide
agucaacucugcuaagcuc

SEQ ID NO: 2027203 - RNA, 19 nt, Artificial Sequence
  Description of Artificial Sequence: Synthetic oligonucleotide
ugacugucaacugggagag

SEQ ID NO: 2027204 - RNA, 19 nt, Artificial Sequence
  Description of Artificial Sequence: Synthetic oligonucleotide
cuucaccucucguaaaacc

SEQ ID NO: 2027205 - RNA, 19 nt, Artificial Sequence
  Description of Artificial Sequence: Synthetic oligonucleotide
uugucuguuuccaugguua

SEQ ID NO: 2027206 - RNA, 19 nt, Artificial Sequence
  Description of Artificial Sequence: Synthetic oligonucleotide
uccggauugcaaaugcaug

SEQ ID NO: 2027207 - RNA, 19 nt, Artificial Sequence
  Description of Artificial Sequence: Synthetic oligonucleotide
ucuugaauguaggaggcac

SEQ ID NO: 2027208 - RNA, 19 nt, Artificial Sequence
  Description of Artificial Sequence: Synthetic oligonucleotide
ucgagagcaucccgaaagg

SEQ ID NO: 2027209 - RNA, 19 nt, Artificial Sequence
  Description of Artificial Sequence: Synthetic oligonucleotide
aaugcauggauauccucua

SEQ ID NO: 2027210 - RNA, 19 nt, Artificial Sequence
  Description of Artificial Sequence: Synthetic oligonucleotide
auuaagaacauccgccuuu

SEQ ID NO: 2027211 - RNA, 19 nt, Artificial Sequence
  Description of Artificial Sequence: Synthetic oligonucleotide
aaggcaucuugaauguagg

SEQ ID NO: 2027212 - RNA, 19 nt, Artificial Sequence
  Description of Artificial Sequence: Synthetic oligonucleotide
gaacuaaggauagauuuca

SEQ ID NO: 2027213 - RNA, 19 nt, Artificial Sequence
  Description of Artificial Sequence: Synthetic oligonucleotide
aacucugcuaagcuccgga

SEQ ID NO: 2027214 - RNA, 19 nt, Artificial Sequence
  Description of Artificial Sequence: Synthetic oligonucleotide
aguguagaucgguucauca

SEQ ID NO: 2027215 - RNA, 19 nt, Artificial Sequence
  Description of Artificial Sequence: Synthetic oligonucleotide
uacuggcuuagccagagau

SEQ ID NO: 2027216 - RNA, 19 nt, Artificial Sequence
  Description of Artificial Sequence: Synthetic oligonucleotide
ucaacucugcuaagcuccg

SEQ ID NO: 2027217 - RNA, 19 nt, Artificial Sequence
  Description of Artificial Sequence: Synthetic oligonucleotide
ucaccucucguaaaaccug

SEQ ID NO: 2027218 - RNA, 19 nt, Artificial Sequence
  Description of Artificial Sequence: Synthetic oligonucleotide
gaggccucuagaaacacug

SEQ ID NO: 2027219 - RNA, 19 nt, Artificial Sequence
  Description of Artificial Sequence: Synthetic oligonucleotide
acacugcagugauuaaugg

SEQ ID NO: 2027220 - RNA, 19 nt, Artificial Sequence
  Description of Artificial Sequence: Synthetic oligonucleotide
gaugugaaaggccuugaaa

SEQ ID NO: 2027221 - RNA, 19 nt, Artificial Sequence
  Description of Artificial Sequence: Synthetic oligonucleotide
uccucuauugaacuucuuu

SEQ ID NO: 2027222 - RNA, 19 nt, Artificial Sequence
  Description of Artificial Sequence: Synthetic oligonucleotide
cauaaugaguuuucuuguc

SEQ ID NO: 2027223 - RNA, 19 nt, Artificial Sequence
  Description of Artificial Sequence: Synthetic oligonucleotide
acuuucucgggaaagcauc

SEQ ID NO: 2027224 - RNA, 19 nt, Artificial Sequence
  Description of Artificial Sequence: Synthetic oligonucleotide
uugaauguaggaggcacug

SEQ ID NO: 2027225 - RNA, 19 nt, Artificial Sequence
  Description of Artificial Sequence: Synthetic oligonucleotide
auucguaggcuguauuucu

SEQ ID NO: 2027226 - RNA, 19 nt, Artificial Sequence
  Description of Artificial Sequence: Synthetic oligonucleotide
gacaguguagaucgguuca

SEQ ID NO: 2027227 - RNA, 19 nt, Artificial Sequence
  Description of Artificial Sequence: Synthetic oligonucleotide
aacuaaggauagauuucac

SEQ ID NO: 2027228 - RNA, 19 nt, Artificial Sequence
  Description of Artificial Sequence: Synthetic oligonucleotide
gauggucgagagcaucccg

SEQ ID NO: 2027229 - RNA, 19 nt, Artificial Sequence
  Description of Artificial Sequence: Synthetic oligonucleotide
agcaugacugucaacuggg

SEQ ID NO: 2027230 - RNA, 19 nt, Artificial Sequence
  Description of Artificial Sequence: Synthetic oligonucleotide
ugccauugcaaguuucucu

SEQ ID NO: 2027231 - RNA, 19 nt, Artificial Sequence
  Description of Artificial Sequence: Synthetic oligonucleotide
uauccucuauugaacuucu

SEQ ID NO: 2027232 - RNA, 19 nt, Artificial Sequence
  Description of Artificial Sequence: Synthetic oligonucleotide
ucccgaaaggcccagccac

SEQ ID NO: 2027233 - RNA, 19 nt, Artificial Sequence
  Description of Artificial Sequence: Synthetic oligonucleotide
ugauccauucguaggcugu

SEQ ID NO: 2027234 - RNA, 19 nt, Artificial Sequence
  Description of Artificial Sequence: Synthetic oligonucleotide
uguggucuguaauucuucu

SEQ ID NO: 2027235 - RNA, 19 nt, Artificial Sequence
  Description of Artificial Sequence: Synthetic oligonucleotide
guguagaucgguucaucag

SEQ ID NO: 2027236 - RNA, 19 nt, Artificial Sequence
  Description of Artificial Sequence: Synthetic oligonucleotide
agugauuaauggauuaaga

SEQ ID NO: 2027237 - RNA, 19 nt, Artificial Sequence
  Description of Artificial Sequence: Synthetic oligonucleotide
ucucgggaaagcaucucca

SEQ ID NO: 2027238 - RNA, 19 nt, Artificial Sequence
  Description of Artificial Sequence: Synthetic oligonucleotide
augcagucaacucugcuaa

SEQ ID NO: 2027239 - RNA, 19 nt, Artificial Sequence
  Description of Artificial Sequence: Synthetic oligonucleotide
guccugauccauucguagg

SEQ ID NO: 2027240 - RNA, 19 nt, Artificial Sequence
  Description of Artificial Sequence: Synthetic oligonucleotide
acuguuugaggccucuaga

SEQ ID NO: 2027241 - RNA, 19 nt, Artificial Sequence
  Description of Artificial Sequence: Synthetic oligonucleotide
uaaggauagauuucaccuu

SEQ ID NO: 2027242 - RNA, 19 nt, Artificial Sequence
  Description of Artificial Sequence: Synthetic oligonucleotide
ugacuugcucucaacuaga

SEQ ID NO: 2027243 - RNA, 19 nt, Artificial Sequence
  Description of Artificial Sequence: Synthetic oligonucleotide
ugguuaccucauuggaggg

SEQ ID NO: 2027244 - RNA, 19 nt, Artificial Sequence
  Description of Artificial Sequence: Synthetic oligonucleotide
uuuagacagagagcccagg

SEQ ID NO: 2027245 - RNA, 19 nt, Artificial Sequence
  Description of Artificial Sequence: Synthetic oligonucleotide
aauugagcaugcagucaac

SEQ ID NO: 2027246 - RNA, 19 nt, Artificial Sequence
  Description of Artificial Sequence: Synthetic oligonucleotide
uggccaugcagaaccaaug

SEQ ID NO: 2027247 - RNA, 19 nt, Artificial Sequence
  Description of Artificial Sequence: Synthetic oligonucleotide
uucuuugagcugcucuagc

SEQ ID NO: 2027248 - RNA, 19 nt, Artificial Sequence
  Description of Artificial Sequence: Synthetic oligonucleotide
cucuagaaacacugcagug

SEQ ID NO: 2027249 - RNA, 19 nt, Artificial Sequence
  Description of Artificial Sequence: Synthetic oligonucleotide
caugacugucaacugggag

SEQ ID NO: 2027250 - RNA, 19 nt, Artificial Sequence
  Description of Artificial Sequence: Synthetic oligonucleotide
guuaccucauuggagggcc

SEQ ID NO: 2027251 - RNA, 19 nt, Artificial Sequence
  Description of Artificial Sequence: Synthetic oligonucleotide
uccucucuaaggcugucac

SEQ ID NO: 2027252 - RNA, 19 nt, Artificial Sequence
  Description of Artificial Sequence: Synthetic oligonucleotide
uguugagauggucgagagc

SEQ ID NO: 2027253 - RNA, 19 nt, Artificial Sequence
  Description of Artificial Sequence: Synthetic oligonucleotide
gugaacucuuuagacagag

SEQ ID NO: 2027254 - RNA, 19 nt, Artificial Sequence
  Description of Artificial Sequence: Synthetic oligonucleotide
cagguggugaacucuuuag

SEQ ID NO: 2027255 - RNA, 19 nt, Artificial Sequence
  Description of Artificial Sequence: Synthetic oligonucleotide
auuggagggccacugcucu

SEQ ID NO: 2027256 - RNA, 19 nt, Artificial Sequence
  Description of Artificial Sequence: Synthetic oligonucleotide
agauguccugauccauucg

SEQ ID NO: 2027257 - RNA, 19 nt, Artificial Sequence
  Description of Artificial Sequence: Synthetic oligonucleotide
cagugauuaauggauuaag

SEQ ID NO: 2027258 - RNA, 19 nt, Artificial Sequence
  Description of Artificial Sequence: Synthetic oligonucleotide
ugcaaguuucucuggucug

SEQ ID NO: 2027259 - RNA, 19 nt, Artificial Sequence
  Description of Artificial Sequence: Synthetic oligonucleotide
ucuuguggucuguaauucu

SEQ ID NO: 2027260 - RNA, 19 nt, Artificial Sequence
  Description of Artificial Sequence: Synthetic oligonucleotide
aacauccgccuuuucucug

SEQ ID NO: 2027261 - RNA, 19 nt, Artificial Sequence
  Description of Artificial Sequence: Synthetic oligonucleotide
ugcagugauuaauggauua

SEQ ID NO: 2027262 - RNA, 19 nt, Artificial Sequence
  Description of Artificial Sequence: Synthetic oligonucleotide
ucgggaaagcaucuccaga

SEQ ID NO: 2027263 - RNA, 19 nt, Artificial Sequence
  Description of Artificial Sequence: Synthetic oligonucleotide
ugcucuagcucaagucuug

SEQ ID NO: 2027264 - RNA, 19 nt, Artificial Sequence
  Description of Artificial Sequence: Synthetic oligonucleotide
ucguaggcuguauuucuug

SEQ ID NO: 2027265 - RNA, 19 nt, Artificial Sequence
  Description of Artificial Sequence: Synthetic oligonucleotide
uugagcaugcagucaacuc

SEQ ID NO: 2027266 - RNA, 19 nt, Artificial Sequence
  Description of Artificial Sequence: Synthetic oligonucleotide
ugacaguguagaucgguuc

SEQ ID NO: 2027267 - RNA, 19 nt, Artificial Sequence
  Description of Artificial Sequence: Synthetic oligonucleotide
cuguugagauggucgagag

SEQ ID NO: 2027268 - RNA, 19 nt, Artificial Sequence
  Description of Artificial Sequence: Synthetic oligonucleotide
cuagaugugaaaggccuug

SEQ ID NO: 2027269 - RNA, 19 nt, Artificial Sequence
  Description of Artificial Sequence: Synthetic oligonucleotide
gggaaaacgcuucuuugag

SEQ ID NO: 2027270 - RNA, 19 nt, Artificial Sequence
  Description of Artificial Sequence: Synthetic oligonucleotide
agauggucgagagcauccc

SEQ ID NO: 2027271 - RNA, 19 nt, Artificial Sequence
  Description of Artificial Sequence: Synthetic oligonucleotide
agucuuguggucuguaauu

SEQ ID NO: 2027272 - RNA, 19 nt, Artificial Sequence
  Description of Artificial Sequence: Synthetic oligonucleotide
uucuccacuaagagaacua

SEQ ID NO: 2027273 - RNA, 19 nt, Artificial Sequence
  Description of Artificial Sequence: Synthetic oligonucleotide
ggcaucuugaauguaggag

SEQ ID NO: 2027274 - RNA, 19 nt, Artificial Sequence
  Description of Artificial Sequence: Synthetic oligonucleotide
guggugaacucuuuagaca

SEQ ID NO: 2027275 - RNA, 19 nt, Artificial Sequence
  Description of Artificial Sequence: Synthetic oligonucleotide
guuacuggcuuagccagag

SEQ ID NO: 2027276 - RNA, 19 nt, Artificial Sequence
  Description of Artificial Sequence: Synthetic oligonucleotide
acucugacuugcucucaac

SEQ ID NO: 2027277 - RNA, 19 nt, Artificial Sequence
  Description of Artificial Sequence: Synthetic oligonucleotide
aaccaaugccgcuguuuug

SEQ ID NO: 2027278 - RNA, 19 nt, Artificial Sequence
  Description of Artificial Sequence: Synthetic oligonucleotide
ccacugauaacacucuugc

SEQ ID NO: 2027279 - RNA, 19 nt, Artificial Sequence
  Description of Artificial Sequence: Synthetic oligonucleotide
ugucuguuuccaugguuac

SEQ ID NO: 2027280 - RNA, 19 nt, Artificial Sequence
  Description of Artificial Sequence: Synthetic oligonucleotide
ccggauugcaaaugcaugg

SEQ ID NO: 2027281 - RNA, 19 nt, Artificial Sequence
  Description of Artificial Sequence: Synthetic oligonucleotide
uuucaccuuuauuucacuu

SEQ ID NO: 2027282 - RNA, 19 nt, Artificial Sequence
  Description of Artificial Sequence: Synthetic oligonucleotide
guagaucgguucaucaggc

SEQ ID NO: 2027283 - RNA, 19 nt, Artificial Sequence
  Description of Artificial Sequence: Synthetic oligonucleotide
aucaaagaguagcccauaa

SEQ ID NO: 2027284 - RNA, 19 nt, Artificial Sequence
  Description of Artificial Sequence: Synthetic oligonucleotide
acagaacuccgccagggaa

SEQ ID NO: 2027285 - RNA, 19 nt, Artificial Sequence
  Description of Artificial Sequence: Synthetic oligonucleotide
uuguggucuguaauucuuc

SEQ ID NO: 2027286 - RNA, 19 nt, Artificial Sequence
  Description of Artificial Sequence: Synthetic oligonucleotide
uaagcuccggauugcaaau

SEQ ID NO: 2027287 - RNA, 19 nt, Artificial Sequence
  Description of Artificial Sequence: Synthetic oligonucleotide
ugcauggauauccucuauu

SEQ ID NO: 2027288 - RNA, 19 nt, Artificial Sequence
  Description of Artificial Sequence: Synthetic oligonucleotide
acuggugagcuuucauucu

SEQ ID NO: 2027289 - RNA, 19 nt, Artificial Sequence
  Description of Artificial Sequence: Synthetic oligonucleotide
auuucaccuuuauuucacu

SEQ ID NO: 2027290 - RNA, 19 nt, Artificial Sequence
  Description of Artificial Sequence: Synthetic oligonucleotide
uuaauggauuaagaacauc

SEQ ID NO: 2027291 - RNA, 19 nt, Artificial Sequence
  Description of Artificial Sequence: Synthetic oligonucleotide
cacuguuugaggccucuag

SEQ ID NO: 2027292 - RNA, 19 nt, Artificial Sequence
  Description of Artificial Sequence: Synthetic oligonucleotide
caaugccgcuguuuugugg

SEQ ID NO: 2027293 - RNA, 19 nt, Artificial Sequence
  Description of Artificial Sequence: Synthetic oligonucleotide
cucucaacuagagagaucu

SEQ ID NO: 2027294 - RNA, 19 nt, Artificial Sequence
  Description of Artificial Sequence: Synthetic oligonucleotide
gccauugcaaguuucucug

SEQ ID NO: 2027295 - RNA, 19 nt, Artificial Sequence
  Description of Artificial Sequence: Synthetic oligonucleotide
agacaugaagcugagcaaa

SEQ ID NO: 2027296 - RNA, 19 nt, Artificial Sequence
  Description of Artificial Sequence: Synthetic oligonucleotide
uguuaucuccuugguaacu

SEQ ID NO: 2027297 - RNA, 19 nt, Artificial Sequence
  Description of Artificial Sequence: Synthetic oligonucleotide
ucuugccauugcaaguuuc

SEQ ID NO: 2027298 - RNA, 19 nt, Artificial Sequence
  Description of Artificial Sequence: Synthetic oligonucleotide
gaaacucaucaaagaguag

SEQ ID NO: 2027299 - RNA, 19 nt, Artificial Sequence
  Description of Artificial Sequence: Synthetic oligonucleotide
gauaacacucuugcccgug

SEQ ID NO: 2027300 - RNA, 19 nt, Artificial Sequence
  Description of Artificial Sequence: Synthetic oligonucleotide
cuaagcuccggauugcaaa

SEQ ID NO: 2027301 - RNA, 19 nt, Artificial Sequence
  Description of Artificial Sequence: Synthetic oligonucleotide
accaaugccgcuguuuugu

SEQ ID NO: 2027302 - RNA, 19 nt, Artificial Sequence
  Description of Artificial Sequence: Synthetic oligonucleotide
gauugcaaaugcauggaua

SEQ ID NO: 2027303 - RNA, 19 nt, Artificial Sequence
  Description of Artificial Sequence: Synthetic oligonucleotide
uagcccauaaugaguuuuc

SEQ ID NO: 2027304 - RNA, 19 nt, Artificial Sequence
  Description of Artificial Sequence: Synthetic oligonucleotide
guucaauugagcaugcagu

SEQ ID NO: 2027305 - RNA, 19 nt, Artificial Sequence
  Description of Artificial Sequence: Synthetic oligonucleotide
agaguagcccauaaugagu

SEQ ID NO: 2027306 - RNA, 19 nt, Artificial Sequence
  Description of Artificial Sequence: Synthetic oligonucleotide
caucccgaaaggcccagcc

SEQ ID NO: 2027307 - RNA, 19 nt, Artificial Sequence
  Description of Artificial Sequence: Synthetic oligonucleotide
uguuacuggcuuagccaga

SEQ ID NO: 2027308 - RNA, 19 nt, Artificial Sequence
  Description of Artificial Sequence: Synthetic oligonucleotide
gauguccugauccauucgu

SEQ ID NO: 2027309 - RNA, 19 nt, Artificial Sequence
  Description of Artificial Sequence: Synthetic oligonucleotide
gagacaugaagcugagcaa

SEQ ID NO: 2027310 - RNA, 19 nt, Artificial Sequence
  Description of Artificial Sequence: Synthetic oligonucleotide
ucuccacuaagagaacuaa

SEQ ID NO: 2027311 - RNA, 19 nt, Artificial Sequence
  Description of Artificial Sequence: Synthetic oligonucleotide
ucuagaugugaaaggccuu

SEQ ID NO: 2027312 - RNA, 19 nt, Artificial Sequence
  Description of Artificial Sequence: Synthetic oligonucleotide
agcaaacaguucuguuauc

SEQ ID NO: 2027313 - RNA, 19 nt, Artificial Sequence
  Description of Artificial Sequence: Synthetic oligonucleotide
cucgggaaagcaucuccag

SEQ ID NO: 2027314 - RNA, 19 nt, Artificial Sequence
  Description of Artificial Sequence: Synthetic oligonucleotide
uagaucgguucaucaggcc

SEQ ID NO: 2027315 - RNA, 19 nt, Artificial Sequence
  Description of Artificial Sequence: Synthetic oligonucleotide
ggaaaacgcuucuuugagc

SEQ ID NO: 2027316 - RNA, 19 nt, Artificial Sequence
  Description of Artificial Sequence: Synthetic oligonucleotide
cauucguaggcuguauuuc

SEQ ID NO: 2027317 - RNA, 19 nt, Artificial Sequence
  Description of Artificial Sequence: Synthetic oligonucleotide
cuguuaucuccuugguaac

SEQ ID NO: 2027318 - RNA, 19 nt, Artificial Sequence
  Description of Artificial Sequence: Synthetic oligonucleotide
uaagagaacuaaggauaga

SEQ ID NO: 2027319 - RNA, 19 nt, Artificial Sequence
  Description of Artificial Sequence: Synthetic oligonucleotide
augaagcugagcaaacagu

SEQ ID NO: 2027320 - RNA, 19 nt, Artificial Sequence
  Description of Artificial Sequence: Synthetic oligonucleotide
cauccucacagaacuccgc

SEQ ID NO: 2027321 - RNA, 19 nt, Artificial Sequence
  Description of Artificial Sequence: Synthetic oligonucleotide
gucuguaauucuucuccac

SEQ ID NO: 2027322 - RNA, 19 nt, Artificial Sequence
  Description of Artificial Sequence: Synthetic oligonucleotide
uuaagaacauccgccuuuu

SEQ ID NO: 2027323 - RNA, 19 nt, Artificial Sequence
  Description of Artificial Sequence: Synthetic oligonucleotide
gacuugcucucaacuagag

SEQ ID NO: 2027324 - RNA, 19 nt, Artificial Sequence
  Description of Artificial Sequence: Synthetic oligonucleotide
caugcagucaacucugcua

SEQ ID NO: 2027325 - RNA, 19 nt, Artificial Sequence
  Description of Artificial Sequence: Synthetic oligonucleotide
gugaaaggccuugaaacuc

SEQ ID NO: 2027326 - RNA, 19 nt, Artificial Sequence
  Description of Artificial Sequence: Synthetic oligonucleotide
acuccgccagggaaaacgc

SEQ ID NO: 2027327 - RNA, 19 nt, Artificial Sequence
  Description of Artificial Sequence: Synthetic oligonucleotide
cauggauauccucuauuga

SEQ ID NO: 2027328 - RNA, 19 nt, Artificial Sequence
  Description of Artificial Sequence: Synthetic oligonucleotide
cuuuguccuucaccucucg

SEQ ID NO: 2027329 - RNA, 19 nt, Artificial Sequence
  Description of Artificial Sequence: Synthetic oligonucleotide
ucucaacuagagagaucug

SEQ ID NO: 2027330 - RNA, 19 nt, Artificial Sequence
  Description of Artificial Sequence: Synthetic oligonucleotide
gaacaguucaauugagcau

SEQ ID NO: 2027331 - RNA, 19 nt, Artificial Sequence
  Description of Artificial Sequence: Synthetic oligonucleotide
agcucaagucuuguggucu

SEQ ID NO: 2027332 - RNA, 19 nt, Artificial Sequence
  Description of Artificial Sequence: Synthetic oligonucleotide
ugcucucaacuagagagau

SEQ ID NO: 2027333 - RNA, 19 nt, Artificial Sequence
  Description of Artificial Sequence: Synthetic oligonucleotide
gacaugaagcugagcaaac

SEQ ID NO: 2027334 - RNA, 19 nt, Artificial Sequence
  Description of Artificial Sequence: Synthetic oligonucleotide
cacagcaugacugucaacu

SEQ ID NO: 2027335 - RNA, 19 nt, Artificial Sequence
  Description of Artificial Sequence: Synthetic oligonucleotide
ucucugaccccagcaguag

SEQ ID NO: 2027336 - RNA, 19 nt, Artificial Sequence
  Description of Artificial Sequence: Synthetic oligonucleotide
cugauccauucguaggcug

SEQ ID NO: 2027337 - RNA, 19 nt, Artificial Sequence
  Description of Artificial Sequence: Synthetic oligonucleotide
cuguuugaggccucuagaa

SEQ ID NO: 2027338 - RNA, 19 nt, Artificial Sequence
  Description of Artificial Sequence: Synthetic oligonucleotide
agaugugaaaggccuugaa

SEQ ID NO: 2027339 - RNA, 19 nt, Artificial Sequence
  Description of Artificial Sequence: Synthetic oligonucleotide
cauuggagggccacugcuc

SEQ ID NO: 2027340 - RNA, 19 nt, Artificial Sequence
  Description of Artificial Sequence: Synthetic oligonucleotide
aggucuuuacacagcauga

SEQ ID NO: 2027341 - RNA, 19 nt, Artificial Sequence
  Description of Artificial Sequence: Synthetic oligonucleotide
ggcuuagccagagaugucc

SEQ ID NO: 2027342 - RNA, 19 nt, Artificial Sequence
  Description of Artificial Sequence: Synthetic oligonucleotide
cacuaagagaacuaaggau

SEQ ID NO: 2027343 - RNA, 19 nt, Artificial Sequence
  Description of Artificial Sequence: Synthetic oligonucleotide
gaauguaggaggcacuguu

SEQ ID NO: 2027344 - RNA, 19 nt, Artificial Sequence
  Description of Artificial Sequence: Synthetic oligonucleotide
ugauaacacucuugcccgu

SEQ ID NO: 2027345 - RNA, 19 nt, Artificial Sequence
  Description of Artificial Sequence: Synthetic oligonucleotide
acucuugcccgugcucugc

SEQ ID NO: 2027346 - RNA, 19 nt, Artificial Sequence
  Description of Artificial Sequence: Synthetic oligonucleotide
ucguaaaaccugugacagu

SEQ ID NO: 2027347 - RNA, 19 nt, Artificial Sequence
  Description of Artificial Sequence: Synthetic oligonucleotide
gugacucugacuugcucuc

SEQ ID NO: 2027348 - RNA, 19 nt, Artificial Sequence
  Description of Artificial Sequence: Synthetic oligonucleotide
ugagauggucgagagcauc

SEQ ID NO: 2027349 - RNA, 19 nt, Artificial Sequence
  Description of Artificial Sequence: Synthetic oligonucleotide
ugcagucaacucugcuaag

SEQ ID NO: 2027350 - RNA, 19 nt, Artificial Sequence
  Description of Artificial Sequence: Synthetic oligonucleotide
auccgccuuuucucugacc

SEQ ID NO: 2027351 - RNA, 19 nt, Artificial Sequence
  Description of Artificial Sequence: Synthetic oligonucleotide
uucguaggcuguauuucuu

SEQ ID NO: 2027352 - RNA, 19 nt, Artificial Sequence
  Description of Artificial Sequence: Synthetic oligonucleotide
cucauuggagggccacugc

SEQ ID NO: 2027353 - RNA, 19 nt, Artificial Sequence
  Description of Artificial Sequence: Synthetic oligonucleotide
cagcacaggcaggagaagc

SEQ ID NO: 2027354 - RNA, 19 nt, Artificial Sequence
  Description of Artificial Sequence: Synthetic oligonucleotide
ugaauguaggaggcacugu

SEQ ID NO: 2027355 - RNA, 19 nt, Artificial Sequence
  Description of Artificial Sequence: Synthetic oligonucleotide
gagaucugcagcacaggca

SEQ ID NO: 2027356 - RNA, 19 nt, Artificial Sequence
  Description of Artificial Sequence: Synthetic oligonucleotide
acaugaagcugagcaaaca

SEQ ID NO: 2027357 - RNA, 19 nt, Artificial Sequence
  Description of Artificial Sequence: Synthetic oligonucleotide
uuaucuccuugguaacuuu

SEQ ID NO: 2027358 - RNA, 19 nt, Artificial Sequence
  Description of Artificial Sequence: Synthetic oligonucleotide
ugacuuccucaauauucuc

SEQ ID NO: 2027359 - RNA, 19 nt, Artificial Sequence
  Description of Artificial Sequence: Synthetic oligonucleotide
gccuugaaacucaucaaag

SEQ ID NO: 2027360 - RNA, 19 nt, Artificial Sequence
  Description of Artificial Sequence: Synthetic oligonucleotide
uugcccgugcucugcacug

SEQ ID NO: 2027361 - RNA, 19 nt, Artificial Sequence
  Description of Artificial Sequence: Synthetic oligonucleotide
uccauucguaggcuguauu

SEQ ID NO: 2027362 - RNA, 19 nt, Artificial Sequence
  Description of Artificial Sequence: Synthetic oligonucleotide
guggaacaguucaauugag

SEQ ID NO: 2027363 - RNA, 19 nt, Artificial Sequence
  Description of Artificial Sequence: Synthetic oligonucleotide
gcaaguuucucuggucugg

SEQ ID NO: 2027364 - RNA, 19 nt, Artificial Sequence
  Description of Artificial Sequence: Synthetic oligonucleotide
ggccaugcagaaccaaugc

SEQ ID NO: 2027365 - RNA, 19 nt, Artificial Sequence
  Description of Artificial Sequence: Synthetic oligonucleotide
gguggcucaccccugggug

SEQ ID NO: 2027366 - RNA, 19 nt, Artificial Sequence
  Description of Artificial Sequence: Synthetic oligonucleotide
uagcucaagucuugugguc

SEQ ID NO: 2027367 - RNA, 19 nt, Artificial Sequence
  Description of Artificial Sequence: Synthetic oligonucleotide
acuggcuuagccagagaug

SEQ ID NO: 2027368 - RNA, 19 nt, Artificial Sequence
  Description of Artificial Sequence: Synthetic oligonucleotide
ggaggcacuguuugaggcc

SEQ ID NO: 2027369 - RNA, 19 nt, Artificial Sequence
  Description of Artificial Sequence: Synthetic oligonucleotide
gaaccaaugccgcuguuuu

SEQ ID NO: 2027370 - RNA, 19 nt, Artificial Sequence
  Description of Artificial Sequence: Synthetic oligonucleotide
ggauuaagaacauccgccu

SEQ ID NO: 2027371 - RNA, 19 nt, Artificial Sequence
  Description of Artificial Sequence: Synthetic oligonucleotide
aagcuccggauugcaaaug

SEQ ID NO: 2027372 - RNA, 19 nt, Artificial Sequence
  Description of Artificial Sequence: Synthetic oligonucleotide
aggccuugaaacucaucaa

SEQ ID NO: 2027373 - RNA, 19 nt, Artificial Sequence
  Description of Artificial Sequence: Synthetic oligonucleotide
caguucuguuaucuccuug

SEQ ID NO: 2027374 - RNA, 19 nt, Artificial Sequence
  Description of Artificial Sequence: Synthetic oligonucleotide
gaacauccgccuuuucucu

SEQ ID NO: 2027375 - RNA, 19 nt, Artificial Sequence
  Description of Artificial Sequence: Synthetic oligonucleotide
ugguggcucaccccugggu

SEQ ID NO: 2027376 - RNA, 19 nt, Artificial Sequence
  Description of Artificial Sequence: Synthetic oligonucleotide
agagaacuaaggauagauu

SEQ ID NO: 2027377 - RNA, 19 nt, Artificial Sequence
  Description of Artificial Sequence: Synthetic oligonucleotide
gacuuccucaauauucucu

SEQ ID NO: 2027378 - RNA, 19 nt, Artificial Sequence
  Description of Artificial Sequence: Synthetic oligonucleotide
cuagaaacacugcagugau

SEQ ID NO: 2027379 - RNA, 19 nt, Artificial Sequence
  Description of Artificial Sequence: Synthetic oligonucleotide
agcaugcagucaacucugc

SEQ ID NO: 2027380 - RNA, 19 nt, Artificial Sequence
  Description of Artificial Sequence: Synthetic oligonucleotide
uggucgagagcaucccgaa

SEQ ID NO: 2027381 - RNA, 19 nt, Artificial Sequence
  Description of Artificial Sequence: Synthetic oligonucleotide
gcuguauuucuugccauug

SEQ ID NO: 2027382 - RNA, 19 nt, Artificial Sequence
  Description of Artificial Sequence: Synthetic oligonucleotide
aucccgaaaggcccagcca

SEQ ID NO: 2027383 - RNA, 19 nt, Artificial Sequence
  Description of Artificial Sequence: Synthetic oligonucleotide
gggaaagcaucuccagagc

SEQ ID NO: 2027384 - RNA, 19 nt, Artificial Sequence
  Description of Artificial Sequence: Synthetic oligonucleotide
uuaccucauuggagggcca

SEQ ID NO: 2027385 - RNA, 19 nt, Artificial Sequence
  Description of Artificial Sequence: Synthetic oligonucleotide
guggucuguaauucuucuc

SEQ ID NO: 2027386 - RNA, 19 nt, Artificial Sequence
  Description of Artificial Sequence: Synthetic oligonucleotide
gccucuagaaacacugcag

SEQ ID NO: 2027387 - RNA, 19 nt, Artificial Sequence
  Description of Artificial Sequence: Synthetic oligonucleotide
agaaccaaugccgcuguuu

SEQ ID NO: 2027388 - RNA, 19 nt, Artificial Sequence
  Description of Artificial Sequence: Synthetic oligonucleotide
ugcuaagcuccggauugca

SEQ ID NO: 2027389 - RNA, 19 nt, Artificial Sequence
  Description of Artificial Sequence: Synthetic oligonucleotide
cagagcuucuagaugugaa

SEQ ID NO: 2027390 - RNA, 19 nt, Artificial Sequence
  Description of Artificial Sequence: Synthetic oligonucleotide
uugaggccucuagaaacac

SEQ ID NO: 2027391 - RNA, 19 nt, Artificial Sequence
  Description of Artificial Sequence: Synthetic oligonucleotide
cuugccauugcaaguuucu

SEQ ID NO: 2027392 - RNA, 19 nt, Artificial Sequence
  Description of Artificial Sequence: Synthetic oligonucleotide
uuacuggcuuagccagaga

SEQ ID NO: 2027393 - RNA, 19 nt, Artificial Sequence
  Description of Artificial Sequence: Synthetic oligonucleotide
gugagagggcucugggcug

SEQ ID NO: 2027394 - RNA, 19 nt, Artificial Sequence
  Description of Artificial Sequence: Synthetic oligonucleotide
uugagauggucgagagcau

SEQ ID NO: 2027395 - RNA, 19 nt, Artificial Sequence
  Description of Artificial Sequence: Synthetic oligonucleotide
ggauauccucuauugaacu

SEQ ID NO: 2027396 - RNA, 19 nt, Artificial Sequence
  Description of Artificial Sequence: Synthetic oligonucleotide
aggcuguauuucuugccau

SEQ ID NO: 2027397 - RNA, 19 nt, Artificial Sequence
  Description of Artificial Sequence: Synthetic oligonucleotide
ggccuugaaacucaucaaa

SEQ ID NO: 2027398 - RNA, 19 nt, Artificial Sequence
  Description of Artificial Sequence: Synthetic oligonucleotide
gcagucaacucugcuaagc

SEQ ID NO: 2027399 - RNA, 19 nt, Artificial Sequence
  Description of Artificial Sequence: Synthetic oligonucleotide
gauuaagaacauccgccuu

SEQ ID NO: 2027400 - RNA, 19 nt, Artificial Sequence
  Description of Artificial Sequence: Synthetic oligonucleotide
cagaacuccgccagggaaa

SEQ ID NO: 2027401 - RNA, 19 nt, Artificial Sequence
  Description of Artificial Sequence: Synthetic oligonucleotide
gacucugacuugcucucaa

SEQ ID NO: 2027402 - RNA, 19 nt, Artificial Sequence
  Description of Artificial Sequence: Synthetic oligonucleotide
uugccauugcaaguuucuc

SEQ ID NO: 2027403 - RNA, 19 nt, Artificial Sequence
  Description of Artificial Sequence: Synthetic oligonucleotide
caauauucucugucuccga

SEQ ID NO: 2027404 - RNA, 19 nt, Artificial Sequence
  Description of Artificial Sequence: Synthetic oligonucleotide
cccacugauaacacucuug

SEQ ID NO: 2027405 - RNA, 19 nt, Artificial Sequence
  Description of Artificial Sequence: Synthetic oligonucleotide
ggucuguaauucuucucca

SEQ ID NO: 2027406 - RNA, 19 nt, Artificial Sequence
  Description of Artificial Sequence: Synthetic oligonucleotide
aucuugaauguaggaggca

SEQ ID NO: 2027407 - RNA, 19 nt, Artificial Sequence
  Description of Artificial Sequence: Synthetic oligonucleotide
ccacuaagagaacuaagga

SEQ ID NO: 2027408 - RNA, 19 nt, Artificial Sequence
  Description of Artificial Sequence: Synthetic oligonucleotide
ucucuguuacuggcuuagc

SEQ ID NO: 2027409 - RNA, 19 nt, Artificial Sequence
  Description of Artificial Sequence: Synthetic oligonucleotide
gaucgguucaucaggcccu

SEQ ID NO: 2027410 - RNA, 19 nt, Artificial Sequence
  Description of Artificial Sequence: Synthetic oligonucleotide
ggccucuagaaacacugca

SEQ ID NO: 2027411 - RNA, 19 nt, Artificial Sequence
  Description of Artificial Sequence: Synthetic oligonucleotide
cuugaauguaggaggcacu

SEQ ID NO: 2027412 - RNA, 19 nt, Artificial Sequence
  Description of Artificial Sequence: Synthetic oligonucleotide
gaguagcccauaaugaguu

SEQ ID NO: 2027413 - RNA, 19 nt, Artificial Sequence
  Description of Artificial Sequence: Synthetic oligonucleotide
agaacuccgccagggaaaa

SEQ ID NO: 2027414 - RNA, 19 nt, Artificial Sequence
  Description of Artificial Sequence: Synthetic oligonucleotide
ggugagcuuucauucucac

SEQ ID NO: 2027415 - RNA, 19 nt, Artificial Sequence
  Description of Artificial Sequence: Synthetic oligonucleotide
uuucucgggaaagcaucuc

SEQ ID NO: 2027416 - RNA, 19 nt, Artificial Sequence
  Description of Artificial Sequence: Synthetic oligonucleotide
uggagggccacugcucuuc

SEQ ID NO: 2027417 - RNA, 19 nt, Artificial Sequence
  Description of Artificial Sequence: Synthetic oligonucleotide
caagucuuguggucuguaa

SEQ ID NO: 2027418 - RNA, 19 nt, Artificial Sequence
  Description of Artificial Sequence: Synthetic oligonucleotide
agcccauaaugaguuuucu

SEQ ID NO: 2027419 - RNA, 19 nt, Artificial Sequence
  Description of Artificial Sequence: Synthetic oligonucleotide
augcauggauauccucuau

SEQ ID NO: 2027420 - RNA, 19 nt, Artificial Sequence
  Description of Artificial Sequence: Synthetic oligonucleotide
cauugcaaguuucucuggu

SEQ ID NO: 2027421 - RNA, 19 nt, Artificial Sequence
  Description of Artificial Sequence: Synthetic oligonucleotide
aacgcuucuuugagcugcu

SEQ ID NO: 2027422 - RNA, 19 nt, Artificial Sequence
  Description of Artificial Sequence: Synthetic oligonucleotide
gguuaccucauuggagggc

SEQ ID NO: 2027423 - RNA, 19 nt, Artificial Sequence
  Description of Artificial Sequence: Synthetic oligonucleotide
ugacucugacuugcucuca

SEQ ID NO: 2027424 - RNA, 19 nt, Artificial Sequence
  Description of Artificial Sequence: Synthetic oligonucleotide
uaccucauuggagggccac

SEQ ID NO: 2027425 - RNA, 19 nt, Artificial Sequence
  Description of Artificial Sequence: Synthetic oligonucleotide
cuuucucgggaaagcaucu

SEQ ID NO: 2027426 - RNA, 19 nt, Artificial Sequence
  Description of Artificial Sequence: Synthetic oligonucleotide
aguagcccauaaugaguuu

SEQ ID NO: 2027427 - RNA, 19 nt, Artificial Sequence
  Description of Artificial Sequence: Synthetic oligonucleotide
gcuaugacauccauugucu

SEQ ID NO: 2027428 - RNA, 19 nt, Artificial Sequence
  Description of Artificial Sequence: Synthetic oligonucleotide
uggcuuagccagagauguc

SEQ ID NO: 2027429 - RNA, 19 nt, Artificial Sequence
  Description of Artificial Sequence: Synthetic oligonucleotide
gcucaagucuuguggucug

SEQ ID NO: 2027430 - RNA, 19 nt, Artificial Sequence
  Description of Artificial Sequence: Synthetic oligonucleotide
uccccuugucucuccuccu

SEQ ID NO: 2027431 - RNA, 19 nt, Artificial Sequence
  Description of Artificial Sequence: Synthetic oligonucleotide
guucuguuaucuccuuggu

SEQ ID NO: 2027432 - RNA, 19 nt, Artificial Sequence
  Description of Artificial Sequence: Synthetic oligonucleotide
cagucaacucugcuaagcu

SEQ ID NO: 2027433 - RNA, 19 nt, Artificial Sequence
  Description of Artificial Sequence: Synthetic oligonucleotide
gcuguugagauggucgaga

SEQ ID NO: 2027434 - RNA, 19 nt, Artificial Sequence
  Description of Artificial Sequence: Synthetic oligonucleotide
ugccgcuguuuuguggaac

SEQ ID NO: 2027435 - RNA, 19 nt, Artificial Sequence
  Description of Artificial Sequence: Synthetic oligonucleotide
cugcagcacaggcaggaga

SEQ ID NO: 2027436 - RNA, 19 nt, Artificial Sequence
  Description of Artificial Sequence: Synthetic oligonucleotide
guggcucaccccuggguga

SEQ ID NO: 2027437 - RNA, 19 nt, Artificial Sequence
  Description of Artificial Sequence: Synthetic oligonucleotide
caacucugcuaagcuccgg

SEQ ID NO: 2027438 - RNA, 19 nt, Artificial Sequence
  Description of Artificial Sequence: Synthetic oligonucleotide
caguguagaucgguucauc

SEQ ID NO: 2027439 - RNA, 19 nt, Artificial Sequence
  Description of Artificial Sequence: Synthetic oligonucleotide
gauccauucguaggcugua

SEQ ID NO: 2027440 - RNA, 19 nt, Artificial Sequence
  Description of Artificial Sequence: Synthetic oligonucleotide
cauccgccuuuucucugac

SEQ ID NO: 2027441 - RNA, 19 nt, Artificial Sequence
  Description of Artificial Sequence: Synthetic oligonucleotide
cuccggauugcaaaugcau

SEQ ID NO: 2027442 - RNA, 19 nt, Artificial Sequence
  Description of Artificial Sequence: Synthetic oligonucleotide
ccucucuaaggcugucacc

SEQ ID NO: 2027443 - RNA, 19 nt, Artificial Sequence
  Description of Artificial Sequence: Synthetic oligonucleotide
ccaugguuaccucauugga

SEQ ID NO: 2027444 - RNA, 19 nt, Artificial Sequence
  Description of Artificial Sequence: Synthetic oligonucleotide
gccgcuguuuuguggaaca

SEQ ID NO: 2027445 - RNA, 19 nt, Artificial Sequence
  Description of Artificial Sequence: Synthetic oligonucleotide
uggcucaccccugggugac

SEQ ID NO: 2027446 - RNA, 19 nt, Artificial Sequence
  Description of Artificial Sequence: Synthetic oligonucleotide
guucaucaggcccuugguu

SEQ ID NO: 2027447 - RNA, 19 nt, Artificial Sequence
  Description of Artificial Sequence: Synthetic oligonucleotide
accucucguaaaaccugug

SEQ ID NO: 2027448 - RNA, 19 nt, Artificial Sequence
  Description of Artificial Sequence: Synthetic oligonucleotide
accucauuggagggccacu

SEQ ID NO: 2027449 - RNA, 19 nt, Artificial Sequence
  Description of Artificial Sequence: Synthetic oligonucleotide
guagcccauaaugaguuuu

SEQ ID NO: 2027450 - RNA, 19 nt, Artificial Sequence
  Description of Artificial Sequence: Synthetic oligonucleotide
cacugcuguugagaugguc

SEQ ID NO: 2027451 - RNA, 19 nt, Artificial Sequence
  Description of Artificial Sequence: Synthetic oligonucleotide
auguccugauccauucgua

SEQ ID NO: 2027452 - RNA, 19 nt, Artificial Sequence
  Description of Artificial Sequence: Synthetic oligonucleotide
aggauagauuucaccuuua

SEQ ID NO: 2027453 - RNA, 19 nt, Artificial Sequence
  Description of Artificial Sequence: Synthetic oligonucleotide
ugcccgugcucugcacugc

SEQ ID NO: 2027454 - RNA, 19 nt, Artificial Sequence
  Description of Artificial Sequence: Synthetic oligonucleotide
ccucuauugaacuucuuuu

SEQ ID NO: 2027455 - RNA, 19 nt, Artificial Sequence
  Description of Artificial Sequence: Synthetic oligonucleotide
auccauucguaggcuguau

SEQ ID NO: 2027456 - RNA, 19 nt, Artificial Sequence
  Description of Artificial Sequence: Synthetic oligonucleotide
caccucucguaaaaccugu

SEQ ID NO: 2027457 - RNA, 19 nt, Artificial Sequence
  Description of Artificial Sequence: Synthetic oligonucleotide
cacuuucucgggaaagcau

SEQ ID NO: 2027458 - RNA, 19 nt, Artificial Sequence
  Description of Artificial Sequence: Synthetic oligonucleotide
gcuguuuuguggaacaguu

SEQ ID NO: 2027459 - RNA, 19 nt, Artificial Sequence
  Description of Artificial Sequence: Synthetic oligonucleotide
cuggccaugcagaaccaau

SEQ ID NO: 2027460 - RNA, 19 nt, Artificial Sequence
  Description of Artificial Sequence: Synthetic oligonucleotide
uuggagggccacugcucuu

SEQ ID NO: 2027461 - RNA, 19 nt, Artificial Sequence
  Description of Artificial Sequence: Synthetic oligonucleotide
ccucuagaaacacugcagu

SEQ ID NO: 2027462 - RNA, 19 nt, Artificial Sequence
  Description of Artificial Sequence: Synthetic oligonucleotide
gacugucaacugggagagc

SEQ ID NO: 2027463 - RNA, 19 nt, Artificial Sequence
  Description of Artificial Sequence: Synthetic oligonucleotide
ggauugcaaaugcauggau

SEQ ID NO: 2027464 - RNA, 19 nt, Artificial Sequence
  Description of Artificial Sequence: Synthetic oligonucleotide
ccucauuggagggccacug

SEQ ID NO: 2027465 - RNA, 19 nt, Artificial Sequence
  Description of Artificial Sequence: Synthetic oligonucleotide
augccgcuguuuuguggaa

SEQ ID NO: 2027466 - RNA, 19 nt, Artificial Sequence
  Description of Artificial Sequence: Synthetic oligonucleotide
ggcccuugguucuuuuaaa

SEQ ID NO: 2027467 - RNA, 19 nt, Artificial Sequence
  Description of Artificial Sequence: Synthetic oligonucleotide
cuugcccgugcucugcacu

SEQ ID NO: 2027468 - RNA, 19 nt, Artificial Sequence
  Description of Artificial Sequence: Synthetic oligonucleotide
ccuucaccucucguaaaac

SEQ ID NO: 2027469 - RNA, 19 nt, Artificial Sequence
  Description of Artificial Sequence: Synthetic oligonucleotide
ccaaugccgcuguuuugug

SEQ ID NO: 2027470 - RNA, 19 nt, Artificial Sequence
  Description of Artificial Sequence: Synthetic oligonucleotide
gggugacucugacuugcuc

SEQ ID NO: 2027471 - RNA, 19 nt, Artificial Sequence
  Description of Artificial Sequence: Synthetic oligonucleotide
gcagguggugaacucuuua

SEQ ID NO: 2027472 - RNA, 19 nt, Artificial Sequence
  Description of Artificial Sequence: Synthetic oligonucleotide
ccgccuuuucucugacccc

SEQ ID NO: 2027473 - RNA, 19 nt, Artificial Sequence
  Description of Artificial Sequence: Synthetic oligonucleotide
gugacaguguagaucgguu

SEQ ID NO: 2027474 - RNA, 19 nt, Artificial Sequence
  Description of Artificial Sequence: Synthetic oligonucleotide
ccgccagggaaaacgcuuc

SEQ ID NO: 2027475 - RNA, 19 nt, Artificial Sequence
  Description of Artificial Sequence: Synthetic oligonucleotide
gaacuccgccagggaaaac

SEQ ID NO: 2027476 - RNA, 19 nt, Artificial Sequence
  Description of Artificial Sequence: Synthetic oligonucleotide
aggcacuguuugaggccuc

SEQ ID NO: 2027477 - RNA, 19 nt, Artificial Sequence
  Description of Artificial Sequence: Synthetic oligonucleotide
aucgguucaucaggcccuu

SEQ ID NO: 2027478 - RNA, 19 nt, Artificial Sequence
  Description of Artificial Sequence: Synthetic oligonucleotide
ggucgagagcaucccgaaa

SEQ ID NO: 2027479 - RNA, 19 nt, Artificial Sequence
  Description of Artificial Sequence: Synthetic oligonucleotide
gcuccggauugcaaaugca

SEQ ID NO: 2027480 - RNA, 19 nt, Artificial Sequence
  Description of Artificial Sequence: Synthetic oligonucleotide
cugcuaugacauccauugu

SEQ ID NO: 2027481 - RNA, 19 nt, Artificial Sequence
  Description of Artificial Sequence: Synthetic oligonucleotide
ccgaaaggcccagccacug

SEQ ID NO: 2027482 - RNA, 19 nt, Artificial Sequence
  Description of Artificial Sequence: Synthetic oligonucleotide
cugucaacugggagagcau

SEQ ID NO: 2027483 - RNA, 19 nt, Artificial Sequence
  Description of Artificial Sequence: Synthetic oligonucleotide
gcaugcagucaacucugcu

SEQ ID NO: 2027484 - RNA, 19 nt, Artificial Sequence
  Description of Artificial Sequence: Synthetic oligonucleotide
caggcccuugguucuuuua

SEQ ID NO: 2027485 - RNA, 19 nt, Artificial Sequence
  Description of Artificial Sequence: Synthetic oligonucleotide
gcuaagcuccggauugcaa

SEQ ID NO: 2027486 - RNA, 19 nt, Artificial Sequence
  Description of Artificial Sequence: Synthetic oligonucleotide
aucaggcccuugguucuuu

SEQ ID NO: 2027487 - RNA, 19 nt, Artificial Sequence
  Description of Artificial Sequence: Synthetic oligonucleotide
ccauucguaggcuguauuu

SEQ ID NO: 2027488 - RNA, 19 nt, Artificial Sequence
  Description of Artificial Sequence: Synthetic oligonucleotide
gcucucaacuagagagauc

SEQ ID NO: 2027489 - RNA, 19 nt, Artificial Sequence
  Description of Artificial Sequence: Synthetic oligonucleotide
gcccauaaugaguuuucuu

SEQ ID NO: 2027490 - RNA, 19 nt, Artificial Sequence
  Description of Artificial Sequence: Synthetic oligonucleotide
auccucuauugaacuucuu

SEQ ID NO: 2027491 - RNA, 19 nt, Artificial Sequence
  Description of Artificial Sequence: Synthetic oligonucleotide
cuccgccagggaaaacgcu

SEQ ID NO: 2027492 - RNA, 19 nt, Artificial Sequence
  Description of Artificial Sequence: Synthetic oligonucleotide
ccagggaaaacgcuucuuu

SEQ ID NO: 2027493 - RNA, 19 nt, Artificial Sequence
  Description of Artificial Sequence: Synthetic oligonucleotide
ccgcuguuuuguggaacag

SEQ ID NO: 2027494 - RNA, 19 nt, Artificial Sequence
  Description of Artificial Sequence: Synthetic oligonucleotide
cucaagucuuguggucugu

SEQ ID NO: 2027495 - RNA, 19 nt, Artificial Sequence
  Description of Artificial Sequence: Synthetic oligonucleotide
ccauugucuucuuuccaau

SEQ ID NO: 2027496 - RNA, 19 nt, Artificial Sequence
  Description of Artificial Sequence: Synthetic oligonucleotide
ggaaggcaucuugaaugua

SEQ ID NO: 2027497 - RNA, 19 nt, Artificial Sequence
  Description of Artificial Sequence: Synthetic oligonucleotide
gcucaccccugggugacuc

SEQ ID NO: 2027498 - RNA, 19 nt, Artificial Sequence
  Description of Artificial Sequence: Synthetic oligonucleotide
cgccuuuucucugacccca

SEQ ID NO: 2027499 - RNA, 19 nt, Artificial Sequence
  Description of Artificial Sequence: Synthetic oligonucleotide
gcaucccgaaaggcccagc

SEQ ID NO: 2027500 - RNA, 19 nt, Artificial Sequence
  Description of Artificial Sequence: Synthetic oligonucleotide
ggucuggaugagacaugaa

SEQ ID NO: 2027501 - RNA, 19 nt, Artificial Sequence
  Description of Artificial Sequence: Synthetic oligonucleotide
cucaccccugggugacucu

SEQ ID NO: 2027502 - RNA, 19 nt, Artificial Sequence
  Description of Artificial Sequence: Synthetic oligonucleotide
ccgugcucugcacugcugu

SEQ ID NO: 2027503 - RNA, 19 nt, Artificial Sequence
  Description of Artificial Sequence: Synthetic oligonucleotide
ccugauccauucguaggcu

SEQ ID NO: 2027504 - RNA, 19 nt, Artificial Sequence
  Description of Artificial Sequence: Synthetic oligonucleotide
cccgaaaggcccagccacu

SEQ ID NO: 2027505 - RNA, 19 nt, Artificial Sequence
  Description of Artificial Sequence: Synthetic oligonucleotide
gcccgugcucugcacugcu

SEQ ID NO: 2027506 - RNA, 19 nt, Artificial Sequence
  Description of Artificial Sequence: Synthetic oligonucleotide
ccaggucuuuacacagcau

SEQ ID NO: 2027507 - RNA, 19 nt, Artificial Sequence
  Description of Artificial Sequence: Synthetic oligonucleotide
gccagggaaaacgcuucuu

SEQ ID NO: 2027508 - RNA, 19 nt, Artificial Sequence
  Description of Artificial Sequence: Synthetic oligonucleotide
cgcuguuuuguggaacagu

SEQ ID NO: 2027509 - RNA, 19 nt, Artificial Sequence
  Description of Artificial Sequence: Synthetic oligonucleotide
cgugcucugcacugcuguu

SEQ ID NO: 2027510 - RNA, 19 nt, Artificial Sequence
  Description of Artificial Sequence: Synthetic oligonucleotide
aaagauuggagcuuggagg

SEQ ID NO: 2027511 - RNA, 19 nt, Artificial Sequence
  Description of Artificial Sequence: Synthetic oligonucleotide
ugauguuucuguaaggugg

SEQ ID NO: 2027512 - RNA, 19 nt, Artificial Sequence
  Description of Artificial Sequence: Synthetic oligonucleotide
gguacaaugaaauucaggg

SEQ ID NO: 2027513 - RNA, 19 nt, Artificial Sequence
  Description of Artificial Sequence: Synthetic oligonucleotide
uacaaugaaauucagggac

SEQ ID NO: 2027514 - RNA, 19 nt, Artificial Sequence
  Description of Artificial Sequence: Synthetic oligonucleotide
aguuauaacagucgaguac

SEQ ID NO: 2027515 - RNA, 19 nt, Artificial Sequence
  Description of Artificial Sequence: Synthetic oligonucleotide
aaucaagggguccaccagc

SEQ ID NO: 2027516 - RNA, 19 nt, Artificial Sequence
  Description of Artificial Sequence: Synthetic oligonucleotide
gaaauucagggacacgugg

SEQ ID NO: 2027517 - RNA, 19 nt, Artificial Sequence
  Description of Artificial Sequence: Synthetic oligonucleotide
aacagaaagacaaacauuu

SEQ ID NO: 2027518 - RNA, 19 nt, Artificial Sequence
  Description of Artificial Sequence: Synthetic oligonucleotide
uguaagguggacaaaugca

SEQ ID NO: 2027519 - RNA, 19 nt, Artificial Sequence
  Description of Artificial Sequence: Synthetic oligonucleotide
uauccuaugguccaaccug

SEQ ID NO: 2027520 - RNA, 19 nt, Artificial Sequence
  Description of Artificial Sequence: Synthetic oligonucleotide
aagacuagacgccugcaag

SEQ ID NO: 2027521 - RNA, 19 nt, Artificial Sequence
  Description of Artificial Sequence: Synthetic oligonucleotide
agccaugguauucaagucc

SEQ ID NO: 2027522 - RNA, 19 nt, Artificial Sequence
  Description of Artificial Sequence: Synthetic oligonucleotide
aagauuggagcuuggagga

SEQ ID NO: 2027523 - RNA, 19 nt, Artificial Sequence
  Description of Artificial Sequence: Synthetic oligonucleotide
gaaagauuggagcuuggag

SEQ ID NO: 2027524 - RNA, 19 nt, Artificial Sequence
  Description of Artificial Sequence: Synthetic oligonucleotide
ucauccaaggacaggagcc

SEQ ID NO: 2027525 - RNA, 19 nt, Artificial Sequence
  Description of Artificial Sequence: Synthetic oligonucleotide
uuacagacaacagaaagac

SEQ ID NO: 2027526 - RNA, 19 nt, Artificial Sequence
  Description of Artificial Sequence: Synthetic oligonucleotide
uacacuucuagagagggag

SEQ ID NO: 2027527 - RNA, 19 nt, Artificial Sequence
  Description of Artificial Sequence: Synthetic oligonucleotide
aaugccaugggcuuuugaa

SEQ ID NO: 2027528 - RNA, 19 nt, Artificial Sequence
  Description of Artificial Sequence: Synthetic oligonucleotide
uuaucaggcuugcugagcc

SEQ ID NO: 2027529 - RNA, 19 nt, Artificial Sequence
  Description of Artificial Sequence: Synthetic oligonucleotide
auuugcaccggauauccuc

SEQ ID NO: 2027530 - RNA, 19 nt, Artificial Sequence
  Description of Artificial Sequence: Synthetic oligonucleotide
auugcacccagucuugugg

SEQ ID NO: 2027531 - RNA, 19 nt, Artificial Sequence
  Description of Artificial Sequence: Synthetic oligonucleotide
aaccugauggcucagcagu

SEQ ID NO: 2027532 - RNA, 19 nt, Artificial Sequence
  Description of Artificial Sequence: Synthetic oligonucleotide
uauucaaguccccugcuca

SEQ ID NO: 2027533 - RNA, 19 nt, Artificial Sequence
  Description of Artificial Sequence: Synthetic oligonucleotide
ucgcaaagcaggcaguagg

SEQ ID NO: 2027534 - RNA, 19 nt, Artificial Sequence
  Description of Artificial Sequence: Synthetic oligonucleotide
agacuagacgccugcaagc

SEQ ID NO: 2027535 - RNA, 19 nt, Artificial Sequence
  Description of Artificial Sequence: Synthetic oligonucleotide
agccagcaagacuagacgc

SEQ ID NO: 2027536 - RNA, 19 nt, Artificial Sequence
  Description of Artificial Sequence: Synthetic oligonucleotide
auaacagucgaguacacuu

SEQ ID NO: 2027537 - RNA, 19 nt, Artificial Sequence
  Description of Artificial Sequence: Synthetic oligonucleotide
gagaacaaaugccaugggc

SEQ ID NO: 2027538 - RNA, 19 nt, Artificial Sequence
  Description of Artificial Sequence: Synthetic oligonucleotide
caauuuaauggcuuccuug

SEQ ID NO: 2027539 - RNA, 19 nt, Artificial Sequence
  Description of Artificial Sequence: Synthetic oligonucleotide
cucaguguaagcauccggc

SEQ ID NO: 2027540 - RNA, 19 nt, Artificial Sequence
  Description of Artificial Sequence: Synthetic oligonucleotide
uaaaacaauuuaauggcuu

SEQ ID NO: 2027541 - RNA, 19 nt, Artificial Sequence
  Description of Artificial Sequence: Synthetic oligonucleotide
agaagggguggauugcacc

SEQ ID NO: 2027542 - RNA, 19 nt, Artificial Sequence
  Description of Artificial Sequence: Synthetic oligonucleotide
aaacauuucucuccaugca

SEQ ID NO: 2027543 - RNA, 19 nt, Artificial Sequence
  Description of Artificial Sequence: Synthetic oligonucleotide
guugcaguccuucugagac

SEQ ID NO: 2027544 - RNA, 19 nt, Artificial Sequence
  Description of Artificial Sequence: Synthetic oligonucleotide
gucgaguacacuucuagag

SEQ ID NO: 2027545 - RNA, 19 nt, Artificial Sequence
  Description of Artificial Sequence: Synthetic oligonucleotide
gaagacugcaaugagcccc

SEQ ID NO: 2027546 - RNA, 19 nt, Artificial Sequence
  Description of Artificial Sequence: Synthetic oligonucleotide
aaucacucucccuaguuau

SEQ ID NO: 2027547 - RNA, 19 nt, Artificial Sequence
  Description of Artificial Sequence: Synthetic oligonucleotide
aguacacuucuagagaggg

SEQ ID NO: 2027548 - RNA, 19 nt, Artificial Sequence
  Description of Artificial Sequence: Synthetic oligonucleotide
aaaugucucuguucccuuc

SEQ ID NO: 2027549 - RNA, 19 nt, Artificial Sequence
  Description of Artificial Sequence: Synthetic oligonucleotide
ucccuaguuauaacagucg

SEQ ID NO: 2027550 - RNA, 19 nt, Artificial Sequence
  Description of Artificial Sequence: Synthetic oligonucleotide
ucuuguuggcuugagcugg

SEQ ID NO: 2027551 - RNA, 19 nt, Artificial Sequence
  Description of Artificial Sequence: Synthetic oligonucleotide
caugguacaaugaaauuca

SEQ ID NO: 2027552 - RNA, 19 nt, Artificial Sequence
  Description of Artificial Sequence: Synthetic oligonucleotide
agcaagacuagacgccugc

SEQ ID NO: 2027553 - RNA, 19 nt, Artificial Sequence
  Description of Artificial Sequence: Synthetic oligonucleotide
aaugcauuugcaccggaua

SEQ ID NO: 2027554 - RNA, 19 nt, Artificial Sequence
  Description of Artificial Sequence: Synthetic oligonucleotide
ugcuuaucaggcuugcuga

SEQ ID NO: 2027555 - RNA, 19 nt, Artificial Sequence
  Description of Artificial Sequence: Synthetic oligonucleotide
ugguauucaaguccccugc

SEQ ID NO: 2027556 - RNA, 19 nt, Artificial Sequence
  Description of Artificial Sequence: Synthetic oligonucleotide
uuuugaagggaagacccag

SEQ ID NO: 2027557 - RNA, 19 nt, Artificial Sequence
  Description of Artificial Sequence: Synthetic oligonucleotide
cuagacgccugcaagcucc

SEQ ID NO: 2027558 - RNA, 19 nt, Artificial Sequence
  Description of Artificial Sequence: Synthetic oligonucleotide
agaacaaaugccaugggcu

SEQ ID NO: 2027559 - RNA, 19 nt, Artificial Sequence
  Description of Artificial Sequence: Synthetic oligonucleotide
uccggcuuucgaaucaagg

SEQ ID NO: 2027560 - RNA, 19 nt, Artificial Sequence
  Description of Artificial Sequence: Synthetic oligonucleotide
ucgaguacacuucuagaga

SEQ ID NO: 2027561 - RNA, 19 nt, Artificial Sequence
  Description of Artificial Sequence: Synthetic oligonucleotide
ugaaauucagggacacgug

SEQ ID NO: 2027562 - RNA, 19 nt, Artificial Sequence
  Description of Artificial Sequence: Synthetic oligonucleotide
aaugaaauucagggacacg

SEQ ID NO: 2027563 - RNA, 19 nt, Artificial Sequence
  Description of Artificial Sequence: Synthetic oligonucleotide
aacaauuuaauggcuuccu

SEQ ID NO: 2027564 - RNA, 19 nt, Artificial Sequence
  Description of Artificial Sequence: Synthetic oligonucleotide
augcuuaucaggcuugcug

SEQ ID NO: 2027565 - RNA, 19 nt, Artificial Sequence
  Description of Artificial Sequence: Synthetic oligonucleotide
cuguaagguggacaaaugc

SEQ ID NO: 2027566 - RNA, 19 nt, Artificial Sequence
  Description of Artificial Sequence: Synthetic oligonucleotide
uuccuugauuuacagacaa

SEQ ID NO: 2027567 - RNA, 19 nt, Artificial Sequence
  Description of Artificial Sequence: Synthetic oligonucleotide
ugccagacaucuaacugag

SEQ ID NO: 2027568 - RNA, 19 nt, Artificial Sequence
  Description of Artificial Sequence: Synthetic oligonucleotide
gacacguggucauccaagg

SEQ ID NO: 2027569 - RNA, 19 nt, Artificial Sequence
  Description of Artificial Sequence: Synthetic oligonucleotide
agggaggagaacaaaugcc

SEQ ID NO: 2027570 - RNA, 19 nt, Artificial Sequence
  Description of Artificial Sequence: Synthetic oligonucleotide
uuugcaccggauauccuca

SEQ ID NO: 2027571 - RNA, 19 nt, Artificial Sequence
  Description of Artificial Sequence: Synthetic oligonucleotide
ucuaacugagcaucuugug

SEQ ID NO: 2027572 - RNA, 19 nt, Artificial Sequence
  Description of Artificial Sequence: Synthetic oligonucleotide
aacagucgaguacacuucu

SEQ ID NO: 2027573 - RNA, 19 nt, Artificial Sequence
  Description of Artificial Sequence: Synthetic oligonucleotide
ucuguaagguggacaaaug

SEQ ID NO: 2027574 - RNA, 19 nt, Artificial Sequence
  Description of Artificial Sequence: Synthetic oligonucleotide
cuaggacaguguuugcucg

SEQ ID NO: 2027575 - RNA, 19 nt, Artificial Sequence
  Description of Artificial Sequence: Synthetic oligonucleotide
ucuugugccgaucgaagac

SEQ ID NO: 2027576 - RNA, 19 nt, Artificial Sequence
  Description of Artificial Sequence: Synthetic oligonucleotide
uacagagacccaaucacuc

SEQ ID NO: 2027577 - RNA, 19 nt, Artificial Sequence
  Description of Artificial Sequence: Synthetic oligonucleotide
uuguaaaugugaccacuga

SEQ ID NO: 2027578 - RNA, 19 nt, Artificial Sequence
  Description of Artificial Sequence: Synthetic oligonucleotide
accggauauccucagagcu

SEQ ID NO: 2027579 - RNA, 19 nt, Artificial Sequence
  Description of Artificial Sequence: Synthetic oligonucleotide
cugagacacauucugguug

SEQ ID NO: 2027580 - RNA, 19 nt, Artificial Sequence
  Description of Artificial Sequence: Synthetic oligonucleotide
ucuaggacaguguuugcuc

SEQ ID NO: 2027581 - RNA, 19 nt, Artificial Sequence
  Description of Artificial Sequence: Synthetic oligonucleotide
uaagcauccggcuuucgaa

SEQ ID NO: 2027582 - RNA, 19 nt, Artificial Sequence
  Description of Artificial Sequence: Synthetic oligonucleotide
gaaucaagggguccaccag

SEQ ID NO: 2027583 - RNA, 19 nt, Artificial Sequence
  Description of Artificial Sequence: Synthetic oligonucleotide
guuucuguaagguggacaa

SEQ ID NO: 2027584 - RNA, 19 nt, Artificial Sequence
  Description of Artificial Sequence: Synthetic oligonucleotide
aaccgugccagacaucuaa

SEQ ID NO: 2027585 - RNA, 19 nt, Artificial Sequence
  Description of Artificial Sequence: Synthetic oligonucleotide
cucucccuaguuauaacag

SEQ ID NO: 2027586 - RNA, 19 nt, Artificial Sequence
  Description of Artificial Sequence: Synthetic oligonucleotide
agacagguagaugacaaug

SEQ ID NO: 2027587 - RNA, 19 nt, Artificial Sequence
  Description of Artificial Sequence: Synthetic oligonucleotide
acugauguuucuguaaggu

SEQ ID NO: 2027588 - RNA, 19 nt, Artificial Sequence
  Description of Artificial Sequence: Synthetic oligonucleotide
uccccuaccaccccggaga

SEQ ID NO: 2027589 - RNA, 19 nt, Artificial Sequence
  Description of Artificial Sequence: Synthetic oligonucleotide
uuccacucgcucuaggaca

SEQ ID NO: 2027590 - RNA, 19 nt, Artificial Sequence
  Description of Artificial Sequence: Synthetic oligonucleotide
ucgaagacugucuuccgcu

SEQ ID NO: 2027591 - RNA, 19 nt, Artificial Sequence
  Description of Artificial Sequence: Synthetic oligonucleotide
gcaguaggcuuccacaucg

SEQ ID NO: 2027592 - RNA, 19 nt, Artificial Sequence
  Description of Artificial Sequence: Synthetic oligonucleotide
agggaagacugcaaugagc

SEQ ID NO: 2027593 - RNA, 19 nt, Artificial Sequence
  Description of Artificial Sequence: Synthetic oligonucleotide
acaagaagggguggauugc

SEQ ID NO: 2027594 - RNA, 19 nt, Artificial Sequence
  Description of Artificial Sequence: Synthetic oligonucleotide
aagacugcaaugagccccg

SEQ ID NO: 2027595 - RNA, 19 nt, Artificial Sequence
  Description of Artificial Sequence: Synthetic oligonucleotide
cucccuaguuauaacaguc

SEQ ID NO: 2027596 - RNA, 19 nt, Artificial Sequence
  Description of Artificial Sequence: Synthetic oligonucleotide
caagcuccccaccacagcc

SEQ ID NO: 2027597 - RNA, 19 nt, Artificial Sequence
  Description of Artificial Sequence: Synthetic oligonucleotide
augguauucaaguccccug

SEQ ID NO: 2027598 - RNA, 19 nt, Artificial Sequence
  Description of Artificial Sequence: Synthetic oligonucleotide
aaauucagggacacguggu

SEQ ID NO: 2027599 - RNA, 19 nt, Artificial Sequence
  Description of Artificial Sequence: Synthetic oligonucleotide
ggaguggugggaaagauug

SEQ ID NO: 2027600 - RNA, 19 nt, Artificial Sequence
  Description of Artificial Sequence: Synthetic oligonucleotide
uguuucuguaagguggaca

SEQ ID NO: 2027601 - RNA, 19 nt, Artificial Sequence
  Description of Artificial Sequence: Synthetic oligonucleotide
gagaagaacaagaaggggu

SEQ ID NO: 2027602 - RNA, 19 nt, Artificial Sequence
  Description of Artificial Sequence: Synthetic oligonucleotide
aagaacaagaaggggugga

SEQ ID NO: 2027603 - RNA, 19 nt, Artificial Sequence
  Description of Artificial Sequence: Synthetic oligonucleotide
uaacagucgaguacacuuc

SEQ ID NO: 2027604 - RNA, 19 nt, Artificial Sequence
  Description of Artificial Sequence: Synthetic oligonucleotide
agcagucgcagucacugag

SEQ ID NO: 2027605 - RNA, 19 nt, Artificial Sequence
  Description of Artificial Sequence: Synthetic oligonucleotide
uguggcuaccucaaauguc

SEQ ID NO: 2027606 - RNA, 19 nt, Artificial Sequence
  Description of Artificial Sequence: Synthetic oligonucleotide
ucaguguaagcauccggcu

SEQ ID NO: 2027607 - RNA, 19 nt, Artificial Sequence
  Description of Artificial Sequence: Synthetic oligonucleotide
caugcaggcaguugcaguc

SEQ ID NO: 2027608 - RNA, 19 nt, Artificial Sequence
  Description of Artificial Sequence: Synthetic oligonucleotide
gaagacccagggaagacug

SEQ ID NO: 2027609 - RNA, 19 nt, Artificial Sequence
  Description of Artificial Sequence: Synthetic oligonucleotide
aguguaagcauccggcuuu

SEQ ID NO: 2027610 - RNA, 19 nt, Artificial Sequence
  Description of Artificial Sequence: Synthetic oligonucleotide
accuacagagacccaauca

SEQ ID NO: 2027611 - RNA, 19 nt, Artificial Sequence
  Description of Artificial Sequence: Synthetic oligonucleotide
uuucgaaucaaggggucca

SEQ ID NO: 2027612 - RNA, 19 nt, Artificial Sequence
  Description of Artificial Sequence: Synthetic oligonucleotide
uucuagagagggaggagaa

SEQ ID NO: 2027613 - RNA, 19 nt, Artificial Sequence
  Description of Artificial Sequence: Synthetic oligonucleotide
caucuugugccgaucgaag

SEQ ID NO: 2027614 - RNA, 19 nt, Artificial Sequence
  Description of Artificial Sequence: Synthetic oligonucleotide
uuuccaccgcugcugagca

SEQ ID NO: 2027615 - RNA, 19 nt, Artificial Sequence
  Description of Artificial Sequence: Synthetic oligonucleotide
gaucgaagacugucuuccg

SEQ ID NO: 2027616 - RNA, 19 nt, Artificial Sequence
  Description of Artificial Sequence: Synthetic oligonucleotide
guacaaugaaauucaggga

SEQ ID NO: 2027617 - RNA, 19 nt, Artificial Sequence
  Description of Artificial Sequence: Synthetic oligonucleotide
agcucccuauccuaugguc

SEQ ID NO: 2027618 - RNA, 19 nt, Artificial Sequence
  Description of Artificial Sequence: Synthetic oligonucleotide
auucaaguccccugcucag

SEQ ID NO: 2027619 - RNA, 19 nt, Artificial Sequence
  Description of Artificial Sequence: Synthetic oligonucleotide
gcuuuugaagggaagaccc

SEQ ID NO: 2027620 - RNA, 19 nt, Artificial Sequence
  Description of Artificial Sequence: Synthetic oligonucleotide
caauggaugcagcugccgc

SEQ ID NO: 2027621 - RNA, 19 nt, Artificial Sequence
  Description of Artificial Sequence: Synthetic oligonucleotide
ucaaguccccugcucagcu

SEQ ID NO: 2027622 - RNA, 19 nt, Artificial Sequence
  Description of Artificial Sequence: Synthetic oligonucleotide
cagucgaguacacuucuag

SEQ ID NO: 2027623 - RNA, 19 nt, Artificial Sequence
  Description of Artificial Sequence: Synthetic oligonucleotide
uuauaacagucgaguacac

SEQ ID NO: 2027624 - RNA, 19 nt, Artificial Sequence
  Description of Artificial Sequence: Synthetic oligonucleotide
ucucccuaguuauaacagu

SEQ ID NO: 2027625 - RNA, 19 nt, Artificial Sequence
  Description of Artificial Sequence: Synthetic oligonucleotide
gucucuguucccuucugcc

SEQ ID NO: 2027626 - RNA, 19 nt, Artificial Sequence
  Description of Artificial Sequence: Synthetic oligonucleotide
ugaccacugauguuucugu

SEQ ID NO: 2027627 - RNA, 19 nt, Artificial Sequence
  Description of Artificial Sequence: Synthetic oligonucleotide
uaguuauaacagucgagua

SEQ ID NO: 2027628 - RNA, 19 nt, Artificial Sequence
  Description of Artificial Sequence: Synthetic oligonucleotide
augcauuugcaccggauau

SEQ ID NO: 2027629 - RNA, 19 nt, Artificial Sequence
  Description of Artificial Sequence: Synthetic oligonucleotide
agagacccaaucacucucc

SEQ ID NO: 2027630 - RNA, 19 nt, Artificial Sequence
  Description of Artificial Sequence: Synthetic oligonucleotide
ugggaaagauuggagcuug

SEQ ID NO: 2027631 - RNA, 19 nt, Artificial Sequence
  Description of Artificial Sequence: Synthetic oligonucleotide
aagaagggguggauugcac

SEQ ID NO: 2027632 - RNA, 19 nt, Artificial Sequence
  Description of Artificial Sequence: Synthetic oligonucleotide
aagcauccggcuuucgaau

SEQ ID NO: 2027633 - RNA, 19 nt, Artificial Sequence
  Description of Artificial Sequence: Synthetic oligonucleotide
gaugcaaccgugccagaca

SEQ ID NO: 2027634 - RNA, 19 nt, Artificial Sequence
  Description of Artificial Sequence: Synthetic oligonucleotide
uugugccgaucgaagacug

SEQ ID NO: 2027635 - RNA, 19 nt, Artificial Sequence
  Description of Artificial Sequence: Synthetic oligonucleotide
gacccaaucacucucccua

SEQ ID NO: 2027636 - RNA, 19 nt, Artificial Sequence
  Description of Artificial Sequence: Synthetic oligonucleotide
agucgaguacacuucuaga

SEQ ID NO: 2027637 - RNA, 19 nt, Artificial Sequence
  Description of Artificial Sequence: Synthetic oligonucleotide
cuagagagggaggagaaca

SEQ ID NO: 2027638 - RNA, 19 nt, Artificial Sequence
  Description of Artificial Sequence: Synthetic oligonucleotide
uauaacagucgaguacacu

SEQ ID NO: 2027639 - RNA, 19 nt, Artificial Sequence
  Description of Artificial Sequence: Synthetic oligonucleotide
acagagacccaaucacucu

SEQ ID NO: 2027640 - RNA, 19 nt, Artificial Sequence
  Description of Artificial Sequence: Synthetic oligonucleotide
aucaggaaggccauguaga

SEQ ID NO: 2027641 - RNA, 19 nt, Artificial Sequence
  Description of Artificial Sequence: Synthetic oligonucleotide
gaguacacuucuagagagg

SEQ ID NO: 2027642 - RNA, 19 nt, Artificial Sequence
  Description of Artificial Sequence: Synthetic oligonucleotide
gugccagacaucuaacuga

SEQ ID NO: 2027643 - RNA, 19 nt, Artificial Sequence
  Description of Artificial Sequence: Synthetic oligonucleotide
agcauccggcuuucgaauc

SEQ ID NO: 2027644 - RNA, 19 nt, Artificial Sequence
  Description of Artificial Sequence: Synthetic oligonucleotide
gauauccucagagcucuug

SEQ ID NO: 2027645 - RNA, 19 nt, Artificial Sequence
  Description of Artificial Sequence: Synthetic oligonucleotide
gacagguagaugacaauga

SEQ ID NO: 2027646 - RNA, 19 nt, Artificial Sequence
  Description of Artificial Sequence: Synthetic oligonucleotide
cuuccacucgcucuaggac

SEQ ID NO: 2027647 - RNA, 19 nt, Artificial Sequence
  Description of Artificial Sequence: Synthetic oligonucleotide
gauugcacccagucuugug

SEQ ID NO: 2027648 - RNA, 19 nt, Artificial Sequence
  Description of Artificial Sequence: Synthetic oligonucleotide
ucccugaugcaaccgugcc

SEQ ID NO: 2027649 - RNA, 19 nt, Artificial Sequence
  Description of Artificial Sequence: Synthetic oligonucleotide
aucuugugccgaucgaaga

SEQ ID NO: 2027650 - RNA, 19 nt, Artificial Sequence
  Description of Artificial Sequence: Synthetic oligonucleotide
ccuacagagacccaaucac

SEQ ID NO: 2027651 - RNA, 19 nt, Artificial Sequence
  Description of Artificial Sequence: Synthetic oligonucleotide
augcaugguacaaugaaau

SEQ ID NO: 2027652 - RNA, 19 nt, Artificial Sequence
  Description of Artificial Sequence: Synthetic oligonucleotide
ugcaguuuccaccgcugcu

SEQ ID NO: 2027653 - RNA, 19 nt, Artificial Sequence
  Description of Artificial Sequence: Synthetic oligonucleotide
ucugagacacauucugguu

SEQ ID NO: 2027654 - RNA, 19 nt, Artificial Sequence
  Description of Artificial Sequence: Synthetic oligonucleotide
gacgccugcaagcuccgcc

SEQ ID NO: 2027655 - RNA, 19 nt, Artificial Sequence
  Description of Artificial Sequence: Synthetic oligonucleotide
acuagacgccugcaagcuc

SEQ ID NO: 2027656 - RNA, 19 nt, Artificial Sequence
  Description of Artificial Sequence: Synthetic oligonucleotide
ggagaagaacaagaagggg

SEQ ID NO: 2027657 - RNA, 19 nt, Artificial Sequence
  Description of Artificial Sequence: Synthetic oligonucleotide
cuccguuccucguaccugc

SEQ ID NO: 2027658 - RNA, 19 nt, Artificial Sequence
  Description of Artificial Sequence: Synthetic oligonucleotide
ccugcacucgcaaagcagg

SEQ ID NO: 2027659 - RNA, 19 nt, Artificial Sequence
  Description of Artificial Sequence: Synthetic oligonucleotide
caccacagccaccaaacac

SEQ ID NO: 2027660 - RNA, 19 nt, Artificial Sequence
  Description of Artificial Sequence: Synthetic oligonucleotide
cuuucgaaucaaggggucc

SEQ ID NO: 2027661 - RNA, 19 nt, Artificial Sequence
  Description of Artificial Sequence: Synthetic oligonucleotide
uugcacccagucuuguggc

SEQ ID NO: 2027662 - RNA, 19 nt, Artificial Sequence
  Description of Artificial Sequence: Synthetic oligonucleotide
acaauuuaauggcuuccuu

SEQ ID NO: 2027663 - RNA, 19 nt, Artificial Sequence
  Description of Artificial Sequence: Synthetic oligonucleotide
ccggcuuucgaaucaaggg

SEQ ID NO: 2027664 - RNA, 19 nt, Artificial Sequence
  Description of Artificial Sequence: Synthetic oligonucleotide
cuuaucaggcuugcugagc

SEQ ID NO: 2027665 - RNA, 19 nt, Artificial Sequence
  Description of Artificial Sequence: Synthetic oligonucleotide
uccaaggacaggagccaug

SEQ ID NO: 2027666 - RNA, 19 nt, Artificial Sequence
  Description of Artificial Sequence: Synthetic oligonucleotide
aagacccagggaagacugc

SEQ ID NO: 2027667 - RNA, 19 nt, Artificial Sequence
  Description of Artificial Sequence: Synthetic oligonucleotide
uccuugauuuacagacaac

SEQ ID NO: 2027668 - RNA, 19 nt, Artificial Sequence
  Description of Artificial Sequence: Synthetic oligonucleotide
uccucguaccugcacucgc

SEQ ID NO: 2027669 - RNA, 19 nt, Artificial Sequence
  Description of Artificial Sequence: Synthetic oligonucleotide
ugcagcugcucaguguaag

SEQ ID NO: 2027670 - RNA, 19 nt, Artificial Sequence
  Description of Artificial Sequence: Synthetic oligonucleotide
caagggguccaccagcauc

SEQ ID NO: 2027671 - RNA, 19 nt, Artificial Sequence
  Description of Artificial Sequence: Synthetic oligonucleotide
ugccgaucgaagacugucu

SEQ ID NO: 2027672 - RNA, 19 nt, Artificial Sequence
  Description of Artificial Sequence: Synthetic oligonucleotide
ccuaguuauaacagucgag

SEQ ID NO: 2027673 - RNA, 19 nt, Artificial Sequence
  Description of Artificial Sequence: Synthetic oligonucleotide
agcuccccaccacagccac

SEQ ID NO: 2027674 - RNA, 19 nt, Artificial Sequence
  Description of Artificial Sequence: Synthetic oligonucleotide
caaccugauggcucagcag

SEQ ID NO: 2027675 - RNA, 19 nt, Artificial Sequence
  Description of Artificial Sequence: Synthetic oligonucleotide
ccagacaucuaacugagca

SEQ ID NO: 2027676 - RNA, 19 nt, Artificial Sequence
  Description of Artificial Sequence: Synthetic oligonucleotide
aguugcaguccuucugaga

SEQ ID NO: 2027677 - RNA, 19 nt, Artificial Sequence
  Description of Artificial Sequence: Synthetic oligonucleotide
ugcaugguacaaugaaauu

SEQ ID NO: 2027678 - RNA, 19 nt, Artificial Sequence
  Description of Artificial Sequence: Synthetic oligonucleotide
agcgugcauccucauuuuc

SEQ ID NO: 2027679 - RNA, 19 nt, Artificial Sequence
  Description of Artificial Sequence: Synthetic oligonucleotide
guaagcauccggcuuucga

SEQ ID NO: 2027680 - RNA, 19 nt, Artificial Sequence
  Description of Artificial Sequence: Synthetic oligonucleotide
aaaugcauuugcaccggau

SEQ ID NO: 2027681 - RNA, 19 nt, Artificial Sequence
  Description of Artificial Sequence: Synthetic oligonucleotide
cagagacccaaucacucuc

SEQ ID NO: 2027682 - RNA, 19 nt, Artificial Sequence
  Description of Artificial Sequence: Synthetic oligonucleotide
ggagccaugguauucaagu

SEQ ID NO: 2027683 - RNA, 19 nt, Artificial Sequence
  Description of Artificial Sequence: Synthetic oligonucleotide
cuugcugagccagcaagac

SEQ ID NO: 2027684 - RNA, 19 nt, Artificial Sequence
  Description of Artificial Sequence: Synthetic oligonucleotide
guauucaaguccccugcuc

SEQ ID NO: 2027685 - RNA, 19 nt, Artificial Sequence
  Description of Artificial Sequence: Synthetic oligonucleotide
uucagggacacguggucau

SEQ ID NO: 2027686 - RNA, 19 nt, Artificial Sequence
  Description of Artificial Sequence: Synthetic oligonucleotide
acccaaucacucucccuag

SEQ ID NO: 2027687 - RNA, 19 nt, Artificial Sequence
  Description of Artificial Sequence: Synthetic oligonucleotide
cugauggcucagcagucgc

SEQ ID NO: 2027688 - RNA, 19 nt, Artificial Sequence
  Description of Artificial Sequence: Synthetic oligonucleotide
ugcuccguuccucguaccu

SEQ ID NO: 2027689 - RNA, 19 nt, Artificial Sequence
  Description of Artificial Sequence: Synthetic oligonucleotide
ucgcagucacugaggagug

SEQ ID NO: 2027690 - RNA, 19 nt, Artificial Sequence
  Description of Artificial Sequence: Synthetic oligonucleotide
acuucuagagagggaggag

SEQ ID NO: 2027691 - RNA, 19 nt, Artificial Sequence
  Description of Artificial Sequence: Synthetic oligonucleotide
cgaguacacuucuagagag

SEQ ID NO: 2027692 - RNA, 19 nt, Artificial Sequence
  Description of Artificial Sequence: Synthetic oligonucleotide
ugaggaguggugggaaaga

SEQ ID NO: 2027693 - RNA, 19 nt, Artificial Sequence
  Description of Artificial Sequence: Synthetic oligonucleotide
gguggugcuccguuccucg

SEQ ID NO: 2027694 - RNA, 19 nt, Artificial Sequence
  Description of Artificial Sequence: Synthetic oligonucleotide
ucaugcuuaucaggcuugc

SEQ ID NO: 2027695 - RNA, 19 nt, Artificial Sequence
  Description of Artificial Sequence: Synthetic oligonucleotide
cagucuuguggcuaccuca

SEQ ID NO: 2027696 - RNA, 19 nt, Artificial Sequence
  Description of Artificial Sequence: Synthetic oligonucleotide
cagggaagacugcaaugag

SEQ ID NO: 2027697 - RNA, 19 nt, Artificial Sequence
  Description of Artificial Sequence: Synthetic oligonucleotide
gcauuugcaccggauaucc

SEQ ID NO: 2027698 - RNA, 19 nt, Artificial Sequence
  Description of Artificial Sequence: Synthetic oligonucleotide
uagacgccugcaagcuccg

SEQ ID NO: 2027699 - RNA, 19 nt, Artificial Sequence
  Description of Artificial Sequence: Synthetic oligonucleotide
aggacaguguuugcucggg

SEQ ID NO: 2027700 - RNA, 19 nt, Artificial Sequence
  Description of Artificial Sequence: Synthetic oligonucleotide
aacaaaugccaugggcuuu

SEQ ID NO: 2027701 - RNA, 19 nt, Artificial Sequence
  Description of Artificial Sequence: Synthetic oligonucleotide
gcacucgcaaagcaggcag

SEQ ID NO: 2027702 - RNA, 19 nt, Artificial Sequence
  Description of Artificial Sequence: Synthetic oligonucleotide
uucaaguccccugcucagc

SEQ ID NO: 2027703 - RNA, 19 nt, Artificial Sequence
  Description of Artificial Sequence: Synthetic oligonucleotide
ugcucgggguccuccaaug

SEQ ID NO: 2027704 - RNA, 19 nt, Artificial Sequence
  Description of Artificial Sequence: Synthetic oligonucleotide
ugcauuugcaccggauauc

SEQ ID NO: 2027705 - RNA, 19 nt, Artificial Sequence
  Description of Artificial Sequence: Synthetic oligonucleotide
gugaccacugauguuucug

SEQ ID NO: 2027706 - RNA, 19 nt, Artificial Sequence
  Description of Artificial Sequence: Synthetic oligonucleotide
gucgcagucacugaggagu

SEQ ID NO: 2027707 - RNA, 19 nt, Artificial Sequence
  Description of Artificial Sequence: Synthetic oligonucleotide
ccuugauuuacagacaaca

SEQ ID NO: 2027708 - RNA, 19 nt, Artificial Sequence
  Description of Artificial Sequence: Synthetic oligonucleotide
auucagggacacgugguca

SEQ ID NO: 2027709 - RNA, 19 nt, Artificial Sequence
  Description of Artificial Sequence: Synthetic oligonucleotide
aggcaguaggcuuccacau

SEQ ID NO: 2027710 - RNA, 19 nt, Artificial Sequence
  Description of Artificial Sequence: Synthetic oligonucleotide
ucuagagagggaggagaac

SEQ ID NO: 2027711 - RNA, 19 nt, Artificial Sequence
  Description of Artificial Sequence: Synthetic oligonucleotide
gcuaccucaaaugucucug

SEQ ID NO: 2027712 - RNA, 19 nt, Artificial Sequence
  Description of Artificial Sequence: Synthetic oligonucleotide
cuuccuugauuuacagaca

SEQ ID NO: 2027713 - RNA, 19 nt, Artificial Sequence
  Description of Artificial Sequence: Synthetic oligonucleotide
uguuugcucgggguccucc

SEQ ID NO: 2027714 - RNA, 19 nt, Artificial Sequence
  Description of Artificial Sequence: Synthetic oligonucleotide
gagggccccuaccacagac

SEQ ID NO: 2027715 - RNA, 19 nt, Artificial Sequence
  Description of Artificial Sequence: Synthetic oligonucleotide
agcuuggaggaguggagaa

SEQ ID NO: 2027716 - RNA, 19 nt, Artificial Sequence
  Description of Artificial Sequence: Synthetic oligonucleotide
caggcaguaggcuuccaca

SEQ ID NO: 2027717 - RNA, 19 nt, Artificial Sequence
  Description of Artificial Sequence: Synthetic oligonucleotide
uguaagcauccggcuuucg

SEQ ID NO: 2027718 - RNA, 19 nt, Artificial Sequence
  Description of Artificial Sequence: Synthetic oligonucleotide
cauggagcgugcauccuca

SEQ ID NO: 2027719 - RNA, 19 nt, Artificial Sequence
  Description of Artificial Sequence: Synthetic oligonucleotide
gaacaaaugccaugggcuu

SEQ ID NO: 2027720 - RNA, 19 nt, Artificial Sequence
  Description of Artificial Sequence: Synthetic oligonucleotide
ggugggaaagauuggagcu

SEQ ID NO: 2027721 - RNA, 19 nt, Artificial Sequence
  Description of Artificial Sequence: Synthetic oligonucleotide
uaucaggcuugcugagcca

SEQ ID NO: 2027722 - RNA, 19 nt, Artificial Sequence
  Description of Artificial Sequence: Synthetic oligonucleotide
gacaguguuugcucggggu

SEQ ID NO: 2027723 - RNA, 19 nt, Artificial Sequence
  Description of Artificial Sequence: Synthetic oligonucleotide
guggauugcacccagucuu

SEQ ID NO: 2027724 - RNA, 19 nt, Artificial Sequence
  Description of Artificial Sequence: Synthetic oligonucleotide
ucgaaucaagggguccacc

SEQ ID NO: 2027725 - RNA, 19 nt, Artificial Sequence
  Description of Artificial Sequence: Synthetic oligonucleotide
caaacacagcagcuucaug

SEQ ID NO: 2027726 - RNA, 19 nt, Artificial Sequence
  Description of Artificial Sequence: Synthetic oligonucleotide
gccaugguauucaaguccc

SEQ ID NO: 2027727 - RNA, 19 nt, Artificial Sequence
  Description of Artificial Sequence: Synthetic oligonucleotide
ugugaccacugauguuucu

SEQ ID NO: 2027728 - RNA, 19 nt, Artificial Sequence
  Description of Artificial Sequence: Synthetic oligonucleotide
ugcaccggauauccucaga

SEQ ID NO: 2027729 - RNA, 19 nt, Artificial Sequence
  Description of Artificial Sequence: Synthetic oligonucleotide
auguuucuguaagguggac

SEQ ID NO: 2027730 - RNA, 19 nt, Artificial Sequence
  Description of Artificial Sequence: Synthetic oligonucleotide
cucccuauccuauggucca

SEQ ID NO: 2027731 - RNA, 19 nt, Artificial Sequence
  Description of Artificial Sequence: Synthetic oligonucleotide
guuccucguaccugcacuc

SEQ ID NO: 2027732 - RNA, 19 nt, Artificial Sequence
  Description of Artificial Sequence: Synthetic oligonucleotide
gggaggagaacaaaugcca

SEQ ID NO: 2027733 - RNA, 19 nt, Artificial Sequence
  Description of Artificial Sequence: Synthetic oligonucleotide
uuugcucgggguccuccaa

SEQ ID NO: 2027734 - RNA, 19 nt, Artificial Sequence
  Description of Artificial Sequence: Synthetic oligonucleotide
cggcuuucgaaucaagggg

SEQ ID NO: 2027735 - RNA, 19 nt, Artificial Sequence
  Description of Artificial Sequence: Synthetic oligonucleotide
uugcaccggauauccucag

SEQ ID NO: 2027736 - RNA, 19 nt, Artificial Sequence
  Description of Artificial Sequence: Synthetic oligonucleotide
acacguggucauccaagga

SEQ ID NO: 2027737 - RNA, 19 nt, Artificial Sequence
  Description of Artificial Sequence: Synthetic oligonucleotide
gccaugggcuuuugaaggg

SEQ ID NO: 2027738 - RNA, 19 nt, Artificial Sequence
  Description of Artificial Sequence: Synthetic oligonucleotide
gagccccggaagcugguug

SEQ ID NO: 2027739 - RNA, 19 nt, Artificial Sequence
  Description of Artificial Sequence: Synthetic oligonucleotide
ugugccgaucgaagacugu

SEQ ID NO: 2027740 - RNA, 19 nt, Artificial Sequence
  Description of Artificial Sequence: Synthetic oligonucleotide
ugcacucgcaaagcaggca

SEQ ID NO: 2027741 - RNA, 19 nt, Artificial Sequence
  Description of Artificial Sequence: Synthetic oligonucleotide
uucgaaucaagggguccac

SEQ ID NO: 2027742 - RNA, 19 nt, Artificial Sequence
  Description of Artificial Sequence: Synthetic oligonucleotide
auggccugggucccugaug

SEQ ID NO: 2027743 - RNA, 19 nt, Artificial Sequence
  Description of Artificial Sequence: Synthetic oligonucleotide
accuuccacucgcucuagg

SEQ ID NO: 2027744 - RNA, 19 nt, Artificial Sequence
  Description of Artificial Sequence: Synthetic oligonucleotide
aguuuccaccgcugcugag

SEQ ID NO: 2027745 - RNA, 19 nt, Artificial Sequence
  Description of Artificial Sequence: Synthetic oligonucleotide
cgaucgaagacugucuucc

SEQ ID NO: 2027746 - RNA, 19 nt, Artificial Sequence
  Description of Artificial Sequence: Synthetic oligonucleotide
uguucccuucugccuugcc

SEQ ID NO: 2027747 - RNA, 19 nt, Artificial Sequence
  Description of Artificial Sequence: Synthetic oligonucleotide
auccuaugguccaaccuga

SEQ ID NO: 2027748 - RNA, 19 nt, Artificial Sequence
  Description of Artificial Sequence: Synthetic oligonucleotide
cguaccugcacucgcaaag

SEQ ID NO: 2027749 - RNA, 19 nt, Artificial Sequence
  Description of Artificial Sequence: Synthetic oligonucleotide
aucaagggguccaccagca

SEQ ID NO: 2027750 - RNA, 19 nt, Artificial Sequence
  Description of Artificial Sequence: Synthetic oligonucleotide
gguagaugacaaugaugac

SEQ ID NO: 2027751 - RNA, 19 nt, Artificial Sequence
  Description of Artificial Sequence: Synthetic oligonucleotide
cacucucccuaguuauaac

SEQ ID NO: 2027752 - RNA, 19 nt, Artificial Sequence
  Description of Artificial Sequence: Synthetic oligonucleotide
augugaccacugauguuuc

SEQ ID NO: 2027753 - RNA, 19 nt, Artificial Sequence
  Description of Artificial Sequence: Synthetic oligonucleotide
agggaagacccagggaaga

SEQ ID NO: 2027754 - RNA, 19 nt, Artificial Sequence
  Description of Artificial Sequence: Synthetic oligonucleotide
caaugagccccggaagcug

SEQ ID NO: 2027755 - RNA, 19 nt, Artificial Sequence
  Description of Artificial Sequence: Synthetic oligonucleotide
gauuggagcuuggaggagu

SEQ ID NO: 2027756 - RNA, 19 nt, Artificial Sequence
  Description of Artificial Sequence: Synthetic oligonucleotide
cucgcaaagcaggcaguag

SEQ ID NO: 2027757 - RNA, 19 nt, Artificial Sequence
  Description of Artificial Sequence: Synthetic oligonucleotide
gcucccuauccuauggucc

SEQ ID NO: 2027758 - RNA, 19 nt, Artificial Sequence
  Description of Artificial Sequence: Synthetic oligonucleotide
caagacuagacgccugcaa

SEQ ID NO: 2027759 - RNA, 19 nt, Artificial Sequence
  Description of Artificial Sequence: Synthetic oligonucleotide
gggccccuaccacagacag

SEQ ID NO: 2027760 - RNA, 19 nt, Artificial Sequence
  Description of Artificial Sequence: Synthetic oligonucleotide
accgugccagacaucuaac

SEQ ID NO: 2027761 - RNA, 19 nt, Artificial Sequence
  Description of Artificial Sequence: Synthetic oligonucleotide
uccuaugguccaaccugau

SEQ ID NO: 2027762 - RNA, 19 nt, Artificial Sequence
  Description of Artificial Sequence: Synthetic oligonucleotide
cacccagucuuguggcuac

SEQ ID NO: 2027763 - RNA, 19 nt, Artificial Sequence
  Description of Artificial Sequence: Synthetic oligonucleotide
caaucacucucccuaguua

SEQ ID NO: 2027764 - RNA, 19 nt, Artificial Sequence
  Description of Artificial Sequence: Synthetic oligonucleotide
cuggcaugggcuccaccac

SEQ ID NO: 2027765 - RNA, 19 nt, Artificial Sequence
  Description of Artificial Sequence: Synthetic oligonucleotide
agucuuguggcuaccucaa

SEQ ID NO: 2027766 - RNA, 19 nt, Artificial Sequence
  Description of Artificial Sequence: Synthetic oligonucleotide
ccuauccuaugguccaacc

SEQ ID NO: 2027767 - RNA, 19 nt, Artificial Sequence
  Description of Artificial Sequence: Synthetic oligonucleotide
guggccaggcacuggcaug

SEQ ID NO: 2027768 - RNA, 19 nt, Artificial Sequence
  Description of Artificial Sequence: Synthetic oligonucleotide
gguccaaccugauggcuca

SEQ ID NO: 2027769 - RNA, 19 nt, Artificial Sequence
  Description of Artificial Sequence: Synthetic oligonucleotide
gugccgaucgaagacuguc

SEQ ID NO: 2027770 - RNA, 19 nt, Artificial Sequence
  Description of Artificial Sequence: Synthetic oligonucleotide
cuauccuaugguccaaccu

SEQ ID NO: 2027771 - RNA, 19 nt, Artificial Sequence
  Description of Artificial Sequence: Synthetic oligonucleotide
agggacacguggucaucca

SEQ ID NO: 2027772 - RNA, 19 nt, Artificial Sequence
  Description of Artificial Sequence: Synthetic oligonucleotide
ugagcaucuugugccgauc

SEQ ID NO: 2027773 - RNA, 19 nt, Artificial Sequence
  Description of Artificial Sequence: Synthetic oligonucleotide
ucguaccugcacucgcaaa

SEQ ID NO: 2027774 - RNA, 19 nt, Artificial Sequence
  Description of Artificial Sequence: Synthetic oligonucleotide
uugcucgggguccuccaau

SEQ ID NO: 2027775 - RNA, 19 nt, Artificial Sequence
  Description of Artificial Sequence: Synthetic oligonucleotide
uggcuaccucaaaugucuc

SEQ ID NO: 2027776 - RNA, 19 nt, Artificial Sequence
  Description of Artificial Sequence: Synthetic oligonucleotide
caagaagggguggauugca

SEQ ID NO: 2027777 - RNA, 19 nt, Artificial Sequence
  Description of Artificial Sequence: Synthetic oligonucleotide
ucgcucuaggacaguguuu

SEQ ID NO: 2027778 - RNA, 19 nt, Artificial Sequence
  Description of Artificial Sequence: Synthetic oligonucleotide
gguccuccaauggaugcag

SEQ ID NO: 2027779 - RNA, 19 nt, Artificial Sequence
  Description of Artificial Sequence: Synthetic oligonucleotide
cagcaagacuagacgccug

SEQ ID NO: 2027780 - RNA, 19 nt, Artificial Sequence
  Description of Artificial Sequence: Synthetic oligonucleotide
gcgugcauccucauuuucc

SEQ ID NO: 2027781 - RNA, 19 nt, Artificial Sequence
  Description of Artificial Sequence: Synthetic oligonucleotide
gagagggaggagaacaaau

SEQ ID NO: 2027782 - RNA, 19 nt, Artificial Sequence
  Description of Artificial Sequence: Synthetic oligonucleotide
uccguuccucguaccugca

SEQ ID NO: 2027783 - RNA, 19 nt, Artificial Sequence
  Description of Artificial Sequence: Synthetic oligonucleotide
caugggcuuuugaagggaa

SEQ ID NO: 2027784 - RNA, 19 nt, Artificial Sequence
  Description of Artificial Sequence: Synthetic oligonucleotide
gacaucuaacugagcaucu

SEQ ID NO: 2027785 - RNA, 19 nt, Artificial Sequence
  Description of Artificial Sequence: Synthetic oligonucleotide
ggguggauugcacccaguc

SEQ ID NO: 2027786 - RNA, 19 nt, Artificial Sequence
  Description of Artificial Sequence: Synthetic oligonucleotide
gcugcugagcaccuuccac

SEQ ID NO: 2027787 - RNA, 19 nt, Artificial Sequence
  Description of Artificial Sequence: Synthetic oligonucleotide
cgugccagacaucuaacug

SEQ ID NO: 2027788 - RNA, 19 nt, Artificial Sequence
  Description of Artificial Sequence: Synthetic oligonucleotide
cuugauggugguggugcuc

SEQ ID NO: 2027789 - RNA, 19 nt, Artificial Sequence
  Description of Artificial Sequence: Synthetic oligonucleotide
gacugcaaugagccccgga

SEQ ID NO: 2027790 - RNA, 19 nt, Artificial Sequence
  Description of Artificial Sequence: Synthetic oligonucleotide
uggagcgugcauccucauu

SEQ ID NO: 2027791 - RNA, 19 nt, Artificial Sequence
  Description of Artificial Sequence: Synthetic oligonucleotide
cucgggguccuccaaugga

SEQ ID NO: 2027792 - RNA, 19 nt, Artificial Sequence
  Description of Artificial Sequence: Synthetic oligonucleotide
acaucguggccaggcacug

SEQ ID NO: 2027793 - RNA, 19 nt, Artificial Sequence
  Description of Artificial Sequence: Synthetic oligonucleotide
gcagucgcagucacugagg

SEQ ID NO: 2027794 - RNA, 19 nt, Artificial Sequence
  Description of Artificial Sequence: Synthetic oligonucleotide
ggagcgugcauccucauuu

SEQ ID NO: 2027795 - RNA, 19 nt, Artificial Sequence
  Description of Artificial Sequence: Synthetic oligonucleotide
ggaaagauuggagcuugga

SEQ ID NO: 2027796 - RNA, 19 nt, Artificial Sequence
  Description of Artificial Sequence: Synthetic oligonucleotide
acaucuaacugagcaucuu

SEQ ID NO: 2027797 - RNA, 19 nt, Artificial Sequence
  Description of Artificial Sequence: Synthetic oligonucleotide
ucguggccaggcacuggca

SEQ ID NO: 2027798 - RNA, 19 nt, Artificial Sequence
  Description of Artificial Sequence: Synthetic oligonucleotide
caaaugcauuugcaccgga

SEQ ID NO: 2027799 - RNA, 19 nt, Artificial Sequence
  Description of Artificial Sequence: Synthetic oligonucleotide
cuccccuaccaccccggag

SEQ ID NO: 2027800 - RNA, 19 nt, Artificial Sequence
  Description of Artificial Sequence: Synthetic oligonucleotide
gggcuuuugaagggaagac

SEQ ID NO: 2027801 - RNA, 19 nt, Artificial Sequence
  Description of Artificial Sequence: Synthetic oligonucleotide
cggagaccuacagagaccc

SEQ ID NO: 2027802 - RNA, 19 nt, Artificial Sequence
  Description of Artificial Sequence: Synthetic oligonucleotide
acccagucuuguggcuacc

SEQ ID NO: 2027803 - RNA, 19 nt, Artificial Sequence
  Description of Artificial Sequence: Synthetic oligonucleotide
gcucgggguccuccaaugg

SEQ ID NO: 2027804 - RNA, 19 nt, Artificial Sequence
  Description of Artificial Sequence: Synthetic oligonucleotide
cccuaguuauaacagucga

SEQ ID NO: 2027805 - RNA, 19 nt, Artificial Sequence
  Description of Artificial Sequence: Synthetic oligonucleotide
ugcaaccgugccagacauc

SEQ ID NO: 2027806 - RNA, 19 nt, Artificial Sequence
  Description of Artificial Sequence: Synthetic oligonucleotide
cagacaucuaacugagcau

SEQ ID NO: 2027807 - RNA, 19 nt, Artificial Sequence
  Description of Artificial Sequence: Synthetic oligonucleotide
uaccaccccggagaccuac

SEQ ID NO: 2027808 - RNA, 19 nt, Artificial Sequence
  Description of Artificial Sequence: Synthetic oligonucleotide
caaguccccugcucagcuc

SEQ ID NO: 2027809 - RNA, 19 nt, Artificial Sequence
  Description of Artificial Sequence: Synthetic oligonucleotide
cacaucguggccaggcacu

SEQ ID NO: 2027810 - RNA, 19 nt, Artificial Sequence
  Description of Artificial Sequence: Synthetic oligonucleotide
guacacuucuagagaggga

SEQ ID NO: 2027811 - RNA, 19 nt, Artificial Sequence
  Description of Artificial Sequence: Synthetic oligonucleotide
cacuugcaguuuccaccgc

SEQ ID NO: 2027812 - RNA, 19 nt, Artificial Sequence
  Description of Artificial Sequence: Synthetic oligonucleotide
caguuuccaccgcugcuga

SEQ ID NO: 2027813 - RNA, 19 nt, Artificial Sequence
  Description of Artificial Sequence: Synthetic oligonucleotide
gcaaccgugccagacaucu

SEQ ID NO: 2027814 - RNA, 19 nt, Artificial Sequence
  Description of Artificial Sequence: Synthetic oligonucleotide
cucuccaugcaugguacaa

SEQ ID NO: 2027815 - RNA, 19 nt, Artificial Sequence
  Description of Artificial Sequence: Synthetic oligonucleotide
acucgcucuaggacagugu

SEQ ID NO: 2027816 - RNA, 19 nt, Artificial Sequence
  Description of Artificial Sequence: Synthetic oligonucleotide
ucagggacacguggucauc

SEQ ID NO: 2027817 - RNA, 19 nt, Artificial Sequence
  Description of Artificial Sequence: Synthetic oligonucleotide
ccacagacagguagaugac

SEQ ID NO: 2027818 - RNA, 19 nt, Artificial Sequence
  Description of Artificial Sequence: Synthetic oligonucleotide
ccggagaccuacagagacc

SEQ ID NO: 2027819 - RNA, 19 nt, Artificial Sequence
  Description of Artificial Sequence: Synthetic oligonucleotide
cuugugccgaucgaagacu

SEQ ID NO: 2027820 - RNA, 19 nt, Artificial Sequence
  Description of Artificial Sequence: Synthetic oligonucleotide
ccaauggaugcagcugccg

SEQ ID NO: 2027821 - RNA, 19 nt, Artificial Sequence
  Description of Artificial Sequence: Synthetic oligonucleotide
agacgccugcaagcuccgc

SEQ ID NO: 2027822 - RNA, 19 nt, Artificial Sequence
  Description of Artificial Sequence: Synthetic oligonucleotide
ccugggucccugaugcaac

SEQ ID NO: 2027823 - RNA, 19 nt, Artificial Sequence
  Description of Artificial Sequence: Synthetic oligonucleotide
cucuaggacaguguuugcu

SEQ ID NO: 2027824 - RNA, 19 nt, Artificial Sequence
  Description of Artificial Sequence: Synthetic oligonucleotide
gguggauugcacccagucu

SEQ ID NO: 2027825 - RNA, 19 nt, Artificial Sequence
  Description of Artificial Sequence: Synthetic oligonucleotide
gccccuaccacagacaggu

SEQ ID NO: 2027826 - RNA, 19 nt, Artificial Sequence
  Description of Artificial Sequence: Synthetic oligonucleotide
gcauccggcuuucgaauca

SEQ ID NO: 2027827 - RNA, 19 nt, Artificial Sequence
  Description of Artificial Sequence: Synthetic oligonucleotide
cgaaucaagggguccacca

SEQ ID NO: 2027828 - RNA, 19 nt, Artificial Sequence
  Description of Artificial Sequence: Synthetic oligonucleotide
ccaugguauucaagucccc

SEQ ID NO: 2027829 - RNA, 19 nt, Artificial Sequence
  Description of Artificial Sequence: Synthetic oligonucleotide
ugguggugcuccguuccuc

SEQ ID NO: 2027830 - RNA, 19 nt, Artificial Sequence
  Description of Artificial Sequence: Synthetic oligonucleotide
ggaugcagcugccgccgcc

SEQ ID NO: 2027831 - RNA, 19 nt, Artificial Sequence
  Description of Artificial Sequence: Synthetic oligonucleotide
gguauucaaguccccugcu

SEQ ID NO: 2027832 - RNA, 19 nt, Artificial Sequence
  Description of Artificial Sequence: Synthetic oligonucleotide
ccacaucguggccaggcac

SEQ ID NO: 2027833 - RNA, 19 nt, Artificial Sequence
  Description of Artificial Sequence: Synthetic oligonucleotide
ccaaccugauggcucagca

SEQ ID NO: 2027834 - RNA, 19 nt, Artificial Sequence
  Description of Artificial Sequence: Synthetic oligonucleotide
cucguaccugcacucgcaa

SEQ ID NO: 2027835 - RNA, 19 nt, Artificial Sequence
  Description of Artificial Sequence: Synthetic oligonucleotide
ccauggagcgugcauccuc

SEQ ID NO: 2027836 - RNA, 19 nt, Artificial Sequence
  Description of Artificial Sequence: Synthetic oligonucleotide
auccggcuuucgaaucaag

SEQ ID NO: 2027837 - RNA, 19 nt, Artificial Sequence
  Description of Artificial Sequence: Synthetic oligonucleotide
cguggucauccaaggacag

SEQ ID NO: 2027838 - RNA, 19 nt, Artificial Sequence
  Description of Artificial Sequence: Synthetic oligonucleotide
aucacucucccuaguuaua

SEQ ID NO: 2027839 - RNA, 19 nt, Artificial Sequence
  Description of Artificial Sequence: Synthetic oligonucleotide
ucccuauccuaugguccaa

SEQ ID NO: 2027840 - RNA, 19 nt, Artificial Sequence
  Description of Artificial Sequence: Synthetic oligonucleotide
gugcuccguuccucguacc

SEQ ID NO: 2027841 - RNA, 19 nt, Artificial Sequence
  Description of Artificial Sequence: Synthetic oligonucleotide
gcucuaggacaguguuugc

SEQ ID NO: 2027842 - RNA, 19 nt, Artificial Sequence
  Description of Artificial Sequence: Synthetic oligonucleotide
gcaucuugugccgaucgaa

SEQ ID NO: 2027843 - RNA, 19 nt, Artificial Sequence
  Description of Artificial Sequence: Synthetic oligonucleotide
cucgcucuaggacaguguu

SEQ ID NO: 2027844 - RNA, 19 nt, Artificial Sequence
  Description of Artificial Sequence: Synthetic oligonucleotide
gggaagacccagggaagac

SEQ ID NO: 2027845 - RNA, 19 nt, Artificial Sequence
  Description of Artificial Sequence: Synthetic oligonucleotide
gcuuucgaaucaagggguc

SEQ ID NO: 2027846 - RNA, 19 nt, Artificial Sequence
  Description of Artificial Sequence: Synthetic oligonucleotide
uuccaccgcugcugagcac

SEQ ID NO: 2027847 - RNA, 19 nt, Artificial Sequence
  Description of Artificial Sequence: Synthetic oligonucleotide
agacugcaaugagccccgg

SEQ ID NO: 2027848 - RNA, 19 nt, Artificial Sequence
  Description of Artificial Sequence: Synthetic oligonucleotide
ccgaucgaagacugucuuc

SEQ ID NO: 2027849 - RNA, 19 nt, Artificial Sequence
  Description of Artificial Sequence: Synthetic oligonucleotide
caguccuucugagacacau

SEQ ID NO: 2027850 - RNA, 19 nt, Artificial Sequence
  Description of Artificial Sequence: Synthetic oligonucleotide
caccagcaucaggaaggcc

SEQ ID NO: 2027851 - RNA, 19 nt, Artificial Sequence
  Description of Artificial Sequence: Synthetic oligonucleotide
ccagucuuguggcuaccuc

SEQ ID NO: 2027852 - RNA, 19 nt, Artificial Sequence
  Description of Artificial Sequence: Synthetic oligonucleotide
gcugagccagcaagacuag

SEQ ID NO: 2027853 - RNA, 19 nt, Artificial Sequence
  Description of Artificial Sequence: Synthetic oligonucleotide
gucuuguggcuaccucaaa

SEQ ID NO: 2027854 - RNA, 19 nt, Artificial Sequence
  Description of Artificial Sequence: Synthetic oligonucleotide
ggcuaccucaaaugucucu

SEQ ID NO: 2027855 - RNA, 19 nt, Artificial Sequence
  Description of Artificial Sequence: Synthetic oligonucleotide
caguguaagcauccggcuu

SEQ ID NO: 2027856 - RNA, 19 nt, Artificial Sequence
  Description of Artificial Sequence: Synthetic oligonucleotide
ggaagacccagggaagacu

SEQ ID NO: 2027857 - RNA, 19 nt, Artificial Sequence
  Description of Artificial Sequence: Synthetic oligonucleotide
caccuuccacucgcucuag

SEQ ID NO: 2027858 - RNA, 19 nt, Artificial Sequence
  Description of Artificial Sequence: Synthetic oligonucleotide
cagcagucgcagucacuga

SEQ ID NO: 2027859 - RNA, 19 nt, Artificial Sequence
  Description of Artificial Sequence: Synthetic oligonucleotide
gagcgugcauccucauuuu

SEQ ID NO: 2027860 - RNA, 19 nt, Artificial Sequence
  Description of Artificial Sequence: Synthetic oligonucleotide
cauuugcaccggauauccu

SEQ ID NO: 2027861 - RNA, 19 nt, Artificial Sequence
  Description of Artificial Sequence: Synthetic oligonucleotide
cagacagguagaugacaau

SEQ ID NO: 2027862 - RNA, 19 nt, Artificial Sequence
  Description of Artificial Sequence: Synthetic oligonucleotide
guccaaccugauggcucag

SEQ ID NO: 2027863 - RNA, 19 nt, Artificial Sequence
  Description of Artificial Sequence: Synthetic oligonucleotide
gugggaaagauuggagcuu

SEQ ID NO: 2027864 - RNA, 19 nt, Artificial Sequence
  Description of Artificial Sequence: Synthetic oligonucleotide
cugagccagcaagacuaga

SEQ ID NO: 2027865 - RNA, 19 nt, Artificial Sequence
  Description of Artificial Sequence: Synthetic oligonucleotide
ggguccuccaauggaugca

SEQ ID NO: 2027866 - RNA, 19 nt, Artificial Sequence
  Description of Artificial Sequence: Synthetic oligonucleotide
cauccggcuuucgaaucaa

SEQ ID NO: 2027867 - RNA, 19 nt, Artificial Sequence
  Description of Artificial Sequence: Synthetic oligonucleotide
cugagcaucuugugccgau

SEQ ID NO: 2027868 - RNA, 19 nt, Artificial Sequence
  Description of Artificial Sequence: Synthetic oligonucleotide
ccucguaccugcacucgca

SEQ ID NO: 2027869 - RNA, 19 nt, Artificial Sequence
  Description of Artificial Sequence: Synthetic oligonucleotide
gcagucacugaggaguggu

SEQ ID NO: 2027870 - RNA, 19 nt, Artificial Sequence
  Description of Artificial Sequence: Synthetic oligonucleotide
cacucgcaaagcaggcagu

SEQ ID NO: 2027871 - RNA, 19 nt, Artificial Sequence
  Description of Artificial Sequence: Synthetic oligonucleotide
ggccccuaccacagacagg

SEQ ID NO: 2027872 - RNA, 19 nt, Artificial Sequence
  Description of Artificial Sequence: Synthetic oligonucleotide
cugaugcaaccgugccaga

SEQ ID NO: 2027873 - RNA, 19 nt, Artificial Sequence
  Description of Artificial Sequence: Synthetic oligonucleotide
gcaaugagccccggaagcu

SEQ ID NO: 2027874 - RNA, 19 nt, Artificial Sequence
  Description of Artificial Sequence: Synthetic oligonucleotide
augagccccggaagcuggu

SEQ ID NO: 2027875 - RNA, 19 nt, Artificial Sequence
  Description of Artificial Sequence: Synthetic oligonucleotide
gcaaagcaggcaguaggcu

SEQ ID NO: 2027876 - RNA, 19 nt, Artificial Sequence
  Description of Artificial Sequence: Synthetic oligonucleotide
gggucccugaugcaaccgu

SEQ ID NO: 2027877 - RNA, 19 nt, Artificial Sequence
  Description of Artificial Sequence: Synthetic oligonucleotide
cccuauccuaugguccaac

SEQ ID NO: 2027878 - RNA, 19 nt, Artificial Sequence
  Description of Artificial Sequence: Synthetic oligonucleotide
ggggcaccagcaagcuccc

SEQ ID NO: 2027879 - RNA, 19 nt, Artificial Sequence
  Description of Artificial Sequence: Synthetic oligonucleotide
cagcucccuauccuauggu

SEQ ID NO: 2027880 - RNA, 19 nt, Artificial Sequence
  Description of Artificial Sequence: Synthetic oligonucleotide
caaccgugccagacaucua

SEQ ID NO: 2027881 - RNA, 19 nt, Artificial Sequence
  Description of Artificial Sequence: Synthetic oligonucleotide
ccccuaccaccccggagac

SEQ ID NO: 2027882 - RNA, 19 nt, Artificial Sequence
  Description of Artificial Sequence: Synthetic oligonucleotide
ccaugggcuuuugaaggga

SEQ ID NO: 2027883 - RNA, 19 nt, Artificial Sequence
  Description of Artificial Sequence: Synthetic oligonucleotide
gccgaucgaagacugucuu

SEQ ID NO: 2027884 - RNA, 19 nt, Artificial Sequence
  Description of Artificial Sequence: Synthetic oligonucleotide
ccagcaagacuagacgccu

SEQ ID NO: 2027885 - RNA, 19 nt, Artificial Sequence
  Description of Artificial Sequence: Synthetic oligonucleotide
gugcagcugcucaguguaa

SEQ ID NO: 2027886 - RNA, 19 nt, Artificial Sequence
  Description of Artificial Sequence: Synthetic oligonucleotide
ggauugcacccagucuugu

SEQ ID NO: 2027887 - RNA, 19 nt, Artificial Sequence
  Description of Artificial Sequence: Synthetic oligonucleotide
ccccggagaccuacagaga

SEQ ID NO: 2027888 - RNA, 19 nt, Artificial Sequence
  Description of Artificial Sequence: Synthetic oligonucleotide
ccuugauggugguggugcu

SEQ ID NO: 2027889 - RNA, 19 nt, Artificial Sequence
  Description of Artificial Sequence: Synthetic oligonucleotide
gcuccaccacaugcaggca

SEQ ID NO: 2027890 - RNA, 19 nt, Artificial Sequence
  Description of Artificial Sequence: Synthetic oligonucleotide
cuaccaccccggagaccua

SEQ ID NO: 2027891 - RNA, 19 nt, Artificial Sequence
  Description of Artificial Sequence: Synthetic oligonucleotide
gccgccauggagcgugcau

SEQ ID NO: 2027892 - RNA, 19 nt, Artificial Sequence
  Description of Artificial Sequence: Synthetic oligonucleotide
cccaaucacucucccuagu

SEQ ID NO: 2027893 - RNA, 19 nt, Artificial Sequence
  Description of Artificial Sequence: Synthetic oligonucleotide
cagcugccgccgccaugga

SEQ ID NO: 2027894 - RNA, 19 nt, Artificial Sequence
  Description of Artificial Sequence: Synthetic oligonucleotide
gccauggagcgugcauccu

SEQ ID NO: 2027895 - RNA, 19 nt, Artificial Sequence
  Description of Artificial Sequence: Synthetic oligonucleotide
cccagucuuguggcuaccu

SEQ ID NO: 2027896 - RNA, 19 nt, Artificial Sequence
  Description of Artificial Sequence: Synthetic oligonucleotide
gggguggauugcacccagu

SEQ ID NO: 2027897 - RNA, 19 nt, Artificial Sequence
  Description of Artificial Sequence: Synthetic oligonucleotide
ccaccgcugcugagcaccu

SEQ ID NO: 2027898 - RNA, 19 nt, Artificial Sequence
  Description of Artificial Sequence: Synthetic oligonucleotide
caccgcugcugagcaccuu

SEQ ID NO: 2027899 - RNA, 19 nt, Artificial Sequence
  Description of Artificial Sequence: Synthetic oligonucleotide
aaagcuauauauuucaucu

SEQ ID NO: 2027900 - RNA, 19 nt, Artificial Sequence
  Description of Artificial Sequence: Synthetic oligonucleotide
acuaaauuggacuuauugc

SEQ ID NO: 2027901 - RNA, 19 nt, Artificial Sequence
  Description of Artificial Sequence: Synthetic oligonucleotide
aaauauacguaagauauug

SEQ ID NO: 2027902 - RNA, 19 nt, Artificial Sequence
  Description of Artificial Sequence: Synthetic oligonucleotide
auauacguaagauauuggg

SEQ ID NO: 2027903 - RNA, 19 nt, Artificial Sequence
  Description of Artificial Sequence: Synthetic oligonucleotide
uuaauucaaauccugcaag

SEQ ID NO: 2027904 - RNA, 19 nt, Artificial Sequence
  Description of Artificial Sequence: Synthetic oligonucleotide
auacguaagauauugggag

SEQ ID NO: 2027905 - RNA, 19 nt, Artificial Sequence
  Description of Artificial Sequence: Synthetic oligonucleotide
uuuacaaugcagauuuucc

SEQ ID NO: 2027906 - RNA, 19 nt, Artificial Sequence
  Description of Artificial Sequence: Synthetic oligonucleotide
aaaugugagauucuuuucu

SEQ ID NO: 2027907 - RNA, 19 nt, Artificial Sequence
  Description of Artificial Sequence: Synthetic oligonucleotide
aauccugcaagcuuuacgu

SEQ ID NO: 2027908 - RNA, 19 nt, Artificial Sequence
  Description of Artificial Sequence: Synthetic oligonucleotide
ucugaggagagguauacgg

SEQ ID NO: 2027909 - RNA, 19 nt, Artificial Sequence
  Description of Artificial Sequence: Synthetic oligonucleotide
gagucaaauuucuucaugg

SEQ ID NO: 2027910 - RNA, 19 nt, Artificial Sequence
  Description of Artificial Sequence: Synthetic oligonucleotide
auuacagccuuucaaauug

SEQ ID NO: 2027911 - RNA, 19 nt, Artificial Sequence
  Description of Artificial Sequence: Synthetic oligonucleotide
aguaucuugucauugcccg

SEQ ID NO: 2027912 - RNA, 19 nt, Artificial Sequence
  Description of Artificial Sequence: Synthetic oligonucleotide
uauuccacugccauuuugg

SEQ ID NO: 2027913 - RNA, 19 nt, Artificial Sequence
  Description of Artificial Sequence: Synthetic oligonucleotide
ucccaauuuauccauaccc

SEQ ID NO: 2027914 - RNA, 19 nt, Artificial Sequence
  Description of Artificial Sequence: Synthetic oligonucleotide
uuuacuuaauucaaauccu

SEQ ID NO: 2027915 - RNA, 19 nt, Artificial Sequence
  Description of Artificial Sequence: Synthetic oligonucleotide
aaauccugcaagcuuuacg

SEQ ID NO: 2027916 - RNA, 19 nt, Artificial Sequence
  Description of Artificial Sequence: Synthetic oligonucleotide
uauacggugaugaauagau

SEQ ID NO: 2027917 - RNA, 19 nt, Artificial Sequence
  Description of Artificial Sequence: Synthetic oligonucleotide
ucuuccuguagccaggagg

SEQ ID NO: 2027918 - RNA, 19 nt, Artificial Sequence
  Description of Artificial Sequence: Synthetic oligonucleotide
ugaugaauagauuuucucu

SEQ ID NO: 2027919 - RNA, 19 nt, Artificial Sequence
  Description of Artificial Sequence: Synthetic oligonucleotide
uauacguaagauauuggga

SEQ ID NO: 2027920 - RNA, 19 nt, Artificial Sequence
  Description of Artificial Sequence: Synthetic oligonucleotide
gaugaauagauuuucucuc

SEQ ID NO: 2027921 - RNA, 19 nt, Artificial Sequence
  Description of Artificial Sequence: Synthetic oligonucleotide
uaugcguuucccuagacgu

SEQ ID NO: 2027922 - RNA, 19 nt, Artificial Sequence
  Description of Artificial Sequence: Synthetic oligonucleotide
aauuuauccauaccccuga

SEQ ID NO: 2027923 - RNA, 19 nt, Artificial Sequence
  Description of Artificial Sequence: Synthetic oligonucleotide
ucugaucucguuauugaag

SEQ ID NO: 2027924 - RNA, 19 nt, Artificial Sequence
  Description of Artificial Sequence: Synthetic oligonucleotide
agauuuuccagucucugag

SEQ ID NO: 2027925 - RNA, 19 nt, Artificial Sequence
  Description of Artificial Sequence: Synthetic oligonucleotide
uucacuucaaggaaaagua

SEQ ID NO: 2027926 - RNA, 19 nt, Artificial Sequence
  Description of Artificial Sequence: Synthetic oligonucleotide
ucguuauugaagauguccc

SEQ ID NO: 2027927 - RNA, 19 nt, Artificial Sequence
  Description of Artificial Sequence: Synthetic oligonucleotide
uuugcauuguuuccggcag

SEQ ID NO: 2027928 - RNA, 19 nt, Artificial Sequence
  Description of Artificial Sequence: Synthetic oligonucleotide
aaauuggacuuauugcuga

SEQ ID NO: 2027929 - RNA, 19 nt, Artificial Sequence
  Description of Artificial Sequence: Synthetic oligonucleotide
auugcccgaagucacaaac

SEQ ID NO: 2027930 - RNA, 19 nt, Artificial Sequence
  Description of Artificial Sequence: Synthetic oligonucleotide
gaugcguucauuaaaugug

SEQ ID NO: 2027931 - RNA, 19 nt, Artificial Sequence
  Description of Artificial Sequence: Synthetic oligonucleotide
uuacuuaauucaaauccug

SEQ ID NO: 2027932 - RNA, 19 nt, Artificial Sequence
  Description of Artificial Sequence: Synthetic oligonucleotide
acauuuggagcagaguucc

SEQ ID NO: 2027933 - RNA, 19 nt, Artificial Sequence
  Description of Artificial Sequence: Synthetic oligonucleotide
uagauuuucucuccuuuag

SEQ ID NO: 2027934 - RNA, 19 nt, Artificial Sequence
  Description of Artificial Sequence: Synthetic oligonucleotide
auaaaccuuuagcugcucc

SEQ ID NO: 2027935 - RNA, 19 nt, Artificial Sequence
  Description of Artificial Sequence: Synthetic oligonucleotide
gaucugucccaauuuaucc

SEQ ID NO: 2027936 - RNA, 19 nt, Artificial Sequence
  Description of Artificial Sequence: Synthetic oligonucleotide
uucacuguuucaucaaugc

SEQ ID NO: 2027937 - RNA, 19 nt, Artificial Sequence
  Description of Artificial Sequence: Synthetic oligonucleotide
uguuuuacuuaauucaaau

SEQ ID NO: 2027938 - RNA, 19 nt, Artificial Sequence
  Description of Artificial Sequence: Synthetic oligonucleotide
uacuuaauucaaauccugc

SEQ ID NO: 2027939 - RNA, 19 nt, Artificial Sequence
  Description of Artificial Sequence: Synthetic oligonucleotide
uaauucaaauccugcaagc

SEQ ID NO: 2027940 - RNA, 19 nt, Artificial Sequence
  Description of Artificial Sequence: Synthetic oligonucleotide
uagaauuacagccuuucaa

SEQ ID NO: 2027941 - RNA, 19 nt, Artificial Sequence
  Description of Artificial Sequence: Synthetic oligonucleotide
acuuaauucaaauccugca

SEQ ID NO: 2027942 - RNA, 19 nt, Artificial Sequence
  Description of Artificial Sequence: Synthetic oligonucleotide
aauauacguaagauauugg

SEQ ID NO: 2027943 - RNA, 19 nt, Artificial Sequence
  Description of Artificial Sequence: Synthetic oligonucleotide
cacuaaauuggacuuauug

SEQ ID NO: 2027944 - RNA, 19 nt, Artificial Sequence
  Description of Artificial Sequence: Synthetic oligonucleotide
uccugcaagcuuuacgugg

SEQ ID NO: 2027945 - RNA, 19 nt, Artificial Sequence
  Description of Artificial Sequence: Synthetic oligonucleotide
uuacaaugcagauuuucca

SEQ ID NO: 2027946 - RNA, 19 nt, Artificial Sequence
  Description of Artificial Sequence: Synthetic oligonucleotide
uuuucuaucugcugccuug

SEQ ID NO: 2027947 - RNA, 19 nt, Artificial Sequence
  Description of Artificial Sequence: Synthetic oligonucleotide
ugcagaucccaaauauacg

SEQ ID NO: 2027948 - RNA, 19 nt, Artificial Sequence
  Description of Artificial Sequence: Synthetic oligonucleotide
uaagauauugggagaguca

SEQ ID NO: 2027949 - RNA, 19 nt, Artificial Sequence
  Description of Artificial Sequence: Synthetic oligonucleotide
aacuggagaucugugguac

SEQ ID NO: 2027950 - RNA, 19 nt, Artificial Sequence
  Description of Artificial Sequence: Synthetic oligonucleotide
ucgccuaaggcgaugaucu

SEQ ID NO: 2027951 - RNA, 19 nt, Artificial Sequence
  Description of Artificial Sequence: Synthetic oligonucleotide
uuggacuuauugcugaacu

SEQ ID NO: 2027952 - RNA, 19 nt, Artificial Sequence
  Description of Artificial Sequence: Synthetic oligonucleotide
aucaaccuggagcagcagc

SEQ ID NO: 2027953 - RNA, 19 nt, Artificial Sequence
  Description of Artificial Sequence: Synthetic oligonucleotide
ugugcugagguuauuguuc

SEQ ID NO: 2027954 - RNA, 19 nt, Artificial Sequence
  Description of Artificial Sequence: Synthetic oligonucleotide
uuauagaugagaucgccua

SEQ ID NO: 2027955 - RNA, 19 nt, Artificial Sequence
  Description of Artificial Sequence: Synthetic oligonucleotide
agacguuugcauuguuucc

SEQ ID NO: 2027956 - RNA, 19 nt, Artificial Sequence
  Description of Artificial Sequence: Synthetic oligonucleotide
uuauugaagaugucccuca

SEQ ID NO: 2027957 - RNA, 19 nt, Artificial Sequence
  Description of Artificial Sequence: Synthetic oligonucleotide
aauuacagccuuucaaauu

SEQ ID NO: 2027958 - RNA, 19 nt, Artificial Sequence
  Description of Artificial Sequence: Synthetic oligonucleotide
agaugcguucauuaaaugu

SEQ ID NO: 2027959 - RNA, 19 nt, Artificial Sequence
  Description of Artificial Sequence: Synthetic oligonucleotide
agcaauuaugucaucuggc

SEQ ID NO: 2027960 - RNA, 19 nt, Artificial Sequence
  Description of Artificial Sequence: Synthetic oligonucleotide
cuguauaaaccuuuagcug

SEQ ID NO: 2027961 - RNA, 19 nt, Artificial Sequence
  Description of Artificial Sequence: Synthetic oligonucleotide
agcagcaauagcuccuccc

SEQ ID NO: 2027962 - RNA, 19 nt, Artificial Sequence
  Description of Artificial Sequence: Synthetic oligonucleotide
aauugggaucuuuccagug

SEQ ID NO: 2027963 - RNA, 19 nt, Artificial Sequence
  Description of Artificial Sequence: Synthetic oligonucleotide
gauuuuccagucucugagg

SEQ ID NO: 2027964 - RNA, 19 nt, Artificial Sequence
  Description of Artificial Sequence: Synthetic oligonucleotide
ugaggagagguauacggug

SEQ ID NO: 2027965 - RNA, 19 nt, Artificial Sequence
  Description of Artificial Sequence: Synthetic oligonucleotide
uacggugaugaauagauuu

SEQ ID NO: 2027966 - RNA, 19 nt, Artificial Sequence
  Description of Artificial Sequence: Synthetic oligonucleotide
gacguuugcauuguuuccg

SEQ ID NO: 2027967 - RNA, 19 nt, Artificial Sequence
  Description of Artificial Sequence: Synthetic oligonucleotide
caggacagccucaaaacgg

SEQ ID NO: 2027968 - RNA, 19 nt, Artificial Sequence
  Description of Artificial Sequence: Synthetic oligonucleotide
agcuuuacgugguagccuc

SEQ ID NO: 2027969 - RNA, 19 nt, Artificial Sequence
  Description of Artificial Sequence: Synthetic oligonucleotide
ucaaccuggagcagcagca

SEQ ID NO: 2027970 - RNA, 19 nt, Artificial Sequence
  Description of Artificial Sequence: Synthetic oligonucleotide
guagccuccagccaccagg

SEQ ID NO: 2027971 - RNA, 19 nt, Artificial Sequence
  Description of Artificial Sequence: Synthetic oligonucleotide
uaaggcgaugaucuguccc

SEQ ID NO: 2027972 - RNA, 19 nt, Artificial Sequence
  Description of Artificial Sequence: Synthetic oligonucleotide
cuaaauuggacuuauugcu

SEQ ID NO: 2027973 - RNA, 19 nt, Artificial Sequence
  Description of Artificial Sequence: Synthetic oligonucleotide
aaugcagauuuuccagucu

SEQ ID NO: 2027974 - RNA, 19 nt, Artificial Sequence
  Description of Artificial Sequence: Synthetic oligonucleotide
aagauauugggagagucaa

SEQ ID NO: 2027975 - RNA, 19 nt, Artificial Sequence
  Description of Artificial Sequence: Synthetic oligonucleotide
aaggcgaugaucuguccca

SEQ ID NO: 2027976 - RNA, 19 nt, Artificial Sequence
  Description of Artificial Sequence: Synthetic oligonucleotide
ugaauagauuuucucuccu

SEQ ID NO: 2027977 - RNA, 19 nt, Artificial Sequence
  Description of Artificial Sequence: Synthetic oligonucleotide
agcagaguuccguugauca

SEQ ID NO: 2027978 - RNA, 19 nt, Artificial Sequence
  Description of Artificial Sequence: Synthetic oligonucleotide
aagaugucccucacuauuc

SEQ ID NO: 2027979 - RNA, 19 nt, Artificial Sequence
  Description of Artificial Sequence: Synthetic oligonucleotide
aaugugagauucuuuucuu

SEQ ID NO: 2027980 - RNA, 19 nt, Artificial Sequence
  Description of Artificial Sequence: Synthetic oligonucleotide
aagccuguguuuuacuuaa

SEQ ID NO: 2027981 - RNA, 19 nt, Artificial Sequence
  Description of Artificial Sequence: Synthetic oligonucleotide
uugggaucuuuccaguggc

SEQ ID NO: 2027982 - RNA, 19 nt, Artificial Sequence
  Description of Artificial Sequence: Synthetic oligonucleotide
caaagcuauauauuucauc

SEQ ID NO: 2027983 - RNA, 19 nt, Artificial Sequence
  Description of Artificial Sequence: Synthetic oligonucleotide
uacgugguagccuccagcc

SEQ ID NO: 2027984 - RNA, 19 nt, Artificial Sequence
  Description of Artificial Sequence: Synthetic oligonucleotide
auugggagagucaaauuuc

SEQ ID NO: 2027985 - RNA, 19 nt, Artificial Sequence
  Description of Artificial Sequence: Synthetic oligonucleotide
aagaugcguucauuaaaug

SEQ ID NO: 2027986 - RNA, 19 nt, Artificial Sequence
  Description of Artificial Sequence: Synthetic oligonucleotide
uuacagccuuucaaauugg

SEQ ID NO: 2027987 - RNA, 19 nt, Artificial Sequence
  Description of Artificial Sequence: Synthetic oligonucleotide
cuguugaucuuccuguagc

SEQ ID NO: 2027988 - RNA, 19 nt, Artificial Sequence
  Description of Artificial Sequence: Synthetic oligonucleotide
cagcaauuaugucaucugg

SEQ ID NO: 2027989 - RNA, 19 nt, Artificial Sequence
  Description of Artificial Sequence: Synthetic oligonucleotide
caauuuauccauaccccug

SEQ ID NO: 2027990 - RNA, 19 nt, Artificial Sequence
  Description of Artificial Sequence: Synthetic oligonucleotide
aggaaguccaaucugugau

SEQ ID NO: 2027991 - RNA, 19 nt, Artificial Sequence
  Description of Artificial Sequence: Synthetic oligonucleotide
cuuguaugcguuucccuag

SEQ ID NO: 2027992 - RNA, 19 nt, Artificial Sequence
  Description of Artificial Sequence: Synthetic oligonucleotide
ugguguagccuguauaaac

SEQ ID NO: 2027993 - RNA, 19 nt, Artificial Sequence
  Description of Artificial Sequence: Synthetic oligonucleotide
cacuucaaggaaaaguauc

SEQ ID NO: 2027994 - RNA, 19 nt, Artificial Sequence
  Description of Artificial Sequence: Synthetic oligonucleotide
aguuccguugaucaaccug

SEQ ID NO: 2027995 - RNA, 19 nt, Artificial Sequence
  Description of Artificial Sequence: Synthetic oligonucleotide
uguugaauacuuugauggu

SEQ ID NO: 2027996 - RNA, 19 nt, Artificial Sequence
  Description of Artificial Sequence: Synthetic oligonucleotide
uaaaugugagauucuuuuc

SEQ ID NO: 2027997 - RNA, 19 nt, Artificial Sequence
  Description of Artificial Sequence: Synthetic oligonucleotide
agaucugugguacucuccu

SEQ ID NO: 2027998 - RNA, 19 nt, Artificial Sequence
  Description of Artificial Sequence: Synthetic oligonucleotide
ugucauugcccgaagucac

SEQ ID NO: 2027999 - RNA, 19 nt, Artificial Sequence
  Description of Artificial Sequence: Synthetic oligonucleotide
guaugcguuucccuagacg

SEQ ID NO: 2028000 - RNA, 19 nt, Artificial Sequence
  Description of Artificial Sequence: Synthetic oligonucleotide
auccuguugaucuuccugu

SEQ ID NO: 2028001 - RNA, 19 nt, Artificial Sequence
  Description of Artificial Sequence: Synthetic oligonucleotide
ugaucaaccuggagcagca

SEQ ID NO: 2028002 - RNA, 19 nt, Artificial Sequence
  Description of Artificial Sequence: Synthetic oligonucleotide
cuuaauucaaauccugcaa

SEQ ID NO: 2028003 - RNA, 19 nt, Artificial Sequence
  Description of Artificial Sequence: Synthetic oligonucleotide
aagucacaaacuuccacua

SEQ ID NO: 2028004 - RNA, 19 nt, Artificial Sequence
  Description of Artificial Sequence: Synthetic oligonucleotide
aucaaugcagaucccaaau

SEQ ID NO: 2028005 - RNA, 19 nt, Artificial Sequence
  Description of Artificial Sequence: Synthetic oligonucleotide
ugaugguaacuggagaucu

SEQ ID NO: 2028006 - RNA, 19 nt, Artificial Sequence
  Description of Artificial Sequence: Synthetic oligonucleotide
uacguaagauauugggaga

SEQ ID NO: 2028007 - RNA, 19 nt, Artificial Sequence
  Description of Artificial Sequence: Synthetic oligonucleotide
uauagaugagaucgccuaa

SEQ ID NO: 2028008 - RNA, 19 nt, Artificial Sequence
  Description of Artificial Sequence: Synthetic oligonucleotide
cuuagaauuacagccuuuc

SEQ ID NO: 2028009 - RNA, 19 nt, Artificial Sequence
  Description of Artificial Sequence: Synthetic oligonucleotide
uugucauugcccgaaguca

SEQ ID NO: 2028010 - RNA, 19 nt, Artificial Sequence
  Description of Artificial Sequence: Synthetic oligonucleotide
uuuauccauaccccugagu

SEQ ID NO: 2028011 - RNA, 19 nt, Artificial Sequence
  Description of Artificial Sequence: Synthetic oligonucleotide
uuugggguuuguugaauac

SEQ ID NO: 2028012 - RNA, 19 nt, Artificial Sequence
  Description of Artificial Sequence: Synthetic oligonucleotide
ugcaguugagguguuuccg

SEQ ID NO: 2028013 - RNA, 19 nt, Artificial Sequence
  Description of Artificial Sequence: Synthetic oligonucleotide
uucaucaaugcagauccca

SEQ ID NO: 2028014 - RNA, 19 nt, Artificial Sequence
  Description of Artificial Sequence: Synthetic oligonucleotide
agaucccaaauauacguaa

SEQ ID NO: 2028015 - RNA, 19 nt, Artificial Sequence
  Description of Artificial Sequence: Synthetic oligonucleotide
agguuguccacuccuuggg

SEQ ID NO: 2028016 - RNA, 19 nt, Artificial Sequence
  Description of Artificial Sequence: Synthetic oligonucleotide
uuccgugugguguagccug

SEQ ID NO: 2028017 - RNA, 19 nt, Artificial Sequence
  Description of Artificial Sequence: Synthetic oligonucleotide
cuugucauugcccgaaguc

SEQ ID NO: 2028018 - RNA, 19 nt, Artificial Sequence
  Description of Artificial Sequence: Synthetic oligonucleotide
aagugugcugagguuauug

SEQ ID NO: 2028019 - RNA, 19 nt, Artificial Sequence
  Description of Artificial Sequence: Synthetic oligonucleotide
ugcguucauuaaaugugag

SEQ ID NO: 2028020 - RNA, 19 nt, Artificial Sequence
  Description of Artificial Sequence: Synthetic oligonucleotide
aaccuuuagcugcucccag

SEQ ID NO: 2028021 - RNA, 19 nt, Artificial Sequence
  Description of Artificial Sequence: Synthetic oligonucleotide
agaguuccguugaucaacc

SEQ ID NO: 2028022 - RNA, 19 nt, Artificial Sequence
  Description of Artificial Sequence: Synthetic oligonucleotide
aucucguuauugaagaugu

SEQ ID NO: 2028023 - RNA, 19 nt, Artificial Sequence
  Description of Artificial Sequence: Synthetic oligonucleotide
aucccaaauauacguaaga

SEQ ID NO: 2028024 - RNA, 19 nt, Artificial Sequence
  Description of Artificial Sequence: Synthetic oligonucleotide
aagcucgagcugcugaugu

SEQ ID NO: 2028025 - RNA, 19 nt, Artificial Sequence
  Description of Artificial Sequence: Synthetic oligonucleotide
acuucaucucuucacacuu

SEQ ID NO: 2028026 - RNA, 19 nt, Artificial Sequence
  Description of Artificial Sequence: Synthetic oligonucleotide
uugaucaaccuggagcagc

SEQ ID NO: 2028027 - RNA, 19 nt, Artificial Sequence
  Description of Artificial Sequence: Synthetic oligonucleotide
gaucccaaauauacguaag

SEQ ID NO: 2028028 - RNA, 19 nt, Artificial Sequence
  Description of Artificial Sequence: Synthetic oligonucleotide
gccuguauaaaccuuuagc

SEQ ID NO: 2028029 - RNA, 19 nt, Artificial Sequence
  Description of Artificial Sequence: Synthetic oligonucleotide
uggagcagaguuccguuga

SEQ ID NO: 2028030 - RNA, 19 nt, Artificial Sequence
  Description of Artificial Sequence: Synthetic oligonucleotide
agauuuucucuccuuuagu

SEQ ID NO: 2028031 - RNA, 19 nt, Artificial Sequence
  Description of Artificial Sequence: Synthetic oligonucleotide
uucuuagaauuacagccuu

SEQ ID NO: 2028032 - RNA, 19 nt, Artificial Sequence
  Description of Artificial Sequence: Synthetic oligonucleotide
cccgaagucacaaacuucc

SEQ ID NO: 2028033 - RNA, 19 nt, Artificial Sequence
  Description of Artificial Sequence: Synthetic oligonucleotide
acguaagauauugggagag

SEQ ID NO: 2028034 - RNA, 19 nt, Artificial Sequence
  Description of Artificial Sequence: Synthetic oligonucleotide
ucaaugcagaucccaaaua

SEQ ID NO: 2028035 - RNA, 19 nt, Artificial Sequence
  Description of Artificial Sequence: Synthetic oligonucleotide
uauugaagaugucccucac

SEQ ID NO: 2028036 - RNA, 19 nt, Artificial Sequence
  Description of Artificial Sequence: Synthetic oligonucleotide
ucccuagacguuugcauug

SEQ ID NO: 2028037 - RNA, 19 nt, Artificial Sequence
  Description of Artificial Sequence: Synthetic oligonucleotide
ugggguuuguugaauacuu

SEQ ID NO: 2028038 - RNA, 19 nt, Artificial Sequence
  Description of Artificial Sequence: Synthetic oligonucleotide
ugagccucuggagaggcag

SEQ ID NO: 2028039 - RNA, 19 nt, Artificial Sequence
  Description of Artificial Sequence: Synthetic oligonucleotide
uaaagugugcugagguuau

SEQ ID NO: 2028040 - RNA, 19 nt, Artificial Sequence
  Description of Artificial Sequence: Synthetic oligonucleotide
aauuggacuuauugcugaa

SEQ ID NO: 2028041 - RNA, 19 nt, Artificial Sequence
  Description of Artificial Sequence: Synthetic oligonucleotide
ccagccaccaggaagcucg

SEQ ID NO: 2028042 - RNA, 19 nt, Artificial Sequence
  Description of Artificial Sequence: Synthetic oligonucleotide
ucacuucaaggaaaaguau

SEQ ID NO: 2028043 - RNA, 19 nt, Artificial Sequence
  Description of Artificial Sequence: Synthetic oligonucleotide
caaggaaaaguaucuuguc

SEQ ID NO: 2028044 - RNA, 19 nt, Artificial Sequence
  Description of Artificial Sequence: Synthetic oligonucleotide
auuggacuuauugcugaac

SEQ ID NO: 2028045 - RNA, 19 nt, Artificial Sequence
  Description of Artificial Sequence: Synthetic oligonucleotide
ucaaaacggcccagggcag

SEQ ID NO: 2028046 - RNA, 19 nt, Artificial Sequence
  Description of Artificial Sequence: Synthetic oligonucleotide
acguuugcauuguuuccgg

SEQ ID NO: 2028047 - RNA, 19 nt, Artificial Sequence
  Description of Artificial Sequence: Synthetic oligonucleotide
uacucuccucuguaaagug

SEQ ID NO: 2028048 - RNA, 19 nt, Artificial Sequence
  Description of Artificial Sequence: Synthetic oligonucleotide
caagcuuuacgugguagcc

SEQ ID NO: 2028049 - RNA, 19 nt, Artificial Sequence
  Description of Artificial Sequence: Synthetic oligonucleotide
uuagcugcucccaggacua

SEQ ID NO: 2028050 - RNA, 19 nt, Artificial Sequence
  Description of Artificial Sequence: Synthetic oligonucleotide
aagcuauauauuucaucuu

SEQ ID NO: 2028051 - RNA, 19 nt, Artificial Sequence
  Description of Artificial Sequence: Synthetic oligonucleotide
guuugcauuguuuccggca

SEQ ID NO: 2028052 - RNA, 19 nt, Artificial Sequence
  Description of Artificial Sequence: Synthetic oligonucleotide
agugugcugagguuauugu

SEQ ID NO: 2028053 - RNA, 19 nt, Artificial Sequence
  Description of Artificial Sequence: Synthetic oligonucleotide
caaugcagauuuuccaguc

SEQ ID NO: 2028054 - RNA, 19 nt, Artificial Sequence
  Description of Artificial Sequence: Synthetic oligonucleotide
uugagguguuuccgugugg

SEQ ID NO: 2028055 - RNA, 19 nt, Artificial Sequence
  Description of Artificial Sequence: Synthetic oligonucleotide
uuuacgugguagccuccag

SEQ ID NO: 2028056 - RNA, 19 nt, Artificial Sequence
  Description of Artificial Sequence: Synthetic oligonucleotide
guaagauauugggagaguc

SEQ ID NO: 2028057 - RNA, 19 nt, Artificial Sequence
  Description of Artificial Sequence: Synthetic oligonucleotide
gaggcaguagcagaccuug

SEQ ID NO: 2028058 - RNA, 19 nt, Artificial Sequence
  Description of Artificial Sequence: Synthetic oligonucleotide
uuuugggguuuguugaaua

SEQ ID NO: 2028059 - RNA, 19 nt, Artificial Sequence
  Description of Artificial Sequence: Synthetic oligonucleotide
ccaaauauacguaagauau

SEQ ID NO: 2028060 - RNA, 19 nt, Artificial Sequence
  Description of Artificial Sequence: Synthetic oligonucleotide
guugagguguuuccgugug

SEQ ID NO: 2028061 - RNA, 19 nt, Artificial Sequence
  Description of Artificial Sequence: Synthetic oligonucleotide
uguaaagugugcugagguu

SEQ ID NO: 2028062 - RNA, 19 nt, Artificial Sequence
  Description of Artificial Sequence: Synthetic oligonucleotide
auggaagccuguguuuuac

SEQ ID NO: 2028063 - RNA, 19 nt, Artificial Sequence
  Description of Artificial Sequence: Synthetic oligonucleotide
cccaauuuauccauacccc

SEQ ID NO: 2028064 - RNA, 19 nt, Artificial Sequence
  Description of Artificial Sequence: Synthetic oligonucleotide
ccguugaucaaccuggagc

SEQ ID NO: 2028065 - RNA, 19 nt, Artificial Sequence
  Description of Artificial Sequence: Synthetic oligonucleotide
ugcaagcuuuacgugguag

SEQ ID NO: 2028066 - RNA, 19 nt, Artificial Sequence
  Description of Artificial Sequence: Synthetic oligonucleotide
gguacucuccucuguaaag

SEQ ID NO: 2028067 - RNA, 19 nt, Artificial Sequence
  Description of Artificial Sequence: Synthetic oligonucleotide
augagaucgccuaaggcga

SEQ ID NO: 2028068 - RNA, 19 nt, Artificial Sequence
  Description of Artificial Sequence: Synthetic oligonucleotide
gauauugggagagucaaau

SEQ ID NO: 2028069 - RNA, 19 nt, Artificial Sequence
  Description of Artificial Sequence: Synthetic oligonucleotide
uuguaugcguuucccuaga

SEQ ID NO: 2028070 - RNA, 19 nt, Artificial Sequence
  Description of Artificial Sequence: Synthetic oligonucleotide
gggagagucaaauuucuuc

SEQ ID NO: 2028071 - RNA, 19 nt, Artificial Sequence
  Description of Artificial Sequence: Synthetic oligonucleotide
gucacaaacuuccacuaaa

SEQ ID NO: 2028072 - RNA, 19 nt, Artificial Sequence
  Description of Artificial Sequence: Synthetic oligonucleotide
guuuccgugugguguagcc

SEQ ID NO: 2028073 - RNA, 19 nt, Artificial Sequence
  Description of Artificial Sequence: Synthetic oligonucleotide
aucgccuaaggcgaugauc

SEQ ID NO: 2028074 - RNA, 19 nt, Artificial Sequence
  Description of Artificial Sequence: Synthetic oligonucleotide
gacauuuggagcagaguuc

SEQ ID NO: 2028075 - RNA, 19 nt, Artificial Sequence
  Description of Artificial Sequence: Synthetic oligonucleotide
auuaugucaucuggcaggu

SEQ ID NO: 2028076 - RNA, 19 nt, Artificial Sequence
  Description of Artificial Sequence: Synthetic oligonucleotide
cucuguaaagugugcugag

SEQ ID NO: 2028077 - RNA, 19 nt, Artificial Sequence
  Description of Artificial Sequence: Synthetic oligonucleotide
gguguagccuguauaaacc

SEQ ID NO: 2028078 - RNA, 19 nt, Artificial Sequence
  Description of Artificial Sequence: Synthetic oligonucleotide
gcaauuaugucaucuggca

SEQ ID NO: 2028079 - RNA, 19 nt, Artificial Sequence
  Description of Artificial Sequence: Synthetic oligonucleotide
acuuauugcugaacuuuuc

SEQ ID NO: 2028080 - RNA, 19 nt, Artificial Sequence
  Description of Artificial Sequence: Synthetic oligonucleotide
ucucugaggagagguauac

SEQ ID NO: 2028081 - RNA, 19 nt, Artificial Sequence
  Description of Artificial Sequence: Synthetic oligonucleotide
agguauacggugaugaaua

SEQ ID NO: 2028082 - RNA, 19 nt, Artificial Sequence
  Description of Artificial Sequence: Synthetic oligonucleotide
ugugcaguugagguguuuc

SEQ ID NO: 2028083 - RNA, 19 nt, Artificial Sequence
  Description of Artificial Sequence: Synthetic oligonucleotide
uccguugaucaaccuggag

SEQ ID NO: 2028084 - RNA, 19 nt, Artificial Sequence
  Description of Artificial Sequence: Synthetic oligonucleotide
aguugagguguuuccgugu

SEQ ID NO: 2028085 - RNA, 19 nt, Artificial Sequence
  Description of Artificial Sequence: Synthetic oligonucleotide
aggaagaugcguucauuaa

SEQ ID NO: 2028086 - RNA, 19 nt, Artificial Sequence
  Description of Artificial Sequence: Synthetic oligonucleotide
uccacuaaauuggacuuau

SEQ ID NO: 2028087 - RNA, 19 nt, Artificial Sequence
  Description of Artificial Sequence: Synthetic oligonucleotide
ugcccgaagucacaaacuu

SEQ ID NO: 2028088 - RNA, 19 nt, Artificial Sequence
  Description of Artificial Sequence: Synthetic oligonucleotide
uugcccgaagucacaaacu

SEQ ID NO: 2028089 - RNA, 19 nt, Artificial Sequence
  Description of Artificial Sequence: Synthetic oligonucleotide
uguagccuguauaaaccuu

SEQ ID NO: 2028090 - RNA, 19 nt, Artificial Sequence
  Description of Artificial Sequence: Synthetic oligonucleotide
cuuugaugguaacuggaga

SEQ ID NO: 2028091 - RNA, 19 nt, Artificial Sequence
  Description of Artificial Sequence: Synthetic oligonucleotide
cauaccccugaguuccagg

SEQ ID NO: 2028092 - RNA, 19 nt, Artificial Sequence
  Description of Artificial Sequence: Synthetic oligonucleotide
agccuguauaaaccuuuag

SEQ ID NO: 2028093 - RNA, 19 nt, Artificial Sequence
  Description of Artificial Sequence: Synthetic oligonucleotide
cagaguuccguugaucaac

SEQ ID NO: 2028094 - RNA, 19 nt, Artificial Sequence
  Description of Artificial Sequence: Synthetic oligonucleotide
uccuguagccaggaggccc

SEQ ID NO: 2028095 - RNA, 19 nt, Artificial Sequence
  Description of Artificial Sequence: Synthetic oligonucleotide
ucuugagccucuggagagg

SEQ ID NO: 2028096 - RNA, 19 nt, Artificial Sequence
  Description of Artificial Sequence: Synthetic oligonucleotide
auuuggagcagaguuccgu

SEQ ID NO: 2028097 - RNA, 19 nt, Artificial Sequence
  Description of Artificial Sequence: Synthetic oligonucleotide
aagcuuuacgugguagccu

SEQ ID NO: 2028098 - RNA, 19 nt, Artificial Sequence
  Description of Artificial Sequence: Synthetic oligonucleotide
ccuguguuuuacuuaauuc

SEQ ID NO: 2028099 - RNA, 19 nt, Artificial Sequence
  Description of Artificial Sequence: Synthetic oligonucleotide
uugggguuuguugaauacu

SEQ ID NO: 2028100 - RNA, 19 nt, Artificial Sequence
  Description of Artificial Sequence: Synthetic oligonucleotide
uguaugcguuucccuagac

SEQ ID NO: 2028101 - RNA, 19 nt, Artificial Sequence
  Description of Artificial Sequence: Synthetic oligonucleotide
uucccuagacguuugcauu

SEQ ID NO: 2028102 - RNA, 19 nt, Artificial Sequence
  Description of Artificial Sequence: Synthetic oligonucleotide
guaaagugugcugagguua

SEQ ID NO: 2028103 - RNA, 19 nt, Artificial Sequence
  Description of Artificial Sequence: Synthetic oligonucleotide
gaauuacagccuuucaaau

SEQ ID NO: 2028104 - RNA, 19 nt, Artificial Sequence
  Description of Artificial Sequence: Synthetic oligonucleotide
agguguuuccguguggugu

SEQ ID NO: 2028105 - RNA, 19 nt, Artificial Sequence
  Description of Artificial Sequence: Synthetic oligonucleotide
uggcaauuucccagaguac

SEQ ID NO: 2028106 - RNA, 19 nt, Artificial Sequence
  Description of Artificial Sequence: Synthetic oligonucleotide
gaagaugucccucacuauu

SEQ ID NO: 2028107 - RNA, 19 nt, Artificial Sequence
  Description of Artificial Sequence: Synthetic oligonucleotide
cuauuccacugccauuuug

SEQ ID NO: 2028108 - RNA, 19 nt, Artificial Sequence
  Description of Artificial Sequence: Synthetic oligonucleotide
gcugaacuuuucuaucugc

SEQ ID NO: 2028109 - RNA, 19 nt, Artificial Sequence
  Description of Artificial Sequence: Synthetic oligonucleotide
uucccucaggguuccaugu

SEQ ID NO: 2028110 - RNA, 19 nt, Artificial Sequence
  Description of Artificial Sequence: Synthetic oligonucleotide
acuaggaagaugcguucau

SEQ ID NO: 2028111 - RNA, 19 nt, Artificial Sequence
  Description of Artificial Sequence: Synthetic oligonucleotide
gaagaugcguucauuaaau

SEQ ID NO: 2028112 - RNA, 19 nt, Artificial Sequence
  Description of Artificial Sequence: Synthetic oligonucleotide
gucccaauuuauccauacc

SEQ ID NO: 2028113 - RNA, 19 nt, Artificial Sequence
  Description of Artificial Sequence: Synthetic oligonucleotide
ccuguauaaaccuuuagcu

SEQ ID NO: 2028114 - RNA, 19 nt, Artificial Sequence
  Description of Artificial Sequence: Synthetic oligonucleotide
uguuuccggcaguacuuca

SEQ ID NO: 2028115 - RNA, 19 nt, Artificial Sequence
  Description of Artificial Sequence: Synthetic oligonucleotide
gguauacggugaugaauag

SEQ ID NO: 2028116 - RNA, 19 nt, Artificial Sequence
  Description of Artificial Sequence: Synthetic oligonucleotide
guugaauacuuugauggua

SEQ ID NO: 2028117 - RNA, 19 nt, Artificial Sequence
  Description of Artificial Sequence: Synthetic oligonucleotide
aguggcaauuucccagagu

SEQ ID NO: 2028118 - RNA, 19 nt, Artificial Sequence
  Description of Artificial Sequence: Synthetic oligonucleotide
gcaagcuuuacgugguagc

SEQ ID NO: 2028119 - RNA, 19 nt, Artificial Sequence
  Description of Artificial Sequence: Synthetic oligonucleotide
uuccggcaguacuucaucu

SEQ ID NO: 2028120 - RNA, 19 nt, Artificial Sequence
  Description of Artificial Sequence: Synthetic oligonucleotide
gaugguaacuggagaucug

SEQ ID NO: 2028121 - RNA, 19 nt, Artificial Sequence
  Description of Artificial Sequence: Synthetic oligonucleotide
gugcaguugagguguuucc

SEQ ID NO: 2028122 - RNA, 19 nt, Artificial Sequence
  Description of Artificial Sequence: Synthetic oligonucleotide
gaccuuguaugcguuuccc

SEQ ID NO: 2028123 - RNA, 19 nt, Artificial Sequence
  Description of Artificial Sequence: Synthetic oligonucleotide
cuugagccucuggagaggc

SEQ ID NO: 2028124 - RNA, 19 nt, Artificial Sequence
  Description of Artificial Sequence: Synthetic oligonucleotide
agucacaaacuuccacuaa

SEQ ID NO: 2028125 - RNA, 19 nt, Artificial Sequence
  Description of Artificial Sequence: Synthetic oligonucleotide
gagaucugugguacucucc

SEQ ID NO: 2028126 - RNA, 19 nt, Artificial Sequence
  Description of Artificial Sequence: Synthetic oligonucleotide
cuaaggcgaugaucugucc

SEQ ID NO: 2028127 - RNA, 19 nt, Artificial Sequence
  Description of Artificial Sequence: Synthetic oligonucleotide
ggcaauuucccagaguaca

SEQ ID NO: 2028128 - RNA, 19 nt, Artificial Sequence
  Description of Artificial Sequence: Synthetic oligonucleotide
gaauacuuugaugguaacu

SEQ ID NO: 2028129 - RNA, 19 nt, Artificial Sequence
  Description of Artificial Sequence: Synthetic oligonucleotide
aggacuaggaagaugcguu

SEQ ID NO: 2028130 - RNA, 19 nt, Artificial Sequence
  Description of Artificial Sequence: Synthetic oligonucleotide
accuuguaugcguuucccu

SEQ ID NO: 2028131 - RNA, 19 nt, Artificial Sequence
  Description of Artificial Sequence: Synthetic oligonucleotide
agagguauacggugaugaa

SEQ ID NO: 2028132 - RNA, 19 nt, Artificial Sequence
  Description of Artificial Sequence: Synthetic oligonucleotide
guucccucaggguuccaug

SEQ ID NO: 2028133 - RNA, 19 nt, Artificial Sequence
  Description of Artificial Sequence: Synthetic oligonucleotide
auccugcaagcuuuacgug

SEQ ID NO: 2028134 - RNA, 19 nt, Artificial Sequence
  Description of Artificial Sequence: Synthetic oligonucleotide
auuguuuccggcaguacuu

SEQ ID NO: 2028135 - RNA, 19 nt, Artificial Sequence
  Description of Artificial Sequence: Synthetic oligonucleotide
aucuugucauugcccgaag

SEQ ID NO: 2028136 - RNA, 19 nt, Artificial Sequence
  Description of Artificial Sequence: Synthetic oligonucleotide
ugggaucuuuccaguggca

SEQ ID NO: 2028137 - RNA, 19 nt, Artificial Sequence
  Description of Artificial Sequence: Synthetic oligonucleotide
ugaucucguuauugaagau

SEQ ID NO: 2028138 - RNA, 19 nt, Artificial Sequence
  Description of Artificial Sequence: Synthetic oligonucleotide
augcguucauuaaauguga

SEQ ID NO: 2028139 - RNA, 19 nt, Artificial Sequence
  Description of Artificial Sequence: Synthetic oligonucleotide
uuccguugaucaaccugga

SEQ ID NO: 2028140 - RNA, 19 nt, Artificial Sequence
  Description of Artificial Sequence: Synthetic oligonucleotide
gcagaucccaaauauacgu

SEQ ID NO: 2028141 - RNA, 19 nt, Artificial Sequence
  Description of Artificial Sequence: Synthetic oligonucleotide
ucauugcccgaagucacaa

SEQ ID NO: 2028142 - RNA, 19 nt, Artificial Sequence
  Description of Artificial Sequence: Synthetic oligonucleotide
cuguaaagugugcugaggu

SEQ ID NO: 2028143 - RNA, 19 nt, Artificial Sequence
  Description of Artificial Sequence: Synthetic oligonucleotide
gacuaggaagaugcguuca

SEQ ID NO: 2028144 - RNA, 19 nt, Artificial Sequence
  Description of Artificial Sequence: Synthetic oligonucleotide
uagccuguauaaaccuuua

SEQ ID NO: 2028145 - RNA, 19 nt, Artificial Sequence
  Description of Artificial Sequence: Synthetic oligonucleotide
uggagaucugugguacucu

SEQ ID NO: 2028146 - RNA, 19 nt, Artificial Sequence
  Description of Artificial Sequence: Synthetic oligonucleotide
uuuccgugugguguagccu

SEQ ID NO: 2028147 - RNA, 19 nt, Artificial Sequence
  Description of Artificial Sequence: Synthetic oligonucleotide
gagguguuuccguguggug

SEQ ID NO: 2028148 - RNA, 19 nt, Artificial Sequence
  Description of Artificial Sequence: Synthetic oligonucleotide
ucucguuauugaagauguc

SEQ ID NO: 2028149 - RNA, 19 nt, Artificial Sequence
  Description of Artificial Sequence: Synthetic oligonucleotide
ugcguuucccuagacguuu

SEQ ID NO: 2028150 - RNA, 19 nt, Artificial Sequence
  Description of Artificial Sequence: Synthetic oligonucleotide
uggaagccuguguuuuacu

SEQ ID NO: 2028151 - RNA, 19 nt, Artificial Sequence
  Description of Artificial Sequence: Synthetic oligonucleotide
ugcauuguuuccggcagua

SEQ ID NO: 2028152 - RNA, 19 nt, Artificial Sequence
  Description of Artificial Sequence: Synthetic oligonucleotide
cugaacuuuucuaucugcu

SEQ ID NO: 2028153 - RNA, 19 nt, Artificial Sequence
  Description of Artificial Sequence: Synthetic oligonucleotide
ggucuugagccucuggaga

SEQ ID NO: 2028154 - RNA, 19 nt, Artificial Sequence
  Description of Artificial Sequence: Synthetic oligonucleotide
gucucccacugauggaagc

SEQ ID NO: 2028155 - RNA, 19 nt, Artificial Sequence
  Description of Artificial Sequence: Synthetic oligonucleotide
cucugaggagagguauacg

SEQ ID NO: 2028156 - RNA, 19 nt, Artificial Sequence
  Description of Artificial Sequence: Synthetic oligonucleotide
ucacuauuccacugccauu

SEQ ID NO: 2028157 - RNA, 19 nt, Artificial Sequence
  Description of Artificial Sequence: Synthetic oligonucleotide
cucccagcuucucauucac

SEQ ID NO: 2028158 - RNA, 19 nt, Artificial Sequence
  Description of Artificial Sequence: Synthetic oligonucleotide
gucccucacuauuccacug

SEQ ID NO: 2028159 - RNA, 19 nt, Artificial Sequence
  Description of Artificial Sequence: Synthetic oligonucleotide
guauacggugaugaauaga

SEQ ID NO: 2028160 - RNA, 19 nt, Artificial Sequence
  Description of Artificial Sequence: Synthetic oligonucleotide
gaagcucgagcugcugaug

SEQ ID NO: 2028161 - RNA, 19 nt, Artificial Sequence
  Description of Artificial Sequence: Synthetic oligonucleotide
gguuccauguucacaguac

SEQ ID NO: 2028162 - RNA, 19 nt, Artificial Sequence
  Description of Artificial Sequence: Synthetic oligonucleotide
cguugaucaaccuggagca

SEQ ID NO: 2028163 - RNA, 19 nt, Artificial Sequence
  Description of Artificial Sequence: Synthetic oligonucleotide
cauuuugggguuuguugaa

SEQ ID NO: 2028164 - RNA, 19 nt, Artificial Sequence
  Description of Artificial Sequence: Synthetic oligonucleotide
ccuaaggcgaugaucuguc

SEQ ID NO: 2028165 - RNA, 19 nt, Artificial Sequence
  Description of Artificial Sequence: Synthetic oligonucleotide
uuguuuccggcaguacuuc

SEQ ID NO: 2028166 - RNA, 19 nt, Artificial Sequence
  Description of Artificial Sequence: Synthetic oligonucleotide
uccuguugaucuuccugua

SEQ ID NO: 2028167 - RNA, 19 nt, Artificial Sequence
  Description of Artificial Sequence: Synthetic oligonucleotide
ugagaucgccuaaggcgau

SEQ ID NO: 2028168 - RNA, 19 nt, Artificial Sequence
  Description of Artificial Sequence: Synthetic oligonucleotide
guaucuugucauugcccga

SEQ ID NO: 2028169 - RNA, 19 nt, Artificial Sequence
  Description of Artificial Sequence: Synthetic oligonucleotide
cucacuauuccacugccau

SEQ ID NO: 2028170 - RNA, 19 nt, Artificial Sequence
  Description of Artificial Sequence: Synthetic oligonucleotide
uguuuccgugugguguagc

SEQ ID NO: 2028171 - RNA, 19 nt, Artificial Sequence
  Description of Artificial Sequence: Synthetic oligonucleotide
agaucgccuaaggcgauga

SEQ ID NO: 2028172 - RNA, 19 nt, Artificial Sequence
  Description of Artificial Sequence: Synthetic oligonucleotide
cucaggguuccauguucac

SEQ ID NO: 2028173 - RNA, 19 nt, Artificial Sequence
  Description of Artificial Sequence: Synthetic oligonucleotide
uuccacuaaauuggacuua

SEQ ID NO: 2028174 - RNA, 19 nt, Artificial Sequence
  Description of Artificial Sequence: Synthetic oligonucleotide
gagaggcaguagcagaccu

SEQ ID NO: 2028175 - RNA, 19 nt, Artificial Sequence
  Description of Artificial Sequence: Synthetic oligonucleotide
gcucugaucucguuauuga

SEQ ID NO: 2028176 - RNA, 19 nt, Artificial Sequence
  Description of Artificial Sequence: Synthetic oligonucleotide
ccugaguuccaggaagucc

SEQ ID NO: 2028177 - RNA, 19 nt, Artificial Sequence
  Description of Artificial Sequence: Synthetic oligonucleotide
guguagccuguauaaaccu

SEQ ID NO: 2028178 - RNA, 19 nt, Artificial Sequence
  Description of Artificial Sequence: Synthetic oligonucleotide
gcugagguuauuguucuuc

SEQ ID NO: 2028179 - RNA, 19 nt, Artificial Sequence
  Description of Artificial Sequence: Synthetic oligonucleotide
cauggcucugaucucguua

SEQ ID NO: 2028180 - RNA, 19 nt, Artificial Sequence
  Description of Artificial Sequence: Synthetic oligonucleotide
acggugaugaauagauuuu

SEQ ID NO: 2028181 - RNA, 19 nt, Artificial Sequence
  Description of Artificial Sequence: Synthetic oligonucleotide
guuucccuagacguuugca

SEQ ID NO: 2028182 - RNA, 19 nt, Artificial Sequence
  Description of Artificial Sequence: Synthetic oligonucleotide
ggcaguacuucaucucuuc

SEQ ID NO: 2028183 - RNA, 19 nt, Artificial Sequence
  Description of Artificial Sequence: Synthetic oligonucleotide
gagguauacggugaugaau

SEQ ID NO: 2028184 - RNA, 19 nt, Artificial Sequence
  Description of Artificial Sequence: Synthetic oligonucleotide
gcugacauuuggagcagag

SEQ ID NO: 2028185 - RNA, 19 nt, Artificial Sequence
  Description of Artificial Sequence: Synthetic oligonucleotide
caguggcaauuucccagag

SEQ ID NO: 2028186 - RNA, 19 nt, Artificial Sequence
  Description of Artificial Sequence: Synthetic oligonucleotide
uccgugugguguagccugu

SEQ ID NO: 2028187 - RNA, 19 nt, Artificial Sequence
  Description of Artificial Sequence: Synthetic oligonucleotide
ucccaggacuaggaagaug

SEQ ID NO: 2028188 - RNA, 19 nt, Artificial Sequence
  Description of Artificial Sequence: Synthetic oligonucleotide
gaucuuuccaguggcaauu

SEQ ID NO: 2028189 - RNA, 19 nt, Artificial Sequence
  Description of Artificial Sequence: Synthetic oligonucleotide
cagaucccaaauauacgua

SEQ ID NO: 2028190 - RNA, 19 nt, Artificial Sequence
  Description of Artificial Sequence: Synthetic oligonucleotide
guauaaaccuuuagcugcu

SEQ ID NO: 2028191 - RNA, 19 nt, Artificial Sequence
  Description of Artificial Sequence: Synthetic oligonucleotide
ggacuaggaagaugcguuc

SEQ ID NO: 2028192 - RNA, 19 nt, Artificial Sequence
  Description of Artificial Sequence: Synthetic oligonucleotide
uccauaccccugaguucca

SEQ ID NO: 2028193 - RNA, 19 nt, Artificial Sequence
  Description of Artificial Sequence: Synthetic oligonucleotide
gggcuucacuguuucauca

SEQ ID NO: 2028194 - RNA, 19 nt, Artificial Sequence
  Description of Artificial Sequence: Synthetic oligonucleotide
cugaggagagguauacggu

SEQ ID NO: 2028195 - RNA, 19 nt, Artificial Sequence
  Description of Artificial Sequence: Synthetic oligonucleotide
acgugguagccuccagcca

SEQ ID NO: 2028196 - RNA, 19 nt, Artificial Sequence
  Description of Artificial Sequence: Synthetic oligonucleotide
gugugguguagccuguaua

SEQ ID NO: 2028197 - RNA, 19 nt, Artificial Sequence
  Description of Artificial Sequence: Synthetic oligonucleotide
uuugugcaguugagguguu

SEQ ID NO: 2028198 - RNA, 19 nt, Artificial Sequence
  Description of Artificial Sequence: Synthetic oligonucleotide
gagaucgccuaaggcgaug

SEQ ID NO: 2028199 - RNA, 19 nt, Artificial Sequence
  Description of Artificial Sequence: Synthetic oligonucleotide
cuuuacgugguagccucca

SEQ ID NO: 2028200 - RNA, 19 nt, Artificial Sequence
  Description of Artificial Sequence: Synthetic oligonucleotide
guacucuccucuguaaagu

SEQ ID NO: 2028201 - RNA, 19 nt, Artificial Sequence
  Description of Artificial Sequence: Synthetic oligonucleotide
gacuuauugcugaacuuuu

SEQ ID NO: 2028202 - RNA, 19 nt, Artificial Sequence
  Description of Artificial Sequence: Synthetic oligonucleotide
auagcuccucccagacauc

SEQ ID NO: 2028203 - RNA, 19 nt, Artificial Sequence
  Description of Artificial Sequence: Synthetic oligonucleotide
agauauugggagagucaaa

SEQ ID NO: 2028204 - RNA, 19 nt, Artificial Sequence
  Description of Artificial Sequence: Synthetic oligonucleotide
uccuugggucuugagccuc

SEQ ID NO: 2028205 - RNA, 19 nt, Artificial Sequence
  Description of Artificial Sequence: Synthetic oligonucleotide
cuagacguuugcauuguuu

SEQ ID NO: 2028206 - RNA, 19 nt, Artificial Sequence
  Description of Artificial Sequence: Synthetic oligonucleotide
ucccucaggguuccauguu

SEQ ID NO: 2028207 - RNA, 19 nt, Artificial Sequence
  Description of Artificial Sequence: Synthetic oligonucleotide
cacuauuccacugccauuu

SEQ ID NO: 2028208 - RNA, 19 nt, Artificial Sequence
  Description of Artificial Sequence: Synthetic oligonucleotide
aaagugugcugagguuauu

SEQ ID NO: 2028209 - RNA, 19 nt, Artificial Sequence
  Description of Artificial Sequence: Synthetic oligonucleotide
cugcauccuguugaucuuc

SEQ ID NO: 2028210 - RNA, 19 nt, Artificial Sequence
  Description of Artificial Sequence: Synthetic oligonucleotide
caauagcuccucccagaca

SEQ ID NO: 2028211 - RNA, 19 nt, Artificial Sequence
  Description of Artificial Sequence: Synthetic oligonucleotide
guagccuguauaaaccuuu

SEQ ID NO: 2028212 - RNA, 19 nt, Artificial Sequence
  Description of Artificial Sequence: Synthetic oligonucleotide
gguguuuccguguggugua

SEQ ID NO: 2028213 - RNA, 19 nt, Artificial Sequence
  Description of Artificial Sequence: Synthetic oligonucleotide
cccucacuauuccacugcc

SEQ ID NO: 2028214 - RNA, 19 nt, Artificial Sequence
  Description of Artificial Sequence: Synthetic oligonucleotide
ccaauuuauccauaccccu

SEQ ID NO: 2028215 - RNA, 19 nt, Artificial Sequence
  Description of Artificial Sequence: Synthetic oligonucleotide
gugguagccuccagccacc

SEQ ID NO: 2028216 - RNA, 19 nt, Artificial Sequence
  Description of Artificial Sequence: Synthetic oligonucleotide
ggcaguagcagaccuugua

SEQ ID NO: 2028217 - RNA, 19 nt, Artificial Sequence
  Description of Artificial Sequence: Synthetic oligonucleotide
ccuuguaugcguuucccua

SEQ ID NO: 2028218 - RNA, 19 nt, Artificial Sequence
  Description of Artificial Sequence: Synthetic oligonucleotide
cauguucacaguacuccau

SEQ ID NO: 2028219 - RNA, 19 nt, Artificial Sequence
  Description of Artificial Sequence: Synthetic oligonucleotide
ggugaugaauagauuuucu

SEQ ID NO: 2028220 - RNA, 19 nt, Artificial Sequence
  Description of Artificial Sequence: Synthetic oligonucleotide
gucauugcccgaagucaca

SEQ ID NO: 2028221 - RNA, 19 nt, Artificial Sequence
  Description of Artificial Sequence: Synthetic oligonucleotide
guguuuccgugugguguag

SEQ ID NO: 2028222 - RNA, 19 nt, Artificial Sequence
  Description of Artificial Sequence: Synthetic oligonucleotide
ggaaaaguaucuugucauu

SEQ ID NO: 2028223 - RNA, 19 nt, Artificial Sequence
  Description of Artificial Sequence: Synthetic oligonucleotide
ccucuguaaagugugcuga

SEQ ID NO: 2028224 - RNA, 19 nt, Artificial Sequence
  Description of Artificial Sequence: Synthetic oligonucleotide
ggacuuauugcugaacuuu

SEQ ID NO: 2028225 - RNA, 19 nt, Artificial Sequence
  Description of Artificial Sequence: Synthetic oligonucleotide
gugugcugagguuauuguu

SEQ ID NO: 2028226 - RNA, 19 nt, Artificial Sequence
  Description of Artificial Sequence: Synthetic oligonucleotide
gcaauuucccagaguacaa

SEQ ID NO: 2028227 - RNA, 19 nt, Artificial Sequence
  Description of Artificial Sequence: Synthetic oligonucleotide
gugguguagccuguauaaa

SEQ ID NO: 2028228 - RNA, 19 nt, Artificial Sequence
  Description of Artificial Sequence: Synthetic oligonucleotide
gggaucuuuccaguggcaa

SEQ ID NO: 2028229 - RNA, 19 nt, Artificial Sequence
  Description of Artificial Sequence: Synthetic oligonucleotide
gcaguugagguguuuccgu

SEQ ID NO: 2028230 - RNA, 19 nt, Artificial Sequence
  Description of Artificial Sequence: Synthetic oligonucleotide
cauugcccgaagucacaaa

SEQ ID NO: 2028231 - RNA, 19 nt, Artificial Sequence
  Description of Artificial Sequence: Synthetic oligonucleotide
caggacuaggaagaugcgu

SEQ ID NO: 2028232 - RNA, 19 nt, Artificial Sequence
  Description of Artificial Sequence: Synthetic oligonucleotide
ggcccuuuggcugacauuu

SEQ ID NO: 2028233 - RNA, 19 nt, Artificial Sequence
  Description of Artificial Sequence: Synthetic oligonucleotide
gaggcccuuuggcugacau

SEQ ID NO: 2028234 - RNA, 19 nt, Artificial Sequence
  Description of Artificial Sequence: Synthetic oligonucleotide
gcagaguuccguugaucaa

SEQ ID NO: 2028235 - RNA, 19 nt, Artificial Sequence
  Description of Artificial Sequence: Synthetic oligonucleotide
aggcccuuuggcugacauu

SEQ ID NO: 2028236 - RNA, 19 nt, Artificial Sequence
  Description of Artificial Sequence: Synthetic oligonucleotide
ggaucuuuccaguggcaau

SEQ ID NO: 2028237 - RNA, 19 nt, Artificial Sequence
  Description of Artificial Sequence: Synthetic oligonucleotide
ccucaggguuccauguuca

SEQ ID NO: 2028238 - RNA, 19 nt, Artificial Sequence
  Description of Artificial Sequence: Synthetic oligonucleotide
cuuuucuaucugcugccuu

SEQ ID NO: 2028239 - RNA, 19 nt, Artificial Sequence
  Description of Artificial Sequence: Synthetic oligonucleotide
gaguuccguugaucaaccu

SEQ ID NO: 2028240 - RNA, 19 nt, Artificial Sequence
  Description of Artificial Sequence: Synthetic oligonucleotide
gcugcucccaggacuagga

SEQ ID NO: 2028241 - RNA, 19 nt, Artificial Sequence
  Description of Artificial Sequence: Synthetic oligonucleotide
cccagaguacaauuccaaa

SEQ ID NO: 2028242 - RNA, 19 nt, Artificial Sequence
  Description of Artificial Sequence: Synthetic oligonucleotide
ggaagcucgagcugcugau

SEQ ID NO: 2028243 - RNA, 19 nt, Artificial Sequence
  Description of Artificial Sequence: Synthetic oligonucleotide
aggcgaugaucugucccaa

SEQ ID NO: 2028244 - RNA, 19 nt, Artificial Sequence
  Description of Artificial Sequence: Synthetic oligonucleotide
guuuccggcaguacuucau

SEQ ID NO: 2028245 - RNA, 19 nt, Artificial Sequence
  Description of Artificial Sequence: Synthetic oligonucleotide
augcguuucccuagacguu

SEQ ID NO: 2028246 - RNA, 19 nt, Artificial Sequence
  Description of Artificial Sequence: Synthetic oligonucleotide
cuucaucucuucacacuuu

SEQ ID NO: 2028247 - RNA, 19 nt, Artificial Sequence
  Description of Artificial Sequence: Synthetic oligonucleotide
uguagccaggaggcccuuu

SEQ ID NO: 2028248 - RNA, 19 nt, Artificial Sequence
  Description of Artificial Sequence: Synthetic oligonucleotide
gcuuuacgugguagccucc

SEQ ID NO: 2028249 - RNA, 19 nt, Artificial Sequence
  Description of Artificial Sequence: Synthetic oligonucleotide
ccugcaagcuuuacguggu

SEQ ID NO: 2028250 - RNA, 19 nt, Artificial Sequence
  Description of Artificial Sequence: Synthetic oligonucleotide
caaccuggagcagcagcaa

SEQ ID NO: 2028251 - RNA, 19 nt, Artificial Sequence
  Description of Artificial Sequence: Synthetic oligonucleotide
aggcaguagcagaccuugu

SEQ ID NO: 2028252 - RNA, 19 nt, Artificial Sequence
  Description of Artificial Sequence: Synthetic oligonucleotide
ccucacuauuccacugcca

SEQ ID NO: 2028253 - RNA, 19 nt, Artificial Sequence
  Description of Artificial Sequence: Synthetic oligonucleotide
gcccgaagucacaaacuuc

SEQ ID NO: 2028254 - RNA, 19 nt, Artificial Sequence
  Description of Artificial Sequence: Synthetic oligonucleotide
cguuucccuagacguuugc

SEQ ID NO: 2028255 - RNA, 19 nt, Artificial Sequence
  Description of Artificial Sequence: Synthetic oligonucleotide
cuaggaagaugcguucauu

SEQ ID NO: 2028256 - RNA, 19 nt, Artificial Sequence
  Description of Artificial Sequence: Synthetic oligonucleotide
gaucgccuaaggcgaugau

SEQ ID NO: 2028257 - RNA, 19 nt, Artificial Sequence
  Description of Artificial Sequence: Synthetic oligonucleotide
cguuauugaagaugucccu

SEQ ID NO: 2028258 - RNA, 19 nt, Artificial Sequence
  Description of Artificial Sequence: Synthetic oligonucleotide
gccuaaggcgaugaucugu

SEQ ID NO: 2028259 - RNA, 19 nt, Artificial Sequence
  Description of Artificial Sequence: Synthetic oligonucleotide
cucgagcugcugauguuuu

SEQ ID NO: 2028260 - RNA, 19 nt, Artificial Sequence
  Description of Artificial Sequence: Synthetic oligonucleotide
ccagucucugaggagaggu

SEQ ID NO: 2028261 - RNA, 19 nt, Artificial Sequence
  Description of Artificial Sequence: Synthetic oligonucleotide
gcguuucccuagacguuug

SEQ ID NO: 2028262 - RNA, 19 nt, Artificial Sequence
  Description of Artificial Sequence: Synthetic oligonucleotide
ccggcaguacuucaucucu

SEQ ID NO: 2028263 - RNA, 19 nt, Artificial Sequence
  Description of Artificial Sequence: Synthetic oligonucleotide
agccuguguuuuacuuaau

SEQ ID NO: 2028264 - RNA, 19 nt, Artificial Sequence
  Description of Artificial Sequence: Synthetic oligonucleotide
ccauaccccugaguuccag

SEQ ID NO: 2028265 - RNA, 19 nt, Artificial Sequence
  Description of Artificial Sequence: Synthetic oligonucleotide
cugcaagcuuuacguggua

SEQ ID NO: 2028266 - RNA, 19 nt, Artificial Sequence
  Description of Artificial Sequence: Synthetic oligonucleotide
cagccaccaggaagcucga

SEQ ID NO: 2028267 - RNA, 19 nt, Artificial Sequence
  Description of Artificial Sequence: Synthetic oligonucleotide
ggagcagaguuccguugau

SEQ ID NO: 2028268 - RNA, 19 nt, Artificial Sequence
  Description of Artificial Sequence: Synthetic oligonucleotide
ggcugacauuuggagcaga

SEQ ID NO: 2028269 - RNA, 19 nt, Artificial Sequence
  Description of Artificial Sequence: Synthetic oligonucleotide
cccugaguuccaggaaguc

SEQ ID NO: 2028270 - RNA, 19 nt, Artificial Sequence
  Description of Artificial Sequence: Synthetic oligonucleotide
gcccuuuggcugacauuug

SEQ ID NO: 2028271 - RNA, 19 nt, Artificial Sequence
  Description of Artificial Sequence: Synthetic oligonucleotide
gcucgagcugcugauguuu

SEQ ID NO: 2028272 - RNA, 19 nt, Artificial Sequence
  Description of Artificial Sequence: Synthetic oligonucleotide
cgccuaaggcgaugaucug

SEQ ID NO: 2028273 - RNA, 19 nt, Artificial Sequence
  Description of Artificial Sequence: Synthetic oligonucleotide
gcagaccuuguaugcguuu

SEQ ID NO: 2028274 - RNA, 19 nt, Artificial Sequence
  Description of Artificial Sequence: Synthetic oligonucleotide
gggguuuguugaauacuuu

SEQ ID NO: 2028275 - RNA, 19 nt, Artificial Sequence
  Description of Artificial Sequence: Synthetic oligonucleotide
cccacugauggaagccugu

SEQ ID NO: 2028276 - RNA, 19 nt, Artificial Sequence
  Description of Artificial Sequence: Synthetic oligonucleotide
ggcgaugaucugucccaau

SEQ ID NO: 2028277 - RNA, 19 nt, Artificial Sequence
  Description of Artificial Sequence: Synthetic oligonucleotide
ggcccagggcagcaauuau

SEQ ID NO: 2028278 - RNA, 19 nt, Artificial Sequence
  Description of Artificial Sequence: Synthetic oligonucleotide
cguaagauauugggagagu

SEQ ID NO: 2028279 - RNA, 19 nt, Artificial Sequence
  Description of Artificial Sequence: Synthetic oligonucleotide
cucccaggacuaggaagau

SEQ ID NO: 2028280 - RNA, 19 nt, Artificial Sequence
  Description of Artificial Sequence: Synthetic oligonucleotide
cugccauuuugggguuugu

SEQ ID NO: 2028281 - RNA, 19 nt, Artificial Sequence
  Description of Artificial Sequence: Synthetic oligonucleotide
cccuagacguuugcauugu

SEQ ID NO: 2028282 - RNA, 19 nt, Artificial Sequence
  Description of Artificial Sequence: Synthetic oligonucleotide
ccacuaaauuggacuuauu

SEQ ID NO: 2028283 - RNA, 19 nt, Artificial Sequence
  Description of Artificial Sequence: Synthetic oligonucleotide
caguucccucaggguucca

SEQ ID NO: 2028284 - RNA, 19 nt, Artificial Sequence
  Description of Artificial Sequence: Synthetic oligonucleotide
ccuagacguuugcauuguu

SEQ ID NO: 2028285 - RNA, 19 nt, Artificial Sequence
  Description of Artificial Sequence: Synthetic oligonucleotide
cgugugguguagccuguau

SEQ ID NO: 2028286 - RNA, 19 nt, Artificial Sequence
  Description of Artificial Sequence: Synthetic oligonucleotide
cuguagccaggaggcccuu

SEQ ID NO: 2028287 - RNA, 19 nt, Artificial Sequence
  Description of Artificial Sequence: Synthetic oligonucleotide
aagagaaucaaacuacagc

SEQ ID NO: 2028288 - RNA, 19 nt, Artificial Sequence
  Description of Artificial Sequence: Synthetic oligonucleotide
aauccugucugcuuuacgc

SEQ ID NO: 2028289 - RNA, 19 nt, Artificial Sequence
  Description of Artificial Sequence: Synthetic oligonucleotide
uuugucacagacuagcugg

SEQ ID NO: 2028290 - RNA, 19 nt, Artificial Sequence
  Description of Artificial Sequence: Synthetic oligonucleotide
uacuaaaccauuaaguccc

SEQ ID NO: 2028291 - RNA, 19 nt, Artificial Sequence
  Description of Artificial Sequence: Synthetic oligonucleotide
agauucagauuguagaacc

SEQ ID NO: 2028292 - RNA, 19 nt, Artificial Sequence
  Description of Artificial Sequence: Synthetic oligonucleotide
agaaucaaacuacagcagc

SEQ ID NO: 2028293 - RNA, 19 nt, Artificial Sequence
  Description of Artificial Sequence: Synthetic oligonucleotide
aaaccauuaagucccaaag

SEQ ID NO: 2028294 - RNA, 19 nt, Artificial Sequence
  Description of Artificial Sequence: Synthetic oligonucleotide
uugcacaucauucagauuc

SEQ ID NO: 2028295 - RNA, 19 nt, Artificial Sequence
  Description of Artificial Sequence: Synthetic oligonucleotide
aaccauuaagucccaaagc

SEQ ID NO: 2028296 - RNA, 19 nt, Artificial Sequence
  Description of Artificial Sequence: Synthetic oligonucleotide
ugugcaaagagaaucaaac

SEQ ID NO: 2028297 - RNA, 19 nt, Artificial Sequence
  Description of Artificial Sequence: Synthetic oligonucleotide
aaguguguuacaucggaac

SEQ ID NO: 2028298 - RNA, 19 nt, Artificial Sequence
  Description of Artificial Sequence: Synthetic oligonucleotide
uuacuaaaccauuaagucc

SEQ ID NO: 2028299 - RNA, 19 nt, Artificial Sequence
  Description of Artificial Sequence: Synthetic oligonucleotide
uuucaagagccuuugagcc

SEQ ID NO: 2028300 - RNA, 19 nt, Artificial Sequence
  Description of Artificial Sequence: Synthetic oligonucleotide
cuguaaguguguuacaucg

SEQ ID NO: 2028301 - RNA, 19 nt, Artificial Sequence
  Description of Artificial Sequence: Synthetic oligonucleotide
gauuguagaaccucacagg

SEQ ID NO: 2028302 - RNA, 19 nt, Artificial Sequence
  Description of Artificial Sequence: Synthetic oligonucleotide
uuuucaagagccuuugagc

SEQ ID NO: 2028303 - RNA, 19 nt, Artificial Sequence
  Description of Artificial Sequence: Synthetic oligonucleotide
aguguguuacaucggaacc

SEQ ID NO: 2028304 - RNA, 19 nt, Artificial Sequence
  Description of Artificial Sequence: Synthetic oligonucleotide
agauuguagaaccucacag

SEQ ID NO: 2028305 - RNA, 19 nt, Artificial Sequence
  Description of Artificial Sequence: Synthetic oligonucleotide
uucauuauggguaguaacu

SEQ ID NO: 2028306 - RNA, 19 nt, Artificial Sequence
  Description of Artificial Sequence: Synthetic oligonucleotide
guuacuaaaccauuaaguc

SEQ ID NO: 2028307 - RNA, 19 nt, Artificial Sequence
  Description of Artificial Sequence: Synthetic oligonucleotide
ugcaaagagaaucaaacua

SEQ ID NO: 2028308 - RNA, 19 nt, Artificial Sequence
  Description of Artificial Sequence: Synthetic oligonucleotide
acaucauucagauucagau

SEQ ID NO: 2028309 - RNA, 19 nt, Artificial Sequence
  Description of Artificial Sequence: Synthetic oligonucleotide
aggacuaaguccugggacc

SEQ ID NO: 2028310 - RNA, 19 nt, Artificial Sequence
  Description of Artificial Sequence: Synthetic oligonucleotide
uugcagacauuucuggugg

SEQ ID NO: 2028311 - RNA, 19 nt, Artificial Sequence
  Description of Artificial Sequence: Synthetic oligonucleotide
ugcuuuacgcuucucaccc

SEQ ID NO: 2028312 - RNA, 19 nt, Artificial Sequence
  Description of Artificial Sequence: Synthetic oligonucleotide
caugaggucgaccaggucc

SEQ ID NO: 2028313 - RNA, 19 nt, Artificial Sequence
  Description of Artificial Sequence: Synthetic oligonucleotide
ucucaaugugcaaagagaa

SEQ ID NO: 2028314 - RNA, 19 nt, Artificial Sequence
  Description of Artificial Sequence: Synthetic oligonucleotide
aaccucacagguaugacgg

SEQ ID NO: 2028315 - RNA, 19 nt, Artificial Sequence
  Description of Artificial Sequence: Synthetic oligonucleotide
cagauguucaccauguuug

SEQ ID NO: 2028316 - RNA, 19 nt, Artificial Sequence
  Description of Artificial Sequence: Synthetic oligonucleotide
auguucaccauguuugcac

SEQ ID NO: 2028317 - RNA, 19 nt, Artificial Sequence
  Description of Artificial Sequence: Synthetic oligonucleotide
agaguuuggacauugcaca

SEQ ID NO: 2028318 - RNA, 19 nt, Artificial Sequence
  Description of Artificial Sequence: Synthetic oligonucleotide
uucucaaugugcaaagaga

SEQ ID NO: 2028319 - RNA, 19 nt, Artificial Sequence
  Description of Artificial Sequence: Synthetic oligonucleotide
auuguagaaccucacaggu

SEQ ID NO: 2028320 - RNA, 19 nt, Artificial Sequence
  Description of Artificial Sequence: Synthetic oligonucleotide
aguaaacugggguuuccgc

SEQ ID NO: 2028321 - RNA, 19 nt, Artificial Sequence
  Description of Artificial Sequence: Synthetic oligonucleotide
ucaaugugcaaagagaauc

SEQ ID NO: 2028322 - RNA, 19 nt, Artificial Sequence
  Description of Artificial Sequence: Synthetic oligonucleotide
ucaaacuacagcagccucc

SEQ ID NO: 2028323 - RNA, 19 nt, Artificial Sequence
  Description of Artificial Sequence: Synthetic oligonucleotide
guuugcacgacuuugucac

SEQ ID NO: 2028324 - RNA, 19 nt, Artificial Sequence
  Description of Artificial Sequence: Synthetic oligonucleotide
uccaacaguuacuaaacca

SEQ ID NO: 2028325 - RNA, 19 nt, Artificial Sequence
  Description of Artificial Sequence: Synthetic oligonucleotide
uggacauugcacaucauuc

SEQ ID NO: 2028326 - RNA, 19 nt, Artificial Sequence
  Description of Artificial Sequence: Synthetic oligonucleotide
gaaccucacagguaugacg

SEQ ID NO: 2028327 - RNA, 19 nt, Artificial Sequence
  Description of Artificial Sequence: Synthetic oligonucleotide
uguaaguguguuacaucgg

SEQ ID NO: 2028328 - RNA, 19 nt, Artificial Sequence
  Description of Artificial Sequence: Synthetic oligonucleotide
ucggucuucacccacccag

SEQ ID NO: 2028329 - RNA, 19 nt, Artificial Sequence
  Description of Artificial Sequence: Synthetic oligonucleotide
cauuauggguaguaacucg

SEQ ID NO: 2028330 - RNA, 19 nt, Artificial Sequence
  Description of Artificial Sequence: Synthetic oligonucleotide
aguuacuaaaccauuaagu

SEQ ID NO: 2028331 - RNA, 19 nt, Artificial Sequence
  Description of Artificial Sequence: Synthetic oligonucleotide
agauguucaccauguuugc

SEQ ID NO: 2028332 - RNA, 19 nt, Artificial Sequence
  Description of Artificial Sequence: Synthetic oligonucleotide
uguucaccauguuugcacg

SEQ ID NO: 2028333 - RNA, 19 nt, Artificial Sequence
  Description of Artificial Sequence: Synthetic oligonucleotide
acagguaugacggaccuuc

SEQ ID NO: 2028334 - RNA, 19 nt, Artificial Sequence
  Description of Artificial Sequence: Synthetic oligonucleotide
ucagauucagauuguagaa

SEQ ID NO: 2028335 - RNA, 19 nt, Artificial Sequence
  Description of Artificial Sequence: Synthetic oligonucleotide
accaccggcuugcagagcc

SEQ ID NO: 2028336 - RNA, 19 nt, Artificial Sequence
  Description of Artificial Sequence: Synthetic oligonucleotide
aaguccugggacccggcgc

SEQ ID NO: 2028337 - RNA, 19 nt, Artificial Sequence
  Description of Artificial Sequence: Synthetic oligonucleotide
aaagagaaucaaacuacag

SEQ ID NO: 2028338 - RNA, 19 nt, Artificial Sequence
  Description of Artificial Sequence: Synthetic oligonucleotide
uuucaugaggucgaccagg

SEQ ID NO: 2028339 - RNA, 19 nt, Artificial Sequence
  Description of Artificial Sequence: Synthetic oligonucleotide
ucaccacucucccaugugg

SEQ ID NO: 2028340 - RNA, 19 nt, Artificial Sequence
  Description of Artificial Sequence: Synthetic oligonucleotide
gaaucaaacuacagcagcc

SEQ ID NO: 2028341 - RNA, 19 nt, Artificial Sequence
  Description of Artificial Sequence: Synthetic oligonucleotide
aguaacucguugcagacau

SEQ ID NO: 2028342 - RNA, 19 nt, Artificial Sequence
  Description of Artificial Sequence: Synthetic oligonucleotide
uaaacugggguuuccgccc

SEQ ID NO: 2028343 - RNA, 19 nt, Artificial Sequence
  Description of Artificial Sequence: Synthetic oligonucleotide
uauggguaguaacucguug

SEQ ID NO: 2028344 - RNA, 19 nt, Artificial Sequence
  Description of Artificial Sequence: Synthetic oligonucleotide
auuugucucccucuccaac

SEQ ID NO: 2028345 - RNA, 19 nt, Artificial Sequence
  Description of Artificial Sequence: Synthetic oligonucleotide
uccuccacaguccuggagc

SEQ ID NO: 2028346 - RNA, 19 nt, Artificial Sequence
  Description of Artificial Sequence: Synthetic oligonucleotide
acgacuuugucacagacua

SEQ ID NO: 2028347 - RNA, 19 nt, Artificial Sequence
  Description of Artificial Sequence: Synthetic oligonucleotide
aaacugggguuuccgcccc

SEQ ID NO: 2028348 - RNA, 19 nt, Artificial Sequence
  Description of Artificial Sequence: Synthetic oligonucleotide
ugaagaucuucacugcagu

SEQ ID NO: 2028349 - RNA, 19 nt, Artificial Sequence
  Description of Artificial Sequence: Synthetic oligonucleotide
uacaucggaaccuuuccug

SEQ ID NO: 2028350 - RNA, 19 nt, Artificial Sequence
  Description of Artificial Sequence: Synthetic oligonucleotide
gacuagcuggcccugaggc

SEQ ID NO: 2028351 - RNA, 19 nt, Artificial Sequence
  Description of Artificial Sequence: Synthetic oligonucleotide
ucugcuuuacgcuucucac

SEQ ID NO: 2028352 - RNA, 19 nt, Artificial Sequence
  Description of Artificial Sequence: Synthetic oligonucleotide
aggacgacaugucggaggg

SEQ ID NO: 2028353 - RNA, 19 nt, Artificial Sequence
  Description of Artificial Sequence: Synthetic oligonucleotide
guaaacugggguuuccgcc

SEQ ID NO: 2028354 - RNA, 19 nt, Artificial Sequence
  Description of Artificial Sequence: Synthetic oligonucleotide
uguuacaucggaaccuuuc

SEQ ID NO: 2028355 - RNA, 19 nt, Artificial Sequence
  Description of Artificial Sequence: Synthetic oligonucleotide
ugacauucaccacucuccc

SEQ ID NO: 2028356 - RNA, 19 nt, Artificial Sequence
  Description of Artificial Sequence: Synthetic oligonucleotide
agaaccguggcgcaggacu

SEQ ID NO: 2028357 - RNA, 19 nt, Artificial Sequence
  Description of Artificial Sequence: Synthetic oligonucleotide
uuugucucccucuccaaca

SEQ ID NO: 2028358 - RNA, 19 nt, Artificial Sequence
  Description of Artificial Sequence: Synthetic oligonucleotide
guuacaucggaaccuuucc

SEQ ID NO: 2028359 - RNA, 19 nt, Artificial Sequence
  Description of Artificial Sequence: Synthetic oligonucleotide
aucaaacuacagcagccuc

SEQ ID NO: 2028360 - RNA, 19 nt, Artificial Sequence
  Description of Artificial Sequence: Synthetic oligonucleotide
aaucaaacuacagcagccu

SEQ ID NO: 2028361 - RNA, 19 nt, Artificial Sequence
  Description of Artificial Sequence: Synthetic oligonucleotide
uuuucaugaggucgaccag

SEQ ID NO: 2028362 - RNA, 19 nt, Artificial Sequence
  Description of Artificial Sequence: Synthetic oligonucleotide
cauuaagucccaaagcaga

SEQ ID NO: 2028363 - RNA, 19 nt, Artificial Sequence
  Description of Artificial Sequence: Synthetic oligonucleotide
auucagauuguagaaccuc

SEQ ID NO: 2028364 - RNA, 19 nt, Artificial Sequence
  Description of Artificial Sequence: Synthetic oligonucleotide
uguuugcacgacuuuguca

SEQ ID NO: 2028365 - RNA, 19 nt, Artificial Sequence
  Description of Artificial Sequence: Synthetic oligonucleotide
agucccaaagcagauguuc

SEQ ID NO: 2028366 - RNA, 19 nt, Artificial Sequence
  Description of Artificial Sequence: Synthetic oligonucleotide
agacugcugacauucacca

SEQ ID NO: 2028367 - RNA, 19 nt, Artificial Sequence
  Description of Artificial Sequence: Synthetic oligonucleotide
gagaguuuggacauugcac

SEQ ID NO: 2028368 - RNA, 19 nt, Artificial Sequence
  Description of Artificial Sequence: Synthetic oligonucleotide
cugaagaucuucacugcag

SEQ ID NO: 2028369 - RNA, 19 nt, Artificial Sequence
  Description of Artificial Sequence: Synthetic oligonucleotide
caguuacuaaaccauuaag

SEQ ID NO: 2028370 - RNA, 19 nt, Artificial Sequence
  Description of Artificial Sequence: Synthetic oligonucleotide
gagaaucaaacuacagcag

SEQ ID NO: 2028371 - RNA, 19 nt, Artificial Sequence
  Description of Artificial Sequence: Synthetic oligonucleotide
guuuggacauugcacauca

SEQ ID NO: 2028372 - RNA, 19 nt, Artificial Sequence
  Description of Artificial Sequence: Synthetic oligonucleotide
ucagauuguagaaccucac

SEQ ID NO: 2028373 - RNA, 19 nt, Artificial Sequence
  Description of Artificial Sequence: Synthetic oligonucleotide
aacuacagcagccuccauu

SEQ ID NO: 2028374 - RNA, 19 nt, Artificial Sequence
  Description of Artificial Sequence: Synthetic oligonucleotide
uggcgcaggacuaaguccu

SEQ ID NO: 2028375 - RNA, 19 nt, Artificial Sequence
  Description of Artificial Sequence: Synthetic oligonucleotide
uggguaguaacucguugca

SEQ ID NO: 2028376 - RNA, 19 nt, Artificial Sequence
  Description of Artificial Sequence: Synthetic oligonucleotide
uggucccucgccaugucgg

SEQ ID NO: 2028377 - RNA, 19 nt, Artificial Sequence
  Description of Artificial Sequence: Synthetic oligonucleotide
uuacaucggaaccuuuccu

SEQ ID NO: 2028378 - RNA, 19 nt, Artificial Sequence
  Description of Artificial Sequence: Synthetic oligonucleotide
acaguuacuaaaccauuaa

SEQ ID NO: 2028379 - RNA, 19 nt, Artificial Sequence
  Description of Artificial Sequence: Synthetic oligonucleotide
uucaagagccuuugagccc

SEQ ID NO: 2028380 - RNA, 19 nt, Artificial Sequence
  Description of Artificial Sequence: Synthetic oligonucleotide
cagacugcugacauucacc

SEQ ID NO: 2028381 - RNA, 19 nt, Artificial Sequence
  Description of Artificial Sequence: Synthetic oligonucleotide
guaaguguguuacaucgga

SEQ ID NO: 2028382 - RNA, 19 nt, Artificial Sequence
  Description of Artificial Sequence: Synthetic oligonucleotide
uuggacauugcacaucauu

SEQ ID NO: 2028383 - RNA, 19 nt, Artificial Sequence
  Description of Artificial Sequence: Synthetic oligonucleotide
acaugucggagggacacgc

SEQ ID NO: 2028384 - RNA, 19 nt, Artificial Sequence
  Description of Artificial Sequence: Synthetic oligonucleotide
cuucucacccagcugcugg

SEQ ID NO: 2028385 - RNA, 19 nt, Artificial Sequence
  Description of Artificial Sequence: Synthetic oligonucleotide
uuacgcuucucacccagcu

SEQ ID NO: 2028386 - RNA, 19 nt, Artificial Sequence
  Description of Artificial Sequence: Synthetic oligonucleotide
gagccuuugagcccugcag

SEQ ID NO: 2028387 - RNA, 19 nt, Artificial Sequence
  Description of Artificial Sequence: Synthetic oligonucleotide
ucauuauggguaguaacuc

SEQ ID NO: 2028388 - RNA, 19 nt, Artificial Sequence
  Description of Artificial Sequence: Synthetic oligonucleotide
augaggucgaccagguccc

SEQ ID NO: 2028389 - RNA, 19 nt, Artificial Sequence
  Description of Artificial Sequence: Synthetic oligonucleotide
aagaucuucacugcaguuu

SEQ ID NO: 2028390 - RNA, 19 nt, Artificial Sequence
  Description of Artificial Sequence: Synthetic oligonucleotide
ucuguaaguguguuacauc

SEQ ID NO: 2028391 - RNA, 19 nt, Artificial Sequence
  Description of Artificial Sequence: Synthetic oligonucleotide
uaaguccugggacccggcg

SEQ ID NO: 2028392 - RNA, 19 nt, Artificial Sequence
  Description of Artificial Sequence: Synthetic oligonucleotide
augucggagggacacgcgg

SEQ ID NO: 2028393 - RNA, 19 nt, Artificial Sequence
  Description of Artificial Sequence: Synthetic oligonucleotide
guaguaacucguugcagac

SEQ ID NO: 2028394 - RNA, 19 nt, Artificial Sequence
  Description of Artificial Sequence: Synthetic oligonucleotide
gaaccuuuccugaagaucu

SEQ ID NO: 2028395 - RNA, 19 nt, Artificial Sequence
  Description of Artificial Sequence: Synthetic oligonucleotide
cucacagguaugacggacc

SEQ ID NO: 2028396 - RNA, 19 nt, Artificial Sequence
  Description of Artificial Sequence: Synthetic oligonucleotide
cuuuacgcuucucacccag

SEQ ID NO: 2028397 - RNA, 19 nt, Artificial Sequence
  Description of Artificial Sequence: Synthetic oligonucleotide
ugcacaucauucagauuca

SEQ ID NO: 2028398 - RNA, 19 nt, Artificial Sequence
  Description of Artificial Sequence: Synthetic oligonucleotide
agcuuggacaccccguaag

SEQ ID NO: 2028399 - RNA, 19 nt, Artificial Sequence
  Description of Artificial Sequence: Synthetic oligonucleotide
ucggaaccuuuccugaaga

SEQ ID NO: 2028400 - RNA, 19 nt, Artificial Sequence
  Description of Artificial Sequence: Synthetic oligonucleotide
cugcaggacgacaugucgg

SEQ ID NO: 2028401 - RNA, 19 nt, Artificial Sequence
  Description of Artificial Sequence: Synthetic oligonucleotide
uggacaccccguaagcuga

SEQ ID NO: 2028402 - RNA, 19 nt, Artificial Sequence
  Description of Artificial Sequence: Synthetic oligonucleotide
ugacggaccuuccuucuca

SEQ ID NO: 2028403 - RNA, 19 nt, Artificial Sequence
  Description of Artificial Sequence: Synthetic oligonucleotide
caaugugcaaagagaauca

SEQ ID NO: 2028404 - RNA, 19 nt, Artificial Sequence
  Description of Artificial Sequence: Synthetic oligonucleotide
uaaguguguuacaucggaa

SEQ ID NO: 2028405 - RNA, 19 nt, Artificial Sequence
  Description of Artificial Sequence: Synthetic oligonucleotide
cucguugcagacauuucug

SEQ ID NO: 2028406 - RNA, 19 nt, Artificial Sequence
  Description of Artificial Sequence: Synthetic oligonucleotide
aucggaaccuuuccugaag

SEQ ID NO: 2028407 - RNA, 19 nt, Artificial Sequence
  Description of Artificial Sequence: Synthetic oligonucleotide
ucacagguaugacggaccu

SEQ ID NO: 2028408 - RNA, 19 nt, Artificial Sequence
  Description of Artificial Sequence: Synthetic oligonucleotide
aagcagauguucaccaugu

SEQ ID NO: 2028409 - RNA, 19 nt, Artificial Sequence
  Description of Artificial Sequence: Synthetic oligonucleotide
aacaguuacuaaaccauua

SEQ ID NO: 2028410 - RNA, 19 nt, Artificial Sequence
  Description of Artificial Sequence: Synthetic oligonucleotide
ggcaucuggaggcaggagg

SEQ ID NO: 2028411 - RNA, 19 nt, Artificial Sequence
  Description of Artificial Sequence: Synthetic oligonucleotide
caggacuaaguccugggac

SEQ ID NO: 2028412 - RNA, 19 nt, Artificial Sequence
  Description of Artificial Sequence: Synthetic oligonucleotide
gcaaagagaaucaaacuac

SEQ ID NO: 2028413 - RNA, 19 nt, Artificial Sequence
  Description of Artificial Sequence: Synthetic oligonucleotide
auuauggguaguaacucgu

SEQ ID NO: 2028414 - RNA, 19 nt, Artificial Sequence
  Description of Artificial Sequence: Synthetic oligonucleotide
uuaagucccaaagcagaug

SEQ ID NO: 2028415 - RNA, 19 nt, Artificial Sequence
  Description of Artificial Sequence: Synthetic oligonucleotide
gucacagacuagcuggccc

SEQ ID NO: 2028416 - RNA, 19 nt, Artificial Sequence
  Description of Artificial Sequence: Synthetic oligonucleotide
ugcaggacgacaugucgga

SEQ ID NO: 2028417 - RNA, 19 nt, Artificial Sequence
  Description of Artificial Sequence: Synthetic oligonucleotide
ucauucagauucagauugu

SEQ ID NO: 2028418 - RNA, 19 nt, Artificial Sequence
  Description of Artificial Sequence: Synthetic oligonucleotide
ucacagacuagcuggcccu

SEQ ID NO: 2028419 - RNA, 19 nt, Artificial Sequence
  Description of Artificial Sequence: Synthetic oligonucleotide
cugcuuuacgcuucucacc

SEQ ID NO: 2028420 - RNA, 19 nt, Artificial Sequence
  Description of Artificial Sequence: Synthetic oligonucleotide
gguaguaacucguugcaga

SEQ ID NO: 2028421 - RNA, 19 nt, Artificial Sequence
  Description of Artificial Sequence: Synthetic oligonucleotide
uugucacagacuagcuggc

SEQ ID NO: 2028422 - RNA, 19 nt, Artificial Sequence
  Description of Artificial Sequence: Synthetic oligonucleotide
acaucggaaccuuuccuga

SEQ ID NO: 2028423 - RNA, 19 nt, Artificial Sequence
  Description of Artificial Sequence: Synthetic oligonucleotide
cugagucuggccaaccuuc

SEQ ID NO: 2028424 - RNA, 19 nt, Artificial Sequence
  Description of Artificial Sequence: Synthetic oligonucleotide
gacgacaugucggagggac

SEQ ID NO: 2028425 - RNA, 19 nt, Artificial Sequence
  Description of Artificial Sequence: Synthetic oligonucleotide
ugcagagccggcugggcag

SEQ ID NO: 2028426 - RNA, 19 nt, Artificial Sequence
  Description of Artificial Sequence: Synthetic oligonucleotide
acaccccguaagcugaguc

SEQ ID NO: 2028427 - RNA, 19 nt, Artificial Sequence
  Description of Artificial Sequence: Synthetic oligonucleotide
aguuuggacauugcacauc

SEQ ID NO: 2028428 - RNA, 19 nt, Artificial Sequence
  Description of Artificial Sequence: Synthetic oligonucleotide
ugagucuggccaaccuucc

SEQ ID NO: 2028429 - RNA, 19 nt, Artificial Sequence
  Description of Artificial Sequence: Synthetic oligonucleotide
uaugacggaccuuccuucu

SEQ ID NO: 2028430 - RNA, 19 nt, Artificial Sequence
  Description of Artificial Sequence: Synthetic oligonucleotide
agucuggccaaccuucccu

SEQ ID NO: 2028431 - RNA, 19 nt, Artificial Sequence
  Description of Artificial Sequence: Synthetic oligonucleotide
guggucagaaccguggcgc

SEQ ID NO: 2028432 - RNA, 19 nt, Artificial Sequence
  Description of Artificial Sequence: Synthetic oligonucleotide
uaacucguugcagacauuu

SEQ ID NO: 2028433 - RNA, 19 nt, Artificial Sequence
  Description of Artificial Sequence: Synthetic oligonucleotide
uuuacgcuucucacccagc

SEQ ID NO: 2028434 - RNA, 19 nt, Artificial Sequence
  Description of Artificial Sequence: Synthetic oligonucleotide
uugcacgacuuugucacag

SEQ ID NO: 2028435 - RNA, 19 nt, Artificial Sequence
  Description of Artificial Sequence: Synthetic oligonucleotide
acuaaguccugggacccgg

SEQ ID NO: 2028436 - RNA, 19 nt, Artificial Sequence
  Description of Artificial Sequence: Synthetic oligonucleotide
gccaugucggucuucaccc

SEQ ID NO: 2028437 - RNA, 19 nt, Artificial Sequence
  Description of Artificial Sequence: Synthetic oligonucleotide
ugucggucuucacccaccc

SEQ ID NO: 2028438 - RNA, 19 nt, Artificial Sequence
  Description of Artificial Sequence: Synthetic oligonucleotide
ccaaccuucccucucgugg

SEQ ID NO: 2028439 - RNA, 19 nt, Artificial Sequence
  Description of Artificial Sequence: Synthetic oligonucleotide
ugggguuuccgccccuucc

SEQ ID NO: 2028440 - RNA, 19 nt, Artificial Sequence
  Description of Artificial Sequence: Synthetic oligonucleotide
agacuagcuggcccugagg

SEQ ID NO: 2028441 - RNA, 19 nt, Artificial Sequence
  Description of Artificial Sequence: Synthetic oligonucleotide
gaggcucaguggcaucugg

SEQ ID NO: 2028442 - RNA, 19 nt, Artificial Sequence
  Description of Artificial Sequence: Synthetic oligonucleotide
agccuuugagcccugcaga

SEQ ID NO: 2028443 - RNA, 19 nt, Artificial Sequence
  Description of Artificial Sequence: Synthetic oligonucleotide
aagcugagucuggccaacc

SEQ ID NO: 2028444 - RNA, 19 nt, Artificial Sequence
  Description of Artificial Sequence: Synthetic oligonucleotide
guaugacggaccuuccuuc

SEQ ID NO: 2028445 - RNA, 19 nt, Artificial Sequence
  Description of Artificial Sequence: Synthetic oligonucleotide
aacucguugcagacauuuc

SEQ ID NO: 2028446 - RNA, 19 nt, Artificial Sequence
  Description of Artificial Sequence: Synthetic oligonucleotide
ucccaaagcagauguucac

SEQ ID NO: 2028447 - RNA, 19 nt, Artificial Sequence
  Description of Artificial Sequence: Synthetic oligonucleotide
ugucggagggacacgcgga

SEQ ID NO: 2028448 - RNA, 19 nt, Artificial Sequence
  Description of Artificial Sequence: Synthetic oligonucleotide
uuguagaaccucacaggua

SEQ ID NO: 2028449 - RNA, 19 nt, Artificial Sequence
  Description of Artificial Sequence: Synthetic oligonucleotide
guggcgcaggacuaagucc

SEQ ID NO: 2028450 - RNA, 19 nt, Artificial Sequence
  Description of Artificial Sequence: Synthetic oligonucleotide
uuauggguaguaacucguu

SEQ ID NO: 2028451 - RNA, 19 nt, Artificial Sequence
  Description of Artificial Sequence: Synthetic oligonucleotide
ccauuaagucccaaagcag

SEQ ID NO: 2028452 - RNA, 19 nt, Artificial Sequence
  Description of Artificial Sequence: Synthetic oligonucleotide
augacggaccuuccuucuc

SEQ ID NO: 2028453 - RNA, 19 nt, Artificial Sequence
  Description of Artificial Sequence: Synthetic oligonucleotide
uugcagagccggcugggca

SEQ ID NO: 2028454 - RNA, 19 nt, Artificial Sequence
  Description of Artificial Sequence: Synthetic oligonucleotide
agcccugcagacugcugac

SEQ ID NO: 2028455 - RNA, 19 nt, Artificial Sequence
  Description of Artificial Sequence: Synthetic oligonucleotide
uguguuacaucggaaccuu

SEQ ID NO: 2028456 - RNA, 19 nt, Artificial Sequence
  Description of Artificial Sequence: Synthetic oligonucleotide
uuugagcccugcagacugc

SEQ ID NO: 2028457 - RNA, 19 nt, Artificial Sequence
  Description of Artificial Sequence: Synthetic oligonucleotide
auuaagucccaaagcagau

SEQ ID NO: 2028458 - RNA, 19 nt, Artificial Sequence
  Description of Artificial Sequence: Synthetic oligonucleotide
aguccugggacccggcgcu

SEQ ID NO: 2028459 - RNA, 19 nt, Artificial Sequence
  Description of Artificial Sequence: Synthetic oligonucleotide
cucccucuccaacaguuac

SEQ ID NO: 2028460 - RNA, 19 nt, Artificial Sequence
  Description of Artificial Sequence: Synthetic oligonucleotide
gucagaaccguggcgcagg

SEQ ID NO: 2028461 - RNA, 19 nt, Artificial Sequence
  Description of Artificial Sequence: Synthetic oligonucleotide
ugcaguuuucaagagccuu

SEQ ID NO: 2028462 - RNA, 19 nt, Artificial Sequence
  Description of Artificial Sequence: Synthetic oligonucleotide
ggacauugcacaucauuca

SEQ ID NO: 2028463 - RNA, 19 nt, Artificial Sequence
  Description of Artificial Sequence: Synthetic oligonucleotide
ucccucuccaacaguuacu

SEQ ID NO: 2028464 - RNA, 19 nt, Artificial Sequence
  Description of Artificial Sequence: Synthetic oligonucleotide
gaccuuccuucucaaugug

SEQ ID NO: 2028465 - RNA, 19 nt, Artificial Sequence
  Description of Artificial Sequence: Synthetic oligonucleotide
augucggucuucacccacc

SEQ ID NO: 2028466 - RNA, 19 nt, Artificial Sequence
  Description of Artificial Sequence: Synthetic oligonucleotide
uuugcacgacuuugucaca

SEQ ID NO: 2028467 - RNA, 19 nt, Artificial Sequence
  Description of Artificial Sequence: Synthetic oligonucleotide
caugucggagggacacgcg

SEQ ID NO: 2028468 - RNA, 19 nt, Artificial Sequence
  Description of Artificial Sequence: Synthetic oligonucleotide
agguaugacggaccuuccu

SEQ ID NO: 2028469 - RNA, 19 nt, Artificial Sequence
  Description of Artificial Sequence: Synthetic oligonucleotide
caggauucuggaaaggacu

SEQ ID NO: 2028470 - RNA, 19 nt, Artificial Sequence
  Description of Artificial Sequence: Synthetic oligonucleotide
gcagccuccauuugucucc

SEQ ID NO: 2028471 - RNA, 19 nt, Artificial Sequence
  Description of Artificial Sequence: Synthetic oligonucleotide
accuuuccugaagaucuuc

SEQ ID NO: 2028472 - RNA, 19 nt, Artificial Sequence
  Description of Artificial Sequence: Synthetic oligonucleotide
gauguucaccauguuugca

SEQ ID NO: 2028473 - RNA, 19 nt, Artificial Sequence
  Description of Artificial Sequence: Synthetic oligonucleotide
caaguaaacugggguuucc

SEQ ID NO: 2028474 - RNA, 19 nt, Artificial Sequence
  Description of Artificial Sequence: Synthetic oligonucleotide
acuagcuggcccugaggcu

SEQ ID NO: 2028475 - RNA, 19 nt, Artificial Sequence
  Description of Artificial Sequence: Synthetic oligonucleotide
uaguaacucguugcagaca

SEQ ID NO: 2028476 - RNA, 19 nt, Artificial Sequence
  Description of Artificial Sequence: Synthetic oligonucleotide
cagauuguagaaccucaca

SEQ ID NO: 2028477 - RNA, 19 nt, Artificial Sequence
  Description of Artificial Sequence: Synthetic oligonucleotide
gcaucuggaggcaggaggg

SEQ ID NO: 2028478 - RNA, 19 nt, Artificial Sequence
  Description of Artificial Sequence: Synthetic oligonucleotide
gucuucacccacccagggc

SEQ ID NO: 2028479 - RNA, 19 nt, Artificial Sequence
  Description of Artificial Sequence: Synthetic oligonucleotide
ucucccaugugguuucauu

SEQ ID NO: 2028480 - RNA, 19 nt, Artificial Sequence
  Description of Artificial Sequence: Synthetic oligonucleotide
gagccggcugggcagcggg

SEQ ID NO: 2028481 - RNA, 19 nt, Artificial Sequence
  Description of Artificial Sequence: Synthetic oligonucleotide
cuggcccugaggcucagug

SEQ ID NO: 2028482 - RNA, 19 nt, Artificial Sequence
  Description of Artificial Sequence: Synthetic oligonucleotide
ugcacgacuuugucacaga

SEQ ID NO: 2028483 - RNA, 19 nt, Artificial Sequence
  Description of Artificial Sequence: Synthetic oligonucleotide
gacaugucggagggacacg

SEQ ID NO: 2028484 - RNA, 19 nt, Artificial Sequence
  Description of Artificial Sequence: Synthetic oligonucleotide
gagucuggccaaccuuccc

SEQ ID NO: 2028485 - RNA, 19 nt, Artificial Sequence
  Description of Artificial Sequence: Synthetic oligonucleotide
guuucauuauggguaguaa

SEQ ID NO: 2028486 - RNA, 19 nt, Artificial Sequence
  Description of Artificial Sequence: Synthetic oligonucleotide
agcagaauccugucugcuu

SEQ ID NO: 2028487 - RNA, 19 nt, Artificial Sequence
  Description of Artificial Sequence: Synthetic oligonucleotide
ucagaaccguggcgcagga

SEQ ID NO: 2028488 - RNA, 19 nt, Artificial Sequence
  Description of Artificial Sequence: Synthetic oligonucleotide
agcugagucuggccaaccu

SEQ ID NO: 2028489 - RNA, 19 nt, Artificial Sequence
  Description of Artificial Sequence: Synthetic oligonucleotide
gacuaaguccugggacccg

SEQ ID NO: 2028490 - RNA, 19 nt, Artificial Sequence
  Description of Artificial Sequence: Synthetic oligonucleotide
accccguaagcugagucug

SEQ ID NO: 2028491 - RNA, 19 nt, Artificial Sequence
  Description of Artificial Sequence: Synthetic oligonucleotide
aggcauugagcagaauccu

SEQ ID NO: 2028492 - RNA, 19 nt, Artificial Sequence
  Description of Artificial Sequence: Synthetic oligonucleotide
uaagcugagucuggccaac

SEQ ID NO: 2028493 - RNA, 19 nt, Artificial Sequence
  Description of Artificial Sequence: Synthetic oligonucleotide
uggucagaaccguggcgca

SEQ ID NO: 2028494 - RNA, 19 nt, Artificial Sequence
  Description of Artificial Sequence: Synthetic oligonucleotide
cuggucccucgccaugucg

SEQ ID NO: 2028495 - RNA, 19 nt, Artificial Sequence
  Description of Artificial Sequence: Synthetic oligonucleotide
guaagcugagucuggccaa

SEQ ID NO: 2028496 - RNA, 19 nt, Artificial Sequence
  Description of Artificial Sequence: Synthetic oligonucleotide
acgcggaccaccggcuugc

SEQ ID NO: 2028497 - RNA, 19 nt, Artificial Sequence
  Description of Artificial Sequence: Synthetic oligonucleotide
uucccucucguggacuuca

SEQ ID NO: 2028498 - RNA, 19 nt, Artificial Sequence
  Description of Artificial Sequence: Synthetic oligonucleotide
cuaaguccugggacccggc

SEQ ID NO: 2028499 - RNA, 19 nt, Artificial Sequence
  Description of Artificial Sequence: Synthetic oligonucleotide
cauguuugcacgacuuugu

SEQ ID NO: 2028500 - RNA, 19 nt, Artificial Sequence
  Description of Artificial Sequence: Synthetic oligonucleotide
caaccuucccucucgugga

SEQ ID NO: 2028501 - RNA, 19 nt, Artificial Sequence
  Description of Artificial Sequence: Synthetic oligonucleotide
gacugcugacauucaccac

SEQ ID NO: 2028502 - RNA, 19 nt, Artificial Sequence
  Description of Artificial Sequence: Synthetic oligonucleotide
cagacuagcuggcccugag

SEQ ID NO: 2028503 - RNA, 19 nt, Artificial Sequence
  Description of Artificial Sequence: Synthetic oligonucleotide
cucccaugugguuucauua

SEQ ID NO: 2028504 - RNA, 19 nt, Artificial Sequence
  Description of Artificial Sequence: Synthetic oligonucleotide
cagguaugacggaccuucc

SEQ ID NO: 2028505 - RNA, 19 nt, Artificial Sequence
  Description of Artificial Sequence: Synthetic oligonucleotide
gcuuggacaccccguaagc

SEQ ID NO: 2028506 - RNA, 19 nt, Artificial Sequence
  Description of Artificial Sequence: Synthetic oligonucleotide
ucuggccaaccuucccucu

SEQ ID NO: 2028507 - RNA, 19 nt, Artificial Sequence
  Description of Artificial Sequence: Synthetic oligonucleotide
gauucagauuguagaaccu

SEQ ID NO: 2028508 - RNA, 19 nt, Artificial Sequence
  Description of Artificial Sequence: Synthetic oligonucleotide
augugcaaagagaaucaaa

SEQ ID NO: 2028509 - RNA, 19 nt, Artificial Sequence
  Description of Artificial Sequence: Synthetic oligonucleotide
cuucacccacccagggcag

SEQ ID NO: 2028510 - RNA, 19 nt, Artificial Sequence
  Description of Artificial Sequence: Synthetic oligonucleotide
accauguuugcacgacuuu

SEQ ID NO: 2028511 - RNA, 19 nt, Artificial Sequence
  Description of Artificial Sequence: Synthetic oligonucleotide
uccgccccuuccuccacag

SEQ ID NO: 2028512 - RNA, 19 nt, Artificial Sequence
  Description of Artificial Sequence: Synthetic oligonucleotide
gucccaaagcagauguuca

SEQ ID NO: 2028513 - RNA, 19 nt, Artificial Sequence
  Description of Artificial Sequence: Synthetic oligonucleotide
cccguggucagaaccgugg

SEQ ID NO: 2028514 - RNA, 19 nt, Artificial Sequence
  Description of Artificial Sequence: Synthetic oligonucleotide
uuuggacauugcacaucau

SEQ ID NO: 2028515 - RNA, 19 nt, Artificial Sequence
  Description of Artificial Sequence: Synthetic oligonucleotide
auugcacaucauucagauu

SEQ ID NO: 2028516 - RNA, 19 nt, Artificial Sequence
  Description of Artificial Sequence: Synthetic oligonucleotide
gccacccguggucagaacc

SEQ ID NO: 2028517 - RNA, 19 nt, Artificial Sequence
  Description of Artificial Sequence: Synthetic oligonucleotide
ggacacgcggaccaccggc

SEQ ID NO: 2028518 - RNA, 19 nt, Artificial Sequence
  Description of Artificial Sequence: Synthetic oligonucleotide
guuuccgccccuuccucca

SEQ ID NO: 2028519 - RNA, 19 nt, Artificial Sequence
  Description of Artificial Sequence: Synthetic oligonucleotide
ccacccguggucagaaccg

SEQ ID NO: 2028520 - RNA, 19 nt, Artificial Sequence
  Description of Artificial Sequence: Synthetic oligonucleotide
ggaccaccggcuugcagag

SEQ ID NO: 2028521 - RNA, 19 nt, Artificial Sequence
  Description of Artificial Sequence: Synthetic oligonucleotide
gucuggccaaccuucccuc

SEQ ID NO: 2028522 - RNA, 19 nt, Artificial Sequence
  Description of Artificial Sequence: Synthetic oligonucleotide
ggacuaaguccugggaccc

SEQ ID NO: 2028523 - RNA, 19 nt, Artificial Sequence
  Description of Artificial Sequence: Synthetic oligonucleotide
ccauguuugcacgacuuug

SEQ ID NO: 2028524 - RNA, 19 nt, Artificial Sequence
  Description of Artificial Sequence: Synthetic oligonucleotide
gucggagggacacgcggac

SEQ ID NO: 2028525 - RNA, 19 nt, Artificial Sequence
  Description of Artificial Sequence: Synthetic oligonucleotide
cuugcagagccggcugggc

SEQ ID NO: 2028526 - RNA, 19 nt, Artificial Sequence
  Description of Artificial Sequence: Synthetic oligonucleotide
ggcauugagcagaauccug

SEQ ID NO: 2028527 - RNA, 19 nt, Artificial Sequence
  Description of Artificial Sequence: Synthetic oligonucleotide
aaacuacagcagccuccau

SEQ ID NO: 2028528 - RNA, 19 nt, Artificial Sequence
  Description of Artificial Sequence: Synthetic oligonucleotide
gaguuuggacauugcacau

SEQ ID NO: 2028529 - RNA, 19 nt, Artificial Sequence
  Description of Artificial Sequence: Synthetic oligonucleotide
ggcagcaggcauugagcag

SEQ ID NO: 2028530 - RNA, 19 nt, Artificial Sequence
  Description of Artificial Sequence: Synthetic oligonucleotide
guguguuacaucggaaccu

SEQ ID NO: 2028531 - RNA, 19 nt, Artificial Sequence
  Description of Artificial Sequence: Synthetic oligonucleotide
gagggacacgcggaccacc

SEQ ID NO: 2028532 - RNA, 19 nt, Artificial Sequence
  Description of Artificial Sequence: Synthetic oligonucleotide
gcacgacuuugucacagac

SEQ ID NO: 2028533 - RNA, 19 nt, Artificial Sequence
  Description of Artificial Sequence: Synthetic oligonucleotide
acuaaaccauuaaguccca

SEQ ID NO: 2028534 - RNA, 19 nt, Artificial Sequence
  Description of Artificial Sequence: Synthetic oligonucleotide
guagaaccucacagguaug

SEQ ID NO: 2028535 - RNA, 19 nt, Artificial Sequence
  Description of Artificial Sequence: Synthetic oligonucleotide
ccaacaguuacuaaaccau

SEQ ID NO: 2028536 - RNA, 19 nt, Artificial Sequence
  Description of Artificial Sequence: Synthetic oligonucleotide
ggguaguaacucguugcag

SEQ ID NO: 2028537 - RNA, 19 nt, Artificial Sequence
  Description of Artificial Sequence: Synthetic oligonucleotide
caucuggaggcaggagggc

SEQ ID NO: 2028538 - RNA, 19 nt, Artificial Sequence
  Description of Artificial Sequence: Synthetic oligonucleotide
cggaccuuccuucucaaug

SEQ ID NO: 2028539 - RNA, 19 nt, Artificial Sequence
  Description of Artificial Sequence: Synthetic oligonucleotide
accacucucccaugugguu

SEQ ID NO: 2028540 - RNA, 19 nt, Artificial Sequence
  Description of Artificial Sequence: Synthetic oligonucleotide
cuggccaaccuucccucuc

SEQ ID NO: 2028541 - RNA, 19 nt, Artificial Sequence
  Description of Artificial Sequence: Synthetic oligonucleotide
cuacagcagccuccauuug

SEQ ID NO: 2028542 - RNA, 19 nt, Artificial Sequence
  Description of Artificial Sequence: Synthetic oligonucleotide
gccuuugagcccugcagac

SEQ ID NO: 2028543 - RNA, 19 nt, Artificial Sequence
  Description of Artificial Sequence: Synthetic oligonucleotide
cguaagcugagucuggcca

SEQ ID NO: 2028544 - RNA, 19 nt, Artificial Sequence
  Description of Artificial Sequence: Synthetic oligonucleotide
gguuucauuauggguagua

SEQ ID NO: 2028545 - RNA, 19 nt, Artificial Sequence
  Description of Artificial Sequence: Synthetic oligonucleotide
uggagcccuggucccucgc

SEQ ID NO: 2028546 - RNA, 19 nt, Artificial Sequence
  Description of Artificial Sequence: Synthetic oligonucleotide
caucggaaccuuuccugaa

SEQ ID NO: 2028547 - RNA, 19 nt, Artificial Sequence
  Description of Artificial Sequence: Synthetic oligonucleotide
cauucagauucagauugua

SEQ ID NO: 2028548 - RNA, 19 nt, Artificial Sequence
  Description of Artificial Sequence: Synthetic oligonucleotide
agcagauguucaccauguu

SEQ ID NO: 2028549 - RNA, 19 nt, Artificial Sequence
  Description of Artificial Sequence: Synthetic oligonucleotide
cucaaugugcaaagagaau

SEQ ID NO: 2028550 - RNA, 19 nt, Artificial Sequence
  Description of Artificial Sequence: Synthetic oligonucleotide
cucuguaaguguguuacau

SEQ ID NO: 2028551 - RNA, 19 nt, Artificial Sequence
  Description of Artificial Sequence: Synthetic oligonucleotide
gacggaccuuccuucucaa

SEQ ID NO: 2028552 - RNA, 19 nt, Artificial Sequence
  Description of Artificial Sequence: Synthetic oligonucleotide
caacaguuacuaaaccauu

SEQ ID NO: 2028553 - RNA, 19 nt, Artificial Sequence
  Description of Artificial Sequence: Synthetic oligonucleotide
cacgacuuugucacagacu

SEQ ID NO: 2028554 - RNA, 19 nt, Artificial Sequence
  Description of Artificial Sequence: Synthetic oligonucleotide
cacgcggaccaccggcuug

SEQ ID NO: 2028555 - RNA, 19 nt, Artificial Sequence
  Description of Artificial Sequence: Synthetic oligonucleotide
ccugucugcuuuacgcuuc

SEQ ID NO: 2028556 - RNA, 19 nt, Artificial Sequence
  Description of Artificial Sequence: Synthetic oligonucleotide
ccugaagaucuucacugca

SEQ ID NO: 2028557 - RNA, 19 nt, Artificial Sequence
  Description of Artificial Sequence: Synthetic oligonucleotide
ugguuucauuauggguagu

SEQ ID NO: 2028558 - RNA, 19 nt, Artificial Sequence
  Description of Artificial Sequence: Synthetic oligonucleotide
accggcuugcagagccggc

SEQ ID NO: 2028559 - RNA, 19 nt, Artificial Sequence
  Description of Artificial Sequence: Synthetic oligonucleotide
gcaggacuaaguccuggga

SEQ ID NO: 2028560 - RNA, 19 nt, Artificial Sequence
  Description of Artificial Sequence: Synthetic oligonucleotide
cacaguccuggagcccugg

SEQ ID NO: 2028561 - RNA, 19 nt, Artificial Sequence
  Description of Artificial Sequence: Synthetic oligonucleotide
gguaugacggaccuuccuu

SEQ ID NO: 2028562 - RNA, 19 nt, Artificial Sequence
  Description of Artificial Sequence: Synthetic oligonucleotide
aaccuuuccugaagaucuu

SEQ ID NO: 2028563 - RNA, 19 nt, Artificial Sequence
  Description of Artificial Sequence: Synthetic oligonucleotide
accguggcgcaggacuaag

SEQ ID NO: 2028564 - RNA, 19 nt, Artificial Sequence
  Description of Artificial Sequence: Synthetic oligonucleotide
gccaggauucuggaaagga

SEQ ID NO: 2028565 - RNA, 19 nt, Artificial Sequence
  Description of Artificial Sequence: Synthetic oligonucleotide
aaccguggcgcaggacuaa

SEQ ID NO: 2028566 - RNA, 19 nt, Artificial Sequence
  Description of Artificial Sequence: Synthetic oligonucleotide
aagucccaaagcagauguu

SEQ ID NO: 2028567 - RNA, 19 nt, Artificial Sequence
  Description of Artificial Sequence: Synthetic oligonucleotide
cgccaugucggucuucacc

SEQ ID NO: 2028568 - RNA, 19 nt, Artificial Sequence
  Description of Artificial Sequence: Synthetic oligonucleotide
gcagauguucaccauguuu

SEQ ID NO: 2028569 - RNA, 19 nt, Artificial Sequence
  Description of Artificial Sequence: Synthetic oligonucleotide
acagacuagcuggcccuga

SEQ ID NO: 2028570 - RNA, 19 nt, Artificial Sequence
  Description of Artificial Sequence: Synthetic oligonucleotide
cagccuccauuugucuccc

SEQ ID NO: 2028571 - RNA, 19 nt, Artificial Sequence
  Description of Artificial Sequence: Synthetic oligonucleotide
cacagacuagcuggcccug

SEQ ID NO: 2028572 - RNA, 19 nt, Artificial Sequence
  Description of Artificial Sequence: Synthetic oligonucleotide
ccucacagguaugacggac

SEQ ID NO: 2028573 - RNA, 19 nt, Artificial Sequence
  Description of Artificial Sequence: Synthetic oligonucleotide
ggcagcgggccacccgugg

SEQ ID NO: 2028574 - RNA, 19 nt, Artificial Sequence
  Description of Artificial Sequence: Synthetic oligonucleotide
ccguaagcugagucuggcc

SEQ ID NO: 2028575 - RNA, 19 nt, Artificial Sequence
  Description of Artificial Sequence: Synthetic oligonucleotide
aggcucaguggcaucugga

SEQ ID NO: 2028576 - RNA, 19 nt, Artificial Sequence
  Description of Artificial Sequence: Synthetic oligonucleotide
ugaggucgaccaggucccc

SEQ ID NO: 2028577 - RNA, 19 nt, Artificial Sequence
  Description of Artificial Sequence: Synthetic oligonucleotide
gccuccauuugucucccuc

SEQ ID NO: 2028578 - RNA, 19 nt, Artificial Sequence
  Description of Artificial Sequence: Synthetic oligonucleotide
gaaccguggcgcaggacua

SEQ ID NO: 2028579 - RNA, 19 nt, Artificial Sequence
  Description of Artificial Sequence: Synthetic oligonucleotide
cuuggacaccccguaagcu

SEQ ID NO: 2028580 - RNA, 19 nt, Artificial Sequence
  Description of Artificial Sequence: Synthetic oligonucleotide
ggucagaaccguggcgcag

SEQ ID NO: 2028581 - RNA, 19 nt, Artificial Sequence
  Description of Artificial Sequence: Synthetic oligonucleotide
ggccaggauucuggaaagg

SEQ ID NO: 2028582 - RNA, 19 nt, Artificial Sequence
  Description of Artificial Sequence: Synthetic oligonucleotide
acggaccuuccuucucaau

SEQ ID NO: 2028583 - RNA, 19 nt, Artificial Sequence
  Description of Artificial Sequence: Synthetic oligonucleotide
gagcagaauccugucugcu

SEQ ID NO: 2028584 - RNA, 19 nt, Artificial Sequence
  Description of Artificial Sequence: Synthetic oligonucleotide
caccccguaagcugagucu

SEQ ID NO: 2028585 - RNA, 19 nt, Artificial Sequence
  Description of Artificial Sequence: Synthetic oligonucleotide
ccaaguaaacugggguuuc

SEQ ID NO: 2028586 - RNA, 19 nt, Artificial Sequence
  Description of Artificial Sequence: Synthetic oligonucleotide
cucucguggacuucauuuu

SEQ ID NO: 2028587 - RNA, 19 nt, Artificial Sequence
  Description of Artificial Sequence: Synthetic oligonucleotide
agcgggccacccgugguca

SEQ ID NO: 2028588 - RNA, 19 nt, Artificial Sequence
  Description of Artificial Sequence: Synthetic oligonucleotide
cguggcgcaggacuaaguc

SEQ ID NO: 2028589 - RNA, 19 nt, Artificial Sequence
  Description of Artificial Sequence: Synthetic oligonucleotide
cuaaaccauuaagucccaa

SEQ ID NO: 2028590 - RNA, 19 nt, Artificial Sequence
  Description of Artificial Sequence: Synthetic oligonucleotide
caccauguuugcacgacuu

SEQ ID NO: 2028591 - RNA, 19 nt, Artificial Sequence
  Description of Artificial Sequence: Synthetic oligonucleotide
acgacaugucggagggaca

SEQ ID NO: 2028592 - RNA, 19 nt, Artificial Sequence
  Description of Artificial Sequence: Synthetic oligonucleotide
ucgccaugucggucuucac

SEQ ID NO: 2028593 - RNA, 19 nt, Artificial Sequence
  Description of Artificial Sequence: Synthetic oligonucleotide
ggccaaguaaacugggguu

SEQ ID NO: 2028594 - RNA, 19 nt, Artificial Sequence
  Description of Artificial Sequence: Synthetic oligonucleotide
ccguggucagaaccguggc

SEQ ID NO: 2028595 - RNA, 19 nt, Artificial Sequence
  Description of Artificial Sequence: Synthetic oligonucleotide
cgacaugucggagggacac

SEQ ID NO: 2028596 - RNA, 19 nt, Artificial Sequence
  Description of Artificial Sequence: Synthetic oligonucleotide
ccccguaagcugagucugg

SEQ ID NO: 2028597 - RNA, 19 nt, Artificial Sequence
  Description of Artificial Sequence: Synthetic oligonucleotide
cccguaagcugagucuggc

SEQ ID NO: 2028598 - RNA, 19 nt, Artificial Sequence
  Description of Artificial Sequence: Synthetic oligonucleotide
gcgcaggacuaaguccugg

SEQ ID NO: 2028599 - RNA, 19 nt, Artificial Sequence
  Description of Artificial Sequence: Synthetic oligonucleotide
gucggucuucacccaccca

SEQ ID NO: 2028600 - RNA, 19 nt, Artificial Sequence
  Description of Artificial Sequence: Synthetic oligonucleotide
acacgcggaccaccggcuu

SEQ ID NO: 2028601 - RNA, 19 nt, Artificial Sequence
  Description of Artificial Sequence: Synthetic oligonucleotide
gccaaccuucccucucgug

SEQ ID NO: 2028602 - RNA, 19 nt, Artificial Sequence
  Description of Artificial Sequence: Synthetic oligonucleotide
gacacgcggaccaccggcu

SEQ ID NO: 2028603 - RNA, 19 nt, Artificial Sequence
  Description of Artificial Sequence: Synthetic oligonucleotide
cuucccucucguggacuuc

SEQ ID NO: 2028604 - RNA, 19 nt, Artificial Sequence
  Description of Artificial Sequence: Synthetic oligonucleotide
gcugggccaggauucugga

SEQ ID NO: 2028605 - RNA, 19 nt, Artificial Sequence
  Description of Artificial Sequence: Synthetic oligonucleotide
acccguggucagaaccgug

SEQ ID NO: 2028606 - RNA, 19 nt, Artificial Sequence
  Description of Artificial Sequence: Synthetic oligonucleotide
cugcaguuuucaagagccu

SEQ ID NO: 2028607 - RNA, 19 nt, Artificial Sequence
  Description of Artificial Sequence: Synthetic oligonucleotide
ccucucguggacuucauuu

SEQ ID NO: 2028608 - RNA, 19 nt, Artificial Sequence
  Description of Artificial Sequence: Synthetic oligonucleotide
gcuuuacgcuucucaccca

SEQ ID NO: 2028609 - RNA, 19 nt, Artificial Sequence
  Description of Artificial Sequence: Synthetic oligonucleotide
cgccccuuccuccacaguc

SEQ ID NO: 2028610 - RNA, 19 nt, Artificial Sequence
  Description of Artificial Sequence: Synthetic oligonucleotide
ccccagcuuggacaccccg

SEQ ID NO: 2028611 - RNA, 19 nt, Artificial Sequence
  Description of Artificial Sequence: Synthetic oligonucleotide
gaccaccggcuugcagagc

SEQ ID NO: 2028612 - RNA, 19 nt, Artificial Sequence
  Description of Artificial Sequence: Synthetic oligonucleotide
cagaaccguggcgcaggac

SEQ ID NO: 2028613 - RNA, 19 nt, Artificial Sequence
  Description of Artificial Sequence: Synthetic oligonucleotide
ccaccggcuugcagagccg

SEQ ID NO: 2028614 - RNA, 19 nt, Artificial Sequence
  Description of Artificial Sequence: Synthetic oligonucleotide
agccuccauuugucucccu

SEQ ID NO: 2028615 - RNA, 19 nt, Artificial Sequence
  Description of Artificial Sequence: Synthetic oligonucleotide
gccaaguaaacugggguuu

SEQ ID NO: 2028616 - RNA, 19 nt, Artificial Sequence
  Description of Artificial Sequence: Synthetic oligonucleotide
ggacaccccguaagcugag

SEQ ID NO: 2028617 - RNA, 19 nt, Artificial Sequence
  Description of Artificial Sequence: Synthetic oligonucleotide
cccagggcagcaggcauug

SEQ ID NO: 2028618 - RNA, 19 nt, Artificial Sequence
  Description of Artificial Sequence: Synthetic oligonucleotide
gcugagucuggccaaccuu

SEQ ID NO: 2028619 - RNA, 19 nt, Artificial Sequence
  Description of Artificial Sequence: Synthetic oligonucleotide
gucccucgccaugucgguc

SEQ ID NO: 2028620 - RNA, 19 nt, Artificial Sequence
  Description of Artificial Sequence: Synthetic oligonucleotide
gcggaccaccggcuugcag

SEQ ID NO: 2028621 - RNA, 19 nt, Artificial Sequence
  Description of Artificial Sequence: Synthetic oligonucleotide
cggagggacacgcggacca

SEQ ID NO: 2028622 - RNA, 19 nt, Artificial Sequence
  Description of Artificial Sequence: Synthetic oligonucleotide
ggcgcaggacuaaguccug

SEQ ID NO: 2028623 - RNA, 19 nt, Artificial Sequence
  Description of Artificial Sequence: Synthetic oligonucleotide
gacaccccguaagcugagu

SEQ ID NO: 2028624 - RNA, 19 nt, Artificial Sequence
  Description of Artificial Sequence: Synthetic oligonucleotide
agcaggcauugagcagaau

SEQ ID NO: 2028625 - RNA, 19 nt, Artificial Sequence
  Description of Artificial Sequence: Synthetic oligonucleotide
ccaugucggucuucaccca

SEQ ID NO: 2028626 - RNA, 19 nt, Artificial Sequence
  Description of Artificial Sequence: Synthetic oligonucleotide
ggucccucgccaugucggu

SEQ ID NO: 2028627 - RNA, 19 nt, Artificial Sequence
  Description of Artificial Sequence: Synthetic oligonucleotide
ccucuccaacaguuacuaa

SEQ ID NO: 2028628 - RNA, 19 nt, Artificial Sequence
  Description of Artificial Sequence: Synthetic oligonucleotide
gcgggccacccguggucag

SEQ ID NO: 2028629 - RNA, 19 nt, Artificial Sequence
  Description of Artificial Sequence: Synthetic oligonucleotide
guguuacaucggaaccuuu

SEQ ID NO: 2028630 - RNA, 19 nt, Artificial Sequence
  Description of Artificial Sequence: Synthetic oligonucleotide
cccagcuuggacaccccgu

SEQ ID NO: 2028631 - RNA, 19 nt, Artificial Sequence
  Description of Artificial Sequence: Synthetic oligonucleotide
cacccguggucagaaccgu

SEQ ID NO: 2028632 - RNA, 19 nt, Artificial Sequence
  Description of Artificial Sequence: Synthetic oligonucleotide
guaacucguugcagacauu

SEQ ID NO: 2028633 - RNA, 19 nt, Artificial Sequence
  Description of Artificial Sequence: Synthetic oligonucleotide
ggccacccguggucagaac

SEQ ID NO: 2028634 - RNA, 19 nt, Artificial Sequence
  Description of Artificial Sequence: Synthetic oligonucleotide
cccugcagacugcugacau

SEQ ID NO: 2028635 - RNA, 19 nt, Artificial Sequence
  Description of Artificial Sequence: Synthetic oligonucleotide
gcugggcagcgggccaccc

SEQ ID NO: 2028636 - RNA, 19 nt, Artificial Sequence
  Description of Artificial Sequence: Synthetic oligonucleotide
gggccacccguggucagaa

SEQ ID NO: 2028637 - RNA, 19 nt, Artificial Sequence
  Description of Artificial Sequence: Synthetic oligonucleotide
ggacgacaugucggaggga

SEQ ID NO: 2028638 - RNA, 19 nt, Artificial Sequence
  Description of Artificial Sequence: Synthetic oligonucleotide
gcccugcagacugcugaca

SEQ ID NO: 2028639 - RNA, 19 nt, Artificial Sequence
  Description of Artificial Sequence: Synthetic oligonucleotide
gcagcgggccacccguggu

SEQ ID NO: 2028640 - RNA, 19 nt, Artificial Sequence
  Description of Artificial Sequence: Synthetic oligonucleotide
ccuuugagcccugcagacu

SEQ ID NO: 2028641 - RNA, 19 nt, Artificial Sequence
  Description of Artificial Sequence: Synthetic oligonucleotide
ccccucuguaaguguguua

SEQ ID NO: 2028642 - RNA, 19 nt, Artificial Sequence
  Description of Artificial Sequence: Synthetic oligonucleotide
cacagguaugacggaccuu

SEQ ID NO: 2028643 - RNA, 19 nt, Artificial Sequence
  Description of Artificial Sequence: Synthetic oligonucleotide
gggcagcgggccacccgug

SEQ ID NO: 2028644 - RNA, 19 nt, Artificial Sequence
  Description of Artificial Sequence: Synthetic oligonucleotide
ccacucucccaugugguuu

SEQ ID NO: 2028645 - RNA, 19 nt, Artificial Sequence
  Description of Artificial Sequence: Synthetic oligonucleotide
ccugcagacugcugacauu

SEQ ID NO: 2028646 - RNA, 19 nt, Artificial Sequence
  Description of Artificial Sequence: Synthetic oligonucleotide
cucucccaugugguuucau

SEQ ID NO: 2028647 - RNA, 19 nt, Artificial Sequence
  Description of Artificial Sequence: Synthetic oligonucleotide
ccguggcgcaggacuaagu

SEQ ID NO: 2028648 - RNA, 19 nt, Artificial Sequence
  Description of Artificial Sequence: Synthetic oligonucleotide
ccucgccaugucggucuuc

SEQ ID NO: 2028649 - RNA, 19 nt, Artificial Sequence
  Description of Artificial Sequence: Synthetic oligonucleotide
cgggccacccguggucaga

SEQ ID NO: 2028650 - RNA, 19 nt, Artificial Sequence
  Description of Artificial Sequence: Synthetic oligonucleotide
gcuggcccugaggcucagu

SEQ ID NO: 2028651 - RNA, 19 nt, Artificial Sequence
  Description of Artificial Sequence: Synthetic oligonucleotide
ccgccccuuccuccacagu

SEQ ID NO: 2028652 - RNA, 19 nt, Artificial Sequence
  Description of Artificial Sequence: Synthetic oligonucleotide
cccucgccaugucggucuu

SEQ ID NO: 2028653 - RNA, 19 nt, Artificial Sequence
  Description of Artificial Sequence: Synthetic oligonucleotide
cgcggaccaccggcuugca

SEQ ID NO: 2028654 - RNA, 19 nt, Artificial Sequence
  Description of Artificial Sequence: Synthetic oligonucleotide
auaaucuucacuuauaugc

SEQ ID NO: 2028655 - RNA, 19 nt, Artificial Sequence
  Description of Artificial Sequence: Synthetic oligonucleotide
aaacuagucuuucauaugc

SEQ ID NO: 2028656 - RNA, 19 nt, Artificial Sequence
  Description of Artificial Sequence: Synthetic oligonucleotide
aaagauacuguucagagug

SEQ ID NO: 2028657 - RNA, 19 nt, Artificial Sequence
  Description of Artificial Sequence: Synthetic oligonucleotide
ugagaaaguagcuacaucc

SEQ ID NO: 2028658 - RNA, 19 nt, Artificial Sequence
  Description of Artificial Sequence: Synthetic oligonucleotide
accugaaucacucugaagg

SEQ ID NO: 2028659 - RNA, 19 nt, Artificial Sequence
  Description of Artificial Sequence: Synthetic oligonucleotide
ugucguaauaacaagaaca

SEQ ID NO: 2028660 - RNA, 19 nt, Artificial Sequence
  Description of Artificial Sequence: Synthetic oligonucleotide
uuuacucucuauuacacag

SEQ ID NO: 2028661 - RNA, 19 nt, Artificial Sequence
  Description of Artificial Sequence: Synthetic oligonucleotide
aauuuagccagaccacugc

SEQ ID NO: 2028662 - RNA, 19 nt, Artificial Sequence
  Description of Artificial Sequence: Synthetic oligonucleotide
aacuccguguucuugaaac

SEQ ID NO: 2028663 - RNA, 19 nt, Artificial Sequence
  Description of Artificial Sequence: Synthetic oligonucleotide
agaacaacgucccacuucc

SEQ ID NO: 2028664 - RNA, 19 nt, Artificial Sequence
  Description of Artificial Sequence: Synthetic oligonucleotide
ucuccaauauauaaagggg

SEQ ID NO: 2028665 - RNA, 19 nt, Artificial Sequence
  Description of Artificial Sequence: Synthetic oligonucleotide
acuuaucaaaacuccaugc

SEQ ID NO: 2028666 - RNA, 19 nt, Artificial Sequence
  Description of Artificial Sequence: Synthetic oligonucleotide
auaacaagaacacaggagu

SEQ ID NO: 2028667 - RNA, 19 nt, Artificial Sequence
  Description of Artificial Sequence: Synthetic oligonucleotide
uguagugguacuccgaggg

SEQ ID NO: 2028668 - RNA, 19 nt, Artificial Sequence
  Description of Artificial Sequence: Synthetic oligonucleotide
agaguauucaacccaacac

SEQ ID NO: 2028669 - RNA, 19 nt, Artificial Sequence
  Description of Artificial Sequence: Synthetic oligonucleotide
aaugcaaggagaaagggag

SEQ ID NO: 2028670 - RNA, 19 nt, Artificial Sequence
  Description of Artificial Sequence: Synthetic oligonucleotide
aaagggagacaccugaauc

SEQ ID NO: 2028671 - RNA, 19 nt, Artificial Sequence
  Description of Artificial Sequence: Synthetic oligonucleotide
uuuaagaguauucaaccca

SEQ ID NO: 2028672 - RNA, 19 nt, Artificial Sequence
  Description of Artificial Sequence: Synthetic oligonucleotide
uauuuuaguaucaggagcu

SEQ ID NO: 2028673 - RNA, 19 nt, Artificial Sequence
  Description of Artificial Sequence: Synthetic oligonucleotide
ucuauguagacaucaaaag

SEQ ID NO: 2028674 - RNA, 19 nt, Artificial Sequence
  Description of Artificial Sequence: Synthetic oligonucleotide
ugaacauacaacuuuaaau

SEQ ID NO: 2028675 - RNA, 19 nt, Artificial Sequence
  Description of Artificial Sequence: Synthetic oligonucleotide
aacuuuaagaguauucaac

SEQ ID NO: 2028676 - RNA, 19 nt, Artificial Sequence
  Description of Artificial Sequence: Synthetic oligonucleotide
uucacuuauaugcaaagga

SEQ ID NO: 2028677 - RNA, 19 nt, Artificial Sequence
  Description of Artificial Sequence: Synthetic oligonucleotide
cucucuauuacacagcagg

SEQ ID NO: 2028678 - RNA, 19 nt, Artificial Sequence
  Description of Artificial Sequence: Synthetic oligonucleotide
gaaagcaccgcccuguugg

SEQ ID NO: 2028679 - RNA, 19 nt, Artificial Sequence
  Description of Artificial Sequence: Synthetic oligonucleotide
aauugggcuguauucaguc

SEQ ID NO: 2028680 - RNA, 19 nt, Artificial Sequence
  Description of Artificial Sequence: Synthetic oligonucleotide
ccaaaugucaucaauaggg

SEQ ID NO: 2028681 - RNA, 19 nt, Artificial Sequence
  Description of Artificial Sequence: Synthetic oligonucleotide
aacucgugugugcacaugc

SEQ ID NO: 2028682 - RNA, 19 nt, Artificial Sequence
  Description of Artificial Sequence: Synthetic oligonucleotide
ucuauuacacagcaggaca

SEQ ID NO: 2028683 - RNA, 19 nt, Artificial Sequence
  Description of Artificial Sequence: Synthetic oligonucleotide
uguucuugaaacucuaagc

SEQ ID NO: 2028684 - RNA, 19 nt, Artificial Sequence
  Description of Artificial Sequence: Synthetic oligonucleotide
uuuugcauaaucuucacuu

SEQ ID NO: 2028685 - RNA, 19 nt, Artificial Sequence
  Description of Artificial Sequence: Synthetic oligonucleotide
ucuugaaacucuaagcaga

SEQ ID NO: 2028686 - RNA, 19 nt, Artificial Sequence
  Description of Artificial Sequence: Synthetic oligonucleotide
caaaagauacuguucagag

SEQ ID NO: 2028687 - RNA, 19 nt, Artificial Sequence
  Description of Artificial Sequence: Synthetic oligonucleotide
aaaggauugauaucuccug

SEQ ID NO: 2028688 - RNA, 19 nt, Artificial Sequence
  Description of Artificial Sequence: Synthetic oligonucleotide
ucagaugucguaauaacaa

SEQ ID NO: 2028689 - RNA, 19 nt, Artificial Sequence
  Description of Artificial Sequence: Synthetic oligonucleotide
uguauucaguccaacuccg

SEQ ID NO: 2028690 - RNA, 19 nt, Artificial Sequence
  Description of Artificial Sequence: Synthetic oligonucleotide
gauaaugcaaggagaaagg

SEQ ID NO: 2028691 - RNA, 19 nt, Artificial Sequence
  Description of Artificial Sequence: Synthetic oligonucleotide
uuuaguaucaggagcuucu

SEQ ID NO: 2028692 - RNA, 19 nt, Artificial Sequence
  Description of Artificial Sequence: Synthetic oligonucleotide
uuuauagguuccaaacaag

SEQ ID NO: 2028693 - RNA, 19 nt, Artificial Sequence
  Description of Artificial Sequence: Synthetic oligonucleotide
uauauaaaggggcuggaaa

SEQ ID NO: 2028694 - RNA, 19 nt, Artificial Sequence
  Description of Artificial Sequence: Synthetic oligonucleotide
guauuuuaguaucaggagc

SEQ ID NO: 2028695 - RNA, 19 nt, Artificial Sequence
  Description of Artificial Sequence: Synthetic oligonucleotide
aagagcuccacaauuuagc

SEQ ID NO: 2028696 - RNA, 19 nt, Artificial Sequence
  Description of Artificial Sequence: Synthetic oligonucleotide
uauuaccagauaaugcaag

SEQ ID NO: 2028697 - RNA, 19 nt, Artificial Sequence
  Description of Artificial Sequence: Synthetic oligonucleotide
uuaucaaaacuccaugcac

SEQ ID NO: 2028698 - RNA, 19 nt, Artificial Sequence
  Description of Artificial Sequence: Synthetic oligonucleotide
auaugcaaaggauugauau

SEQ ID NO: 2028699 - RNA, 19 nt, Artificial Sequence
  Description of Artificial Sequence: Synthetic oligonucleotide
uccaaacaaggucaaagag

SEQ ID NO: 2028700 - RNA, 19 nt, Artificial Sequence
  Description of Artificial Sequence: Synthetic oligonucleotide
agauaaugcaaggagaaag

SEQ ID NO: 2028701 - RNA, 19 nt, Artificial Sequence
  Description of Artificial Sequence: Synthetic oligonucleotide
auuaccagauaaugcaagg

SEQ ID NO: 2028702 - RNA, 19 nt, Artificial Sequence
  Description of Artificial Sequence: Synthetic oligonucleotide
agagcuccacaauuuagcc

SEQ ID NO: 2028703 - RNA, 19 nt, Artificial Sequence
  Description of Artificial Sequence: Synthetic oligonucleotide
ugucuuuccaaacuuggug

SEQ ID NO: 2028704 - RNA, 19 nt, Artificial Sequence
  Description of Artificial Sequence: Synthetic oligonucleotide
uguguuuugcauaaucuuc

SEQ ID NO: 2028705 - RNA, 19 nt, Artificial Sequence
  Description of Artificial Sequence: Synthetic oligonucleotide
gggaccauaacuuuaaccc

SEQ ID NO: 2028706 - RNA, 19 nt, Artificial Sequence
  Description of Artificial Sequence: Synthetic oligonucleotide
aaguccacuuaucaaaacu

SEQ ID NO: 2028707 - RNA, 19 nt, Artificial Sequence
  Description of Artificial Sequence: Synthetic oligonucleotide
ugcuauuaccagauaaugc

SEQ ID NO: 2028708 - RNA, 19 nt, Artificial Sequence
  Description of Artificial Sequence: Synthetic oligonucleotide
aacccaaccuuccauaacu

SEQ ID NO: 2028709 - RNA, 19 nt, Artificial Sequence
  Description of Artificial Sequence: Synthetic oligonucleotide
uuugaauugggcuguauuc

SEQ ID NO: 2028710 - RNA, 19 nt, Artificial Sequence
  Description of Artificial Sequence: Synthetic oligonucleotide
ucugaaggcacacuucuug

SEQ ID NO: 2028711 - RNA, 19 nt, Artificial Sequence
  Description of Artificial Sequence: Synthetic oligonucleotide
uauucaacccaacacuugu

SEQ ID NO: 2028712 - RNA, 19 nt, Artificial Sequence
  Description of Artificial Sequence: Synthetic oligonucleotide
aacuuuaacccaaccuucc

SEQ ID NO: 2028713 - RNA, 19 nt, Artificial Sequence
  Description of Artificial Sequence: Synthetic oligonucleotide
aagaguauucaacccaaca

SEQ ID NO: 2028714 - RNA, 19 nt, Artificial Sequence
  Description of Artificial Sequence: Synthetic oligonucleotide
aagggagacaccugaauca

SEQ ID NO: 2028715 - RNA, 19 nt, Artificial Sequence
  Description of Artificial Sequence: Synthetic oligonucleotide
aaaaccacuucuccaauau

SEQ ID NO: 2028716 - RNA, 19 nt, Artificial Sequence
  Description of Artificial Sequence: Synthetic oligonucleotide
aguagcuacauccugcugu

SEQ ID NO: 2028717 - RNA, 19 nt, Artificial Sequence
  Description of Artificial Sequence: Synthetic oligonucleotide
aacaacgucccacuuccuc

SEQ ID NO: 2028718 - RNA, 19 nt, Artificial Sequence
  Description of Artificial Sequence: Synthetic oligonucleotide
caauauauaaaggggcugg

SEQ ID NO: 2028719 - RNA, 19 nt, Artificial Sequence
  Description of Artificial Sequence: Synthetic oligonucleotide
uucugcagaugcuaaaacc

SEQ ID NO: 2028720 - RNA, 19 nt, Artificial Sequence
  Description of Artificial Sequence: Synthetic oligonucleotide
cauacucucaagauggcug

SEQ ID NO: 2028721 - RNA, 19 nt, Artificial Sequence
  Description of Artificial Sequence: Synthetic oligonucleotide
uuaagaguauucaacccaa

SEQ ID NO: 2028722 - RNA, 19 nt, Artificial Sequence
  Description of Artificial Sequence: Synthetic oligonucleotide
uagguuaggauguccacag

SEQ ID NO: 2028723 - RNA, 19 nt, Artificial Sequence
  Description of Artificial Sequence: Synthetic oligonucleotide
cguaauaacaagaacacag

SEQ ID NO: 2028724 - RNA, 19 nt, Artificial Sequence
  Description of Artificial Sequence: Synthetic oligonucleotide
uaaugcaaggagaaaggga

SEQ ID NO: 2028725 - RNA, 19 nt, Artificial Sequence
  Description of Artificial Sequence: Synthetic oligonucleotide
gggaaagaaacacacagcc

SEQ ID NO: 2028726 - RNA, 19 nt, Artificial Sequence
  Description of Artificial Sequence: Synthetic oligonucleotide
cauuuuaguacccaggaga

SEQ ID NO: 2028727 - RNA, 19 nt, Artificial Sequence
  Description of Artificial Sequence: Synthetic oligonucleotide
aggaguuugaacauacaac

SEQ ID NO: 2028728 - RNA, 19 nt, Artificial Sequence
  Description of Artificial Sequence: Synthetic oligonucleotide
ucauagguuaggaugucca

SEQ ID NO: 2028729 - RNA, 19 nt, Artificial Sequence
  Description of Artificial Sequence: Synthetic oligonucleotide
ucacuuauaugcaaaggau

SEQ ID NO: 2028730 - RNA, 19 nt, Artificial Sequence
  Description of Artificial Sequence: Synthetic oligonucleotide
cuguauucaguccaacucc

SEQ ID NO: 2028731 - RNA, 19 nt, Artificial Sequence
  Description of Artificial Sequence: Synthetic oligonucleotide
ugaaucacucugaaggcac

SEQ ID NO: 2028732 - RNA, 19 nt, Artificial Sequence
  Description of Artificial Sequence: Synthetic oligonucleotide
augaagaacaacgucccac

SEQ ID NO: 2028733 - RNA, 19 nt, Artificial Sequence
  Description of Artificial Sequence: Synthetic oligonucleotide
aaagaaacacacagccugg

SEQ ID NO: 2028734 - RNA, 19 nt, Artificial Sequence
  Description of Artificial Sequence: Synthetic oligonucleotide
uucgguaucuccaaauguc

SEQ ID NO: 2028735 - RNA, 19 nt, Artificial Sequence
  Description of Artificial Sequence: Synthetic oligonucleotide
aauuuagccacagucuccu

SEQ ID NO: 2028736 - RNA, 19 nt, Artificial Sequence
  Description of Artificial Sequence: Synthetic oligonucleotide
ugcacaugcugaaagcacc

SEQ ID NO: 2028737 - RNA, 19 nt, Artificial Sequence
  Description of Artificial Sequence: Synthetic oligonucleotide
uauucaguccaacuccgug

SEQ ID NO: 2028738 - RNA, 19 nt, Artificial Sequence
  Description of Artificial Sequence: Synthetic oligonucleotide
aguuugaacauacaacuuu

SEQ ID NO: 2028739 - RNA, 19 nt, Artificial Sequence
  Description of Artificial Sequence: Synthetic oligonucleotide
agguauaccagacacuccu

SEQ ID NO: 2028740 - RNA, 19 nt, Artificial Sequence
  Description of Artificial Sequence: Synthetic oligonucleotide
auauaaaggggcuggaaau

SEQ ID NO: 2028741 - RNA, 19 nt, Artificial Sequence
  Description of Artificial Sequence: Synthetic oligonucleotide
auuuaauuuccugggaaag

SEQ ID NO: 2028742 - RNA, 19 nt, Artificial Sequence
  Description of Artificial Sequence: Synthetic oligonucleotide
ucugcugagcucagcacgg

SEQ ID NO: 2028743 - RNA, 19 nt, Artificial Sequence
  Description of Artificial Sequence: Synthetic oligonucleotide
uccugggaaagaaacacac

SEQ ID NO: 2028744 - RNA, 19 nt, Artificial Sequence
  Description of Artificial Sequence: Synthetic oligonucleotide
auaaugcaaggagaaaggg

SEQ ID NO: 2028745 - RNA, 19 nt, Artificial Sequence
  Description of Artificial Sequence: Synthetic oligonucleotide
ucuucgguaucuccaaaug

SEQ ID NO: 2028746 - RNA, 19 nt, Artificial Sequence
  Description of Artificial Sequence: Synthetic oligonucleotide
uaaacuagucuuucauaug

SEQ ID NO: 2028747 - RNA, 19 nt, Artificial Sequence
  Description of Artificial Sequence: Synthetic oligonucleotide
uuccaaacaaggucaaaga

SEQ ID NO: 2028748 - RNA, 19 nt, Artificial Sequence
  Description of Artificial Sequence: Synthetic oligonucleotide
ugaagaacaacgucccacu

SEQ ID NO: 2028749 - RNA, 19 nt, Artificial Sequence
  Description of Artificial Sequence: Synthetic oligonucleotide
ugggaaagaaacacacagc

SEQ ID NO: 2028750 - RNA, 19 nt, Artificial Sequence
  Description of Artificial Sequence: Synthetic oligonucleotide
ucagucuauguagacauca

SEQ ID NO: 2028751 - RNA, 19 nt, Artificial Sequence
  Description of Artificial Sequence: Synthetic oligonucleotide
uuuagccacagucuccucu

SEQ ID NO: 2028752 - RNA, 19 nt, Artificial Sequence
  Description of Artificial Sequence: Synthetic oligonucleotide
gcuauuaccagauaaugca

SEQ ID NO: 2028753 - RNA, 19 nt, Artificial Sequence
  Description of Artificial Sequence: Synthetic oligonucleotide
acuuguucccugcuauuac

SEQ ID NO: 2028754 - RNA, 19 nt, Artificial Sequence
  Description of Artificial Sequence: Synthetic oligonucleotide
cacagguaaagcagcaccg

SEQ ID NO: 2028755 - RNA, 19 nt, Artificial Sequence
  Description of Artificial Sequence: Synthetic oligonucleotide
gaaauuuaauuuccuggga

SEQ ID NO: 2028756 - RNA, 19 nt, Artificial Sequence
  Description of Artificial Sequence: Synthetic oligonucleotide
ugggaccauaacuuuaacc

SEQ ID NO: 2028757 - RNA, 19 nt, Artificial Sequence
  Description of Artificial Sequence: Synthetic oligonucleotide
uuuaauuuccugggaaaga

SEQ ID NO: 2028758 - RNA, 19 nt, Artificial Sequence
  Description of Artificial Sequence: Synthetic oligonucleotide
uccacuuaucaaaacucca

SEQ ID NO: 2028759 - RNA, 19 nt, Artificial Sequence
  Description of Artificial Sequence: Synthetic oligonucleotide
ugcuaaaaccacuucucca

SEQ ID NO: 2028760 - RNA, 19 nt, Artificial Sequence
  Description of Artificial Sequence: Synthetic oligonucleotide
agaaaguagcuacauccug

SEQ ID NO: 2028761 - RNA, 19 nt, Artificial Sequence
  Description of Artificial Sequence: Synthetic oligonucleotide
uuuuacucucuauuacaca

SEQ ID NO: 2028762 - RNA, 19 nt, Artificial Sequence
  Description of Artificial Sequence: Synthetic oligonucleotide
ucucuauuacacagcagga

SEQ ID NO: 2028763 - RNA, 19 nt, Artificial Sequence
  Description of Artificial Sequence: Synthetic oligonucleotide
acuagucuuucauaugcug

SEQ ID NO: 2028764 - RNA, 19 nt, Artificial Sequence
  Description of Artificial Sequence: Synthetic oligonucleotide
ucaacccaacacuuguucc

SEQ ID NO: 2028765 - RNA, 19 nt, Artificial Sequence
  Description of Artificial Sequence: Synthetic oligonucleotide
guguucuugaaacucuaag

SEQ ID NO: 2028766 - RNA, 19 nt, Artificial Sequence
  Description of Artificial Sequence: Synthetic oligonucleotide
aagcccacuccacaucuuc

SEQ ID NO: 2028767 - RNA, 19 nt, Artificial Sequence
  Description of Artificial Sequence: Synthetic oligonucleotide
aaagagcuccacaauuuag

SEQ ID NO: 2028768 - RNA, 19 nt, Artificial Sequence
  Description of Artificial Sequence: Synthetic oligonucleotide
aggacacugcaacaacagc

SEQ ID NO: 2028769 - RNA, 19 nt, Artificial Sequence
  Description of Artificial Sequence: Synthetic oligonucleotide
uaugcuguagcuggcaucu

SEQ ID NO: 2028770 - RNA, 19 nt, Artificial Sequence
  Description of Artificial Sequence: Synthetic oligonucleotide
uugguaccaggcaauuuag

SEQ ID NO: 2028771 - RNA, 19 nt, Artificial Sequence
  Description of Artificial Sequence: Synthetic oligonucleotide
aaucuucacuuauaugcaa

SEQ ID NO: 2028772 - RNA, 19 nt, Artificial Sequence
  Description of Artificial Sequence: Synthetic oligonucleotide
uugaauugggcuguauuca

SEQ ID NO: 2028773 - RNA, 19 nt, Artificial Sequence
  Description of Artificial Sequence: Synthetic oligonucleotide
uguaaacuagucuuucaua

SEQ ID NO: 2028774 - RNA, 19 nt, Artificial Sequence
  Description of Artificial Sequence: Synthetic oligonucleotide
ucgguaucuccaaauguca

SEQ ID NO: 2028775 - RNA, 19 nt, Artificial Sequence
  Description of Artificial Sequence: Synthetic oligonucleotide
cuuaucaaaacuccaugca

SEQ ID NO: 2028776 - RNA, 19 nt, Artificial Sequence
  Description of Artificial Sequence: Synthetic oligonucleotide
aacaaacugcuucagccuu

SEQ ID NO: 2028777 - RNA, 19 nt, Artificial Sequence
  Description of Artificial Sequence: Synthetic oligonucleotide
uucaacccaacacuuguuc

SEQ ID NO: 2028778 - RNA, 19 nt, Artificial Sequence
  Description of Artificial Sequence: Synthetic oligonucleotide
cauaaucuucacuuauaug

SEQ ID NO: 2028779 - RNA, 19 nt, Artificial Sequence
  Description of Artificial Sequence: Synthetic oligonucleotide
uuuaacccaaccuuccaua

SEQ ID NO: 2028780 - RNA, 19 nt, Artificial Sequence
  Description of Artificial Sequence: Synthetic oligonucleotide
aaccacuucuccaauauau

SEQ ID NO: 2028781 - RNA, 19 nt, Artificial Sequence
  Description of Artificial Sequence: Synthetic oligonucleotide
gucguaauaacaagaacac

SEQ ID NO: 2028782 - RNA, 19 nt, Artificial Sequence
  Description of Artificial Sequence: Synthetic oligonucleotide
ccaaacaaggucaaagagc

SEQ ID NO: 2028783 - RNA, 19 nt, Artificial Sequence
  Description of Artificial Sequence: Synthetic oligonucleotide
auucaguccaacuccgugu

SEQ ID NO: 2028784 - RNA, 19 nt, Artificial Sequence
  Description of Artificial Sequence: Synthetic oligonucleotide
agguaaagcagcaccgacc

SEQ ID NO: 2028785 - RNA, 19 nt, Artificial Sequence
  Description of Artificial Sequence: Synthetic oligonucleotide
aauaggggcuuuagccugc

SEQ ID NO: 2028786 - RNA, 19 nt, Artificial Sequence
  Description of Artificial Sequence: Synthetic oligonucleotide
uuacacagcaggacacugc

SEQ ID NO: 2028787 - RNA, 19 nt, Artificial Sequence
  Description of Artificial Sequence: Synthetic oligonucleotide
cuuguucccugcuauuacc

SEQ ID NO: 2028788 - RNA, 19 nt, Artificial Sequence
  Description of Artificial Sequence: Synthetic oligonucleotide
ucugggaccauaacuuuaa

SEQ ID NO: 2028789 - RNA, 19 nt, Artificial Sequence
  Description of Artificial Sequence: Synthetic oligonucleotide
ucgugugugcacaugcuga

SEQ ID NO: 2028790 - RNA, 19 nt, Artificial Sequence
  Description of Artificial Sequence: Synthetic oligonucleotide
caauuuagccacagucucc

SEQ ID NO: 2028791 - RNA, 19 nt, Artificial Sequence
  Description of Artificial Sequence: Synthetic oligonucleotide
auaugcuguagcuggcauc

SEQ ID NO: 2028792 - RNA, 19 nt, Artificial Sequence
  Description of Artificial Sequence: Synthetic oligonucleotide
agcaccgcccuguugguac

SEQ ID NO: 2028793 - RNA, 19 nt, Artificial Sequence
  Description of Artificial Sequence: Synthetic oligonucleotide
acaagcaguuguuugaauu

SEQ ID NO: 2028794 - RNA, 19 nt, Artificial Sequence
  Description of Artificial Sequence: Synthetic oligonucleotide
caacccaacacuuguuccc

SEQ ID NO: 2028795 - RNA, 19 nt, Artificial Sequence
  Description of Artificial Sequence: Synthetic oligonucleotide
cacaauuuagccagaccac

SEQ ID NO: 2028796 - RNA, 19 nt, Artificial Sequence
  Description of Artificial Sequence: Synthetic oligonucleotide
cacuuaucaaaacuccaug

SEQ ID NO: 2028797 - RNA, 19 nt, Artificial Sequence
  Description of Artificial Sequence: Synthetic oligonucleotide
cagaugucguaauaacaag

SEQ ID NO: 2028798 - RNA, 19 nt, Artificial Sequence
  Description of Artificial Sequence: Synthetic oligonucleotide
ugugcacaugcugaaagca

SEQ ID NO: 2028799 - RNA, 19 nt, Artificial Sequence
  Description of Artificial Sequence: Synthetic oligonucleotide
uuaccagauaaugcaagga

SEQ ID NO: 2028800 - RNA, 19 nt, Artificial Sequence
  Description of Artificial Sequence: Synthetic oligonucleotide
gaugucguaauaacaagaa

SEQ ID NO: 2028801 - RNA, 19 nt, Artificial Sequence
  Description of Artificial Sequence: Synthetic oligonucleotide
agacaccugaaucacucug

SEQ ID NO: 2028802 - RNA, 19 nt, Artificial Sequence
  Description of Artificial Sequence: Synthetic oligonucleotide
uuaacccaaccuuccauaa

SEQ ID NO: 2028803 - RNA, 19 nt, Artificial Sequence
  Description of Artificial Sequence: Synthetic oligonucleotide
aagauacuguucagagugg

SEQ ID NO: 2028804 - RNA, 19 nt, Artificial Sequence
  Description of Artificial Sequence: Synthetic oligonucleotide
ugcauaaucuucacuuaua

SEQ ID NO: 2028805 - RNA, 19 nt, Artificial Sequence
  Description of Artificial Sequence: Synthetic oligonucleotide
ugguguguuuugcauaauc

SEQ ID NO: 2028806 - RNA, 19 nt, Artificial Sequence
  Description of Artificial Sequence: Synthetic oligonucleotide
caauaggggcuuuagccug

SEQ ID NO: 2028807 - RNA, 19 nt, Artificial Sequence
  Description of Artificial Sequence: Synthetic oligonucleotide
aucaaaacuccaugcacaa

SEQ ID NO: 2028808 - RNA, 19 nt, Artificial Sequence
  Description of Artificial Sequence: Synthetic oligonucleotide
uccguguucuugaaacucu

SEQ ID NO: 2028809 - RNA, 19 nt, Artificial Sequence
  Description of Artificial Sequence: Synthetic oligonucleotide
uucauaugcuguagcuggc

SEQ ID NO: 2028810 - RNA, 19 nt, Artificial Sequence
  Description of Artificial Sequence: Synthetic oligonucleotide
ugauaucuccuguaagcuc

SEQ ID NO: 2028811 - RNA, 19 nt, Artificial Sequence
  Description of Artificial Sequence: Synthetic oligonucleotide
agaccacugcugcauacuc

SEQ ID NO: 2028812 - RNA, 19 nt, Artificial Sequence
  Description of Artificial Sequence: Synthetic oligonucleotide
cuuucauaugcuguagcug

SEQ ID NO: 2028813 - RNA, 19 nt, Artificial Sequence
  Description of Artificial Sequence: Synthetic oligonucleotide
agcaccgaccuccccaaac

SEQ ID NO: 2028814 - RNA, 19 nt, Artificial Sequence
  Description of Artificial Sequence: Synthetic oligonucleotide
cagacuuucauguaguggu

SEQ ID NO: 2028815 - RNA, 19 nt, Artificial Sequence
  Description of Artificial Sequence: Synthetic oligonucleotide
guaccaggcaauuuagcca

SEQ ID NO: 2028816 - RNA, 19 nt, Artificial Sequence
  Description of Artificial Sequence: Synthetic oligonucleotide
ucuuguaaacuagucuuuc

SEQ ID NO: 2028817 - RNA, 19 nt, Artificial Sequence
  Description of Artificial Sequence: Synthetic oligonucleotide
acacuccuuaaugaagaac

SEQ ID NO: 2028818 - RNA, 19 nt, Artificial Sequence
  Description of Artificial Sequence: Synthetic oligonucleotide
aagaacacaggaguuugaa

SEQ ID NO: 2028819 - RNA, 19 nt, Artificial Sequence
  Description of Artificial Sequence: Synthetic oligonucleotide
guagcuacauccugcugug

SEQ ID NO: 2028820 - RNA, 19 nt, Artificial Sequence
  Description of Artificial Sequence: Synthetic oligonucleotide
acaauuuagccagaccacu

SEQ ID NO: 2028821 - RNA, 19 nt, Artificial Sequence
  Description of Artificial Sequence: Synthetic oligonucleotide
agaugucguaauaacaaga

SEQ ID NO: 2028822 - RNA, 19 nt, Artificial Sequence
  Description of Artificial Sequence: Synthetic oligonucleotide
cucagaugucguaauaaca

SEQ ID NO: 2028823 - RNA, 19 nt, Artificial Sequence
  Description of Artificial Sequence: Synthetic oligonucleotide
gacaucaaaagauacuguu

SEQ ID NO: 2028824 - RNA, 19 nt, Artificial Sequence
  Description of Artificial Sequence: Synthetic oligonucleotide
uaagaguauucaacccaac

SEQ ID NO: 2028825 - RNA, 19 nt, Artificial Sequence
  Description of Artificial Sequence: Synthetic oligonucleotide
cauagguuaggauguccac

SEQ ID NO: 2028826 - RNA, 19 nt, Artificial Sequence
  Description of Artificial Sequence: Synthetic oligonucleotide
uuuuaguaucaggagcuuc

SEQ ID NO: 2028827 - RNA, 19 nt, Artificial Sequence
  Description of Artificial Sequence: Synthetic oligonucleotide
uguagcuggcaucuucaaa

SEQ ID NO: 2028828 - RNA, 19 nt, Artificial Sequence
  Description of Artificial Sequence: Synthetic oligonucleotide
acggucuccaacucgugug

SEQ ID NO: 2028829 - RNA, 19 nt, Artificial Sequence
  Description of Artificial Sequence: Synthetic oligonucleotide
ucugagaaaguagcuacau

SEQ ID NO: 2028830 - RNA, 19 nt, Artificial Sequence
  Description of Artificial Sequence: Synthetic oligonucleotide
agggagacaccugaaucac

SEQ ID NO: 2028831 - RNA, 19 nt, Artificial Sequence
  Description of Artificial Sequence: Synthetic oligonucleotide
acuuuaacccaaccuucca

SEQ ID NO: 2028832 - RNA, 19 nt, Artificial Sequence
  Description of Artificial Sequence: Synthetic oligonucleotide
cugcuauuaccagauaaug

SEQ ID NO: 2028833 - RNA, 19 nt, Artificial Sequence
  Description of Artificial Sequence: Synthetic oligonucleotide
auagguuaggauguccaca

SEQ ID NO: 2028834 - RNA, 19 nt, Artificial Sequence
  Description of Artificial Sequence: Synthetic oligonucleotide
cauacaacuuuaaauuugu

SEQ ID NO: 2028835 - RNA, 19 nt, Artificial Sequence
  Description of Artificial Sequence: Synthetic oligonucleotide
uaaguccacuuaucaaaac

SEQ ID NO: 2028836 - RNA, 19 nt, Artificial Sequence
  Description of Artificial Sequence: Synthetic oligonucleotide
ccuguaagcucugagaaag

SEQ ID NO: 2028837 - RNA, 19 nt, Artificial Sequence
  Description of Artificial Sequence: Synthetic oligonucleotide
ugcugcauacucucaagau

SEQ ID NO: 2028838 - RNA, 19 nt, Artificial Sequence
  Description of Artificial Sequence: Synthetic oligonucleotide
ucguaauaacaagaacaca

SEQ ID NO: 2028839 - RNA, 19 nt, Artificial Sequence
  Description of Artificial Sequence: Synthetic oligonucleotide
cucuauuacacagcaggac

SEQ ID NO: 2028840 - RNA, 19 nt, Artificial Sequence
  Description of Artificial Sequence: Synthetic oligonucleotide
uguaagcucugagaaagua

SEQ ID NO: 2028841 - RNA, 19 nt, Artificial Sequence
  Description of Artificial Sequence: Synthetic oligonucleotide
cuucucuucauagguuagg

SEQ ID NO: 2028842 - RNA, 19 nt, Artificial Sequence
  Description of Artificial Sequence: Synthetic oligonucleotide
ugguaccaggcaauuuagc

SEQ ID NO: 2028843 - RNA, 19 nt, Artificial Sequence
  Description of Artificial Sequence: Synthetic oligonucleotide
guccacuuaucaaaacucc

SEQ ID NO: 2028844 - RNA, 19 nt, Artificial Sequence
  Description of Artificial Sequence: Synthetic oligonucleotide
guagugguacuccgagggg

SEQ ID NO: 2028845 - RNA, 19 nt, Artificial Sequence
  Description of Artificial Sequence: Synthetic oligonucleotide
gcugcauacucucaagaug

SEQ ID NO: 2028846 - RNA, 19 nt, Artificial Sequence
  Description of Artificial Sequence: Synthetic oligonucleotide
uuaguaucaggagcuucug

SEQ ID NO: 2028847 - RNA, 19 nt, Artificial Sequence
  Description of Artificial Sequence: Synthetic oligonucleotide
uuuuaguacccaggagagc

SEQ ID NO: 2028848 - RNA, 19 nt, Artificial Sequence
  Description of Artificial Sequence: Synthetic oligonucleotide
ccacaauuuagccagacca

SEQ ID NO: 2028849 - RNA, 19 nt, Artificial Sequence
  Description of Artificial Sequence: Synthetic oligonucleotide
uaacccaaccuuccauaac

SEQ ID NO: 2028850 - RNA, 19 nt, Artificial Sequence
  Description of Artificial Sequence: Synthetic oligonucleotide
gcucugagaaaguagcuac

SEQ ID NO: 2028851 - RNA, 19 nt, Artificial Sequence
  Description of Artificial Sequence: Synthetic oligonucleotide
ugcauacucucaagauggc

SEQ ID NO: 2028852 - RNA, 19 nt, Artificial Sequence
  Description of Artificial Sequence: Synthetic oligonucleotide
gcaauuuagccacagucuc

SEQ ID NO: 2028853 - RNA, 19 nt, Artificial Sequence
  Description of Artificial Sequence: Synthetic oligonucleotide
uucaguccaacuccguguu

SEQ ID NO: 2028854 - RNA, 19 nt, Artificial Sequence
  Description of Artificial Sequence: Synthetic oligonucleotide
aacuagucuuucauaugcu

SEQ ID NO: 2028855 - RNA, 19 nt, Artificial Sequence
  Description of Artificial Sequence: Synthetic oligonucleotide
auaccagacacuccuuaau

SEQ ID NO: 2028856 - RNA, 19 nt, Artificial Sequence
  Description of Artificial Sequence: Synthetic oligonucleotide
uucugggaccauaacuuua

SEQ ID NO: 2028857 - RNA, 19 nt, Artificial Sequence
  Description of Artificial Sequence: Synthetic oligonucleotide
ucuccaacucgugugugca

SEQ ID NO: 2028858 - RNA, 19 nt, Artificial Sequence
  Description of Artificial Sequence: Synthetic oligonucleotide
ugaaagcaccgcccuguug

SEQ ID NO: 2028859 - RNA, 19 nt, Artificial Sequence
  Description of Artificial Sequence: Synthetic oligonucleotide
ggcauuuuaguacccagga

SEQ ID NO: 2028860 - RNA, 19 nt, Artificial Sequence
  Description of Artificial Sequence: Synthetic oligonucleotide
cuauuaccagauaaugcaa

SEQ ID NO: 2028861 - RNA, 19 nt, Artificial Sequence
  Description of Artificial Sequence: Synthetic oligonucleotide
aucuucgguaucuccaaau

SEQ ID NO: 2028862 - RNA, 19 nt, Artificial Sequence
  Description of Artificial Sequence: Synthetic oligonucleotide
aacccaacacuuguucccu

SEQ ID NO: 2028863 - RNA, 19 nt, Artificial Sequence
  Description of Artificial Sequence: Synthetic oligonucleotide
agcaguuguuugaauuggg

SEQ ID NO: 2028864 - RNA, 19 nt, Artificial Sequence
  Description of Artificial Sequence: Synthetic oligonucleotide
aaaggggcuggaaauuuaa

SEQ ID NO: 2028865 - RNA, 19 nt, Artificial Sequence
  Description of Artificial Sequence: Synthetic oligonucleotide
ucauaugcuguagcuggca

SEQ ID NO: 2028866 - RNA, 19 nt, Artificial Sequence
  Description of Artificial Sequence: Synthetic oligonucleotide
caggaguuugaacauacaa

SEQ ID NO: 2028867 - RNA, 19 nt, Artificial Sequence
  Description of Artificial Sequence: Synthetic oligonucleotide
aggauugauaucuccugua

SEQ ID NO: 2028868 - RNA, 19 nt, Artificial Sequence
  Description of Artificial Sequence: Synthetic oligonucleotide
guauucaacccaacacuug

SEQ ID NO: 2028869 - RNA, 19 nt, Artificial Sequence
  Description of Artificial Sequence: Synthetic oligonucleotide
gaccauaacuuuaacccaa

SEQ ID NO: 2028870 - RNA, 19 nt, Artificial Sequence
  Description of Artificial Sequence: Synthetic oligonucleotide
aaagcaccgcccuguuggu

SEQ ID NO: 2028871 - RNA, 19 nt, Artificial Sequence
  Description of Artificial Sequence: Synthetic oligonucleotide
cugagaaaguagcuacauc

SEQ ID NO: 2028872 - RNA, 19 nt, Artificial Sequence
  Description of Artificial Sequence: Synthetic oligonucleotide
cuccuguaagcucugagaa

SEQ ID NO: 2028873 - RNA, 19 nt, Artificial Sequence
  Description of Artificial Sequence: Synthetic oligonucleotide
auauauaaaggggcuggaa

SEQ ID NO: 2028874 - RNA, 19 nt, Artificial Sequence
  Description of Artificial Sequence: Synthetic oligonucleotide
caugcacaauugucuuucc

SEQ ID NO: 2028875 - RNA, 19 nt, Artificial Sequence
  Description of Artificial Sequence: Synthetic oligonucleotide
caacgucccacuuccucag

SEQ ID NO: 2028876 - RNA, 19 nt, Artificial Sequence
  Description of Artificial Sequence: Synthetic oligonucleotide
cucgugugugcacaugcug

SEQ ID NO: 2028877 - RNA, 19 nt, Artificial Sequence
  Description of Artificial Sequence: Synthetic oligonucleotide
agguuaggauguccacagg

SEQ ID NO: 2028878 - RNA, 19 nt, Artificial Sequence
  Description of Artificial Sequence: Synthetic oligonucleotide
augcugaaagcaccgcccu

SEQ ID NO: 2028879 - RNA, 19 nt, Artificial Sequence
  Description of Artificial Sequence: Synthetic oligonucleotide
uuuccaaacuugguguguu

SEQ ID NO: 2028880 - RNA, 19 nt, Artificial Sequence
  Description of Artificial Sequence: Synthetic oligonucleotide
gacaccugaaucacucuga

SEQ ID NO: 2028881 - RNA, 19 nt, Artificial Sequence
  Description of Artificial Sequence: Synthetic oligonucleotide
ugcugaaagcaccgcccug

SEQ ID NO: 2028882 - RNA, 19 nt, Artificial Sequence
  Description of Artificial Sequence: Synthetic oligonucleotide
uacuccgaggggcucuugu

SEQ ID NO: 2028883 - RNA, 19 nt, Artificial Sequence
  Description of Artificial Sequence: Synthetic oligonucleotide
gcauuuuaguacccaggag

SEQ ID NO: 2028884 - RNA, 19 nt, Artificial Sequence
  Description of Artificial Sequence: Synthetic oligonucleotide
uccccacauggcuuccagg

SEQ ID NO: 2028885 - RNA, 19 nt, Artificial Sequence
  Description of Artificial Sequence: Synthetic oligonucleotide
gucuccaacucgugugugc

SEQ ID NO: 2028886 - RNA, 19 nt, Artificial Sequence
  Description of Artificial Sequence: Synthetic oligonucleotide
auaaaggggcuggaaauuu

SEQ ID NO: 2028887 - RNA, 19 nt, Artificial Sequence
  Description of Artificial Sequence: Synthetic oligonucleotide
guucccugcuauuaccaga

SEQ ID NO: 2028888 - RNA, 19 nt, Artificial Sequence
  Description of Artificial Sequence: Synthetic oligonucleotide
aaccuuccauaacugucuu

SEQ ID NO: 2028889 - RNA, 19 nt, Artificial Sequence
  Description of Artificial Sequence: Synthetic oligonucleotide
auuuagccacagucuccuc

SEQ ID NO: 2028890 - RNA, 19 nt, Artificial Sequence
  Description of Artificial Sequence: Synthetic oligonucleotide
gguaaagcagcaccgaccu

SEQ ID NO: 2028891 - RNA, 19 nt, Artificial Sequence
  Description of Artificial Sequence: Synthetic oligonucleotide
ggcccuggcauuuuaguac

SEQ ID NO: 2028892 - RNA, 19 nt, Artificial Sequence
  Description of Artificial Sequence: Synthetic oligonucleotide
acaccugaaucacucugaa

SEQ ID NO: 2028893 - RNA, 19 nt, Artificial Sequence
  Description of Artificial Sequence: Synthetic oligonucleotide
ccaaccuuccauaacuguc

SEQ ID NO: 2028894 - RNA, 19 nt, Artificial Sequence
  Description of Artificial Sequence: Synthetic oligonucleotide
ggaccauaacuuuaaccca

SEQ ID NO: 2028895 - RNA, 19 nt, Artificial Sequence
  Description of Artificial Sequence: Synthetic oligonucleotide
uccgaggggcucuuguaaa

SEQ ID NO: 2028896 - RNA, 19 nt, Artificial Sequence
  Description of Artificial Sequence: Synthetic oligonucleotide
ucucaagauggcugacaaa

SEQ ID NO: 2028897 - RNA, 19 nt, Artificial Sequence
  Description of Artificial Sequence: Synthetic oligonucleotide
caguuguuugaauugggcu

SEQ ID NO: 2028898 - RNA, 19 nt, Artificial Sequence
  Description of Artificial Sequence: Synthetic oligonucleotide
acagguaaagcagcaccga

SEQ ID NO: 2028899 - RNA, 19 nt, Artificial Sequence
  Description of Artificial Sequence: Synthetic oligonucleotide
guauaccagacacuccuua

SEQ ID NO: 2028900 - RNA, 19 nt, Artificial Sequence
  Description of Artificial Sequence: Synthetic oligonucleotide
uuccucagaugucguaaua

SEQ ID NO: 2028901 - RNA, 19 nt, Artificial Sequence
  Description of Artificial Sequence: Synthetic oligonucleotide
caccugaaucacucugaag

SEQ ID NO: 2028902 - RNA, 19 nt, Artificial Sequence
  Description of Artificial Sequence: Synthetic oligonucleotide
ugggcuguauucaguccaa

SEQ ID NO: 2028903 - RNA, 19 nt, Artificial Sequence
  Description of Artificial Sequence: Synthetic oligonucleotide
caaccuuccauaacugucu

SEQ ID NO: 2028904 - RNA, 19 nt, Artificial Sequence
  Description of Artificial Sequence: Synthetic oligonucleotide
gugugaaggcucugcugag

SEQ ID NO: 2028905 - RNA, 19 nt, Artificial Sequence
  Description of Artificial Sequence: Synthetic oligonucleotide
cuccguguucuugaaacuc

SEQ ID NO: 2028906 - RNA, 19 nt, Artificial Sequence
  Description of Artificial Sequence: Synthetic oligonucleotide
ggagacaccugaaucacuc

SEQ ID NO: 2028907 - RNA, 19 nt, Artificial Sequence
  Description of Artificial Sequence: Synthetic oligonucleotide
ccucagaugucguaauaac

SEQ ID NO: 2028908 - RNA, 19 nt, Artificial Sequence
  Description of Artificial Sequence: Synthetic oligonucleotide
ggauugauaucuccuguaa

SEQ ID NO: 2028909 - RNA, 19 nt, Artificial Sequence
  Description of Artificial Sequence: Synthetic oligonucleotide
gacacuccuuaaugaagaa

SEQ ID NO: 2028910 - RNA, 19 nt, Artificial Sequence
  Description of Artificial Sequence: Synthetic oligonucleotide
ccagauaaugcaaggagaa

SEQ ID NO: 2028911 - RNA, 19 nt, Artificial Sequence
  Description of Artificial Sequence: Synthetic oligonucleotide
gaaggcacacuucuuguuu

SEQ ID NO: 2028912 - RNA, 19 nt, Artificial Sequence
  Description of Artificial Sequence: Synthetic oligonucleotide
uccaugcacaauugucuuu

SEQ ID NO: 2028913 - RNA, 19 nt, Artificial Sequence
  Description of Artificial Sequence: Synthetic oligonucleotide
guuguuugaauugggcugu

SEQ ID NO: 2028914 - RNA, 19 nt, Artificial Sequence
  Description of Artificial Sequence: Synthetic oligonucleotide
gguuaggauguccacaggu

SEQ ID NO: 2028915 - RNA, 19 nt, Artificial Sequence
  Description of Artificial Sequence: Synthetic oligonucleotide
acucucaagauggcugaca

SEQ ID NO: 2028916 - RNA, 19 nt, Artificial Sequence
  Description of Artificial Sequence: Synthetic oligonucleotide
cugaaucacucugaaggca

SEQ ID NO: 2028917 - RNA, 19 nt, Artificial Sequence
  Description of Artificial Sequence: Synthetic oligonucleotide
guuugaauugggcuguauu

SEQ ID NO: 2028918 - RNA, 19 nt, Artificial Sequence
  Description of Artificial Sequence: Synthetic oligonucleotide
caaagagcuccacaauuua

SEQ ID NO: 2028919 - RNA, 19 nt, Artificial Sequence
  Description of Artificial Sequence: Synthetic oligonucleotide
guuaggauguccacaggua

SEQ ID NO: 2028920 - RNA, 19 nt, Artificial Sequence
  Description of Artificial Sequence: Synthetic oligonucleotide
ccaauauauaaaggggcug

SEQ ID NO: 2028921 - RNA, 19 nt, Artificial Sequence
  Description of Artificial Sequence: Synthetic oligonucleotide
aacgucccacuuccucaga

SEQ ID NO: 2028922 - RNA, 19 nt, Artificial Sequence
  Description of Artificial Sequence: Synthetic oligonucleotide
cugaagcccacuccacauc

SEQ ID NO: 2028923 - RNA, 19 nt, Artificial Sequence
  Description of Artificial Sequence: Synthetic oligonucleotide
cuucgguaucuccaaaugu

SEQ ID NO: 2028924 - RNA, 19 nt, Artificial Sequence
  Description of Artificial Sequence: Synthetic oligonucleotide
agcuggcaucuucaaacau

SEQ ID NO: 2028925 - RNA, 19 nt, Artificial Sequence
  Description of Artificial Sequence: Synthetic oligonucleotide
caccgaccuccccaaacag

SEQ ID NO: 2028926 - RNA, 19 nt, Artificial Sequence
  Description of Artificial Sequence: Synthetic oligonucleotide
gcccacuccacaucuucgg

SEQ ID NO: 2028927 - RNA, 19 nt, Artificial Sequence
  Description of Artificial Sequence: Synthetic oligonucleotide
agggcugaaacaagcaguu

SEQ ID NO: 2028928 - RNA, 19 nt, Artificial Sequence
  Description of Artificial Sequence: Synthetic oligonucleotide
augucaucaauaggggcuu

SEQ ID NO: 2028929 - RNA, 19 nt, Artificial Sequence
  Description of Artificial Sequence: Synthetic oligonucleotide
uagccagaccacugcugca

SEQ ID NO: 2028930 - RNA, 19 nt, Artificial Sequence
  Description of Artificial Sequence: Synthetic oligonucleotide
ucaguccaacuccguguuc

SEQ ID NO: 2028931 - RNA, 19 nt, Artificial Sequence
  Description of Artificial Sequence: Synthetic oligonucleotide
cuccacaauuuagccagac

SEQ ID NO: 2028932 - RNA, 19 nt, Artificial Sequence
  Description of Artificial Sequence: Synthetic oligonucleotide
uguuugaauugggcuguau

SEQ ID NO: 2028933 - RNA, 19 nt, Artificial Sequence
  Description of Artificial Sequence: Synthetic oligonucleotide
gcuacauccugcuguguga

SEQ ID NO: 2028934 - RNA, 19 nt, Artificial Sequence
  Description of Artificial Sequence: Synthetic oligonucleotide
uguugguaccaggcaauuu

SEQ ID NO: 2028935 - RNA, 19 nt, Artificial Sequence
  Description of Artificial Sequence: Synthetic oligonucleotide
gguguguuuugcauaaucu

SEQ ID NO: 2028936 - RNA, 19 nt, Artificial Sequence
  Description of Artificial Sequence: Synthetic oligonucleotide
gagcuucugggaccauaac

SEQ ID NO: 2028937 - RNA, 19 nt, Artificial Sequence
  Description of Artificial Sequence: Synthetic oligonucleotide
cuucauagguuaggauguc

SEQ ID NO: 2028938 - RNA, 19 nt, Artificial Sequence
  Description of Artificial Sequence: Synthetic oligonucleotide
cugggaccauaacuuuaac

SEQ ID NO: 2028939 - RNA, 19 nt, Artificial Sequence
  Description of Artificial Sequence: Synthetic oligonucleotide
cuuuaacccaaccuuccau

SEQ ID NO: 2028940 - RNA, 19 nt, Artificial Sequence
  Description of Artificial Sequence: Synthetic oligonucleotide
ggcaauuuagccacagucu

SEQ ID NO: 2028941 - RNA, 19 nt, Artificial Sequence
  Description of Artificial Sequence: Synthetic oligonucleotide
cagucuauguagacaucaa

SEQ ID NO: 2028942 - RNA, 19 nt, Artificial Sequence
  Description of Artificial Sequence: Synthetic oligonucleotide
ugguacuccgaggggcucu

SEQ ID NO: 2028943 - RNA, 19 nt, Artificial Sequence
  Description of Artificial Sequence: Synthetic oligonucleotide
cuccaacucgugugugcac

SEQ ID NO: 2028944 - RNA, 19 nt, Artificial Sequence
  Description of Artificial Sequence: Synthetic oligonucleotide
uacucucaagauggcugac

SEQ ID NO: 2028945 - RNA, 19 nt, Artificial Sequence
  Description of Artificial Sequence: Synthetic oligonucleotide
acccaaccuuccauaacug

SEQ ID NO: 2028946 - RNA, 19 nt, Artificial Sequence
  Description of Artificial Sequence: Synthetic oligonucleotide
gcuuccagguauaccagac

SEQ ID NO: 2028947 - RNA, 19 nt, Artificial Sequence
  Description of Artificial Sequence: Synthetic oligonucleotide
agccagaccacugcugcau

SEQ ID NO: 2028948 - RNA, 19 nt, Artificial Sequence
  Description of Artificial Sequence: Synthetic oligonucleotide
auaucuccuguaagcucug

SEQ ID NO: 2028949 - RNA, 19 nt, Artificial Sequence
  Description of Artificial Sequence: Synthetic oligonucleotide
acuccgaggggcucuugua

SEQ ID NO: 2028950 - RNA, 19 nt, Artificial Sequence
  Description of Artificial Sequence: Synthetic oligonucleotide
gaauugggcuguauucagu

SEQ ID NO: 2028951 - RNA, 19 nt, Artificial Sequence
  Description of Artificial Sequence: Synthetic oligonucleotide
gagacaccugaaucacucu

SEQ ID NO: 2028952 - RNA, 19 nt, Artificial Sequence
  Description of Artificial Sequence: Synthetic oligonucleotide
ggauguccacagguaaagc

SEQ ID NO: 2028953 - RNA, 19 nt, Artificial Sequence
  Description of Artificial Sequence: Synthetic oligonucleotide
auucaacccaacacuuguu

SEQ ID NO: 2028954 - RNA, 19 nt, Artificial Sequence
  Description of Artificial Sequence: Synthetic oligonucleotide
acucgugugugcacaugcu

SEQ ID NO: 2028955 - RNA, 19 nt, Artificial Sequence
  Description of Artificial Sequence: Synthetic oligonucleotide
guccaacuccguguucuug

SEQ ID NO: 2028956 - RNA, 19 nt, Artificial Sequence
  Description of Artificial Sequence: Synthetic oligonucleotide
cagauaaugcaaggagaaa

SEQ ID NO: 2028957 - RNA, 19 nt, Artificial Sequence
  Description of Artificial Sequence: Synthetic oligonucleotide
cuaaaaccacuucuccaau

SEQ ID NO: 2028958 - RNA, 19 nt, Artificial Sequence
  Description of Artificial Sequence: Synthetic oligonucleotide
aguacccaggagagcagaa

SEQ ID NO: 2028959 - RNA, 19 nt, Artificial Sequence
  Description of Artificial Sequence: Synthetic oligonucleotide
aggcucugcugagcucagc

SEQ ID NO: 2028960 - RNA, 19 nt, Artificial Sequence
  Description of Artificial Sequence: Synthetic oligonucleotide
gcaccgaccuccccaaaca

SEQ ID NO: 2028961 - RNA, 19 nt, Artificial Sequence
  Description of Artificial Sequence: Synthetic oligonucleotide
gagcagaaauaaguccacu

SEQ ID NO: 2028962 - RNA, 19 nt, Artificial Sequence
  Description of Artificial Sequence: Synthetic oligonucleotide
caacucgugugugcacaug

SEQ ID NO: 2028963 - RNA, 19 nt, Artificial Sequence
  Description of Artificial Sequence: Synthetic oligonucleotide
cccugcuauuaccagauaa

SEQ ID NO: 2028964 - RNA, 19 nt, Artificial Sequence
  Description of Artificial Sequence: Synthetic oligonucleotide
caguccaacuccguguucu

SEQ ID NO: 2028965 - RNA, 19 nt, Artificial Sequence
  Description of Artificial Sequence: Synthetic oligonucleotide
ggagcuucugggaccauaa

SEQ ID NO: 2028966 - RNA, 19 nt, Artificial Sequence
  Description of Artificial Sequence: Synthetic oligonucleotide
guacccaggagagcagaaa

SEQ ID NO: 2028967 - RNA, 19 nt, Artificial Sequence
  Description of Artificial Sequence: Synthetic oligonucleotide
cauaugcuguagcuggcau

SEQ ID NO: 2028968 - RNA, 19 nt, Artificial Sequence
  Description of Artificial Sequence: Synthetic oligonucleotide
uuguuugaauugggcugua

SEQ ID NO: 2028969 - RNA, 19 nt, Artificial Sequence
  Description of Artificial Sequence: Synthetic oligonucleotide
ucccugcuauuaccagaua

SEQ ID NO: 2028970 - RNA, 19 nt, Artificial Sequence
  Description of Artificial Sequence: Synthetic oligonucleotide
aggagcuucugggaccaua

SEQ ID NO: 2028971 - RNA, 19 nt, Artificial Sequence
  Description of Artificial Sequence: Synthetic oligonucleotide
cgcccuguugguaccaggc

SEQ ID NO: 2028972 - RNA, 19 nt, Artificial Sequence
  Description of Artificial Sequence: Synthetic oligonucleotide
ccaggcaauuuagccacag

SEQ ID NO: 2028973 - RNA, 19 nt, Artificial Sequence
  Description of Artificial Sequence: Synthetic oligonucleotide
ggcugacaaagucuucucu

SEQ ID NO: 2028974 - RNA, 19 nt, Artificial Sequence
  Description of Artificial Sequence: Synthetic oligonucleotide
uagcuacauccugcugugu

SEQ ID NO: 2028975 - RNA, 19 nt, Artificial Sequence
  Description of Artificial Sequence: Synthetic oligonucleotide
cuccaugcacaauugucuu

SEQ ID NO: 2028976 - RNA, 19 nt, Artificial Sequence
  Description of Artificial Sequence: Synthetic oligonucleotide
gaccacugcugcauacucu

SEQ ID NO: 2028977 - RNA, 19 nt, Artificial Sequence
  Description of Artificial Sequence: Synthetic oligonucleotide
gucaucaauaggggcuuua

SEQ ID NO: 2028978 - RNA, 19 nt, Artificial Sequence
  Description of Artificial Sequence: Synthetic oligonucleotide
ccucugaagcccacuccac

SEQ ID NO: 2028979 - RNA, 19 nt, Artificial Sequence
  Description of Artificial Sequence: Synthetic oligonucleotide
aagcaccgcccuguuggua

SEQ ID NO: 2028980 - RNA, 19 nt, Artificial Sequence
  Description of Artificial Sequence: Synthetic oligonucleotide
ggucuccaacucgugugug

SEQ ID NO: 2028981 - RNA, 19 nt, Artificial Sequence
  Description of Artificial Sequence: Synthetic oligonucleotide
cacggucuccaacucgugu

SEQ ID NO: 2028982 - RNA, 19 nt, Artificial Sequence
  Description of Artificial Sequence: Synthetic oligonucleotide
accgcccuguugguaccag

SEQ ID NO: 2028983 - RNA, 19 nt, Artificial Sequence
  Description of Artificial Sequence: Synthetic oligonucleotide
guauucaguccaacuccgu

SEQ ID NO: 2028984 - RNA, 19 nt, Artificial Sequence
  Description of Artificial Sequence: Synthetic oligonucleotide
ccgaccuccccaaacaggu

SEQ ID NO: 2028985 - RNA, 19 nt, Artificial Sequence
  Description of Artificial Sequence: Synthetic oligonucleotide
gcagaugcuaaaaccacuu

SEQ ID NO: 2028986 - RNA, 19 nt, Artificial Sequence
  Description of Artificial Sequence: Synthetic oligonucleotide
cccuguugguaccaggcaa

SEQ ID NO: 2028987 - RNA, 19 nt, Artificial Sequence
  Description of Artificial Sequence: Synthetic oligonucleotide
gcccuguugguaccaggca

SEQ ID NO: 2028988 - RNA, 19 nt, Artificial Sequence
  Description of Artificial Sequence: Synthetic oligonucleotide
cgucccacuuccucagaug

SEQ ID NO: 2028989 - RNA, 19 nt, Artificial Sequence
  Description of Artificial Sequence: Synthetic oligonucleotide
gcauacucucaagauggcu

SEQ ID NO: 2028990 - RNA, 19 nt, Artificial Sequence
  Description of Artificial Sequence: Synthetic oligonucleotide
accaggcaauuuagccaca

SEQ ID NO: 2028991 - RNA, 19 nt, Artificial Sequence
  Description of Artificial Sequence: Synthetic oligonucleotide
gugguacuccgaggggcuc

SEQ ID NO: 2028992 - RNA, 19 nt, Artificial Sequence
  Description of Artificial Sequence: Synthetic oligonucleotide
gcaccgcccuguugguacc

SEQ ID NO: 2028993 - RNA, 19 nt, Artificial Sequence
  Description of Artificial Sequence: Synthetic oligonucleotide
ccgcccuguugguaccagg

SEQ ID NO: 2028994 - RNA, 19 nt, Artificial Sequence
  Description of Artificial Sequence: Synthetic oligonucleotide
cucugaaggcacacuucuu

SEQ ID NO: 2028995 - RNA, 19 nt, Artificial Sequence
  Description of Artificial Sequence: Synthetic oligonucleotide
gggcuguauucaguccaac

SEQ ID NO: 2028996 - RNA, 19 nt, Artificial Sequence
  Description of Artificial Sequence: Synthetic oligonucleotide
ggggcucuuguaaacuagu

SEQ ID NO: 2028997 - RNA, 19 nt, Artificial Sequence
  Description of Artificial Sequence: Synthetic oligonucleotide
guacuccgaggggcucuug

SEQ ID NO: 2028998 - RNA, 19 nt, Artificial Sequence
  Description of Artificial Sequence: Synthetic oligonucleotide
ccuguugguaccaggcaau

SEQ ID NO: 2028999 - RNA, 19 nt, Artificial Sequence
  Description of Artificial Sequence: Synthetic oligonucleotide
cugaaagcaccgcccuguu

SEQ ID NO: 2029000 - RNA, 19 nt, Artificial Sequence
  Description of Artificial Sequence: Synthetic oligonucleotide
cuguugguaccaggcaauu

SEQ ID NO: 2029001 - RNA, 19 nt, Artificial Sequence
  Description of Artificial Sequence: Synthetic oligonucleotide
gggagacaccugaaucacu

SEQ ID NO: 2029002 - RNA, 19 nt, Artificial Sequence
  Description of Artificial Sequence: Synthetic oligonucleotide
gcuccacaauuuagccaga

SEQ ID NO: 2029003 - RNA, 19 nt, Artificial Sequence
  Description of Artificial Sequence: Synthetic oligonucleotide
cccacauggcuuccaggua

SEQ ID NO: 2029004 - RNA, 19 nt, Artificial Sequence
  Description of Artificial Sequence: Synthetic oligonucleotide
caccgcccuguugguacca

SEQ ID NO: 2029005 - RNA, 19 nt, Artificial Sequence
  Description of Artificial Sequence: Synthetic oligonucleotide
cgaccuccccaaacagguc

SEQ ID NO: 2029006 - RNA, 19 nt, Artificial Sequence
  Description of Artificial Sequence: Synthetic oligonucleotide
cccacuccacaucuucggu

SEQ ID NO: 2029007 - RNA, 19 nt, Artificial Sequence
  Description of Artificial Sequence: Synthetic oligonucleotide
agccuggcccuggcauuuu

SEQ ID NO: 2029008 - RNA, 19 nt, Artificial Sequence
  Description of Artificial Sequence: Synthetic oligonucleotide
gccuggcccuggcauuuua

SEQ ID NO: 2029009 - RNA, 19 nt, Artificial Sequence
  Description of Artificial Sequence: Synthetic oligonucleotide
gguacuccgaggggcucuu

SEQ ID NO: 2029010 - RNA, 19 nt, Artificial Sequence
  Description of Artificial Sequence: Synthetic oligonucleotide
cgaggggcucuuguaaacu

SEQ ID NO: 2029011 - RNA, 19 nt, Artificial Sequence
  Description of Artificial Sequence: Synthetic oligonucleotide
gggcuuuagccugcuucuu

SEQ ID NO: 2029012 - RNA, 19 nt, Artificial Sequence
  Description of Artificial Sequence: Synthetic oligonucleotide
uguaaugugaccaaggcag

SEQ ID NO: 2029013 - RNA, 19 nt, Artificial Sequence
  Description of Artificial Sequence: Synthetic oligonucleotide
agucauuucauuaugacag

SEQ ID NO: 2029014 - RNA, 19 nt, Artificial Sequence
  Description of Artificial Sequence: Synthetic oligonucleotide
aaucugaagagucauuuca

SEQ ID NO: 2029015 - RNA, 19 nt, Artificial Sequence
  Description of Artificial Sequence: Synthetic oligonucleotide
uucuaauucacacugccca

SEQ ID NO: 2029016 - RNA, 19 nt, Artificial Sequence
  Description of Artificial Sequence: Synthetic oligonucleotide
auaccugcuaaguaauucc

SEQ ID NO: 2029017 - RNA, 19 nt, Artificial Sequence
  Description of Artificial Sequence: Synthetic oligonucleotide
cuuaaagucuucaacccgg

SEQ ID NO: 2029018 - RNA, 19 nt, Artificial Sequence
  Description of Artificial Sequence: Synthetic oligonucleotide
cuugauuugucacuuaaag

SEQ ID NO: 2029019 - RNA, 19 nt, Artificial Sequence
  Description of Artificial Sequence: Synthetic oligonucleotide
ucuaccucuucaaaacucg

SEQ ID NO: 2029020 - RNA, 19 nt, Artificial Sequence
  Description of Artificial Sequence: Synthetic oligonucleotide
aaaacucgucucuaaauga

SEQ ID NO: 2029021 - RNA, 19 nt, Artificial Sequence
  Description of Artificial Sequence: Synthetic oligonucleotide
uacuuuguuaaguacggag

SEQ ID NO: 2029022 - RNA, 19 nt, Artificial Sequence
  Description of Artificial Sequence: Synthetic oligonucleotide
uuuucuaccucuucaaaac

SEQ ID NO: 2029023 - RNA, 19 nt, Artificial Sequence
  Description of Artificial Sequence: Synthetic oligonucleotide
aagucuucaacccggacgu

SEQ ID NO: 2029024 - RNA, 19 nt, Artificial Sequence
  Description of Artificial Sequence: Synthetic oligonucleotide
uccaaaugcagcaaguggu

SEQ ID NO: 2029025 - RNA, 19 nt, Artificial Sequence
  Description of Artificial Sequence: Synthetic oligonucleotide
uguguaaugugaccaaggc

SEQ ID NO: 2029026 - RNA, 19 nt, Artificial Sequence
  Description of Artificial Sequence: Synthetic oligonucleotide
agagucauuucauuaugac

SEQ ID NO: 2029027 - RNA, 19 nt, Artificial Sequence
  Description of Artificial Sequence: Synthetic oligonucleotide
uucauuaugacagggguug

SEQ ID NO: 2029028 - RNA, 19 nt, Artificial Sequence
  Description of Artificial Sequence: Synthetic oligonucleotide
auuucauuaugacaggggu

SEQ ID NO: 2029029 - RNA, 19 nt, Artificial Sequence
  Description of Artificial Sequence: Synthetic oligonucleotide
uccucaaagaacuucugcc

SEQ ID NO: 2029030 - RNA, 19 nt, Artificial Sequence
  Description of Artificial Sequence: Synthetic oligonucleotide
ugcuaaguaauuccagucc

SEQ ID NO: 2029031 - RNA, 19 nt, Artificial Sequence
  Description of Artificial Sequence: Synthetic oligonucleotide
uaaaccaggggacagcaca

SEQ ID NO: 2029032 - RNA, 19 nt, Artificial Sequence
  Description of Artificial Sequence: Synthetic oligonucleotide
cuguacauccuccucaucg

SEQ ID NO: 2029033 - RNA, 19 nt, Artificial Sequence
  Description of Artificial Sequence: Synthetic oligonucleotide
acuuuguuaaguacggagc

SEQ ID NO: 2029034 - RNA, 19 nt, Artificial Sequence
  Description of Artificial Sequence: Synthetic oligonucleotide
acuuaaagucuucaacccg

SEQ ID NO: 2029035 - RNA, 19 nt, Artificial Sequence
  Description of Artificial Sequence: Synthetic oligonucleotide
uuaaguacggagcacuccu

SEQ ID NO: 2029036 - RNA, 19 nt, Artificial Sequence
  Description of Artificial Sequence: Synthetic oligonucleotide
ucuaaaugagccaggcuug

SEQ ID NO: 2029037 - RNA, 19 nt, Artificial Sequence
  Description of Artificial Sequence: Synthetic oligonucleotide
ucaucggacuggaugaggg

SEQ ID NO: 2029038 - RNA, 19 nt, Artificial Sequence
  Description of Artificial Sequence: Synthetic oligonucleotide
ugggcagagagcaugacca

SEQ ID NO: 2029039 - RNA, 19 nt, Artificial Sequence
  Description of Artificial Sequence: Synthetic oligonucleotide
agaguacuuuguuaaguac

SEQ ID NO: 2029040 - RNA, 19 nt, Artificial Sequence
  Description of Artificial Sequence: Synthetic oligonucleotide
cuuucuaauucacacugcc

SEQ ID NO: 2029041 - RNA, 19 nt, Artificial Sequence
  Description of Artificial Sequence: Synthetic oligonucleotide
ucaagcucuaaaccagggg

SEQ ID NO: 2029042 - RNA, 19 nt, Artificial Sequence
  Description of Artificial Sequence: Synthetic oligonucleotide
cugauucugaggaauuugg

SEQ ID NO: 2029043 - RNA, 19 nt, Artificial Sequence
  Description of Artificial Sequence: Synthetic oligonucleotide
ggaauuuggaaucugaaga

SEQ ID NO: 2029044 - RNA, 19 nt, Artificial Sequence
  Description of Artificial Sequence: Synthetic oligonucleotide
uguacauccuccucaucgg

SEQ ID NO: 2029045 - RNA, 19 nt, Artificial Sequence
  Description of Artificial Sequence: Synthetic oligonucleotide
aaguacggagcacuccugg

SEQ ID NO: 2029046 - RNA, 19 nt, Artificial Sequence
  Description of Artificial Sequence: Synthetic oligonucleotide
aaguaauuccaguccagca

SEQ ID NO: 2029047 - RNA, 19 nt, Artificial Sequence
  Description of Artificial Sequence: Synthetic oligonucleotide
uuuggaaucugaagaguca

SEQ ID NO: 2029048 - RNA, 19 nt, Artificial Sequence
  Description of Artificial Sequence: Synthetic oligonucleotide
caaaacucgucucuaaaug

SEQ ID NO: 2029049 - RNA, 19 nt, Artificial Sequence
  Description of Artificial Sequence: Synthetic oligonucleotide
auucugaggaauuuggaau

SEQ ID NO: 2029050 - RNA, 19 nt, Artificial Sequence
  Description of Artificial Sequence: Synthetic oligonucleotide
cacuuaaagucuucaaccc

SEQ ID NO: 2029051 - RNA, 19 nt, Artificial Sequence
  Description of Artificial Sequence: Synthetic oligonucleotide
ucauuucauuaugacaggg

SEQ ID NO: 2029052 - RNA, 19 nt, Artificial Sequence
  Description of Artificial Sequence: Synthetic oligonucleotide
gaagagucauuucauuaug

SEQ ID NO: 2029053 - RNA, 19 nt, Artificial Sequence
  Description of Artificial Sequence: Synthetic oligonucleotide
agggguuggauucaagcuc

SEQ ID NO: 2029054 - RNA, 19 nt, Artificial Sequence
  Description of Artificial Sequence: Synthetic oligonucleotide
auuuggaaucugaagaguc

SEQ ID NO: 2029055 - RNA, 19 nt, Artificial Sequence
  Description of Artificial Sequence: Synthetic oligonucleotide
ucaguguguaaugugacca

SEQ ID NO: 2029056 - RNA, 19 nt, Artificial Sequence
  Description of Artificial Sequence: Synthetic oligonucleotide
aacucgucucuaaaugagc

SEQ ID NO: 2029057 - RNA, 19 nt, Artificial Sequence
  Description of Artificial Sequence: Synthetic oligonucleotide
aaugcagcaagugguuuuc

SEQ ID NO: 2029058 - RNA, 19 nt, Artificial Sequence
  Description of Artificial Sequence: Synthetic oligonucleotide
uccauggaugacaugcugc

SEQ ID NO: 2029059 - RNA, 19 nt, Artificial Sequence
  Description of Artificial Sequence: Synthetic oligonucleotide
acucgucucuaaaugagcc

SEQ ID NO: 2029060 - RNA, 19 nt, Artificial Sequence
  Description of Artificial Sequence: Synthetic oligonucleotide
ucaagaagacauccagagc

SEQ ID NO: 2029061 - RNA, 19 nt, Artificial Sequence
  Description of Artificial Sequence: Synthetic oligonucleotide
aaacucgucucuaaaugag

SEQ ID NO: 2029062 - RNA, 19 nt, Artificial Sequence
  Description of Artificial Sequence: Synthetic oligonucleotide
uguggacagguacuguucc

SEQ ID NO: 2029063 - RNA, 19 nt, Artificial Sequence
  Description of Artificial Sequence: Synthetic oligonucleotide
uaauucuccaggugucggg

SEQ ID NO: 2029064 - RNA, 19 nt, Artificial Sequence
  Description of Artificial Sequence: Synthetic oligonucleotide
uguaauucuccaggugucg

SEQ ID NO: 2029065 - RNA, 19 nt, Artificial Sequence
  Description of Artificial Sequence: Synthetic oligonucleotide
auucacacugcccacacaa

SEQ ID NO: 2029066 - RNA, 19 nt, Artificial Sequence
  Description of Artificial Sequence: Synthetic oligonucleotide
agcaugaccaccucgcugu

SEQ ID NO: 2029067 - RNA, 19 nt, Artificial Sequence
  Description of Artificial Sequence: Synthetic oligonucleotide
uuuugcuucucuugauuug

SEQ ID NO: 2029068 - RNA, 19 nt, Artificial Sequence
  Description of Artificial Sequence: Synthetic oligonucleotide
cuccaaaugcagcaagugg

SEQ ID NO: 2029069 - RNA, 19 nt, Artificial Sequence
  Description of Artificial Sequence: Synthetic oligonucleotide
uccucaucggacuggauga

SEQ ID NO: 2029070 - RNA, 19 nt, Artificial Sequence
  Description of Artificial Sequence: Synthetic oligonucleotide
ucaaaacucgucucuaaau

SEQ ID NO: 2029071 - RNA, 19 nt, Artificial Sequence
  Description of Artificial Sequence: Synthetic oligonucleotide
gagucauuucauuaugaca

SEQ ID NO: 2029072 - RNA, 19 nt, Artificial Sequence
  Description of Artificial Sequence: Synthetic oligonucleotide
uucugaggaauuuggaauc

SEQ ID NO: 2029073 - RNA, 19 nt, Artificial Sequence
  Description of Artificial Sequence: Synthetic oligonucleotide
ucuuucuaauucacacugc

SEQ ID NO: 2029074 - RNA, 19 nt, Artificial Sequence
  Description of Artificial Sequence: Synthetic oligonucleotide
aagcucuaaaccaggggac

SEQ ID NO: 2029075 - RNA, 19 nt, Artificial Sequence
  Description of Artificial Sequence: Synthetic oligonucleotide
ucgucucuaaaugagccag

SEQ ID NO: 2029076 - RNA, 19 nt, Artificial Sequence
  Description of Artificial Sequence: Synthetic oligonucleotide
uuucuaccucuucaaaacu

SEQ ID NO: 2029077 - RNA, 19 nt, Artificial Sequence
  Description of Artificial Sequence: Synthetic oligonucleotide
uggagugcugauucugagg

SEQ ID NO: 2029078 - RNA, 19 nt, Artificial Sequence
  Description of Artificial Sequence: Synthetic oligonucleotide
uccaucaaguccaucugcu

SEQ ID NO: 2029079 - RNA, 19 nt, Artificial Sequence
  Description of Artificial Sequence: Synthetic oligonucleotide
guaaccuguggacagguac

SEQ ID NO: 2029080 - RNA, 19 nt, Artificial Sequence
  Description of Artificial Sequence: Synthetic oligonucleotide
aaaugcagcaagugguuuu

SEQ ID NO: 2029081 - RNA, 19 nt, Artificial Sequence
  Description of Artificial Sequence: Synthetic oligonucleotide
ugauucugaggaauuugga

SEQ ID NO: 2029082 - RNA, 19 nt, Artificial Sequence
  Description of Artificial Sequence: Synthetic oligonucleotide
cagguacuguuccauaucc

SEQ ID NO: 2029083 - RNA, 19 nt, Artificial Sequence
  Description of Artificial Sequence: Synthetic oligonucleotide
agagagcaugaccaccucg

SEQ ID NO: 2029084 - RNA, 19 nt, Artificial Sequence
  Description of Artificial Sequence: Synthetic oligonucleotide
uguccaucaaguccaucug

SEQ ID NO: 2029085 - RNA, 19 nt, Artificial Sequence
  Description of Artificial Sequence: Synthetic oligonucleotide
aaugugaccaaggcagugu

SEQ ID NO: 2029086 - RNA, 19 nt, Artificial Sequence
  Description of Artificial Sequence: Synthetic oligonucleotide
agcgucugcacacuccuuc

SEQ ID NO: 2029087 - RNA, 19 nt, Artificial Sequence
  Description of Artificial Sequence: Synthetic oligonucleotide
agcccacgcauccucauac

SEQ ID NO: 2029088 - RNA, 19 nt, Artificial Sequence
  Description of Artificial Sequence: Synthetic oligonucleotide
gucauuucauuaugacagg

SEQ ID NO: 2029089 - RNA, 19 nt, Artificial Sequence
  Description of Artificial Sequence: Synthetic oligonucleotide
caagcucuaaaccagggga

SEQ ID NO: 2029090 - RNA, 19 nt, Artificial Sequence
  Description of Artificial Sequence: Synthetic oligonucleotide
ucuaauucacacugcccac

SEQ ID NO: 2029091 - RNA, 19 nt, Artificial Sequence
  Description of Artificial Sequence: Synthetic oligonucleotide
uuaaagucuucaacccgga

SEQ ID NO: 2029092 - RNA, 19 nt, Artificial Sequence
  Description of Artificial Sequence: Synthetic oligonucleotide
uaaccuguggacagguacu

SEQ ID NO: 2029093 - RNA, 19 nt, Artificial Sequence
  Description of Artificial Sequence: Synthetic oligonucleotide
uuguuaaguacggagcacu

SEQ ID NO: 2029094 - RNA, 19 nt, Artificial Sequence
  Description of Artificial Sequence: Synthetic oligonucleotide
caucaaggacuccaagucc

SEQ ID NO: 2029095 - RNA, 19 nt, Artificial Sequence
  Description of Artificial Sequence: Synthetic oligonucleotide
cuuuguuaaguacggagca

SEQ ID NO: 2029096 - RNA, 19 nt, Artificial Sequence
  Description of Artificial Sequence: Synthetic oligonucleotide
uaauucacacugcccacac

SEQ ID NO: 2029097 - RNA, 19 nt, Artificial Sequence
  Description of Artificial Sequence: Synthetic oligonucleotide
uuguaauucuccagguguc

SEQ ID NO: 2029098 - RNA, 19 nt, Artificial Sequence
  Description of Artificial Sequence: Synthetic oligonucleotide
cagcaagugguuuucuacc

SEQ ID NO: 2029099 - RNA, 19 nt, Artificial Sequence
  Description of Artificial Sequence: Synthetic oligonucleotide
uccucuuauuuucuuguaa

SEQ ID NO: 2029100 - RNA, 19 nt, Artificial Sequence
  Description of Artificial Sequence: Synthetic oligonucleotide
uguuccauauccugcugga

SEQ ID NO: 2029101 - RNA, 19 nt, Artificial Sequence
  Description of Artificial Sequence: Synthetic oligonucleotide
ucuaaaccaggggacagca

SEQ ID NO: 2029102 - RNA, 19 nt, Artificial Sequence
  Description of Artificial Sequence: Synthetic oligonucleotide
uccugugaagugcagccca

SEQ ID NO: 2029103 - RNA, 19 nt, Artificial Sequence
  Description of Artificial Sequence: Synthetic oligonucleotide
uguccacuagcucuccagc

SEQ ID NO: 2029104 - RNA, 19 nt, Artificial Sequence
  Description of Artificial Sequence: Synthetic oligonucleotide
aguccagcagaguacuuug

SEQ ID NO: 2029105 - RNA, 19 nt, Artificial Sequence
  Description of Artificial Sequence: Synthetic oligonucleotide
auuccaguccagcagagua

SEQ ID NO: 2029106 - RNA, 19 nt, Artificial Sequence
  Description of Artificial Sequence: Synthetic oligonucleotide
uaccugcuaaguaauucca

SEQ ID NO: 2029107 - RNA, 19 nt, Artificial Sequence
  Description of Artificial Sequence: Synthetic oligonucleotide
uuucauuaugacagggguu

SEQ ID NO: 2029108 - RNA, 19 nt, Artificial Sequence
  Description of Artificial Sequence: Synthetic oligonucleotide
augugaccaaggcaguguc

SEQ ID NO: 2029109 - RNA, 19 nt, Artificial Sequence
  Description of Artificial Sequence: Synthetic oligonucleotide
aguacggagcacuccuggg

SEQ ID NO: 2029110 - RNA, 19 nt, Artificial Sequence
  Description of Artificial Sequence: Synthetic oligonucleotide
aagagucauuucauuauga

SEQ ID NO: 2029111 - RNA, 19 nt, Artificial Sequence
  Description of Artificial Sequence: Synthetic oligonucleotide
uguuaaguacggagcacuc

SEQ ID NO: 2029112 - RNA, 19 nt, Artificial Sequence
  Description of Artificial Sequence: Synthetic oligonucleotide
ggacgugaaauccugcugc

SEQ ID NO: 2029113 - RNA, 19 nt, Artificial Sequence
  Description of Artificial Sequence: Synthetic oligonucleotide
ucagcgguguccaggucag

SEQ ID NO: 2029114 - RNA, 19 nt, Artificial Sequence
  Description of Artificial Sequence: Synthetic oligonucleotide
ugaggggagcuucagcggu

SEQ ID NO: 2029115 - RNA, 19 nt, Artificial Sequence
  Description of Artificial Sequence: Synthetic oligonucleotide
ucugcguguguucugcauc

SEQ ID NO: 2029116 - RNA, 19 nt, Artificial Sequence
  Description of Artificial Sequence: Synthetic oligonucleotide
gacugugcauguuuguguc

SEQ ID NO: 2029117 - RNA, 19 nt, Artificial Sequence
  Description of Artificial Sequence: Synthetic oligonucleotide
agcaagugguuuucuaccu

SEQ ID NO: 2029118 - RNA, 19 nt, Artificial Sequence
  Description of Artificial Sequence: Synthetic oligonucleotide
ugucacuuaaagucuucaa

SEQ ID NO: 2029119 - RNA, 19 nt, Artificial Sequence
  Description of Artificial Sequence: Synthetic oligonucleotide
guaauucuccaggugucgg

SEQ ID NO: 2029120 - RNA, 19 nt, Artificial Sequence
  Description of Artificial Sequence: Synthetic oligonucleotide
uccacuagcucuccagcgu

SEQ ID NO: 2029121 - RNA, 19 nt, Artificial Sequence
  Description of Artificial Sequence: Synthetic oligonucleotide
uuuguuaaguacggagcac

SEQ ID NO: 2029122 - RNA, 19 nt, Artificial Sequence
  Description of Artificial Sequence: Synthetic oligonucleotide
uuguccucuccauuggagu

SEQ ID NO: 2029123 - RNA, 19 nt, Artificial Sequence
  Description of Artificial Sequence: Synthetic oligonucleotide
cuccucaucggacuggaug

SEQ ID NO: 2029124 - RNA, 19 nt, Artificial Sequence
  Description of Artificial Sequence: Synthetic oligonucleotide
augaggggagcuucagcgg

SEQ ID NO: 2029125 - RNA, 19 nt, Artificial Sequence
  Description of Artificial Sequence: Synthetic oligonucleotide
ucugaagagucauuucauu

SEQ ID NO: 2029126 - RNA, 19 nt, Artificial Sequence
  Description of Artificial Sequence: Synthetic oligonucleotide
agcagaguacuuuguuaag

SEQ ID NO: 2029127 - RNA, 19 nt, Artificial Sequence
  Description of Artificial Sequence: Synthetic oligonucleotide
ucggacuggaugaggggag

SEQ ID NO: 2029128 - RNA, 19 nt, Artificial Sequence
  Description of Artificial Sequence: Synthetic oligonucleotide
ucaacuucaguugcugcgu

SEQ ID NO: 2029129 - RNA, 19 nt, Artificial Sequence
  Description of Artificial Sequence: Synthetic oligonucleotide
gucaguguguaaugugacc

SEQ ID NO: 2029130 - RNA, 19 nt, Artificial Sequence
  Description of Artificial Sequence: Synthetic oligonucleotide
cauaccugcuaaguaauuc

SEQ ID NO: 2029131 - RNA, 19 nt, Artificial Sequence
  Description of Artificial Sequence: Synthetic oligonucleotide
aaaccaggggacagcacag

SEQ ID NO: 2029132 - RNA, 19 nt, Artificial Sequence
  Description of Artificial Sequence: Synthetic oligonucleotide
ugggguagacuuucuguca

SEQ ID NO: 2029133 - RNA, 19 nt, Artificial Sequence
  Description of Artificial Sequence: Synthetic oligonucleotide
ugugaccaaggcagugucc

SEQ ID NO: 2029134 - RNA, 19 nt, Artificial Sequence
  Description of Artificial Sequence: Synthetic oligonucleotide
guccacuagcucuccagcg

SEQ ID NO: 2029135 - RNA, 19 nt, Artificial Sequence
  Description of Artificial Sequence: Synthetic oligonucleotide
uacauccuccucaucggac

SEQ ID NO: 2029136 - RNA, 19 nt, Artificial Sequence
  Description of Artificial Sequence: Synthetic oligonucleotide
uccuggucagagaugucca

SEQ ID NO: 2029137 - RNA, 19 nt, Artificial Sequence
  Description of Artificial Sequence: Synthetic oligonucleotide
aagacauccagagccuccu

SEQ ID NO: 2029138 - RNA, 19 nt, Artificial Sequence
  Description of Artificial Sequence: Synthetic oligonucleotide
aguguguaaugugaccaag

SEQ ID NO: 2029139 - RNA, 19 nt, Artificial Sequence
  Description of Artificial Sequence: Synthetic oligonucleotide
uuccaguccagcagaguac

SEQ ID NO: 2029140 - RNA, 19 nt, Artificial Sequence
  Description of Artificial Sequence: Synthetic oligonucleotide
uaaguacggagcacuccug

SEQ ID NO: 2029141 - RNA, 19 nt, Artificial Sequence
  Description of Artificial Sequence: Synthetic oligonucleotide
aacuucaguugcugcgugu

SEQ ID NO: 2029142 - RNA, 19 nt, Artificial Sequence
  Description of Artificial Sequence: Synthetic oligonucleotide
uuuccagaaccuucugcgu

SEQ ID NO: 2029143 - RNA, 19 nt, Artificial Sequence
  Description of Artificial Sequence: Synthetic oligonucleotide
ggagugcugauucugagga

SEQ ID NO: 2029144 - RNA, 19 nt, Artificial Sequence
  Description of Artificial Sequence: Synthetic oligonucleotide
uguuguccucuccauugga

SEQ ID NO: 2029145 - RNA, 19 nt, Artificial Sequence
  Description of Artificial Sequence: Synthetic oligonucleotide
uaccucuucaaaacucguc

SEQ ID NO: 2029146 - RNA, 19 nt, Artificial Sequence
  Description of Artificial Sequence: Synthetic oligonucleotide
uccucauaccugcuaagua

SEQ ID NO: 2029147 - RNA, 19 nt, Artificial Sequence
  Description of Artificial Sequence: Synthetic oligonucleotide
ggaguucaagaagacaucc

SEQ ID NO: 2029148 - RNA, 19 nt, Artificial Sequence
  Description of Artificial Sequence: Synthetic oligonucleotide
ucauuaugacagggguugg

SEQ ID NO: 2029149 - RNA, 19 nt, Artificial Sequence
  Description of Artificial Sequence: Synthetic oligonucleotide
uugucacuuaaagucuuca

SEQ ID NO: 2029150 - RNA, 19 nt, Artificial Sequence
  Description of Artificial Sequence: Synthetic oligonucleotide
ugcagguaaccuguggaca

SEQ ID NO: 2029151 - RNA, 19 nt, Artificial Sequence
  Description of Artificial Sequence: Synthetic oligonucleotide
aucaaggacuccaaguccu

SEQ ID NO: 2029152 - RNA, 19 nt, Artificial Sequence
  Description of Artificial Sequence: Synthetic oligonucleotide
cugcgugugcuccauuucc

SEQ ID NO: 2029153 - RNA, 19 nt, Artificial Sequence
  Description of Artificial Sequence: Synthetic oligonucleotide
guuaaguacggagcacucc

SEQ ID NO: 2029154 - RNA, 19 nt, Artificial Sequence
  Description of Artificial Sequence: Synthetic oligonucleotide
guguaaugugaccaaggca

SEQ ID NO: 2029155 - RNA, 19 nt, Artificial Sequence
  Description of Artificial Sequence: Synthetic oligonucleotide
ucugaggaauuuggaaucu

SEQ ID NO: 2029156 - RNA, 19 nt, Artificial Sequence
  Description of Artificial Sequence: Synthetic oligonucleotide
uuggaaucugaagagucau

SEQ ID NO: 2029157 - RNA, 19 nt, Artificial Sequence
  Description of Artificial Sequence: Synthetic oligonucleotide
agcaucgcguccccucccc

SEQ ID NO: 2029158 - RNA, 19 nt, Artificial Sequence
  Description of Artificial Sequence: Synthetic oligonucleotide
uccagcgucugcacacucc

SEQ ID NO: 2029159 - RNA, 19 nt, Artificial Sequence
  Description of Artificial Sequence: Synthetic oligonucleotide
gcuaaguaauuccagucca

SEQ ID NO: 2029160 - RNA, 19 nt, Artificial Sequence
  Description of Artificial Sequence: Synthetic oligonucleotide
ugcgugugcuccauuucca

SEQ ID NO: 2029161 - RNA, 19 nt, Artificial Sequence
  Description of Artificial Sequence: Synthetic oligonucleotide
cugcccacacaaauccucc

SEQ ID NO: 2029162 - RNA, 19 nt, Artificial Sequence
  Description of Artificial Sequence: Synthetic oligonucleotide
cugaagagucauuucauua

SEQ ID NO: 2029163 - RNA, 19 nt, Artificial Sequence
  Description of Artificial Sequence: Synthetic oligonucleotide
guccaucaaguccaucugc

SEQ ID NO: 2029164 - RNA, 19 nt, Artificial Sequence
  Description of Artificial Sequence: Synthetic oligonucleotide
cuaaaugagccaggcuugc

SEQ ID NO: 2029165 - RNA, 19 nt, Artificial Sequence
  Description of Artificial Sequence: Synthetic oligonucleotide
ucacugacaccugggguag

SEQ ID NO: 2029166 - RNA, 19 nt, Artificial Sequence
  Description of Artificial Sequence: Synthetic oligonucleotide
auuaugacagggguuggau

SEQ ID NO: 2029167 - RNA, 19 nt, Artificial Sequence
  Description of Artificial Sequence: Synthetic oligonucleotide
acugacaccugggguagac

SEQ ID NO: 2029168 - RNA, 19 nt, Artificial Sequence
  Description of Artificial Sequence: Synthetic oligonucleotide
uucaacccggacgugaaau

SEQ ID NO: 2029169 - RNA, 19 nt, Artificial Sequence
  Description of Artificial Sequence: Synthetic oligonucleotide
uguuugugucuuucuaauu

SEQ ID NO: 2029170 - RNA, 19 nt, Artificial Sequence
  Description of Artificial Sequence: Synthetic oligonucleotide
caucggacuggaugagggg

SEQ ID NO: 2029171 - RNA, 19 nt, Artificial Sequence
  Description of Artificial Sequence: Synthetic oligonucleotide
uuaugacagggguuggauu

SEQ ID NO: 2029172 - RNA, 19 nt, Artificial Sequence
  Description of Artificial Sequence: Synthetic oligonucleotide
ugcccaugggcucucgccu

SEQ ID NO: 2029173 - RNA, 19 nt, Artificial Sequence
  Description of Artificial Sequence: Synthetic oligonucleotide
cuggagugcugauucugag

SEQ ID NO: 2029174 - RNA, 19 nt, Artificial Sequence
  Description of Artificial Sequence: Synthetic oligonucleotide
uucugucaguguguaaugu

SEQ ID NO: 2029175 - RNA, 19 nt, Artificial Sequence
  Description of Artificial Sequence: Synthetic oligonucleotide
uucgcucuccugugaagug

SEQ ID NO: 2029176 - RNA, 19 nt, Artificial Sequence
  Description of Artificial Sequence: Synthetic oligonucleotide
cagcagaguacuuuguuaa

SEQ ID NO: 2029177 - RNA, 19 nt, Artificial Sequence
  Description of Artificial Sequence: Synthetic oligonucleotide
caacccggacgugaaaucc

SEQ ID NO: 2029178 - RNA, 19 nt, Artificial Sequence
  Description of Artificial Sequence: Synthetic oligonucleotide
acguucaccuccauggaug

SEQ ID NO: 2029179 - RNA, 19 nt, Artificial Sequence
  Description of Artificial Sequence: Synthetic oligonucleotide
aaccuucugcguguguucu

SEQ ID NO: 2029180 - RNA, 19 nt, Artificial Sequence
  Description of Artificial Sequence: Synthetic oligonucleotide
acgcucagcagccgcucgc

SEQ ID NO: 2029181 - RNA, 19 nt, Artificial Sequence
  Description of Artificial Sequence: Synthetic oligonucleotide
agcuucagcgguguccagg

SEQ ID NO: 2029182 - RNA, 19 nt, Artificial Sequence
  Description of Artificial Sequence: Synthetic oligonucleotide
cauccucauaccugcuaag

SEQ ID NO: 2029183 - RNA, 19 nt, Artificial Sequence
  Description of Artificial Sequence: Synthetic oligonucleotide
uaaaugagccaggcuugcc

SEQ ID NO: 2029184 - RNA, 19 nt, Artificial Sequence
  Description of Artificial Sequence: Synthetic oligonucleotide
uucugccgcuccuucaacu

SEQ ID NO: 2029185 - RNA, 19 nt, Artificial Sequence
  Description of Artificial Sequence: Synthetic oligonucleotide
ucaacccggacgugaaauc

SEQ ID NO: 2029186 - RNA, 19 nt, Artificial Sequence
  Description of Artificial Sequence: Synthetic oligonucleotide
cgugaaauccugcugcacg

SEQ ID NO: 2029187 - RNA, 19 nt, Artificial Sequence
  Description of Artificial Sequence: Synthetic oligonucleotide
uacggagcacuccuggguu

SEQ ID NO: 2029188 - RNA, 19 nt, Artificial Sequence
  Description of Artificial Sequence: Synthetic oligonucleotide
gacgugaaauccugcugca

SEQ ID NO: 2029189 - RNA, 19 nt, Artificial Sequence
  Description of Artificial Sequence: Synthetic oligonucleotide
cagaguacuuuguuaagua

SEQ ID NO: 2029190 - RNA, 19 nt, Artificial Sequence
  Description of Artificial Sequence: Synthetic oligonucleotide
gaggaauuuggaaucugaa

SEQ ID NO: 2029191 - RNA, 19 nt, Artificial Sequence
  Description of Artificial Sequence: Synthetic oligonucleotide
aucggacuggaugagggga

SEQ ID NO: 2029192 - RNA, 19 nt, Artificial Sequence
  Description of Artificial Sequence: Synthetic oligonucleotide
cucuugauuugucacuuaa

SEQ ID NO: 2029193 - RNA, 19 nt, Artificial Sequence
  Description of Artificial Sequence: Synthetic oligonucleotide
ucgcgcagggucuccagca

SEQ ID NO: 2029194 - RNA, 19 nt, Artificial Sequence
  Description of Artificial Sequence: Synthetic oligonucleotide
ucauaccugcuaaguaauu

SEQ ID NO: 2029195 - RNA, 19 nt, Artificial Sequence
  Description of Artificial Sequence: Synthetic oligonucleotide
uucacacugcccacacaaa

SEQ ID NO: 2029196 - RNA, 19 nt, Artificial Sequence
  Description of Artificial Sequence: Synthetic oligonucleotide
cucuaaaccaggggacagc

SEQ ID NO: 2029197 - RNA, 19 nt, Artificial Sequence
  Description of Artificial Sequence: Synthetic oligonucleotide
uccuucgcucuccugugaa

SEQ ID NO: 2029198 - RNA, 19 nt, Artificial Sequence
  Description of Artificial Sequence: Synthetic oligonucleotide
gguagacuuucugucagug

SEQ ID NO: 2029199 - RNA, 19 nt, Artificial Sequence
  Description of Artificial Sequence: Synthetic oligonucleotide
ucgcucuccugugaagugc

SEQ ID NO: 2029200 - RNA, 19 nt, Artificial Sequence
  Description of Artificial Sequence: Synthetic oligonucleotide
acgugaaauccugcugcac

SEQ ID NO: 2029201 - RNA, 19 nt, Artificial Sequence
  Description of Artificial Sequence: Synthetic oligonucleotide
auccucauaccugcuaagu

SEQ ID NO: 2029202 - RNA, 19 nt, Artificial Sequence
  Description of Artificial Sequence: Synthetic oligonucleotide
ugaaauccugcugcacgcu

SEQ ID NO: 2029203 - RNA, 19 nt, Artificial Sequence
  Description of Artificial Sequence: Synthetic oligonucleotide
accugcuaaguaauuccag

SEQ ID NO: 2029204 - RNA, 19 nt, Artificial Sequence
  Description of Artificial Sequence: Synthetic oligonucleotide
ucaaguccaucugcuccag

SEQ ID NO: 2029205 - RNA, 19 nt, Artificial Sequence
  Description of Artificial Sequence: Synthetic oligonucleotide
cuuucugucaguguguaau

SEQ ID NO: 2029206 - RNA, 19 nt, Artificial Sequence
  Description of Artificial Sequence: Synthetic oligonucleotide
cucaucggacuggaugagg

SEQ ID NO: 2029207 - RNA, 19 nt, Artificial Sequence
  Description of Artificial Sequence: Synthetic oligonucleotide
uuccucuuauuuucuugua

SEQ ID NO: 2029208 - RNA, 19 nt, Artificial Sequence
  Description of Artificial Sequence: Synthetic oligonucleotide
cuaaaccaggggacagcac

SEQ ID NO: 2029209 - RNA, 19 nt, Artificial Sequence
  Description of Artificial Sequence: Synthetic oligonucleotide
cagggucuccagcaucgcg

SEQ ID NO: 2029210 - RNA, 19 nt, Artificial Sequence
  Description of Artificial Sequence: Synthetic oligonucleotide
agcgguguccaggucagug

SEQ ID NO: 2029211 - RNA, 19 nt, Artificial Sequence
  Description of Artificial Sequence: Synthetic oligonucleotide
agcucuaaaccaggggaca

SEQ ID NO: 2029212 - RNA, 19 nt, Artificial Sequence
  Description of Artificial Sequence: Synthetic oligonucleotide
accuguacauccuccucau

SEQ ID NO: 2029213 - RNA, 19 nt, Artificial Sequence
  Description of Artificial Sequence: Synthetic oligonucleotide
caaagaacuucugccgcuc

SEQ ID NO: 2029214 - RNA, 19 nt, Artificial Sequence
  Description of Artificial Sequence: Synthetic oligonucleotide
cuaauucacacugcccaca

SEQ ID NO: 2029215 - RNA, 19 nt, Artificial Sequence
  Description of Artificial Sequence: Synthetic oligonucleotide
uccucuccauuggaguuca

SEQ ID NO: 2029216 - RNA, 19 nt, Artificial Sequence
  Description of Artificial Sequence: Synthetic oligonucleotide
ugcagcccacgcauccuca

SEQ ID NO: 2029217 - RNA, 19 nt, Artificial Sequence
  Description of Artificial Sequence: Synthetic oligonucleotide
aacccggacgugaaauccu

SEQ ID NO: 2029218 - RNA, 19 nt, Artificial Sequence
  Description of Artificial Sequence: Synthetic oligonucleotide
ggugucgggacugugcaug

SEQ ID NO: 2029219 - RNA, 19 nt, Artificial Sequence
  Description of Artificial Sequence: Synthetic oligonucleotide
caagugguuuucuaccucu

SEQ ID NO: 2029220 - RNA, 19 nt, Artificial Sequence
  Description of Artificial Sequence: Synthetic oligonucleotide
ugcugcgugugcuccauuu

SEQ ID NO: 2029221 - RNA, 19 nt, Artificial Sequence
  Description of Artificial Sequence: Synthetic oligonucleotide
agggucuccagcaucgcgu

SEQ ID NO: 2029222 - RNA, 19 nt, Artificial Sequence
  Description of Artificial Sequence: Synthetic oligonucleotide
caccucgcuguccacuagc

SEQ ID NO: 2029223 - RNA, 19 nt, Artificial Sequence
  Description of Artificial Sequence: Synthetic oligonucleotide
uucugcguguguucugcau

SEQ ID NO: 2029224 - RNA, 19 nt, Artificial Sequence
  Description of Artificial Sequence: Synthetic oligonucleotide
caacuucaguugcugcgug

SEQ ID NO: 2029225 - RNA, 19 nt, Artificial Sequence
  Description of Artificial Sequence: Synthetic oligonucleotide
ucaggccucgcgccgccgc

SEQ ID NO: 2029226 - RNA, 19 nt, Artificial Sequence
  Description of Artificial Sequence: Synthetic oligonucleotide
agacuuucugucagugugu

SEQ ID NO: 2029227 - RNA, 19 nt, Artificial Sequence
  Description of Artificial Sequence: Synthetic oligonucleotide
uggaugacaugcugcccau

SEQ ID NO: 2029228 - RNA, 19 nt, Artificial Sequence
  Description of Artificial Sequence: Synthetic oligonucleotide
agugggcagagagcaugac

SEQ ID NO: 2029229 - RNA, 19 nt, Artificial Sequence
  Description of Artificial Sequence: Synthetic oligonucleotide
cugugaagugcagcccacg

SEQ ID NO: 2029230 - RNA, 19 nt, Artificial Sequence
  Description of Artificial Sequence: Synthetic oligonucleotide
guacauccuccucaucgga

SEQ ID NO: 2029231 - RNA, 19 nt, Artificial Sequence
  Description of Artificial Sequence: Synthetic oligonucleotide
cugaggaauuuggaaucug

SEQ ID NO: 2029232 - RNA, 19 nt, Artificial Sequence
  Description of Artificial Sequence: Synthetic oligonucleotide
ucucuugauuugucacuua

SEQ ID NO: 2029233 - RNA, 19 nt, Artificial Sequence
  Description of Artificial Sequence: Synthetic oligonucleotide
aguugcugcgugugcucca

SEQ ID NO: 2029234 - RNA, 19 nt, Artificial Sequence
  Description of Artificial Sequence: Synthetic oligonucleotide
aguucagcuuugaaggcuu

SEQ ID NO: 2029235 - RNA, 19 nt, Artificial Sequence
  Description of Artificial Sequence: Synthetic oligonucleotide
ugcugauucugaggaauuu

SEQ ID NO: 2029236 - RNA, 19 nt, Artificial Sequence
  Description of Artificial Sequence: Synthetic oligonucleotide
ugaccaaggcaguguccac

SEQ ID NO: 2029237 - RNA, 19 nt, Artificial Sequence
  Description of Artificial Sequence: Synthetic oligonucleotide
aucgcguccccuccccuca

SEQ ID NO: 2029238 - RNA, 19 nt, Artificial Sequence
  Description of Artificial Sequence: Synthetic oligonucleotide
ccucauaccugcuaaguaa

SEQ ID NO: 2029239 - RNA, 19 nt, Artificial Sequence
  Description of Artificial Sequence: Synthetic oligonucleotide
cuggucagagauguccauc

SEQ ID NO: 2029240 - RNA, 19 nt, Artificial Sequence
  Description of Artificial Sequence: Synthetic oligonucleotide
guccacguucaccuccaug

SEQ ID NO: 2029241 - RNA, 19 nt, Artificial Sequence
  Description of Artificial Sequence: Synthetic oligonucleotide
ccccagacgccguagggcg

SEQ ID NO: 2029242 - RNA, 19 nt, Artificial Sequence
  Description of Artificial Sequence: Synthetic oligonucleotide
gucuucaacccggacguga

SEQ ID NO: 2029243 - RNA, 19 nt, Artificial Sequence
  Description of Artificial Sequence: Synthetic oligonucleotide
caggugucgggacugugca

SEQ ID NO: 2029244 - RNA, 19 nt, Artificial Sequence
  Description of Artificial Sequence: Synthetic oligonucleotide
acuagcucuccagcgucug

SEQ ID NO: 2029245 - RNA, 19 nt, Artificial Sequence
  Description of Artificial Sequence: Synthetic oligonucleotide
agguaaccuguggacaggu

SEQ ID NO: 2029246 - RNA, 19 nt, Artificial Sequence
  Description of Artificial Sequence: Synthetic oligonucleotide
caguugcugcgugugcucc

SEQ ID NO: 2029247 - RNA, 19 nt, Artificial Sequence
  Description of Artificial Sequence: Synthetic oligonucleotide
auauccugcuggaaggcuu

SEQ ID NO: 2029248 - RNA, 19 nt, Artificial Sequence
  Description of Artificial Sequence: Synthetic oligonucleotide
cuccugugaagugcagccc

SEQ ID NO: 2029249 - RNA, 19 nt, Artificial Sequence
  Description of Artificial Sequence: Synthetic oligonucleotide
augacagggguuggauuca

SEQ ID NO: 2029250 - RNA, 19 nt, Artificial Sequence
  Description of Artificial Sequence: Synthetic oligonucleotide
cucauaccugcuaaguaau

SEQ ID NO: 2029251 - RNA, 19 nt, Artificial Sequence
  Description of Artificial Sequence: Synthetic oligonucleotide
cagggguuggauucaagcu

SEQ ID NO: 2029252 - RNA, 19 nt, Artificial Sequence
  Description of Artificial Sequence: Synthetic oligonucleotide
cauuaugacagggguugga

SEQ ID NO: 2029253 - RNA, 19 nt, Artificial Sequence
  Description of Artificial Sequence: Synthetic oligonucleotide
guagacuuucugucagugu

SEQ ID NO: 2029254 - RNA, 19 nt, Artificial Sequence
  Description of Artificial Sequence: Synthetic oligonucleotide
gggagcuucagcggugucc

SEQ ID NO: 2029255 - RNA, 19 nt, Artificial Sequence
  Description of Artificial Sequence: Synthetic oligonucleotide
gcucuaaaccaggggacag

SEQ ID NO: 2029256 - RNA, 19 nt, Artificial Sequence
  Description of Artificial Sequence: Synthetic oligonucleotide
ggcagagagcaugaccacc

SEQ ID NO: 2029257 - RNA, 19 nt, Artificial Sequence
  Description of Artificial Sequence: Synthetic oligonucleotide
gacaugcugcccaugggcu

SEQ ID NO: 2029258 - RNA, 19 nt, Artificial Sequence
  Description of Artificial Sequence: Synthetic oligonucleotide
caguguguaaugugaccaa

SEQ ID NO: 2029259 - RNA, 19 nt, Artificial Sequence
  Description of Artificial Sequence: Synthetic oligonucleotide
cucuuauuuucuuguaauu

SEQ ID NO: 2029260 - RNA, 19 nt, Artificial Sequence
  Description of Artificial Sequence: Synthetic oligonucleotide
ggagcuucagcggugucca

SEQ ID NO: 2029261 - RNA, 19 nt, Artificial Sequence
  Description of Artificial Sequence: Synthetic oligonucleotide
agcacuccuggguuugcuu

SEQ ID NO: 2029262 - RNA, 19 nt, Artificial Sequence
  Description of Artificial Sequence: Synthetic oligonucleotide
agguacuguuccauauccu

SEQ ID NO: 2029263 - RNA, 19 nt, Artificial Sequence
  Description of Artificial Sequence: Synthetic oligonucleotide
gcauccucauaccugcuaa

SEQ ID NO: 2029264 - RNA, 19 nt, Artificial Sequence
  Description of Artificial Sequence: Synthetic oligonucleotide
cacuccuucgcucuccugu

SEQ ID NO: 2029265 - RNA, 19 nt, Artificial Sequence
  Description of Artificial Sequence: Synthetic oligonucleotide
guacggagcacuccugggu

SEQ ID NO: 2029266 - RNA, 19 nt, Artificial Sequence
  Description of Artificial Sequence: Synthetic oligonucleotide
cuucugccgcuccuucaac

SEQ ID NO: 2029267 - RNA, 19 nt, Artificial Sequence
  Description of Artificial Sequence: Synthetic oligonucleotide
aagugguuuucuaccucuu

SEQ ID NO: 2029268 - RNA, 19 nt, Artificial Sequence
  Description of Artificial Sequence: Synthetic oligonucleotide
cuggaugaggggagcuuca

SEQ ID NO: 2029269 - RNA, 19 nt, Artificial Sequence
  Description of Artificial Sequence: Synthetic oligonucleotide
gaggggagcuucagcggug

SEQ ID NO: 2029270 - RNA, 19 nt, Artificial Sequence
  Description of Artificial Sequence: Synthetic oligonucleotide
gcguguguucugcaucaag

SEQ ID NO: 2029271 - RNA, 19 nt, Artificial Sequence
  Description of Artificial Sequence: Synthetic oligonucleotide
gcaagugguuuucuaccuc

SEQ ID NO: 2029272 - RNA, 19 nt, Artificial Sequence
  Description of Artificial Sequence: Synthetic oligonucleotide
uggcuggagugcugauucu

SEQ ID NO: 2029273 - RNA, 19 nt, Artificial Sequence
  Description of Artificial Sequence: Synthetic oligonucleotide
caucgcguccccuccccuc

SEQ ID NO: 2029274 - RNA, 19 nt, Artificial Sequence
  Description of Artificial Sequence: Synthetic oligonucleotide
ggacugugcauguuugugu

SEQ ID NO: 2029275 - RNA, 19 nt, Artificial Sequence
  Description of Artificial Sequence: Synthetic oligonucleotide
gaagugcagcccacgcauc

SEQ ID NO: 2029276 - RNA, 19 nt, Artificial Sequence
  Description of Artificial Sequence: Synthetic oligonucleotide
auguccacguucaccucca

SEQ ID NO: 2029277 - RNA, 19 nt, Artificial Sequence
  Description of Artificial Sequence: Synthetic oligonucleotide
acccggacgugaaauccug

SEQ ID NO: 2029278 - RNA, 19 nt, Artificial Sequence
  Description of Artificial Sequence: Synthetic oligonucleotide
cagccgcucgcgcaggguc

SEQ ID NO: 2029279 - RNA, 19 nt, Artificial Sequence
  Description of Artificial Sequence: Synthetic oligonucleotide
gagcuucagcgguguccag

SEQ ID NO: 2029280 - RNA, 19 nt, Artificial Sequence
  Description of Artificial Sequence: Synthetic oligonucleotide
ccauauccugcuggaaggc

SEQ ID NO: 2029281 - RNA, 19 nt, Artificial Sequence
  Description of Artificial Sequence: Synthetic oligonucleotide
cagcaucgcguccccuccc

SEQ ID NO: 2029282 - RNA, 19 nt, Artificial Sequence
  Description of Artificial Sequence: Synthetic oligonucleotide
ucgcguccccuccccucag

SEQ ID NO: 2029283 - RNA, 19 nt, Artificial Sequence
  Description of Artificial Sequence: Synthetic oligonucleotide
acggagcacuccuggguuu

SEQ ID NO: 2029284 - RNA, 19 nt, Artificial Sequence
  Description of Artificial Sequence: Synthetic oligonucleotide
ccugcuaaguaauuccagu

SEQ ID NO: 2029285 - RNA, 19 nt, Artificial Sequence
  Description of Artificial Sequence: Synthetic oligonucleotide
gcagaguacuuuguuaagu

SEQ ID NO: 2029286 - RNA, 19 nt, Artificial Sequence
  Description of Artificial Sequence: Synthetic oligonucleotide
caggccucgcgccgccgcg

SEQ ID NO: 2029287 - RNA, 19 nt, Artificial Sequence
  Description of Artificial Sequence: Synthetic oligonucleotide
agacgccguagggcgcccc

SEQ ID NO: 2029288 - RNA, 19 nt, Artificial Sequence
  Description of Artificial Sequence: Synthetic oligonucleotide
accuguggacagguacugu

SEQ ID NO: 2029289 - RNA, 19 nt, Artificial Sequence
  Description of Artificial Sequence: Synthetic oligonucleotide
cuucugcguguguucugca

SEQ ID NO: 2029290 - RNA, 19 nt, Artificial Sequence
  Description of Artificial Sequence: Synthetic oligonucleotide
aggugucgggacugugcau

SEQ ID NO: 2029291 - RNA, 19 nt, Artificial Sequence
  Description of Artificial Sequence: Synthetic oligonucleotide
ccacuagcucuccagcguc

SEQ ID NO: 2029292 - RNA, 19 nt, Artificial Sequence
  Description of Artificial Sequence: Synthetic oligonucleotide
augcagcaagugguuuucu

SEQ ID NO: 2029293 - RNA, 19 nt, Artificial Sequence
  Description of Artificial Sequence: Synthetic oligonucleotide
gcugcgugugcuccauuuc

SEQ ID NO: 2029294 - RNA, 19 nt, Artificial Sequence
  Description of Artificial Sequence: Synthetic oligonucleotide
gucgggacugugcauguuu

SEQ ID NO: 2029295 - RNA, 19 nt, Artificial Sequence
  Description of Artificial Sequence: Synthetic oligonucleotide
gcuggagugcugauucuga

SEQ ID NO: 2029296 - RNA, 19 nt, Artificial Sequence
  Description of Artificial Sequence: Synthetic oligonucleotide
gggguuggauucaagcucu

SEQ ID NO: 2029297 - RNA, 19 nt, Artificial Sequence
  Description of Artificial Sequence: Synthetic oligonucleotide
cuucagcgguguccagguc

SEQ ID NO: 2029298 - RNA, 19 nt, Artificial Sequence
  Description of Artificial Sequence: Synthetic oligonucleotide
gcuucagcgguguccaggu

SEQ ID NO: 2029299 - RNA, 19 nt, Artificial Sequence
  Description of Artificial Sequence: Synthetic oligonucleotide
ugcguguguucugcaucaa

SEQ ID NO: 2029300 - RNA, 19 nt, Artificial Sequence
  Description of Artificial Sequence: Synthetic oligonucleotide
cuucaacccggacgugaaa

SEQ ID NO: 2029301 - RNA, 19 nt, Artificial Sequence
  Description of Artificial Sequence: Synthetic oligonucleotide
guucaccuccauggaugac

SEQ ID NO: 2029302 - RNA, 19 nt, Artificial Sequence
  Description of Artificial Sequence: Synthetic oligonucleotide
cauauccugcuggaaggcu

SEQ ID NO: 2029303 - RNA, 19 nt, Artificial Sequence
  Description of Artificial Sequence: Synthetic oligonucleotide
cggacgugaaauccugcug

SEQ ID NO: 2029304 - RNA, 19 nt, Artificial Sequence
  Description of Artificial Sequence: Synthetic oligonucleotide
gggccccagacgccguagg

SEQ ID NO: 2029305 - RNA, 19 nt, Artificial Sequence
  Description of Artificial Sequence: Synthetic oligonucleotide
ggucagagauguccaucaa

SEQ ID NO: 2029306 - RNA, 19 nt, Artificial Sequence
  Description of Artificial Sequence: Synthetic oligonucleotide
gcccacgcauccucauacc

SEQ ID NO: 2029307 - RNA, 19 nt, Artificial Sequence
  Description of Artificial Sequence: Synthetic oligonucleotide
gucagugcaggcagagggu

SEQ ID NO: 2029308 - RNA, 19 nt, Artificial Sequence
  Description of Artificial Sequence: Synthetic oligonucleotide
cuccuucgcucuccuguga

SEQ ID NO: 2029309 - RNA, 19 nt, Artificial Sequence
  Description of Artificial Sequence: Synthetic oligonucleotide
cccggacgugaaauccugc

SEQ ID NO: 2029310 - RNA, 19 nt, Artificial Sequence
  Description of Artificial Sequence: Synthetic oligonucleotide
gcacacuccuucgcucucc

SEQ ID NO: 2029311 - RNA, 19 nt, Artificial Sequence
  Description of Artificial Sequence: Synthetic oligonucleotide
gcccaugggcucucgccug

SEQ ID NO: 2029312 - RNA, 19 nt, Artificial Sequence
  Description of Artificial Sequence: Synthetic oligonucleotide
gugucgggacugugcaugu

SEQ ID NO: 2029313 - RNA, 19 nt, Artificial Sequence
  Description of Artificial Sequence: Synthetic oligonucleotide
ccagacgccguagggcgcc

SEQ ID NO: 2029314 - RNA, 19 nt, Artificial Sequence
  Description of Artificial Sequence: Synthetic oligonucleotide
ugucgggacugugcauguu

SEQ ID NO: 2029315 - RNA, 19 nt, Artificial Sequence
  Description of Artificial Sequence: Synthetic oligonucleotide
augcugcccaugggcucuc

SEQ ID NO: 2029316 - RNA, 19 nt, Artificial Sequence
  Description of Artificial Sequence: Synthetic oligonucleotide
gcugcccaugggcucucgc

SEQ ID NO: 2029317 - RNA, 19 nt, Artificial Sequence
  Description of Artificial Sequence: Synthetic oligonucleotide
uugcugcgugugcuccauu

SEQ ID NO: 2029318 - RNA, 19 nt, Artificial Sequence
  Description of Artificial Sequence: Synthetic oligonucleotide
cgcuccuucaacuucaguu

SEQ ID NO: 2029319 - RNA, 19 nt, Artificial Sequence
  Description of Artificial Sequence: Synthetic oligonucleotide
ccuccccucaggccucgcg

SEQ ID NO: 2029320 - RNA, 19 nt, Artificial Sequence
  Description of Artificial Sequence: Synthetic oligonucleotide
cucaggccucgcgccgccg

SEQ ID NO: 2029321 - RNA, 19 nt, Artificial Sequence
  Description of Artificial Sequence: Synthetic oligonucleotide
ccucaucggacuggaugag

SEQ ID NO: 2029322 - RNA, 19 nt, Artificial Sequence
  Description of Artificial Sequence: Synthetic oligonucleotide
ccacacaaauccuccaaau

SEQ ID NO: 2029323 - RNA, 19 nt, Artificial Sequence
  Description of Artificial Sequence: Synthetic oligonucleotide
ggagcacuccuggguuugc

SEQ ID NO: 2029324 - RNA, 19 nt, Artificial Sequence
  Description of Artificial Sequence: Synthetic oligonucleotide
cucggacaggcugguccuc

SEQ ID NO: 2029325 - RNA, 19 nt, Artificial Sequence
  Description of Artificial Sequence: Synthetic oligonucleotide
ggugaggcagguggcugga

SEQ ID NO: 2029326 - RNA, 19 nt, Artificial Sequence
  Description of Artificial Sequence: Synthetic oligonucleotide
cccagacgccguagggcgc

SEQ ID NO: 2029327 - RNA, 19 nt, Artificial Sequence
  Description of Artificial Sequence: Synthetic oligonucleotide
gagcacuccuggguuugcu

SEQ ID NO: 2029328 - RNA, 19 nt, Artificial Sequence
  Description of Artificial Sequence: Synthetic oligonucleotide
ggguagacuuucugucagu

SEQ ID NO: 2029329 - RNA, 19 nt, Artificial Sequence
  Description of Artificial Sequence: Synthetic oligonucleotide
ccuguacauccuccucauc

SEQ ID NO: 2029330 - RNA, 19 nt, Artificial Sequence
  Description of Artificial Sequence: Synthetic oligonucleotide
guugcugcgugugcuccau

SEQ ID NO: 2029331 - RNA, 19 nt, Artificial Sequence
  Description of Artificial Sequence: Synthetic oligonucleotide
gugcugauucugaggaauu

SEQ ID NO: 2029332 - RNA, 19 nt, Artificial Sequence
  Description of Artificial Sequence: Synthetic oligonucleotide
ccggacgugaaauccugcu

SEQ ID NO: 2029333 - RNA, 19 nt, Artificial Sequence
  Description of Artificial Sequence: Synthetic oligonucleotide
ccagcgucugcacacuccu

SEQ ID NO: 2029334 - RNA, 19 nt, Artificial Sequence
  Description of Artificial Sequence: Synthetic oligonucleotide
cagcccacgcauccucaua

SEQ ID NO: 2029335 - RNA, 19 nt, Artificial Sequence
  Description of Artificial Sequence: Synthetic oligonucleotide
gguaaccuguggacaggua

SEQ ID NO: 2029336 - RNA, 19 nt, Artificial Sequence
  Description of Artificial Sequence: Synthetic oligonucleotide
cggacuggaugaggggagc

SEQ ID NO: 2029337 - RNA, 19 nt, Artificial Sequence
  Description of Artificial Sequence: Synthetic oligonucleotide
cggagcacuccuggguuug

SEQ ID NO: 2029338 - RNA, 19 nt, Artificial Sequence
  Description of Artificial Sequence: Synthetic oligonucleotide
cccucaggccucgcgccgc

SEQ ID NO: 2029339 - RNA, 19 nt, Artificial Sequence
  Description of Artificial Sequence: Synthetic oligonucleotide
ggggagcuucagcgguguc

SEQ ID NO: 2029340 - RNA, 19 nt, Artificial Sequence
  Description of Artificial Sequence: Synthetic oligonucleotide
cacugacaccugggguaga

SEQ ID NO: 2029341 - RNA, 19 nt, Artificial Sequence
  Description of Artificial Sequence: Synthetic oligonucleotide
cagcucggacaggcugguc

SEQ ID NO: 2029342 - RNA, 19 nt, Artificial Sequence
  Description of Artificial Sequence: Synthetic oligonucleotide
ggcucucgccugucugcaa

SEQ ID NO: 2029343 - RNA, 19 nt, Artificial Sequence
  Description of Artificial Sequence: Synthetic oligonucleotide
cgcguccccuccccucagg

SEQ ID NO: 2029344 - RNA, 19 nt, Artificial Sequence
  Description of Artificial Sequence: Synthetic oligonucleotide
ggguuggauucaagcucua

SEQ ID NO: 2029345 - RNA, 19 nt, Artificial Sequence
  Description of Artificial Sequence: Synthetic oligonucleotide
gcaucgcguccccuccccu

SEQ ID NO: 2029346 - RNA, 19 nt, Artificial Sequence
  Description of Artificial Sequence: Synthetic oligonucleotide
gcagcucggacaggcuggu

SEQ ID NO: 2029347 - RNA, 19 nt, Artificial Sequence
  Description of Artificial Sequence: Synthetic oligonucleotide
cagcgucugcacacuccuu

SEQ ID NO: 2029348 - RNA, 19 nt, Artificial Sequence
  Description of Artificial Sequence: Synthetic oligonucleotide
cgggccccagacgccguag

SEQ ID NO: 2029349 - RNA, 19 nt, Artificial Sequence
  Description of Artificial Sequence: Synthetic oligonucleotide
cgggacugugcauguuugu

SEQ ID NO: 2029350 - RNA, 19 nt, Artificial Sequence
  Description of Artificial Sequence: Synthetic oligonucleotide
ccaguccagcagaguacuu

SEQ ID NO: 2029351 - RNA, 19 nt, Artificial Sequence
  Description of Artificial Sequence: Synthetic oligonucleotide
ugguauauagauaugucgg

SEQ ID NO: 2029352 - RNA, 19 nt, Artificial Sequence
  Description of Artificial Sequence: Synthetic oligonucleotide
uuuacaaauguacagugga

SEQ ID NO: 2029353 - RNA, 19 nt, Artificial Sequence
  Description of Artificial Sequence: Synthetic oligonucleotide
uugguauauagauaugucg

SEQ ID NO: 2029354 - RNA, 19 nt, Artificial Sequence
  Description of Artificial Sequence: Synthetic oligonucleotide
uucacacggacauacaagg

SEQ ID NO: 2029355 - RNA, 19 nt, Artificial Sequence
  Description of Artificial Sequence: Synthetic oligonucleotide
agcaugucguccuugaugg

SEQ ID NO: 2029356 - RNA, 19 nt, Artificial Sequence
  Description of Artificial Sequence: Synthetic oligonucleotide
gauguagacaccugggcgg

SEQ ID NO: 2029357 - RNA, 19 nt, Artificial Sequence
  Description of Artificial Sequence: Synthetic oligonucleotide
uauauagauaugucggaag

SEQ ID NO: 2029358 - RNA, 19 nt, Artificial Sequence
  Description of Artificial Sequence: Synthetic oligonucleotide
gauaugucggaaguguugg

SEQ ID NO: 2029359 - RNA, 19 nt, Artificial Sequence
  Description of Artificial Sequence: Synthetic oligonucleotide
acaggcauccuucuugccc

SEQ ID NO: 2029360 - RNA, 19 nt, Artificial Sequence
  Description of Artificial Sequence: Synthetic oligonucleotide
auauagauaugucggaagu

SEQ ID NO: 2029361 - RNA, 19 nt, Artificial Sequence
  Description of Artificial Sequence: Synthetic oligonucleotide
acucaaagaugauggaggg

SEQ ID NO: 2029362 - RNA, 19 nt, Artificial Sequence
  Description of Artificial Sequence: Synthetic oligonucleotide
uccacaaggcacaccaagg

SEQ ID NO: 2029363 - RNA, 19 nt, Artificial Sequence
  Description of Artificial Sequence: Synthetic oligonucleotide
ugacugauccacaaggcac

SEQ ID NO: 2029364 - RNA, 19 nt, Artificial Sequence
  Description of Artificial Sequence: Synthetic oligonucleotide
auaguaagcagugucacca

SEQ ID NO: 2029365 - RNA, 19 nt, Artificial Sequence
  Description of Artificial Sequence: Synthetic oligonucleotide
acaaggcacaccaaggggc

SEQ ID NO: 2029366 - RNA, 19 nt, Artificial Sequence
  Description of Artificial Sequence: Synthetic oligonucleotide
cacacggacauacaaggcg

SEQ ID NO: 2029367 - RNA, 19 nt, Artificial Sequence
  Description of Artificial Sequence: Synthetic oligonucleotide
aacaugacugcaugggcca

SEQ ID NO: 2029368 - RNA, 19 nt, Artificial Sequence
  Description of Artificial Sequence: Synthetic oligonucleotide
cuuuccacccguuucacac

SEQ ID NO: 2029369 - RNA, 19 nt, Artificial Sequence
  Description of Artificial Sequence: Synthetic oligonucleotide
uucuaaggcguccuccccg

SEQ ID NO: 2029370 - RNA, 19 nt, Artificial Sequence
  Description of Artificial Sequence: Synthetic oligonucleotide
gacugcaugggccaccagg

SEQ ID NO: 2029371 - RNA, 19 nt, Artificial Sequence
  Description of Artificial Sequence: Synthetic oligonucleotide
aagugacacggauguagac

SEQ ID NO: 2029372 - RNA, 19 nt, Artificial Sequence
  Description of Artificial Sequence: Synthetic oligonucleotide
agcaggacuugguauauag

SEQ ID NO: 2029373 - RNA, 19 nt, Artificial Sequence
  Description of Artificial Sequence: Synthetic oligonucleotide
uguuggagaagcagugugc

SEQ ID NO: 2029374 - RNA, 19 nt, Artificial Sequence
  Description of Artificial Sequence: Synthetic oligonucleotide
cauguuggugcgaugagac

SEQ ID NO: 2029375 - RNA, 19 nt, Artificial Sequence
  Description of Artificial Sequence: Synthetic oligonucleotide
uccgguugaacauccuugg

SEQ ID NO: 2029376 - RNA, 19 nt, Artificial Sequence
  Description of Artificial Sequence: Synthetic oligonucleotide
caacaugacugcaugggcc

SEQ ID NO: 2029377 - RNA, 19 nt, Artificial Sequence
  Description of Artificial Sequence: Synthetic oligonucleotide
guuucugcaggauccgugg

SEQ ID NO: 2029378 - RNA, 19 nt, Artificial Sequence
  Description of Artificial Sequence: Synthetic oligonucleotide
gaggauaguaagcaguguc

SEQ ID NO: 2029379 - RNA, 19 nt, Artificial Sequence
  Description of Artificial Sequence: Synthetic oligonucleotide
ugaggacccauguuggugc

SEQ ID NO: 2029380 - RNA, 19 nt, Artificial Sequence
  Description of Artificial Sequence: Synthetic oligonucleotide
auagauaugucggaagugu

SEQ ID NO: 2029381 - RNA, 19 nt, Artificial Sequence
  Description of Artificial Sequence: Synthetic oligonucleotide
gauaguaagcagugucacc

SEQ ID NO: 2029382 - RNA, 19 nt, Artificial Sequence
  Description of Artificial Sequence: Synthetic oligonucleotide
ucugggaugaucugaugga

SEQ ID NO: 2029383 - RNA, 19 nt, Artificial Sequence
  Description of Artificial Sequence: Synthetic oligonucleotide
agcagauugcaccugggug

SEQ ID NO: 2029384 - RNA, 19 nt, Artificial Sequence
  Description of Artificial Sequence: Synthetic oligonucleotide
auuugugaugggaagugac

SEQ ID NO: 2029385 - RNA, 19 nt, Artificial Sequence
  Description of Artificial Sequence: Synthetic oligonucleotide
agggaugugggacugccuc

SEQ ID NO: 2029386 - RNA, 19 nt, Artificial Sequence
  Description of Artificial Sequence: Synthetic oligonucleotide
acuugguauauagauaugu

SEQ ID NO: 2029387 - RNA, 19 nt, Artificial Sequence
  Description of Artificial Sequence: Synthetic oligonucleotide
uauagauaugucggaagug

SEQ ID NO: 2029388 - RNA, 19 nt, Artificial Sequence
  Description of Artificial Sequence: Synthetic oligonucleotide
uaugucggaaguguuggag

SEQ ID NO: 2029389 - RNA, 19 nt, Artificial Sequence
  Description of Artificial Sequence: Synthetic oligonucleotide
gugaugggaagugacacgg

SEQ ID NO: 2029390 - RNA, 19 nt, Artificial Sequence
  Description of Artificial Sequence: Synthetic oligonucleotide
agaagugggucccgauugc

SEQ ID NO: 2029391 - RNA, 19 nt, Artificial Sequence
  Description of Artificial Sequence: Synthetic oligonucleotide
gucaccaggaccaacauga

SEQ ID NO: 2029392 - RNA, 19 nt, Artificial Sequence
  Description of Artificial Sequence: Synthetic oligonucleotide
ggauguagacaccugggcg

SEQ ID NO: 2029393 - RNA, 19 nt, Artificial Sequence
  Description of Artificial Sequence: Synthetic oligonucleotide
gaagucggaaucagcaucc

SEQ ID NO: 2029394 - RNA, 19 nt, Artificial Sequence
  Description of Artificial Sequence: Synthetic oligonucleotide
ucaugcccgacucaaagau

SEQ ID NO: 2029395 - RNA, 19 nt, Artificial Sequence
  Description of Artificial Sequence: Synthetic oligonucleotide
uuacaggcauccuucuugc

SEQ ID NO: 2029396 - RNA, 19 nt, Artificial Sequence
  Description of Artificial Sequence: Synthetic oligonucleotide
ggugcugccaaccucgagg

SEQ ID NO: 2029397 - RNA, 19 nt, Artificial Sequence
  Description of Artificial Sequence: Synthetic oligonucleotide
guugguugagcccugguca

SEQ ID NO: 2029398 - RNA, 19 nt, Artificial Sequence
  Description of Artificial Sequence: Synthetic oligonucleotide
gguugaacauccuugggug

SEQ ID NO: 2029399 - RNA, 19 nt, Artificial Sequence
  Description of Artificial Sequence: Synthetic oligonucleotide
aguggauagggcucuaccu

SEQ ID NO: 2029400 - RNA, 19 nt, Artificial Sequence
  Description of Artificial Sequence: Synthetic oligonucleotide
uuccacccguuucacacgg

SEQ ID NO: 2029401 - RNA, 19 nt, Artificial Sequence
  Description of Artificial Sequence: Synthetic oligonucleotide
gaaggucacaggcaccugc

SEQ ID NO: 2029402 - RNA, 19 nt, Artificial Sequence
  Description of Artificial Sequence: Synthetic oligonucleotide
ucggaaguguuggagaagc

SEQ ID NO: 2029403 - RNA, 19 nt, Artificial Sequence
  Description of Artificial Sequence: Synthetic oligonucleotide
ggugcgaugagacugcccc

SEQ ID NO: 2029404 - RNA, 19 nt, Artificial Sequence
  Description of Artificial Sequence: Synthetic oligonucleotide
uucucuggccugaugguug

SEQ ID NO: 2029405 - RNA, 19 nt, Artificial Sequence
  Description of Artificial Sequence: Synthetic oligonucleotide
gugacacggauguagacac

SEQ ID NO: 2029406 - RNA, 19 nt, Artificial Sequence
  Description of Artificial Sequence: Synthetic oligonucleotide
ucagcaucccugcuguaca

SEQ ID NO: 2029407 - RNA, 19 nt, Artificial Sequence
  Description of Artificial Sequence: Synthetic oligonucleotide
auccauuugugaugggaag

SEQ ID NO: 2029408 - RNA, 19 nt, Artificial Sequence
  Description of Artificial Sequence: Synthetic oligonucleotide
cagaggauaguaagcagug

SEQ ID NO: 2029409 - RNA, 19 nt, Artificial Sequence
  Description of Artificial Sequence: Synthetic oligonucleotide
aggcucagaggauaguaag

SEQ ID NO: 2029410 - RNA, 19 nt, Artificial Sequence
  Description of Artificial Sequence: Synthetic oligonucleotide
guuuugagcuggaagucgg

SEQ ID NO: 2029411 - RNA, 19 nt, Artificial Sequence
  Description of Artificial Sequence: Synthetic oligonucleotide
uacaaauguacaguggaua

SEQ ID NO: 2029412 - RNA, 19 nt, Artificial Sequence
  Description of Artificial Sequence: Synthetic oligonucleotide
ucggucuuguucacugggg

SEQ ID NO: 2029413 - RNA, 19 nt, Artificial Sequence
  Description of Artificial Sequence: Synthetic oligonucleotide
ugaugguugguugagcccu

SEQ ID NO: 2029414 - RNA, 19 nt, Artificial Sequence
  Description of Artificial Sequence: Synthetic oligonucleotide
augacugauccacaaggca

SEQ ID NO: 2029415 - RNA, 19 nt, Artificial Sequence
  Description of Artificial Sequence: Synthetic oligonucleotide
gcagccuccaccaagagcc

SEQ ID NO: 2029416 - RNA, 19 nt, Artificial Sequence
  Description of Artificial Sequence: Synthetic oligonucleotide
uguucacuggggcugcccc

SEQ ID NO: 2029417 - RNA, 19 nt, Artificial Sequence
  Description of Artificial Sequence: Synthetic oligonucleotide
cacggauguagacaccugg

SEQ ID NO: 2029418 - RNA, 19 nt, Artificial Sequence
  Description of Artificial Sequence: Synthetic oligonucleotide
acugccucauguucucugg

SEQ ID NO: 2029419 - RNA, 19 nt, Artificial Sequence
  Description of Artificial Sequence: Synthetic oligonucleotide
cacaaggcacaccaagggg

SEQ ID NO: 2029420 - RNA, 19 nt, Artificial Sequence
  Description of Artificial Sequence: Synthetic oligonucleotide
uuuccacccguuucacacg

SEQ ID NO: 2029421 - RNA, 19 nt, Artificial Sequence
  Description of Artificial Sequence: Synthetic oligonucleotide
ugcuguacagcagauugca

SEQ ID NO: 2029422 - RNA, 19 nt, Artificial Sequence
  Description of Artificial Sequence: Synthetic oligonucleotide
uugaacauccuugggugcc

SEQ ID NO: 2029423 - RNA, 19 nt, Artificial Sequence
  Description of Artificial Sequence: Synthetic oligonucleotide
caaauguacaguggauagg

SEQ ID NO: 2029424 - RNA, 19 nt, Artificial Sequence
  Description of Artificial Sequence: Synthetic oligonucleotide
aacauccuugggugcccgc

SEQ ID NO: 2029425 - RNA, 19 nt, Artificial Sequence
  Description of Artificial Sequence: Synthetic oligonucleotide
aucagcaucccugcuguac

SEQ ID NO: 2029426 - RNA, 19 nt, Artificial Sequence
  Description of Artificial Sequence: Synthetic oligonucleotide
ccaugacugauccacaagg

SEQ ID NO: 2029427 - RNA, 19 nt, Artificial Sequence
  Description of Artificial Sequence: Synthetic oligonucleotide
ccauucaccuucuaaggcg

SEQ ID NO: 2029428 - RNA, 19 nt, Artificial Sequence
  Description of Artificial Sequence: Synthetic oligonucleotide
cagaagugggucccgauug

SEQ ID NO: 2029429 - RNA, 19 nt, Artificial Sequence
  Description of Artificial Sequence: Synthetic oligonucleotide
ucccgauugcgcuggaugc

SEQ ID NO: 2029430 - RNA, 19 nt, Artificial Sequence
  Description of Artificial Sequence: Synthetic oligonucleotide
ugaucugauggauccauuu

SEQ ID NO: 2029431 - RNA, 19 nt, Artificial Sequence
  Description of Artificial Sequence: Synthetic oligonucleotide
ucacacggacauacaaggc

SEQ ID NO: 2029432 - RNA, 19 nt, Artificial Sequence
  Description of Artificial Sequence: Synthetic oligonucleotide
aacuucaguucugggauga

SEQ ID NO: 2029433 - RNA, 19 nt, Artificial Sequence
  Description of Artificial Sequence: Synthetic oligonucleotide
gucggaaucagcaucccug

SEQ ID NO: 2029434 - RNA, 19 nt, Artificial Sequence
  Description of Artificial Sequence: Synthetic oligonucleotide
uugguugagcccuggucag

SEQ ID NO: 2029435 - RNA, 19 nt, Artificial Sequence
  Description of Artificial Sequence: Synthetic oligonucleotide
agugacacggauguagaca

SEQ ID NO: 2029436 - RNA, 19 nt, Artificial Sequence
  Description of Artificial Sequence: Synthetic oligonucleotide
ugucggaaguguuggagaa

SEQ ID NO: 2029437 - RNA, 19 nt, Artificial Sequence
  Description of Artificial Sequence: Synthetic oligonucleotide
ggacauacaaggcgugugg

SEQ ID NO: 2029438 - RNA, 19 nt, Artificial Sequence
  Description of Artificial Sequence: Synthetic oligonucleotide
uucaugcccgacucaaaga

SEQ ID NO: 2029439 - RNA, 19 nt, Artificial Sequence
  Description of Artificial Sequence: Synthetic oligonucleotide
caaggcacaccaaggggcc

SEQ ID NO: 2029440 - RNA, 19 nt, Artificial Sequence
  Description of Artificial Sequence: Synthetic oligonucleotide
ugcacagagcaugucgucc

SEQ ID NO: 2029441 - RNA, 19 nt, Artificial Sequence
  Description of Artificial Sequence: Synthetic oligonucleotide
ucuaaggcguccuccccgc

SEQ ID NO: 2029442 - RNA, 19 nt, Artificial Sequence
  Description of Artificial Sequence: Synthetic oligonucleotide
gaugggcacagcaaguuuc

SEQ ID NO: 2029443 - RNA, 19 nt, Artificial Sequence
  Description of Artificial Sequence: Synthetic oligonucleotide
ggaaggauguaguugguga

SEQ ID NO: 2029444 - RNA, 19 nt, Artificial Sequence
  Description of Artificial Sequence: Synthetic oligonucleotide
uccauuugugaugggaagu

SEQ ID NO: 2029445 - RNA, 19 nt, Artificial Sequence
  Description of Artificial Sequence: Synthetic oligonucleotide
uccccugaaacuucaguuc

SEQ ID NO: 2029446 - RNA, 19 nt, Artificial Sequence
  Description of Artificial Sequence: Synthetic oligonucleotide
acccguuucacacggacau

SEQ ID NO: 2029447 - RNA, 19 nt, Artificial Sequence
  Description of Artificial Sequence: Synthetic oligonucleotide
gggccauucaccuucuaag

SEQ ID NO: 2029448 - RNA, 19 nt, Artificial Sequence
  Description of Artificial Sequence: Synthetic oligonucleotide
ucuugcccucugcaaagcc

SEQ ID NO: 2029449 - RNA, 19 nt, Artificial Sequence
  Description of Artificial Sequence: Synthetic oligonucleotide
gcaaguuucugcaggaucc

SEQ ID NO: 2029450 - RNA, 19 nt, Artificial Sequence
  Description of Artificial Sequence: Synthetic oligonucleotide
agauaugucggaaguguug

SEQ ID NO: 2029451 - RNA, 19 nt, Artificial Sequence
  Description of Artificial Sequence: Synthetic oligonucleotide
gaaggauguaguuggugaa

SEQ ID NO: 2029452 - RNA, 19 nt, Artificial Sequence
  Description of Artificial Sequence: Synthetic oligonucleotide
cugaugguugguugagccc

SEQ ID NO: 2029453 - RNA, 19 nt, Artificial Sequence
  Description of Artificial Sequence: Synthetic oligonucleotide
agugggucccgauugcgcu

SEQ ID NO: 2029454 - RNA, 19 nt, Artificial Sequence
  Description of Artificial Sequence: Synthetic oligonucleotide
gguauauagauaugucgga

SEQ ID NO: 2029455 - RNA, 19 nt, Artificial Sequence
  Description of Artificial Sequence: Synthetic oligonucleotide
ggcagaguuccccaggugc

SEQ ID NO: 2029456 - RNA, 19 nt, Artificial Sequence
  Description of Artificial Sequence: Synthetic oligonucleotide
gacauacaaggcguguggc

SEQ ID NO: 2029457 - RNA, 19 nt, Artificial Sequence
  Description of Artificial Sequence: Synthetic oligonucleotide
agaguuccccaggugcugc

SEQ ID NO: 2029458 - RNA, 19 nt, Artificial Sequence
  Description of Artificial Sequence: Synthetic oligonucleotide
accauccgguugaacaucc

SEQ ID NO: 2029459 - RNA, 19 nt, Artificial Sequence
  Description of Artificial Sequence: Synthetic oligonucleotide
ggaaucagcaucccugcug

SEQ ID NO: 2029460 - RNA, 19 nt, Artificial Sequence
  Description of Artificial Sequence: Synthetic oligonucleotide
ugugucaaugaugggcaca

SEQ ID NO: 2029461 - RNA, 19 nt, Artificial Sequence
  Description of Artificial Sequence: Synthetic oligonucleotide
aggggucaggcagacacac

SEQ ID NO: 2029462 - RNA, 19 nt, Artificial Sequence
  Description of Artificial Sequence: Synthetic oligonucleotide
ucaguucugggaugaucug

SEQ ID NO: 2029463 - RNA, 19 nt, Artificial Sequence
  Description of Artificial Sequence: Synthetic oligonucleotide
aggauaguaagcaguguca

SEQ ID NO: 2029464 - RNA, 19 nt, Artificial Sequence
  Description of Artificial Sequence: Synthetic oligonucleotide
gguuuugagcuggaagucg

SEQ ID NO: 2029465 - RNA, 19 nt, Artificial Sequence
  Description of Artificial Sequence: Synthetic oligonucleotide
uagauaugucggaaguguu

SEQ ID NO: 2029466 - RNA, 19 nt, Artificial Sequence
  Description of Artificial Sequence: Synthetic oligonucleotide
acccuuacaggcauccuuc

SEQ ID NO: 2029467 - RNA, 19 nt, Artificial Sequence
  Description of Artificial Sequence: Synthetic oligonucleotide
agacacacaggaaggaugu

SEQ ID NO: 2029468 - RNA, 19 nt, Artificial Sequence
  Description of Artificial Sequence: Synthetic oligonucleotide
gauccauuugugaugggaa

SEQ ID NO: 2029469 - RNA, 19 nt, Artificial Sequence
  Description of Artificial Sequence: Synthetic oligonucleotide
cagucggucuuguucacug

SEQ ID NO: 2029470 - RNA, 19 nt, Artificial Sequence
  Description of Artificial Sequence: Synthetic oligonucleotide
acaccugggcgguuccggc

SEQ ID NO: 2029471 - RNA, 19 nt, Artificial Sequence
  Description of Artificial Sequence: Synthetic oligonucleotide
cucaaagaugauggagggg

SEQ ID NO: 2029472 - RNA, 19 nt, Artificial Sequence
  Description of Artificial Sequence: Synthetic oligonucleotide
agucggucuuguucacugg

SEQ ID NO: 2029473 - RNA, 19 nt, Artificial Sequence
  Description of Artificial Sequence: Synthetic oligonucleotide
guauauagauaugucggaa

SEQ ID NO: 2029474 - RNA, 19 nt, Artificial Sequence
  Description of Artificial Sequence: Synthetic oligonucleotide
ccugaugguugguugagcc

SEQ ID NO: 2029475 - RNA, 19 nt, Artificial Sequence
  Description of Artificial Sequence: Synthetic oligonucleotide
ggaagucggaaucagcauc

SEQ ID NO: 2029476 - RNA, 19 nt, Artificial Sequence
  Description of Artificial Sequence: Synthetic oligonucleotide
  modified_base (8)..(8): a, c, u, g, unknown or other
ucuaccunccuggccuggg

SEQ ID NO: 2029477 - RNA, 19 nt, Artificial Sequence
  Description of Artificial Sequence: Synthetic oligonucleotide
  modified_base (6)..(6): a, c, u, g, unknown or other
uaccunccuggccugggca

SEQ ID NO: 2029478 - RNA, 19 nt, Artificial Sequence
  Description of Artificial Sequence: Synthetic oligonucleotide
acggauguagacaccuggg

SEQ ID NO: 2029479 - RNA, 19 nt, Artificial Sequence
  Description of Artificial Sequence: Synthetic oligonucleotide
cugcacccaugacugaucc

SEQ ID NO: 2029480 - RNA, 19 nt, Artificial Sequence
  Description of Artificial Sequence: Synthetic oligonucleotide
  modified_base (15)..(15): a, c, u, g, unknown or other
auagggcucuaccunccug

SEQ ID NO: 2029481 - RNA, 19 nt, Artificial Sequence
  Description of Artificial Sequence: Synthetic oligonucleotide
gucccgauugcgcuggaug

SEQ ID NO: 2029482 - RNA, 19 nt, Artificial Sequence
  Description of Artificial Sequence: Synthetic oligonucleotide
gaagugacacggauguaga

SEQ ID NO: 2029483 - RNA, 19 nt, Artificial Sequence
  Description of Artificial Sequence: Synthetic oligonucleotide
caaguuucugcaggauccg

SEQ ID NO: 2029484 - RNA, 19 nt, Artificial Sequence
  Description of Artificial Sequence: Synthetic oligonucleotide
augcccgacucaaagauga

SEQ ID NO: 2029485 - RNA, 19 nt, Artificial Sequence
  Description of Artificial Sequence: Synthetic oligonucleotide
auccgguugaacauccuug

SEQ ID NO: 2029486 - RNA, 19 nt, Artificial Sequence
  Description of Artificial Sequence: Synthetic oligonucleotide
gaaguguuggagaagcagu

SEQ ID NO: 2029487 - RNA, 19 nt, Artificial Sequence
  Description of Artificial Sequence: Synthetic oligonucleotide
  modified_base (5)..(5): a, c, u, g, unknown or other
accunccuggccugggcag

SEQ ID NO: 2029488 - RNA, 19 nt, Artificial Sequence
  Description of Artificial Sequence: Synthetic oligonucleotide
caucagucccagaucucag

SEQ ID NO: 2029489 - RNA, 19 nt, Artificial Sequence
  Description of Artificial Sequence: Synthetic oligonucleotide
ccaggugcugccaaccucg

SEQ ID NO: 2029490 - RNA, 19 nt, Artificial Sequence
  Description of Artificial Sequence: Synthetic oligonucleotide
cagaucucagcagcagugg

SEQ ID NO: 2029491 - RNA, 19 nt, Artificial Sequence
  Description of Artificial Sequence: Synthetic oligonucleotide
aggcagacacacaggaagg

SEQ ID NO: 2029492 - RNA, 19 nt, Artificial Sequence
  Description of Artificial Sequence: Synthetic oligonucleotide
gacugauccacaaggcaca

SEQ ID NO: 2029493 - RNA, 19 nt, Artificial Sequence
  Description of Artificial Sequence: Synthetic oligonucleotide
guuggagaagcagugugca

SEQ ID NO: 2029494 - RNA, 19 nt, Artificial Sequence
  Description of Artificial Sequence: Synthetic oligonucleotide
gaggacccauguuggugcg

SEQ ID NO: 2029495 - RNA, 19 nt, Artificial Sequence
  Description of Artificial Sequence: Synthetic oligonucleotide
  modified_base (7)..(7): a, c, u, g, unknown or other
cuaccunccuggccugggc

SEQ ID NO: 2029496 - RNA, 19 nt, Artificial Sequence
  Description of Artificial Sequence: Synthetic oligonucleotide
cuucuaaggcguccucccc

SEQ ID NO: 2029497 - RNA, 19 nt, Artificial Sequence
  Description of Artificial Sequence: Synthetic oligonucleotide
gcggugaggacccauguug

SEQ ID NO: 2029498 - RNA, 19 nt, Artificial Sequence
  Description of Artificial Sequence: Synthetic oligonucleotide
ggaccaacaugacugcaug

SEQ ID NO: 2029499 - RNA, 19 nt, Artificial Sequence
  Description of Artificial Sequence: Synthetic oligonucleotide
agcaucccugcuguacagc

SEQ ID NO: 2029500 - RNA, 19 nt, Artificial Sequence
  Description of Artificial Sequence: Synthetic oligonucleotide
uccuccccgccuaccaucc

SEQ ID NO: 2029501 - RNA, 19 nt, Artificial Sequence
  Description of Artificial Sequence: Synthetic oligonucleotide
caggacuugguauauagau

SEQ ID NO: 2029502 - RNA, 19 nt, Artificial Sequence
  Description of Artificial Sequence: Synthetic oligonucleotide
guaagcagugucaccagga

SEQ ID NO: 2029503 - RNA, 19 nt, Artificial Sequence
  Description of Artificial Sequence: Synthetic oligonucleotide
ggauccguggguugggcag

SEQ ID NO: 2029504 - RNA, 19 nt, Artificial Sequence
  Description of Artificial Sequence: Synthetic oligonucleotide
acacggacauacaaggcgu

SEQ ID NO: 2029505 - RNA, 19 nt, Artificial Sequence
  Description of Artificial Sequence: Synthetic oligonucleotide
gacaccugggcgguuccgg

SEQ ID NO: 2029506 - RNA, 19 nt, Artificial Sequence
  Description of Artificial Sequence: Synthetic oligonucleotide
cugauggauccauuuguga

SEQ ID NO: 2029507 - RNA, 19 nt, Artificial Sequence
  Description of Artificial Sequence: Synthetic oligonucleotide
ugaugggcacagcaaguuu

SEQ ID NO: 2029508 - RNA, 19 nt, Artificial Sequence
  Description of Artificial Sequence: Synthetic oligonucleotide
agagugcuggccccaucag

SEQ ID NO: 2029509 - RNA, 19 nt, Artificial Sequence
  Description of Artificial Sequence: Synthetic oligonucleotide
gccauucaccuucuaaggc

SEQ ID NO: 2029510 - RNA, 19 nt, Artificial Sequence
  Description of Artificial Sequence: Synthetic oligonucleotide
caugcccgacucaaagaug

SEQ ID NO: 2029511 - RNA, 19 nt, Artificial Sequence
  Description of Artificial Sequence: Synthetic oligonucleotide
agggccauucaccuucuaa

SEQ ID NO: 2029512 - RNA, 19 nt, Artificial Sequence
  Description of Artificial Sequence: Synthetic oligonucleotide
acccauguuggugcgauga

SEQ ID NO: 2029513 - RNA, 19 nt, Artificial Sequence
  Description of Artificial Sequence: Synthetic oligonucleotide
aaggcguguggcccuggcu

SEQ ID NO: 2029514 - RNA, 19 nt, Artificial Sequence
  Description of Artificial Sequence: Synthetic oligonucleotide
ugacacggauguagacacc

SEQ ID NO: 2029515 - RNA, 19 nt, Artificial Sequence
  Description of Artificial Sequence: Synthetic oligonucleotide
uugggugcccgcaggcucu

SEQ ID NO: 2029516 - RNA, 19 nt, Artificial Sequence
  Description of Artificial Sequence: Synthetic oligonucleotide
agucggaaucagcaucccu

SEQ ID NO: 2029517 - RNA, 19 nt, Artificial Sequence
  Description of Artificial Sequence: Synthetic oligonucleotide
gguuccggcgggcacagcc

SEQ ID NO: 2029518 - RNA, 19 nt, Artificial Sequence
  Description of Artificial Sequence: Synthetic oligonucleotide
  modified_base (19)..(19): a, c, u, g, unknown or other
guggauagggcucuaccun

SEQ ID NO: 2029519 - RNA, 19 nt, Artificial Sequence
  Description of Artificial Sequence: Synthetic oligonucleotide
ugggucccgauugcgcugg

SEQ ID NO: 2029520 - RNA, 19 nt, Artificial Sequence
  Description of Artificial Sequence: Synthetic oligonucleotide
uagacaccugggcgguucc

SEQ ID NO: 2029521 - RNA, 19 nt, Artificial Sequence
  Description of Artificial Sequence: Synthetic oligonucleotide
ggauaguaagcagugucac

SEQ ID NO: 2029522 - RNA, 19 nt, Artificial Sequence
  Description of Artificial Sequence: Synthetic oligonucleotide
gauugcaccuggguguguc

SEQ ID NO: 2029523 - RNA, 19 nt, Artificial Sequence
  Description of Artificial Sequence: Synthetic oligonucleotide
gggcacagcaaguuucugc

SEQ ID NO: 2029524 - RNA, 19 nt, Artificial Sequence
  Description of Artificial Sequence: Synthetic oligonucleotide
gaugggaagugacacggau

SEQ ID NO: 2029525 - RNA, 19 nt, Artificial Sequence
  Description of Artificial Sequence: Synthetic oligonucleotide
gacuugguauauagauaug

SEQ ID NO: 2029526 - RNA, 19 nt, Artificial Sequence
  Description of Artificial Sequence: Synthetic oligonucleotide
cuugggugcccgcaggcuc

SEQ ID NO: 2029527 - RNA, 19 nt, Artificial Sequence
  Description of Artificial Sequence: Synthetic oligonucleotide
ccuucuaaggcguccuccc

SEQ ID NO: 2029528 - RNA, 19 nt, Artificial Sequence
  Description of Artificial Sequence: Synthetic oligonucleotide
gguugagcccuggucagcg

SEQ ID NO: 2029529 - RNA, 19 nt, Artificial Sequence
  Description of Artificial Sequence: Synthetic oligonucleotide
  modified_base (13)..(13): a, c, u, g, unknown or other
agggcucuaccunccuggc

SEQ ID NO: 2029530 - RNA, 19 nt, Artificial Sequence
  Description of Artificial Sequence: Synthetic oligonucleotide
caucccugcuguacagcag

SEQ ID NO: 2029531 - RNA, 19 nt, Artificial Sequence
  Description of Artificial Sequence: Synthetic oligonucleotide
cucgagggucucuuugcug

SEQ ID NO: 2029532 - RNA, 19 nt, Artificial Sequence
  Description of Artificial Sequence: Synthetic oligonucleotide
ccaacaugacugcaugggc

SEQ ID NO: 2029533 - RNA, 19 nt, Artificial Sequence
  Description of Artificial Sequence: Synthetic oligonucleotide
auguuggugcgaugagacu

SEQ ID NO: 2029534 - RNA, 19 nt, Artificial Sequence
  Description of Artificial Sequence: Synthetic oligonucleotide
  modified_base (16)..(16): a, c, u, g, unknown or other
gauagggcucuaccunccu

SEQ ID NO: 2029535 - RNA, 19 nt, Artificial Sequence
  Description of Artificial Sequence: Synthetic oligonucleotide
gugggacugccucauguuc

SEQ ID NO: 2029536 - RNA, 19 nt, Artificial Sequence
  Description of Artificial Sequence: Synthetic oligonucleotide
acccaugacugauccacaa

SEQ ID NO: 2029537 - RNA, 19 nt, Artificial Sequence
  Description of Artificial Sequence: Synthetic oligonucleotide
agaggauaguaagcagugu

SEQ ID NO: 2029538 - RNA, 19 nt, Artificial Sequence
  Description of Artificial Sequence: Synthetic oligonucleotide
gacacggauguagacaccu

SEQ ID NO: 2029539 - RNA, 19 nt, Artificial Sequence
  Description of Artificial Sequence: Synthetic oligonucleotide
uggugcgaugagacugccc

SEQ ID NO: 2029540 - RNA, 19 nt, Artificial Sequence
  Description of Artificial Sequence: Synthetic oligonucleotide
gcucucagagugcuggccc

SEQ ID NO: 2029541 - RNA, 19 nt, Artificial Sequence
  Description of Artificial Sequence: Synthetic oligonucleotide
guugagcccuggucagcgg

SEQ ID NO: 2029542 - RNA, 19 nt, Artificial Sequence
  Description of Artificial Sequence: Synthetic oligonucleotide
gcucagaggauaguaagca

SEQ ID NO: 2029543 - RNA, 19 nt, Artificial Sequence
  Description of Artificial Sequence: Synthetic oligonucleotide
acuggaggccaugccuugg

SEQ ID NO: 2029544 - RNA, 19 nt, Artificial Sequence
  Description of Artificial Sequence: Synthetic oligonucleotide
aaggcguccuccccgccua

SEQ ID NO: 2029545 - RNA, 19 nt, Artificial Sequence
  Description of Artificial Sequence: Synthetic oligonucleotide
acagcagauugcaccuggg

SEQ ID NO: 2029546 - RNA, 19 nt, Artificial Sequence
  Description of Artificial Sequence: Synthetic oligonucleotide
caugacugcaugggccacc

SEQ ID NO: 2029547 - RNA, 19 nt, Artificial Sequence
  Description of Artificial Sequence: Synthetic oligonucleotide
uggauccauuugugauggg

SEQ ID NO: 2029548 - RNA, 19 nt, Artificial Sequence
  Description of Artificial Sequence: Synthetic oligonucleotide
gaggccaugccuugguacu

SEQ ID NO: 2029549 - RNA, 19 nt, Artificial Sequence
  Description of Artificial Sequence: Synthetic oligonucleotide
cacggacauacaaggcgug

SEQ ID NO: 2029550 - RNA, 19 nt, Artificial Sequence
  Description of Artificial Sequence: Synthetic oligonucleotide
guucugggaugaucugaug

SEQ ID NO: 2029551 - RNA, 19 nt, Artificial Sequence
  Description of Artificial Sequence: Synthetic oligonucleotide
agugacccagcaguucaug

SEQ ID NO: 2029552 - RNA, 19 nt, Artificial Sequence
  Description of Artificial Sequence: Synthetic oligonucleotide
gaugugggacugccucaug

SEQ ID NO: 2029553 - RNA, 19 nt, Artificial Sequence
  Description of Artificial Sequence: Synthetic oligonucleotide
aagccugcacagagcaugu

SEQ ID NO: 2029554 - RNA, 19 nt, Artificial Sequence
  Description of Artificial Sequence: Synthetic oligonucleotide
gagaagcagugugcagcgg

SEQ ID NO: 2029555 - RNA, 19 nt, Artificial Sequence
  Description of Artificial Sequence: Synthetic oligonucleotide
aggauccguggguugggca

SEQ ID NO: 2029556 - RNA, 19 nt, Artificial Sequence
  Description of Artificial Sequence: Synthetic oligonucleotide
ggauccauuugugauggga

SEQ ID NO: 2029557 - RNA, 19 nt, Artificial Sequence
  Description of Artificial Sequence: Synthetic oligonucleotide
caccugggcgguuccggcg

SEQ ID NO: 2029558 - RNA, 19 nt, Artificial Sequence
  Description of Artificial Sequence: Synthetic oligonucleotide
gaguuccccaggugcugcc

SEQ ID NO: 2029559 - RNA, 19 nt, Artificial Sequence
  Description of Artificial Sequence: Synthetic oligonucleotide
cccgcaggcucucagagug

SEQ ID NO: 2029560 - RNA, 19 nt, Artificial Sequence
  Description of Artificial Sequence: Synthetic oligonucleotide
gaugguugguugagcccug

SEQ ID NO: 2029561 - RNA, 19 nt, Artificial Sequence
  Description of Artificial Sequence: Synthetic oligonucleotide
ugcccucugcaaagccugc

SEQ ID NO: 2029562 - RNA, 19 nt, Artificial Sequence
  Description of Artificial Sequence: Synthetic oligonucleotide
uaccauccgguugaacauc

SEQ ID NO: 2029563 - RNA, 19 nt, Artificial Sequence
  Description of Artificial Sequence: Synthetic oligonucleotide
ccaaggggccuccagaguc

SEQ ID NO: 2029564 - RNA, 19 nt, Artificial Sequence
  Description of Artificial Sequence: Synthetic oligonucleotide
uuccggcgggcacagcccu

SEQ ID NO: 2029565 - RNA, 19 nt, Artificial Sequence
  Description of Artificial Sequence: Synthetic oligonucleotide
gggcagucggucuuguuca

SEQ ID NO: 2029566 - RNA, 19 nt, Artificial Sequence
  Description of Artificial Sequence: Synthetic oligonucleotide
gucggaaguguuggagaag

SEQ ID NO: 2029567 - RNA, 19 nt, Artificial Sequence
  Description of Artificial Sequence: Synthetic oligonucleotide
ugaucaccccagccugcac

SEQ ID NO: 2029568 - RNA, 19 nt, Artificial Sequence
  Description of Artificial Sequence: Synthetic oligonucleotide
acagagcaugucguccuug

SEQ ID NO: 2029569 - RNA, 19 nt, Artificial Sequence
  Description of Artificial Sequence: Synthetic oligonucleotide
auguagacaccugggcggu

SEQ ID NO: 2029570 - RNA, 19 nt, Artificial Sequence
  Description of Artificial Sequence: Synthetic oligonucleotide
agagcaugucguccuugau

SEQ ID NO: 2029571 - RNA, 19 nt, Artificial Sequence
  Description of Artificial Sequence: Synthetic oligonucleotide
ugucaaugaugggcacagc

SEQ ID NO: 2029572 - RNA, 19 nt, Artificial Sequence
  Description of Artificial Sequence: Synthetic oligonucleotide
  modified_base (11)..(11): a, c, u, g, unknown or other
ggcucuaccunccuggccu

SEQ ID NO: 2029573 - RNA, 19 nt, Artificial Sequence
  Description of Artificial Sequence: Synthetic oligonucleotide
ucucagagugcuggcccca

SEQ ID NO: 2029574 - RNA, 19 nt, Artificial Sequence
  Description of Artificial Sequence: Synthetic oligonucleotide
ccacaucagcacuggaggc

SEQ ID NO: 2029575 - RNA, 19 nt, Artificial Sequence
  Description of Artificial Sequence: Synthetic oligonucleotide
augguugguugagcccugg

SEQ ID NO: 2029576 - RNA, 19 nt, Artificial Sequence
  Description of Artificial Sequence: Synthetic oligonucleotide
aaucagcaucccugcugua

SEQ ID NO: 2029577 - RNA, 19 nt, Artificial Sequence
  Description of Artificial Sequence: Synthetic oligonucleotide
ugcuuuccacccguuucac

SEQ ID NO: 2029578 - RNA, 19 nt, Artificial Sequence
  Description of Artificial Sequence: Synthetic oligonucleotide
acggacauacaaggcgugu

SEQ ID NO: 2029579 - RNA, 19 nt, Artificial Sequence
  Description of Artificial Sequence: Synthetic oligonucleotide
ucagagugcuggccccauc

SEQ ID NO: 2029580 - RNA, 19 nt, Artificial Sequence
  Description of Artificial Sequence: Synthetic oligonucleotide
ucuggccugaugguugguu

SEQ ID NO: 2029581 - RNA, 19 nt, Artificial Sequence
  Description of Artificial Sequence: Synthetic oligonucleotide
  modified_base (9)..(9): a, c, u, g, unknown or other
cucuaccunccuggccugg

SEQ ID NO: 2029582 - RNA, 19 nt, Artificial Sequence
  Description of Artificial Sequence: Synthetic oligonucleotide
gcugccaaccucgaggguc

SEQ ID NO: 2029583 - RNA, 19 nt, Artificial Sequence
  Description of Artificial Sequence: Synthetic oligonucleotide
gugggucccgauugcgcug

SEQ ID NO: 2029584 - RNA, 19 nt, Artificial Sequence
  Description of Artificial Sequence: Synthetic oligonucleotide
ugguugagcccuggucagc

SEQ ID NO: 2029585 - RNA, 19 nt, Artificial Sequence
  Description of Artificial Sequence: Synthetic oligonucleotide
ccguuucacacggacauac

SEQ ID NO: 2029586 - RNA, 19 nt, Artificial Sequence
  Description of Artificial Sequence: Synthetic oligonucleotide
cuugcccucugcaaagccu

SEQ ID NO: 2029587 - RNA, 19 nt, Artificial Sequence
  Description of Artificial Sequence: Synthetic oligonucleotide
augucguccuugaugguuu

SEQ ID NO: 2029588 - RNA, 19 nt, Artificial Sequence
  Description of Artificial Sequence: Synthetic oligonucleotide
ugcaccugggugugucaau

SEQ ID NO: 2029589 - RNA, 19 nt, Artificial Sequence
  Description of Artificial Sequence: Synthetic oligonucleotide
  modified_base (3)..(3): a, c, u, g, unknown or other
cunccuggccugggcaggc

SEQ ID NO: 2029590 - RNA, 19 nt, Artificial Sequence
  Description of Artificial Sequence: Synthetic oligonucleotide
gacccauguuggugcgaug

SEQ ID NO: 2029591 - RNA, 19 nt, Artificial Sequence
  Description of Artificial Sequence: Synthetic oligonucleotide
ugacugcaugggccaccag

SEQ ID NO: 2029592 - RNA, 19 nt, Artificial Sequence
  Description of Artificial Sequence: Synthetic oligonucleotide
guggguugggcagucgguc

SEQ ID NO: 2029593 - RNA, 19 nt, Artificial Sequence
  Description of Artificial Sequence: Synthetic oligonucleotide
cuaaggcguccuccccgcc

SEQ ID NO: 2029594 - RNA, 19 nt, Artificial Sequence
  Description of Artificial Sequence: Synthetic oligonucleotide
  modified_base (10)..(10): a, c, u, g, unknown or other
gcucuaccunccuggccug

SEQ ID NO: 2029595 - RNA, 19 nt, Artificial Sequence
  Description of Artificial Sequence: Synthetic oligonucleotide
gcgggcacagcccucuccc

SEQ ID NO: 2029596 - RNA, 19 nt, Artificial Sequence
  Description of Artificial Sequence: Synthetic oligonucleotide
  modified_base (17)..(17): a, c, u, g, unknown or other
ggauagggcucuaccuncc

SEQ ID NO: 2029597 - RNA, 19 nt, Artificial Sequence
  Description of Artificial Sequence: Synthetic oligonucleotide
cacccguuucacacggaca

SEQ ID NO: 2029598 - RNA, 19 nt, Artificial Sequence
  Description of Artificial Sequence: Synthetic oligonucleotide
cagaguuccccaggugcug

SEQ ID NO: 2029599 - RNA, 19 nt, Artificial Sequence
  Description of Artificial Sequence: Synthetic oligonucleotide
agacaccugggcgguuccg

SEQ ID NO: 2029600 - RNA, 19 nt, Artificial Sequence
  Description of Artificial Sequence: Synthetic oligonucleotide
guuccggcgggcacagccc

SEQ ID NO: 2029601 - RNA, 19 nt, Artificial Sequence
  Description of Artificial Sequence: Synthetic oligonucleotide
cggugaggacccauguugg

SEQ ID NO: 2029602 - RNA, 19 nt, Artificial Sequence
  Description of Artificial Sequence: Synthetic oligonucleotide
uccacccguuucacacgga

SEQ ID NO: 2029603 - RNA, 19 nt, Artificial Sequence
  Description of Artificial Sequence: Synthetic oligonucleotide
ggugaaggucacaggcacc

SEQ ID NO: 2029604 - RNA, 19 nt, Artificial Sequence
  Description of Artificial Sequence: Synthetic oligonucleotide
caagagccacaucagcacu

SEQ ID NO: 2029605 - RNA, 19 nt, Artificial Sequence
  Description of Artificial Sequence: Synthetic oligonucleotide
guccuccccgccuaccauc

SEQ ID NO: 2029606 - RNA, 19 nt, Artificial Sequence
  Description of Artificial Sequence: Synthetic oligonucleotide
ucacccuuacaggcauccu

SEQ ID NO: 2029607 - RNA, 19 nt, Artificial Sequence
  Description of Artificial Sequence: Synthetic oligonucleotide
gcagggaugugggacugcc

SEQ ID NO: 2029608 - RNA, 19 nt, Artificial Sequence
  Description of Artificial Sequence: Synthetic oligonucleotide
ugcugccaaccucgagggu

SEQ ID NO: 2029609 - RNA, 19 nt, Artificial Sequence
  Description of Artificial Sequence: Synthetic oligonucleotide
ugcccgacucaaagaugau

SEQ ID NO: 2029610 - RNA, 19 nt, Artificial Sequence
  Description of Artificial Sequence: Synthetic oligonucleotide
ggugcccgcaggcucucag

SEQ ID NO: 2029611 - RNA, 19 nt, Artificial Sequence
  Description of Artificial Sequence: Synthetic oligonucleotide
acacggauguagacaccug

SEQ ID NO: 2029612 - RNA, 19 nt, Artificial Sequence
  Description of Artificial Sequence: Synthetic oligonucleotide
guaguuggugaaggucaca

SEQ ID NO: 2029613 - RNA, 19 nt, Artificial Sequence
  Description of Artificial Sequence: Synthetic oligonucleotide
ccgguugaacauccuuggg

SEQ ID NO: 2029614 - RNA, 19 nt, Artificial Sequence
  Description of Artificial Sequence: Synthetic oligonucleotide
auccguggguugggcaguc

SEQ ID NO: 2029615 - RNA, 19 nt, Artificial Sequence
  Description of Artificial Sequence: Synthetic oligonucleotide
ggcguguggcccuggcugc

SEQ ID NO: 2029616 - RNA, 19 nt, Artificial Sequence
  Description of Artificial Sequence: Synthetic oligonucleotide
ccguggguugggcagucgg

SEQ ID NO: 2029617 - RNA, 19 nt, Artificial Sequence
  Description of Artificial Sequence: Synthetic oligonucleotide
ccacccguuucacacggac

SEQ ID NO: 2029618 - RNA, 19 nt, Artificial Sequence
  Description of Artificial Sequence: Synthetic oligonucleotide
aguucaugcccgacucaaa

SEQ ID NO: 2029619 - RNA, 19 nt, Artificial Sequence
  Description of Artificial Sequence: Synthetic oligonucleotide
aggcguccuccccgccuac

SEQ ID NO: 2029620 - RNA, 19 nt, Artificial Sequence
  Description of Artificial Sequence: Synthetic oligonucleotide
caccugggugugucaauga

SEQ ID NO: 2029621 - RNA, 19 nt, Artificial Sequence
  Description of Artificial Sequence: Synthetic oligonucleotide
ggucuuguucacuggggcu

SEQ ID NO: 2029622 - RNA, 19 nt, Artificial Sequence
  Description of Artificial Sequence: Synthetic oligonucleotide
cccugaaacuucaguucug

SEQ ID NO: 2029623 - RNA, 19 nt, Artificial Sequence
  Description of Artificial Sequence: Synthetic oligonucleotide
ggccugaugguugguugag

SEQ ID NO: 2029624 - RNA, 19 nt, Artificial Sequence
  Description of Artificial Sequence: Synthetic oligonucleotide
  modified_base (12)..(12): a, c, u, g, unknown or other
gggcucuaccunccuggcc

SEQ ID NO: 2029625 - RNA, 19 nt, Artificial Sequence
  Description of Artificial Sequence: Synthetic oligonucleotide
acaaggcguguggcccugg

SEQ ID NO: 2029626 - RNA, 19 nt, Artificial Sequence
  Description of Artificial Sequence: Synthetic oligonucleotide
  modified_base (4)..(4): a, c, u, g, unknown or other
ccunccuggccugggcagg

SEQ ID NO: 2029627 - RNA, 19 nt, Artificial Sequence
  Description of Artificial Sequence: Synthetic oligonucleotide
guuccccaggugcugccaa

SEQ ID NO: 2029628 - RNA, 19 nt, Artificial Sequence
  Description of Artificial Sequence: Synthetic oligonucleotide
ugggcgguuccggcgggca

SEQ ID NO: 2029629 - RNA, 19 nt, Artificial Sequence
  Description of Artificial Sequence: Synthetic oligonucleotide
ugcagcggugaggacccau

SEQ ID NO: 2029630 - RNA, 19 nt, Artificial Sequence
  Description of Artificial Sequence: Synthetic oligonucleotide
ccugcacccaugacugauc

SEQ ID NO: 2029631 - RNA, 19 nt, Artificial Sequence
  Description of Artificial Sequence: Synthetic oligonucleotide
cugcaugggccaccaggca

SEQ ID NO: 2029632 - RNA, 19 nt, Artificial Sequence
  Description of Artificial Sequence: Synthetic oligonucleotide
cccgccuaccauccgguug

SEQ ID NO: 2029633 - RNA, 19 nt, Artificial Sequence
  Description of Artificial Sequence: Synthetic oligonucleotide
ccccaccagaagugggucc

SEQ ID NO: 2029634 - RNA, 19 nt, Artificial Sequence
  Description of Artificial Sequence: Synthetic oligonucleotide
ccagccugcacccaugacu

SEQ ID NO: 2029635 - RNA, 19 nt, Artificial Sequence
  Description of Artificial Sequence: Synthetic oligonucleotide
ggaugaucugauggaucca

SEQ ID NO: 2029636 - RNA, 19 nt, Artificial Sequence
  Description of Artificial Sequence: Synthetic oligonucleotide
gcuuuccacccguuucaca

SEQ ID NO: 2029637 - RNA, 19 nt, Artificial Sequence
  Description of Artificial Sequence: Synthetic oligonucleotide
gcagcggugaggacccaug

SEQ ID NO: 2029638 - RNA, 19 nt, Artificial Sequence
  Description of Artificial Sequence: Synthetic oligonucleotide
ccgccuaccauccgguuga

SEQ ID NO: 2029639 - RNA, 19 nt, Artificial Sequence
  Description of Artificial Sequence: Synthetic oligonucleotide
caggaccaacaugacugca

SEQ ID NO: 2029640 - RNA, 19 nt, Artificial Sequence
  Description of Artificial Sequence: Synthetic oligonucleotide
gcaggcucagaggauagua

SEQ ID NO: 2029641 - RNA, 19 nt, Artificial Sequence
  Description of Artificial Sequence: Synthetic oligonucleotide
gcaguucaugcccgacuca

SEQ ID NO: 2029642 - RNA, 19 nt, Artificial Sequence
  Description of Artificial Sequence: Synthetic oligonucleotide
gauccguggguugggcagu

SEQ ID NO: 2029643 - RNA, 19 nt, Artificial Sequence
  Description of Artificial Sequence: Synthetic oligonucleotide
ggcagucggucuuguucac

SEQ ID NO: 2029644 - RNA, 19 nt, Artificial Sequence
  Description of Artificial Sequence: Synthetic oligonucleotide
gacacacaggaaggaugua

SEQ ID NO: 2029645 - RNA, 19 nt, Artificial Sequence
  Description of Artificial Sequence: Synthetic oligonucleotide
uguagacaccugggcgguu

SEQ ID NO: 2029646 - RNA, 19 nt, Artificial Sequence
  Description of Artificial Sequence: Synthetic oligonucleotide
aggacccauguuggugcga

SEQ ID NO: 2029647 - RNA, 19 nt, Artificial Sequence
  Description of Artificial Sequence: Synthetic oligonucleotide
cggacauacaaggcgugug

SEQ ID NO: 2029648 - RNA, 19 nt, Artificial Sequence
  Description of Artificial Sequence: Synthetic oligonucleotide
uccggcgggcacagcccuc

SEQ ID NO: 2029649 - RNA, 19 nt, Artificial Sequence
  Description of Artificial Sequence: Synthetic oligonucleotide
  modified_base (2)..(2): a, c, u, g, unknown or other
unccuggccugggcaggcu

SEQ ID NO: 2029650 - RNA, 19 nt, Artificial Sequence
  Description of Artificial Sequence: Synthetic oligonucleotide
gccccaucagucccagauc

SEQ ID NO: 2029651 - RNA, 19 nt, Artificial Sequence
  Description of Artificial Sequence: Synthetic oligonucleotide
ccauguuggugcgaugaga

SEQ ID NO: 2029652 - RNA, 19 nt, Artificial Sequence
  Description of Artificial Sequence: Synthetic oligonucleotide
ggugaggacccauguuggu

SEQ ID NO: 2029653 - RNA, 19 nt, Artificial Sequence
  Description of Artificial Sequence: Synthetic oligonucleotide
caggugcugccaaccucga

SEQ ID NO: 2029654 - RNA, 19 nt, Artificial Sequence
  Description of Artificial Sequence: Synthetic oligonucleotide
agccagugacccagcaguu

SEQ ID NO: 2029655 - RNA, 19 nt, Artificial Sequence
  Description of Artificial Sequence: Synthetic oligonucleotide
gggguugcuuuccacccgu

SEQ ID NO: 2029656 - RNA, 19 nt, Artificial Sequence
  Description of Artificial Sequence: Synthetic oligonucleotide
cagccuccaccaagagcca

SEQ ID NO: 2029657 - RNA, 19 nt, Artificial Sequence
  Description of Artificial Sequence: Synthetic oligonucleotide
gccuccaccaagagccaca

SEQ ID NO: 2029658 - RNA, 19 nt, Artificial Sequence
  Description of Artificial Sequence: Synthetic oligonucleotide
cugggcgguuccggcgggc

SEQ ID NO: 2029659 - RNA, 19 nt, Artificial Sequence
  Description of Artificial Sequence: Synthetic oligonucleotide
gguugcuuuccacccguuu

SEQ ID NO: 2029660 - RNA, 19 nt, Artificial Sequence
  Description of Artificial Sequence: Synthetic oligonucleotide
ggcgguuccggcgggcaca

SEQ ID NO: 2029661 - RNA, 19 nt, Artificial Sequence
  Description of Artificial Sequence: Synthetic oligonucleotide
cguuucacacggacauaca

SEQ ID NO: 2029662 - RNA, 19 nt, Artificial Sequence
  Description of Artificial Sequence: Synthetic oligonucleotide
ggccuuccccugaaacuuc

SEQ ID NO: 2029663 - RNA, 19 nt, Artificial Sequence
  Description of Artificial Sequence: Synthetic oligonucleotide
ugggugcccgcaggcucuc

SEQ ID NO: 2029664 - RNA, 19 nt, Artificial Sequence
  Description of Artificial Sequence: Synthetic oligonucleotide
ugccaaccucgagggucuc

SEQ ID NO: 2029665 - RNA, 19 nt, Artificial Sequence
  Description of Artificial Sequence: Synthetic oligonucleotide
ggaugugggacugccucau

SEQ ID NO: 2029666 - RNA, 19 nt, Artificial Sequence
  Description of Artificial Sequence: Synthetic oligonucleotide
ggacccauguuggugcgau

SEQ ID NO: 2029667 - RNA, 19 nt, Artificial Sequence
  Description of Artificial Sequence: Synthetic oligonucleotide
cagugacccagcaguucau

SEQ ID NO: 2029668 - RNA, 19 nt, Artificial Sequence
  Description of Artificial Sequence: Synthetic oligonucleotide
gggcgguuccggcgggcac

SEQ ID NO: 2029669 - RNA, 19 nt, Artificial Sequence
  Description of Artificial Sequence: Synthetic oligonucleotide
cccagaucucagcagcagu

SEQ ID NO: 2029670 - RNA, 19 nt, Artificial Sequence
  Description of Artificial Sequence: Synthetic oligonucleotide
ccuccccgccuaccauccg

SEQ ID NO: 2029671 - RNA, 19 nt, Artificial Sequence
  Description of Artificial Sequence: Synthetic oligonucleotide
cacagagcaugucguccuu

SEQ ID NO: 2029672 - RNA, 19 nt, Artificial Sequence
  Description of Artificial Sequence: Synthetic oligonucleotide
cagcaggacuugguauaua

SEQ ID NO: 2029673 - RNA, 19 nt, Artificial Sequence
  Description of Artificial Sequence: Synthetic oligonucleotide
caccccagccugcacccau

SEQ ID NO: 2029674 - RNA, 19 nt, Artificial Sequence
  Description of Artificial Sequence: Synthetic oligonucleotide
gccuaccauccgguugaac

SEQ ID NO: 2029675 - RNA, 19 nt, Artificial Sequence
  Description of Artificial Sequence: Synthetic oligonucleotide
ccucgagggucucuuugcu

SEQ ID NO: 2029676 - RNA, 19 nt, Artificial Sequence
  Description of Artificial Sequence: Synthetic oligonucleotide
caaccucgagggucucuuu

SEQ ID NO: 2029677 - RNA, 19 nt, Artificial Sequence
  Description of Artificial Sequence: Synthetic oligonucleotide
cccuuacaggcauccuucu

SEQ ID NO: 2029678 - RNA, 19 nt, Artificial Sequence
  Description of Artificial Sequence: Synthetic oligonucleotide
gccugcacccaugacugau

SEQ ID NO: 2029679 - RNA, 19 nt, Artificial Sequence
  Description of Artificial Sequence: Synthetic oligonucleotide
gggaagugacacggaugua

SEQ ID NO: 2029680 - RNA, 19 nt, Artificial Sequence
  Description of Artificial Sequence: Synthetic oligonucleotide
gcagucggucuuguucacu

SEQ ID NO: 2029681 - RNA, 19 nt, Artificial Sequence
  Description of Artificial Sequence: Synthetic oligonucleotide
ggacugccucauguucucu

SEQ ID NO: 2029682 - RNA, 19 nt, Artificial Sequence
  Description of Artificial Sequence: Synthetic oligonucleotide
gcccgcaggcucucagagu

SEQ ID NO: 2029683 - RNA, 19 nt, Artificial Sequence
  Description of Artificial Sequence: Synthetic oligonucleotide
ccaaccucgagggucucuu

SEQ ID NO: 2029684 - RNA, 19 nt, Artificial Sequence
  Description of Artificial Sequence: Synthetic oligonucleotide
gggucccgauugcgcugga

SEQ ID NO: 2029685 - RNA, 19 nt, Artificial Sequence
  Description of Artificial Sequence: Synthetic oligonucleotide
gccaaccucgagggucucu

SEQ ID NO: 2029686 - RNA, 19 nt, Artificial Sequence
  Description of Artificial Sequence: Synthetic oligonucleotide
cccguuucacacggacaua

SEQ ID NO: 2029687 - RNA, 19 nt, Artificial Sequence
  Description of Artificial Sequence: Synthetic oligonucleotide
cggaaucagcaucccugcu

SEQ ID NO: 2029688 - RNA, 19 nt, Artificial Sequence
  Description of Artificial Sequence: Synthetic oligonucleotide
ggucccgauugcgcuggau

SEQ ID NO: 2029689 - RNA, 19 nt, Artificial Sequence
  Description of Artificial Sequence: Synthetic oligonucleotide
ggguugcuuuccacccguu

SEQ ID NO: 2029690 - RNA, 19 nt, Artificial Sequence
  Description of Artificial Sequence: Synthetic oligonucleotide
ccggcgggcacagcccucu

SEQ ID NO: 2029691 - RNA, 19 nt, Artificial Sequence
  Description of Artificial Sequence: Synthetic oligonucleotide
ccccgccuaccauccgguu

SEQ ID NO: 2029692 - RNA, 19 nt, Artificial Sequence
  Description of Artificial Sequence: Synthetic oligonucleotide
cgccuaccauccgguugaa

SEQ ID NO: 2029693 - RNA, 19 nt, Artificial Sequence
  Description of Artificial Sequence: Synthetic oligonucleotide
acuagcaauaauuagcagc

SEQ ID NO: 2029694 - RNA, 19 nt, Artificial Sequence
  Description of Artificial Sequence: Synthetic oligonucleotide
uguauugcaaaauuugugc

SEQ ID NO: 2029695 - RNA, 19 nt, Artificial Sequence
  Description of Artificial Sequence: Synthetic oligonucleotide
aauaauuagcagcagcugu

SEQ ID NO: 2029696 - RNA, 19 nt, Artificial Sequence
  Description of Artificial Sequence: Synthetic oligonucleotide
aauaagcgccccuugaauc

SEQ ID NO: 2029697 - RNA, 19 nt, Artificial Sequence
  Description of Artificial Sequence: Synthetic oligonucleotide
uuacuaagaaaauaagcgc

SEQ ID NO: 2029698 - RNA, 19 nt, Artificial Sequence
  Description of Artificial Sequence: Synthetic oligonucleotide
uuuucgaucacuuuggcau

SEQ ID NO: 2029699 - RNA, 19 nt, Artificial Sequence
  Description of Artificial Sequence: Synthetic oligonucleotide
cuugaaucuauaaacacac

SEQ ID NO: 2029700 - RNA, 19 nt, Artificial Sequence
  Description of Artificial Sequence: Synthetic oligonucleotide
ucuauaaacacaccuaaaa

SEQ ID NO: 2029701 - RNA, 19 nt, Artificial Sequence
  Description of Artificial Sequence: Synthetic oligonucleotide
acaauguaaauucugucuc

SEQ ID NO: 2029702 - RNA, 19 nt, Artificial Sequence
  Description of Artificial Sequence: Synthetic oligonucleotide
ugcacauaggaauuggagg

SEQ ID NO: 2029703 - RNA, 19 nt, Artificial Sequence
  Description of Artificial Sequence: Synthetic oligonucleotide
agcaauaauuagcagcagc

SEQ ID NO: 2029704 - RNA, 19 nt, Artificial Sequence
  Description of Artificial Sequence: Synthetic oligonucleotide
ugucucacaacuaggacag

SEQ ID NO: 2029705 - RNA, 19 nt, Artificial Sequence
  Description of Artificial Sequence: Synthetic oligonucleotide
aagauaaguagucuccuca

SEQ ID NO: 2029706 - RNA, 19 nt, Artificial Sequence
  Description of Artificial Sequence: Synthetic oligonucleotide
caguaauagacauggaggg

SEQ ID NO: 2029707 - RNA, 19 nt, Artificial Sequence
  Description of Artificial Sequence: Synthetic oligonucleotide
uguagguauauccaagcug

SEQ ID NO: 2029708 - RNA, 19 nt, Artificial Sequence
  Description of Artificial Sequence: Synthetic oligonucleotide
uuccaauucagccagcucu

SEQ ID NO: 2029709 - RNA, 19 nt, Artificial Sequence
  Description of Artificial Sequence: Synthetic oligonucleotide
acaguaauagacauggagg

SEQ ID NO: 2029710 - RNA, 19 nt, Artificial Sequence
  Description of Artificial Sequence: Synthetic oligonucleotide
ugauuauuaauguugcuau

SEQ ID NO: 2029711 - RNA, 19 nt, Artificial Sequence
  Description of Artificial Sequence: Synthetic oligonucleotide
caaugauuauuaauguugc

SEQ ID NO: 2029712 - RNA, 19 nt, Artificial Sequence
  Description of Artificial Sequence: Synthetic oligonucleotide
uauauugacgcucgauucc

SEQ ID NO: 2029713 - RNA, 19 nt, Artificial Sequence
  Description of Artificial Sequence: Synthetic oligonucleotide
ucauaaccuucuuaggagg

SEQ ID NO: 2029714 - RNA, 19 nt, Artificial Sequence
  Description of Artificial Sequence: Synthetic oligonucleotide
guauugcaaaauuugugcg

SEQ ID NO: 2029715 - RNA, 19 nt, Artificial Sequence
  Description of Artificial Sequence: Synthetic oligonucleotide
aggucuauaagaaguaagc

SEQ ID NO: 2029716 - RNA, 19 nt, Artificial Sequence
  Description of Artificial Sequence: Synthetic oligonucleotide
cucuaacugacaaucaagc

SEQ ID NO: 2029717 - RNA, 19 nt, Artificial Sequence
  Description of Artificial Sequence: Synthetic oligonucleotide
auaaguagucuccucaucu

SEQ ID NO: 2029718 - RNA, 19 nt, Artificial Sequence
  Description of Artificial Sequence: Synthetic oligonucleotide
uauugcaaaauuugugcgc

SEQ ID NO: 2029719 - RNA, 19 nt, Artificial Sequence
  Description of Artificial Sequence: Synthetic oligonucleotide
cuucuuccuauauugacgc

SEQ ID NO: 2029720 - RNA, 19 nt, Artificial Sequence
  Description of Artificial Sequence: Synthetic oligonucleotide
aauuggaggauaaagugga

SEQ ID NO: 2029721 - RNA, 19 nt, Artificial Sequence
  Description of Artificial Sequence: Synthetic oligonucleotide
aacuucucuagccucuauc

SEQ ID NO: 2029722 - RNA, 19 nt, Artificial Sequence
  Description of Artificial Sequence: Synthetic oligonucleotide
ugaguauauauauugguuu

SEQ ID NO: 2029723 - RNA, 19 nt, Artificial Sequence
  Description of Artificial Sequence: Synthetic oligonucleotide
ucugaguauauauauuggu

SEQ ID NO: 2029724 - RNA, 19 nt, Artificial Sequence
  Description of Artificial Sequence: Synthetic oligonucleotide
aaguagucuccucaucuuc

SEQ ID NO: 2029725 - RNA, 19 nt, Artificial Sequence
  Description of Artificial Sequence: Synthetic oligonucleotide
ucuuacucaugccuuugcg

SEQ ID NO: 2029726 - RNA, 19 nt, Artificial Sequence
  Description of Artificial Sequence: Synthetic oligonucleotide
agugguaggccacacuucg

SEQ ID NO: 2029727 - RNA, 19 nt, Artificial Sequence
  Description of Artificial Sequence: Synthetic oligonucleotide
gaagccugaauuuccgagg

SEQ ID NO: 2029728 - RNA, 19 nt, Artificial Sequence
  Description of Artificial Sequence: Synthetic oligonucleotide
aaguaagcaaguaagacua

SEQ ID NO: 2029729 - RNA, 19 nt, Artificial Sequence
  Description of Artificial Sequence: Synthetic oligonucleotide
ugacaaucaagcaccagga

SEQ ID NO: 2029730 - RNA, 19 nt, Artificial Sequence
  Description of Artificial Sequence: Synthetic oligonucleotide
uuucacuacggcuccaucc

SEQ ID NO: 2029731 - RNA, 19 nt, Artificial Sequence
  Description of Artificial Sequence: Synthetic oligonucleotide
auaagaaguaagcaaguaa

SEQ ID NO: 2029732 - RNA, 19 nt, Artificial Sequence
  Description of Artificial Sequence: Synthetic oligonucleotide
aaugauuauuaauguugcu

SEQ ID NO: 2029733 - RNA, 19 nt, Artificial Sequence
  Description of Artificial Sequence: Synthetic oligonucleotide
agcaucaaucacccgagac

SEQ ID NO: 2029734 - RNA, 19 nt, Artificial Sequence
  Description of Artificial Sequence: Synthetic oligonucleotide
aaaauaagcgccccuugaa

SEQ ID NO: 2029735 - RNA, 19 nt, Artificial Sequence
  Description of Artificial Sequence: Synthetic oligonucleotide
cuuccuauauugacgcucg

SEQ ID NO: 2029736 - RNA, 19 nt, Artificial Sequence
  Description of Artificial Sequence: Synthetic oligonucleotide
caucaaucacccgagaccg

SEQ ID NO: 2029737 - RNA, 19 nt, Artificial Sequence
  Description of Artificial Sequence: Synthetic oligonucleotide
ccaguuugaacucagaaag

SEQ ID NO: 2029738 - RNA, 19 nt, Artificial Sequence
  Description of Artificial Sequence: Synthetic oligonucleotide
guaauagacauggaggggc

SEQ ID NO: 2029739 - RNA, 19 nt, Artificial Sequence
  Description of Artificial Sequence: Synthetic oligonucleotide
agaccaccgaccuggauac

SEQ ID NO: 2029740 - RNA, 19 nt, Artificial Sequence
  Description of Artificial Sequence: Synthetic oligonucleotide
uauuaauguugcuauuacu

SEQ ID NO: 2029741 - RNA, 19 nt, Artificial Sequence
  Description of Artificial Sequence: Synthetic oligonucleotide
gaagacucagacaugacca

SEQ ID NO: 2029742 - RNA, 19 nt, Artificial Sequence
  Description of Artificial Sequence: Synthetic oligonucleotide
auauugacgcucgauuccc

SEQ ID NO: 2029743 - RNA, 19 nt, Artificial Sequence
  Description of Artificial Sequence: Synthetic oligonucleotide
uuaauguugcuauuacuau

SEQ ID NO: 2029744 - RNA, 19 nt, Artificial Sequence
  Description of Artificial Sequence: Synthetic oligonucleotide
ucuaacugacaaucaagca

SEQ ID NO: 2029745 - RNA, 19 nt, Artificial Sequence
  Description of Artificial Sequence: Synthetic oligonucleotide
aaggucuauaagaaguaag

SEQ ID NO: 2029746 - RNA, 19 nt, Artificial Sequence
  Description of Artificial Sequence: Synthetic oligonucleotide
cuauauugacgcucgauuc

SEQ ID NO: 2029747 - RNA, 19 nt, Artificial Sequence
  Description of Artificial Sequence: Synthetic oligonucleotide
aaauaagcgccccuugaau

SEQ ID NO: 2029748 - RNA, 19 nt, Artificial Sequence
  Description of Artificial Sequence: Synthetic oligonucleotide
caucuggccgcauaaacag

SEQ ID NO: 2029749 - RNA, 19 nt, Artificial Sequence
  Description of Artificial Sequence: Synthetic oligonucleotide
cucgccgucaucauauucc

SEQ ID NO: 2029750 - RNA, 19 nt, Artificial Sequence
  Description of Artificial Sequence: Synthetic oligonucleotide
aagcaaguaagacuagcaa

SEQ ID NO: 2029751 - RNA, 19 nt, Artificial Sequence
  Description of Artificial Sequence: Synthetic oligonucleotide
acuucuuccuauauugacg

SEQ ID NO: 2029752 - RNA, 19 nt, Artificial Sequence
  Description of Artificial Sequence: Synthetic oligonucleotide
uucacuacggcuccaucca

SEQ ID NO: 2029753 - RNA, 19 nt, Artificial Sequence
  Description of Artificial Sequence: Synthetic oligonucleotide
aauguugcuauuacuauua

SEQ ID NO: 2029754 - RNA, 19 nt, Artificial Sequence
  Description of Artificial Sequence: Synthetic oligonucleotide
cuggauacgacuuucggca

SEQ ID NO: 2029755 - RNA, 19 nt, Artificial Sequence
  Description of Artificial Sequence: Synthetic oligonucleotide
agucgccucuuacucaugc

SEQ ID NO: 2029756 - RNA, 19 nt, Artificial Sequence
  Description of Artificial Sequence: Synthetic oligonucleotide
caaucaagcaccaggacca

SEQ ID NO: 2029757 - RNA, 19 nt, Artificial Sequence
  Description of Artificial Sequence: Synthetic oligonucleotide
aaguacucaggacagcaau

SEQ ID NO: 2029758 - RNA, 19 nt, Artificial Sequence
  Description of Artificial Sequence: Synthetic oligonucleotide
uucauacaauguaaauucu

SEQ ID NO: 2029759 - RNA, 19 nt, Artificial Sequence
  Description of Artificial Sequence: Synthetic oligonucleotide
aguggaguaaagguagagg

SEQ ID NO: 2029760 - RNA, 19 nt, Artificial Sequence
  Description of Artificial Sequence: Synthetic oligonucleotide
ugguaaaagagugguaggc

SEQ ID NO: 2029761 - RNA, 19 nt, Artificial Sequence
  Description of Artificial Sequence: Synthetic oligonucleotide
gugcauacgagucagcaac

SEQ ID NO: 2029762 - RNA, 19 nt, Artificial Sequence
  Description of Artificial Sequence: Synthetic oligonucleotide
cuucuuaggaggcucuugc

SEQ ID NO: 2029763 - RNA, 19 nt, Artificial Sequence
  Description of Artificial Sequence: Synthetic oligonucleotide
agguauauccaagcugugc

SEQ ID NO: 2029764 - RNA, 19 nt, Artificial Sequence
  Description of Artificial Sequence: Synthetic oligonucleotide
acaaucuaagugcuggccu

SEQ ID NO: 2029765 - RNA, 19 nt, Artificial Sequence
  Description of Artificial Sequence: Synthetic oligonucleotide
cauuccacuaccgagcuac

SEQ ID NO: 2029766 - RNA, 19 nt, Artificial Sequence
  Description of Artificial Sequence: Synthetic oligonucleotide
uaaaagagugguaggccac

SEQ ID NO: 2029767 - RNA, 19 nt, Artificial Sequence
  Description of Artificial Sequence: Synthetic oligonucleotide
guaaagguagaggucauug

SEQ ID NO: 2029768 - RNA, 19 nt, Artificial Sequence
  Description of Artificial Sequence: Synthetic oligonucleotide
gaggugaagacucagacau

SEQ ID NO: 2029769 - RNA, 19 nt, Artificial Sequence
  Description of Artificial Sequence: Synthetic oligonucleotide
gaaaauaagcgccccuuga

SEQ ID NO: 2029770 - RNA, 19 nt, Artificial Sequence
  Description of Artificial Sequence: Synthetic oligonucleotide
aguaauagacauggagggg

SEQ ID NO: 2029771 - RNA, 19 nt, Artificial Sequence
  Description of Artificial Sequence: Synthetic oligonucleotide
auugcaaaauuugugcgca

SEQ ID NO: 2029772 - RNA, 19 nt, Artificial Sequence
  Description of Artificial Sequence: Synthetic oligonucleotide
uggccagagacuagaagcc

SEQ ID NO: 2029773 - RNA, 19 nt, Artificial Sequence
  Description of Artificial Sequence: Synthetic oligonucleotide
cuuaggaggcucuugcuuc

SEQ ID NO: 2029774 - RNA, 19 nt, Artificial Sequence
  Description of Artificial Sequence: Synthetic oligonucleotide
ugcgaagauaaguagucuc

SEQ ID NO: 2029775 - RNA, 19 nt, Artificial Sequence
  Description of Artificial Sequence: Synthetic oligonucleotide
augcauuccacuaccgagc

SEQ ID NO: 2029776 - RNA, 19 nt, Artificial Sequence
  Description of Artificial Sequence: Synthetic oligonucleotide
aagaaguaagcaaguaaga

SEQ ID NO: 2029777 - RNA, 19 nt, Artificial Sequence
  Description of Artificial Sequence: Synthetic oligonucleotide
gagacuagaagccugaauu

SEQ ID NO: 2029778 - RNA, 19 nt, Artificial Sequence
  Description of Artificial Sequence: Synthetic oligonucleotide
uccacuaccgagcuaccac

SEQ ID NO: 2029779 - RNA, 19 nt, Artificial Sequence
  Description of Artificial Sequence: Synthetic oligonucleotide
ucugucucacaacuaggac

SEQ ID NO: 2029780 - RNA, 19 nt, Artificial Sequence
  Description of Artificial Sequence: Synthetic oligonucleotide
agaggucauugucugcugg

SEQ ID NO: 2029781 - RNA, 19 nt, Artificial Sequence
  Description of Artificial Sequence: Synthetic oligonucleotide
auaagcgccccuugaaucu

SEQ ID NO: 2029782 - RNA, 19 nt, Artificial Sequence
  Description of Artificial Sequence: Synthetic oligonucleotide
uugugcgcauguuuggcag

SEQ ID NO: 2029783 - RNA, 19 nt, Artificial Sequence
  Description of Artificial Sequence: Synthetic oligonucleotide
uaauguugcuauuacuauu

SEQ ID NO: 2029784 - RNA, 19 nt, Artificial Sequence
  Description of Artificial Sequence: Synthetic oligonucleotide
ugugcacauaggaauugga

SEQ ID NO: 2029785 - RNA, 19 nt, Artificial Sequence
  Description of Artificial Sequence: Synthetic oligonucleotide
cagcaaaugaggugaagac

SEQ ID NO: 2029786 - RNA, 19 nt, Artificial Sequence
  Description of Artificial Sequence: Synthetic oligonucleotide
ugguaggccacacuucgca

SEQ ID NO: 2029787 - RNA, 19 nt, Artificial Sequence
  Description of Artificial Sequence: Synthetic oligonucleotide
acacuucgcacacuucuuc

SEQ ID NO: 2029788 - RNA, 19 nt, Artificial Sequence
  Description of Artificial Sequence: Synthetic oligonucleotide
aguuugaacucagaaagau

SEQ ID NO: 2029789 - RNA, 19 nt, Artificial Sequence
  Description of Artificial Sequence: Synthetic oligonucleotide
cacagguggucauucauac

SEQ ID NO: 2029790 - RNA, 19 nt, Artificial Sequence
  Description of Artificial Sequence: Synthetic oligonucleotide
gguauauccaagcugugca

SEQ ID NO: 2029791 - RNA, 19 nt, Artificial Sequence
  Description of Artificial Sequence: Synthetic oligonucleotide
ucacaacuaggacagcaaa

SEQ ID NO: 2029792 - RNA, 19 nt, Artificial Sequence
  Description of Artificial Sequence: Synthetic oligonucleotide
acuaccgagcuaccacccc

SEQ ID NO: 2029793 - RNA, 19 nt, Artificial Sequence
  Description of Artificial Sequence: Synthetic oligonucleotide
ucuuccuauauugacgcuc

SEQ ID NO: 2029794 - RNA, 19 nt, Artificial Sequence
  Description of Artificial Sequence: Synthetic oligonucleotide
aacugguugucgaucagug

SEQ ID NO: 2029795 - RNA, 19 nt, Artificial Sequence
  Description of Artificial Sequence: Synthetic oligonucleotide
uuugugcgcauguuuggca

SEQ ID NO: 2029796 - RNA, 19 nt, Artificial Sequence
  Description of Artificial Sequence: Synthetic oligonucleotide
uauaagaaguaagcaagua

SEQ ID NO: 2029797 - RNA, 19 nt, Artificial Sequence
  Description of Artificial Sequence: Synthetic oligonucleotide
cugucucacaacuaggaca

SEQ ID NO: 2029798 - RNA, 19 nt, Artificial Sequence
  Description of Artificial Sequence: Synthetic oligonucleotide
agcauucuucggcugggac

SEQ ID NO: 2029799 - RNA, 19 nt, Artificial Sequence
  Description of Artificial Sequence: Synthetic oligonucleotide
auacgagucagcaacuucu

SEQ ID NO: 2029800 - RNA, 19 nt, Artificial Sequence
  Description of Artificial Sequence: Synthetic oligonucleotide
auugacgcucgauucccuc

SEQ ID NO: 2029801 - RNA, 19 nt, Artificial Sequence
  Description of Artificial Sequence: Synthetic oligonucleotide
cuugcccaugucuuuagug

SEQ ID NO: 2029802 - RNA, 19 nt, Artificial Sequence
  Description of Artificial Sequence: Synthetic oligonucleotide
accuggauacgacuuucgg

SEQ ID NO: 2029803 - RNA, 19 nt, Artificial Sequence
  Description of Artificial Sequence: Synthetic oligonucleotide
gauaaguagucuccucauc

SEQ ID NO: 2029804 - RNA, 19 nt, Artificial Sequence
  Description of Artificial Sequence: Synthetic oligonucleotide
ucuggccgcauaaacagua

SEQ ID NO: 2029805 - RNA, 19 nt, Artificial Sequence
  Description of Artificial Sequence: Synthetic oligonucleotide
uccgaggugguguagguau

SEQ ID NO: 2029806 - RNA, 19 nt, Artificial Sequence
  Description of Artificial Sequence: Synthetic oligonucleotide
acgcucgauucccucaggc

SEQ ID NO: 2029807 - RNA, 19 nt, Artificial Sequence
  Description of Artificial Sequence: Synthetic oligonucleotide
uguagucgccucuuacuca

SEQ ID NO: 2029808 - RNA, 19 nt, Artificial Sequence
  Description of Artificial Sequence: Synthetic oligonucleotide
uugucgaucaguguccccu

SEQ ID NO: 2029809 - RNA, 19 nt, Artificial Sequence
  Description of Artificial Sequence: Synthetic oligonucleotide
auaaacaguaauagacaug

SEQ ID NO: 2029810 - RNA, 19 nt, Artificial Sequence
  Description of Artificial Sequence: Synthetic oligonucleotide
gacucagacaugaccaagc

SEQ ID NO: 2029811 - RNA, 19 nt, Artificial Sequence
  Description of Artificial Sequence: Synthetic oligonucleotide
ugcaaaauuugugcgcaug

SEQ ID NO: 2029812 - RNA, 19 nt, Artificial Sequence
  Description of Artificial Sequence: Synthetic oligonucleotide
gacuagcaauaauuagcag

SEQ ID NO: 2029813 - RNA, 19 nt, Artificial Sequence
  Description of Artificial Sequence: Synthetic oligonucleotide
guaagcaaguaagacuagc

SEQ ID NO: 2029814 - RNA, 19 nt, Artificial Sequence
  Description of Artificial Sequence: Synthetic oligonucleotide
agcaaugauuauuaauguu

SEQ ID NO: 2029815 - RNA, 19 nt, Artificial Sequence
  Description of Artificial Sequence: Synthetic oligonucleotide
cucacggucacgcgugucg

SEQ ID NO: 2029816 - RNA, 19 nt, Artificial Sequence
  Description of Artificial Sequence: Synthetic oligonucleotide
ucgccucuuacucaugccu

SEQ ID NO: 2029817 - RNA, 19 nt, Artificial Sequence
  Description of Artificial Sequence: Synthetic oligonucleotide
guggaguaaagguagaggu

SEQ ID NO: 2029818 - RNA, 19 nt, Artificial Sequence
  Description of Artificial Sequence: Synthetic oligonucleotide
ugcauuccacuaccgagcu

SEQ ID NO: 2029819 - RNA, 19 nt, Artificial Sequence
  Description of Artificial Sequence: Synthetic oligonucleotide
gcaucaaucacccgagacc

SEQ ID NO: 2029820 - RNA, 19 nt, Artificial Sequence
  Description of Artificial Sequence: Synthetic oligonucleotide
cauucuucggcugggacug

SEQ ID NO: 2029821 - RNA, 19 nt, Artificial Sequence
  Description of Artificial Sequence: Synthetic oligonucleotide
agauaaguagucuccucau

SEQ ID NO: 2029822 - RNA, 19 nt, Artificial Sequence
  Description of Artificial Sequence: Synthetic oligonucleotide
ugacgcucgauucccucag

SEQ ID NO: 2029823 - RNA, 19 nt, Artificial Sequence
  Description of Artificial Sequence: Synthetic oligonucleotide
guagguauauccaagcugu

SEQ ID NO: 2029824 - RNA, 19 nt, Artificial Sequence
  Description of Artificial Sequence: Synthetic oligonucleotide
auuucacuacggcuccauc

SEQ ID NO: 2029825 - RNA, 19 nt, Artificial Sequence
  Description of Artificial Sequence: Synthetic oligonucleotide
ucagccagcucuuguaguc

SEQ ID NO: 2029826 - RNA, 19 nt, Artificial Sequence
  Description of Artificial Sequence: Synthetic oligonucleotide
caugucuuuagugcguuug

SEQ ID NO: 2029827 - RNA, 19 nt, Artificial Sequence
  Description of Artificial Sequence: Synthetic oligonucleotide
agcaaaugaggugaagacu

SEQ ID NO: 2029828 - RNA, 19 nt, Artificial Sequence
  Description of Artificial Sequence: Synthetic oligonucleotide
uggauuauuugaacugguu

SEQ ID NO: 2029829 - RNA, 19 nt, Artificial Sequence
  Description of Artificial Sequence: Synthetic oligonucleotide
caauaauuagcagcagcug

SEQ ID NO: 2029830 - RNA, 19 nt, Artificial Sequence
  Description of Artificial Sequence: Synthetic oligonucleotide
uuccucacggucacgcgug

SEQ ID NO: 2029831 - RNA, 19 nt, Artificial Sequence
  Description of Artificial Sequence: Synthetic oligonucleotide
cagguggucauucauacaa

SEQ ID NO: 2029832 - RNA, 19 nt, Artificial Sequence
  Description of Artificial Sequence: Synthetic oligonucleotide
auugucugcugggacacag

SEQ ID NO: 2029833 - RNA, 19 nt, Artificial Sequence
  Description of Artificial Sequence: Synthetic oligonucleotide
gccacaaucuaagugcugg

SEQ ID NO: 2029834 - RNA, 19 nt, Artificial Sequence
  Description of Artificial Sequence: Synthetic oligonucleotide
gugcacauaggaauuggag

SEQ ID NO: 2029835 - RNA, 19 nt, Artificial Sequence
  Description of Artificial Sequence: Synthetic oligonucleotide
cacuucgcacacuucuucc

SEQ ID NO: 2029836 - RNA, 19 nt, Artificial Sequence
  Description of Artificial Sequence: Synthetic oligonucleotide
gacaaucaagcaccaggac

SEQ ID NO: 2029837 - RNA, 19 nt, Artificial Sequence
  Description of Artificial Sequence: Synthetic oligonucleotide
gcaaaugaggugaagacuc

SEQ ID NO: 2029838 - RNA, 19 nt, Artificial Sequence
  Description of Artificial Sequence: Synthetic oligonucleotide
uccaagcugugcacauagg

SEQ ID NO: 2029839 - RNA, 19 nt, Artificial Sequence
  Description of Artificial Sequence: Synthetic oligonucleotide
gaggauaaaguggaguaaa

SEQ ID NO: 2029840 - RNA, 19 nt, Artificial Sequence
  Description of Artificial Sequence: Synthetic oligonucleotide
auuccucacggucacgcgu

SEQ ID NO: 2029841 - RNA, 19 nt, Artificial Sequence
  Description of Artificial Sequence: Synthetic oligonucleotide
gguaaaagagugguaggcc

SEQ ID NO: 2029842 - RNA, 19 nt, Artificial Sequence
  Description of Artificial Sequence: Synthetic oligonucleotide
auggaggggcuucucgccg

SEQ ID NO: 2029843 - RNA, 19 nt, Artificial Sequence
  Description of Artificial Sequence: Synthetic oligonucleotide
aagagugguaggccacacu

SEQ ID NO: 2029844 - RNA, 19 nt, Artificial Sequence
  Description of Artificial Sequence: Synthetic oligonucleotide
agugcguuuggucaucaua

SEQ ID NO: 2029845 - RNA, 19 nt, Artificial Sequence
  Description of Artificial Sequence: Synthetic oligonucleotide
ugcauacgagucagcaacu

SEQ ID NO: 2029846 - RNA, 19 nt, Artificial Sequence
  Description of Artificial Sequence: Synthetic oligonucleotide
caugaccaagcaugcauuc

SEQ ID NO: 2029847 - RNA, 19 nt, Artificial Sequence
  Description of Artificial Sequence: Synthetic oligonucleotide
cacuacggcuccauccacg

SEQ ID NO: 2029848 - RNA, 19 nt, Artificial Sequence
  Description of Artificial Sequence: Synthetic oligonucleotide
aauuucacuacggcuccau

SEQ ID NO: 2029849 - RNA, 19 nt, Artificial Sequence
  Description of Artificial Sequence: Synthetic oligonucleotide
acuacggcuccauccacga

SEQ ID NO: 2029850 - RNA, 19 nt, Artificial Sequence
  Description of Artificial Sequence: Synthetic oligonucleotide
cauacgagucagcaacuuc

SEQ ID NO: 2029851 - RNA, 19 nt, Artificial Sequence
  Description of Artificial Sequence: Synthetic oligonucleotide
agagacuagaagccugaau

SEQ ID NO: 2029852 - RNA, 19 nt, Artificial Sequence
  Description of Artificial Sequence: Synthetic oligonucleotide
uagguauauccaagcugug

SEQ ID NO: 2029853 - RNA, 19 nt, Artificial Sequence
  Description of Artificial Sequence: Synthetic oligonucleotide
uagaagccugaauuuccga

SEQ ID NO: 2029854 - RNA, 19 nt, Artificial Sequence
  Description of Artificial Sequence: Synthetic oligonucleotide
aggacagcaaugauuauua

SEQ ID NO: 2029855 - RNA, 19 nt, Artificial Sequence
  Description of Artificial Sequence: Synthetic oligonucleotide
auucccucaggccugcgaa

SEQ ID NO: 2029856 - RNA, 19 nt, Artificial Sequence
  Description of Artificial Sequence: Synthetic oligonucleotide
acuucgcacacuucuuccu

SEQ ID NO: 2029857 - RNA, 19 nt, Artificial Sequence
  Description of Artificial Sequence: Synthetic oligonucleotide
uucuuaggaggcucuugcu

SEQ ID NO: 2029858 - RNA, 19 nt, Artificial Sequence
  Description of Artificial Sequence: Synthetic oligonucleotide
ugucggagcagaccaccga

SEQ ID NO: 2029859 - RNA, 19 nt, Artificial Sequence
  Description of Artificial Sequence: Synthetic oligonucleotide
aauuuccgaggugguguag

SEQ ID NO: 2029860 - RNA, 19 nt, Artificial Sequence
  Description of Artificial Sequence: Synthetic oligonucleotide
uacgagucagcaacuucuc

SEQ ID NO: 2029861 - RNA, 19 nt, Artificial Sequence
  Description of Artificial Sequence: Synthetic oligonucleotide
ccuggauacgacuuucggc

SEQ ID NO: 2029862 - RNA, 19 nt, Artificial Sequence
  Description of Artificial Sequence: Synthetic oligonucleotide
ugucuuuagugcguuuggu

SEQ ID NO: 2029863 - RNA, 19 nt, Artificial Sequence
  Description of Artificial Sequence: Synthetic oligonucleotide
agacucagacaugaccaag

SEQ ID NO: 2029864 - RNA, 19 nt, Artificial Sequence
  Description of Artificial Sequence: Synthetic oligonucleotide
cauaggaauuggaggauaa

SEQ ID NO: 2029865 - RNA, 19 nt, Artificial Sequence
  Description of Artificial Sequence: Synthetic oligonucleotide
uuuccgaggugguguaggu

SEQ ID NO: 2029866 - RNA, 19 nt, Artificial Sequence
  Description of Artificial Sequence: Synthetic oligonucleotide
ugcguuuggucaucauaac

SEQ ID NO: 2029867 - RNA, 19 nt, Artificial Sequence
  Description of Artificial Sequence: Synthetic oligonucleotide
uaaccuucuuaggaggcuc

SEQ ID NO: 2029868 - RNA, 19 nt, Artificial Sequence
  Description of Artificial Sequence: Synthetic oligonucleotide
ugugcgcauguuuggcagc

SEQ ID NO: 2029869 - RNA, 19 nt, Artificial Sequence
  Description of Artificial Sequence: Synthetic oligonucleotide
ccuugaaucuauaaacaca

SEQ ID NO: 2029870 - RNA, 19 nt, Artificial Sequence
  Description of Artificial Sequence: Synthetic oligonucleotide
uauugacgcucgauucccu

SEQ ID NO: 2029871 - RNA, 19 nt, Artificial Sequence
  Description of Artificial Sequence: Synthetic oligonucleotide
cacuaccgagcuaccaccc

SEQ ID NO: 2029872 - RNA, 19 nt, Artificial Sequence
  Description of Artificial Sequence: Synthetic oligonucleotide
cuauaagaaguaagcaagu

SEQ ID NO: 2029873 - RNA, 19 nt, Artificial Sequence
  Description of Artificial Sequence: Synthetic oligonucleotide
ucugugcauacgagucagc

SEQ ID NO: 2029874 - RNA, 19 nt, Artificial Sequence
  Description of Artificial Sequence: Synthetic oligonucleotide
ucacggucacgcgugucgg

SEQ ID NO: 2029875 - RNA, 19 nt, Artificial Sequence
  Description of Artificial Sequence: Synthetic oligonucleotide
gcauaaacaguaauagaca

SEQ ID NO: 2029876 - RNA, 19 nt, Artificial Sequence
  Description of Artificial Sequence: Synthetic oligonucleotide
guacucaggacagcaauga

SEQ ID NO: 2029877 - RNA, 19 nt, Artificial Sequence
  Description of Artificial Sequence: Synthetic oligonucleotide
auaaccuucuuaggaggcu

SEQ ID NO: 2029878 - RNA, 19 nt, Artificial Sequence
  Description of Artificial Sequence: Synthetic oligonucleotide
ucgccgucaucauauuccu

SEQ ID NO: 2029879 - RNA, 19 nt, Artificial Sequence
  Description of Artificial Sequence: Synthetic oligonucleotide
gaccuggauacgacuuucg

SEQ ID NO: 2029880 - RNA, 19 nt, Artificial Sequence
  Description of Artificial Sequence: Synthetic oligonucleotide
gcgaagauaaguagucucc

SEQ ID NO: 2029881 - RNA, 19 nt, Artificial Sequence
  Description of Artificial Sequence: Synthetic oligonucleotide
ccugcgaagauaaguaguc

SEQ ID NO: 2029882 - RNA, 19 nt, Artificial Sequence
  Description of Artificial Sequence: Synthetic oligonucleotide
gcguuuggucaucauaacc

SEQ ID NO: 2029883 - RNA, 19 nt, Artificial Sequence
  Description of Artificial Sequence: Synthetic oligonucleotide
uccuauauugacgcucgau

SEQ ID NO: 2029884 - RNA, 19 nt, Artificial Sequence
  Description of Artificial Sequence: Synthetic oligonucleotide
ggucuauaagaaguaagca

SEQ ID NO: 2029885 - RNA, 19 nt, Artificial Sequence
  Description of Artificial Sequence: Synthetic oligonucleotide
gucggagcagaccaccgac

SEQ ID NO: 2029886 - RNA, 19 nt, Artificial Sequence
  Description of Artificial Sequence: Synthetic oligonucleotide
ggccaaauuucacuacggc

SEQ ID NO: 2029887 - RNA, 19 nt, Artificial Sequence
  Description of Artificial Sequence: Synthetic oligonucleotide
aguaagcaaguaagacuag

SEQ ID NO: 2029888 - RNA, 19 nt, Artificial Sequence
  Description of Artificial Sequence: Synthetic oligonucleotide
uacucaggacagcaaugau

SEQ ID NO: 2029889 - RNA, 19 nt, Artificial Sequence
  Description of Artificial Sequence: Synthetic oligonucleotide
guaggccacacuucgcaca

SEQ ID NO: 2029890 - RNA, 19 nt, Artificial Sequence
  Description of Artificial Sequence: Synthetic oligonucleotide
cugaguauauauauugguu

SEQ ID NO: 2029891 - RNA, 19 nt, Artificial Sequence
  Description of Artificial Sequence: Synthetic oligonucleotide
gucccgaggccucaugggc

SEQ ID NO: 2029892 - RNA, 19 nt, Artificial Sequence
  Description of Artificial Sequence: Synthetic oligonucleotide
aaauuucacuacggcucca

SEQ ID NO: 2029893 - RNA, 19 nt, Artificial Sequence
  Description of Artificial Sequence: Synthetic oligonucleotide
aaacaguaauagacaugga

SEQ ID NO: 2029894 - RNA, 19 nt, Artificial Sequence
  Description of Artificial Sequence: Synthetic oligonucleotide
uuuagugcguuuggucauc

SEQ ID NO: 2029895 - RNA, 19 nt, Artificial Sequence
  Description of Artificial Sequence: Synthetic oligonucleotide
caaaugaggugaagacuca

SEQ ID NO: 2029896 - RNA, 19 nt, Artificial Sequence
  Description of Artificial Sequence: Synthetic oligonucleotide
gcaaguaagacuagcaaua

SEQ ID NO: 2029897 - RNA, 19 nt, Artificial Sequence
  Description of Artificial Sequence: Synthetic oligonucleotide
uucuuccuauauugacgcu

SEQ ID NO: 2029898 - RNA, 19 nt, Artificial Sequence
  Description of Artificial Sequence: Synthetic oligonucleotide
uggccgcauaaacaguaau

SEQ ID NO: 2029899 - RNA, 19 nt, Artificial Sequence
  Description of Artificial Sequence: Synthetic oligonucleotide
acagguggucauucauaca

SEQ ID NO: 2029900 - RNA, 19 nt, Artificial Sequence
  Description of Artificial Sequence: Synthetic oligonucleotide
ucggcugggacugguaaaa

SEQ ID NO: 2029901 - RNA, 19 nt, Artificial Sequence
  Description of Artificial Sequence: Synthetic oligonucleotide
uuagugcguuuggucauca

SEQ ID NO: 2029902 - RNA, 19 nt, Artificial Sequence
  Description of Artificial Sequence: Synthetic oligonucleotide
gaucacuuuggcauucugu

SEQ ID NO: 2029903 - RNA, 19 nt, Artificial Sequence
  Description of Artificial Sequence: Synthetic oligonucleotide
gacgcucgauucccucagg

SEQ ID NO: 2029904 - RNA, 19 nt, Artificial Sequence
  Description of Artificial Sequence: Synthetic oligonucleotide
ucuugcuucugaguauaua

SEQ ID NO: 2029905 - RNA, 19 nt, Artificial Sequence
  Description of Artificial Sequence: Synthetic oligonucleotide
gaauuuccgagguggugua

SEQ ID NO: 2029906 - RNA, 19 nt, Artificial Sequence
  Description of Artificial Sequence: Synthetic oligonucleotide
auguugcuauuacuauuau

SEQ ID NO: 2029907 - RNA, 19 nt, Artificial Sequence
  Description of Artificial Sequence: Synthetic oligonucleotide
cagaccaccgaccuggaua

SEQ ID NO: 2029908 - RNA, 19 nt, Artificial Sequence
  Description of Artificial Sequence: Synthetic oligonucleotide
gcaauaauuagcagcagcu

SEQ ID NO: 2029909 - RNA, 19 nt, Artificial Sequence
  Description of Artificial Sequence: Synthetic oligonucleotide
ugguagacacagugacgga

SEQ ID NO: 2029910 - RNA, 19 nt, Artificial Sequence
  Description of Artificial Sequence: Synthetic oligonucleotide
aaccuucuuaggaggcucu

SEQ ID NO: 2029911 - RNA, 19 nt, Artificial Sequence
  Description of Artificial Sequence: Synthetic oligonucleotide
uucgaucacuuuggcauuc

SEQ ID NO: 2029912 - RNA, 19 nt, Artificial Sequence
  Description of Artificial Sequence: Synthetic oligonucleotide
uuccuauauugacgcucga

SEQ ID NO: 2029913 - RNA, 19 nt, Artificial Sequence
  Description of Artificial Sequence: Synthetic oligonucleotide
gugacggagcugaacuugc

SEQ ID NO: 2029914 - RNA, 19 nt, Artificial Sequence
  Description of Artificial Sequence: Synthetic oligonucleotide
cagcaaugauuauuaaugu

SEQ ID NO: 2029915 - RNA, 19 nt, Artificial Sequence
  Description of Artificial Sequence: Synthetic oligonucleotide
auuccacuaccgagcuacc

SEQ ID NO: 2029916 - RNA, 19 nt, Artificial Sequence
  Description of Artificial Sequence: Synthetic oligonucleotide
uggauacgacuuucggcau

SEQ ID NO: 2029917 - RNA, 19 nt, Artificial Sequence
  Description of Artificial Sequence: Synthetic oligonucleotide
ucacgcgugucggagcaga

SEQ ID NO: 2029918 - RNA, 19 nt, Artificial Sequence
  Description of Artificial Sequence: Synthetic oligonucleotide
aauagacauggaggggcuu

SEQ ID NO: 2029919 - RNA, 19 nt, Artificial Sequence
  Description of Artificial Sequence: Synthetic oligonucleotide
ucccucaggccugcgaaga

SEQ ID NO: 2029920 - RNA, 19 nt, Artificial Sequence
  Description of Artificial Sequence: Synthetic oligonucleotide
ggccugcgaagauaaguag

SEQ ID NO: 2029921 - RNA, 19 nt, Artificial Sequence
  Description of Artificial Sequence: Synthetic oligonucleotide
uugcaaaauuugugcgcau

SEQ ID NO: 2029922 - RNA, 19 nt, Artificial Sequence
  Description of Artificial Sequence: Synthetic oligonucleotide
acauaggaauuggaggaua

SEQ ID NO: 2029923 - RNA, 19 nt, Artificial Sequence
  Description of Artificial Sequence: Synthetic oligonucleotide
cagccagcucuuguagucg

SEQ ID NO: 2029924 - RNA, 19 nt, Artificial Sequence
  Description of Artificial Sequence: Synthetic oligonucleotide
accaccgaccuggauacga

SEQ ID NO: 2029925 - RNA, 19 nt, Artificial Sequence
  Description of Artificial Sequence: Synthetic oligonucleotide
ggucauugucugcugggac

SEQ ID NO: 2029926 - RNA, 19 nt, Artificial Sequence
  Description of Artificial Sequence: Synthetic oligonucleotide
guguagguauauccaagcu

SEQ ID NO: 2029927 - RNA, 19 nt, Artificial Sequence
  Description of Artificial Sequence: Synthetic oligonucleotide
ccacuaccgagcuaccacc

SEQ ID NO: 2029928 - RNA, 19 nt, Artificial Sequence
  Description of Artificial Sequence: Synthetic oligonucleotide
acggucacgcgugucggag

SEQ ID NO: 2029929 - RNA, 19 nt, Artificial Sequence
  Description of Artificial Sequence: Synthetic oligonucleotide
guugucgaucagugucccc

SEQ ID NO: 2029930 - RNA, 19 nt, Artificial Sequence
  Description of Artificial Sequence: Synthetic oligonucleotide
gugucggagcagaccaccg

SEQ ID NO: 2029931 - RNA, 19 nt, Artificial Sequence
  Description of Artificial Sequence: Synthetic oligonucleotide
caaguacucaggacagcaa

SEQ ID NO: 2029932 - RNA, 19 nt, Artificial Sequence
  Description of Artificial Sequence: Synthetic oligonucleotide
ggcauucugugcauacgag

SEQ ID NO: 2029933 - RNA, 19 nt, Artificial Sequence
  Description of Artificial Sequence: Synthetic oligonucleotide
guagucgccucuuacucau

SEQ ID NO: 2029934 - RNA, 19 nt, Artificial Sequence
  Description of Artificial Sequence: Synthetic oligonucleotide
gcaaaauuugugcgcaugu

SEQ ID NO: 2029935 - RNA, 19 nt, Artificial Sequence
  Description of Artificial Sequence: Synthetic oligonucleotide
ucuucggcugggacuggua

SEQ ID NO: 2029936 - RNA, 19 nt, Artificial Sequence
  Description of Artificial Sequence: Synthetic oligonucleotide
aggccugcgaagauaagua

SEQ ID NO: 2029937 - RNA, 19 nt, Artificial Sequence
  Description of Artificial Sequence: Synthetic oligonucleotide
aucaaucacccgagaccgg

SEQ ID NO: 2029938 - RNA, 19 nt, Artificial Sequence
  Description of Artificial Sequence: Synthetic oligonucleotide
ccaagcugugcacauagga

SEQ ID NO: 2029939 - RNA, 19 nt, Artificial Sequence
  Description of Artificial Sequence: Synthetic oligonucleotide
cuggauuauuugaacuggu

SEQ ID NO: 2029940 - RNA, 19 nt, Artificial Sequence
  Description of Artificial Sequence: Synthetic oligonucleotide
ucgaucacuuuggcauucu

SEQ ID NO: 2029941 - RNA, 19 nt, Artificial Sequence
  Description of Artificial Sequence: Synthetic oligonucleotide
agacaugaccaagcaugca

SEQ ID NO: 2029942 - RNA, 19 nt, Artificial Sequence
  Description of Artificial Sequence: Synthetic oligonucleotide
acggcuccauccacgauga

SEQ ID NO: 2029943 - RNA, 19 nt, Artificial Sequence
  Description of Artificial Sequence: Synthetic oligonucleotide
gguaggccacacuucgcac

SEQ ID NO: 2029944 - RNA, 19 nt, Artificial Sequence
  Description of Artificial Sequence: Synthetic oligonucleotide
uagucgccucuuacucaug

SEQ ID NO: 2029945 - RNA, 19 nt, Artificial Sequence
  Description of Artificial Sequence: Synthetic oligonucleotide
ccccuugaaucuauaaaca

SEQ ID NO: 2029946 - RNA, 19 nt, Artificial Sequence
  Description of Artificial Sequence: Synthetic oligonucleotide
ggcugggacugguaaaaga

SEQ ID NO: 2029947 - RNA, 19 nt, Artificial Sequence
  Description of Artificial Sequence: Synthetic oligonucleotide
cguuuggucaucauaaccu

SEQ ID NO: 2029948 - RNA, 19 nt, Artificial Sequence
  Description of Artificial Sequence: Synthetic oligonucleotide
cuucggcugggacugguaa

SEQ ID NO: 2029949 - RNA, 19 nt, Artificial Sequence
  Description of Artificial Sequence: Synthetic oligonucleotide
ucgauucccucaggccugc

SEQ ID NO: 2029950 - RNA, 19 nt, Artificial Sequence
  Description of Artificial Sequence: Synthetic oligonucleotide
gcaugcauuccacuaccga

SEQ ID NO: 2029951 - RNA, 19 nt, Artificial Sequence
  Description of Artificial Sequence: Synthetic oligonucleotide
uaagcgccccuugaaucua

SEQ ID NO: 2029952 - RNA, 19 nt, Artificial Sequence
  Description of Artificial Sequence: Synthetic oligonucleotide
gccagagacuagaagccug

SEQ ID NO: 2029953 - RNA, 19 nt, Artificial Sequence
  Description of Artificial Sequence: Synthetic oligonucleotide
uccucacggucacgcgugu

SEQ ID NO: 2029954 - RNA, 19 nt, Artificial Sequence
  Description of Artificial Sequence: Synthetic oligonucleotide
ccaaguacucaggacagca

SEQ ID NO: 2029955 - RNA, 19 nt, Artificial Sequence
  Description of Artificial Sequence: Synthetic oligonucleotide
ggacugguaaaagaguggu

SEQ ID NO: 2029956 - RNA, 19 nt, Artificial Sequence
  Description of Artificial Sequence: Synthetic oligonucleotide
cuucgcacacuucuuccua

SEQ ID NO: 2029957 - RNA, 19 nt, Artificial Sequence
  Description of Artificial Sequence: Synthetic oligonucleotide
ggucacgcgugucggagca

SEQ ID NO: 2029958 - RNA, 19 nt, Artificial Sequence
  Description of Artificial Sequence: Synthetic oligonucleotide
gacugguaaaagaguggua

SEQ ID NO: 2029959 - RNA, 19 nt, Artificial Sequence
  Description of Artificial Sequence: Synthetic oligonucleotide
ggaggauaaaguggaguaa

SEQ ID NO: 2029960 - RNA, 19 nt, Artificial Sequence
  Description of Artificial Sequence: Synthetic oligonucleotide
aucuaagugcuggccucca

SEQ ID NO: 2029961 - RNA, 19 nt, Artificial Sequence
  Description of Artificial Sequence: Synthetic oligonucleotide
gucgaucaguguccccuuc

SEQ ID NO: 2029962 - RNA, 19 nt, Artificial Sequence
  Description of Artificial Sequence: Synthetic oligonucleotide
accgaccuggauacgacuu

SEQ ID NO: 2029963 - RNA, 19 nt, Artificial Sequence
  Description of Artificial Sequence: Synthetic oligonucleotide
ggagcagaccaccgaccug

SEQ ID NO: 2029964 - RNA, 19 nt, Artificial Sequence
  Description of Artificial Sequence: Synthetic oligonucleotide
agaccggucccgaggccuc

SEQ ID NO: 2029965 - RNA, 19 nt, Artificial Sequence
  Description of Artificial Sequence: Synthetic oligonucleotide
uagugcguuuggucaucau

SEQ ID NO: 2029966 - RNA, 19 nt, Artificial Sequence
  Description of Artificial Sequence: Synthetic oligonucleotide
gugcgcauguuuggcagca

SEQ ID NO: 2029967 - RNA, 19 nt, Artificial Sequence
  Description of Artificial Sequence: Synthetic oligonucleotide
cacgcgugucggagcagac

SEQ ID NO: 2029968 - RNA, 19 nt, Artificial Sequence
  Description of Artificial Sequence: Synthetic oligonucleotide
uuccgaggugguguaggua

SEQ ID NO: 2029969 - RNA, 19 nt, Artificial Sequence
  Description of Artificial Sequence: Synthetic oligonucleotide
ccgagaccggucccgaggc

SEQ ID NO: 2029970 - RNA, 19 nt, Artificial Sequence
  Description of Artificial Sequence: Synthetic oligonucleotide
cagccacaaucuaagugcu

SEQ ID NO: 2029971 - RNA, 19 nt, Artificial Sequence
  Description of Artificial Sequence: Synthetic oligonucleotide
ccuauauugacgcucgauu

SEQ ID NO: 2029972 - RNA, 19 nt, Artificial Sequence
  Description of Artificial Sequence: Synthetic oligonucleotide
cuggccgcauaaacaguaa

SEQ ID NO: 2029973 - RNA, 19 nt, Artificial Sequence
  Description of Artificial Sequence: Synthetic oligonucleotide
acccgagaccggucccgag

SEQ ID NO: 2029974 - RNA, 19 nt, Artificial Sequence
  Description of Artificial Sequence: Synthetic oligonucleotide
ggagcugaacuugcccaug

SEQ ID NO: 2029975 - RNA, 19 nt, Artificial Sequence
  Description of Artificial Sequence: Synthetic oligonucleotide
gagaccggucccgaggccu

SEQ ID NO: 2029976 - RNA, 19 nt, Artificial Sequence
  Description of Artificial Sequence: Synthetic oligonucleotide
uucucgccgucaucauauu

SEQ ID NO: 2029977 - RNA, 19 nt, Artificial Sequence
  Description of Artificial Sequence: Synthetic oligonucleotide
ggccgcauaaacaguaaua

SEQ ID NO: 2029978 - RNA, 19 nt, Artificial Sequence
  Description of Artificial Sequence: Synthetic oligonucleotide
caggccugcgaagauaagu

SEQ ID NO: 2029979 - RNA, 19 nt, Artificial Sequence
  Description of Artificial Sequence: Synthetic oligonucleotide
gcgcauguuuggcagcauc

SEQ ID NO: 2029980 - RNA, 19 nt, Artificial Sequence
  Description of Artificial Sequence: Synthetic oligonucleotide
gaccaccgaccuggauacg

SEQ ID NO: 2029981 - RNA, 19 nt, Artificial Sequence
  Description of Artificial Sequence: Synthetic oligonucleotide
gccuuugcgcuccagcugu

SEQ ID NO: 2029982 - RNA, 19 nt, Artificial Sequence
  Description of Artificial Sequence: Synthetic oligonucleotide
ggacagcaaugauuauuaa

SEQ ID NO: 2029983 - RNA, 19 nt, Artificial Sequence
  Description of Artificial Sequence: Synthetic oligonucleotide
ccuucuuaggaggcucuug

SEQ ID NO: 2029984 - RNA, 19 nt, Artificial Sequence
  Description of Artificial Sequence: Synthetic oligonucleotide
ccaccgaccuggauacgac

SEQ ID NO: 2029985 - RNA, 19 nt, Artificial Sequence
  Description of Artificial Sequence: Synthetic oligonucleotide
aagcgccccuugaaucuau

SEQ ID NO: 2029986 - RNA, 19 nt, Artificial Sequence
  Description of Artificial Sequence: Synthetic oligonucleotide
cgugucggagcagaccacc

SEQ ID NO: 2029987 - RNA, 19 nt, Artificial Sequence
  Description of Artificial Sequence: Synthetic oligonucleotide
cugcgaagauaaguagucu

SEQ ID NO: 2029988 - RNA, 19 nt, Artificial Sequence
  Description of Artificial Sequence: Synthetic oligonucleotide
cgcgugucggagcagacca

SEQ ID NO: 2029989 - RNA, 19 nt, Artificial Sequence
  Description of Artificial Sequence: Synthetic oligonucleotide
cacacuucgcacacuucuu

SEQ ID NO: 2029990 - RNA, 19 nt, Artificial Sequence
  Description of Artificial Sequence: Synthetic oligonucleotide
cacauaggaauuggaggau

SEQ ID NO: 2029991 - RNA, 19 nt, Artificial Sequence
  Description of Artificial Sequence: Synthetic oligonucleotide
gucacgcgugucggagcag

SEQ ID NO: 2029992 - RNA, 19 nt, Artificial Sequence
  Description of Artificial Sequence: Synthetic oligonucleotide
cacggucacgcgugucgga

SEQ ID NO: 2029993 - RNA, 19 nt, Artificial Sequence
  Description of Artificial Sequence: Synthetic oligonucleotide
gccugcgaagauaaguagu

SEQ ID NO: 2029994 - RNA, 19 nt, Artificial Sequence
  Description of Artificial Sequence: Synthetic oligonucleotide
cagagacuagaagccugaa

SEQ ID NO: 2029995 - RNA, 19 nt, Artificial Sequence
  Description of Artificial Sequence: Synthetic oligonucleotide
gcuucugaguauauauauu

SEQ ID NO: 2029996 - RNA, 19 nt, Artificial Sequence
  Description of Artificial Sequence: Synthetic oligonucleotide
cauugucugcugggacaca

SEQ ID NO: 2029997 - RNA, 19 nt, Artificial Sequence
  Description of Artificial Sequence: Synthetic oligonucleotide
gcgccccuugaaucuauaa

SEQ ID NO: 2029998 - RNA, 19 nt, Artificial Sequence
  Description of Artificial Sequence: Synthetic oligonucleotide
gaccggucccgaggccuca

SEQ ID NO: 2029999 - RNA, 19 nt, Artificial Sequence
  Description of Artificial Sequence: Synthetic oligonucleotide
ggccagagacuagaagccu

SEQ ID NO: 2030000 - RNA, 19 nt, Artificial Sequence
  Description of Artificial Sequence: Synthetic oligonucleotide
cgaagauaaguagucuccu

SEQ ID NO: 2030001 - RNA, 19 nt, Artificial Sequence
  Description of Artificial Sequence: Synthetic oligonucleotide
gccucuuacucaugccuuu

SEQ ID NO: 2030002 - RNA, 19 nt, Artificial Sequence
  Description of Artificial Sequence: Synthetic oligonucleotide
cacccgagaccggucccga

SEQ ID NO: 2030003 - RNA, 19 nt, Artificial Sequence
  Description of Artificial Sequence: Synthetic oligonucleotide
agcgccccuugaaucuaua

SEQ ID NO: 2030004 - RNA, 19 nt, Artificial Sequence
  Description of Artificial Sequence: Synthetic oligonucleotide
gcauuccacuaccgagcua

SEQ ID NO: 2030005 - RNA, 19 nt, Artificial Sequence
  Description of Artificial Sequence: Synthetic oligonucleotide
accggucccgaggccucau

SEQ ID NO: 2030006 - RNA, 19 nt, Artificial Sequence
  Description of Artificial Sequence: Synthetic oligonucleotide
cgagaccggucccgaggcc

SEQ ID NO: 2030007 - RNA, 19 nt, Artificial Sequence
  Description of Artificial Sequence: Synthetic oligonucleotide
gcgugucggagcagaccac

SEQ ID NO: 2030008 - RNA, 19 nt, Artificial Sequence
  Description of Artificial Sequence: Synthetic oligonucleotide
gcauacgagucagcaacuu

SEQ ID NO: 2030009 - RNA, 19 nt, Artificial Sequence
  Description of Artificial Sequence: Synthetic oligonucleotide
cuacggcuccauccacgau

SEQ ID NO: 2030010 - RNA, 19 nt, Artificial Sequence
  Description of Artificial Sequence: Synthetic oligonucleotide
cgccgucaucauauuccuc

SEQ ID NO: 2030011 - RNA, 19 nt, Artificial Sequence
  Description of Artificial Sequence: Synthetic oligonucleotide
cggcugggacugguaaaag

SEQ ID NO: 2030012 - RNA, 19 nt, Artificial Sequence
  Description of Artificial Sequence: Synthetic oligonucleotide
ccgaggugguguagguaua

SEQ ID NO: 2030013 - RNA, 19 nt, Artificial Sequence
  Description of Artificial Sequence: Synthetic oligonucleotide
ccucacggucacgcguguc

SEQ ID NO: 2030014 - RNA, 19 nt, Artificial Sequence
  Description of Artificial Sequence: Synthetic oligonucleotide
ccggucccgaggccucaug

SEQ ID NO: 2030015 - RNA, 19 nt, Artificial Sequence
  Description of Artificial Sequence: Synthetic oligonucleotide
gcagaccaccgaccuggau

SEQ ID NO: 2030016 - RNA, 19 nt, Artificial Sequence
  Description of Artificial Sequence: Synthetic oligonucleotide
cgcacacuucuuccuauau

SEQ ID NO: 2030017 - RNA, 19 nt, Artificial Sequence
  Description of Artificial Sequence: Synthetic oligonucleotide
ccgaccuggauacgacuuu

SEQ ID NO: 2030018 - RNA, 19 nt, Artificial Sequence
  Description of Artificial Sequence: Synthetic oligonucleotide
cgauucccucaggccugcg

SEQ ID NO: 2030019 - RNA, 19 nt, Artificial Sequence
  Description of Artificial Sequence: Synthetic oligonucleotide
ccaggaccaucuggccgca

SEQ ID NO: 2030020 - RNA, 19 nt, Artificial Sequence
  Description of Artificial Sequence: Synthetic oligonucleotide
caggaccaucuggccgcau

SEQ ID NO: 2030021 - RNA, 19 nt, Artificial Sequence
  Description of Artificial Sequence: Synthetic oligonucleotide
guuuagaaaguauugaagg

SEQ ID NO: 2030022 - RNA, 19 nt, Artificial Sequence
  Description of Artificial Sequence: Synthetic oligonucleotide
uguauguauguuuuaaugg

SEQ ID NO: 2030023 - RNA, 19 nt, Artificial Sequence
  Description of Artificial Sequence: Synthetic oligonucleotide
uuuucaaaaguucuuagug

SEQ ID NO: 2030024 - RNA, 19 nt, Artificial Sequence
  Description of Artificial Sequence: Synthetic oligonucleotide
aauacaaaagaucuaggca

SEQ ID NO: 2030025 - RNA, 19 nt, Artificial Sequence
  Description of Artificial Sequence: Synthetic oligonucleotide
aaugauggaauucggaaag

SEQ ID NO: 2030026 - RNA, 19 nt, Artificial Sequence
  Description of Artificial Sequence: Synthetic oligonucleotide
uuaucaugugaucagaaag

SEQ ID NO: 2030027 - RNA, 19 nt, Artificial Sequence
  Description of Artificial Sequence: Synthetic oligonucleotide
uauugaaggauaauggaag

SEQ ID NO: 2030028 - RNA, 19 nt, Artificial Sequence
  Description of Artificial Sequence: Synthetic oligonucleotide
aaaagaucuaggcacaucu

SEQ ID NO: 2030029 - RNA, 19 nt, Artificial Sequence
  Description of Artificial Sequence: Synthetic oligonucleotide
caugugaucagaaagauuc

SEQ ID NO: 2030030 - RNA, 19 nt, Artificial Sequence
  Description of Artificial Sequence: Synthetic oligonucleotide
uguuuuaaugguaucaagc

SEQ ID NO: 2030031 - RNA, 19 nt, Artificial Sequence
  Description of Artificial Sequence: Synthetic oligonucleotide
acacuuguggcauuaaugc

SEQ ID NO: 2030032 - RNA, 19 nt, Artificial Sequence
  Description of Artificial Sequence: Synthetic oligonucleotide
aaagcaaugaugagaaggc

SEQ ID NO: 2030033 - RNA, 19 nt, Artificial Sequence
  Description of Artificial Sequence: Synthetic oligonucleotide
uccaauaugaacuaccaug

SEQ ID NO: 2030034 - RNA, 19 nt, Artificial Sequence
  Description of Artificial Sequence: Synthetic oligonucleotide
aaacucuaaagacucugcc

SEQ ID NO: 2030035 - RNA, 19 nt, Artificial Sequence
  Description of Artificial Sequence: Synthetic oligonucleotide
uuuaccacuauuuucacac

SEQ ID NO: 2030036 - RNA, 19 nt, Artificial Sequence
  Description of Artificial Sequence: Synthetic oligonucleotide
uauccgguuguuuagaacg

SEQ ID NO: 2030037 - RNA, 19 nt, Artificial Sequence
  Description of Artificial Sequence: Synthetic oligonucleotide
uuacuuuguguuuagaaag

SEQ ID NO: 2030038 - RNA, 19 nt, Artificial Sequence
  Description of Artificial Sequence: Synthetic oligonucleotide
uuugauguugcuuaagacc

SEQ ID NO: 2030039 - RNA, 19 nt, Artificial Sequence
  Description of Artificial Sequence: Synthetic oligonucleotide
uuucacuccaauaugaacu

SEQ ID NO: 2030040 - RNA, 19 nt, Artificial Sequence
  Description of Artificial Sequence: Synthetic oligonucleotide
uuuaaugguaucaagcagu

SEQ ID NO: 2030041 - RNA, 19 nt, Artificial Sequence
  Description of Artificial Sequence: Synthetic oligonucleotide
aaaguauugaaggauaaug

SEQ ID NO: 2030042 - RNA, 19 nt, Artificial Sequence
  Description of Artificial Sequence: Synthetic oligonucleotide
aaaaguucuuagugaauac

SEQ ID NO: 2030043 - RNA, 19 nt, Artificial Sequence
  Description of Artificial Sequence: Synthetic oligonucleotide
uguucugaaaguaaugaug

SEQ ID NO: 2030044 - RNA, 19 nt, Artificial Sequence
  Description of Artificial Sequence: Synthetic oligonucleotide
aaugguaucaagcagugua

SEQ ID NO: 2030045 - RNA, 19 nt, Artificial Sequence
  Description of Artificial Sequence: Synthetic oligonucleotide
cauguguugagaaauauug

SEQ ID NO: 2030046 - RNA, 19 nt, Artificial Sequence
  Description of Artificial Sequence: Synthetic oligonucleotide
acucuaaagacucugccac

SEQ ID NO: 2030047 - RNA, 19 nt, Artificial Sequence
  Description of Artificial Sequence: Synthetic oligonucleotide
uugauguugcuuaagacca

SEQ ID NO: 2030048 - RNA, 19 nt, Artificial Sequence
  Description of Artificial Sequence: Synthetic oligonucleotide
aauauuggaaagcuuauua

SEQ ID NO: 2030049 - RNA, 19 nt, Artificial Sequence
  Description of Artificial Sequence: Synthetic oligonucleotide
uucuuagugaauacaaaag

SEQ ID NO: 2030050 - RNA, 19 nt, Artificial Sequence
  Description of Artificial Sequence: Synthetic oligonucleotide
uggaaagcuuauuaaaggg

SEQ ID NO: 2030051 - RNA, 19 nt, Artificial Sequence
  Description of Artificial Sequence: Synthetic oligonucleotide
aaguauugaaggauaaugg

SEQ ID NO: 2030052 - RNA, 19 nt, Artificial Sequence
  Description of Artificial Sequence: Synthetic oligonucleotide
uaagauuuguaccauuuca

SEQ ID NO: 2030053 - RNA, 19 nt, Artificial Sequence
  Description of Artificial Sequence: Synthetic oligonucleotide
acacuauucacacuugugg

SEQ ID NO: 2030054 - RNA, 19 nt, Artificial Sequence
  Description of Artificial Sequence: Synthetic oligonucleotide
aagaucuaggcacaucuuc

SEQ ID NO: 2030055 - RNA, 19 nt, Artificial Sequence
  Description of Artificial Sequence: Synthetic oligonucleotide
uuuuaaugguaucaagcag

SEQ ID NO: 2030056 - RNA, 19 nt, Artificial Sequence
  Description of Artificial Sequence: Synthetic oligonucleotide
uuauuaaaggguuuguaac

SEQ ID NO: 2030057 - RNA, 19 nt, Artificial Sequence
  Description of Artificial Sequence: Synthetic oligonucleotide
aauuacuuuguguuuagaa

SEQ ID NO: 2030058 - RNA, 19 nt, Artificial Sequence
  Description of Artificial Sequence: Synthetic oligonucleotide
aguaagaauuaucaggucu

SEQ ID NO: 2030059 - RNA, 19 nt, Artificial Sequence
  Description of Artificial Sequence: Synthetic oligonucleotide
acugguaauagcuuuacca

SEQ ID NO: 2030060 - RNA, 19 nt, Artificial Sequence
  Description of Artificial Sequence: Synthetic oligonucleotide
aaaguagugauggaccacg

SEQ ID NO: 2030061 - RNA, 19 nt, Artificial Sequence
  Description of Artificial Sequence: Synthetic oligonucleotide
uuagugaauacaaaagauc

SEQ ID NO: 2030062 - RNA, 19 nt, Artificial Sequence
  Description of Artificial Sequence: Synthetic oligonucleotide
uguguugagaaauauugga

SEQ ID NO: 2030063 - RNA, 19 nt, Artificial Sequence
  Description of Artificial Sequence: Synthetic oligonucleotide
guucugaaaguaaugaugg

SEQ ID NO: 2030064 - RNA, 19 nt, Artificial Sequence
  Description of Artificial Sequence: Synthetic oligonucleotide
uuauguacagaaagcaaug

SEQ ID NO: 2030065 - RNA, 19 nt, Artificial Sequence
  Description of Artificial Sequence: Synthetic oligonucleotide
augaugagaaggcuuuucc

SEQ ID NO: 2030066 - RNA, 19 nt, Artificial Sequence
  Description of Artificial Sequence: Synthetic oligonucleotide
uauuaaaggguuuguaaca

SEQ ID NO: 2030067 - RNA, 19 nt, Artificial Sequence
  Description of Artificial Sequence: Synthetic oligonucleotide
aagauuuguaccauuucac

SEQ ID NO: 2030068 - RNA, 19 nt, Artificial Sequence
  Description of Artificial Sequence: Synthetic oligonucleotide
uguaaacauuucaugaaca

SEQ ID NO: 2030069 - RNA, 19 nt, Artificial Sequence
  Description of Artificial Sequence: Synthetic oligonucleotide
uaucaugugaucagaaaga

SEQ ID NO: 2030070 - RNA, 19 nt, Artificial Sequence
  Description of Artificial Sequence: Synthetic oligonucleotide
uccagaauggauuaucaug

SEQ ID NO: 2030071 - RNA, 19 nt, Artificial Sequence
  Description of Artificial Sequence: Synthetic oligonucleotide
ugcuguagaacuuucacac

SEQ ID NO: 2030072 - RNA, 19 nt, Artificial Sequence
  Description of Artificial Sequence: Synthetic oligonucleotide
auugaaggauaauggaagg

SEQ ID NO: 2030073 - RNA, 19 nt, Artificial Sequence
  Description of Artificial Sequence: Synthetic oligonucleotide
ugugguuucucucacaaau

SEQ ID NO: 2030074 - RNA, 19 nt, Artificial Sequence
  Description of Artificial Sequence: Synthetic oligonucleotide
cuuaagaccagaagacugg

SEQ ID NO: 2030075 - RNA, 19 nt, Artificial Sequence
  Description of Artificial Sequence: Synthetic oligonucleotide
guugcuuaagaccagaaga

SEQ ID NO: 2030076 - RNA, 19 nt, Artificial Sequence
  Description of Artificial Sequence: Synthetic oligonucleotide
ucacaaaugaauucuuuga

SEQ ID NO: 2030077 - RNA, 19 nt, Artificial Sequence
  Description of Artificial Sequence: Synthetic oligonucleotide
aagaccagaagacugguaa

SEQ ID NO: 2030078 - RNA, 19 nt, Artificial Sequence
  Description of Artificial Sequence: Synthetic oligonucleotide
uuaaugcccaguaagaauu

SEQ ID NO: 2030079 - RNA, 19 nt, Artificial Sequence
  Description of Artificial Sequence: Synthetic oligonucleotide
ugaucagaaagauuccgag

SEQ ID NO: 2030080 - RNA, 19 nt, Artificial Sequence
  Description of Artificial Sequence: Synthetic oligonucleotide
uguacugaaaguagugaug

SEQ ID NO: 2030081 - RNA, 19 nt, Artificial Sequence
  Description of Artificial Sequence: Synthetic oligonucleotide
ugauggacaauggaaaucc

SEQ ID NO: 2030082 - RNA, 19 nt, Artificial Sequence
  Description of Artificial Sequence: Synthetic oligonucleotide
uguugagaaauauuggaaa

SEQ ID NO: 2030083 - RNA, 19 nt, Artificial Sequence
  Description of Artificial Sequence: Synthetic oligonucleotide
acuuguggcauuaaugccc

SEQ ID NO: 2030084 - RNA, 19 nt, Artificial Sequence
  Description of Artificial Sequence: Synthetic oligonucleotide
aaauccuugucacauacuu

SEQ ID NO: 2030085 - RNA, 19 nt, Artificial Sequence
  Description of Artificial Sequence: Synthetic oligonucleotide
ugcccaguaagaauuauca

SEQ ID NO: 2030086 - RNA, 19 nt, Artificial Sequence
  Description of Artificial Sequence: Synthetic oligonucleotide
acugaaaguagugauggac

SEQ ID NO: 2030087 - RNA, 19 nt, Artificial Sequence
  Description of Artificial Sequence: Synthetic oligonucleotide
auuaaaggguuuguaacac

SEQ ID NO: 2030088 - RNA, 19 nt, Artificial Sequence
  Description of Artificial Sequence: Synthetic oligonucleotide
gugaauacaaaagaucuag

SEQ ID NO: 2030089 - RNA, 19 nt, Artificial Sequence
  Description of Artificial Sequence: Synthetic oligonucleotide
aguauugaaggauaaugga

SEQ ID NO: 2030090 - RNA, 19 nt, Artificial Sequence
  Description of Artificial Sequence: Synthetic oligonucleotide
cugaaaguagugauggacc

SEQ ID NO: 2030091 - RNA, 19 nt, Artificial Sequence
  Description of Artificial Sequence: Synthetic oligonucleotide
auuccgagaaacucuaaag

SEQ ID NO: 2030092 - RNA, 19 nt, Artificial Sequence
  Description of Artificial Sequence: Synthetic oligonucleotide
uuaaugguaucaagcagug

SEQ ID NO: 2030093 - RNA, 19 nt, Artificial Sequence
  Description of Artificial Sequence: Synthetic oligonucleotide
uucaaaaguucuuagugaa

SEQ ID NO: 2030094 - RNA, 19 nt, Artificial Sequence
  Description of Artificial Sequence: Synthetic oligonucleotide
aacucuaaagacucugcca

SEQ ID NO: 2030095 - RNA, 19 nt, Artificial Sequence
  Description of Artificial Sequence: Synthetic oligonucleotide
guuuuaaugguaucaagca

SEQ ID NO: 2030096 - RNA, 19 nt, Artificial Sequence
  Description of Artificial Sequence: Synthetic oligonucleotide
auuacuuuguguuuagaaa

SEQ ID NO: 2030097 - RNA, 19 nt, Artificial Sequence
  Description of Artificial Sequence: Synthetic oligonucleotide
guacugaaaguagugaugg

SEQ ID NO: 2030098 - RNA, 19 nt, Artificial Sequence
  Description of Artificial Sequence: Synthetic oligonucleotide
gaugagaaggcuuuuccac

SEQ ID NO: 2030099 - RNA, 19 nt, Artificial Sequence
  Description of Artificial Sequence: Synthetic oligonucleotide
uauuggaaagcuuauuaaa

SEQ ID NO: 2030100 - RNA, 19 nt, Artificial Sequence
  Description of Artificial Sequence: Synthetic oligonucleotide
uuuaagauuuguaccauuu

SEQ ID NO: 2030101 - RNA, 19 nt, Artificial Sequence
  Description of Artificial Sequence: Synthetic oligonucleotide
uaccauuucacuccaauau

SEQ ID NO: 2030102 - RNA, 19 nt, Artificial Sequence
  Description of Artificial Sequence: Synthetic oligonucleotide
uggauuaucaugugaucag

SEQ ID NO: 2030103 - RNA, 19 nt, Artificial Sequence
  Description of Artificial Sequence: Synthetic oligonucleotide
ugagaaauauuggaaagcu

SEQ ID NO: 2030104 - RNA, 19 nt, Artificial Sequence
  Description of Artificial Sequence: Synthetic oligonucleotide
uuccgagaaacucuaaaga

SEQ ID NO: 2030105 - RNA, 19 nt, Artificial Sequence
  Description of Artificial Sequence: Synthetic oligonucleotide
ugaauuauccgguuguuua

SEQ ID NO: 2030106 - RNA, 19 nt, Artificial Sequence
  Description of Artificial Sequence: Synthetic oligonucleotide
uagaacgugcuguagaacu

SEQ ID NO: 2030107 - RNA, 19 nt, Artificial Sequence
  Description of Artificial Sequence: Synthetic oligonucleotide
acaauggaaauccuuguca

SEQ ID NO: 2030108 - RNA, 19 nt, Artificial Sequence
  Description of Artificial Sequence: Synthetic oligonucleotide
uugcuuaagaccagaagac

SEQ ID NO: 2030109 - RNA, 19 nt, Artificial Sequence
  Description of Artificial Sequence: Synthetic oligonucleotide
ugugaucagaaagauuccg

SEQ ID NO: 2030110 - RNA, 19 nt, Artificial Sequence
  Description of Artificial Sequence: Synthetic oligonucleotide
aaugaugagaaggcuuuuc

SEQ ID NO: 2030111 - RNA, 19 nt, Artificial Sequence
  Description of Artificial Sequence: Synthetic oligonucleotide
uuguguacagaaaguaaug

SEQ ID NO: 2030112 - RNA, 19 nt, Artificial Sequence
  Description of Artificial Sequence: Synthetic oligonucleotide
uccgagaaacucuaaagac

SEQ ID NO: 2030113 - RNA, 19 nt, Artificial Sequence
  Description of Artificial Sequence: Synthetic oligonucleotide
aaagauuccgagaaacucu

SEQ ID NO: 2030114 - RNA, 19 nt, Artificial Sequence
  Description of Artificial Sequence: Synthetic oligonucleotide
uaucaggucuuuucaaaag

SEQ ID NO: 2030115 - RNA, 19 nt, Artificial Sequence
  Description of Artificial Sequence: Synthetic oligonucleotide
uacuuuguguuuagaaagc

SEQ ID NO: 2030116 - RNA, 19 nt, Artificial Sequence
  Description of Artificial Sequence: Synthetic oligonucleotide
gaauuauccgguuguuuag

SEQ ID NO: 2030117 - RNA, 19 nt, Artificial Sequence
  Description of Artificial Sequence: Synthetic oligonucleotide
ugaaaguagugauggacca

SEQ ID NO: 2030118 - RNA, 19 nt, Artificial Sequence
  Description of Artificial Sequence: Synthetic oligonucleotide
ucaagcaguguaaacauuu

SEQ ID NO: 2030119 - RNA, 19 nt, Artificial Sequence
  Description of Artificial Sequence: Synthetic oligonucleotide
aguaugaauuauccgguug

SEQ ID NO: 2030120 - RNA, 19 nt, Artificial Sequence
  Description of Artificial Sequence: Synthetic oligonucleotide
aauuaucaggucuuuucaa

SEQ ID NO: 2030121 - RNA, 19 nt, Artificial Sequence
  Description of Artificial Sequence: Synthetic oligonucleotide
ucuaggcacaucuucacac

SEQ ID NO: 2030122 - RNA, 19 nt, Artificial Sequence
  Description of Artificial Sequence: Synthetic oligonucleotide
agugauggaccacggaagg

SEQ ID NO: 2030123 - RNA, 19 nt, Artificial Sequence
  Description of Artificial Sequence: Synthetic oligonucleotide
aauagcuuuaccacuauuu

SEQ ID NO: 2030124 - RNA, 19 nt, Artificial Sequence
  Description of Artificial Sequence: Synthetic oligonucleotide
gauucucuuauguacagaa

SEQ ID NO: 2030125 - RNA, 19 nt, Artificial Sequence
  Description of Artificial Sequence: Synthetic oligonucleotide
cugguaauagcuuuaccac

SEQ ID NO: 2030126 - RNA, 19 nt, Artificial Sequence
  Description of Artificial Sequence: Synthetic oligonucleotide
uuagaaaguauugaaggau

SEQ ID NO: 2030127 - RNA, 19 nt, Artificial Sequence
  Description of Artificial Sequence: Synthetic oligonucleotide
ucuuauguacagaaagcaa

SEQ ID NO: 2030128 - RNA, 19 nt, Artificial Sequence
  Description of Artificial Sequence: Synthetic oligonucleotide
acaucuucacacuugugug

SEQ ID NO: 2030129 - RNA, 19 nt, Artificial Sequence
  Description of Artificial Sequence: Synthetic oligonucleotide
uagugauggaccacggaag

SEQ ID NO: 2030130 - RNA, 19 nt, Artificial Sequence
  Description of Artificial Sequence: Synthetic oligonucleotide
uugagaaauauuggaaagc

SEQ ID NO: 2030131 - RNA, 19 nt, Artificial Sequence
  Description of Artificial Sequence: Synthetic oligonucleotide
gaauuaucaggucuuuuca

SEQ ID NO: 2030132 - RNA, 19 nt, Artificial Sequence
  Description of Artificial Sequence: Synthetic oligonucleotide
uaaugauggaauucggaaa

SEQ ID NO: 2030133 - RNA, 19 nt, Artificial Sequence
  Description of Artificial Sequence: Synthetic oligonucleotide
uuuagaacgugcuguagaa

SEQ ID NO: 2030134 - RNA, 19 nt, Artificial Sequence
  Description of Artificial Sequence: Synthetic oligonucleotide
ucugaaaguaaugauggaa

SEQ ID NO: 2030135 - RNA, 19 nt, Artificial Sequence
  Description of Artificial Sequence: Synthetic oligonucleotide
aaaguucuuagugaauaca

SEQ ID NO: 2030136 - RNA, 19 nt, Artificial Sequence
  Description of Artificial Sequence: Synthetic oligonucleotide
uacaaaagaucuaggcaca

SEQ ID NO: 2030137 - RNA, 19 nt, Artificial Sequence
  Description of Artificial Sequence: Synthetic oligonucleotide
aguguaaacauuucaugaa

SEQ ID NO: 2030138 - RNA, 19 nt, Artificial Sequence
  Description of Artificial Sequence: Synthetic oligonucleotide
uaaaggguuuguaacacua

SEQ ID NO: 2030139 - RNA, 19 nt, Artificial Sequence
  Description of Artificial Sequence: Synthetic oligonucleotide
acuuguggguuuucuuucc

SEQ ID NO: 2030140 - RNA, 19 nt, Artificial Sequence
  Description of Artificial Sequence: Synthetic oligonucleotide
aauuuucuuguguacugaa

SEQ ID NO: 2030141 - RNA, 19 nt, Artificial Sequence
  Description of Artificial Sequence: Synthetic oligonucleotide
uuguguacugaaaguagug

SEQ ID NO: 2030142 - RNA, 19 nt, Artificial Sequence
  Description of Artificial Sequence: Synthetic oligonucleotide
uguagaacuuucacacuug

SEQ ID NO: 2030143 - RNA, 19 nt, Artificial Sequence
  Description of Artificial Sequence: Synthetic oligonucleotide
agaaauauuggaaagcuua

SEQ ID NO: 2030144 - RNA, 19 nt, Artificial Sequence
  Description of Artificial Sequence: Synthetic oligonucleotide
uuaagauuuguaccauuuc

SEQ ID NO: 2030145 - RNA, 19 nt, Artificial Sequence
  Description of Artificial Sequence: Synthetic oligonucleotide
uaucaagcaguguaaacau

SEQ ID NO: 2030146 - RNA, 19 nt, Artificial Sequence
  Description of Artificial Sequence: Synthetic oligonucleotide
ucuuguguacagaaaguaa

SEQ ID NO: 2030147 - RNA, 19 nt, Artificial Sequence
  Description of Artificial Sequence: Synthetic oligonucleotide
guuuguaacacuauucaca

SEQ ID NO: 2030148 - RNA, 19 nt, Artificial Sequence
  Description of Artificial Sequence: Synthetic oligonucleotide
uguguacagaaaguaauga

SEQ ID NO: 2030149 - RNA, 19 nt, Artificial Sequence
  Description of Artificial Sequence: Synthetic oligonucleotide
cuuauuaaaggguuuguaa

SEQ ID NO: 2030150 - RNA, 19 nt, Artificial Sequence
  Description of Artificial Sequence: Synthetic oligonucleotide
cccaguaagaauuaucagg

SEQ ID NO: 2030151 - RNA, 19 nt, Artificial Sequence
  Description of Artificial Sequence: Synthetic oligonucleotide
ggcauuaaugcccaguaag

SEQ ID NO: 2030152 - RNA, 19 nt, Artificial Sequence
  Description of Artificial Sequence: Synthetic oligonucleotide
acagaaagcaaugaugaga

SEQ ID NO: 2030153 - RNA, 19 nt, Artificial Sequence
  Description of Artificial Sequence: Synthetic oligonucleotide
agugugaauuacuuugugu

SEQ ID NO: 2030154 - RNA, 19 nt, Artificial Sequence
  Description of Artificial Sequence: Synthetic oligonucleotide
auauuggaaagcuuauuaa

SEQ ID NO: 2030155 - RNA, 19 nt, Artificial Sequence
  Description of Artificial Sequence: Synthetic oligonucleotide
gaaagauuccgagaaacuc

SEQ ID NO: 2030156 - RNA, 19 nt, Artificial Sequence
  Description of Artificial Sequence: Synthetic oligonucleotide
ucucucacaaaugaauucu

SEQ ID NO: 2030157 - RNA, 19 nt, Artificial Sequence
  Description of Artificial Sequence: Synthetic oligonucleotide
guaaugauggaauucggaa

SEQ ID NO: 2030158 - RNA, 19 nt, Artificial Sequence
  Description of Artificial Sequence: Synthetic oligonucleotide
aagcuuauuaaaggguuug

SEQ ID NO: 2030159 - RNA, 19 nt, Artificial Sequence
  Description of Artificial Sequence: Synthetic oligonucleotide
auguuuuaaugguaucaag

SEQ ID NO: 2030160 - RNA, 19 nt, Artificial Sequence
  Description of Artificial Sequence: Synthetic oligonucleotide
ugauggaaaacggaaggug

SEQ ID NO: 2030161 - RNA, 19 nt, Artificial Sequence
  Description of Artificial Sequence: Synthetic oligonucleotide
auuccucacacuuguagug

SEQ ID NO: 2030162 - RNA, 19 nt, Artificial Sequence
  Description of Artificial Sequence: Synthetic oligonucleotide
uauguauguuuuaauggua

SEQ ID NO: 2030163 - RNA, 19 nt, Artificial Sequence
  Description of Artificial Sequence: Synthetic oligonucleotide
agaauggauuaucauguga

SEQ ID NO: 2030164 - RNA, 19 nt, Artificial Sequence
  Description of Artificial Sequence: Synthetic oligonucleotide
gaauucggaaagcuuugcc

SEQ ID NO: 2030165 - RNA, 19 nt, Artificial Sequence
  Description of Artificial Sequence: Synthetic oligonucleotide
ugugugguuucucucacaa

SEQ ID NO: 2030166 - RNA, 19 nt, Artificial Sequence
  Description of Artificial Sequence: Synthetic oligonucleotide
uuucucucacaaaugaauu

SEQ ID NO: 2030167 - RNA, 19 nt, Artificial Sequence
  Description of Artificial Sequence: Synthetic oligonucleotide
uuaucaggucuuuucaaaa

SEQ ID NO: 2030168 - RNA, 19 nt, Artificial Sequence
  Description of Artificial Sequence: Synthetic oligonucleotide
cacacuuguggcauuaaug

SEQ ID NO: 2030169 - RNA, 19 nt, Artificial Sequence
  Description of Artificial Sequence: Synthetic oligonucleotide
cacuccaauaugaacuacc

SEQ ID NO: 2030170 - RNA, 19 nt, Artificial Sequence
  Description of Artificial Sequence: Synthetic oligonucleotide
auuaucaggucuuuucaaa

SEQ ID NO: 2030171 - RNA, 19 nt, Artificial Sequence
  Description of Artificial Sequence: Synthetic oligonucleotide
agcuuuaccacuauuuuca

SEQ ID NO: 2030172 - RNA, 19 nt, Artificial Sequence
  Description of Artificial Sequence: Synthetic oligonucleotide
guucuuagugaauacaaaa

SEQ ID NO: 2030173 - RNA, 19 nt, Artificial Sequence
  Description of Artificial Sequence: Synthetic oligonucleotide
guaucaagcaguguaaaca

SEQ ID NO: 2030174 - RNA, 19 nt, Artificial Sequence
  Description of Artificial Sequence: Synthetic oligonucleotide
uagaaagcacugauggaac

SEQ ID NO: 2030175 - RNA, 19 nt, Artificial Sequence
  Description of Artificial Sequence: Synthetic oligonucleotide
gaaaacggaagguguuucc

SEQ ID NO: 2030176 - RNA, 19 nt, Artificial Sequence
  Description of Artificial Sequence: Synthetic oligonucleotide
guguaaacauuucaugaac

SEQ ID NO: 2030177 - RNA, 19 nt, Artificial Sequence
  Description of Artificial Sequence: Synthetic oligonucleotide
uguaccauuucacuccaau

SEQ ID NO: 2030178 - RNA, 19 nt, Artificial Sequence
  Description of Artificial Sequence: Synthetic oligonucleotide
agaaaguaaugauggaaaa

SEQ ID NO: 2030179 - RNA, 19 nt, Artificial Sequence
  Description of Artificial Sequence: Synthetic oligonucleotide
uggaauucggaaagcuuug

SEQ ID NO: 2030180 - RNA, 19 nt, Artificial Sequence
  Description of Artificial Sequence: Synthetic oligonucleotide
uguuuccacacacuucaca

SEQ ID NO: 2030181 - RNA, 19 nt, Artificial Sequence
  Description of Artificial Sequence: Synthetic oligonucleotide
accauuucacuccaauaug

SEQ ID NO: 2030182 - RNA, 19 nt, Artificial Sequence
  Description of Artificial Sequence: Synthetic oligonucleotide
uauguauguauguuuuaau

SEQ ID NO: 2030183 - RNA, 19 nt, Artificial Sequence
  Description of Artificial Sequence: Synthetic oligonucleotide
ugguaauagcuuuaccacu

SEQ ID NO: 2030184 - RNA, 19 nt, Artificial Sequence
  Description of Artificial Sequence: Synthetic oligonucleotide
auggauuaucaugugauca

SEQ ID NO: 2030185 - RNA, 19 nt, Artificial Sequence
  Description of Artificial Sequence: Synthetic oligonucleotide
caguguaaacauuucauga

SEQ ID NO: 2030186 - RNA, 19 nt, Artificial Sequence
  Description of Artificial Sequence: Synthetic oligonucleotide
aagguguuuccacacacuu

SEQ ID NO: 2030187 - RNA, 19 nt, Artificial Sequence
  Description of Artificial Sequence: Synthetic oligonucleotide
uguguacugaaaguaguga

SEQ ID NO: 2030188 - RNA, 19 nt, Artificial Sequence
  Description of Artificial Sequence: Synthetic oligonucleotide
agaaacucuaaagacucug

SEQ ID NO: 2030189 - RNA, 19 nt, Artificial Sequence
  Description of Artificial Sequence: Synthetic oligonucleotide
aaguucuuagugaauacaa

SEQ ID NO: 2030190 - RNA, 19 nt, Artificial Sequence
  Description of Artificial Sequence: Synthetic oligonucleotide
ugaaaguaaugauggaauu

SEQ ID NO: 2030191 - RNA, 19 nt, Artificial Sequence
  Description of Artificial Sequence: Synthetic oligonucleotide
gaaacucuaaagacucugc

SEQ ID NO: 2030192 - RNA, 19 nt, Artificial Sequence
  Description of Artificial Sequence: Synthetic oligonucleotide
acuugugugguuucucuca

SEQ ID NO: 2030193 - RNA, 19 nt, Artificial Sequence
  Description of Artificial Sequence: Synthetic oligonucleotide
uaugaacuaccauguguug

SEQ ID NO: 2030194 - RNA, 19 nt, Artificial Sequence
  Description of Artificial Sequence: Synthetic oligonucleotide
aaggguuuguaacacuauu

SEQ ID NO: 2030195 - RNA, 19 nt, Artificial Sequence
  Description of Artificial Sequence: Synthetic oligonucleotide
auagcuuuaccacuauuuu

SEQ ID NO: 2030196 - RNA, 19 nt, Artificial Sequence
  Description of Artificial Sequence: Synthetic oligonucleotide
uguggguuuucuuuccaga

SEQ ID NO: 2030197 - RNA, 19 nt, Artificial Sequence
  Description of Artificial Sequence: Synthetic oligonucleotide
gguguuuccacacacuuca

SEQ ID NO: 2030198 - RNA, 19 nt, Artificial Sequence
  Description of Artificial Sequence: Synthetic oligonucleotide
gaucagaaagauuccgaga

SEQ ID NO: 2030199 - RNA, 19 nt, Artificial Sequence
  Description of Artificial Sequence: Synthetic oligonucleotide
guauguauguuuuaauggu

SEQ ID NO: 2030200 - RNA, 19 nt, Artificial Sequence
  Description of Artificial Sequence: Synthetic oligonucleotide
aauuauccgguuguuuaga

SEQ ID NO: 2030201 - RNA, 19 nt, Artificial Sequence
  Description of Artificial Sequence: Synthetic oligonucleotide
guuuagaacgugcuguaga

SEQ ID NO: 2030202 - RNA, 19 nt, Artificial Sequence
  Description of Artificial Sequence: Synthetic oligonucleotide
uuaaaggguuuguaacacu

SEQ ID NO: 2030203 - RNA, 19 nt, Artificial Sequence
  Description of Artificial Sequence: Synthetic oligonucleotide
aggguuuguaacacuauuc

SEQ ID NO: 2030204 - RNA, 19 nt, Artificial Sequence
  Description of Artificial Sequence: Synthetic oligonucleotide
ugugaauuacuuuguguuu

SEQ ID NO: 2030205 - RNA, 19 nt, Artificial Sequence
  Description of Artificial Sequence: Synthetic oligonucleotide
auguguugagaaauauugg

SEQ ID NO: 2030206 - RNA, 19 nt, Artificial Sequence
  Description of Artificial Sequence: Synthetic oligonucleotide
uaauuuucuuguguacuga

SEQ ID NO: 2030207 - RNA, 19 nt, Artificial Sequence
  Description of Artificial Sequence: Synthetic oligonucleotide
uagcuuuaccacuauuuuc

SEQ ID NO: 2030208 - RNA, 19 nt, Artificial Sequence
  Description of Artificial Sequence: Synthetic oligonucleotide
ucaggucuuuucaaaaguu

SEQ ID NO: 2030209 - RNA, 19 nt, Artificial Sequence
  Description of Artificial Sequence: Synthetic oligonucleotide
guagugauggaccacggaa

SEQ ID NO: 2030210 - RNA, 19 nt, Artificial Sequence
  Description of Artificial Sequence: Synthetic oligonucleotide
ucaaaaguucuuagugaau

SEQ ID NO: 2030211 - RNA, 19 nt, Artificial Sequence
  Description of Artificial Sequence: Synthetic oligonucleotide
uucuuguguacugaaagua

SEQ ID NO: 2030212 - RNA, 19 nt, Artificial Sequence
  Description of Artificial Sequence: Synthetic oligonucleotide
aagcacugauggaacacgg

SEQ ID NO: 2030213 - RNA, 19 nt, Artificial Sequence
  Description of Artificial Sequence: Synthetic oligonucleotide
auaugaacuaccauguguu

SEQ ID NO: 2030214 - RNA, 19 nt, Artificial Sequence
  Description of Artificial Sequence: Synthetic oligonucleotide
gaucuaggcacaucuucac

SEQ ID NO: 2030215 - RNA, 19 nt, Artificial Sequence
  Description of Artificial Sequence: Synthetic oligonucleotide
auguacagaaagcaaugau

SEQ ID NO: 2030216 - RNA, 19 nt, Artificial Sequence
  Description of Artificial Sequence: Synthetic oligonucleotide
ugauguugcuuaagaccag

SEQ ID NO: 2030217 - RNA, 19 nt, Artificial Sequence
  Description of Artificial Sequence: Synthetic oligonucleotide
gauuccgagaaacucuaaa

SEQ ID NO: 2030218 - RNA, 19 nt, Artificial Sequence
  Description of Artificial Sequence: Synthetic oligonucleotide
augauggaauucggaaagc

SEQ ID NO: 2030219 - RNA, 19 nt, Artificial Sequence
  Description of Artificial Sequence: Synthetic oligonucleotide
ugauggaauucggaaagcu

SEQ ID NO: 2030220 - RNA, 19 nt, Artificial Sequence
  Description of Artificial Sequence: Synthetic oligonucleotide
aaauauuggaaagcuuauu

SEQ ID NO: 2030221 - RNA, 19 nt, Artificial Sequence
  Description of Artificial Sequence: Synthetic oligonucleotide
uuuuaagauuuguaccauu

SEQ ID NO: 2030222 - RNA, 19 nt, Artificial Sequence
  Description of Artificial Sequence: Synthetic oligonucleotide
uucacuccaauaugaacua

SEQ ID NO: 2030223 - RNA, 19 nt, Artificial Sequence
  Description of Artificial Sequence: Synthetic oligonucleotide
agaaagcacugauggaaca

SEQ ID NO: 2030224 - RNA, 19 nt, Artificial Sequence
  Description of Artificial Sequence: Synthetic oligonucleotide
uuguggguuuucuuuccag

SEQ ID NO: 2030225 - RNA, 19 nt, Artificial Sequence
  Description of Artificial Sequence: Synthetic oligonucleotide
cuuagugaauacaaaagau

SEQ ID NO: 2030226 - RNA, 19 nt, Artificial Sequence
  Description of Artificial Sequence: Synthetic oligonucleotide
augugaucagaaagauucc

SEQ ID NO: 2030227 - RNA, 19 nt, Artificial Sequence
  Description of Artificial Sequence: Synthetic oligonucleotide
uuauccgguuguuuagaac

SEQ ID NO: 2030228 - RNA, 19 nt, Artificial Sequence
  Description of Artificial Sequence: Synthetic oligonucleotide
guauugaaggauaauggaa

SEQ ID NO: 2030229 - RNA, 19 nt, Artificial Sequence
  Description of Artificial Sequence: Synthetic oligonucleotide
uguuuagaacgugcuguag

SEQ ID NO: 2030230 - RNA, 19 nt, Artificial Sequence
  Description of Artificial Sequence: Synthetic oligonucleotide
agacugguaauagcuuuac

SEQ ID NO: 2030231 - RNA, 19 nt, Artificial Sequence
  Description of Artificial Sequence: Synthetic oligonucleotide
caggucuuuucaaaaguuc

SEQ ID NO: 2030232 - RNA, 19 nt, Artificial Sequence
  Description of Artificial Sequence: Synthetic oligonucleotide
ucucacaaaugaauucuuu

SEQ ID NO: 2030233 - RNA, 19 nt, Artificial Sequence
  Description of Artificial Sequence: Synthetic oligonucleotide
aguaaugauggaauucgga

SEQ ID NO: 2030234 - RNA, 19 nt, Artificial Sequence
  Description of Artificial Sequence: Synthetic oligonucleotide
ggaaauccuugucacauac

SEQ ID NO: 2030235 - RNA, 19 nt, Artificial Sequence
  Description of Artificial Sequence: Synthetic oligonucleotide
uucugaaaguaaugaugga

SEQ ID NO: 2030236 - RNA, 19 nt, Artificial Sequence
  Description of Artificial Sequence: Synthetic oligonucleotide
gcaguguaaacauuucaug

SEQ ID NO: 2030237 - RNA, 19 nt, Artificial Sequence
  Description of Artificial Sequence: Synthetic oligonucleotide
cucuuauguacagaaagca

SEQ ID NO: 2030238 - RNA, 19 nt, Artificial Sequence
  Description of Artificial Sequence: Synthetic oligonucleotide
acacuuguggguuuucuuu

SEQ ID NO: 2030239 - RNA, 19 nt, Artificial Sequence
  Description of Artificial Sequence: Synthetic oligonucleotide
uaccacuauuuucacacuu

SEQ ID NO: 2030240 - RNA, 19 nt, Artificial Sequence
  Description of Artificial Sequence: Synthetic oligonucleotide
guaugaauuauccgguugu

SEQ ID NO: 2030241 - RNA, 19 nt, Artificial Sequence
  Description of Artificial Sequence: Synthetic oligonucleotide
guuguuuagaacgugcugu

SEQ ID NO: 2030242 - RNA, 19 nt, Artificial Sequence
  Description of Artificial Sequence: Synthetic oligonucleotide
gaauggauuaucaugugau

SEQ ID NO: 2030243 - RNA, 19 nt, Artificial Sequence
  Description of Artificial Sequence: Synthetic oligonucleotide
ugcuuaagaccagaagacu

SEQ ID NO: 2030244 - RNA, 19 nt, Artificial Sequence
  Description of Artificial Sequence: Synthetic oligonucleotide
cagaagacugguaauagcu

SEQ ID NO: 2030245 - RNA, 19 nt, Artificial Sequence
  Description of Artificial Sequence: Synthetic oligonucleotide
aaguagugauggaccacgg

SEQ ID NO: 2030246 - RNA, 19 nt, Artificial Sequence
  Description of Artificial Sequence: Synthetic oligonucleotide
cuuuccagaauggauuauc

SEQ ID NO: 2030247 - RNA, 19 nt, Artificial Sequence
  Description of Artificial Sequence: Synthetic oligonucleotide
ggguuuguaacacuauuca

SEQ ID NO: 2030248 - RNA, 19 nt, Artificial Sequence
  Description of Artificial Sequence: Synthetic oligonucleotide
auggaauucggaaagcuuu

SEQ ID NO: 2030249 - RNA, 19 nt, Artificial Sequence
  Description of Artificial Sequence: Synthetic oligonucleotide
uggguuuucuuuccagaau

SEQ ID NO: 2030250 - RNA, 19 nt, Artificial Sequence
  Description of Artificial Sequence: Synthetic oligonucleotide
agaucuaggcacaucuuca

SEQ ID NO: 2030251 - RNA, 19 nt, Artificial Sequence
  Description of Artificial Sequence: Synthetic oligonucleotide
gacugguaauagcuuuacc

SEQ ID NO: 2030252 - RNA, 19 nt, Artificial Sequence
  Description of Artificial Sequence: Synthetic oligonucleotide
agcaguguaaacauuucau

SEQ ID NO: 2030253 - RNA, 19 nt, Artificial Sequence
  Description of Artificial Sequence: Synthetic oligonucleotide
uguggcauuaaugcccagu

SEQ ID NO: 2030254 - RNA, 19 nt, Artificial Sequence
  Description of Artificial Sequence: Synthetic oligonucleotide
cuuguguacagaaaguaau

SEQ ID NO: 2030255 - RNA, 19 nt, Artificial Sequence
  Description of Artificial Sequence: Synthetic oligonucleotide
uuaucuccugugugaauuc

SEQ ID NO: 2030256 - RNA, 19 nt, Artificial Sequence
  Description of Artificial Sequence: Synthetic oligonucleotide
agaaagcaaugaugagaag

SEQ ID NO: 2030257 - RNA, 19 nt, Artificial Sequence
  Description of Artificial Sequence: Synthetic oligonucleotide
gguuuguaacacuauucac

SEQ ID NO: 2030258 - RNA, 19 nt, Artificial Sequence
  Description of Artificial Sequence: Synthetic oligonucleotide
aacgugcuguagaacuuuc

SEQ ID NO: 2030259 - RNA, 19 nt, Artificial Sequence
  Description of Artificial Sequence: Synthetic oligonucleotide
aagcaaugaugagaaggcu

SEQ ID NO: 2030260 - RNA, 19 nt, Artificial Sequence
  Description of Artificial Sequence: Synthetic oligonucleotide
ucaugugaucagaaagauu

SEQ ID NO: 2030261 - RNA, 19 nt, Artificial Sequence
  Description of Artificial Sequence: Synthetic oligonucleotide
gugugaauuacuuuguguu

SEQ ID NO: 2030262 - RNA, 19 nt, Artificial Sequence
  Description of Artificial Sequence: Synthetic oligonucleotide
gauuaucaugugaucagaa

SEQ ID NO: 2030263 - RNA, 19 nt, Artificial Sequence
  Description of Artificial Sequence: Synthetic oligonucleotide
acuccaauaugaacuacca

SEQ ID NO: 2030264 - RNA, 19 nt, Artificial Sequence
  Description of Artificial Sequence: Synthetic oligonucleotide
gaauuuucuuguguuuaga

SEQ ID NO: 2030265 - RNA, 19 nt, Artificial Sequence
  Description of Artificial Sequence: Synthetic oligonucleotide
aagauuccgagaaacucua

SEQ ID NO: 2030266 - RNA, 19 nt, Artificial Sequence
  Description of Artificial Sequence: Synthetic oligonucleotide
cacuuguggguuuucuuuc

SEQ ID NO: 2030267 - RNA, 19 nt, Artificial Sequence
  Description of Artificial Sequence: Synthetic oligonucleotide
aguagugauggaccacgga

SEQ ID NO: 2030268 - RNA, 19 nt, Artificial Sequence
  Description of Artificial Sequence: Synthetic oligonucleotide
aucaugugaucagaaagau

SEQ ID NO: 2030269 - RNA, 19 nt, Artificial Sequence
  Description of Artificial Sequence: Synthetic oligonucleotide
uuccagaauggauuaucau

SEQ ID NO: 2030270 - RNA, 19 nt, Artificial Sequence
  Description of Artificial Sequence: Synthetic oligonucleotide
acauuucaugaacauuuua

SEQ ID NO: 2030271 - RNA, 19 nt, Artificial Sequence
  Description of Artificial Sequence: Synthetic oligonucleotide
cuuguggcauuaaugccca

SEQ ID NO: 2030272 - RNA, 19 nt, Artificial Sequence
  Description of Artificial Sequence: Synthetic oligonucleotide
aggauaauggaaggccuug

SEQ ID NO: 2030273 - RNA, 19 nt, Artificial Sequence
  Description of Artificial Sequence: Synthetic oligonucleotide
cacaucuucacacuugugu

SEQ ID NO: 2030274 - RNA, 19 nt, Artificial Sequence
  Description of Artificial Sequence: Synthetic oligonucleotide
agaaaguauugaaggauaa

SEQ ID NO: 2030275 - RNA, 19 nt, Artificial Sequence
  Description of Artificial Sequence: Synthetic oligonucleotide
aucuaggcacaucuucaca

SEQ ID NO: 2030276 - RNA, 19 nt, Artificial Sequence
  Description of Artificial Sequence: Synthetic oligonucleotide
gaaaguagugauggaccac

SEQ ID NO: 2030277 - RNA, 19 nt, Artificial Sequence
  Description of Artificial Sequence: Synthetic oligonucleotide
cgagaaacucuaaagacuc

SEQ ID NO: 2030278 - RNA, 19 nt, Artificial Sequence
  Description of Artificial Sequence: Synthetic oligonucleotide
gguaucaagcaguguaaac

SEQ ID NO: 2030279 - RNA, 19 nt, Artificial Sequence
  Description of Artificial Sequence: Synthetic oligonucleotide
gguuguuuagaacgugcug

SEQ ID NO: 2030280 - RNA, 19 nt, Artificial Sequence
  Description of Artificial Sequence: Synthetic oligonucleotide
cagaauggauuaucaugug

SEQ ID NO: 2030281 - RNA, 19 nt, Artificial Sequence
  Description of Artificial Sequence: Synthetic oligonucleotide
uuagaacgugcuguagaac

SEQ ID NO: 2030282 - RNA, 19 nt, Artificial Sequence
  Description of Artificial Sequence: Synthetic oligonucleotide
accacuauuuucacacuug

SEQ ID NO: 2030283 - RNA, 19 nt, Artificial Sequence
  Description of Artificial Sequence: Synthetic oligonucleotide
uuaccacuauuuucacacu

SEQ ID NO: 2030284 - RNA, 19 nt, Artificial Sequence
  Description of Artificial Sequence: Synthetic oligonucleotide
uacugaaaguagugaugga

SEQ ID NO: 2030285 - RNA, 19 nt, Artificial Sequence
  Description of Artificial Sequence: Synthetic oligonucleotide
aaaggguuuguaacacuau

SEQ ID NO: 2030286 - RNA, 19 nt, Artificial Sequence
  Description of Artificial Sequence: Synthetic oligonucleotide
gauguugcuuaagaccaga

SEQ ID NO: 2030287 - RNA, 19 nt, Artificial Sequence
  Description of Artificial Sequence: Synthetic oligonucleotide
ggaagguguuuccacacac

SEQ ID NO: 2030288 - RNA, 19 nt, Artificial Sequence
  Description of Artificial Sequence: Synthetic oligonucleotide
aacauuucaugaacauuuu

SEQ ID NO: 2030289 - RNA, 19 nt, Artificial Sequence
  Description of Artificial Sequence: Synthetic oligonucleotide
uccuguguguaauuuucuu

SEQ ID NO: 2030290 - RNA, 19 nt, Artificial Sequence
  Description of Artificial Sequence: Synthetic oligonucleotide
cuuuaccacuauuuucaca

SEQ ID NO: 2030291 - RNA, 19 nt, Artificial Sequence
  Description of Artificial Sequence: Synthetic oligonucleotide
uggcauuaaugcccaguaa

SEQ ID NO: 2030292 - RNA, 19 nt, Artificial Sequence
  Description of Artificial Sequence: Synthetic oligonucleotide
uuccucacacuuguagugu

SEQ ID NO: 2030293 - RNA, 19 nt, Artificial Sequence
  Description of Artificial Sequence: Synthetic oligonucleotide
uaccauguguugagaaaua

SEQ ID NO: 2030294 - RNA, 19 nt, Artificial Sequence
  Description of Artificial Sequence: Synthetic oligonucleotide
guaacacuauucacacuug

SEQ ID NO: 2030295 - RNA, 19 nt, Artificial Sequence
  Description of Artificial Sequence: Synthetic oligonucleotide
aaugcccaguaagaauuau

SEQ ID NO: 2030296 - RNA, 19 nt, Artificial Sequence
  Description of Artificial Sequence: Synthetic oligonucleotide
cuuguguacugaaaguagu

SEQ ID NO: 2030297 - RNA, 19 nt, Artificial Sequence
  Description of Artificial Sequence: Synthetic oligonucleotide
caguaagaauuaucagguc

SEQ ID NO: 2030298 - RNA, 19 nt, Artificial Sequence
  Description of Artificial Sequence: Synthetic oligonucleotide
gugaauuacuuuguguuua

SEQ ID NO: 2030299 - RNA, 19 nt, Artificial Sequence
  Description of Artificial Sequence: Synthetic oligonucleotide
uaggcacaucuucacacuu

SEQ ID NO: 2030300 - RNA, 19 nt, Artificial Sequence
  Description of Artificial Sequence: Synthetic oligonucleotide
uaagaauuaucaggucuuu

SEQ ID NO: 2030301 - RNA, 19 nt, Artificial Sequence
  Description of Artificial Sequence: Synthetic oligonucleotide
agaccagaagacugguaau

SEQ ID NO: 2030302 - RNA, 19 nt, Artificial Sequence
  Description of Artificial Sequence: Synthetic oligonucleotide
cauuucacuccaauaugaa

SEQ ID NO: 2030303 - RNA, 19 nt, Artificial Sequence
  Description of Artificial Sequence: Synthetic oligonucleotide
gaaggauaauggaaggccu

SEQ ID NO: 2030304 - RNA, 19 nt, Artificial Sequence
  Description of Artificial Sequence: Synthetic oligonucleotide
agguguuuccacacacuuc

SEQ ID NO: 2030305 - RNA, 19 nt, Artificial Sequence
  Description of Artificial Sequence: Synthetic oligonucleotide
aagacugguaauagcuuua

SEQ ID NO: 2030306 - RNA, 19 nt, Artificial Sequence
  Description of Artificial Sequence: Synthetic oligonucleotide
uaugaauuauccgguuguu

SEQ ID NO: 2030307 - RNA, 19 nt, Artificial Sequence
  Description of Artificial Sequence: Synthetic oligonucleotide
caugaacauuuuaagauuu

SEQ ID NO: 2030308 - RNA, 19 nt, Artificial Sequence
  Description of Artificial Sequence: Synthetic oligonucleotide
guuucucucacaaaugaau

SEQ ID NO: 2030309 - RNA, 19 nt, Artificial Sequence
  Description of Artificial Sequence: Synthetic oligonucleotide
cauuaaugcccaguaagaa

SEQ ID NO: 2030310 - RNA, 19 nt, Artificial Sequence
  Description of Artificial Sequence: Synthetic oligonucleotide
gaaauauuggaaagcuuau

SEQ ID NO: 2030311 - RNA, 19 nt, Artificial Sequence
  Description of Artificial Sequence: Synthetic oligonucleotide
gugaucagaaagauuccga

SEQ ID NO: 2030312 - RNA, 19 nt, Artificial Sequence
  Description of Artificial Sequence: Synthetic oligonucleotide
agcaaugaugagaaggcuu

SEQ ID NO: 2030313 - RNA, 19 nt, Artificial Sequence
  Description of Artificial Sequence: Synthetic oligonucleotide
ugguaucaagcaguguaaa

SEQ ID NO: 2030314 - RNA, 19 nt, Artificial Sequence
  Description of Artificial Sequence: Synthetic oligonucleotide
guggcauuaaugcccagua

SEQ ID NO: 2030315 - RNA, 19 nt, Artificial Sequence
  Description of Artificial Sequence: Synthetic oligonucleotide
agcuuauuaaaggguuugu

SEQ ID NO: 2030316 - RNA, 19 nt, Artificial Sequence
  Description of Artificial Sequence: Synthetic oligonucleotide
agugaauacaaaagaucua

SEQ ID NO: 2030317 - RNA, 19 nt, Artificial Sequence
  Description of Artificial Sequence: Synthetic oligonucleotide
guggguuuucuuuccagaa

SEQ ID NO: 2030318 - RNA, 19 nt, Artificial Sequence
  Description of Artificial Sequence: Synthetic oligonucleotide
ccaguaagaauuaucaggu

SEQ ID NO: 2030319 - RNA, 19 nt, Artificial Sequence
  Description of Artificial Sequence: Synthetic oligonucleotide
aaagaucuaggcacaucuu

SEQ ID NO: 2030320 - RNA, 19 nt, Artificial Sequence
  Description of Artificial Sequence: Synthetic oligonucleotide
uugugugguuucucucaca

SEQ ID NO: 2030321 - RNA, 19 nt, Artificial Sequence
  Description of Artificial Sequence: Synthetic oligonucleotide
uggaaaacggaagguguuu

SEQ ID NO: 2030322 - RNA, 19 nt, Artificial Sequence
  Description of Artificial Sequence: Synthetic oligonucleotide
ccagaagacugguaauagc

SEQ ID NO: 2030323 - RNA, 19 nt, Artificial Sequence
  Description of Artificial Sequence: Synthetic oligonucleotide
ccagaauggauuaucaugu

SEQ ID NO: 2030324 - RNA, 19 nt, Artificial Sequence
  Description of Artificial Sequence: Synthetic oligonucleotide
guaccauuucacuccaaua

SEQ ID NO: 2030325 - RNA, 19 nt, Artificial Sequence
  Description of Artificial Sequence: Synthetic oligonucleotide
auuuucuuguguacugaaa

SEQ ID NO: 2030326 - RNA, 19 nt, Artificial Sequence
  Description of Artificial Sequence: Synthetic oligonucleotide
guguuuagaaagcacugau

SEQ ID NO: 2030327 - RNA, 19 nt, Artificial Sequence
  Description of Artificial Sequence: Synthetic oligonucleotide
uccgguuguuuagaacgug

SEQ ID NO: 2030328 - RNA, 19 nt, Artificial Sequence
  Description of Artificial Sequence: Synthetic oligonucleotide
guguacugaaaguagugau

SEQ ID NO: 2030329 - RNA, 19 nt, Artificial Sequence
  Description of Artificial Sequence: Synthetic oligonucleotide
gaauucucuuguguacaga

SEQ ID NO: 2030330 - RNA, 19 nt, Artificial Sequence
  Description of Artificial Sequence: Synthetic oligonucleotide
ccauuucacuccaauauga

SEQ ID NO: 2030331 - RNA, 19 nt, Artificial Sequence
  Description of Artificial Sequence: Synthetic oligonucleotide
guguacagaaaguaaugau

SEQ ID NO: 2030332 - RNA, 19 nt, Artificial Sequence
  Description of Artificial Sequence: Synthetic oligonucleotide
cacaaaugaauucuuugau

SEQ ID NO: 2030333 - RNA, 19 nt, Artificial Sequence
  Description of Artificial Sequence: Synthetic oligonucleotide
accauguguugagaaauau

SEQ ID NO: 2030334 - RNA, 19 nt, Artificial Sequence
  Description of Artificial Sequence: Synthetic oligonucleotide
uaaugguaucaagcagugu

SEQ ID NO: 2030335 - RNA, 19 nt, Artificial Sequence
  Description of Artificial Sequence: Synthetic oligonucleotide
augguaucaagcaguguaa

SEQ ID NO: 2030336 - RNA, 19 nt, Artificial Sequence
  Description of Artificial Sequence: Synthetic oligonucleotide
gguaauagcuuuaccacua

SEQ ID NO: 2030337 - RNA, 19 nt, Artificial Sequence
  Description of Artificial Sequence: Synthetic oligonucleotide
guagaacuuucacacuugu

SEQ ID NO: 2030338 - RNA, 19 nt, Artificial Sequence
  Description of Artificial Sequence: Synthetic oligonucleotide
guaagaauuaucaggucuu

SEQ ID NO: 2030339 - RNA, 19 nt, Artificial Sequence
  Description of Artificial Sequence: Synthetic oligonucleotide
ccaauaugaacuaccaugu

SEQ ID NO: 2030340 - RNA, 19 nt, Artificial Sequence
  Description of Artificial Sequence: Synthetic oligonucleotide
augaauuauccgguuguuu

SEQ ID NO: 2030341 - RNA, 19 nt, Artificial Sequence
  Description of Artificial Sequence: Synthetic oligonucleotide
gaccagaagacugguaaua

SEQ ID NO: 2030342 - RNA, 19 nt, Artificial Sequence
  Description of Artificial Sequence: Synthetic oligonucleotide
ucacuccaauaugaacuac

SEQ ID NO: 2030343 - RNA, 19 nt, Artificial Sequence
  Description of Artificial Sequence: Synthetic oligonucleotide
ccgguuguuuagaacgugc

SEQ ID NO: 2030344 - RNA, 19 nt, Artificial Sequence
  Description of Artificial Sequence: Synthetic oligonucleotide
gcccaguaagaauuaucag

SEQ ID NO: 2030345 - RNA, 19 nt, Artificial Sequence
  Description of Artificial Sequence: Synthetic oligonucleotide
agaagacugguaauagcuu

SEQ ID NO: 2030346 - RNA, 19 nt, Artificial Sequence
  Description of Artificial Sequence: Synthetic oligonucleotide
gcauuaaugcccaguaaga

SEQ ID NO: 2030347 - RNA, 19 nt, Artificial Sequence
  Description of Artificial Sequence: Synthetic oligonucleotide
cucuaaagacucugccaca

SEQ ID NO: 2030348 - RNA, 19 nt, Artificial Sequence
  Description of Artificial Sequence: Synthetic oligonucleotide
cuguagaacuuucacacuu

SEQ ID NO: 2030349 - RNA, 19 nt, Artificial Sequence
  Description of Artificial Sequence: Synthetic oligonucleotide
ggaauucggaaagcuuugc

SEQ ID NO: 2030350 - RNA, 19 nt, Artificial Sequence
  Description of Artificial Sequence: Synthetic oligonucleotide
ggaaagcuuauuaaagggu

SEQ ID NO: 2030351 - RNA, 19 nt, Artificial Sequence
  Description of Artificial Sequence: Synthetic oligonucleotide
ggauuaucaugugaucaga

SEQ ID NO: 2030352 - RNA, 19 nt, Artificial Sequence
  Description of Artificial Sequence: Synthetic oligonucleotide
ucacuccuguguguaauuu

SEQ ID NO: 2030353 - RNA, 19 nt, Artificial Sequence
  Description of Artificial Sequence: Synthetic oligonucleotide
ggaaaacggaagguguuuc

SEQ ID NO: 2030354 - RNA, 19 nt, Artificial Sequence
  Description of Artificial Sequence: Synthetic oligonucleotide
guguucugaaaguaaugau

SEQ ID NO: 2030355 - RNA, 19 nt, Artificial Sequence
  Description of Artificial Sequence: Synthetic oligonucleotide
auucacacuuguggcauua

SEQ ID NO: 2030356 - RNA, 19 nt, Artificial Sequence
  Description of Artificial Sequence: Synthetic oligonucleotide
gaacuaccauguguugaga

SEQ ID NO: 2030357 - RNA, 19 nt, Artificial Sequence
  Description of Artificial Sequence: Synthetic oligonucleotide
cacuauuuucacacuugua

SEQ ID NO: 2030358 - RNA, 19 nt, Artificial Sequence
  Description of Artificial Sequence: Synthetic oligonucleotide
gcuuuaccacuauuuucac

SEQ ID NO: 2030359 - RNA, 19 nt, Artificial Sequence
  Description of Artificial Sequence: Synthetic oligonucleotide
uuguggcauuaaugcccag

SEQ ID NO: 2030360 - RNA, 19 nt, Artificial Sequence
  Description of Artificial Sequence: Synthetic oligonucleotide
agaacgugcuguagaacuu

SEQ ID NO: 2030361 - RNA, 19 nt, Artificial Sequence
  Description of Artificial Sequence: Synthetic oligonucleotide
guuucacuccuguguguaa

SEQ ID NO: 2030362 - RNA, 19 nt, Artificial Sequence
  Description of Artificial Sequence: Synthetic oligonucleotide
uuguaccauuucacuccaa

SEQ ID NO: 2030363 - RNA, 19 nt, Artificial Sequence
  Description of Artificial Sequence: Synthetic oligonucleotide
auccgguuguuuagaacgu

SEQ ID NO: 2030364 - RNA, 19 nt, Artificial Sequence
  Description of Artificial Sequence: Synthetic oligonucleotide
agcacugauggaacacgga

SEQ ID NO: 2030365 - RNA, 19 nt, Artificial Sequence
  Description of Artificial Sequence: Synthetic oligonucleotide
cuaggcacaucuucacacu

SEQ ID NO: 2030366 - RNA, 19 nt, Artificial Sequence
  Description of Artificial Sequence: Synthetic oligonucleotide
gaagguguuuccacacacu

SEQ ID NO: 2030367 - RNA, 19 nt, Artificial Sequence
  Description of Artificial Sequence: Synthetic oligonucleotide
uucacacuuguggcauuaa

SEQ ID NO: 2030368 - RNA, 19 nt, Artificial Sequence
  Description of Artificial Sequence: Synthetic oligonucleotide
gagaaauauuggaaagcuu

SEQ ID NO: 2030369 - RNA, 19 nt, Artificial Sequence
  Description of Artificial Sequence: Synthetic oligonucleotide
cuauucacacuuguggcau

SEQ ID NO: 2030370 - RNA, 19 nt, Artificial Sequence
  Description of Artificial Sequence: Synthetic oligonucleotide
ggacaauggaaauccuugu

SEQ ID NO: 2030371 - RNA, 19 nt, Artificial Sequence
  Description of Artificial Sequence: Synthetic oligonucleotide
auguugcuuaagaccagaa

SEQ ID NO: 2030372 - RNA, 19 nt, Artificial Sequence
  Description of Artificial Sequence: Synthetic oligonucleotide
guaauagcuuuaccacuau

SEQ ID NO: 2030373 - RNA, 19 nt, Artificial Sequence
  Description of Artificial Sequence: Synthetic oligonucleotide
ccgagaaacucuaaagacu

SEQ ID NO: 2030374 - RNA, 19 nt, Artificial Sequence
  Description of Artificial Sequence: Synthetic oligonucleotide
gguuucucucacaaaugaa

SEQ ID NO: 2030375 - RNA, 19 nt, Artificial Sequence
  Description of Artificial Sequence: Synthetic oligonucleotide
gugugguuucucucacaaa

SEQ ID NO: 2030376 - RNA, 19 nt, Artificial Sequence
  Description of Artificial Sequence: Synthetic oligonucleotide
gguuucacuccugugugua

SEQ ID NO: 2030377 - RNA, 19 nt, Artificial Sequence
  Description of Artificial Sequence: Synthetic oligonucleotide
ggauucucuuauguacaga

SEQ ID NO: 2030378 - RNA, 19 nt, Artificial Sequence
  Description of Artificial Sequence: Synthetic oligonucleotide
gaacgugcuguagaacuuu

SEQ ID NO: 2030379 - RNA, 19 nt, Artificial Sequence
  Description of Artificial Sequence: Synthetic oligonucleotide
cucucacaaaugaauucuu

SEQ ID NO: 2030380 - RNA, 19 nt, Artificial Sequence
  Description of Artificial Sequence: Synthetic oligonucleotide
gcaaugaugagaaggcuuu

SEQ ID NO: 2030381 - RNA, 19 nt, Artificial Sequence
  Description of Artificial Sequence: Synthetic oligonucleotide
agauuccgagaaacucuaa

SEQ ID NO: 2030382 - RNA, 19 nt, Artificial Sequence
  Description of Artificial Sequence: Synthetic oligonucleotide
gcuguagaacuuucacacu

SEQ ID NO: 2030383 - RNA, 19 nt, Artificial Sequence
  Description of Artificial Sequence: Synthetic oligonucleotide
ccacuauuuucacacuugu

SEQ ID NO: 2030384 - RNA, 19 nt, Artificial Sequence
  Description of Artificial Sequence: Synthetic oligonucleotide
ggauaauggaaggccuugu

SEQ ID NO: 2030385 - RNA, 19 nt, Artificial Sequence
  Description of Artificial Sequence: Synthetic oligonucleotide
ggguuucacuccugugugu

SEQ ID NO: 2030386 - RNA, 19 nt, Artificial Sequence
  Description of Artificial Sequence: Synthetic oligonucleotide
ccauguguugagaaauauu

SEQ ID NO: 2030387 - RNA, 19 nt, Artificial Sequence
  Description of Artificial Sequence: Synthetic oligonucleotide
caaugaugagaaggcuuuu

SEQ ID NO: 2030388 - RNA, 19 nt, Artificial Sequence
  Description of Artificial Sequence: Synthetic oligonucleotide
cgguuguuuagaacgugcu

SEQ ID NO: 2030389 - RNA, 19 nt, Artificial Sequence
  Description of Artificial Sequence: Synthetic oligonucleotide
cggaagguguuuccacaca

SEQ ID NO: 2030390 - RNA, 19 nt, Artificial Sequence
  Description of Artificial Sequence: Synthetic oligonucleotide
agugcuuuuguucaguucc

SEQ ID NO: 2030391 - RNA, 19 nt, Artificial Sequence
  Description of Artificial Sequence: Synthetic oligonucleotide
aagggcauaaucuugaggu

SEQ ID NO: 2030392 - RNA, 19 nt, Artificial Sequence
  Description of Artificial Sequence: Synthetic oligonucleotide
aaguugaucucuuugagcu

SEQ ID NO: 2030393 - RNA, 19 nt, Artificial Sequence
  Description of Artificial Sequence: Synthetic oligonucleotide
ucagagacgugcaagaucu

SEQ ID NO: 2030394 - RNA, 19 nt, Artificial Sequence
  Description of Artificial Sequence: Synthetic oligonucleotide
accuguguagcccugagac

SEQ ID NO: 2030395 - RNA, 19 nt, Artificial Sequence
  Description of Artificial Sequence: Synthetic oligonucleotide
uucagaaugagguugucca

SEQ ID NO: 2030396 - RNA, 19 nt, Artificial Sequence
  Description of Artificial Sequence: Synthetic oligonucleotide
uucgucuucucacuguugg

SEQ ID NO: 2030397 - RNA, 19 nt, Artificial Sequence
  Description of Artificial Sequence: Synthetic oligonucleotide
acuuguuacuuccaagaac

SEQ ID NO: 2030398 - RNA, 19 nt, Artificial Sequence
  Description of Artificial Sequence: Synthetic oligonucleotide
ucucuuugagcuuagggca

SEQ ID NO: 2030399 - RNA, 19 nt, Artificial Sequence
  Description of Artificial Sequence: Synthetic oligonucleotide
gacguaugggcguacaucc

SEQ ID NO: 2030400 - RNA, 19 nt, Artificial Sequence
  Description of Artificial Sequence: Synthetic oligonucleotide
accauuuucagaaugaggu

SEQ ID NO: 2030401 - RNA, 19 nt, Artificial Sequence
  Description of Artificial Sequence: Synthetic oligonucleotide
uccgggcuuacccugaugg

SEQ ID NO: 2030402 - RNA, 19 nt, Artificial Sequence
  Description of Artificial Sequence: Synthetic oligonucleotide
cuaggauggauuuugucug

SEQ ID NO: 2030403 - RNA, 19 nt, Artificial Sequence
  Description of Artificial Sequence: Synthetic oligonucleotide
agggauggugaccaggucg

SEQ ID NO: 2030404 - RNA, 19 nt, Artificial Sequence
  Description of Artificial Sequence: Synthetic oligonucleotide
aaucuugagguccucgggu

SEQ ID NO: 2030405 - RNA, 19 nt, Artificial Sequence
  Description of Artificial Sequence: Synthetic oligonucleotide
uaaucuugagguccucggg

SEQ ID NO: 2030406 - RNA, 19 nt, Artificial Sequence
  Description of Artificial Sequence: Synthetic oligonucleotide
cacuguugguuauaggugg

SEQ ID NO: 2030407 - RNA, 19 nt, Artificial Sequence
  Description of Artificial Sequence: Synthetic oligonucleotide
aaucacguccccuucggca

SEQ ID NO: 2030408 - RNA, 19 nt, Artificial Sequence
  Description of Artificial Sequence: Synthetic oligonucleotide
ucacuguugguuauaggug

SEQ ID NO: 2030409 - RNA, 19 nt, Artificial Sequence
  Description of Artificial Sequence: Synthetic oligonucleotide
aaaucacguccccuucggc

SEQ ID NO: 2030410 - RNA, 19 nt, Artificial Sequence
  Description of Artificial Sequence: Synthetic oligonucleotide
agaucuugagaaucauccg

SEQ ID NO: 2030411 - RNA, 19 nt, Artificial Sequence
  Description of Artificial Sequence: Synthetic oligonucleotide
acgugcaagaucuugagaa

SEQ ID NO: 2030412 - RNA, 19 nt, Artificial Sequence
  Description of Artificial Sequence: Synthetic oligonucleotide
aguaaguggagguaccugu

SEQ ID NO: 2030413 - RNA, 19 nt, Artificial Sequence
  Description of Artificial Sequence: Synthetic oligonucleotide
gaaaucacguccccuucgg

SEQ ID NO: 2030414 - RNA, 19 nt, Artificial Sequence
  Description of Artificial Sequence: Synthetic oligonucleotide
gaaucauccgggcugaguc

SEQ ID NO: 2030415 - RNA, 19 nt, Artificial Sequence
  Description of Artificial Sequence: Synthetic oligonucleotide
auggauuuugucuggcauc

SEQ ID NO: 2030416 - RNA, 19 nt, Artificial Sequence
  Description of Artificial Sequence: Synthetic oligonucleotide
aagugcuuuuguucaguuc

SEQ ID NO: 2030417 - RNA, 19 nt, Artificial Sequence
  Description of Artificial Sequence: Synthetic oligonucleotide
uugagcuuagggcagucug

SEQ ID NO: 2030418 - RNA, 19 nt, Artificial Sequence
  Description of Artificial Sequence: Synthetic oligonucleotide
uuauaggugggaaggaaau

SEQ ID NO: 2030419 - RNA, 19 nt, Artificial Sequence
  Description of Artificial Sequence: Synthetic oligonucleotide
uucccguccaguaagugga

SEQ ID NO: 2030420 - RNA, 19 nt, Artificial Sequence
  Description of Artificial Sequence: Synthetic oligonucleotide
agcacuguccauccuuccc

SEQ ID NO: 2030421 - RNA, 19 nt, Artificial Sequence
  Description of Artificial Sequence: Synthetic oligonucleotide
ucggaaguugaucucuuug

SEQ ID NO: 2030422 - RNA, 19 nt, Artificial Sequence
  Description of Artificial Sequence: Synthetic oligonucleotide
ucuggcaguugagaaagcg

SEQ ID NO: 2030423 - RNA, 19 nt, Artificial Sequence
  Description of Artificial Sequence: Synthetic oligonucleotide
uguuacuuccaagaacaag

SEQ ID NO: 2030424 - RNA, 19 nt, Artificial Sequence
  Description of Artificial Sequence: Synthetic oligonucleotide
cucggagcccucuugacgg

SEQ ID NO: 2030425 - RNA, 19 nt, Artificial Sequence
  Description of Artificial Sequence: Synthetic oligonucleotide
ggguacaccaccuucaagc

SEQ ID NO: 2030426 - RNA, 19 nt, Artificial Sequence
  Description of Artificial Sequence: Synthetic oligonucleotide
acaaguugcauguuguuuu

SEQ ID NO: 2030427 - RNA, 19 nt, Artificial Sequence
  Description of Artificial Sequence: Synthetic oligonucleotide
ucgugggucgcaaugguug

SEQ ID NO: 2030428 - RNA, 19 nt, Artificial Sequence
  Description of Artificial Sequence: Synthetic oligonucleotide
ugagucugcuaccucgucc

SEQ ID NO: 2030429 - RNA, 19 nt, Artificial Sequence
  Description of Artificial Sequence: Synthetic oligonucleotide
guaguuuuccuucccgucc

SEQ ID NO: 2030430 - RNA, 19 nt, Artificial Sequence
  Description of Artificial Sequence: Synthetic oligonucleotide
aaucuucgucuucucacug

SEQ ID NO: 2030431 - RNA, 19 nt, Artificial Sequence
  Description of Artificial Sequence: Synthetic oligonucleotide
uggauuuugucuggcaucc

SEQ ID NO: 2030432 - RNA, 19 nt, Artificial Sequence
  Description of Artificial Sequence: Synthetic oligonucleotide
agcgccggaguacauuucc

SEQ ID NO: 2030433 - RNA, 19 nt, Artificial Sequence
  Description of Artificial Sequence: Synthetic oligonucleotide
uuucgguccuccuucucgg

SEQ ID NO: 2030434 - RNA, 19 nt, Artificial Sequence
  Description of Artificial Sequence: Synthetic oligonucleotide
aaggaaaucacguccccuu

SEQ ID NO: 2030435 - RNA, 19 nt, Artificial Sequence
  Description of Artificial Sequence: Synthetic oligonucleotide
uacucuaggauggauuuug

SEQ ID NO: 2030436 - RNA, 19 nt, Artificial Sequence
  Description of Artificial Sequence: Synthetic oligonucleotide
uugucuggcauccacccac

SEQ ID NO: 2030437 - RNA, 19 nt, Artificial Sequence
  Description of Artificial Sequence: Synthetic oligonucleotide
ccaaguugggaucagaaag

SEQ ID NO: 2030438 - RNA, 19 nt, Artificial Sequence
  Description of Artificial Sequence: Synthetic oligonucleotide
cuuacccugauggucaggg

SEQ ID NO: 2030439 - RNA, 19 nt, Artificial Sequence
  Description of Artificial Sequence: Synthetic oligonucleotide
caugccucgcacaauggcc

SEQ ID NO: 2030440 - RNA, 19 nt, Artificial Sequence
  Description of Artificial Sequence: Synthetic oligonucleotide
guugggaucagaaagccca

SEQ ID NO: 2030441 - RNA, 19 nt, Artificial Sequence
  Description of Artificial Sequence: Synthetic oligonucleotide
auaggugggaaggaaauca

SEQ ID NO: 2030442 - RNA, 19 nt, Artificial Sequence
  Description of Artificial Sequence: Synthetic oligonucleotide
ugagcuuagggcagucugc

SEQ ID NO: 2030443 - RNA, 19 nt, Artificial Sequence
  Description of Artificial Sequence: Synthetic oligonucleotide
cuucccguccaguaagugg

SEQ ID NO: 2030444 - RNA, 19 nt, Artificial Sequence
  Description of Artificial Sequence: Synthetic oligonucleotide
cuuggauggguacaccacc

SEQ ID NO: 2030445 - RNA, 19 nt, Artificial Sequence
  Description of Artificial Sequence: Synthetic oligonucleotide
cuguguagcccugagacgc

SEQ ID NO: 2030446 - RNA, 19 nt, Artificial Sequence
  Description of Artificial Sequence: Synthetic oligonucleotide
uucucagagacgugcaaga

SEQ ID NO: 2030447 - RNA, 19 nt, Artificial Sequence
  Description of Artificial Sequence: Synthetic oligonucleotide
ugccaguucagcagggacc

SEQ ID NO: 2030448 - RNA, 19 nt, Artificial Sequence
  Description of Artificial Sequence: Synthetic oligonucleotide
guuacuuccaagaacaagu

SEQ ID NO: 2030449 - RNA, 19 nt, Artificial Sequence
  Description of Artificial Sequence: Synthetic oligonucleotide
ucucuaggcgcuugucucg

SEQ ID NO: 2030450 - RNA, 19 nt, Artificial Sequence
  Description of Artificial Sequence: Synthetic oligonucleotide
cucgaagcuuguuuccucg

SEQ ID NO: 2030451 - RNA, 19 nt, Artificial Sequence
  Description of Artificial Sequence: Synthetic oligonucleotide
aaagcgccggaguacauuu

SEQ ID NO: 2030452 - RNA, 19 nt, Artificial Sequence
  Description of Artificial Sequence: Synthetic oligonucleotide
uacccugauggucaggggu

SEQ ID NO: 2030453 - RNA, 19 nt, Artificial Sequence
  Description of Artificial Sequence: Synthetic oligonucleotide
cuucucuccgccccaaggg

SEQ ID NO: 2030454 - RNA, 19 nt, Artificial Sequence
  Description of Artificial Sequence: Synthetic oligonucleotide
aggguaguuuuccuucccg

SEQ ID NO: 2030455 - RNA, 19 nt, Artificial Sequence
  Description of Artificial Sequence: Synthetic oligonucleotide
cuguccucuucucacagag

SEQ ID NO: 2030456 - RNA, 19 nt, Artificial Sequence
  Description of Artificial Sequence: Synthetic oligonucleotide
cauaaucuugagguccucg

SEQ ID NO: 2030457 - RNA, 19 nt, Artificial Sequence
  Description of Artificial Sequence: Synthetic oligonucleotide
uccaguaaguggagguacc

SEQ ID NO: 2030458 - RNA, 19 nt, Artificial Sequence
  Description of Artificial Sequence: Synthetic oligonucleotide
aaucauccgggcugagucu

SEQ ID NO: 2030459 - RNA, 19 nt, Artificial Sequence
  Description of Artificial Sequence: Synthetic oligonucleotide
gaucagaaagcccauggcu

SEQ ID NO: 2030460 - RNA, 19 nt, Artificial Sequence
  Description of Artificial Sequence: Synthetic oligonucleotide
uucucuaggcgcuugucuc

SEQ ID NO: 2030461 - RNA, 19 nt, Artificial Sequence
  Description of Artificial Sequence: Synthetic oligonucleotide
ucuguauccgagagugugu

SEQ ID NO: 2030462 - RNA, 19 nt, Artificial Sequence
  Description of Artificial Sequence: Synthetic oligonucleotide
ugggcguacaucccugacc

SEQ ID NO: 2030463 - RNA, 19 nt, Artificial Sequence
  Description of Artificial Sequence: Synthetic oligonucleotide
caagggcauaaucuugagg

SEQ ID NO: 2030464 - RNA, 19 nt, Artificial Sequence
  Description of Artificial Sequence: Synthetic oligonucleotide
ucuugacggcccuugcucc

SEQ ID NO: 2030465 - RNA, 19 nt, Artificial Sequence
  Description of Artificial Sequence: Synthetic oligonucleotide
uacaucccugaccuccggg

SEQ ID NO: 2030466 - RNA, 19 nt, Artificial Sequence
  Description of Artificial Sequence: Synthetic oligonucleotide
uguccuuacagagcugcag

SEQ ID NO: 2030467 - RNA, 19 nt, Artificial Sequence
  Description of Artificial Sequence: Synthetic oligonucleotide
cucacuguugguuauaggu

SEQ ID NO: 2030468 - RNA, 19 nt, Artificial Sequence
  Description of Artificial Sequence: Synthetic oligonucleotide
cugaccuccgggcuuaccc

SEQ ID NO: 2030469 - RNA, 19 nt, Artificial Sequence
  Description of Artificial Sequence: Synthetic oligonucleotide
auccacaagacaaggguag

SEQ ID NO: 2030470 - RNA, 19 nt, Artificial Sequence
  Description of Artificial Sequence: Synthetic oligonucleotide
uucucuccgccccaagggc

SEQ ID NO: 2030471 - RNA, 19 nt, Artificial Sequence
  Description of Artificial Sequence: Synthetic oligonucleotide
ugauggucagggguguggg

SEQ ID NO: 2030472 - RNA, 19 nt, Artificial Sequence
  Description of Artificial Sequence: Synthetic oligonucleotide
ucucacuguugguuauagg

SEQ ID NO: 2030473 - RNA, 19 nt, Artificial Sequence
  Description of Artificial Sequence: Synthetic oligonucleotide
uguccucuucucacagagg

SEQ ID NO: 2030474 - RNA, 19 nt, Artificial Sequence
  Description of Artificial Sequence: Synthetic oligonucleotide
augccucgcacaauggccc

SEQ ID NO: 2030475 - RNA, 19 nt, Artificial Sequence
  Description of Artificial Sequence: Synthetic oligonucleotide
caaggguaguuuuccuucc

SEQ ID NO: 2030476 - RNA, 19 nt, Artificial Sequence
  Description of Artificial Sequence: Synthetic oligonucleotide
gcgaaccacagucacauag

SEQ ID NO: 2030477 - RNA, 19 nt, Artificial Sequence
  Description of Artificial Sequence: Synthetic oligonucleotide
cuggcauccacccaccauc

SEQ ID NO: 2030478 - RNA, 19 nt, Artificial Sequence
  Description of Artificial Sequence: Synthetic oligonucleotide
cucuguauccgagagugug

SEQ ID NO: 2030479 - RNA, 19 nt, Artificial Sequence
  Description of Artificial Sequence: Synthetic oligonucleotide
uccaaguugggaucagaaa

SEQ ID NO: 2030480 - RNA, 19 nt, Artificial Sequence
  Description of Artificial Sequence: Synthetic oligonucleotide
uaggcgcuugucucgaagc

SEQ ID NO: 2030481 - RNA, 19 nt, Artificial Sequence
  Description of Artificial Sequence: Synthetic oligonucleotide
caagacaaggguaguuuuc

SEQ ID NO: 2030482 - RNA, 19 nt, Artificial Sequence
  Description of Artificial Sequence: Synthetic oligonucleotide
uccaugccucgcacaaugg

SEQ ID NO: 2030483 - RNA, 19 nt, Artificial Sequence
  Description of Artificial Sequence: Synthetic oligonucleotide
cucuuugagcuuagggcag

SEQ ID NO: 2030484 - RNA, 19 nt, Artificial Sequence
  Description of Artificial Sequence: Synthetic oligonucleotide
agcccugagacgcucuguc

SEQ ID NO: 2030485 - RNA, 19 nt, Artificial Sequence
  Description of Artificial Sequence: Synthetic oligonucleotide
aguugggaucagaaagccc

SEQ ID NO: 2030486 - RNA, 19 nt, Artificial Sequence
  Description of Artificial Sequence: Synthetic oligonucleotide
uucaagcuccccuccaggu

SEQ ID NO: 2030487 - RNA, 19 nt, Artificial Sequence
  Description of Artificial Sequence: Synthetic oligonucleotide
cuucaagcuccccuccagg

SEQ ID NO: 2030488 - RNA, 19 nt, Artificial Sequence
  Description of Artificial Sequence: Synthetic oligonucleotide
uccgggcugagucugcuac

SEQ ID NO: 2030489 - RNA, 19 nt, Artificial Sequence
  Description of Artificial Sequence: Synthetic oligonucleotide
ucugcuaccucguccucac

SEQ ID NO: 2030490 - RNA, 19 nt, Artificial Sequence
  Description of Artificial Sequence: Synthetic oligonucleotide
ggaaaucacguccccuucg

SEQ ID NO: 2030491 - RNA, 19 nt, Artificial Sequence
  Description of Artificial Sequence: Synthetic oligonucleotide
agcuuguuuccucggaagu

SEQ ID NO: 2030492 - RNA, 19 nt, Artificial Sequence
  Description of Artificial Sequence: Synthetic oligonucleotide
ucagcgaaccacagucaca

SEQ ID NO: 2030493 - RNA, 19 nt, Artificial Sequence
  Description of Artificial Sequence: Synthetic oligonucleotide
aaguggagguaccugugua

SEQ ID NO: 2030494 - RNA, 19 nt, Artificial Sequence
  Description of Artificial Sequence: Synthetic oligonucleotide
auuuucagaaugagguugu

SEQ ID NO: 2030495 - RNA, 19 nt, Artificial Sequence
  Description of Artificial Sequence: Synthetic oligonucleotide
gauggguacaccaccuuca

SEQ ID NO: 2030496 - RNA, 19 nt, Artificial Sequence
  Description of Artificial Sequence: Synthetic oligonucleotide
caccacucggaccugcucc

SEQ ID NO: 2030497 - RNA, 19 nt, Artificial Sequence
  Description of Artificial Sequence: Synthetic oligonucleotide
ugagaaagcgccggaguac

SEQ ID NO: 2030498 - RNA, 19 nt, Artificial Sequence
  Description of Artificial Sequence: Synthetic oligonucleotide
ucuucgucuucucacuguu

SEQ ID NO: 2030499 - RNA, 19 nt, Artificial Sequence
  Description of Artificial Sequence: Synthetic oligonucleotide
cauccuucccagaucucag

SEQ ID NO: 2030500 - RNA, 19 nt, Artificial Sequence
  Description of Artificial Sequence: Synthetic oligonucleotide
uggagguaccuguguagcc

SEQ ID NO: 2030501 - RNA, 19 nt, Artificial Sequence
  Description of Artificial Sequence: Synthetic oligonucleotide
cacagaggucaucauggag

SEQ ID NO: 2030502 - RNA, 19 nt, Artificial Sequence
  Description of Artificial Sequence: Synthetic oligonucleotide
acggcccuugcuccgaccg

SEQ ID NO: 2030503 - RNA, 19 nt, Artificial Sequence
  Description of Artificial Sequence: Synthetic oligonucleotide
agagacgugcaagaucuug

SEQ ID NO: 2030504 - RNA, 19 nt, Artificial Sequence
  Description of Artificial Sequence: Synthetic oligonucleotide
uuacccugauggucagggg

SEQ ID NO: 2030505 - RNA, 19 nt, Artificial Sequence
  Description of Artificial Sequence: Synthetic oligonucleotide
cucagagacgugcaagauc

SEQ ID NO: 2030506 - RNA, 19 nt, Artificial Sequence
  Description of Artificial Sequence: Synthetic oligonucleotide
caggcucuguauccgagag

SEQ ID NO: 2030507 - RNA, 19 nt, Artificial Sequence
  Description of Artificial Sequence: Synthetic oligonucleotide
gaagcuuguuuccucggaa

SEQ ID NO: 2030508 - RNA, 19 nt, Artificial Sequence
  Description of Artificial Sequence: Synthetic oligonucleotide
uguugguuauaggugggaa

SEQ ID NO: 2030509 - RNA, 19 nt, Artificial Sequence
  Description of Artificial Sequence: Synthetic oligonucleotide
ugaagugcuuuuguucagu

SEQ ID NO: 2030510 - RNA, 19 nt, Artificial Sequence
  Description of Artificial Sequence: Synthetic oligonucleotide
cuugacggcccuugcuccg

SEQ ID NO: 2030511 - RNA, 19 nt, Artificial Sequence
  Description of Artificial Sequence: Synthetic oligonucleotide
uuucccgacgcugcuuccg

SEQ ID NO: 2030512 - RNA, 19 nt, Artificial Sequence
  Description of Artificial Sequence: Synthetic oligonucleotide
cucuugacggcccuugcuc

SEQ ID NO: 2030513 - RNA, 19 nt, Artificial Sequence
  Description of Artificial Sequence: Synthetic oligonucleotide
gugugggguucucagagac

SEQ ID NO: 2030514 - RNA, 19 nt, Artificial Sequence
  Description of Artificial Sequence: Synthetic oligonucleotide
auccgagagugugucuucc

SEQ ID NO: 2030515 - RNA, 19 nt, Artificial Sequence
  Description of Artificial Sequence: Synthetic oligonucleotide
uccuucccagaucucagau

SEQ ID NO: 2030516 - RNA, 19 nt, Artificial Sequence
  Description of Artificial Sequence: Synthetic oligonucleotide
gagcuuagggcagucugcc

SEQ ID NO: 2030517 - RNA, 19 nt, Artificial Sequence
  Description of Artificial Sequence: Synthetic oligonucleotide
augggcguacaucccugac

SEQ ID NO: 2030518 - RNA, 19 nt, Artificial Sequence
  Description of Artificial Sequence: Synthetic oligonucleotide
uauaggugggaaggaaauc

SEQ ID NO: 2030519 - RNA, 19 nt, Artificial Sequence
  Description of Artificial Sequence: Synthetic oligonucleotide
cugaagugcuuuuguucag

SEQ ID NO: 2030520 - RNA, 19 nt, Artificial Sequence
  Description of Artificial Sequence: Synthetic oligonucleotide
gcacuuguuacuuccaaga

SEQ ID NO: 2030521 - RNA, 19 nt, Artificial Sequence
  Description of Artificial Sequence: Synthetic oligonucleotide
uacagcaggggcccacgca

SEQ ID NO: 2030522 - RNA, 19 nt, Artificial Sequence
  Description of Artificial Sequence: Synthetic oligonucleotide
acuguugguuauagguggg

SEQ ID NO: 2030523 - RNA, 19 nt, Artificial Sequence
  Description of Artificial Sequence: Synthetic oligonucleotide
gagacgugcaagaucuuga

SEQ ID NO: 2030524 - RNA, 19 nt, Artificial Sequence
  Description of Artificial Sequence: Synthetic oligonucleotide
ugucuggcauccacccacc

SEQ ID NO: 2030525 - RNA, 19 nt, Artificial Sequence
  Description of Artificial Sequence: Synthetic oligonucleotide
uuguuacuuccaagaacaa

SEQ ID NO: 2030526 - RNA, 19 nt, Artificial Sequence
  Description of Artificial Sequence: Synthetic oligonucleotide
aucacguccccuucggcau

SEQ ID NO: 2030527 - RNA, 19 nt, Artificial Sequence
  Description of Artificial Sequence: Synthetic oligonucleotide
ggcacuuguuacuuccaag

SEQ ID NO: 2030528 - RNA, 19 nt, Artificial Sequence
  Description of Artificial Sequence: Synthetic oligonucleotide
ucgcaaugguugcugcugu

SEQ ID NO: 2030529 - RNA, 19 nt, Artificial Sequence
  Description of Artificial Sequence: Synthetic oligonucleotide
cacauaggcagggauggug

SEQ ID NO: 2030530 - RNA, 19 nt, Artificial Sequence
  Description of Artificial Sequence: Synthetic oligonucleotide
ucucgaagcuuguuuccuc

SEQ ID NO: 2030531 - RNA, 19 nt, Artificial Sequence
  Description of Artificial Sequence: Synthetic oligonucleotide
ucacccuccccgcuuuccc

SEQ ID NO: 2030532 - RNA, 19 nt, Artificial Sequence
  Description of Artificial Sequence: Synthetic oligonucleotide
gccggaguacauuuccugg

SEQ ID NO: 2030533 - RNA, 19 nt, Artificial Sequence
  Description of Artificial Sequence: Synthetic oligonucleotide
agacaaggguaguuuuccu

SEQ ID NO: 2030534 - RNA, 19 nt, Artificial Sequence
  Description of Artificial Sequence: Synthetic oligonucleotide
ggcugcauacagcaggggc

SEQ ID NO: 2030535 - RNA, 19 nt, Artificial Sequence
  Description of Artificial Sequence: Synthetic oligonucleotide
cugcauacagcaggggccc

SEQ ID NO: 2030536 - RNA, 19 nt, Artificial Sequence
  Description of Artificial Sequence: Synthetic oligonucleotide
cuaggcgcuugucucgaag

SEQ ID NO: 2030537 - RNA, 19 nt, Artificial Sequence
  Description of Artificial Sequence: Synthetic oligonucleotide
uaugggcguacaucccuga

SEQ ID NO: 2030538 - RNA, 19 nt, Artificial Sequence
  Description of Artificial Sequence: Synthetic oligonucleotide
aggucgugggucgcaaugg

SEQ ID NO: 2030539 - RNA, 19 nt, Artificial Sequence
  Description of Artificial Sequence: Synthetic oligonucleotide
uggcacuuguuacuuccaa

SEQ ID NO: 2030540 - RNA, 19 nt, Artificial Sequence
  Description of Artificial Sequence: Synthetic oligonucleotide
uguauccgagagugugucu

SEQ ID NO: 2030541 - RNA, 19 nt, Artificial Sequence
  Description of Artificial Sequence: Synthetic oligonucleotide
gagaaagcgccggaguaca

SEQ ID NO: 2030542 - RNA, 19 nt, Artificial Sequence
  Description of Artificial Sequence: Synthetic oligonucleotide
aaguugcauguuguuuucu

SEQ ID NO: 2030543 - RNA, 19 nt, Artificial Sequence
  Description of Artificial Sequence: Synthetic oligonucleotide
gucgcaaugguugcugcug

SEQ ID NO: 2030544 - RNA, 19 nt, Artificial Sequence
  Description of Artificial Sequence: Synthetic oligonucleotide
uaccuguguagcccugaga

SEQ ID NO: 2030545 - RNA, 19 nt, Artificial Sequence
  Description of Artificial Sequence: Synthetic oligonucleotide
cuuacagagcugcaggcua

SEQ ID NO: 2030546 - RNA, 19 nt, Artificial Sequence
  Description of Artificial Sequence: Synthetic oligonucleotide
aguacauuuccuggcugca

SEQ ID NO: 2030547 - RNA, 19 nt, Artificial Sequence
  Description of Artificial Sequence: Synthetic oligonucleotide
uguagcccugagacgcucu

SEQ ID NO: 2030548 - RNA, 19 nt, Artificial Sequence
  Description of Artificial Sequence: Synthetic oligonucleotide
gagucugcuaccucguccu

SEQ ID NO: 2030549 - RNA, 19 nt, Artificial Sequence
  Description of Artificial Sequence: Synthetic oligonucleotide
ugguuauaggugggaagga

SEQ ID NO: 2030550 - RNA, 19 nt, Artificial Sequence
  Description of Artificial Sequence: Synthetic oligonucleotide
gacgugcaagaucuugaga

SEQ ID NO: 2030551 - RNA, 19 nt, Artificial Sequence
  Description of Artificial Sequence: Synthetic oligonucleotide
cuggcugcagguccaugcc

SEQ ID NO: 2030552 - RNA, 19 nt, Artificial Sequence
  Description of Artificial Sequence: Synthetic oligonucleotide
ugaccuccgggcuuacccu

SEQ ID NO: 2030553 - RNA, 19 nt, Artificial Sequence
  Description of Artificial Sequence: Synthetic oligonucleotide
uucccgacgcugcuuccgc

SEQ ID NO: 2030554 - RNA, 19 nt, Artificial Sequence
  Description of Artificial Sequence: Synthetic oligonucleotide
uguguagcccugagacgcu

SEQ ID NO: 2030555 - RNA, 19 nt, Artificial Sequence
  Description of Artificial Sequence: Synthetic oligonucleotide
gcaguugagaaagcgccgg

SEQ ID NO: 2030556 - RNA, 19 nt, Artificial Sequence
  Description of Artificial Sequence: Synthetic oligonucleotide
guugcauguuguuuucuua

SEQ ID NO: 2030557 - RNA, 19 nt, Artificial Sequence
  Description of Artificial Sequence: Synthetic oligonucleotide
gguaguuuuccuucccguc

SEQ ID NO: 2030558 - RNA, 19 nt, Artificial Sequence
  Description of Artificial Sequence: Synthetic oligonucleotide
gcugcauacagcaggggcc

SEQ ID NO: 2030559 - RNA, 19 nt, Artificial Sequence
  Description of Artificial Sequence: Synthetic oligonucleotide
uuugagcuuagggcagucu

SEQ ID NO: 2030560 - RNA, 19 nt, Artificial Sequence
  Description of Artificial Sequence: Synthetic oligonucleotide
guuuccucggaaguugauc

SEQ ID NO: 2030561 - RNA, 19 nt, Artificial Sequence
  Description of Artificial Sequence: Synthetic oligonucleotide
uauccgagagugugucuuc

SEQ ID NO: 2030562 - RNA, 19 nt, Artificial Sequence
  Description of Artificial Sequence: Synthetic oligonucleotide
ugggucgcaaugguugcug

SEQ ID NO: 2030563 - RNA, 19 nt, Artificial Sequence
  Description of Artificial Sequence: Synthetic oligonucleotide
guaccuguguagcccugag

SEQ ID NO: 2030564 - RNA, 19 nt, Artificial Sequence
  Description of Artificial Sequence: Synthetic oligonucleotide
gggaaggaaaucacguccc

SEQ ID NO: 2030565 - RNA, 19 nt, Artificial Sequence
  Description of Artificial Sequence: Synthetic oligonucleotide
guggccgggcugcauacag

SEQ ID NO: 2030566 - RNA, 19 nt, Artificial Sequence
  Description of Artificial Sequence: Synthetic oligonucleotide
cuucgucuucucacuguug

SEQ ID NO: 2030567 - RNA, 19 nt, Artificial Sequence
  Description of Artificial Sequence: Synthetic oligonucleotide
aucauccgggcugagucug

SEQ ID NO: 2030568 - RNA, 19 nt, Artificial Sequence
  Description of Artificial Sequence: Synthetic oligonucleotide
ucuuugagcuuagggcagu

SEQ ID NO: 2030569 - RNA, 19 nt, Artificial Sequence
  Description of Artificial Sequence: Synthetic oligonucleotide
guugagaaagcgccggagu

SEQ ID NO: 2030570 - RNA, 19 nt, Artificial Sequence
  Description of Artificial Sequence: Synthetic oligonucleotide
acguaugggcguacauccc

SEQ ID NO: 2030571 - RNA, 19 nt, Artificial Sequence
  Description of Artificial Sequence: Synthetic oligonucleotide
ggaaggaaaucacgucccc

SEQ ID NO: 2030572 - RNA, 19 nt, Artificial Sequence
  Description of Artificial Sequence: Synthetic oligonucleotide
cauccacaagacaagggua

SEQ ID NO: 2030573 - RNA, 19 nt, Artificial Sequence
  Description of Artificial Sequence: Synthetic oligonucleotide
gcuucucuccgccccaagg

SEQ ID NO: 2030574 - RNA, 19 nt, Artificial Sequence
  Description of Artificial Sequence: Synthetic oligonucleotide
uguuuccucggaaguugau

SEQ ID NO: 2030575 - RNA, 19 nt, Artificial Sequence
  Description of Artificial Sequence: Synthetic oligonucleotide
cuguauccgagaguguguc

SEQ ID NO: 2030576 - RNA, 19 nt, Artificial Sequence
  Description of Artificial Sequence: Synthetic oligonucleotide
ugagguccucggguggccg

SEQ ID NO: 2030577 - RNA, 19 nt, Artificial Sequence
  Description of Artificial Sequence: Synthetic oligonucleotide
ugcuuuuguucaguuccac

SEQ ID NO: 2030578 - RNA, 19 nt, Artificial Sequence
  Description of Artificial Sequence: Synthetic oligonucleotide
uccacaagacaaggguagu

SEQ ID NO: 2030579 - RNA, 19 nt, Artificial Sequence
  Description of Artificial Sequence: Synthetic oligonucleotide
ggcuaguggcacuuguuac

SEQ ID NO: 2030580 - RNA, 19 nt, Artificial Sequence
  Description of Artificial Sequence: Synthetic oligonucleotide
ggaguacauuuccuggcug

SEQ ID NO: 2030581 - RNA, 19 nt, Artificial Sequence
  Description of Artificial Sequence: Synthetic oligonucleotide
agaaucauccgggcugagu

SEQ ID NO: 2030582 - RNA, 19 nt, Artificial Sequence
  Description of Artificial Sequence: Synthetic oligonucleotide
gacgcucugucgcuucuuc

SEQ ID NO: 2030583 - RNA, 19 nt, Artificial Sequence
  Description of Artificial Sequence: Synthetic oligonucleotide
aggcgcuugucucgaagcu

SEQ ID NO: 2030584 - RNA, 19 nt, Artificial Sequence
  Description of Artificial Sequence: Synthetic oligonucleotide
accacucggaccugcucca

SEQ ID NO: 2030585 - RNA, 19 nt, Artificial Sequence
  Description of Artificial Sequence: Synthetic oligonucleotide
gaccuccgggcuuacccug

SEQ ID NO: 2030586 - RNA, 19 nt, Artificial Sequence
  Description of Artificial Sequence: Synthetic oligonucleotide
ucggccuuggauggguaca

SEQ ID NO: 2030587 - RNA, 19 nt, Artificial Sequence
  Description of Artificial Sequence: Synthetic oligonucleotide
guacaucccugaccuccgg

SEQ ID NO: 2030588 - RNA, 19 nt, Artificial Sequence
  Description of Artificial Sequence: Synthetic oligonucleotide
uccgagagugugucuuccu

SEQ ID NO: 2030589 - RNA, 19 nt, Artificial Sequence
  Description of Artificial Sequence: Synthetic oligonucleotide
ucucagagacgugcaagau

SEQ ID NO: 2030590 - RNA, 19 nt, Artificial Sequence
  Description of Artificial Sequence: Synthetic oligonucleotide
ucccguccaguaaguggag

SEQ ID NO: 2030591 - RNA, 19 nt, Artificial Sequence
  Description of Artificial Sequence: Synthetic oligonucleotide
caguaaguggagguaccug

SEQ ID NO: 2030592 - RNA, 19 nt, Artificial Sequence
  Description of Artificial Sequence: Synthetic oligonucleotide
ucauccgggcugagucugc

SEQ ID NO: 2030593 - RNA, 19 nt, Artificial Sequence
  Description of Artificial Sequence: Synthetic oligonucleotide
auccaaguugggaucagaa

SEQ ID NO: 2030594 - RNA, 19 nt, Artificial Sequence
  Description of Artificial Sequence: Synthetic oligonucleotide
cagcacgcagguacucuag

SEQ ID NO: 2030595 - RNA, 19 nt, Artificial Sequence
  Description of Artificial Sequence: Synthetic oligonucleotide
agucugcuaccucguccuc

SEQ ID NO: 2030596 - RNA, 19 nt, Artificial Sequence
  Description of Artificial Sequence: Synthetic oligonucleotide
uccuucccguccaguaagu

SEQ ID NO: 2030597 - RNA, 19 nt, Artificial Sequence
  Description of Artificial Sequence: Synthetic oligonucleotide
cacuuguuacuuccaagaa

SEQ ID NO: 2030598 - RNA, 19 nt, Artificial Sequence
  Description of Artificial Sequence: Synthetic oligonucleotide
gcguacaucccugaccucc

SEQ ID NO: 2030599 - RNA, 19 nt, Artificial Sequence
  Description of Artificial Sequence: Synthetic oligonucleotide
ccgggcugcauacagcagg

SEQ ID NO: 2030600 - RNA, 19 nt, Artificial Sequence
  Description of Artificial Sequence: Synthetic oligonucleotide
ggauggguacaccaccuuc

SEQ ID NO: 2030601 - RNA, 19 nt, Artificial Sequence
  Description of Artificial Sequence: Synthetic oligonucleotide
gacgcugcuuccgcucccg

SEQ ID NO: 2030602 - RNA, 19 nt, Artificial Sequence
  Description of Artificial Sequence: Synthetic oligonucleotide
guaugggcguacaucccug

SEQ ID NO: 2030603 - RNA, 19 nt, Artificial Sequence
  Description of Artificial Sequence: Synthetic oligonucleotide
cagguccaccacucggacc

SEQ ID NO: 2030604 - RNA, 19 nt, Artificial Sequence
  Description of Artificial Sequence: Synthetic oligonucleotide
ggcaguugagaaagcgccg

SEQ ID NO: 2030605 - RNA, 19 nt, Artificial Sequence
  Description of Artificial Sequence: Synthetic oligonucleotide
guagcccugagacgcucug

SEQ ID NO: 2030606 - RNA, 19 nt, Artificial Sequence
  Description of Artificial Sequence: Synthetic oligonucleotide
cuugagaaucauccgggcu

SEQ ID NO: 2030607 - RNA, 19 nt, Artificial Sequence
  Description of Artificial Sequence: Synthetic oligonucleotide
cuucucggagcccucuuga

SEQ ID NO: 2030608 - RNA, 19 nt, Artificial Sequence
  Description of Artificial Sequence: Synthetic oligonucleotide
gacaaggguaguuuuccuu

SEQ ID NO: 2030609 - RNA, 19 nt, Artificial Sequence
  Description of Artificial Sequence: Synthetic oligonucleotide
ccggaguacauuuccuggc

SEQ ID NO: 2030610 - RNA, 19 nt, Artificial Sequence
  Description of Artificial Sequence: Synthetic oligonucleotide
acccugauggucaggggug

SEQ ID NO: 2030611 - RNA, 19 nt, Artificial Sequence
  Description of Artificial Sequence: Synthetic oligonucleotide
cuccccgcuuucccgacgc

SEQ ID NO: 2030612 - RNA, 19 nt, Artificial Sequence
  Description of Artificial Sequence: Synthetic oligonucleotide
ccuguguagcccugagacg

SEQ ID NO: 2030613 - RNA, 19 nt, Artificial Sequence
  Description of Artificial Sequence: Synthetic oligonucleotide
uggauggguacaccaccuu

SEQ ID NO: 2030614 - RNA, 19 nt, Artificial Sequence
  Description of Artificial Sequence: Synthetic oligonucleotide
ugccucgcacaauggcccc

SEQ ID NO: 2030615 - RNA, 19 nt, Artificial Sequence
  Description of Artificial Sequence: Synthetic oligonucleotide
agcaggggcccacgcacug

SEQ ID NO: 2030616 - RNA, 19 nt, Artificial Sequence
  Description of Artificial Sequence: Synthetic oligonucleotide
cccugagacgcucugucgc

SEQ ID NO: 2030617 - RNA, 19 nt, Artificial Sequence
  Description of Artificial Sequence: Synthetic oligonucleotide
aagcgccggaguacauuuc

SEQ ID NO: 2030618 - RNA, 19 nt, Artificial Sequence
  Description of Artificial Sequence: Synthetic oligonucleotide
agguacucuaggauggauu

SEQ ID NO: 2030619 - RNA, 19 nt, Artificial Sequence
  Description of Artificial Sequence: Synthetic oligonucleotide
cauccacccaccaucuucu

SEQ ID NO: 2030620 - RNA, 19 nt, Artificial Sequence
  Description of Artificial Sequence: Synthetic oligonucleotide
gguccuccuucucggagcc

SEQ ID NO: 2030621 - RNA, 19 nt, Artificial Sequence
  Description of Artificial Sequence: Synthetic oligonucleotide
gguacucuaggauggauuu

SEQ ID NO: 2030622 - RNA, 19 nt, Artificial Sequence
  Description of Artificial Sequence: Synthetic oligonucleotide
agcuuagggcagucugcca

SEQ ID NO: 2030623 - RNA, 19 nt, Artificial Sequence
  Description of Artificial Sequence: Synthetic oligonucleotide
cagaggucaucauggagcu

SEQ ID NO: 2030624 - RNA, 19 nt, Artificial Sequence
  Description of Artificial Sequence: Synthetic oligonucleotide
acgacguaugggcguacau

SEQ ID NO: 2030625 - RNA, 19 nt, Artificial Sequence
  Description of Artificial Sequence: Synthetic oligonucleotide
uaguggcacuuguuacuuc

SEQ ID NO: 2030626 - RNA, 19 nt, Artificial Sequence
  Description of Artificial Sequence: Synthetic oligonucleotide
ccaccagggagcacugucc

SEQ ID NO: 2030627 - RNA, 19 nt, Artificial Sequence
  Description of Artificial Sequence: Synthetic oligonucleotide
acgcucugucgcuucuucu

SEQ ID NO: 2030628 - RNA, 19 nt, Artificial Sequence
  Description of Artificial Sequence: Synthetic oligonucleotide
ggugggaaggaaaucacgu

SEQ ID NO: 2030629 - RNA, 19 nt, Artificial Sequence
  Description of Artificial Sequence: Synthetic oligonucleotide
ccaugccucgcacaauggc

SEQ ID NO: 2030630 - RNA, 19 nt, Artificial Sequence
  Description of Artificial Sequence: Synthetic oligonucleotide
ucggagcccucuugacggc

SEQ ID NO: 2030631 - RNA, 19 nt, Artificial Sequence
  Description of Artificial Sequence: Synthetic oligonucleotide
acucuaggauggauuuugu

SEQ ID NO: 2030632 - RNA, 19 nt, Artificial Sequence
  Description of Artificial Sequence: Synthetic oligonucleotide
uagggcagucugccaguuc

SEQ ID NO: 2030633 - RNA, 19 nt, Artificial Sequence
  Description of Artificial Sequence: Synthetic oligonucleotide
gucggccuuggauggguac

SEQ ID NO: 2030634 - RNA, 19 nt, Artificial Sequence
  Description of Artificial Sequence: Synthetic oligonucleotide
gccuggaggucgugggucg

SEQ ID NO: 2030635 - RNA, 19 nt, Artificial Sequence
  Description of Artificial Sequence: Synthetic oligonucleotide
cuaccucguccucacccuc

SEQ ID NO: 2030636 - RNA, 19 nt, Artificial Sequence
  Description of Artificial Sequence: Synthetic oligonucleotide
cuuugagcuuagggcaguc

SEQ ID NO: 2030637 - RNA, 19 nt, Artificial Sequence
  Description of Artificial Sequence: Synthetic oligonucleotide
cccgcuuucccgacgcugc

SEQ ID NO: 2030638 - RNA, 19 nt, Artificial Sequence
  Description of Artificial Sequence: Synthetic oligonucleotide
acagagcugcaggcuagug

SEQ ID NO: 2030639 - RNA, 19 nt, Artificial Sequence
  Description of Artificial Sequence: Synthetic oligonucleotide
cccaagggcauaaucuuga

SEQ ID NO: 2030640 - RNA, 19 nt, Artificial Sequence
  Description of Artificial Sequence: Synthetic oligonucleotide
gcuaguggcacuuguuacu

SEQ ID NO: 2030641 - RNA, 19 nt, Artificial Sequence
  Description of Artificial Sequence: Synthetic oligonucleotide
uugacggcccuugcuccga

SEQ ID NO: 2030642 - RNA, 19 nt, Artificial Sequence
  Description of Artificial Sequence: Synthetic oligonucleotide
caccagggagcacugucca

SEQ ID NO: 2030643 - RNA, 19 nt, Artificial Sequence
  Description of Artificial Sequence: Synthetic oligonucleotide
uggucaggggugugggguu

SEQ ID NO: 2030644 - RNA, 19 nt, Artificial Sequence
  Description of Artificial Sequence: Synthetic oligonucleotide
gcccugagacgcucugucg

SEQ ID NO: 2030645 - RNA, 19 nt, Artificial Sequence
  Description of Artificial Sequence: Synthetic oligonucleotide
gaccaggucggccuuggau

SEQ ID NO: 2030646 - RNA, 19 nt, Artificial Sequence
  Description of Artificial Sequence: Synthetic oligonucleotide
caguuccaccauuuucaga

SEQ ID NO: 2030647 - RNA, 19 nt, Artificial Sequence
  Description of Artificial Sequence: Synthetic oligonucleotide
cccuucggcauccacaaga

SEQ ID NO: 2030648 - RNA, 19 nt, Artificial Sequence
  Description of Artificial Sequence: Synthetic oligonucleotide
acccuccccgcuuucccga

SEQ ID NO: 2030649 - RNA, 19 nt, Artificial Sequence
  Description of Artificial Sequence: Synthetic oligonucleotide
cauggagcuuggucuggca

SEQ ID NO: 2030650 - RNA, 19 nt, Artificial Sequence
  Description of Artificial Sequence: Synthetic oligonucleotide
gggcuuacccugaugguca

SEQ ID NO: 2030651 - RNA, 19 nt, Artificial Sequence
  Description of Artificial Sequence: Synthetic oligonucleotide
gagaaucauccgggcugag

SEQ ID NO: 2030652 - RNA, 19 nt, Artificial Sequence
  Description of Artificial Sequence: Synthetic oligonucleotide
gacggcccuugcuccgacc

SEQ ID NO: 2030653 - RNA, 19 nt, Artificial Sequence
  Description of Artificial Sequence: Synthetic oligonucleotide
ucuaggcgcuugucucgaa

SEQ ID NO: 2030654 - RNA, 19 nt, Artificial Sequence
  Description of Artificial Sequence: Synthetic oligonucleotide
uccuucucggagcccucuu

SEQ ID NO: 2030655 - RNA, 19 nt, Artificial Sequence
  Description of Artificial Sequence: Synthetic oligonucleotide
gugcuuuuguucaguucca

SEQ ID NO: 2030656 - RNA, 19 nt, Artificial Sequence
  Description of Artificial Sequence: Synthetic oligonucleotide
caguugagaaagcgccgga

SEQ ID NO: 2030657 - RNA, 19 nt, Artificial Sequence
  Description of Artificial Sequence: Synthetic oligonucleotide
guauccgagagugugucuu

SEQ ID NO: 2030658 - RNA, 19 nt, Artificial Sequence
  Description of Artificial Sequence: Synthetic oligonucleotide
cuucggcauccacaagaca

SEQ ID NO: 2030659 - RNA, 19 nt, Artificial Sequence
  Description of Artificial Sequence: Synthetic oligonucleotide
cccagaucucagauccaag

SEQ ID NO: 2030660 - RNA, 19 nt, Artificial Sequence
  Description of Artificial Sequence: Synthetic oligonucleotide
ugacggcccuugcuccgac

SEQ ID NO: 2030661 - RNA, 19 nt, Artificial Sequence
  Description of Artificial Sequence: Synthetic oligonucleotide
cuguugguuauagguggga

SEQ ID NO: 2030662 - RNA, 19 nt, Artificial Sequence
  Description of Artificial Sequence: Synthetic oligonucleotide
cuuagggcagucugccagu

SEQ ID NO: 2030663 - RNA, 19 nt, Artificial Sequence
  Description of Artificial Sequence: Synthetic oligonucleotide
gggucgcaaugguugcugc

SEQ ID NO: 2030664 - RNA, 19 nt, Artificial Sequence
  Description of Artificial Sequence: Synthetic oligonucleotide
ggcuuacccugauggucag

SEQ ID NO: 2030665 - RNA, 19 nt, Artificial Sequence
  Description of Artificial Sequence: Synthetic oligonucleotide
uggaggucgugggucgcaa

SEQ ID NO: 2030666 - RNA, 19 nt, Artificial Sequence
  Description of Artificial Sequence: Synthetic oligonucleotide
uagcccugagacgcucugu

SEQ ID NO: 2030667 - RNA, 19 nt, Artificial Sequence
  Description of Artificial Sequence: Synthetic oligonucleotide
ccagaucucagauccaagu

SEQ ID NO: 2030668 - RNA, 19 nt, Artificial Sequence
  Description of Artificial Sequence: Synthetic oligonucleotide
cagcgaaccacagucacau

SEQ ID NO: 2030669 - RNA, 19 nt, Artificial Sequence
  Description of Artificial Sequence: Synthetic oligonucleotide
aggucggccuuggaugggu

SEQ ID NO: 2030670 - RNA, 19 nt, Artificial Sequence
  Description of Artificial Sequence: Synthetic oligonucleotide
cccacgcacugccuggagg

SEQ ID NO: 2030671 - RNA, 19 nt, Artificial Sequence
  Description of Artificial Sequence: Synthetic oligonucleotide
ucccgacgcugcuuccgcu

SEQ ID NO: 2030672 - RNA, 19 nt, Artificial Sequence
  Description of Artificial Sequence: Synthetic oligonucleotide
gccuuggcuucucuccgcc

SEQ ID NO: 2030673 - RNA, 19 nt, Artificial Sequence
  Description of Artificial Sequence: Synthetic oligonucleotide
cacgcagguacucuaggau

SEQ ID NO: 2030674 - RNA, 19 nt, Artificial Sequence
  Description of Artificial Sequence: Synthetic oligonucleotide
gguucucagagacgugcaa

SEQ ID NO: 2030675 - RNA, 19 nt, Artificial Sequence
  Description of Artificial Sequence: Synthetic oligonucleotide
auguccuuacagagcugca

SEQ ID NO: 2030676 - RNA, 19 nt, Artificial Sequence
  Description of Artificial Sequence: Synthetic oligonucleotide
cacaagacaaggguaguuu

SEQ ID NO: 2030677 - RNA, 19 nt, Artificial Sequence
  Description of Artificial Sequence: Synthetic oligonucleotide
agggagcacuguccauccu

SEQ ID NO: 2030678 - RNA, 19 nt, Artificial Sequence
  Description of Artificial Sequence: Synthetic oligonucleotide
cugcagguccaugccucgc

SEQ ID NO: 2030679 - RNA, 19 nt, Artificial Sequence
  Description of Artificial Sequence: Synthetic oligonucleotide
ggcagucugccaguucagc

SEQ ID NO: 2030680 - RNA, 19 nt, Artificial Sequence
  Description of Artificial Sequence: Synthetic oligonucleotide
gaaugagguuguccaugau

SEQ ID NO: 2030681 - RNA, 19 nt, Artificial Sequence
  Description of Artificial Sequence: Synthetic oligonucleotide
cgugggucgcaaugguugc

SEQ ID NO: 2030682 - RNA, 19 nt, Artificial Sequence
  Description of Artificial Sequence: Synthetic oligonucleotide
ggguaguuuuccuucccgu

SEQ ID NO: 2030683 - RNA, 19 nt, Artificial Sequence
  Description of Artificial Sequence: Synthetic oligonucleotide
ccgagagugugucuuccuc

SEQ ID NO: 2030684 - RNA, 19 nt, Artificial Sequence
  Description of Artificial Sequence: Synthetic oligonucleotide
guggcacuuguuacuucca

SEQ ID NO: 2030685 - RNA, 19 nt, Artificial Sequence
  Description of Artificial Sequence: Synthetic oligonucleotide
ccgccucuucuuucggucc

SEQ ID NO: 2030686 - RNA, 19 nt, Artificial Sequence
  Description of Artificial Sequence: Synthetic oligonucleotide
ccuucucggagcccucuug

SEQ ID NO: 2030687 - RNA, 19 nt, Artificial Sequence
  Description of Artificial Sequence: Synthetic oligonucleotide
gaaagcgccggaguacauu

SEQ ID NO: 2030688 - RNA, 19 nt, Artificial Sequence
  Description of Artificial Sequence: Synthetic oligonucleotide
cucuaggcgcuugucucga

SEQ ID NO: 2030689 - RNA, 19 nt, Artificial Sequence
  Description of Artificial Sequence: Synthetic oligonucleotide
gagacgcucugucgcuucu

SEQ ID NO: 2030690 - RNA, 19 nt, Artificial Sequence
  Description of Artificial Sequence: Synthetic oligonucleotide
caggucggccuuggauggg

SEQ ID NO: 2030691 - RNA, 19 nt, Artificial Sequence
  Description of Artificial Sequence: Synthetic oligonucleotide
cagucacauaggcagggau

SEQ ID NO: 2030692 - RNA, 19 nt, Artificial Sequence
  Description of Artificial Sequence: Synthetic oligonucleotide
cuccgggcuuacccugaug

SEQ ID NO: 2030693 - RNA, 19 nt, Artificial Sequence
  Description of Artificial Sequence: Synthetic oligonucleotide
cuaguggcacuuguuacuu

SEQ ID NO: 2030694 - RNA, 19 nt, Artificial Sequence
  Description of Artificial Sequence: Synthetic oligonucleotide
gguaccuguguagcccuga

SEQ ID NO: 2030695 - RNA, 19 nt, Artificial Sequence
  Description of Artificial Sequence: Synthetic oligonucleotide
agcgaaccacagucacaua

SEQ ID NO: 2030696 - RNA, 19 nt, Artificial Sequence
  Description of Artificial Sequence: Synthetic oligonucleotide
ccuuggcuucucuccgccc

SEQ ID NO: 2030697 - RNA, 19 nt, Artificial Sequence
  Description of Artificial Sequence: Synthetic oligonucleotide
gagcugcaggcuaguggca

SEQ ID NO: 2030698 - RNA, 19 nt, Artificial Sequence
  Description of Artificial Sequence: Synthetic oligonucleotide
agaaagcgccggaguacau

SEQ ID NO: 2030699 - RNA, 19 nt, Artificial Sequence
  Description of Artificial Sequence: Synthetic oligonucleotide
gcuuacccugauggucagg

SEQ ID NO: 2030700 - RNA, 19 nt, Artificial Sequence
  Description of Artificial Sequence: Synthetic oligonucleotide
ccgacgcugcuuccgcucc

SEQ ID NO: 2030701 - RNA, 19 nt, Artificial Sequence
  Description of Artificial Sequence: Synthetic oligonucleotide
cgccggaguacauuuccug

SEQ ID NO: 2030702 - RNA, 19 nt, Artificial Sequence
  Description of Artificial Sequence: Synthetic oligonucleotide
gcuaccucguccucacccu

SEQ ID NO: 2030703 - RNA, 19 nt, Artificial Sequence
  Description of Artificial Sequence: Synthetic oligonucleotide
gccaguucagcagggaccu

SEQ ID NO: 2030704 - RNA, 19 nt, Artificial Sequence
  Description of Artificial Sequence: Synthetic oligonucleotide
ggguggccgggcugcauac

SEQ ID NO: 2030705 - RNA, 19 nt, Artificial Sequence
  Description of Artificial Sequence: Synthetic oligonucleotide
cgacguaugggcguacauc

SEQ ID NO: 2030706 - RNA, 19 nt, Artificial Sequence
  Description of Artificial Sequence: Synthetic oligonucleotide
cacgacguaugggcguaca

SEQ ID NO: 2030707 - RNA, 19 nt, Artificial Sequence
  Description of Artificial Sequence: Synthetic oligonucleotide
cggcauccacaagacaagg

SEQ ID NO: 2030708 - RNA, 19 nt, Artificial Sequence
  Description of Artificial Sequence: Synthetic oligonucleotide
cccguccaguaaguggagg

SEQ ID NO: 2030709 - RNA, 19 nt, Artificial Sequence
  Description of Artificial Sequence: Synthetic oligonucleotide
ccgggcugagucugcuacc

SEQ ID NO: 2030710 - RNA, 19 nt, Artificial Sequence
  Description of Artificial Sequence: Synthetic oligonucleotide
uggcuucucuccgccccaa

SEQ ID NO: 2030711 - RNA, 19 nt, Artificial Sequence
  Description of Artificial Sequence: Synthetic oligonucleotide
cacgcacugccuggagguc

SEQ ID NO: 2030712 - RNA, 19 nt, Artificial Sequence
  Description of Artificial Sequence: Synthetic oligonucleotide
ggucgcaaugguugcugcu

SEQ ID NO: 2030713 - RNA, 19 nt, Artificial Sequence
  Description of Artificial Sequence: Synthetic oligonucleotide
gggagcacuguccauccuu

SEQ ID NO: 2030714 - RNA, 19 nt, Artificial Sequence
  Description of Artificial Sequence: Synthetic oligonucleotide
gcuccgaccgccgcggcca

SEQ ID NO: 2030715 - RNA, 19 nt, Artificial Sequence
  Description of Artificial Sequence: Synthetic oligonucleotide
cgggcuuacccugaugguc

SEQ ID NO: 2030716 - RNA, 19 nt, Artificial Sequence
  Description of Artificial Sequence: Synthetic oligonucleotide
caccaccuucaagcucccc

SEQ ID NO: 2030717 - RNA, 19 nt, Artificial Sequence
  Description of Artificial Sequence: Synthetic oligonucleotide
gcccucuugacggcccuug

SEQ ID NO: 2030718 - RNA, 19 nt, Artificial Sequence
  Description of Artificial Sequence: Synthetic oligonucleotide
cccgacgcugcuuccgcuc

SEQ ID NO: 2030719 - RNA, 19 nt, Artificial Sequence
  Description of Artificial Sequence: Synthetic oligonucleotide
cuggaggucgugggucgca

SEQ ID NO: 2030720 - RNA, 19 nt, Artificial Sequence
  Description of Artificial Sequence: Synthetic oligonucleotide
ggauuuugucuggcaucca

SEQ ID NO: 2030721 - RNA, 19 nt, Artificial Sequence
  Description of Artificial Sequence: Synthetic oligonucleotide
ggccuuggauggguacacc

SEQ ID NO: 2030722 - RNA, 19 nt, Artificial Sequence
  Description of Artificial Sequence: Synthetic oligonucleotide
agacgcucugucgcuucuu

SEQ ID NO: 2030723 - RNA, 19 nt, Artificial Sequence
  Description of Artificial Sequence: Synthetic oligonucleotide
caggcuaguggcacuuguu

SEQ ID NO: 2030724 - RNA, 19 nt, Artificial Sequence
  Description of Artificial Sequence: Synthetic oligonucleotide
ccuucccguccaguaagug

SEQ ID NO: 2030725 - RNA, 19 nt, Artificial Sequence
  Description of Artificial Sequence: Synthetic oligonucleotide
ccguccaguaaguggaggu

SEQ ID NO: 2030726 - RNA, 19 nt, Artificial Sequence
  Description of Artificial Sequence: Synthetic oligonucleotide
uccgccccaagggcauaau

SEQ ID NO: 2030727 - RNA, 19 nt, Artificial Sequence
  Description of Artificial Sequence: Synthetic oligonucleotide
ccacgcacugccuggaggu

SEQ ID NO: 2030728 - RNA, 19 nt, Artificial Sequence
  Description of Artificial Sequence: Synthetic oligonucleotide
caggggugugggguucuca

SEQ ID NO: 2030729 - RNA, 19 nt, Artificial Sequence
  Description of Artificial Sequence: Synthetic oligonucleotide
guacucuaggauggauuuu

SEQ ID NO: 2030730 - RNA, 19 nt, Artificial Sequence
  Description of Artificial Sequence: Synthetic oligonucleotide
gcuuguuuccucggaaguu

SEQ ID NO: 2030731 - RNA, 19 nt, Artificial Sequence
  Description of Artificial Sequence: Synthetic oligonucleotide
ccuccccgcuuucccgacg

SEQ ID NO: 2030732 - RNA, 19 nt, Artificial Sequence
  Description of Artificial Sequence: Synthetic oligonucleotide
gggcugagucugcuaccuc

SEQ ID NO: 2030733 - RNA, 19 nt, Artificial Sequence
  Description of Artificial Sequence: Synthetic oligonucleotide
gcccacgcacugccuggag

SEQ ID NO: 2030734 - RNA, 19 nt, Artificial Sequence
  Description of Artificial Sequence: Synthetic oligonucleotide
ucuccgccccaagggcaua

SEQ ID NO: 2030735 - RNA, 19 nt, Artificial Sequence
  Description of Artificial Sequence: Synthetic oligonucleotide
ggcguacaucccugaccuc

SEQ ID NO: 2030736 - RNA, 19 nt, Artificial Sequence
  Description of Artificial Sequence: Synthetic oligonucleotide
uccgaccgccgcggccacc

SEQ ID NO: 2030737 - RNA, 19 nt, Artificial Sequence
  Description of Artificial Sequence: Synthetic oligonucleotide
gcugcaggcuaguggcacu

SEQ ID NO: 2030738 - RNA, 19 nt, Artificial Sequence
  Description of Artificial Sequence: Synthetic oligonucleotide
ccgccccaagggcauaauc

SEQ ID NO: 2030739 - RNA, 19 nt, Artificial Sequence
  Description of Artificial Sequence: Synthetic oligonucleotide
cguaugggcguacaucccu

SEQ ID NO: 2030740 - RNA, 19 nt, Artificial Sequence
  Description of Artificial Sequence: Synthetic oligonucleotide
cugccuggaggucgugggu

SEQ ID NO: 2030741 - RNA, 19 nt, Artificial Sequence
  Description of Artificial Sequence: Synthetic oligonucleotide
cccuugcuccgaccgccgc

SEQ ID NO: 2030742 - RNA, 19 nt, Artificial Sequence
  Description of Artificial Sequence: Synthetic oligonucleotide
ucggguggccgggcugcau

SEQ ID NO: 2030743 - RNA, 19 nt, Artificial Sequence
  Description of Artificial Sequence: Synthetic oligonucleotide
ccugauggucaggggugug

SEQ ID NO: 2030744 - RNA, 19 nt, Artificial Sequence
  Description of Artificial Sequence: Synthetic oligonucleotide
cuccgaccgccgcggccac

SEQ ID NO: 2030745 - RNA, 19 nt, Artificial Sequence
  Description of Artificial Sequence: Synthetic oligonucleotide
gugggucgcaaugguugcu

SEQ ID NO: 2030746 - RNA, 19 nt, Artificial Sequence
  Description of Artificial Sequence: Synthetic oligonucleotide
ccuggaggucgugggucgc

SEQ ID NO: 2030747 - RNA, 19 nt, Artificial Sequence
  Description of Artificial Sequence: Synthetic oligonucleotide
ccccgcuuucccgacgcug

SEQ ID NO: 2030748 - RNA, 19 nt, Artificial Sequence
  Description of Artificial Sequence: Synthetic oligonucleotide
cagcaggggcccacgcacu

SEQ ID NO: 2030749 - RNA, 19 nt, Artificial Sequence
  Description of Artificial Sequence: Synthetic oligonucleotide
cauccgggcugagucugcu

SEQ ID NO: 2030750 - RNA, 19 nt, Artificial Sequence
  Description of Artificial Sequence: Synthetic oligonucleotide
cuccgccccaagggcauaa

SEQ ID NO: 2030751 - RNA, 19 nt, Artificial Sequence
  Description of Artificial Sequence: Synthetic oligonucleotide
cggaguacauuuccuggcu

SEQ ID NO: 2030752 - RNA, 19 nt, Artificial Sequence
  Description of Artificial Sequence: Synthetic oligonucleotide
cgugcaagaucuugagaau

SEQ ID NO: 2030753 - RNA, 19 nt, Artificial Sequence
  Description of Artificial Sequence: Synthetic oligonucleotide
cggccuuggauggguacac

SEQ ID NO: 2030754 - RNA, 19 nt, Artificial Sequence
  Description of Artificial Sequence: Synthetic oligonucleotide
gguggccgggcugcauaca

SEQ ID NO: 2030755 - RNA, 19 nt, Artificial Sequence
  Description of Artificial Sequence: Synthetic oligonucleotide
ccccuucggcauccacaag

SEQ ID NO: 2030756 - RNA, 19 nt, Artificial Sequence
  Description of Artificial Sequence: Synthetic oligonucleotide
cccuccccgcuuucccgac

SEQ ID NO: 2030757 - RNA, 19 nt, Artificial Sequence
  Description of Artificial Sequence: Synthetic oligonucleotide
cggagcccucuugacggcc

SEQ ID NO: 2030758 - RNA, 19 nt, Artificial Sequence
  Description of Artificial Sequence: Synthetic oligonucleotide
ggcgcuugucucgaagcuu

SEQ ID NO: 2030759 - RNA, 19 nt, Artificial Sequence
  Description of Artificial Sequence: Synthetic oligonucleotide
acguccccuucggcaucca

SEQ ID NO: 2030760 - RNA, 19 nt, Artificial Sequence
  Description of Artificial Sequence: Synthetic oligonucleotide
cugagacgcucugucgcuu

SEQ ID NO: 2030761 - RNA, 19 nt, Artificial Sequence
  Description of Artificial Sequence: Synthetic oligonucleotide
cagagacgugcaagaucuu

SEQ ID NO: 2030762 - RNA, 19 nt, Artificial Sequence
  Description of Artificial Sequence: Synthetic oligonucleotide
cguccaguaaguggaggua

SEQ ID NO: 2030763 - RNA, 19 nt, Artificial Sequence
  Description of Artificial Sequence: Synthetic oligonucleotide
ccacucggaccugcuccac

SEQ ID NO: 2030764 - RNA, 19 nt, Artificial Sequence
  Description of Artificial Sequence: Synthetic oligonucleotide
cucggguggccgggcugca

SEQ ID NO: 2030765 - RNA, 19 nt, Artificial Sequence
  Description of Artificial Sequence: Synthetic oligonucleotide
ccccacgacguaugggcgu

SEQ ID NO: 2030766 - RNA, 19 nt, Artificial Sequence
  Description of Artificial Sequence: Synthetic oligonucleotide
ccacgacguaugggcguac

SEQ ID NO: 2030767 - RNA, 19 nt, Artificial Sequence
  Description of Artificial Sequence: Synthetic oligonucleotide
ccucacccuccccgcuuuc

SEQ ID NO: 2030768 - RNA, 19 nt, Artificial Sequence
  Description of Artificial Sequence: Synthetic oligonucleotide
ccacaagacaaggguaguu

SEQ ID NO: 2030769 - RNA, 19 nt, Artificial Sequence
  Description of Artificial Sequence: Synthetic oligonucleotide
cccacgacguaugggcgua

SEQ ID NO: 2030770 - RNA, 19 nt, Artificial Sequence
  Description of Artificial Sequence: Synthetic oligonucleotide
ccucggaaguugaucucuu

SEQ ID NO: 2030771 - RNA, 19 nt, Artificial Sequence
  Description of Artificial Sequence: Synthetic oligonucleotide
ggucggccuuggaugggua

SEQ ID NO: 2030772 - RNA, 19 nt, Artificial Sequence
  Description of Artificial Sequence: Synthetic oligonucleotide
ccgggcuuacccugauggu

SEQ ID NO: 2030773 - RNA, 19 nt, Artificial Sequence
  Description of Artificial Sequence: Synthetic oligonucleotide
ggcauccacccaccaucuu

SEQ ID NO: 2030774 - RNA, 19 nt, Artificial Sequence
  Description of Artificial Sequence: Synthetic oligonucleotide
cgcacugccuggaggucgu

SEQ ID NO: 2030775 - RNA, 19 nt, Artificial Sequence
  Description of Artificial Sequence: Synthetic oligonucleotide
ccgcuuucccgacgcugcu

SEQ ID NO: 2030776 - RNA, 19 nt, Artificial Sequence
  Description of Artificial Sequence: Synthetic oligonucleotide
cccugaccuccgggcuuac

SEQ ID NO: 2030777 - RNA, 19 nt, Artificial Sequence
  Description of Artificial Sequence: Synthetic oligonucleotide
cgaccgccgcggccaccag

SEQ ID NO: 2030778 - RNA, 19 nt, Artificial Sequence
  Description of Artificial Sequence: Synthetic oligonucleotide
ccuccgggcuuacccugau

SEQ ID NO: 2030779 - RNA, 19 nt, Artificial Sequence
  Description of Artificial Sequence: Synthetic oligonucleotide
cgcuuucccgacgcugcuu

SEQ ID NO: 2030780 - RNA, 19 nt, Artificial Sequence
  Description of Artificial Sequence: Synthetic oligonucleotide
aauuuuacaggucagggac

SEQ ID NO: 2030781 - RNA, 19 nt, Artificial Sequence
  Description of Artificial Sequence: Synthetic oligonucleotide
ucaucucucacuuagagug

SEQ ID NO: 2030782 - RNA, 19 nt, Artificial Sequence
  Description of Artificial Sequence: Synthetic oligonucleotide
uuuaaaguuccuaugauaa

SEQ ID NO: 2030783 - RNA, 19 nt, Artificial Sequence
  Description of Artificial Sequence: Synthetic oligonucleotide
cuaugauaaaacaagacac

SEQ ID NO: 2030784 - RNA, 19 nt, Artificial Sequence
  Description of Artificial Sequence: Synthetic oligonucleotide
  modified_base (7)..(7): a, c, u, g, unknown or other
uacaganaaaccauaguug

SEQ ID NO: 2030785 - RNA, 19 nt, Artificial Sequence
  Description of Artificial Sequence: Synthetic oligonucleotide
  modified_base (10)..(10): a, c, u, g, unknown or other
guauaaucancuuugucag

SEQ ID NO: 2030786 - RNA, 19 nt, Artificial Sequence
  Description of Artificial Sequence: Synthetic oligonucleotide
aauuuaugaaaaugaaaca

SEQ ID NO: 2030787 - RNA, 19 nt, Artificial Sequence
  Description of Artificial Sequence: Synthetic oligonucleotide
aaggagugccuguugaugc

SEQ ID NO: 2030788 - RNA, 19 nt, Artificial Sequence
  Description of Artificial Sequence: Synthetic oligonucleotide
uuaauuauugauuggacau

SEQ ID NO: 2030789 - RNA, 19 nt, Artificial Sequence
  Description of Artificial Sequence: Synthetic oligonucleotide
auugauuggacauauaaaa

SEQ ID NO: 2030790 - RNA, 19 nt, Artificial Sequence
  Description of Artificial Sequence: Synthetic oligonucleotide
aaaauaacugggauguugg

SEQ ID NO: 2030791 - RNA, 19 nt, Artificial Sequence
  Description of Artificial Sequence: Synthetic oligonucleotide
uuauugauuggacauauaa

SEQ ID NO: 2030792 - RNA, 19 nt, Artificial Sequence
  Description of Artificial Sequence: Synthetic oligonucleotide
agcuaaagcacuaaggccc

SEQ ID NO: 2030793 - RNA, 19 nt, Artificial Sequence
  Description of Artificial Sequence: Synthetic oligonucleotide
ugaagucacuuccaaaagg

SEQ ID NO: 2030794 - RNA, 19 nt, Artificial Sequence
  Description of Artificial Sequence: Synthetic oligonucleotide
guuuaugccaacucggagg

SEQ ID NO: 2030795 - RNA, 19 nt, Artificial Sequence
  Description of Artificial Sequence: Synthetic oligonucleotide
uucgguugaaaauagagaa

SEQ ID NO: 2030796 - RNA, 19 nt, Artificial Sequence
  Description of Artificial Sequence: Synthetic oligonucleotide
aaccauaguuguuuguuuc

SEQ ID NO: 2030797 - RNA, 19 nt, Artificial Sequence
  Description of Artificial Sequence: Synthetic oligonucleotide
aaaugcuccuaacacagug

SEQ ID NO: 2030798 - RNA, 19 nt, Artificial Sequence
  Description of Artificial Sequence: Synthetic oligonucleotide
  modified_base (13)..(13): a, c, u, g, unknown or other
caaacauacaganaaacca

SEQ ID NO: 2030799 - RNA, 19 nt, Artificial Sequence
  Description of Artificial Sequence: Synthetic oligonucleotide
acuuagaguggucuggagc

SEQ ID NO: 2030800 - RNA, 19 nt, Artificial Sequence
  Description of Artificial Sequence: Synthetic oligonucleotide
  modified_base (2)..(2): a, c, u, g, unknown or other
ancuuugucaggaaguguc

SEQ ID NO: 2030801 - RNA, 19 nt, Artificial Sequence
  Description of Artificial Sequence: Synthetic oligonucleotide
uaugauaaaacaagacacu

SEQ ID NO: 2030802 - RNA, 19 nt, Artificial Sequence
  Description of Artificial Sequence: Synthetic oligonucleotide
ucaauuuuacaggucaggg

SEQ ID NO: 2030803 - RNA, 19 nt, Artificial Sequence
  Description of Artificial Sequence: Synthetic oligonucleotide
  modified_base (6)..(6): a, c, u, g, unknown or other
acaganaaaccauaguugu

SEQ ID NO: 2030804 - RNA, 19 nt, Artificial Sequence
  Description of Artificial Sequence: Synthetic oligonucleotide
cuagcuuuugccuugacuc

SEQ ID NO: 2030805 - RNA, 19 nt, Artificial Sequence
  Description of Artificial Sequence: Synthetic oligonucleotide
  modified_base (6)..(6): a, c, u, g, unknown or other
aaucancuuugucaggaag

SEQ ID NO: 2030806 - RNA, 19 nt, Artificial Sequence
  Description of Artificial Sequence: Synthetic oligonucleotide
uuggcauuugucaaggggc

SEQ ID NO: 2030807 - RNA, 19 nt, Artificial Sequence
  Description of Artificial Sequence: Synthetic oligonucleotide
ucuguagucagugagggcc

SEQ ID NO: 2030808 - RNA, 19 nt, Artificial Sequence
  Description of Artificial Sequence: Synthetic oligonucleotide
uuuuaauuauugauuggac

SEQ ID NO: 2030809 - RNA, 19 nt, Artificial Sequence
  Description of Artificial Sequence: Synthetic oligonucleotide
uaaacuuaggcuaggauuu

SEQ ID NO: 2030810 - RNA, 19 nt, Artificial Sequence
  Description of Artificial Sequence: Synthetic oligonucleotide
uuuaugccaacucggaggc

SEQ ID NO: 2030811 - RNA, 19 nt, Artificial Sequence
  Description of Artificial Sequence: Synthetic oligonucleotide
aacaaguaugugcauaagu

SEQ ID NO: 2030812 - RNA, 19 nt, Artificial Sequence
  Description of Artificial Sequence: Synthetic oligonucleotide
ugauaaaacaagacacuug

SEQ ID NO: 2030813 - RNA, 19 nt, Artificial Sequence
  Description of Artificial Sequence: Synthetic oligonucleotide
aaaguuccuaugauaaaac

SEQ ID NO: 2030814 - RNA, 19 nt, Artificial Sequence
  Description of Artificial Sequence: Synthetic oligonucleotide
cuugugaagaaauuacuug

SEQ ID NO: 2030815 - RNA, 19 nt, Artificial Sequence
  Description of Artificial Sequence: Synthetic oligonucleotide
uuggucaucucucacuuag

SEQ ID NO: 2030816 - RNA, 19 nt, Artificial Sequence
  Description of Artificial Sequence: Synthetic oligonucleotide
acugaagugaauccuugac

SEQ ID NO: 2030817 - RNA, 19 nt, Artificial Sequence
  Description of Artificial Sequence: Synthetic oligonucleotide
ugaaguacacaguauaauc

SEQ ID NO: 2030818 - RNA, 19 nt, Artificial Sequence
  Description of Artificial Sequence: Synthetic oligonucleotide
auagagaacaaugugugag

SEQ ID NO: 2030819 - RNA, 19 nt, Artificial Sequence
  Description of Artificial Sequence: Synthetic oligonucleotide
  modified_base (8)..(8): a, c, u, g, unknown or other
auacaganaaaccauaguu

SEQ ID NO: 2030820 - RNA, 19 nt, Artificial Sequence
  Description of Artificial Sequence: Synthetic oligonucleotide
uaagucggaagaccuaggg

SEQ ID NO: 2030821 - RNA, 19 nt, Artificial Sequence
  Description of Artificial Sequence: Synthetic oligonucleotide
guuccuaugauaaaacaag

SEQ ID NO: 2030822 - RNA, 19 nt, Artificial Sequence
  Description of Artificial Sequence: Synthetic oligonucleotide
aagcccucucuacacaggc

SEQ ID NO: 2030823 - RNA, 19 nt, Artificial Sequence
  Description of Artificial Sequence: Synthetic oligonucleotide
caaguaugugcauaagucc

SEQ ID NO: 2030824 - RNA, 19 nt, Artificial Sequence
  Description of Artificial Sequence: Synthetic oligonucleotide
aguggucuggagcuaaagc

SEQ ID NO: 2030825 - RNA, 19 nt, Artificial Sequence
  Description of Artificial Sequence: Synthetic oligonucleotide
ucauuugagggaaaacagc

SEQ ID NO: 2030826 - RNA, 19 nt, Artificial Sequence
  Description of Artificial Sequence: Synthetic oligonucleotide
  modified_base (19)..(19): a, c, u, g, unknown or other
augaaacaaacauacagan

SEQ ID NO: 2030827 - RNA, 19 nt, Artificial Sequence
  Description of Artificial Sequence: Synthetic oligonucleotide
ugucaguuacacuuuuacg

SEQ ID NO: 2030828 - RNA, 19 nt, Artificial Sequence
  Description of Artificial Sequence: Synthetic oligonucleotide
uacgaccugaacaauaacu

SEQ ID NO: 2030829 - RNA, 19 nt, Artificial Sequence
  Description of Artificial Sequence: Synthetic oligonucleotide
ugugcauaagucccaagug

SEQ ID NO: 2030830 - RNA, 19 nt, Artificial Sequence
  Description of Artificial Sequence: Synthetic oligonucleotide
uuucuguagucagugaggg

SEQ ID NO: 2030831 - RNA, 19 nt, Artificial Sequence
  Description of Artificial Sequence: Synthetic oligonucleotide
ugugaagaaauuacuugga

SEQ ID NO: 2030832 - RNA, 19 nt, Artificial Sequence
  Description of Artificial Sequence: Synthetic oligonucleotide
uccaccaagacaccaaugu

SEQ ID NO: 2030833 - RNA, 19 nt, Artificial Sequence
  Description of Artificial Sequence: Synthetic oligonucleotide
acuuuuacgaccugaacaa

SEQ ID NO: 2030834 - RNA, 19 nt, Artificial Sequence
  Description of Artificial Sequence: Synthetic oligonucleotide
uuuacgaccugaacaauaa

SEQ ID NO: 2030835 - RNA, 19 nt, Artificial Sequence
  Description of Artificial Sequence: Synthetic oligonucleotide
aauagagaacaauguguga

SEQ ID NO: 2030836 - RNA, 19 nt, Artificial Sequence
  Description of Artificial Sequence: Synthetic oligonucleotide
uuuuaaaguuccuaugaua

SEQ ID NO: 2030837 - RNA, 19 nt, Artificial Sequence
  Description of Artificial Sequence: Synthetic oligonucleotide
  modified_base (9)..(9): a, c, u, g, unknown or other
uauaaucancuuugucagg

SEQ ID NO: 2030838 - RNA, 19 nt, Artificial Sequence
  Description of Artificial Sequence: Synthetic oligonucleotide
caccaagacaccaaugugc

SEQ ID NO: 2030839 - RNA, 19 nt, Artificial Sequence
  Description of Artificial Sequence: Synthetic oligonucleotide
ucaguuacacuuuuacgac

SEQ ID NO: 2030840 - RNA, 19 nt, Artificial Sequence
  Description of Artificial Sequence: Synthetic oligonucleotide
  modified_base (3)..(3): a, c, u, g, unknown or other
ganaaaccauaguuguuug

SEQ ID NO: 2030841 - RNA, 19 nt, Artificial Sequence
  Description of Artificial Sequence: Synthetic oligonucleotide
uccuaugauaaaacaagac

SEQ ID NO: 2030842 - RNA, 19 nt, Artificial Sequence
  Description of Artificial Sequence: Synthetic oligonucleotide
gugucccuaaguuaagucg

SEQ ID NO: 2030843 - RNA, 19 nt, Artificial Sequence
  Description of Artificial Sequence: Synthetic oligonucleotide
ugagcuuuagccaauuauu

SEQ ID NO: 2030844 - RNA, 19 nt, Artificial Sequence
  Description of Artificial Sequence: Synthetic oligonucleotide
acacaaagcuagcuuuugc

SEQ ID NO: 2030845 - RNA, 19 nt, Artificial Sequence
  Description of Artificial Sequence: Synthetic oligonucleotide
acuuccaaaagggaguggg

SEQ ID NO: 2030846 - RNA, 19 nt, Artificial Sequence
  Description of Artificial Sequence: Synthetic oligonucleotide
uaaguuaagucggaagacc

SEQ ID NO: 2030847 - RNA, 19 nt, Artificial Sequence
  Description of Artificial Sequence: Synthetic oligonucleotide
uaugccaacucggaggcgg

SEQ ID NO: 2030848 - RNA, 19 nt, Artificial Sequence
  Description of Artificial Sequence: Synthetic oligonucleotide
  modified_base (2)..(2): a, c, u, g, unknown or other
anaaaccauaguuguuugu

SEQ ID NO: 2030849 - RNA, 19 nt, Artificial Sequence
  Description of Artificial Sequence: Synthetic oligonucleotide
  modified_base (8)..(8): a, c, u, g, unknown or other
auaaucancuuugucagga

SEQ ID NO: 2030850 - RNA, 19 nt, Artificial Sequence
  Description of Artificial Sequence: Synthetic oligonucleotide
aauaacugggauguuggga

SEQ ID NO: 2030851 - RNA, 19 nt, Artificial Sequence
  Description of Artificial Sequence: Synthetic oligonucleotide
acacuugugaagaaauuac

SEQ ID NO: 2030852 - RNA, 19 nt, Artificial Sequence
  Description of Artificial Sequence: Synthetic oligonucleotide
gagcuaaagcacuaaggcc

SEQ ID NO: 2030853 - RNA, 19 nt, Artificial Sequence
  Description of Artificial Sequence: Synthetic oligonucleotide
uuaguggauacugaaguga

SEQ ID NO: 2030854 - RNA, 19 nt, Artificial Sequence
  Description of Artificial Sequence: Synthetic oligonucleotide
aagggagugggauguuugg

SEQ ID NO: 2030855 - RNA, 19 nt, Artificial Sequence
  Description of Artificial Sequence: Synthetic oligonucleotide
  modified_base (12)..(12): a, c, u, g, unknown or other
aaacauacaganaaaccau

SEQ ID NO: 2030856 - RNA, 19 nt, Artificial Sequence
  Description of Artificial Sequence: Synthetic oligonucleotide
uuuaaacuuaggcuaggau

SEQ ID NO: 2030857 - RNA, 19 nt, Artificial Sequence
  Description of Artificial Sequence: Synthetic oligonucleotide
agcacuaaggccccaucac

SEQ ID NO: 2030858 - RNA, 19 nt, Artificial Sequence
  Description of Artificial Sequence: Synthetic oligonucleotide
agugucccuaaguuaaguc

SEQ ID NO: 2030859 - RNA, 19 nt, Artificial Sequence
  Description of Artificial Sequence: Synthetic oligonucleotide
uggauacugaagugaaucc

SEQ ID NO: 2030860 - RNA, 19 nt, Artificial Sequence
  Description of Artificial Sequence: Synthetic oligonucleotide
uagagaacaaugugugagc

SEQ ID NO: 2030861 - RNA, 19 nt, Artificial Sequence
  Description of Artificial Sequence: Synthetic oligonucleotide
  modified_base (4)..(4): a, c, u, g, unknown or other
aganaaaccauaguuguuu

SEQ ID NO: 2030862 - RNA, 19 nt, Artificial Sequence
  Description of Artificial Sequence: Synthetic oligonucleotide
uaacacagugcuucgguug

SEQ ID NO: 2030863 - RNA, 19 nt, Artificial Sequence
  Description of Artificial Sequence: Synthetic oligonucleotide
  modified_base (4)..(4): a, c, u, g, unknown or other
ucancuuugucaggaagug

SEQ ID NO: 2030864 - RNA, 19 nt, Artificial Sequence
  Description of Artificial Sequence: Synthetic oligonucleotide
aaagcacuaaggccccauc

SEQ ID NO: 2030865 - RNA, 19 nt, Artificial Sequence
  Description of Artificial Sequence: Synthetic oligonucleotide
uuuuacgaccugaacaaua

SEQ ID NO: 2030866 - RNA, 19 nt, Artificial Sequence
  Description of Artificial Sequence: Synthetic oligonucleotide
uuaagucggaagaccuagg

SEQ ID NO: 2030867 - RNA, 19 nt, Artificial Sequence
  Description of Artificial Sequence: Synthetic oligonucleotide
cauucggcuggcaacauug

SEQ ID NO: 2030868 - RNA, 19 nt, Artificial Sequence
  Description of Artificial Sequence: Synthetic oligonucleotide
aacacagugcuucgguuga

SEQ ID NO: 2030869 - RNA, 19 nt, Artificial Sequence
  Description of Artificial Sequence: Synthetic oligonucleotide
gauguugggagaguaggag

SEQ ID NO: 2030870 - RNA, 19 nt, Artificial Sequence
  Description of Artificial Sequence: Synthetic oligonucleotide
agucggaagaccuagggua

SEQ ID NO: 2030871 - RNA, 19 nt, Artificial Sequence
  Description of Artificial Sequence: Synthetic oligonucleotide
aauuacuuggaaauucaaa

SEQ ID NO: 2030872 - RNA, 19 nt, Artificial Sequence
  Description of Artificial Sequence: Synthetic oligonucleotide
acaaagcuagcuuuugccu

SEQ ID NO: 2030873 - RNA, 19 nt, Artificial Sequence
  Description of Artificial Sequence: Synthetic oligonucleotide
uguuuggucaucucucacu

SEQ ID NO: 2030874 - RNA, 19 nt, Artificial Sequence
  Description of Artificial Sequence: Synthetic oligonucleotide
guguagugaagucacuucc

SEQ ID NO: 2030875 - RNA, 19 nt, Artificial Sequence
  Description of Artificial Sequence: Synthetic oligonucleotide
gcaacauugacuguguucc

SEQ ID NO: 2030876 - RNA, 19 nt, Artificial Sequence
  Description of Artificial Sequence: Synthetic oligonucleotide
ugcauaagucccaagugau

SEQ ID NO: 2030877 - RNA, 19 nt, Artificial Sequence
  Description of Artificial Sequence: Synthetic oligonucleotide
uugaaggagugccuguuga

SEQ ID NO: 2030878 - RNA, 19 nt, Artificial Sequence
  Description of Artificial Sequence: Synthetic oligonucleotide
guuaagucggaagaccuag

SEQ ID NO: 2030879 - RNA, 19 nt, Artificial Sequence
  Description of Artificial Sequence: Synthetic oligonucleotide
aaaggagccaggcaccaau

SEQ ID NO: 2030880 - RNA, 19 nt, Artificial Sequence
  Description of Artificial Sequence: Synthetic oligonucleotide
cacuuuuacgaccugaaca

SEQ ID NO: 2030881 - RNA, 19 nt, Artificial Sequence
  Description of Artificial Sequence: Synthetic oligonucleotide
uauccaagcccucucuaca

SEQ ID NO: 2030882 - RNA, 19 nt, Artificial Sequence
  Description of Artificial Sequence: Synthetic oligonucleotide
augccauccagcuugcuca

SEQ ID NO: 2030883 - RNA, 19 nt, Artificial Sequence
  Description of Artificial Sequence: Synthetic oligonucleotide
aggguauuacuuucuguag

SEQ ID NO: 2030884 - RNA, 19 nt, Artificial Sequence
  Description of Artificial Sequence: Synthetic oligonucleotide
aaguuaagucggaagaccu

SEQ ID NO: 2030885 - RNA, 19 nt, Artificial Sequence
  Description of Artificial Sequence: Synthetic oligonucleotide
aacaaugugugagcuuuag

SEQ ID NO: 2030886 - RNA, 19 nt, Artificial Sequence
  Description of Artificial Sequence: Synthetic oligonucleotide
cuuaguggauacugaagug

SEQ ID NO: 2030887 - RNA, 19 nt, Artificial Sequence
  Description of Artificial Sequence: Synthetic oligonucleotide
ucgugcuccaaucacucca

SEQ ID NO: 2030888 - RNA, 19 nt, Artificial Sequence
  Description of Artificial Sequence: Synthetic oligonucleotide
cauaguuguuuguuucacc

SEQ ID NO: 2030889 - RNA, 19 nt, Artificial Sequence
  Description of Artificial Sequence: Synthetic oligonucleotide
uacacuuuuacgaccugaa

SEQ ID NO: 2030890 - RNA, 19 nt, Artificial Sequence
  Description of Artificial Sequence: Synthetic oligonucleotide
aacucggaggcggaaagag

SEQ ID NO: 2030891 - RNA, 19 nt, Artificial Sequence
  Description of Artificial Sequence: Synthetic oligonucleotide
  modified_base (18)..(18): a, c, u, g, unknown or other
aguacacaguauaaucanc

SEQ ID NO: 2030892 - RNA, 19 nt, Artificial Sequence
  Description of Artificial Sequence: Synthetic oligonucleotide
acacuuuuacgaccugaac

SEQ ID NO: 2030893 - RNA, 19 nt, Artificial Sequence
  Description of Artificial Sequence: Synthetic oligonucleotide
gauagauggaugguccuug

SEQ ID NO: 2030894 - RNA, 19 nt, Artificial Sequence
  Description of Artificial Sequence: Synthetic oligonucleotide
aagcacuaaggccccauca

SEQ ID NO: 2030895 - RNA, 19 nt, Artificial Sequence
  Description of Artificial Sequence: Synthetic oligonucleotide
ucggcuggcaacauugacu

SEQ ID NO: 2030896 - RNA, 19 nt, Artificial Sequence
  Description of Artificial Sequence: Synthetic oligonucleotide
aucacacaaagcuagcuuu

SEQ ID NO: 2030897 - RNA, 19 nt, Artificial Sequence
  Description of Artificial Sequence: Synthetic oligonucleotide
uguguagugaagucacuuc

SEQ ID NO: 2030898 - RNA, 19 nt, Artificial Sequence
  Description of Artificial Sequence: Synthetic oligonucleotide
aaaccauaguuguuuguuu

SEQ ID NO: 2030899 - RNA, 19 nt, Artificial Sequence
  Description of Artificial Sequence: Synthetic oligonucleotide
auuuuacaggucagggacc

SEQ ID NO: 2030900 - RNA, 19 nt, Artificial Sequence
  Description of Artificial Sequence: Synthetic oligonucleotide
augguuuaugccaacucgg

SEQ ID NO: 2030901 - RNA, 19 nt, Artificial Sequence
  Description of Artificial Sequence: Synthetic oligonucleotide
uuaaaguuccuaugauaaa

SEQ ID NO: 2030902 - RNA, 19 nt, Artificial Sequence
  Description of Artificial Sequence: Synthetic oligonucleotide
uguccugaggggaugcuga

SEQ ID NO: 2030903 - RNA, 19 nt, Artificial Sequence
  Description of Artificial Sequence: Synthetic oligonucleotide
agaacaaugugugagcuuu

SEQ ID NO: 2030904 - RNA, 19 nt, Artificial Sequence
  Description of Artificial Sequence: Synthetic oligonucleotide
uaguggauacugaagugaa

SEQ ID NO: 2030905 - RNA, 19 nt, Artificial Sequence
  Description of Artificial Sequence: Synthetic oligonucleotide
guggucuggagcuaaagca

SEQ ID NO: 2030906 - RNA, 19 nt, Artificial Sequence
  Description of Artificial Sequence: Synthetic oligonucleotide
gacaccaaugugcgcaugc

SEQ ID NO: 2030907 - RNA, 19 nt, Artificial Sequence
  Description of Artificial Sequence: Synthetic oligonucleotide
aguaggaguguguagugaa

SEQ ID NO: 2030908 - RNA, 19 nt, Artificial Sequence
  Description of Artificial Sequence: Synthetic oligonucleotide
aggagguacacagauuauc

SEQ ID NO: 2030909 - RNA, 19 nt, Artificial Sequence
  Description of Artificial Sequence: Synthetic oligonucleotide
gccuugacucauuugaggg

SEQ ID NO: 2030910 - RNA, 19 nt, Artificial Sequence
  Description of Artificial Sequence: Synthetic oligonucleotide
cuaaguuaagucggaagac

SEQ ID NO: 2030911 - RNA, 19 nt, Artificial Sequence
  Description of Artificial Sequence: Synthetic oligonucleotide
cucaacacauguuccugcc

SEQ ID NO: 2030912 - RNA, 19 nt, Artificial Sequence
  Description of Artificial Sequence: Synthetic oligonucleotide
uugccuugacucauuugag

SEQ ID NO: 2030913 - RNA, 19 nt, Artificial Sequence
  Description of Artificial Sequence: Synthetic oligonucleotide
aggcccaugguuuaugcca

SEQ ID NO: 2030914 - RNA, 19 nt, Artificial Sequence
  Description of Artificial Sequence: Synthetic oligonucleotide
guacacagauuauccaagc

SEQ ID NO: 2030915 - RNA, 19 nt, Artificial Sequence
  Description of Artificial Sequence: Synthetic oligonucleotide
agguacacagauuauccaa

SEQ ID NO: 2030916 - RNA, 19 nt, Artificial Sequence
  Description of Artificial Sequence: Synthetic oligonucleotide
  modified_base (16)..(16): a, c, u, g, unknown or other
uacacaguauaaucancuu

SEQ ID NO: 2030917 - RNA, 19 nt, Artificial Sequence
  Description of Artificial Sequence: Synthetic oligonucleotide
uuuuacaggucagggaccu

SEQ ID NO: 2030918 - RNA, 19 nt, Artificial Sequence
  Description of Artificial Sequence: Synthetic oligonucleotide
ucaaggggcucaauuuuac

SEQ ID NO: 2030919 - RNA, 19 nt, Artificial Sequence
  Description of Artificial Sequence: Synthetic oligonucleotide
auguuuggucaucucucac

SEQ ID NO: 2030920 - RNA, 19 nt, Artificial Sequence
  Description of Artificial Sequence: Synthetic oligonucleotide
aaagggagugggauguuug

SEQ ID NO: 2030921 - RNA, 19 nt, Artificial Sequence
  Description of Artificial Sequence: Synthetic oligonucleotide
gacuguguuccccagaugu

SEQ ID NO: 2030922 - RNA, 19 nt, Artificial Sequence
  Description of Artificial Sequence: Synthetic oligonucleotide
caggcuuucccacggaagc

SEQ ID NO: 2030923 - RNA, 19 nt, Artificial Sequence
  Description of Artificial Sequence: Synthetic oligonucleotide
uguuccugccagauagaug

SEQ ID NO: 2030924 - RNA, 19 nt, Artificial Sequence
  Description of Artificial Sequence: Synthetic oligonucleotide
aagaccuaggguauuacuu

SEQ ID NO: 2030925 - RNA, 19 nt, Artificial Sequence
  Description of Artificial Sequence: Synthetic oligonucleotide
gaaagaguugaaggagugc

SEQ ID NO: 2030926 - RNA, 19 nt, Artificial Sequence
  Description of Artificial Sequence: Synthetic oligonucleotide
agugcuucgguugaaaaua

SEQ ID NO: 2030927 - RNA, 19 nt, Artificial Sequence
  Description of Artificial Sequence: Synthetic oligonucleotide
ucucuacacaggcuuuccc

SEQ ID NO: 2030928 - RNA, 19 nt, Artificial Sequence
  Description of Artificial Sequence: Synthetic oligonucleotide
ucucacuuagaguggucug

SEQ ID NO: 2030929 - RNA, 19 nt, Artificial Sequence
  Description of Artificial Sequence: Synthetic oligonucleotide
ugucaaggggcucaauuuu

SEQ ID NO: 2030930 - RNA, 19 nt, Artificial Sequence
  Description of Artificial Sequence: Synthetic oligonucleotide
agaguaggaguguguagug

SEQ ID NO: 2030931 - RNA, 19 nt, Artificial Sequence
  Description of Artificial Sequence: Synthetic oligonucleotide
uuaggcuaggauuucuguu

SEQ ID NO: 2030932 - RNA, 19 nt, Artificial Sequence
  Description of Artificial Sequence: Synthetic oligonucleotide
uuacacuuuuacgaccuga

SEQ ID NO: 2030933 - RNA, 19 nt, Artificial Sequence
  Description of Artificial Sequence: Synthetic oligonucleotide
gaguguguagugaagucac

SEQ ID NO: 2030934 - RNA, 19 nt, Artificial Sequence
  Description of Artificial Sequence: Synthetic oligonucleotide
cacuaaggccccaucacac

SEQ ID NO: 2030935 - RNA, 19 nt, Artificial Sequence
  Description of Artificial Sequence: Synthetic oligonucleotide
gguauuacuuucuguaguc

SEQ ID NO: 2030936 - RNA, 19 nt, Artificial Sequence
  Description of Artificial Sequence: Synthetic oligonucleotide
acccacagaaggcuuuggg

SEQ ID NO: 2030937 - RNA, 19 nt, Artificial Sequence
  Description of Artificial Sequence: Synthetic oligonucleotide
augcuccuaacacagugcu

SEQ ID NO: 2030938 - RNA, 19 nt, Artificial Sequence
  Description of Artificial Sequence: Synthetic oligonucleotide
gugcauaagucccaaguga

SEQ ID NO: 2030939 - RNA, 19 nt, Artificial Sequence
  Description of Artificial Sequence: Synthetic oligonucleotide
uaagucccaagugauauuu

SEQ ID NO: 2030940 - RNA, 19 nt, Artificial Sequence
  Description of Artificial Sequence: Synthetic oligonucleotide
uggcauuugucaaggggcu

SEQ ID NO: 2030941 - RNA, 19 nt, Artificial Sequence
  Description of Artificial Sequence: Synthetic oligonucleotide
caagacaccaaugugcgca

SEQ ID NO: 2030942 - RNA, 19 nt, Artificial Sequence
  Description of Artificial Sequence: Synthetic oligonucleotide
  modified_base (7)..(7): a, c, u, g, unknown or other
uaaucancuuugucaggaa

SEQ ID NO: 2030943 - RNA, 19 nt, Artificial Sequence
  Description of Artificial Sequence: Synthetic oligonucleotide
ucaacacauguuccugcca

SEQ ID NO: 2030944 - RNA, 19 nt, Artificial Sequence
  Description of Artificial Sequence: Synthetic oligonucleotide
acggaagcucuccauucgg

SEQ ID NO: 2030945 - RNA, 19 nt, Artificial Sequence
  Description of Artificial Sequence: Synthetic oligonucleotide
uaauuauugauuggacaua

SEQ ID NO: 2030946 - RNA, 19 nt, Artificial Sequence
  Description of Artificial Sequence: Synthetic oligonucleotide
aaacagcuuggcauuuguc

SEQ ID NO: 2030947 - RNA, 19 nt, Artificial Sequence
  Description of Artificial Sequence: Synthetic oligonucleotide
caucucucacuuagagugg

SEQ ID NO: 2030948 - RNA, 19 nt, Artificial Sequence
  Description of Artificial Sequence: Synthetic oligonucleotide
ggagguacacagauuaucc

SEQ ID NO: 2030949 - RNA, 19 nt, Artificial Sequence
  Description of Artificial Sequence: Synthetic oligonucleotide
aacacauguuccugccaga

SEQ ID NO: 2030950 - RNA, 19 nt, Artificial Sequence
  Description of Artificial Sequence: Synthetic oligonucleotide
cuuagaguggucuggagcu

SEQ ID NO: 2030951 - RNA, 19 nt, Artificial Sequence
  Description of Artificial Sequence: Synthetic oligonucleotide
gaccugaacaauaacuuaa

SEQ ID NO: 2030952 - RNA, 19 nt, Artificial Sequence
  Description of Artificial Sequence: Synthetic oligonucleotide
cugcacucagcucagaaga

SEQ ID NO: 2030953 - RNA, 19 nt, Artificial Sequence
  Description of Artificial Sequence: Synthetic oligonucleotide
ccagauagauggauggucc

SEQ ID NO: 2030954 - RNA, 19 nt, Artificial Sequence
  Description of Artificial Sequence: Synthetic oligonucleotide
ugguucucguguccugagg

SEQ ID NO: 2030955 - RNA, 19 nt, Artificial Sequence
  Description of Artificial Sequence: Synthetic oligonucleotide
agaguugaaggagugccug

SEQ ID NO: 2030956 - RNA, 19 nt, Artificial Sequence
  Description of Artificial Sequence: Synthetic oligonucleotide
agcuuggcauuugucaagg

SEQ ID NO: 2030957 - RNA, 19 nt, Artificial Sequence
  Description of Artificial Sequence: Synthetic oligonucleotide
agaccuaggguauuacuuu

SEQ ID NO: 2030958 - RNA, 19 nt, Artificial Sequence
  Description of Artificial Sequence: Synthetic oligonucleotide
uguuccccagaugucauac

SEQ ID NO: 2030959 - RNA, 19 nt, Artificial Sequence
  Description of Artificial Sequence: Synthetic oligonucleotide
cuucgugcuccaaucacuc

SEQ ID NO: 2030960 - RNA, 19 nt, Artificial Sequence
  Description of Artificial Sequence: Synthetic oligonucleotide
gagguacacagauuaucca

SEQ ID NO: 2030961 - RNA, 19 nt, Artificial Sequence
  Description of Artificial Sequence: Synthetic oligonucleotide
guucucguguccugagggg

SEQ ID NO: 2030962 - RNA, 19 nt, Artificial Sequence
  Description of Artificial Sequence: Synthetic oligonucleotide
ugagggccaccuuagugga

SEQ ID NO: 2030963 - RNA, 19 nt, Artificial Sequence
  Description of Artificial Sequence: Synthetic oligonucleotide
auuggccuguucuccauga

SEQ ID NO: 2030964 - RNA, 19 nt, Artificial Sequence
  Description of Artificial Sequence: Synthetic oligonucleotide
uccaaucacuccagcaauc

SEQ ID NO: 2030965 - RNA, 19 nt, Artificial Sequence
  Description of Artificial Sequence: Synthetic oligonucleotide
uuacgaccugaacaauaac

SEQ ID NO: 2030966 - RNA, 19 nt, Artificial Sequence
  Description of Artificial Sequence: Synthetic oligonucleotide
gguuuaugccaacucggag

SEQ ID NO: 2030967 - RNA, 19 nt, Artificial Sequence
  Description of Artificial Sequence: Synthetic oligonucleotide
cuggagcuaaagcacuaag

SEQ ID NO: 2030968 - RNA, 19 nt, Artificial Sequence
  Description of Artificial Sequence: Synthetic oligonucleotide
cacggaagcucuccauucg

SEQ ID NO: 2030969 - RNA, 19 nt, Artificial Sequence
  Description of Artificial Sequence: Synthetic oligonucleotide
gaggcuucgugcuccaauc

SEQ ID NO: 2030970 - RNA, 19 nt, Artificial Sequence
  Description of Artificial Sequence: Synthetic oligonucleotide
ucacacaaagcuagcuuuu

SEQ ID NO: 2030971 - RNA, 19 nt, Artificial Sequence
  Description of Artificial Sequence: Synthetic oligonucleotide
gauccugguucucgugucc

SEQ ID NO: 2030972 - RNA, 19 nt, Artificial Sequence
  Description of Artificial Sequence: Synthetic oligonucleotide
gaccuaggguauuacuuuc

SEQ ID NO: 2030973 - RNA, 19 nt, Artificial Sequence
  Description of Artificial Sequence: Synthetic oligonucleotide
gggaccucaacacauguuc

SEQ ID NO: 2030974 - RNA, 19 nt, Artificial Sequence
  Description of Artificial Sequence: Synthetic oligonucleotide
gaagugaauccuugaccca

SEQ ID NO: 2030975 - RNA, 19 nt, Artificial Sequence
  Description of Artificial Sequence: Synthetic oligonucleotide
auacugaggcuucgugcuc

SEQ ID NO: 2030976 - RNA, 19 nt, Artificial Sequence
  Description of Artificial Sequence: Synthetic oligonucleotide
ugcacucagcucagaagac

SEQ ID NO: 2030977 - RNA, 19 nt, Artificial Sequence
  Description of Artificial Sequence: Synthetic oligonucleotide
gaaaggucaggagguacac

SEQ ID NO: 2030978 - RNA, 19 nt, Artificial Sequence
  Description of Artificial Sequence: Synthetic oligonucleotide
aagacaccaaugugcgcau

SEQ ID NO: 2030979 - RNA, 19 nt, Artificial Sequence
  Description of Artificial Sequence: Synthetic oligonucleotide
uacugaggcuucgugcucc

SEQ ID NO: 2030980 - RNA, 19 nt, Artificial Sequence
  Description of Artificial Sequence: Synthetic oligonucleotide
gagaaaggucaggagguac

SEQ ID NO: 2030981 - RNA, 19 nt, Artificial Sequence
  Description of Artificial Sequence: Synthetic oligonucleotide
agaaaggucaggagguaca

SEQ ID NO: 2030982 - RNA, 19 nt, Artificial Sequence
  Description of Artificial Sequence: Synthetic oligonucleotide
cuccuaacacagugcuucg

SEQ ID NO: 2030983 - RNA, 19 nt, Artificial Sequence
  Description of Artificial Sequence: Synthetic oligonucleotide
cacagauuauccaagcccu

SEQ ID NO: 2030984 - RNA, 19 nt, Artificial Sequence
  Description of Artificial Sequence: Synthetic oligonucleotide
gcaccaauuuaugaaaaug

SEQ ID NO: 2030985 - RNA, 19 nt, Artificial Sequence
  Description of Artificial Sequence: Synthetic oligonucleotide
uccuaacacagugcuucgg

SEQ ID NO: 2030986 - RNA, 19 nt, Artificial Sequence
  Description of Artificial Sequence: Synthetic oligonucleotide
auagauggaugguccuugu

SEQ ID NO: 2030987 - RNA, 19 nt, Artificial Sequence
  Description of Artificial Sequence: Synthetic oligonucleotide
ucacuuagaguggucugga

SEQ ID NO: 2030988 - RNA, 19 nt, Artificial Sequence
  Description of Artificial Sequence: Synthetic oligonucleotide
auacugaagugaauccuug

SEQ ID NO: 2030989 - RNA, 19 nt, Artificial Sequence
  Description of Artificial Sequence: Synthetic oligonucleotide
uucuguagucagugagggc

SEQ ID NO: 2030990 - RNA, 19 nt, Artificial Sequence
  Description of Artificial Sequence: Synthetic oligonucleotide
auuauccaagcccucucua

SEQ ID NO: 2030991 - RNA, 19 nt, Artificial Sequence
  Description of Artificial Sequence: Synthetic oligonucleotide
auuucuguugcuggaggga

SEQ ID NO: 2030992 - RNA, 19 nt, Artificial Sequence
  Description of Artificial Sequence: Synthetic oligonucleotide
ggaagugucccuaaguuaa

SEQ ID NO: 2030993 - RNA, 19 nt, Artificial Sequence
  Description of Artificial Sequence: Synthetic oligonucleotide
ugcuucgguugaaaauaga

SEQ ID NO: 2030994 - RNA, 19 nt, Artificial Sequence
  Description of Artificial Sequence: Synthetic oligonucleotide
uagucagugagggccaccu

SEQ ID NO: 2030995 - RNA, 19 nt, Artificial Sequence
  Description of Artificial Sequence: Synthetic oligonucleotide
accuuaguggauacugaag

SEQ ID NO: 2030996 - RNA, 19 nt, Artificial Sequence
  Description of Artificial Sequence: Synthetic oligonucleotide
ucggaggcggaaagaguug

SEQ ID NO: 2030997 - RNA, 19 nt, Artificial Sequence
  Description of Artificial Sequence: Synthetic oligonucleotide
agaugucauacugaggcuu

SEQ ID NO: 2030998 - RNA, 19 nt, Artificial Sequence
  Description of Artificial Sequence: Synthetic oligonucleotide
acagugcuucgguugaaaa

SEQ ID NO: 2030999 - RNA, 19 nt, Artificial Sequence
  Description of Artificial Sequence: Synthetic oligonucleotide
guuucaccugcuccaagca

SEQ ID NO: 2031000 - RNA, 19 nt, Artificial Sequence
  Description of Artificial Sequence: Synthetic oligonucleotide
cuugacucauuugagggaa

SEQ ID NO: 2031001 - RNA, 19 nt, Artificial Sequence
  Description of Artificial Sequence: Synthetic oligonucleotide
uucgugcuccaaucacucc

SEQ ID NO: 2031002 - RNA, 19 nt, Artificial Sequence
  Description of Artificial Sequence: Synthetic oligonucleotide
ugacucauuugagggaaaa

SEQ ID NO: 2031003 - RNA, 19 nt, Artificial Sequence
  Description of Artificial Sequence: Synthetic oligonucleotide
  modified_base (13)..(13): a, c, u, g, unknown or other
acaguauaaucancuuugu

SEQ ID NO: 2031004 - RNA, 19 nt, Artificial Sequence
  Description of Artificial Sequence: Synthetic oligonucleotide
acgaccugaacaauaacuu

SEQ ID NO: 2031005 - RNA, 19 nt, Artificial Sequence
  Description of Artificial Sequence: Synthetic oligonucleotide
caacauugacuguguuccc

SEQ ID NO: 2031006 - RNA, 19 nt, Artificial Sequence
  Description of Artificial Sequence: Synthetic oligonucleotide
ggagaguaggaguguguag

SEQ ID NO: 2031007 - RNA, 19 nt, Artificial Sequence
  Description of Artificial Sequence: Synthetic oligonucleotide
ggcaacauugacuguguuc

SEQ ID NO: 2031008 - RNA, 19 nt, Artificial Sequence
  Description of Artificial Sequence: Synthetic oligonucleotide
gaagaccuaggguauuacu

SEQ ID NO: 2031009 - RNA, 19 nt, Artificial Sequence
  Description of Artificial Sequence: Synthetic oligonucleotide
augucauacugaggcuucg

SEQ ID NO: 2031010 - RNA, 19 nt, Artificial Sequence
  Description of Artificial Sequence: Synthetic oligonucleotide
uguugaugccauccagcuu

SEQ ID NO: 2031011 - RNA, 19 nt, Artificial Sequence
  Description of Artificial Sequence: Synthetic oligonucleotide
agugccuguugaugccauc

SEQ ID NO: 2031012 - RNA, 19 nt, Artificial Sequence
  Description of Artificial Sequence: Synthetic oligonucleotide
caggcaccaauuuaugaaa

SEQ ID NO: 2031013 - RNA, 19 nt, Artificial Sequence
  Description of Artificial Sequence: Synthetic oligonucleotide
guauuacuuucuguaguca

SEQ ID NO: 2031014 - RNA, 19 nt, Artificial Sequence
  Description of Artificial Sequence: Synthetic oligonucleotide
caaugugcgcaugcugccg

SEQ ID NO: 2031015 - RNA, 19 nt, Artificial Sequence
  Description of Artificial Sequence: Synthetic oligonucleotide
  modified_base (9)..(9): a, c, u, g, unknown or other
cauacaganaaaccauagu

SEQ ID NO: 2031016 - RNA, 19 nt, Artificial Sequence
  Description of Artificial Sequence: Synthetic oligonucleotide
auaagucccaagugauauu

SEQ ID NO: 2031017 - RNA, 19 nt, Artificial Sequence
  Description of Artificial Sequence: Synthetic oligonucleotide
acaggcuuucccacggaag

SEQ ID NO: 2031018 - RNA, 19 nt, Artificial Sequence
  Description of Artificial Sequence: Synthetic oligonucleotide
cccuaaguuaagucggaag

SEQ ID NO: 2031019 - RNA, 19 nt, Artificial Sequence
  Description of Artificial Sequence: Synthetic oligonucleotide
guuacacuuuuacgaccug

SEQ ID NO: 2031020 - RNA, 19 nt, Artificial Sequence
  Description of Artificial Sequence: Synthetic oligonucleotide
gaguggucuggagcuaaag

SEQ ID NO: 2031021 - RNA, 19 nt, Artificial Sequence
  Description of Artificial Sequence: Synthetic oligonucleotide
gcggaaagaguugaaggag

SEQ ID NO: 2031022 - RNA, 19 nt, Artificial Sequence
  Description of Artificial Sequence: Synthetic oligonucleotide
uggaugguccuuguagcuc

SEQ ID NO: 2031023 - RNA, 19 nt, Artificial Sequence
  Description of Artificial Sequence: Synthetic oligonucleotide
cacacaaagcuagcuuuug

SEQ ID NO: 2031024 - RNA, 19 nt, Artificial Sequence
  Description of Artificial Sequence: Synthetic oligonucleotide
ggauguuuggucaucucuc

SEQ ID NO: 2031025 - RNA, 19 nt, Artificial Sequence
  Description of Artificial Sequence: Synthetic oligonucleotide
acaagacacuugugaagaa

SEQ ID NO: 2031026 - RNA, 19 nt, Artificial Sequence
  Description of Artificial Sequence: Synthetic oligonucleotide
caccaaugugcgcaugcug

SEQ ID NO: 2031027 - RNA, 19 nt, Artificial Sequence
  Description of Artificial Sequence: Synthetic oligonucleotide
cauaagucccaagugauau

SEQ ID NO: 2031028 - RNA, 19 nt, Artificial Sequence
  Description of Artificial Sequence: Synthetic oligonucleotide
cugguucucguguccugag

SEQ ID NO: 2031029 - RNA, 19 nt, Artificial Sequence
  Description of Artificial Sequence: Synthetic oligonucleotide
gcuaggauuucuguugcug

SEQ ID NO: 2031030 - RNA, 19 nt, Artificial Sequence
  Description of Artificial Sequence: Synthetic oligonucleotide
aucucucacuuagaguggu

SEQ ID NO: 2031031 - RNA, 19 nt, Artificial Sequence
  Description of Artificial Sequence: Synthetic oligonucleotide
cucucuacacaggcuuucc

SEQ ID NO: 2031032 - RNA, 19 nt, Artificial Sequence
  Description of Artificial Sequence: Synthetic oligonucleotide
uugacucauuugagggaaa

SEQ ID NO: 2031033 - RNA, 19 nt, Artificial Sequence
  Description of Artificial Sequence: Synthetic oligonucleotide
ugacccacagaaggcuuug

SEQ ID NO: 2031034 - RNA, 19 nt, Artificial Sequence
  Description of Artificial Sequence: Synthetic oligonucleotide
cuuccaaaagggaguggga

SEQ ID NO: 2031035 - RNA, 19 nt, Artificial Sequence
  Description of Artificial Sequence: Synthetic oligonucleotide
uuaugccaacucggaggcg

SEQ ID NO: 2031036 - RNA, 19 nt, Artificial Sequence
  Description of Artificial Sequence: Synthetic oligonucleotide
ugucauacugaggcuucgu

SEQ ID NO: 2031037 - RNA, 19 nt, Artificial Sequence
  Description of Artificial Sequence: Synthetic oligonucleotide
uugucaggaagugucccua

SEQ ID NO: 2031038 - RNA, 19 nt, Artificial Sequence
  Description of Artificial Sequence: Synthetic oligonucleotide
gugcuucgguugaaaauag

SEQ ID NO: 2031039 - RNA, 19 nt, Artificial Sequence
  Description of Artificial Sequence: Synthetic oligonucleotide
cacuugugaagaaauuacu

SEQ ID NO: 2031040 - RNA, 19 nt, Artificial Sequence
  Description of Artificial Sequence: Synthetic oligonucleotide
uagaguggucuggagcuaa

SEQ ID NO: 2031041 - RNA, 19 nt, Artificial Sequence
  Description of Artificial Sequence: Synthetic oligonucleotide
ucucucacuuagagugguc

SEQ ID NO: 2031042 - RNA, 19 nt, Artificial Sequence
  Description of Artificial Sequence: Synthetic oligonucleotide
ggaguguguagugaaguca

SEQ ID NO: 2031043 - RNA, 19 nt, Artificial Sequence
  Description of Artificial Sequence: Synthetic oligonucleotide
caccuuaguggauacugaa

SEQ ID NO: 2031044 - RNA, 19 nt, Artificial Sequence
  Description of Artificial Sequence: Synthetic oligonucleotide
gguccuuguagcucugcac

SEQ ID NO: 2031045 - RNA, 19 nt, Artificial Sequence
  Description of Artificial Sequence: Synthetic oligonucleotide
accugaacaauaacuuaaa

SEQ ID NO: 2031046 - RNA, 19 nt, Artificial Sequence
  Description of Artificial Sequence: Synthetic oligonucleotide
ugccagauagauggauggu

SEQ ID NO: 2031047 - RNA, 19 nt, Artificial Sequence
  Description of Artificial Sequence: Synthetic oligonucleotide
uccugguucucguguccug

SEQ ID NO: 2031048 - RNA, 19 nt, Artificial Sequence
  Description of Artificial Sequence: Synthetic oligonucleotide
cuuaggcuaggauuucugu

SEQ ID NO: 2031049 - RNA, 19 nt, Artificial Sequence
  Description of Artificial Sequence: Synthetic oligonucleotide
aggcuucgugcuccaauca

SEQ ID NO: 2031050 - RNA, 19 nt, Artificial Sequence
  Description of Artificial Sequence: Synthetic oligonucleotide
agcuagcuuuugccuugac

SEQ ID NO: 2031051 - RNA, 19 nt, Artificial Sequence
  Description of Artificial Sequence: Synthetic oligonucleotide
aguugaaggagugccuguu

SEQ ID NO: 2031052 - RNA, 19 nt, Artificial Sequence
  Description of Artificial Sequence: Synthetic oligonucleotide
agauagauggaugguccuu

SEQ ID NO: 2031053 - RNA, 19 nt, Artificial Sequence
  Description of Artificial Sequence: Synthetic oligonucleotide
ggaccucaacacauguucc

SEQ ID NO: 2031054 - RNA, 19 nt, Artificial Sequence
  Description of Artificial Sequence: Synthetic oligonucleotide
cagaagacuggagaaaggu

SEQ ID NO: 2031055 - RNA, 19 nt, Artificial Sequence
  Description of Artificial Sequence: Synthetic oligonucleotide
uuggccuguucuccaugaa

SEQ ID NO: 2031056 - RNA, 19 nt, Artificial Sequence
  Description of Artificial Sequence: Synthetic oligonucleotide
ccaaugugcgcaugcugcc

SEQ ID NO: 2031057 - RNA, 19 nt, Artificial Sequence
  Description of Artificial Sequence: Synthetic oligonucleotide
gcuaaagcacuaaggcccc

SEQ ID NO: 2031058 - RNA, 19 nt, Artificial Sequence
  Description of Artificial Sequence: Synthetic oligonucleotide
cuaggguauuacuuucugu

SEQ ID NO: 2031059 - RNA, 19 nt, Artificial Sequence
  Description of Artificial Sequence: Synthetic oligonucleotide
ccuaggguauuacuuucug

SEQ ID NO: 2031060 - RNA, 19 nt, Artificial Sequence
  Description of Artificial Sequence: Synthetic oligonucleotide
ccuuaguggauacugaagu

SEQ ID NO: 2031061 - RNA, 19 nt, Artificial Sequence
  Description of Artificial Sequence: Synthetic oligonucleotide
ucccuaaguuaagucggaa

SEQ ID NO: 2031062 - RNA, 19 nt, Artificial Sequence
  Description of Artificial Sequence: Synthetic oligonucleotide
uguagucagugagggccac

SEQ ID NO: 2031063 - RNA, 19 nt, Artificial Sequence
  Description of Artificial Sequence: Synthetic oligonucleotide
aagcuagcuuuugccuuga

SEQ ID NO: 2031064 - RNA, 19 nt, Artificial Sequence
  Description of Artificial Sequence: Synthetic oligonucleotide
accuaggguauuacuuucu

SEQ ID NO: 2031065 - RNA, 19 nt, Artificial Sequence
  Description of Artificial Sequence: Synthetic oligonucleotide
ccaacucggaggcggaaag

SEQ ID NO: 2031066 - RNA, 19 nt, Artificial Sequence
  Description of Artificial Sequence: Synthetic oligonucleotide
aguuaagucggaagaccua

SEQ ID NO: 2031067 - RNA, 19 nt, Artificial Sequence
  Description of Artificial Sequence: Synthetic oligonucleotide
cacuuccaaaagggagugg

SEQ ID NO: 2031068 - RNA, 19 nt, Artificial Sequence
  Description of Artificial Sequence: Synthetic oligonucleotide
caaagcuagcuuuugccuu

SEQ ID NO: 2031069 - RNA, 19 nt, Artificial Sequence
  Description of Artificial Sequence: Synthetic oligonucleotide
uuagaguggucuggagcua

SEQ ID NO: 2031070 - RNA, 19 nt, Artificial Sequence
  Description of Artificial Sequence: Synthetic oligonucleotide
gaguugaaggagugccugu

SEQ ID NO: 2031071 - RNA, 19 nt, Artificial Sequence
  Description of Artificial Sequence: Synthetic oligonucleotide
ccuguucuccaugaaguac

SEQ ID NO: 2031072 - RNA, 19 nt, Artificial Sequence
  Description of Artificial Sequence: Synthetic oligonucleotide
cucggaggcggaaagaguu

SEQ ID NO: 2031073 - RNA, 19 nt, Artificial Sequence
  Description of Artificial Sequence: Synthetic oligonucleotide
gcacuaaggccccaucaca

SEQ ID NO: 2031074 - RNA, 19 nt, Artificial Sequence
  Description of Artificial Sequence: Synthetic oligonucleotide
cucuccauucggcuggcaa

SEQ ID NO: 2031075 - RNA, 19 nt, Artificial Sequence
  Description of Artificial Sequence: Synthetic oligonucleotide
aggcaccaauuuaugaaaa

SEQ ID NO: 2031076 - RNA, 19 nt, Artificial Sequence
  Description of Artificial Sequence: Synthetic oligonucleotide
aguguguagugaagucacu

SEQ ID NO: 2031077 - RNA, 19 nt, Artificial Sequence
  Description of Artificial Sequence: Synthetic oligonucleotide
gcauuugucaaggggcuca

SEQ ID NO: 2031078 - RNA, 19 nt, Artificial Sequence
  Description of Artificial Sequence: Synthetic oligonucleotide
aguggauacugaagugaau

SEQ ID NO: 2031079 - RNA, 19 nt, Artificial Sequence
  Description of Artificial Sequence: Synthetic oligonucleotide
auuauugauuggacauaua

SEQ ID NO: 2031080 - RNA, 19 nt, Artificial Sequence
  Description of Artificial Sequence: Synthetic oligonucleotide
guaugugcauaagucccaa

SEQ ID NO: 2031081 - RNA, 19 nt, Artificial Sequence
  Description of Artificial Sequence: Synthetic oligonucleotide
ggaugguccuuguagcucu

SEQ ID NO: 2031082 - RNA, 19 nt, Artificial Sequence
  Description of Artificial Sequence: Synthetic oligonucleotide
uggcaacauugacuguguu

SEQ ID NO: 2031083 - RNA, 19 nt, Artificial Sequence
  Description of Artificial Sequence: Synthetic oligonucleotide
ccauaguuguuuguuucac

SEQ ID NO: 2031084 - RNA, 19 nt, Artificial Sequence
  Description of Artificial Sequence: Synthetic oligonucleotide
agggccaccuuaguggaua

SEQ ID NO: 2031085 - RNA, 19 nt, Artificial Sequence
  Description of Artificial Sequence: Synthetic oligonucleotide
aagucccaagugauauuuu

SEQ ID NO: 2031086 - RNA, 19 nt, Artificial Sequence
  Description of Artificial Sequence: Synthetic oligonucleotide
ggggcucaauuuuacaggu

SEQ ID NO: 2031087 - RNA, 19 nt, Artificial Sequence
  Description of Artificial Sequence: Synthetic oligonucleotide
acacaggcuuucccacgga

SEQ ID NO: 2031088 - RNA, 19 nt, Artificial Sequence
  Description of Artificial Sequence: Synthetic oligonucleotide
aggccccaucacacaaagc

SEQ ID NO: 2031089 - RNA, 19 nt, Artificial Sequence
  Description of Artificial Sequence: Synthetic oligonucleotide
gucaaggggcucaauuuua

SEQ ID NO: 2031090 - RNA, 19 nt, Artificial Sequence
  Description of Artificial Sequence: Synthetic oligonucleotide
gagaacaaugugugagcuu

SEQ ID NO: 2031091 - RNA, 19 nt, Artificial Sequence
  Description of Artificial Sequence: Synthetic oligonucleotide
cccaucacacaaagcuagc

SEQ ID NO: 2031092 - RNA, 19 nt, Artificial Sequence
  Description of Artificial Sequence: Synthetic oligonucleotide
agccaggcaccaauuuaug

SEQ ID NO: 2031093 - RNA, 19 nt, Artificial Sequence
  Description of Artificial Sequence: Synthetic oligonucleotide
gccaggcaccaauuuauga

SEQ ID NO: 2031094 - RNA, 19 nt, Artificial Sequence
  Description of Artificial Sequence: Synthetic oligonucleotide
cucucacuuagaguggucu

SEQ ID NO: 2031095 - RNA, 19 nt, Artificial Sequence
  Description of Artificial Sequence: Synthetic oligonucleotide
ccacggaagcucuccauuc

SEQ ID NO: 2031096 - RNA, 19 nt, Artificial Sequence
  Description of Artificial Sequence: Synthetic oligonucleotide
acucggaggcggaaagagu

SEQ ID NO: 2031097 - RNA, 19 nt, Artificial Sequence
  Description of Artificial Sequence: Synthetic oligonucleotide
  modified_base (5)..(5): a, c, u, g, unknown or other
caganaaaccauaguuguu

SEQ ID NO: 2031098 - RNA, 19 nt, Artificial Sequence
  Description of Artificial Sequence: Synthetic oligonucleotide
ggauguugggagaguagga

SEQ ID NO: 2031099 - RNA, 19 nt, Artificial Sequence
  Description of Artificial Sequence: Synthetic oligonucleotide
gggaaaacagcuuggcauu

SEQ ID NO: 2031100 - RNA, 19 nt, Artificial Sequence
  Description of Artificial Sequence: Synthetic oligonucleotide
auucggcuggcaacauuga

SEQ ID NO: 2031101 - RNA, 19 nt, Artificial Sequence
  Description of Artificial Sequence: Synthetic oligonucleotide
ccuugacucauuugaggga

SEQ ID NO: 2031102 - RNA, 19 nt, Artificial Sequence
  Description of Artificial Sequence: Synthetic oligonucleotide
cagauuauccaagcccucu

SEQ ID NO: 2031103 - RNA, 19 nt, Artificial Sequence
  Description of Artificial Sequence: Synthetic oligonucleotide
gcuagcuuuugccuugacu

SEQ ID NO: 2031104 - RNA, 19 nt, Artificial Sequence
  Description of Artificial Sequence: Synthetic oligonucleotide
ccaagacaccaaugugcgc

SEQ ID NO: 2031105 - RNA, 19 nt, Artificial Sequence
  Description of Artificial Sequence: Synthetic oligonucleotide
cuaacacagugcuucgguu

SEQ ID NO: 2031106 - RNA, 19 nt, Artificial Sequence
  Description of Artificial Sequence: Synthetic oligonucleotide
cgugcuccaaucacuccag

SEQ ID NO: 2031107 - RNA, 19 nt, Artificial Sequence
  Description of Artificial Sequence: Synthetic oligonucleotide
cacagaaggcuuuggguuu

SEQ ID NO: 2031108 - RNA, 19 nt, Artificial Sequence
  Description of Artificial Sequence: Synthetic oligonucleotide
ucggaagaccuaggguauu

SEQ ID NO: 2031109 - RNA, 19 nt, Artificial Sequence
  Description of Artificial Sequence: Synthetic oligonucleotide
cggaagcucuccauucggc

SEQ ID NO: 2031110 - RNA, 19 nt, Artificial Sequence
  Description of Artificial Sequence: Synthetic oligonucleotide
auuugucaaggggcucaau

SEQ ID NO: 2031111 - RNA, 19 nt, Artificial Sequence
  Description of Artificial Sequence: Synthetic oligonucleotide
ggcaccaauuuaugaaaau

SEQ ID NO: 2031112 - RNA, 19 nt, Artificial Sequence
  Description of Artificial Sequence: Synthetic oligonucleotide
gggagaguaggagugugua

SEQ ID NO: 2031113 - RNA, 19 nt, Artificial Sequence
  Description of Artificial Sequence: Synthetic oligonucleotide
cacauguuccugccagaua

SEQ ID NO: 2031114 - RNA, 19 nt, Artificial Sequence
  Description of Artificial Sequence: Synthetic oligonucleotide
ccaaaagggagugggaugu

SEQ ID NO: 2031115 - RNA, 19 nt, Artificial Sequence
  Description of Artificial Sequence: Synthetic oligonucleotide
agggaccucaacacauguu

SEQ ID NO: 2031116 - RNA, 19 nt, Artificial Sequence
  Description of Artificial Sequence: Synthetic oligonucleotide
cuugacccacagaaggcuu

SEQ ID NO: 2031117 - RNA, 19 nt, Artificial Sequence
  Description of Artificial Sequence: Synthetic oligonucleotide
  modified_base (3)..(3): a, c, u, g, unknown or other
cancuuugucaggaagugu

SEQ ID NO: 2031118 - RNA, 19 nt, Artificial Sequence
  Description of Artificial Sequence: Synthetic oligonucleotide
ccaccuuaguggauacuga

SEQ ID NO: 2031119 - RNA, 19 nt, Artificial Sequence
  Description of Artificial Sequence: Synthetic oligonucleotide
gugggauguuuggucaucu

SEQ ID NO: 2031120 - RNA, 19 nt, Artificial Sequence
  Description of Artificial Sequence: Synthetic oligonucleotide
gucuggagcuaaagcacua

SEQ ID NO: 2031121 - RNA, 19 nt, Artificial Sequence
  Description of Artificial Sequence: Synthetic oligonucleotide
gucggaagaccuaggguau

SEQ ID NO: 2031122 - RNA, 19 nt, Artificial Sequence
  Description of Artificial Sequence: Synthetic oligonucleotide
caacucggaggcggaaaga

SEQ ID NO: 2031123 - RNA, 19 nt, Artificial Sequence
  Description of Artificial Sequence: Synthetic oligonucleotide
cacagugcuucgguugaaa

SEQ ID NO: 2031124 - RNA, 19 nt, Artificial Sequence
  Description of Artificial Sequence: Synthetic oligonucleotide
agaguggucuggagcuaaa

SEQ ID NO: 2031125 - RNA, 19 nt, Artificial Sequence
  Description of Artificial Sequence: Synthetic oligonucleotide
ggcauuugucaaggggcuc

SEQ ID NO: 2031126 - RNA, 19 nt, Artificial Sequence
  Description of Artificial Sequence: Synthetic oligonucleotide
augccaacucggaggcgga

SEQ ID NO: 2031127 - RNA, 19 nt, Artificial Sequence
  Description of Artificial Sequence: Synthetic oligonucleotide
gggccaccuuaguggauac

SEQ ID NO: 2031128 - RNA, 19 nt, Artificial Sequence
  Description of Artificial Sequence: Synthetic oligonucleotide
acacagugcuucgguugaa

SEQ ID NO: 2031129 - RNA, 19 nt, Artificial Sequence
  Description of Artificial Sequence: Synthetic oligonucleotide
cuuuuacgaccugaacaau

SEQ ID NO: 2031130 - RNA, 19 nt, Artificial Sequence
  Description of Artificial Sequence: Synthetic oligonucleotide
gcuucgugcuccaaucacu

SEQ ID NO: 2031131 - RNA, 19 nt, Artificial Sequence
  Description of Artificial Sequence: Synthetic oligonucleotide
ccuuguagcucugcacuca

SEQ ID NO: 2031132 - RNA, 19 nt, Artificial Sequence
  Description of Artificial Sequence: Synthetic oligonucleotide
cgaccugaacaauaacuua

SEQ ID NO: 2031133 - RNA, 19 nt, Artificial Sequence
  Description of Artificial Sequence: Synthetic oligonucleotide
gcccaugguuuaugccaac

SEQ ID NO: 2031134 - RNA, 19 nt, Artificial Sequence
  Description of Artificial Sequence: Synthetic oligonucleotide
gagugccuguugaugccau

SEQ ID NO: 2031135 - RNA, 19 nt, Artificial Sequence
  Description of Artificial Sequence: Synthetic oligonucleotide
ggcuaggauuucuguugcu

SEQ ID NO: 2031136 - RNA, 19 nt, Artificial Sequence
  Description of Artificial Sequence: Synthetic oligonucleotide
gccaacucggaggcggaaa

SEQ ID NO: 2031137 - RNA, 19 nt, Artificial Sequence
  Description of Artificial Sequence: Synthetic oligonucleotide
ccaucacacaaagcuagcu

SEQ ID NO: 2031138 - RNA, 19 nt, Artificial Sequence
  Description of Artificial Sequence: Synthetic oligonucleotide
gcuuucccacggaagcucu

SEQ ID NO: 2031139 - RNA, 19 nt, Artificial Sequence
  Description of Artificial Sequence: Synthetic oligonucleotide
cggaggcggaaagaguuga

SEQ ID NO: 2031140 - RNA, 19 nt, Artificial Sequence
  Description of Artificial Sequence: Synthetic oligonucleotide
cccaugguuuaugccaacu

SEQ ID NO: 2031141 - RNA, 19 nt, Artificial Sequence
  Description of Artificial Sequence: Synthetic oligonucleotide
cccacggaagcucuccauu

SEQ ID NO: 2031142 - RNA, 19 nt, Artificial Sequence
  Description of Artificial Sequence: Synthetic oligonucleotide
gcuuuugccuugacucauu

SEQ ID NO: 2031143 - RNA, 19 nt, Artificial Sequence
  Description of Artificial Sequence: Synthetic oligonucleotide
cccucucuacacaggcuuu

SEQ ID NO: 2031144 - RNA, 19 nt, Artificial Sequence
  Description of Artificial Sequence: Synthetic oligonucleotide
ccauucggcuggcaacauu

SEQ ID NO: 2031145 - RNA, 19 nt, Artificial Sequence
  Description of Artificial Sequence: Synthetic oligonucleotide
  modified_base (1)..(1): a, c, u, g, unknown or other
ncuuugucaggaagugucc

SEQ ID NO: 2031146 - RNA, 19 nt, Artificial Sequence
  Description of Artificial Sequence: Synthetic oligonucleotide
uuugagaaagaucagaugg

SEQ ID NO: 2031147 - RNA, 19 nt, Artificial Sequence
  Description of Artificial Sequence: Synthetic oligonucleotide
aauauuguagaauacacca

SEQ ID NO: 2031148 - RNA, 19 nt, Artificial Sequence
  Description of Artificial Sequence: Synthetic oligonucleotide
uuuuaauuaacccauggga

SEQ ID NO: 2031149 - RNA, 19 nt, Artificial Sequence
  Description of Artificial Sequence: Synthetic oligonucleotide
uuuaacuaaaucuucaaca

SEQ ID NO: 2031150 - RNA, 19 nt, Artificial Sequence
  Description of Artificial Sequence: Synthetic oligonucleotide
uuuaauuaacccaugggag

SEQ ID NO: 2031151 - RNA, 19 nt, Artificial Sequence
  Description of Artificial Sequence: Synthetic oligonucleotide
aagaccauacaucuucucc

SEQ ID NO: 2031152 - RNA, 19 nt, Artificial Sequence
  Description of Artificial Sequence: Synthetic oligonucleotide
auuaauguugcuaaaagac

SEQ ID NO: 2031153 - RNA, 19 nt, Artificial Sequence
  Description of Artificial Sequence: Synthetic oligonucleotide
agagauuauauuaacauac

SEQ ID NO: 2031154 - RNA, 19 nt, Artificial Sequence
  Description of Artificial Sequence: Synthetic oligonucleotide
ucaguauucaaauucuccg

SEQ ID NO: 2031155 - RNA, 19 nt, Artificial Sequence
  Description of Artificial Sequence: Synthetic oligonucleotide
uuuaauggaacuauuacua

SEQ ID NO: 2031156 - RNA, 19 nt, Artificial Sequence
  Description of Artificial Sequence: Synthetic oligonucleotide
uuaauuaacccaugggagg

SEQ ID NO: 2031157 - RNA, 19 nt, Artificial Sequence
  Description of Artificial Sequence: Synthetic oligonucleotide
agugcuuguccauugaagc

SEQ ID NO: 2031158 - RNA, 19 nt, Artificial Sequence
  Description of Artificial Sequence: Synthetic oligonucleotide
uuugaaugcucuaagagau

SEQ ID NO: 2031159 - RNA, 19 nt, Artificial Sequence
  Description of Artificial Sequence: Synthetic oligonucleotide
uguauuaugcuuuucuuac

SEQ ID NO: 2031160 - RNA, 19 nt, Artificial Sequence
  Description of Artificial Sequence: Synthetic oligonucleotide
uguuucaguauucaaauuc

SEQ ID NO: 2031161 - RNA, 19 nt, Artificial Sequence
  Description of Artificial Sequence: Synthetic oligonucleotide
uaagagauuauauuaacau

SEQ ID NO: 2031162 - RNA, 19 nt, Artificial Sequence
  Description of Artificial Sequence: Synthetic oligonucleotide
agaaagaucagaugguguc

SEQ ID NO: 2031163 - RNA, 19 nt, Artificial Sequence
  Description of Artificial Sequence: Synthetic oligonucleotide
aaccacaucaggaucaagc

SEQ ID NO: 2031164 - RNA, 19 nt, Artificial Sequence
  Description of Artificial Sequence: Synthetic oligonucleotide
agaccauacaucuucuccc

SEQ ID NO: 2031165 - RNA, 19 nt, Artificial Sequence
  Description of Artificial Sequence: Synthetic oligonucleotide
auaauauuguagaauacac

SEQ ID NO: 2031166 - RNA, 19 nt, Artificial Sequence
  Description of Artificial Sequence: Synthetic oligonucleotide
agcaucgacacacaacucc

SEQ ID NO: 2031167 - RNA, 19 nt, Artificial Sequence
  Description of Artificial Sequence: Synthetic oligonucleotide
uucauaauauuguagaaua

SEQ ID NO: 2031168 - RNA, 19 nt, Artificial Sequence
  Description of Artificial Sequence: Synthetic oligonucleotide
uauucgaauaagcucacug

SEQ ID NO: 2031169 - RNA, 19 nt, Artificial Sequence
  Description of Artificial Sequence: Synthetic oligonucleotide
uaauauuguagaauacacc

SEQ ID NO: 2031170 - RNA, 19 nt, Artificial Sequence
  Description of Artificial Sequence: Synthetic oligonucleotide
accuaguuuuaauuaaccc

SEQ ID NO: 2031171 - RNA, 19 nt, Artificial Sequence
  Description of Artificial Sequence: Synthetic oligonucleotide
aaagauucaggcaagccag

SEQ ID NO: 2031172 - RNA, 19 nt, Artificial Sequence
  Description of Artificial Sequence: Synthetic oligonucleotide
uuugcauaagaccauacau

SEQ ID NO: 2031173 - RNA, 19 nt, Artificial Sequence
  Description of Artificial Sequence: Synthetic oligonucleotide
ucugggaucaauguguggg

SEQ ID NO: 2031174 - RNA, 19 nt, Artificial Sequence
  Description of Artificial Sequence: Synthetic oligonucleotide
uguagaauacaccacccug

SEQ ID NO: 2031175 - RNA, 19 nt, Artificial Sequence
  Description of Artificial Sequence: Synthetic oligonucleotide
ucgaaccugacuuacagcc

SEQ ID NO: 2031176 - RNA, 19 nt, Artificial Sequence
  Description of Artificial Sequence: Synthetic oligonucleotide
aguagacucugcucgaacc

SEQ ID NO: 2031177 - RNA, 19 nt, Artificial Sequence
  Description of Artificial Sequence: Synthetic oligonucleotide
ucuucucccauuaauguug

SEQ ID NO: 2031178 - RNA, 19 nt, Artificial Sequence
  Description of Artificial Sequence: Synthetic oligonucleotide
ugcauaagaccauacaucu

SEQ ID NO: 2031179 - RNA, 19 nt, Artificial Sequence
  Description of Artificial Sequence: Synthetic oligonucleotide
auuguuacuacuccaggag

SEQ ID NO: 2031180 - RNA, 19 nt, Artificial Sequence
  Description of Artificial Sequence: Synthetic oligonucleotide
caauuguuugccaucagcc

SEQ ID NO: 2031181 - RNA, 19 nt, Artificial Sequence
  Description of Artificial Sequence: Synthetic oligonucleotide
ucuccgagaacucacaacu

SEQ ID NO: 2031182 - RNA, 19 nt, Artificial Sequence
  Description of Artificial Sequence: Synthetic oligonucleotide
auuacuaaaaucugucccu

SEQ ID NO: 2031183 - RNA, 19 nt, Artificial Sequence
  Description of Artificial Sequence: Synthetic oligonucleotide
uugucuuucauucauucaa

SEQ ID NO: 2031184 - RNA, 19 nt, Artificial Sequence
  Description of Artificial Sequence: Synthetic oligonucleotide
uaauuaacccaugggaggg

SEQ ID NO: 2031185 - RNA, 19 nt, Artificial Sequence
  Description of Artificial Sequence: Synthetic oligonucleotide
accaguuaugaaaagauuc

SEQ ID NO: 2031186 - RNA, 19 nt, Artificial Sequence
  Description of Artificial Sequence: Synthetic oligonucleotide
uccauugaagccugaauag

SEQ ID NO: 2031187 - RNA, 19 nt, Artificial Sequence
  Description of Artificial Sequence: Synthetic oligonucleotide
uauucaaauucuccgugcc

SEQ ID NO: 2031188 - RNA, 19 nt, Artificial Sequence
  Description of Artificial Sequence: Synthetic oligonucleotide
uguguuagucgucucagca

SEQ ID NO: 2031189 - RNA, 19 nt, Artificial Sequence
  Description of Artificial Sequence: Synthetic oligonucleotide
agucugaagacucccgggc

SEQ ID NO: 2031190 - RNA, 19 nt, Artificial Sequence
  Description of Artificial Sequence: Synthetic oligonucleotide
ucauuguuacuacuccagg

SEQ ID NO: 2031191 - RNA, 19 nt, Artificial Sequence
  Description of Artificial Sequence: Synthetic oligonucleotide
aauuguuugccaucagcca

SEQ ID NO: 2031192 - RNA, 19 nt, Artificial Sequence
  Description of Artificial Sequence: Synthetic oligonucleotide
ucuaagagauuauauuaac

SEQ ID NO: 2031193 - RNA, 19 nt, Artificial Sequence
  Description of Artificial Sequence: Synthetic oligonucleotide
cugcucuguacuuugaucc

SEQ ID NO: 2031194 - RNA, 19 nt, Artificial Sequence
  Description of Artificial Sequence: Synthetic oligonucleotide
ggagguucuguuuuaaugg

SEQ ID NO: 2031195 - RNA, 19 nt, Artificial Sequence
  Description of Artificial Sequence: Synthetic oligonucleotide
cuauuacuaaaaucugucc

SEQ ID NO: 2031196 - RNA, 19 nt, Artificial Sequence
  Description of Artificial Sequence: Synthetic oligonucleotide
acucacaacuucuacuuuc

SEQ ID NO: 2031197 - RNA, 19 nt, Artificial Sequence
  Description of Artificial Sequence: Synthetic oligonucleotide
aagagauuauauuaacaua

SEQ ID NO: 2031198 - RNA, 19 nt, Artificial Sequence
  Description of Artificial Sequence: Synthetic oligonucleotide
aguauucaaauucuccgug

SEQ ID NO: 2031199 - RNA, 19 nt, Artificial Sequence
  Description of Artificial Sequence: Synthetic oligonucleotide
uagagaaugccccuuuccc

SEQ ID NO: 2031200 - RNA, 19 nt, Artificial Sequence
  Description of Artificial Sequence: Synthetic oligonucleotide
gaacaugugaggaaguccc

SEQ ID NO: 2031201 - RNA, 19 nt, Artificial Sequence
  Description of Artificial Sequence: Synthetic oligonucleotide
uguuacuaggagcagcugu

SEQ ID NO: 2031202 - RNA, 19 nt, Artificial Sequence
  Description of Artificial Sequence: Synthetic oligonucleotide
uaagcucacuguuacuagg

SEQ ID NO: 2031203 - RNA, 19 nt, Artificial Sequence
  Description of Artificial Sequence: Synthetic oligonucleotide
aauaagcucacuguuacua

SEQ ID NO: 2031204 - RNA, 19 nt, Artificial Sequence
  Description of Artificial Sequence: Synthetic oligonucleotide
acuaggagcagcugugaac

SEQ ID NO: 2031205 - RNA, 19 nt, Artificial Sequence
  Description of Artificial Sequence: Synthetic oligonucleotide
uugcauaagaccauacauc

SEQ ID NO: 2031206 - RNA, 19 nt, Artificial Sequence
  Description of Artificial Sequence: Synthetic oligonucleotide
uguuacuacuccaggagcu

SEQ ID NO: 2031207 - RNA, 19 nt, Artificial Sequence
  Description of Artificial Sequence: Synthetic oligonucleotide
uuuucgcugggccucaacc

SEQ ID NO: 2031208 - RNA, 19 nt, Artificial Sequence
  Description of Artificial Sequence: Synthetic oligonucleotide
uaccuaguuuuaauuaacc

SEQ ID NO: 2031209 - RNA, 19 nt, Artificial Sequence
  Description of Artificial Sequence: Synthetic oligonucleotide
ucaaccucaguuguguuag

SEQ ID NO: 2031210 - RNA, 19 nt, Artificial Sequence
  Description of Artificial Sequence: Synthetic oligonucleotide
uacuacuccaccacuaccu

SEQ ID NO: 2031211 - RNA, 19 nt, Artificial Sequence
  Description of Artificial Sequence: Synthetic oligonucleotide
cuuuaacuaaaucuucaac

SEQ ID NO: 2031212 - RNA, 19 nt, Artificial Sequence
  Description of Artificial Sequence: Synthetic oligonucleotide
agugcaauuguuugccauc

SEQ ID NO: 2031213 - RNA, 19 nt, Artificial Sequence
  Description of Artificial Sequence: Synthetic oligonucleotide
ucuagguuccuccauugga

SEQ ID NO: 2031214 - RNA, 19 nt, Artificial Sequence
  Description of Artificial Sequence: Synthetic oligonucleotide
aauguccugcagcaucgac

SEQ ID NO: 2031215 - RNA, 19 nt, Artificial Sequence
  Description of Artificial Sequence: Synthetic oligonucleotide
uucauucaaauucaaccuc

SEQ ID NO: 2031216 - RNA, 19 nt, Artificial Sequence
  Description of Artificial Sequence: Synthetic oligonucleotide
uugcuaaaagacacaagga

SEQ ID NO: 2031217 - RNA, 19 nt, Artificial Sequence
  Description of Artificial Sequence: Synthetic oligonucleotide
auucgaauaagcucacugu

SEQ ID NO: 2031218 - RNA, 19 nt, Artificial Sequence
  Description of Artificial Sequence: Synthetic oligonucleotide
gaaauguccugcagcaucg

SEQ ID NO: 2031219 - RNA, 19 nt, Artificial Sequence
  Description of Artificial Sequence: Synthetic oligonucleotide
ucaauguguggguuacugg

SEQ ID NO: 2031220 - RNA, 19 nt, Artificial Sequence
  Description of Artificial Sequence: Synthetic oligonucleotide
agcuauucgaauaagcuca

SEQ ID NO: 2031221 - RNA, 19 nt, Artificial Sequence
  Description of Artificial Sequence: Synthetic oligonucleotide
aucuugacuauccaucucu

SEQ ID NO: 2031222 - RNA, 19 nt, Artificial Sequence
  Description of Artificial Sequence: Synthetic oligonucleotide
uuguuacuacuccaggagc

SEQ ID NO: 2031223 - RNA, 19 nt, Artificial Sequence
  Description of Artificial Sequence: Synthetic oligonucleotide
aggagguucuguuuuaaug

SEQ ID NO: 2031224 - RNA, 19 nt, Artificial Sequence
  Description of Artificial Sequence: Synthetic oligonucleotide
cucauuguuacuacuccag

SEQ ID NO: 2031225 - RNA, 19 nt, Artificial Sequence
  Description of Artificial Sequence: Synthetic oligonucleotide
caugggaggggcuugauuc

SEQ ID NO: 2031226 - RNA, 19 nt, Artificial Sequence
  Description of Artificial Sequence: Synthetic oligonucleotide
cucacuguuacuaggagca

SEQ ID NO: 2031227 - RNA, 19 nt, Artificial Sequence
  Description of Artificial Sequence: Synthetic oligonucleotide
aaaaguuuugccagguaga

SEQ ID NO: 2031228 - RNA, 19 nt, Artificial Sequence
  Description of Artificial Sequence: Synthetic oligonucleotide
ucugccacacaacuaucag

SEQ ID NO: 2031229 - RNA, 19 nt, Artificial Sequence
  Description of Artificial Sequence: Synthetic oligonucleotide
auaguuuucuucauaauau

SEQ ID NO: 2031230 - RNA, 19 nt, Artificial Sequence
  Description of Artificial Sequence: Synthetic oligonucleotide
accucaguuguguuagucg

SEQ ID NO: 2031231 - RNA, 19 nt, Artificial Sequence
  Description of Artificial Sequence: Synthetic oligonucleotide
uucccugaaaggcaguuac

SEQ ID NO: 2031232 - RNA, 19 nt, Artificial Sequence
  Description of Artificial Sequence: Synthetic oligonucleotide
ucuguuuuaauggaacuau

SEQ ID NO: 2031233 - RNA, 19 nt, Artificial Sequence
  Description of Artificial Sequence: Synthetic oligonucleotide
ucuucauaauauuguagaa

SEQ ID NO: 2031234 - RNA, 19 nt, Artificial Sequence
  Description of Artificial Sequence: Synthetic oligonucleotide
uacuccaggagcuauucga

SEQ ID NO: 2031235 - RNA, 19 nt, Artificial Sequence
  Description of Artificial Sequence: Synthetic oligonucleotide
ugagaaagaucagauggug

SEQ ID NO: 2031236 - RNA, 19 nt, Artificial Sequence
  Description of Artificial Sequence: Synthetic oligonucleotide
uguugcuaaaagacacaag

SEQ ID NO: 2031237 - RNA, 19 nt, Artificial Sequence
  Description of Artificial Sequence: Synthetic oligonucleotide
agcaucuugacuauccauc

SEQ ID NO: 2031238 - RNA, 19 nt, Artificial Sequence
  Description of Artificial Sequence: Synthetic oligonucleotide
auaagcucacuguuacuag

SEQ ID NO: 2031239 - RNA, 19 nt, Artificial Sequence
  Description of Artificial Sequence: Synthetic oligonucleotide
uuaauggaacuauuacuaa

SEQ ID NO: 2031240 - RNA, 19 nt, Artificial Sequence
  Description of Artificial Sequence: Synthetic oligonucleotide
acuaccuaguuuuaauuaa

SEQ ID NO: 2031241 - RNA, 19 nt, Artificial Sequence
  Description of Artificial Sequence: Synthetic oligonucleotide
cuaagagauuauauuaaca

SEQ ID NO: 2031242 - RNA, 19 nt, Artificial Sequence
  Description of Artificial Sequence: Synthetic oligonucleotide
gauucccuacuucuuguag

SEQ ID NO: 2031243 - RNA, 19 nt, Artificial Sequence
  Description of Artificial Sequence: Synthetic oligonucleotide
ucucucauuguuacuacuc

SEQ ID NO: 2031244 - RNA, 19 nt, Artificial Sequence
  Description of Artificial Sequence: Synthetic oligonucleotide
uaucaguuguuucaguauu

SEQ ID NO: 2031245 - RNA, 19 nt, Artificial Sequence
  Description of Artificial Sequence: Synthetic oligonucleotide
cauuaauguugcuaaaaga

SEQ ID NO: 2031246 - RNA, 19 nt, Artificial Sequence
  Description of Artificial Sequence: Synthetic oligonucleotide
auagaagaaaccauuuccu

SEQ ID NO: 2031247 - RNA, 19 nt, Artificial Sequence
  Description of Artificial Sequence: Synthetic oligonucleotide
ugaaaggcaguuacauugu

SEQ ID NO: 2031248 - RNA, 19 nt, Artificial Sequence
  Description of Artificial Sequence: Synthetic oligonucleotide
gaaaagauucaggcaagcc

SEQ ID NO: 2031249 - RNA, 19 nt, Artificial Sequence
  Description of Artificial Sequence: Synthetic oligonucleotide
gagcuauucgaauaagcuc

SEQ ID NO: 2031250 - RNA, 19 nt, Artificial Sequence
  Description of Artificial Sequence: Synthetic oligonucleotide
gaacuauuacuaaaaucug

SEQ ID NO: 2031251 - RNA, 19 nt, Artificial Sequence
  Description of Artificial Sequence: Synthetic oligonucleotide
cucacaacuucuacuuucc

SEQ ID NO: 2031252 - RNA, 19 nt, Artificial Sequence
  Description of Artificial Sequence: Synthetic oligonucleotide
aaauucuccgugccaccag

SEQ ID NO: 2031253 - RNA, 19 nt, Artificial Sequence
  Description of Artificial Sequence: Synthetic oligonucleotide
ugcucuaagagauuauauu

SEQ ID NO: 2031254 - RNA, 19 nt, Artificial Sequence
  Description of Artificial Sequence: Synthetic oligonucleotide
cuaccuaguuuuaauuaac

SEQ ID NO: 2031255 - RNA, 19 nt, Artificial Sequence
  Description of Artificial Sequence: Synthetic oligonucleotide
aagacucccgggcucuccg

SEQ ID NO: 2031256 - RNA, 19 nt, Artificial Sequence
  Description of Artificial Sequence: Synthetic oligonucleotide
gguuacuggaugcaguucc

SEQ ID NO: 2031257 - RNA, 19 nt, Artificial Sequence
  Description of Artificial Sequence: Synthetic oligonucleotide
aggagcuauucgaauaagc

SEQ ID NO: 2031258 - RNA, 19 nt, Artificial Sequence
  Description of Artificial Sequence: Synthetic oligonucleotide
auugugaaguugcucagau

SEQ ID NO: 2031259 - RNA, 19 nt, Artificial Sequence
  Description of Artificial Sequence: Synthetic oligonucleotide
cuagagaaugccccuuucc

SEQ ID NO: 2031260 - RNA, 19 nt, Artificial Sequence
  Description of Artificial Sequence: Synthetic oligonucleotide
auuaacccaugggaggggc

SEQ ID NO: 2031261 - RNA, 19 nt, Artificial Sequence
  Description of Artificial Sequence: Synthetic oligonucleotide
acuaucaguuguuucagua

SEQ ID NO: 2031262 - RNA, 19 nt, Artificial Sequence
  Description of Artificial Sequence: Synthetic oligonucleotide
uguguggguuacuggaugc

SEQ ID NO: 2031263 - RNA, 19 nt, Artificial Sequence
  Description of Artificial Sequence: Synthetic oligonucleotide
uacaccacccuguuggaac

SEQ ID NO: 2031264 - RNA, 19 nt, Artificial Sequence
  Description of Artificial Sequence: Synthetic oligonucleotide
uuguagaauacaccacccu

SEQ ID NO: 2031265 - RNA, 19 nt, Artificial Sequence
  Description of Artificial Sequence: Synthetic oligonucleotide
aauuaacccaugggagggg

SEQ ID NO: 2031266 - RNA, 19 nt, Artificial Sequence
  Description of Artificial Sequence: Synthetic oligonucleotide
ucagccaugcccauaguuu

SEQ ID NO: 2031267 - RNA, 19 nt, Artificial Sequence
  Description of Artificial Sequence: Synthetic oligonucleotide
aaaguuuugccagguagau

SEQ ID NO: 2031268 - RNA, 19 nt, Artificial Sequence
  Description of Artificial Sequence: Synthetic oligonucleotide
ugacuuacagccucuuuaa

SEQ ID NO: 2031269 - RNA, 19 nt, Artificial Sequence
  Description of Artificial Sequence: Synthetic oligonucleotide
aagugcuuguccauugaag

SEQ ID NO: 2031270 - RNA, 19 nt, Artificial Sequence
  Description of Artificial Sequence: Synthetic oligonucleotide
gacuauccaucucuucuag

SEQ ID NO: 2031271 - RNA, 19 nt, Artificial Sequence
  Description of Artificial Sequence: Synthetic oligonucleotide
aguuguguuagucgucuca

SEQ ID NO: 2031272 - RNA, 19 nt, Artificial Sequence
  Description of Artificial Sequence: Synthetic oligonucleotide
ugaaugcucuaagagauua

SEQ ID NO: 2031273 - RNA, 19 nt, Artificial Sequence
  Description of Artificial Sequence: Synthetic oligonucleotide
augggaggggcuugauucc

SEQ ID NO: 2031274 - RNA, 19 nt, Artificial Sequence
  Description of Artificial Sequence: Synthetic oligonucleotide
aauguugcuaaaagacaca

SEQ ID NO: 2031275 - RNA, 19 nt, Artificial Sequence
  Description of Artificial Sequence: Synthetic oligonucleotide
cuggaugcaguuccuagag

SEQ ID NO: 2031276 - RNA, 19 nt, Artificial Sequence
  Description of Artificial Sequence: Synthetic oligonucleotide
uccuuugagaaagaucaga

SEQ ID NO: 2031277 - RNA, 19 nt, Artificial Sequence
  Description of Artificial Sequence: Synthetic oligonucleotide
ucgaauaagcucacuguua

SEQ ID NO: 2031278 - RNA, 19 nt, Artificial Sequence
  Description of Artificial Sequence: Synthetic oligonucleotide
acuauccaucucuucuagg

SEQ ID NO: 2031279 - RNA, 19 nt, Artificial Sequence
  Description of Artificial Sequence: Synthetic oligonucleotide
aucagauggugucugcucu

SEQ ID NO: 2031280 - RNA, 19 nt, Artificial Sequence
  Description of Artificial Sequence: Synthetic oligonucleotide
ugaaguuccuuggaugaca

SEQ ID NO: 2031281 - RNA, 19 nt, Artificial Sequence
  Description of Artificial Sequence: Synthetic oligonucleotide
ugaaaagauucaggcaagc

SEQ ID NO: 2031282 - RNA, 19 nt, Artificial Sequence
  Description of Artificial Sequence: Synthetic oligonucleotide
gagaacucacaacuucuac

SEQ ID NO: 2031283 - RNA, 19 nt, Artificial Sequence
  Description of Artificial Sequence: Synthetic oligonucleotide
uguaguagacucugcucga

SEQ ID NO: 2031284 - RNA, 19 nt, Artificial Sequence
  Description of Artificial Sequence: Synthetic oligonucleotide
cuuacagccucuuuaacua

SEQ ID NO: 2031285 - RNA, 19 nt, Artificial Sequence
  Description of Artificial Sequence: Synthetic oligonucleotide
agagaaugccccuuucccu

SEQ ID NO: 2031286 - RNA, 19 nt, Artificial Sequence
  Description of Artificial Sequence: Synthetic oligonucleotide
agccugaauagaagaaacc

SEQ ID NO: 2031287 - RNA, 19 nt, Artificial Sequence
  Description of Artificial Sequence: Synthetic oligonucleotide
ucaguuguguuagucgucu

SEQ ID NO: 2031288 - RNA, 19 nt, Artificial Sequence
  Description of Artificial Sequence: Synthetic oligonucleotide
caauguguggguuacugga

SEQ ID NO: 2031289 - RNA, 19 nt, Artificial Sequence
  Description of Artificial Sequence: Synthetic oligonucleotide
ucagcaucuugacuaucca

SEQ ID NO: 2031290 - RNA, 19 nt, Artificial Sequence
  Description of Artificial Sequence: Synthetic oligonucleotide
ugcagcaucgacacacaac

SEQ ID NO: 2031291 - RNA, 19 nt, Artificial Sequence
  Description of Artificial Sequence: Synthetic oligonucleotide
gaaucugccacacaacuau

SEQ ID NO: 2031292 - RNA, 19 nt, Artificial Sequence
  Description of Artificial Sequence: Synthetic oligonucleotide
ucaaauucuccgugccacc

SEQ ID NO: 2031293 - RNA, 19 nt, Artificial Sequence
  Description of Artificial Sequence: Synthetic oligonucleotide
uccagucuaucuucagaag

SEQ ID NO: 2031294 - RNA, 19 nt, Artificial Sequence
  Description of Artificial Sequence: Synthetic oligonucleotide
gaaguuccuuggaugacag

SEQ ID NO: 2031295 - RNA, 19 nt, Artificial Sequence
  Description of Artificial Sequence: Synthetic oligonucleotide
guuacuaggagcagcugug

SEQ ID NO: 2031296 - RNA, 19 nt, Artificial Sequence
  Description of Artificial Sequence: Synthetic oligonucleotide
ugggccucaaccacaucag

SEQ ID NO: 2031297 - RNA, 19 nt, Artificial Sequence
  Description of Artificial Sequence: Synthetic oligonucleotide
aucaauguguggguuacug

SEQ ID NO: 2031298 - RNA, 19 nt, Artificial Sequence
  Description of Artificial Sequence: Synthetic oligonucleotide
ucuuacagccagaguuucc

SEQ ID NO: 2031299 - RNA, 19 nt, Artificial Sequence
  Description of Artificial Sequence: Synthetic oligonucleotide
aacuaucaguuguuucagu

SEQ ID NO: 2031300 - RNA, 19 nt, Artificial Sequence
  Description of Artificial Sequence: Synthetic oligonucleotide
ugcuuguccauugaagccu

SEQ ID NO: 2031301 - RNA, 19 nt, Artificial Sequence
  Description of Artificial Sequence: Synthetic oligonucleotide
uguuggaacaugugaggaa

SEQ ID NO: 2031302 - RNA, 19 nt, Artificial Sequence
  Description of Artificial Sequence: Synthetic oligonucleotide
cucuaagagauuauauuaa

SEQ ID NO: 2031303 - RNA, 19 nt, Artificial Sequence
  Description of Artificial Sequence: Synthetic oligonucleotide
uuucgcugggccucaacca

SEQ ID NO: 2031304 - RNA, 19 nt, Artificial Sequence
  Description of Artificial Sequence: Synthetic oligonucleotide
guuguguuagucgucucag

SEQ ID NO: 2031305 - RNA, 19 nt, Artificial Sequence
  Description of Artificial Sequence: Synthetic oligonucleotide
cauuguuacuacuccagga

SEQ ID NO: 2031306 - RNA, 19 nt, Artificial Sequence
  Description of Artificial Sequence: Synthetic oligonucleotide
gagauuauauuaacauaca

SEQ ID NO: 2031307 - RNA, 19 nt, Artificial Sequence
  Description of Artificial Sequence: Synthetic oligonucleotide
caguuaugaaaagauucag

SEQ ID NO: 2031308 - RNA, 19 nt, Artificial Sequence
  Description of Artificial Sequence: Synthetic oligonucleotide
aguuccuuggaugacaguu

SEQ ID NO: 2031309 - RNA, 19 nt, Artificial Sequence
  Description of Artificial Sequence: Synthetic oligonucleotide
ucgacacacaacuccaguc

SEQ ID NO: 2031310 - RNA, 19 nt, Artificial Sequence
  Description of Artificial Sequence: Synthetic oligonucleotide
gaaaggcaguuacauugug

SEQ ID NO: 2031311 - RNA, 19 nt, Artificial Sequence
  Description of Artificial Sequence: Synthetic oligonucleotide
uguccauugaagccugaau

SEQ ID NO: 2031312 - RNA, 19 nt, Artificial Sequence
  Description of Artificial Sequence: Synthetic oligonucleotide
ccauuaauguugcuaaaag

SEQ ID NO: 2031313 - RNA, 19 nt, Artificial Sequence
  Description of Artificial Sequence: Synthetic oligonucleotide
acuacuccaggagcuauuc

SEQ ID NO: 2031314 - RNA, 19 nt, Artificial Sequence
  Description of Artificial Sequence: Synthetic oligonucleotide
uccaggagcuauucgaaua

SEQ ID NO: 2031315 - RNA, 19 nt, Artificial Sequence
  Description of Artificial Sequence: Synthetic oligonucleotide
uucuacuacuccaccacua

SEQ ID NO: 2031316 - RNA, 19 nt, Artificial Sequence
  Description of Artificial Sequence: Synthetic oligonucleotide
uguggguuacuggaugcag

SEQ ID NO: 2031317 - RNA, 19 nt, Artificial Sequence
  Description of Artificial Sequence: Synthetic oligonucleotide
gagguucuguuuuaaugga

SEQ ID NO: 2031318 - RNA, 19 nt, Artificial Sequence
  Description of Artificial Sequence: Synthetic oligonucleotide
acccuguuggaacauguga

SEQ ID NO: 2031319 - RNA, 19 nt, Artificial Sequence
  Description of Artificial Sequence: Synthetic oligonucleotide
uucuguuuuaauggaacua

SEQ ID NO: 2031320 - RNA, 19 nt, Artificial Sequence
  Description of Artificial Sequence: Synthetic oligonucleotide
cagucuaucuucagaagca

SEQ ID NO: 2031321 - RNA, 19 nt, Artificial Sequence
  Description of Artificial Sequence: Synthetic oligonucleotide
cuuugcauaagaccauaca

SEQ ID NO: 2031322 - RNA, 19 nt, Artificial Sequence
  Description of Artificial Sequence: Synthetic oligonucleotide
cagucugaagacucccggg

SEQ ID NO: 2031323 - RNA, 19 nt, Artificial Sequence
  Description of Artificial Sequence: Synthetic oligonucleotide
cacaacuaucaguuguuuc

SEQ ID NO: 2031324 - RNA, 19 nt, Artificial Sequence
  Description of Artificial Sequence: Synthetic oligonucleotide
ucucccauuaauguugcua

SEQ ID NO: 2031325 - RNA, 19 nt, Artificial Sequence
  Description of Artificial Sequence: Synthetic oligonucleotide
cuacuacuccaccacuacc

SEQ ID NO: 2031326 - RNA, 19 nt, Artificial Sequence
  Description of Artificial Sequence: Synthetic oligonucleotide
augaaaagauucaggcaag

SEQ ID NO: 2031327 - RNA, 19 nt, Artificial Sequence
  Description of Artificial Sequence: Synthetic oligonucleotide
accacuaccuaguuuuaau

SEQ ID NO: 2031328 - RNA, 19 nt, Artificial Sequence
  Description of Artificial Sequence: Synthetic oligonucleotide
agaauacaccacccuguug

SEQ ID NO: 2031329 - RNA, 19 nt, Artificial Sequence
  Description of Artificial Sequence: Synthetic oligonucleotide
ugcaauuguuugccaucag

SEQ ID NO: 2031330 - RNA, 19 nt, Artificial Sequence
  Description of Artificial Sequence: Synthetic oligonucleotide
uggaugacaguuugccagu

SEQ ID NO: 2031331 - RNA, 19 nt, Artificial Sequence
  Description of Artificial Sequence: Synthetic oligonucleotide
aggaucaagcugccugccg

SEQ ID NO: 2031332 - RNA, 19 nt, Artificial Sequence
  Description of Artificial Sequence: Synthetic oligonucleotide
gcaauuguuugccaucagc

SEQ ID NO: 2031333 - RNA, 19 nt, Artificial Sequence
  Description of Artificial Sequence: Synthetic oligonucleotide
ggaaauguccugcagcauc

SEQ ID NO: 2031334 - RNA, 19 nt, Artificial Sequence
  Description of Artificial Sequence: Synthetic oligonucleotide
uacagccucuuuaacuaaa

SEQ ID NO: 2031335 - RNA, 19 nt, Artificial Sequence
  Description of Artificial Sequence: Synthetic oligonucleotide
aaucugccacacaacuauc

SEQ ID NO: 2031336 - RNA, 19 nt, Artificial Sequence
  Description of Artificial Sequence: Synthetic oligonucleotide
ucuccgugccaccaguuau

SEQ ID NO: 2031337 - RNA, 19 nt, Artificial Sequence
  Description of Artificial Sequence: Synthetic oligonucleotide
aucccgcaagugcuugucc

SEQ ID NO: 2031338 - RNA, 19 nt, Artificial Sequence
  Description of Artificial Sequence: Synthetic oligonucleotide
agcucacuguuacuaggag

SEQ ID NO: 2031339 - RNA, 19 nt, Artificial Sequence
  Description of Artificial Sequence: Synthetic oligonucleotide
cuucagaagcauuaauaaa

SEQ ID NO: 2031340 - RNA, 19 nt, Artificial Sequence
  Description of Artificial Sequence: Synthetic oligonucleotide
gcucuaagagauuauauua

SEQ ID NO: 2031341 - RNA, 19 nt, Artificial Sequence
  Description of Artificial Sequence: Synthetic oligonucleotide
augccccuuucccugaaag

SEQ ID NO: 2031342 - RNA, 19 nt, Artificial Sequence
  Description of Artificial Sequence: Synthetic oligonucleotide
caguuccuagagaaugccc

SEQ ID NO: 2031343 - RNA, 19 nt, Artificial Sequence
  Description of Artificial Sequence: Synthetic oligonucleotide
aucgacacacaacuccagu

SEQ ID NO: 2031344 - RNA, 19 nt, Artificial Sequence
  Description of Artificial Sequence: Synthetic oligonucleotide
uaguagacucugcucgaac

SEQ ID NO: 2031345 - RNA, 19 nt, Artificial Sequence
  Description of Artificial Sequence: Synthetic oligonucleotide
gaagccugaauagaagaaa

SEQ ID NO: 2031346 - RNA, 19 nt, Artificial Sequence
  Description of Artificial Sequence: Synthetic oligonucleotide
uagucgucucagcaucuug

SEQ ID NO: 2031347 - RNA, 19 nt, Artificial Sequence
  Description of Artificial Sequence: Synthetic oligonucleotide
aggaccaauggggaaaugu

SEQ ID NO: 2031348 - RNA, 19 nt, Artificial Sequence
  Description of Artificial Sequence: Synthetic oligonucleotide
gaccauacaucuucuccca

SEQ ID NO: 2031349 - RNA, 19 nt, Artificial Sequence
  Description of Artificial Sequence: Synthetic oligonucleotide
gcaaaugcugcucccagug

SEQ ID NO: 2031350 - RNA, 19 nt, Artificial Sequence
  Description of Artificial Sequence: Synthetic oligonucleotide
agauucaggcaagccaguc

SEQ ID NO: 2031351 - RNA, 19 nt, Artificial Sequence
  Description of Artificial Sequence: Synthetic oligonucleotide
uuguguuagucgucucagc

SEQ ID NO: 2031352 - RNA, 19 nt, Artificial Sequence
  Description of Artificial Sequence: Synthetic oligonucleotide
uuacauugugaaguugcuc

SEQ ID NO: 2031353 - RNA, 19 nt, Artificial Sequence
  Description of Artificial Sequence: Synthetic oligonucleotide
cucgaaccugacuuacagc

SEQ ID NO: 2031354 - RNA, 19 nt, Artificial Sequence
  Description of Artificial Sequence: Synthetic oligonucleotide
guauuaugcuuuucuuaca

SEQ ID NO: 2031355 - RNA, 19 nt, Artificial Sequence
  Description of Artificial Sequence: Synthetic oligonucleotide
cagugaaucugccacacaa

SEQ ID NO: 2031356 - RNA, 19 nt, Artificial Sequence
  Description of Artificial Sequence: Synthetic oligonucleotide
ugccgucucucauuguuac

SEQ ID NO: 2031357 - RNA, 19 nt, Artificial Sequence
  Description of Artificial Sequence: Synthetic oligonucleotide
cugggccucaaccacauca

SEQ ID NO: 2031358 - RNA, 19 nt, Artificial Sequence
  Description of Artificial Sequence: Synthetic oligonucleotide
ggaugcaguuccuagagaa

SEQ ID NO: 2031359 - RNA, 19 nt, Artificial Sequence
  Description of Artificial Sequence: Synthetic oligonucleotide
aucuucucccauuaauguu

SEQ ID NO: 2031360 - RNA, 19 nt, Artificial Sequence
  Description of Artificial Sequence: Synthetic oligonucleotide
uacuuugaucccgcaagug

SEQ ID NO: 2031361 - RNA, 19 nt, Artificial Sequence
  Description of Artificial Sequence: Synthetic oligonucleotide
cuagguuccuccauuggaa

SEQ ID NO: 2031362 - RNA, 19 nt, Artificial Sequence
  Description of Artificial Sequence: Synthetic oligonucleotide
cugacuuacagccucuuua

SEQ ID NO: 2031363 - RNA, 19 nt, Artificial Sequence
  Description of Artificial Sequence: Synthetic oligonucleotide
ucccgcaagugcuugucca

SEQ ID NO: 2031364 - RNA, 19 nt, Artificial Sequence
  Description of Artificial Sequence: Synthetic oligonucleotide
auguugcuaaaagacacaa

SEQ ID NO: 2031365 - RNA, 19 nt, Artificial Sequence
  Description of Artificial Sequence: Synthetic oligonucleotide
aggcaguuacauugugaag

SEQ ID NO: 2031366 - RNA, 19 nt, Artificial Sequence
  Description of Artificial Sequence: Synthetic oligonucleotide
gcucgaaccugacuuacag

SEQ ID NO: 2031367 - RNA, 19 nt, Artificial Sequence
  Description of Artificial Sequence: Synthetic oligonucleotide
acacaacuccagucuaucu

SEQ ID NO: 2031368 - RNA, 19 nt, Artificial Sequence
  Description of Artificial Sequence: Synthetic oligonucleotide
uggguuacuggaugcaguu

SEQ ID NO: 2031369 - RNA, 19 nt, Artificial Sequence
  Description of Artificial Sequence: Synthetic oligonucleotide
ucuugacuauccaucucuu

SEQ ID NO: 2031370 - RNA, 19 nt, Artificial Sequence
  Description of Artificial Sequence: Synthetic oligonucleotide
acacaggagguucuguuuu

SEQ ID NO: 2031371 - RNA, 19 nt, Artificial Sequence
  Description of Artificial Sequence: Synthetic oligonucleotide
gguucuguuuuaauggaac

SEQ ID NO: 2031372 - RNA, 19 nt, Artificial Sequence
  Description of Artificial Sequence: Synthetic oligonucleotide
cucuccgagaacucacaac

SEQ ID NO: 2031373 - RNA, 19 nt, Artificial Sequence
  Description of Artificial Sequence: Synthetic oligonucleotide
guacauuucuuugucagcu

SEQ ID NO: 2031374 - RNA, 19 nt, Artificial Sequence
  Description of Artificial Sequence: Synthetic oligonucleotide
uggaugcaguuccuagaga

SEQ ID NO: 2031375 - RNA, 19 nt, Artificial Sequence
  Description of Artificial Sequence: Synthetic oligonucleotide
gugaaucugccacacaacu

SEQ ID NO: 2031376 - RNA, 19 nt, Artificial Sequence
  Description of Artificial Sequence: Synthetic oligonucleotide
aggggcuugauucccuacu

SEQ ID NO: 2031377 - RNA, 19 nt, Artificial Sequence
  Description of Artificial Sequence: Synthetic oligonucleotide
uagacucugcucgaaccug

SEQ ID NO: 2031378 - RNA, 19 nt, Artificial Sequence
  Description of Artificial Sequence: Synthetic oligonucleotide
gaagucccuuugcauaaga

SEQ ID NO: 2031379 - RNA, 19 nt, Artificial Sequence
  Description of Artificial Sequence: Synthetic oligonucleotide
agaaaccauuuccugcaau

SEQ ID NO: 2031380 - RNA, 19 nt, Artificial Sequence
  Description of Artificial Sequence: Synthetic oligonucleotide
uuacagccucuuuaacuaa

SEQ ID NO: 2031381 - RNA, 19 nt, Artificial Sequence
  Description of Artificial Sequence: Synthetic oligonucleotide
uuugaucccgcaagugcuu

SEQ ID NO: 2031382 - RNA, 19 nt, Artificial Sequence
  Description of Artificial Sequence: Synthetic oligonucleotide
cauacaucuucucccauua

SEQ ID NO: 2031383 - RNA, 19 nt, Artificial Sequence
  Description of Artificial Sequence: Synthetic oligonucleotide
cuacuccaggagcuauucg

SEQ ID NO: 2031384 - RNA, 19 nt, Artificial Sequence
  Description of Artificial Sequence: Synthetic oligonucleotide
uuaacccaugggaggggcu

SEQ ID NO: 2031385 - RNA, 19 nt, Artificial Sequence
  Description of Artificial Sequence: Synthetic oligonucleotide
cacuaccuaguuuuaauua

SEQ ID NO: 2031386 - RNA, 19 nt, Artificial Sequence
  Description of Artificial Sequence: Synthetic oligonucleotide
gcagcaucgacacacaacu

SEQ ID NO: 2031387 - RNA, 19 nt, Artificial Sequence
  Description of Artificial Sequence: Synthetic oligonucleotide
auaagaccauacaucuucu

SEQ ID NO: 2031388 - RNA, 19 nt, Artificial Sequence
  Description of Artificial Sequence: Synthetic oligonucleotide
ccaguuaugaaaagauuca

SEQ ID NO: 2031389 - RNA, 19 nt, Artificial Sequence
  Description of Artificial Sequence: Synthetic oligonucleotide
ucuguacuuugaucccgca

SEQ ID NO: 2031390 - RNA, 19 nt, Artificial Sequence
  Description of Artificial Sequence: Synthetic oligonucleotide
cuuggaugacaguuugcca

SEQ ID NO: 2031391 - RNA, 19 nt, Artificial Sequence
  Description of Artificial Sequence: Synthetic oligonucleotide
gcucacuguuacuaggagc

SEQ ID NO: 2031392 - RNA, 19 nt, Artificial Sequence
  Description of Artificial Sequence: Synthetic oligonucleotide
cugugaacacaggagguuc

SEQ ID NO: 2031393 - RNA, 19 nt, Artificial Sequence
  Description of Artificial Sequence: Synthetic oligonucleotide
aguuucccuagcucuggga

SEQ ID NO: 2031394 - RNA, 19 nt, Artificial Sequence
  Description of Artificial Sequence: Synthetic oligonucleotide
ucugcucgaaccugacuua

SEQ ID NO: 2031395 - RNA, 19 nt, Artificial Sequence
  Description of Artificial Sequence: Synthetic oligonucleotide
gauucaggcaagccagucu

SEQ ID NO: 2031396 - RNA, 19 nt, Artificial Sequence
  Description of Artificial Sequence: Synthetic oligonucleotide
ggggaaauguccugcagca

SEQ ID NO: 2031397 - RNA, 19 nt, Artificial Sequence
  Description of Artificial Sequence: Synthetic oligonucleotide
uucuuacagccagaguuuc

SEQ ID NO: 2031398 - RNA, 19 nt, Artificial Sequence
  Description of Artificial Sequence: Synthetic oligonucleotide
uuacagccagaguuucccu

SEQ ID NO: 2031399 - RNA, 19 nt, Artificial Sequence
  Description of Artificial Sequence: Synthetic oligonucleotide
ugcucgaaccugacuuaca

SEQ ID NO: 2031400 - RNA, 19 nt, Artificial Sequence
  Description of Artificial Sequence: Synthetic oligonucleotide
cgaauaagcucacuguuac

SEQ ID NO: 2031401 - RNA, 19 nt, Artificial Sequence
  Description of Artificial Sequence: Synthetic oligonucleotide
uugaaugcucuaagagauu

SEQ ID NO: 2031402 - RNA, 19 nt, Artificial Sequence
  Description of Artificial Sequence: Synthetic oligonucleotide
ccuacuucuuguaguagac

SEQ ID NO: 2031403 - RNA, 19 nt, Artificial Sequence
  Description of Artificial Sequence: Synthetic oligonucleotide
acaccacccuguuggaaca

SEQ ID NO: 2031404 - RNA, 19 nt, Artificial Sequence
  Description of Artificial Sequence: Synthetic oligonucleotide
cucaguuguguuagucguc

SEQ ID NO: 2031405 - RNA, 19 nt, Artificial Sequence
  Description of Artificial Sequence: Synthetic oligonucleotide
auguccugcagcaucgaca

SEQ ID NO: 2031406 - RNA, 19 nt, Artificial Sequence
  Description of Artificial Sequence: Synthetic oligonucleotide
guagaauacaccacccugu

SEQ ID NO: 2031407 - RNA, 19 nt, Artificial Sequence
  Description of Artificial Sequence: Synthetic oligonucleotide
uccuagagaaugccccuuu

SEQ ID NO: 2031408 - RNA, 19 nt, Artificial Sequence
  Description of Artificial Sequence: Synthetic oligonucleotide
ugauucccuacuucuugua

SEQ ID NO: 2031409 - RNA, 19 nt, Artificial Sequence
  Description of Artificial Sequence: Synthetic oligonucleotide
ucccuuugcauaagaccau

SEQ ID NO: 2031410 - RNA, 19 nt, Artificial Sequence
  Description of Artificial Sequence: Synthetic oligonucleotide
aacaugugaggaagucccu

SEQ ID NO: 2031411 - RNA, 19 nt, Artificial Sequence
  Description of Artificial Sequence: Synthetic oligonucleotide
uugaucccgcaagugcuug

SEQ ID NO: 2031412 - RNA, 19 nt, Artificial Sequence
  Description of Artificial Sequence: Synthetic oligonucleotide
cuccgugccaccaguuaug

SEQ ID NO: 2031413 - RNA, 19 nt, Artificial Sequence
  Description of Artificial Sequence: Synthetic oligonucleotide
uuacuacuccaggagcuau

SEQ ID NO: 2031414 - RNA, 19 nt, Artificial Sequence
  Description of Artificial Sequence: Synthetic oligonucleotide
uucuccgugccaccaguua

SEQ ID NO: 2031415 - RNA, 19 nt, Artificial Sequence
  Description of Artificial Sequence: Synthetic oligonucleotide
caucuugacuauccaucuc

SEQ ID NO: 2031416 - RNA, 19 nt, Artificial Sequence
  Description of Artificial Sequence: Synthetic oligonucleotide
ucccuacuucuuguaguag

SEQ ID NO: 2031417 - RNA, 19 nt, Artificial Sequence
  Description of Artificial Sequence: Synthetic oligonucleotide
gacucccgggcucuccgag

SEQ ID NO: 2031418 - RNA, 19 nt, Artificial Sequence
  Description of Artificial Sequence: Synthetic oligonucleotide
uuuggccuuguggcaaaug

SEQ ID NO: 2031419 - RNA, 19 nt, Artificial Sequence
  Description of Artificial Sequence: Synthetic oligonucleotide
ccagucugaagacucccgg

SEQ ID NO: 2031420 - RNA, 19 nt, Artificial Sequence
  Description of Artificial Sequence: Synthetic oligonucleotide
caguauucaaauucuccgu

SEQ ID NO: 2031421 - RNA, 19 nt, Artificial Sequence
  Description of Artificial Sequence: Synthetic oligonucleotide
cuguuggaacaugugagga

SEQ ID NO: 2031422 - RNA, 19 nt, Artificial Sequence
  Description of Artificial Sequence: Synthetic oligonucleotide
gagaaagaucagauggugu

SEQ ID NO: 2031423 - RNA, 19 nt, Artificial Sequence
  Description of Artificial Sequence: Synthetic oligonucleotide
gugcaauuguuugccauca

SEQ ID NO: 2031424 - RNA, 19 nt, Artificial Sequence
  Description of Artificial Sequence: Synthetic oligonucleotide
aaugccccuuucccugaaa

SEQ ID NO: 2031425 - RNA, 19 nt, Artificial Sequence
  Description of Artificial Sequence: Synthetic oligonucleotide
agcugugaacacaggaggu

SEQ ID NO: 2031426 - RNA, 19 nt, Artificial Sequence
  Description of Artificial Sequence: Synthetic oligonucleotide
aaauguccugcagcaucga

SEQ ID NO: 2031427 - RNA, 19 nt, Artificial Sequence
  Description of Artificial Sequence: Synthetic oligonucleotide
guagacucugcucgaaccu

SEQ ID NO: 2031428 - RNA, 19 nt, Artificial Sequence
  Description of Artificial Sequence: Synthetic oligonucleotide
cacacaacuccagucuauc

SEQ ID NO: 2031429 - RNA, 19 nt, Artificial Sequence
  Description of Artificial Sequence: Synthetic oligonucleotide
cagccucuuuaacuaaauc

SEQ ID NO: 2031430 - RNA, 19 nt, Artificial Sequence
  Description of Artificial Sequence: Synthetic oligonucleotide
ggagcuauucgaauaagcu

SEQ ID NO: 2031431 - RNA, 19 nt, Artificial Sequence
  Description of Artificial Sequence: Synthetic oligonucleotide
gccccuuucccugaaaggc

SEQ ID NO: 2031432 - RNA, 19 nt, Artificial Sequence
  Description of Artificial Sequence: Synthetic oligonucleotide
gaauaagcucacuguuacu

SEQ ID NO: 2031433 - RNA, 19 nt, Artificial Sequence
  Description of Artificial Sequence: Synthetic oligonucleotide
uuguccauugaagccugaa

SEQ ID NO: 2031434 - RNA, 19 nt, Artificial Sequence
  Description of Artificial Sequence: Synthetic oligonucleotide
cuaucaguuguuucaguau

SEQ ID NO: 2031435 - RNA, 19 nt, Artificial Sequence
  Description of Artificial Sequence: Synthetic oligonucleotide
auacaucuucucccauuaa

SEQ ID NO: 2031436 - RNA, 19 nt, Artificial Sequence
  Description of Artificial Sequence: Synthetic oligonucleotide
uugugaaguugcucagauu

SEQ ID NO: 2031437 - RNA, 19 nt, Artificial Sequence
  Description of Artificial Sequence: Synthetic oligonucleotide
uccgugccaccaguuauga

SEQ ID NO: 2031438 - RNA, 19 nt, Artificial Sequence
  Description of Artificial Sequence: Synthetic oligonucleotide
ugaucccgcaagugcuugu

SEQ ID NO: 2031439 - RNA, 19 nt, Artificial Sequence
  Description of Artificial Sequence: Synthetic oligonucleotide
gcucuguacuuugaucccg

SEQ ID NO: 2031440 - RNA, 19 nt, Artificial Sequence
  Description of Artificial Sequence: Synthetic oligonucleotide
agguuccuccauuggaauu

SEQ ID NO: 2031441 - RNA, 19 nt, Artificial Sequence
  Description of Artificial Sequence: Synthetic oligonucleotide
gaagacucccgggcucucc

SEQ ID NO: 2031442 - RNA, 19 nt, Artificial Sequence
  Description of Artificial Sequence: Synthetic oligonucleotide
caaauucuccgugccacca

SEQ ID NO: 2031443 - RNA, 19 nt, Artificial Sequence
  Description of Artificial Sequence: Synthetic oligonucleotide
caggagcuauucgaauaag

SEQ ID NO: 2031444 - RNA, 19 nt, Artificial Sequence
  Description of Artificial Sequence: Synthetic oligonucleotide
uuucccugaaaggcaguua

SEQ ID NO: 2031445 - RNA, 19 nt, Artificial Sequence
  Description of Artificial Sequence: Synthetic oligonucleotide
ggaccaauggggaaauguc

SEQ ID NO: 2031446 - RNA, 19 nt, Artificial Sequence
  Description of Artificial Sequence: Synthetic oligonucleotide
aaccugacuuacagccucu

SEQ ID NO: 2031447 - RNA, 19 nt, Artificial Sequence
  Description of Artificial Sequence: Synthetic oligonucleotide
uaacccaugggaggggcuu

SEQ ID NO: 2031448 - RNA, 19 nt, Artificial Sequence
  Description of Artificial Sequence: Synthetic oligonucleotide
agccaugcccauaguuuuc

SEQ ID NO: 2031449 - RNA, 19 nt, Artificial Sequence
  Description of Artificial Sequence: Synthetic oligonucleotide
uuacuggaugcaguuccua

SEQ ID NO: 2031450 - RNA, 19 nt, Artificial Sequence
  Description of Artificial Sequence: Synthetic oligonucleotide
accauacaucuucucccau

SEQ ID NO: 2031451 - RNA, 19 nt, Artificial Sequence
  Description of Artificial Sequence: Synthetic oligonucleotide
gaucccgcaagugcuuguc

SEQ ID NO: 2031452 - RNA, 19 nt, Artificial Sequence
  Description of Artificial Sequence: Synthetic oligonucleotide
ggcuugauucccuacuucu

SEQ ID NO: 2031453 - RNA, 19 nt, Artificial Sequence
  Description of Artificial Sequence: Synthetic oligonucleotide
caagugcuuguccauugaa

SEQ ID NO: 2031454 - RNA, 19 nt, Artificial Sequence
  Description of Artificial Sequence: Synthetic oligonucleotide
guacuuugaucccgcaagu

SEQ ID NO: 2031455 - RNA, 19 nt, Artificial Sequence
  Description of Artificial Sequence: Synthetic oligonucleotide
caguuguuucaguauucaa

SEQ ID NO: 2031456 - RNA, 19 nt, Artificial Sequence
  Description of Artificial Sequence: Synthetic oligonucleotide
ccuuugcauaagaccauac

SEQ ID NO: 2031457 - RNA, 19 nt, Artificial Sequence
  Description of Artificial Sequence: Synthetic oligonucleotide
cugcucgaaccugacuuac

SEQ ID NO: 2031458 - RNA, 19 nt, Artificial Sequence
  Description of Artificial Sequence: Synthetic oligonucleotide
guuccuagagaaugccccu

SEQ ID NO: 2031459 - RNA, 19 nt, Artificial Sequence
  Description of Artificial Sequence: Synthetic oligonucleotide
ugggaucaauguguggguu

SEQ ID NO: 2031460 - RNA, 19 nt, Artificial Sequence
  Description of Artificial Sequence: Synthetic oligonucleotide
agacucugcucgaaccuga

SEQ ID NO: 2031461 - RNA, 19 nt, Artificial Sequence
  Description of Artificial Sequence: Synthetic oligonucleotide
acagccucuuuaacuaaau

SEQ ID NO: 2031462 - RNA, 19 nt, Artificial Sequence
  Description of Artificial Sequence: Synthetic oligonucleotide
ccacaucaggaucaagcug

SEQ ID NO: 2031463 - RNA, 19 nt, Artificial Sequence
  Description of Artificial Sequence: Synthetic oligonucleotide
acacaacuaucaguuguuu

SEQ ID NO: 2031464 - RNA, 19 nt, Artificial Sequence
  Description of Artificial Sequence: Synthetic oligonucleotide
gggccucaaccacaucagg

SEQ ID NO: 2031465 - RNA, 19 nt, Artificial Sequence
  Description of Artificial Sequence: Synthetic oligonucleotide
acaggagguucuguuuuaa

SEQ ID NO: 2031466 - RNA, 19 nt, Artificial Sequence
  Description of Artificial Sequence: Synthetic oligonucleotide
uucucccauuaauguugcu

SEQ ID NO: 2031467 - RNA, 19 nt, Artificial Sequence
  Description of Artificial Sequence: Synthetic oligonucleotide
gcaucuugacuauccaucu

SEQ ID NO: 2031468 - RNA, 19 nt, Artificial Sequence
  Description of Artificial Sequence: Synthetic oligonucleotide
uuccuagagaaugccccuu

SEQ ID NO: 2031469 - RNA, 19 nt, Artificial Sequence
  Description of Artificial Sequence: Synthetic oligonucleotide
cagcaucgacacacaacuc

SEQ ID NO: 2031470 - RNA, 19 nt, Artificial Sequence
  Description of Artificial Sequence: Synthetic oligonucleotide
guuacuacuccaggagcua

SEQ ID NO: 2031471 - RNA, 19 nt, Artificial Sequence
  Description of Artificial Sequence: Synthetic oligonucleotide
guguuagucgucucagcau

SEQ ID NO: 2031472 - RNA, 19 nt, Artificial Sequence
  Description of Artificial Sequence: Synthetic oligonucleotide
gucucucauuguuacuacu

SEQ ID NO: 2031473 - RNA, 19 nt, Artificial Sequence
  Description of Artificial Sequence: Synthetic oligonucleotide
cccuacuucuuguaguaga

SEQ ID NO: 2031474 - RNA, 19 nt, Artificial Sequence
  Description of Artificial Sequence: Synthetic oligonucleotide
gccagaguuucccuagcuc

SEQ ID NO: 2031475 - RNA, 19 nt, Artificial Sequence
  Description of Artificial Sequence: Synthetic oligonucleotide
guggcaaaugcugcuccca

SEQ ID NO: 2031476 - RNA, 19 nt, Artificial Sequence
  Description of Artificial Sequence: Synthetic oligonucleotide
ggaucaagcugccugccgu

SEQ ID NO: 2031477 - RNA, 19 nt, Artificial Sequence
  Description of Artificial Sequence: Synthetic oligonucleotide
caguuguguuagucgucuc

SEQ ID NO: 2031478 - RNA, 19 nt, Artificial Sequence
  Description of Artificial Sequence: Synthetic oligonucleotide
cuguuacuaggagcagcug

SEQ ID NO: 2031479 - RNA, 19 nt, Artificial Sequence
  Description of Artificial Sequence: Synthetic oligonucleotide
ccagaguuucccuagcucu

SEQ ID NO: 2031480 - RNA, 19 nt, Artificial Sequence
  Description of Artificial Sequence: Synthetic oligonucleotide
ggccucaaccacaucagga

SEQ ID NO: 2031481 - RNA, 19 nt, Artificial Sequence
  Description of Artificial Sequence: Synthetic oligonucleotide
cacacaacuaucaguuguu

SEQ ID NO: 2031482 - RNA, 19 nt, Artificial Sequence
  Description of Artificial Sequence: Synthetic oligonucleotide
gaugcaguuccuagagaau

SEQ ID NO: 2031483 - RNA, 19 nt, Artificial Sequence
  Description of Artificial Sequence: Synthetic oligonucleotide
agauggugucugcucugua

SEQ ID NO: 2031484 - RNA, 19 nt, Artificial Sequence
  Description of Artificial Sequence: Synthetic oligonucleotide
auacaccacccuguuggaa

SEQ ID NO: 2031485 - RNA, 19 nt, Artificial Sequence
  Description of Artificial Sequence: Synthetic oligonucleotide
guaguagacucugcucgaa

SEQ ID NO: 2031486 - RNA, 19 nt, Artificial Sequence
  Description of Artificial Sequence: Synthetic oligonucleotide
accacccuguuggaacaug

SEQ ID NO: 2031487 - RNA, 19 nt, Artificial Sequence
  Description of Artificial Sequence: Synthetic oligonucleotide
gcuauucgaauaagcucac

SEQ ID NO: 2031488 - RNA, 19 nt, Artificial Sequence
  Description of Artificial Sequence: Synthetic oligonucleotide
gggaucaauguguggguua

SEQ ID NO: 2031489 - RNA, 19 nt, Artificial Sequence
  Description of Artificial Sequence: Synthetic oligonucleotide
ccugaauagaagaaaccau

SEQ ID NO: 2031490 - RNA, 19 nt, Artificial Sequence
  Description of Artificial Sequence: Synthetic oligonucleotide
guguggguuacuggaugca

SEQ ID NO: 2031491 - RNA, 19 nt, Artificial Sequence
  Description of Artificial Sequence: Synthetic oligonucleotide
agacucccgggcucuccga

SEQ ID NO: 2031492 - RNA, 19 nt, Artificial Sequence
  Description of Artificial Sequence: Synthetic oligonucleotide
ccuagagaaugccccuuuc

SEQ ID NO: 2031493 - RNA, 19 nt, Artificial Sequence
  Description of Artificial Sequence: Synthetic oligonucleotide
ccacacaacuaucaguugu

SEQ ID NO: 2031494 - RNA, 19 nt, Artificial Sequence
  Description of Artificial Sequence: Synthetic oligonucleotide
guuacuggaugcaguuccu

SEQ ID NO: 2031495 - RNA, 19 nt, Artificial Sequence
  Description of Artificial Sequence: Synthetic oligonucleotide
guuagucgucucagcaucu

SEQ ID NO: 2031496 - RNA, 19 nt, Artificial Sequence
  Description of Artificial Sequence: Synthetic oligonucleotide
ccucaguuguguuagucgu

SEQ ID NO: 2031497 - RNA, 19 nt, Artificial Sequence
  Description of Artificial Sequence: Synthetic oligonucleotide
ccauugaagccugaauaga

SEQ ID NO: 2031498 - RNA, 19 nt, Artificial Sequence
  Description of Artificial Sequence: Synthetic oligonucleotide
cccauuaauguugcuaaaa

SEQ ID NO: 2031499 - RNA, 19 nt, Artificial Sequence
  Description of Artificial Sequence: Synthetic oligonucleotide
cacaaggaguacauuucuu

SEQ ID NO: 2031500 - RNA, 19 nt, Artificial Sequence
  Description of Artificial Sequence: Synthetic oligonucleotide
cugccgucucucauuguua

SEQ ID NO: 2031501 - RNA, 19 nt, Artificial Sequence
  Description of Artificial Sequence: Synthetic oligonucleotide
cgcaagugcuuguccauug

SEQ ID NO: 2031502 - RNA, 19 nt, Artificial Sequence
  Description of Artificial Sequence: Synthetic oligonucleotide
cccagugaaucugccacac

SEQ ID NO: 2031503 - RNA, 19 nt, Artificial Sequence
  Description of Artificial Sequence: Synthetic oligonucleotide
cccuguauuaugcuuuucu

SEQ ID NO: 2031504 - RNA, 19 nt, Artificial Sequence
  Description of Artificial Sequence: Synthetic oligonucleotide
guggguuacuggaugcagu

SEQ ID NO: 2031505 - RNA, 19 nt, Artificial Sequence
  Description of Artificial Sequence: Synthetic oligonucleotide
cgucucucauuguuacuac

SEQ ID NO: 2031506 - RNA, 19 nt, Artificial Sequence
  Description of Artificial Sequence: Synthetic oligonucleotide
cagccaugcccauaguuuu

SEQ ID NO: 2031507 - RNA, 19 nt, Artificial Sequence
  Description of Artificial Sequence: Synthetic oligonucleotide
gucugcucuguacuuugau

SEQ ID NO: 2031508 - RNA, 19 nt, Artificial Sequence
  Description of Artificial Sequence: Synthetic oligonucleotide
ccgagaacucacaacuucu

SEQ ID NO: 2031509 - RNA, 19 nt, Artificial Sequence
  Description of Artificial Sequence: Synthetic oligonucleotide
caccacuaccuaguuuuaa

SEQ ID NO: 2031510 - RNA, 19 nt, Artificial Sequence
  Description of Artificial Sequence: Synthetic oligonucleotide
gaucaauguguggguuacu

SEQ ID NO: 2031511 - RNA, 19 nt, Artificial Sequence
  Description of Artificial Sequence: Synthetic oligonucleotide
auucuccgugccaccaguu

SEQ ID NO: 2031512 - RNA, 19 nt, Artificial Sequence
  Description of Artificial Sequence: Synthetic oligonucleotide
gggcucuccgagaacucac

SEQ ID NO: 2031513 - RNA, 19 nt, Artificial Sequence
  Description of Artificial Sequence: Synthetic oligonucleotide
accugacuuacagccucuu

SEQ ID NO: 2031514 - RNA, 19 nt, Artificial Sequence
  Description of Artificial Sequence: Synthetic oligonucleotide
cuuucccugaaaggcaguu

SEQ ID NO: 2031515 - RNA, 19 nt, Artificial Sequence
  Description of Artificial Sequence: Synthetic oligonucleotide
cuauucgaauaagcucacu

SEQ ID NO: 2031516 - RNA, 19 nt, Artificial Sequence
  Description of Artificial Sequence: Synthetic oligonucleotide
ccgucucucauuguuacua

SEQ ID NO: 2031517 - RNA, 19 nt, Artificial Sequence
  Description of Artificial Sequence: Synthetic oligonucleotide
caggagguucuguuuuaau

SEQ ID NO: 2031518 - RNA, 19 nt, Artificial Sequence
  Description of Artificial Sequence: Synthetic oligonucleotide
ggaggggcuugauucccua

SEQ ID NO: 2031519 - RNA, 19 nt, Artificial Sequence
  Description of Artificial Sequence: Synthetic oligonucleotide
ccacuaccuaguuuuaauu

SEQ ID NO: 2031520 - RNA, 19 nt, Artificial Sequence
  Description of Artificial Sequence: Synthetic oligonucleotide
ggaugacaguuugccagua

SEQ ID NO: 2031521 - RNA, 19 nt, Artificial Sequence
  Description of Artificial Sequence: Synthetic oligonucleotide
gccaugcccauaguuuucu

SEQ ID NO: 2031522 - RNA, 19 nt, Artificial Sequence
  Description of Artificial Sequence: Synthetic oligonucleotide
ccauacaucuucucccauu

SEQ ID NO: 2031523 - RNA, 19 nt, Artificial Sequence
  Description of Artificial Sequence: Synthetic oligonucleotide
cccugaaaggcaguuacau

SEQ ID NO: 2031524 - RNA, 19 nt, Artificial Sequence
  Description of Artificial Sequence: Synthetic oligonucleotide
ccagugaaucugccacaca

SEQ ID NO: 2031525 - RNA, 19 nt, Artificial Sequence
  Description of Artificial Sequence: Synthetic oligonucleotide
caaccucaguuguguuagu

SEQ ID NO: 2031526 - RNA, 19 nt, Artificial Sequence
  Description of Artificial Sequence: Synthetic oligonucleotide
gcuugauucccuacuucuu

SEQ ID NO: 2031527 - RNA, 19 nt, Artificial Sequence
  Description of Artificial Sequence: Synthetic oligonucleotide
ccugccgucucucauuguu

SEQ ID NO: 2031528 - RNA, 19 nt, Artificial Sequence
  Description of Artificial Sequence: Synthetic oligonucleotide
caucaggaucaagcugccu

SEQ ID NO: 2031529 - RNA, 19 nt, Artificial Sequence
  Description of Artificial Sequence: Synthetic oligonucleotide
caucagccaugcccauagu

SEQ ID NO: 2031530 - RNA, 19 nt, Artificial Sequence
  Description of Artificial Sequence: Synthetic oligonucleotide
gcauaagaccauacaucuu

SEQ ID NO: 2031531 - RNA, 19 nt, Artificial Sequence
  Description of Artificial Sequence: Synthetic oligonucleotide
cccuuugcauaagaccaua

SEQ ID NO: 2031532 - RNA, 19 nt, Artificial Sequence
  Description of Artificial Sequence: Synthetic oligonucleotide
gccgucucucauuguuacu

SEQ ID NO: 2031533 - RNA, 19 nt, Artificial Sequence
  Description of Artificial Sequence: Synthetic oligonucleotide
cgaaccugacuuacagccu

SEQ ID NO: 2031534 - RNA, 19 nt, Artificial Sequence
  Description of Artificial Sequence: Synthetic oligonucleotide
gggaggggcuugauucccu

SEQ ID NO: 2031535 - RNA, 19 nt, Artificial Sequence
  Description of Artificial Sequence: Synthetic oligonucleotide
ccugacuuacagccucuuu

SEQ ID NO: 2031536 - RNA, 19 nt, Artificial Sequence
  Description of Artificial Sequence: Synthetic oligonucleotide
cccgcaagugcuuguccau

SEQ ID NO: 2031537 - RNA, 19 nt, Artificial Sequence
  Description of Artificial Sequence: Synthetic oligonucleotide
cgggcucuccgagaacuca

SEQ ID NO: 2031538 - RNA, 19 nt, Artificial Sequence
  Description of Artificial Sequence: Synthetic oligonucleotide
ccgugccaccaguuaugaa

SEQ ID NO: 2031539 - RNA, 19 nt, Artificial Sequence
  Description of Artificial Sequence: Synthetic oligonucleotide
ccaugggaggggcuugauu

SEQ ID NO: 2031540 - RNA, 19 nt, Artificial Sequence
  Description of Artificial Sequence: Synthetic oligonucleotide
caccacccuguuggaacau

SEQ ID NO: 2031541 - RNA, 19 nt, Artificial Sequence
  Description of Artificial Sequence: Synthetic oligonucleotide
gccugccgucucucauugu

SEQ ID NO: 2031542 - RNA, 19 nt, Artificial Sequence
  Description of Artificial Sequence: Synthetic oligonucleotide
ccaucucuucuagguuccu

SEQ ID NO: 2031543 - RNA, 19 nt, Artificial Sequence
  Description of Artificial Sequence: Synthetic oligonucleotide
ccgcaagugcuuguccauu

SEQ ID NO: 2031544 - RNA, 19 nt, Artificial Sequence
  Description of Artificial Sequence: Synthetic oligonucleotide
cccuagcucugggaucaau

SEQ ID NO: 2031545 - RNA, 19 nt, Artificial Sequence
  Description of Artificial Sequence: Synthetic oligonucleotide
uuagauaaaacaagaaugg

SEQ ID NO: 2031546 - RNA, 19 nt, Artificial Sequence
  Description of Artificial Sequence: Synthetic oligonucleotide
aauggagaaaugcugagac

SEQ ID NO: 2031547 - RNA, 19 nt, Artificial Sequence
  Description of Artificial Sequence: Synthetic oligonucleotide
uuuaauaaaaucaggguca

SEQ ID NO: 2031548 - RNA, 19 nt, Artificial Sequence
  Description of Artificial Sequence: Synthetic oligonucleotide
cuuagauaaaacaagaaug

SEQ ID NO: 2031549 - RNA, 19 nt, Artificial Sequence
  Description of Artificial Sequence: Synthetic oligonucleotide
uuaauuauuguggugaugg

SEQ ID NO: 2031550 - RNA, 19 nt, Artificial Sequence
  Description of Artificial Sequence: Synthetic oligonucleotide
cuugauauuuuccagaaug

SEQ ID NO: 2031551 - RNA, 19 nt, Artificial Sequence
  Description of Artificial Sequence: Synthetic oligonucleotide
uauuuaauuauugugguga

SEQ ID NO: 2031552 - RNA, 19 nt, Artificial Sequence
  Description of Artificial Sequence: Synthetic oligonucleotide
aaaagcuuggcuuggggag

SEQ ID NO: 2031553 - RNA, 19 nt, Artificial Sequence
  Description of Artificial Sequence: Synthetic oligonucleotide
aauguugccccacuucugg

SEQ ID NO: 2031554 - RNA, 19 nt, Artificial Sequence
  Description of Artificial Sequence: Synthetic oligonucleotide
guuguaagaggacaagugg

SEQ ID NO: 2031555 - RNA, 19 nt, Artificial Sequence
  Description of Artificial Sequence: Synthetic oligonucleotide
aaaaucagggucaagagaa

SEQ ID NO: 2031556 - RNA, 19 nt, Artificial Sequence
  Description of Artificial Sequence: Synthetic oligonucleotide
uguaaaauggugacagagc

SEQ ID NO: 2031557 - RNA, 19 nt, Artificial Sequence
  Description of Artificial Sequence: Synthetic oligonucleotide
gaaagucucuauuagguac

SEQ ID NO: 2031558 - RNA, 19 nt, Artificial Sequence
  Description of Artificial Sequence: Synthetic oligonucleotide
ugucuaagaacuuuacagc

SEQ ID NO: 2031559 - RNA, 19 nt, Artificial Sequence
  Description of Artificial Sequence: Synthetic oligonucleotide
uguuguaagaggacaagug

SEQ ID NO: 2031560 - RNA, 19 nt, Artificial Sequence
  Description of Artificial Sequence: Synthetic oligonucleotide
aagaacuuuacagcugccc

SEQ ID NO: 2031561 - RNA, 19 nt, Artificial Sequence
  Description of Artificial Sequence: Synthetic oligonucleotide
agaacuuuacagcugcccg

SEQ ID NO: 2031562 - RNA, 19 nt, Artificial Sequence
  Description of Artificial Sequence: Synthetic oligonucleotide
agaucagagacccuguguc

SEQ ID NO: 2031563 - RNA, 19 nt, Artificial Sequence
  Description of Artificial Sequence: Synthetic oligonucleotide
ucuuguaggagcuugugcu

SEQ ID NO: 2031564 - RNA, 19 nt, Artificial Sequence
  Description of Artificial Sequence: Synthetic oligonucleotide
uuguaagaggacaaguggc

SEQ ID NO: 2031565 - RNA, 19 nt, Artificial Sequence
  Description of Artificial Sequence: Synthetic oligonucleotide
agcauuugcaacccaggcc

SEQ ID NO: 2031566 - RNA, 19 nt, Artificial Sequence
  Description of Artificial Sequence: Synthetic oligonucleotide
gaugguauccugcugggag

SEQ ID NO: 2031567 - RNA, 19 nt, Artificial Sequence
  Description of Artificial Sequence: Synthetic oligonucleotide
cuaagaacuuuacagcugc

SEQ ID NO: 2031568 - RNA, 19 nt, Artificial Sequence
  Description of Artificial Sequence: Synthetic oligonucleotide
agagaaagucucuauuagg

SEQ ID NO: 2031569 - RNA, 19 nt, Artificial Sequence
  Description of Artificial Sequence: Synthetic oligonucleotide
agauaaaacaagaauggag

SEQ ID NO: 2031570 - RNA, 19 nt, Artificial Sequence
  Description of Artificial Sequence: Synthetic oligonucleotide
cugacguucugauaaaacc

SEQ ID NO: 2031571 - RNA, 19 nt, Artificial Sequence
  Description of Artificial Sequence: Synthetic oligonucleotide
gaugcugacguucugauaa

SEQ ID NO: 2031572 - RNA, 19 nt, Artificial Sequence
  Description of Artificial Sequence: Synthetic oligonucleotide
ugacguucugauaaaaccu

SEQ ID NO: 2031573 - RNA, 19 nt, Artificial Sequence
  Description of Artificial Sequence: Synthetic oligonucleotide
uaagaggacaaguggcugg

SEQ ID NO: 2031574 - RNA, 19 nt, Artificial Sequence
  Description of Artificial Sequence: Synthetic oligonucleotide
aaagagcuucacuggguac

SEQ ID NO: 2031575 - RNA, 19 nt, Artificial Sequence
  Description of Artificial Sequence: Synthetic oligonucleotide
uuauuuaauuauuguggug

SEQ ID NO: 2031576 - RNA, 19 nt, Artificial Sequence
  Description of Artificial Sequence: Synthetic oligonucleotide
ucaauguugccccacuucu

SEQ ID NO: 2031577 - RNA, 19 nt, Artificial Sequence
  Description of Artificial Sequence: Synthetic oligonucleotide
gauaaaaccucuuccuuuc

SEQ ID NO: 2031578 - RNA, 19 nt, Artificial Sequence
  Description of Artificial Sequence: Synthetic oligonucleotide
auuagguacaggccaaaag

SEQ ID NO: 2031579 - RNA, 19 nt, Artificial Sequence
  Description of Artificial Sequence: Synthetic oligonucleotide
aauuauuguggugauggcu

SEQ ID NO: 2031580 - RNA, 19 nt, Artificial Sequence
  Description of Artificial Sequence: Synthetic oligonucleotide
ugagacucagaugaaaaug

SEQ ID NO: 2031581 - RNA, 19 nt, Artificial Sequence
  Description of Artificial Sequence: Synthetic oligonucleotide
aggugcaugguguagaacu

SEQ ID NO: 2031582 - RNA, 19 nt, Artificial Sequence
  Description of Artificial Sequence: Synthetic oligonucleotide
gaacuuuacagcugcccgg

SEQ ID NO: 2031583 - RNA, 19 nt, Artificial Sequence
  Description of Artificial Sequence: Synthetic oligonucleotide
acgugacagaagcacagcc

SEQ ID NO: 2031584 - RNA, 19 nt, Artificial Sequence
  Description of Artificial Sequence: Synthetic oligonucleotide
acagagcuuagauaaaaca

SEQ ID NO: 2031585 - RNA, 19 nt, Artificial Sequence
  Description of Artificial Sequence: Synthetic oligonucleotide
aaaaugaggcuugauauuu

SEQ ID NO: 2031586 - RNA, 19 nt, Artificial Sequence
  Description of Artificial Sequence: Synthetic oligonucleotide
agagcuuagauaaaacaag

SEQ ID NO: 2031587 - RNA, 19 nt, Artificial Sequence
  Description of Artificial Sequence: Synthetic oligonucleotide
uagcagauguaaaauggug

SEQ ID NO: 2031588 - RNA, 19 nt, Artificial Sequence
  Description of Artificial Sequence: Synthetic oligonucleotide
auugguagcagauguaaaa

SEQ ID NO: 2031589 - RNA, 19 nt, Artificial Sequence
  Description of Artificial Sequence: Synthetic oligonucleotide
uuaugcuuguggaggagcc

SEQ ID NO: 2031590 - RNA, 19 nt, Artificial Sequence
  Description of Artificial Sequence: Synthetic oligonucleotide
agguuuaucucaaauccac

SEQ ID NO: 2031591 - RNA, 19 nt, Artificial Sequence
  Description of Artificial Sequence: Synthetic oligonucleotide
gguagcagauguaaaaugg

SEQ ID NO: 2031592 - RNA, 19 nt, Artificial Sequence
  Description of Artificial Sequence: Synthetic oligonucleotide
guuggauuguccaaggaug

SEQ ID NO: 2031593 - RNA, 19 nt, Artificial Sequence
  Description of Artificial Sequence: Synthetic oligonucleotide
gacucagaugaaaaugagg

SEQ ID NO: 2031594 - RNA, 19 nt, Artificial Sequence
  Description of Artificial Sequence: Synthetic oligonucleotide
augaaaaugaggcuugaua

SEQ ID NO: 2031595 - RNA, 19 nt, Artificial Sequence
  Description of Artificial Sequence: Synthetic oligonucleotide
ugagguuuccagccauugg

SEQ ID NO: 2031596 - RNA, 19 nt, Artificial Sequence
  Description of Artificial Sequence: Synthetic oligonucleotide
agaauggagaaaugcugag

SEQ ID NO: 2031597 - RNA, 19 nt, Artificial Sequence
  Description of Artificial Sequence: Synthetic oligonucleotide
ugauaaaaccucuuccuuu

SEQ ID NO: 2031598 - RNA, 19 nt, Artificial Sequence
  Description of Artificial Sequence: Synthetic oligonucleotide
ugguagcagauguaaaaug

SEQ ID NO: 2031599 - RNA, 19 nt, Artificial Sequence
  Description of Artificial Sequence: Synthetic oligonucleotide
ucuuuucucagcccauucu

SEQ ID NO: 2031600 - RNA, 19 nt, Artificial Sequence
  Description of Artificial Sequence: Synthetic oligonucleotide
gaccguagagcuuuccaag

SEQ ID NO: 2031601 - RNA, 19 nt, Artificial Sequence
  Description of Artificial Sequence: Synthetic oligonucleotide
caaguggcugguaagcacc

SEQ ID NO: 2031602 - RNA, 19 nt, Artificial Sequence
  Description of Artificial Sequence: Synthetic oligonucleotide
agaacuugaugguauccug

SEQ ID NO: 2031603 - RNA, 19 nt, Artificial Sequence
  Description of Artificial Sequence: Synthetic oligonucleotide
ucuauuagguacaggccaa

SEQ ID NO: 2031604 - RNA, 19 nt, Artificial Sequence
  Description of Artificial Sequence: Synthetic oligonucleotide
ugauccuuguuucgcuggg

SEQ ID NO: 2031605 - RNA, 19 nt, Artificial Sequence
  Description of Artificial Sequence: Synthetic oligonucleotide
ugugagaugcugacguucu

SEQ ID NO: 2031606 - RNA, 19 nt, Artificial Sequence
  Description of Artificial Sequence: Synthetic oligonucleotide
gaggcuugauauuuuccag

SEQ ID NO: 2031607 - RNA, 19 nt, Artificial Sequence
  Description of Artificial Sequence: Synthetic oligonucleotide
cuccagacgugacagaagc

SEQ ID NO: 2031608 - RNA, 19 nt, Artificial Sequence
  Description of Artificial Sequence: Synthetic oligonucleotide
cucaaucccuuguagggcc

SEQ ID NO: 2031609 - RNA, 19 nt, Artificial Sequence
  Description of Artificial Sequence: Synthetic oligonucleotide
uagauaaaacaagaaugga

SEQ ID NO: 2031610 - RNA, 19 nt, Artificial Sequence
  Description of Artificial Sequence: Synthetic oligonucleotide
guaaaauggugacagagcu

SEQ ID NO: 2031611 - RNA, 19 nt, Artificial Sequence
  Description of Artificial Sequence: Synthetic oligonucleotide
uagagcuuuccaagcagag

SEQ ID NO: 2031612 - RNA, 19 nt, Artificial Sequence
  Description of Artificial Sequence: Synthetic oligonucleotide
uuggauuguccaaggaugu

SEQ ID NO: 2031613 - RNA, 19 nt, Artificial Sequence
  Description of Artificial Sequence: Synthetic oligonucleotide
agggucaagagaaagucuc

SEQ ID NO: 2031614 - RNA, 19 nt, Artificial Sequence
  Description of Artificial Sequence: Synthetic oligonucleotide
uccacuaaugucucuggcu

SEQ ID NO: 2031615 - RNA, 19 nt, Artificial Sequence
  Description of Artificial Sequence: Synthetic oligonucleotide
agugcgagcccgaagcucc

SEQ ID NO: 2031616 - RNA, 19 nt, Artificial Sequence
  Description of Artificial Sequence: Synthetic oligonucleotide
caaacucaaucccuuguag

SEQ ID NO: 2031617 - RNA, 19 nt, Artificial Sequence
  Description of Artificial Sequence: Synthetic oligonucleotide
agcccgaagcuccuggagc

SEQ ID NO: 2031618 - RNA, 19 nt, Artificial Sequence
  Description of Artificial Sequence: Synthetic oligonucleotide
gugacagaagcacagccug

SEQ ID NO: 2031619 - RNA, 19 nt, Artificial Sequence
  Description of Artificial Sequence: Synthetic oligonucleotide
uucucagcccauucuauga

SEQ ID NO: 2031620 - RNA, 19 nt, Artificial Sequence
  Description of Artificial Sequence: Synthetic oligonucleotide
aaaaggguaccagcggcag

SEQ ID NO: 2031621 - RNA, 19 nt, Artificial Sequence
  Description of Artificial Sequence: Synthetic oligonucleotide
aaggguaccagcggcagug

SEQ ID NO: 2031622 - RNA, 19 nt, Artificial Sequence
  Description of Artificial Sequence: Synthetic oligonucleotide
aaagucucuauuagguaca

SEQ ID NO: 2031623 - RNA, 19 nt, Artificial Sequence
  Description of Artificial Sequence: Synthetic oligonucleotide
gagacucagaugaaaauga

SEQ ID NO: 2031624 - RNA, 19 nt, Artificial Sequence
  Description of Artificial Sequence: Synthetic oligonucleotide
uguucuugcccuucccugc

SEQ ID NO: 2031625 - RNA, 19 nt, Artificial Sequence
  Description of Artificial Sequence: Synthetic oligonucleotide
ggccaaaagagcuucacug

SEQ ID NO: 2031626 - RNA, 19 nt, Artificial Sequence
  Description of Artificial Sequence: Synthetic oligonucleotide
uuuaauuauuguggugaug

SEQ ID NO: 2031627 - RNA, 19 nt, Artificial Sequence
  Description of Artificial Sequence: Synthetic oligonucleotide
uugugcuugaccguagagc

SEQ ID NO: 2031628 - RNA, 19 nt, Artificial Sequence
  Description of Artificial Sequence: Synthetic oligonucleotide
auucguucuucugaaguuc

SEQ ID NO: 2031629 - RNA, 19 nt, Artificial Sequence
  Description of Artificial Sequence: Synthetic oligonucleotide
ucagugucuaagaacuuua

SEQ ID NO: 2031630 - RNA, 19 nt, Artificial Sequence
  Description of Artificial Sequence: Synthetic oligonucleotide
ucaggcgccggucaaucag

SEQ ID NO: 2031631 - RNA, 19 nt, Artificial Sequence
  Description of Artificial Sequence: Synthetic oligonucleotide
cucuauuagguacaggcca

SEQ ID NO: 2031632 - RNA, 19 nt, Artificial Sequence
  Description of Artificial Sequence: Synthetic oligonucleotide
aagagcuucacuggguaca

SEQ ID NO: 2031633 - RNA, 19 nt, Artificial Sequence
  Description of Artificial Sequence: Synthetic oligonucleotide
uaauuauuguggugauggc

SEQ ID NO: 2031634 - RNA, 19 nt, Artificial Sequence
  Description of Artificial Sequence: Synthetic oligonucleotide
ggucccauuaugcuugugg

SEQ ID NO: 2031635 - RNA, 19 nt, Artificial Sequence
  Description of Artificial Sequence: Synthetic oligonucleotide
ugcccggaucaucugaucc

SEQ ID NO: 2031636 - RNA, 19 nt, Artificial Sequence
  Description of Artificial Sequence: Synthetic oligonucleotide
gaucugguacuccuccucc

SEQ ID NO: 2031637 - RNA, 19 nt, Artificial Sequence
  Description of Artificial Sequence: Synthetic oligonucleotide
agccauugguagcagaugu

SEQ ID NO: 2031638 - RNA, 19 nt, Artificial Sequence
  Description of Artificial Sequence: Synthetic oligonucleotide
gacuggaucccauucguuc

SEQ ID NO: 2031639 - RNA, 19 nt, Artificial Sequence
  Description of Artificial Sequence: Synthetic oligonucleotide
ugauauuuuccagaaugaa

SEQ ID NO: 2031640 - RNA, 19 nt, Artificial Sequence
  Description of Artificial Sequence: Synthetic oligonucleotide
uugaccguagagcuuucca

SEQ ID NO: 2031641 - RNA, 19 nt, Artificial Sequence
  Description of Artificial Sequence: Synthetic oligonucleotide
ugggccacuacaaacucaa

SEQ ID NO: 2031642 - RNA, 19 nt, Artificial Sequence
  Description of Artificial Sequence: Synthetic oligonucleotide
agguacaggccaaaagagc

SEQ ID NO: 2031643 - RNA, 19 nt, Artificial Sequence
  Description of Artificial Sequence: Synthetic oligonucleotide
guuucgcuggguuggauug

SEQ ID NO: 2031644 - RNA, 19 nt, Artificial Sequence
  Description of Artificial Sequence: Synthetic oligonucleotide
guacagaguuccaacagcc

SEQ ID NO: 2031645 - RNA, 19 nt, Artificial Sequence
  Description of Artificial Sequence: Synthetic oligonucleotide
cugggagucccauucagug

SEQ ID NO: 2031646 - RNA, 19 nt, Artificial Sequence
  Description of Artificial Sequence: Synthetic oligonucleotide
aucccauucguucuucuga

SEQ ID NO: 2031647 - RNA, 19 nt, Artificial Sequence
  Description of Artificial Sequence: Synthetic oligonucleotide
ugguguagaacuugauggu

SEQ ID NO: 2031648 - RNA, 19 nt, Artificial Sequence
  Description of Artificial Sequence: Synthetic oligonucleotide
ugcacaauguggucaggug

SEQ ID NO: 2031649 - RNA, 19 nt, Artificial Sequence
  Description of Artificial Sequence: Synthetic oligonucleotide
guuccacuaaugucucugg

SEQ ID NO: 2031650 - RNA, 19 nt, Artificial Sequence
  Description of Artificial Sequence: Synthetic oligonucleotide
accagcggcagugcgagcc

SEQ ID NO: 2031651 - RNA, 19 nt, Artificial Sequence
  Description of Artificial Sequence: Synthetic oligonucleotide
uuauuguggugauggcuug

SEQ ID NO: 2031652 - RNA, 19 nt, Artificial Sequence
  Description of Artificial Sequence: Synthetic oligonucleotide
aauggugacagagcuuaga

SEQ ID NO: 2031653 - RNA, 19 nt, Artificial Sequence
  Description of Artificial Sequence: Synthetic oligonucleotide
aguuccacuaaugucucug

SEQ ID NO: 2031654 - RNA, 19 nt, Artificial Sequence
  Description of Artificial Sequence: Synthetic oligonucleotide
acuggaucccauucguucu

SEQ ID NO: 2031655 - RNA, 19 nt, Artificial Sequence
  Description of Artificial Sequence: Synthetic oligonucleotide
guuuaucucaaauccaccu

SEQ ID NO: 2031656 - RNA, 19 nt, Artificial Sequence
  Description of Artificial Sequence: Synthetic oligonucleotide
agcagauguaaaaugguga

SEQ ID NO: 2031657 - RNA, 19 nt, Artificial Sequence
  Description of Artificial Sequence: Synthetic oligonucleotide
uuccacuaaugucucuggc

SEQ ID NO: 2031658 - RNA, 19 nt, Artificial Sequence
  Description of Artificial Sequence: Synthetic oligonucleotide
gucuggguagguaugcugg

SEQ ID NO: 2031659 - RNA, 19 nt, Artificial Sequence
  Description of Artificial Sequence: Synthetic oligonucleotide
aggacaaguggcugguaag

SEQ ID NO: 2031660 - RNA, 19 nt, Artificial Sequence
  Description of Artificial Sequence: Synthetic oligonucleotide
gauggccaaggccucacug

SEQ ID NO: 2031661 - RNA, 19 nt, Artificial Sequence
  Description of Artificial Sequence: Synthetic oligonucleotide
uaagaacuuuacagcugcc

SEQ ID NO: 2031662 - RNA, 19 nt, Artificial Sequence
  Description of Artificial Sequence: Synthetic oligonucleotide
aacuuuacagcugcccgga

SEQ ID NO: 2031663 - RNA, 19 nt, Artificial Sequence
  Description of Artificial Sequence: Synthetic oligonucleotide
ugccgugagguuuccagcc

SEQ ID NO: 2031664 - RNA, 19 nt, Artificial Sequence
  Description of Artificial Sequence: Synthetic oligonucleotide
ugaccguagagcuuuccaa

SEQ ID NO: 2031665 - RNA, 19 nt, Artificial Sequence
  Description of Artificial Sequence: Synthetic oligonucleotide
aggcuugauauuuuccaga

SEQ ID NO: 2031666 - RNA, 19 nt, Artificial Sequence
  Description of Artificial Sequence: Synthetic oligonucleotide
uggagcucauagucguggg

SEQ ID NO: 2031667 - RNA, 19 nt, Artificial Sequence
  Description of Artificial Sequence: Synthetic oligonucleotide
gucuaagaacuuuacagcu

SEQ ID NO: 2031668 - RNA, 19 nt, Artificial Sequence
  Description of Artificial Sequence: Synthetic oligonucleotide
gcagauguaaaauggugac

SEQ ID NO: 2031669 - RNA, 19 nt, Artificial Sequence
  Description of Artificial Sequence: Synthetic oligonucleotide
ucugugcaguuccuuucag

SEQ ID NO: 2031670 - RNA, 19 nt, Artificial Sequence
  Description of Artificial Sequence: Synthetic oligonucleotide
ugacagagcuuagauaaaa

SEQ ID NO: 2031671 - RNA, 19 nt, Artificial Sequence
  Description of Artificial Sequence: Synthetic oligonucleotide
uuccuuucagccagcauuu

SEQ ID NO: 2031672 - RNA, 19 nt, Artificial Sequence
  Description of Artificial Sequence: Synthetic oligonucleotide
uaaaauggugacagagcuu

SEQ ID NO: 2031673 - RNA, 19 nt, Artificial Sequence
  Description of Artificial Sequence: Synthetic oligonucleotide
uugguagcagauguaaaau

SEQ ID NO: 2031674 - RNA, 19 nt, Artificial Sequence
  Description of Artificial Sequence: Synthetic oligonucleotide
uaugcuuguggaggagccg

SEQ ID NO: 2031675 - RNA, 19 nt, Artificial Sequence
  Description of Artificial Sequence: Synthetic oligonucleotide
gaucccauucguucuucug

SEQ ID NO: 2031676 - RNA, 19 nt, Artificial Sequence
  Description of Artificial Sequence: Synthetic oligonucleotide
cauguuguaagaggacaag

SEQ ID NO: 2031677 - RNA, 19 nt, Artificial Sequence
  Description of Artificial Sequence: Synthetic oligonucleotide
gacguucugauaaaaccuc

SEQ ID NO: 2031678 - RNA, 19 nt, Artificial Sequence
  Description of Artificial Sequence: Synthetic oligonucleotide
aagucucuauuagguacag

SEQ ID NO: 2031679 - RNA, 19 nt, Artificial Sequence
  Description of Artificial Sequence: Synthetic oligonucleotide
aaauccaccuucacccugu

SEQ ID NO: 2031680 - RNA, 19 nt, Artificial Sequence
  Description of Artificial Sequence: Synthetic oligonucleotide
guagaacuugaugguaucc

SEQ ID NO: 2031681 - RNA, 19 nt, Artificial Sequence
  Description of Artificial Sequence: Synthetic oligonucleotide
auagucgugggcccauuca

SEQ ID NO: 2031682 - RNA, 19 nt, Artificial Sequence
  Description of Artificial Sequence: Synthetic oligonucleotide
ucacccugugagaugcuga

SEQ ID NO: 2031683 - RNA, 19 nt, Artificial Sequence
  Description of Artificial Sequence: Synthetic oligonucleotide
aaagcuuggcuuggggagu

SEQ ID NO: 2031684 - RNA, 19 nt, Artificial Sequence
  Description of Artificial Sequence: Synthetic oligonucleotide
cuggagcucauagucgugg

SEQ ID NO: 2031685 - RNA, 19 nt, Artificial Sequence
  Description of Artificial Sequence: Synthetic oligonucleotide
caucugauccuuguuucgc

SEQ ID NO: 2031686 - RNA, 19 nt, Artificial Sequence
  Description of Artificial Sequence: Synthetic oligonucleotide
cacaauguggucaggugca

SEQ ID NO: 2031687 - RNA, 19 nt, Artificial Sequence
  Description of Artificial Sequence: Synthetic oligonucleotide
ggcagugcgagcccgaagc

SEQ ID NO: 2031688 - RNA, 19 nt, Artificial Sequence
  Description of Artificial Sequence: Synthetic oligonucleotide
gcugguaagcaccucucgg

SEQ ID NO: 2031689 - RNA, 19 nt, Artificial Sequence
  Description of Artificial Sequence: Synthetic oligonucleotide
gggagucccauucaguggc

SEQ ID NO: 2031690 - RNA, 19 nt, Artificial Sequence
  Description of Artificial Sequence: Synthetic oligonucleotide
agggcccacauguuguaag

SEQ ID NO: 2031691 - RNA, 19 nt, Artificial Sequence
  Description of Artificial Sequence: Synthetic oligonucleotide
ggaggagccgaucuccacg

SEQ ID NO: 2031692 - RNA, 19 nt, Artificial Sequence
  Description of Artificial Sequence: Synthetic oligonucleotide
ugcaacccaggccucacuc

SEQ ID NO: 2031693 - RNA, 19 nt, Artificial Sequence
  Description of Artificial Sequence: Synthetic oligonucleotide
aagaggacaaguggcuggu

SEQ ID NO: 2031694 - RNA, 19 nt, Artificial Sequence
  Description of Artificial Sequence: Synthetic oligonucleotide
gcacaauguggucaggugc

SEQ ID NO: 2031695 - RNA, 19 nt, Artificial Sequence
  Description of Artificial Sequence: Synthetic oligonucleotide
auaaaaccucuuccuuucu

SEQ ID NO: 2031696 - RNA, 19 nt, Artificial Sequence
  Description of Artificial Sequence: Synthetic oligonucleotide
auggugucagugucuaaga

SEQ ID NO: 2031697 - RNA, 19 nt, Artificial Sequence
  Description of Artificial Sequence: Synthetic oligonucleotide
uagucgugggcccauucaa

SEQ ID NO: 2031698 - RNA, 19 nt, Artificial Sequence
  Description of Artificial Sequence: Synthetic oligonucleotide
cuugugcuugaccguagag

SEQ ID NO: 2031699 - RNA, 19 nt, Artificial Sequence
  Description of Artificial Sequence: Synthetic oligonucleotide
uuggggaguuuucagcuuu

SEQ ID NO: 2031700 - RNA, 19 nt, Artificial Sequence
  Description of Artificial Sequence: Synthetic oligonucleotide
agacgugacagaagcacag

SEQ ID NO: 2031701 - RNA, 19 nt, Artificial Sequence
  Description of Artificial Sequence: Synthetic oligonucleotide
aucugauccuuguuucgcu

SEQ ID NO: 2031702 - RNA, 19 nt, Artificial Sequence
  Description of Artificial Sequence: Synthetic oligonucleotide
aaaggguaccagcggcagu

SEQ ID NO: 2031703 - RNA, 19 nt, Artificial Sequence
  Description of Artificial Sequence: Synthetic oligonucleotide
cuuuacagcugcccggauc

SEQ ID NO: 2031704 - RNA, 19 nt, Artificial Sequence
  Description of Artificial Sequence: Synthetic oligonucleotide
ugagcugggccacuacaaa

SEQ ID NO: 2031705 - RNA, 19 nt, Artificial Sequence
  Description of Artificial Sequence: Synthetic oligonucleotide
gaauggagaaaugcugaga

SEQ ID NO: 2031706 - RNA, 19 nt, Artificial Sequence
  Description of Artificial Sequence: Synthetic oligonucleotide
uggugucagugucuaagaa

SEQ ID NO: 2031707 - RNA, 19 nt, Artificial Sequence
  Description of Artificial Sequence: Synthetic oligonucleotide
uucuaugacuggaucccau

SEQ ID NO: 2031708 - RNA, 19 nt, Artificial Sequence
  Description of Artificial Sequence: Synthetic oligonucleotide
guaagaggacaaguggcug

SEQ ID NO: 2031709 - RNA, 19 nt, Artificial Sequence
  Description of Artificial Sequence: Synthetic oligonucleotide
ucccauucguucuucugaa

SEQ ID NO: 2031710 - RNA, 19 nt, Artificial Sequence
  Description of Artificial Sequence: Synthetic oligonucleotide
gugucagugucuaagaacu

SEQ ID NO: 2031711 - RNA, 19 nt, Artificial Sequence
  Description of Artificial Sequence: Synthetic oligonucleotide
aucagagacccugugucug

SEQ ID NO: 2031712 - RNA, 19 nt, Artificial Sequence
  Description of Artificial Sequence: Synthetic oligonucleotide
gucccauuaugcuugugga

SEQ ID NO: 2031713 - RNA, 19 nt, Artificial Sequence
  Description of Artificial Sequence: Synthetic oligonucleotide
uacaggccaaaagagcuuc

SEQ ID NO: 2031714 - RNA, 19 nt, Artificial Sequence
  Description of Artificial Sequence: Synthetic oligonucleotide
ucuaugacuggaucccauu

SEQ ID NO: 2031715 - RNA, 19 nt, Artificial Sequence
  Description of Artificial Sequence: Synthetic oligonucleotide
augguauccugcugggagu

SEQ ID NO: 2031716 - RNA, 19 nt, Artificial Sequence
  Description of Artificial Sequence: Synthetic oligonucleotide
cauucaguggccacugcga

SEQ ID NO: 2031717 - RNA, 19 nt, Artificial Sequence
  Description of Artificial Sequence: Synthetic oligonucleotide
agacucagaugaaaaugag

SEQ ID NO: 2031718 - RNA, 19 nt, Artificial Sequence
  Description of Artificial Sequence: Synthetic oligonucleotide
ugggcccauucaauguugc

SEQ ID NO: 2031719 - RNA, 19 nt, Artificial Sequence
  Description of Artificial Sequence: Synthetic oligonucleotide
cuuucugugguccagguuu

SEQ ID NO: 2031720 - RNA, 19 nt, Artificial Sequence
  Description of Artificial Sequence: Synthetic oligonucleotide
uguuucgcuggguuggauu

SEQ ID NO: 2031721 - RNA, 19 nt, Artificial Sequence
  Description of Artificial Sequence: Synthetic oligonucleotide
uucagcuuucuguggucca

SEQ ID NO: 2031722 - RNA, 19 nt, Artificial Sequence
  Description of Artificial Sequence: Synthetic oligonucleotide
ggguacagaguuccaacag

SEQ ID NO: 2031723 - RNA, 19 nt, Artificial Sequence
  Description of Artificial Sequence: Synthetic oligonucleotide
ugcuugaccguagagcuuu

SEQ ID NO: 2031724 - RNA, 19 nt, Artificial Sequence
  Description of Artificial Sequence: Synthetic oligonucleotide
caaggucagcaccauggac

SEQ ID NO: 2031725 - RNA, 19 nt, Artificial Sequence
  Description of Artificial Sequence: Synthetic oligonucleotide
aggccaaaagagcuucacu

SEQ ID NO: 2031726 - RNA, 19 nt, Artificial Sequence
  Description of Artificial Sequence: Synthetic oligonucleotide
gaaguuccacuaaugucuc

SEQ ID NO: 2031727 - RNA, 19 nt, Artificial Sequence
  Description of Artificial Sequence: Synthetic oligonucleotide
aaucccuuguagggcccac

SEQ ID NO: 2031728 - RNA, 19 nt, Artificial Sequence
  Description of Artificial Sequence: Synthetic oligonucleotide
auucaguggccacugcgau

SEQ ID NO: 2031729 - RNA, 19 nt, Artificial Sequence
  Description of Artificial Sequence: Synthetic oligonucleotide
uccagacgugacagaagca

SEQ ID NO: 2031730 - RNA, 19 nt, Artificial Sequence
  Description of Artificial Sequence: Synthetic oligonucleotide
ucgugggcccauucaaugu

SEQ ID NO: 2031731 - RNA, 19 nt, Artificial Sequence
  Description of Artificial Sequence: Synthetic oligonucleotide
uccacgccguaucuuuucu

SEQ ID NO: 2031732 - RNA, 19 nt, Artificial Sequence
  Description of Artificial Sequence: Synthetic oligonucleotide
gccguaucuuuucucagcc

SEQ ID NO: 2031733 - RNA, 19 nt, Artificial Sequence
  Description of Artificial Sequence: Synthetic oligonucleotide
uguugccccacuucuggau

SEQ ID NO: 2031734 - RNA, 19 nt, Artificial Sequence
  Description of Artificial Sequence: Synthetic oligonucleotide
gcauuugcaacccaggccu

SEQ ID NO: 2031735 - RNA, 19 nt, Artificial Sequence
  Description of Artificial Sequence: Synthetic oligonucleotide
guaccagcggcagugcgag

SEQ ID NO: 2031736 - RNA, 19 nt, Artificial Sequence
  Description of Artificial Sequence: Synthetic oligonucleotide
agggaagcccagaucagag

SEQ ID NO: 2031737 - RNA, 19 nt, Artificial Sequence
  Description of Artificial Sequence: Synthetic oligonucleotide
ucgggucuggguagguaug

SEQ ID NO: 2031738 - RNA, 19 nt, Artificial Sequence
  Description of Artificial Sequence: Synthetic oligonucleotide
agcuuagauaaaacaagaa

SEQ ID NO: 2031739 - RNA, 19 nt, Artificial Sequence
  Description of Artificial Sequence: Synthetic oligonucleotide
aucuccacgccguaucuuu

SEQ ID NO: 2031740 - RNA, 19 nt, Artificial Sequence
  Description of Artificial Sequence: Synthetic oligonucleotide
aaauggugacagagcuuag

SEQ ID NO: 2031741 - RNA, 19 nt, Artificial Sequence
  Description of Artificial Sequence: Synthetic oligonucleotide
uucacccugugagaugcug

SEQ ID NO: 2031742 - RNA, 19 nt, Artificial Sequence
  Description of Artificial Sequence: Synthetic oligonucleotide
ggagccgaucuccacgccg

SEQ ID NO: 2031743 - RNA, 19 nt, Artificial Sequence
  Description of Artificial Sequence: Synthetic oligonucleotide
cacgccguaucuuuucuca

SEQ ID NO: 2031744 - RNA, 19 nt, Artificial Sequence
  Description of Artificial Sequence: Synthetic oligonucleotide
cugccgugagguuuccagc

SEQ ID NO: 2031745 - RNA, 19 nt, Artificial Sequence
  Description of Artificial Sequence: Synthetic oligonucleotide
acauguuguaagaggacaa

SEQ ID NO: 2031746 - RNA, 19 nt, Artificial Sequence
  Description of Artificial Sequence: Synthetic oligonucleotide
cagcccauucuaugacugg

SEQ ID NO: 2031747 - RNA, 19 nt, Artificial Sequence
  Description of Artificial Sequence: Synthetic oligonucleotide
caggcgccggucaaucagg

SEQ ID NO: 2031748 - RNA, 19 nt, Artificial Sequence
  Description of Artificial Sequence: Synthetic oligonucleotide
gcgccggucaaucaggccc

SEQ ID NO: 2031749 - RNA, 19 nt, Artificial Sequence
  Description of Artificial Sequence: Synthetic oligonucleotide
gacaaguggcugguaagca

SEQ ID NO: 2031750 - RNA, 19 nt, Artificial Sequence
  Description of Artificial Sequence: Synthetic oligonucleotide
ugcccuucccugccgugag

SEQ ID NO: 2031751 - RNA, 19 nt, Artificial Sequence
  Description of Artificial Sequence: Synthetic oligonucleotide
gguuuaucucaaauccacc

SEQ ID NO: 2031752 - RNA, 19 nt, Artificial Sequence
  Description of Artificial Sequence: Synthetic oligonucleotide
uggauuguccaaggaugug

SEQ ID NO: 2031753 - RNA, 19 nt, Artificial Sequence
  Description of Artificial Sequence: Synthetic oligonucleotide
agucaggcgccggucaauc

SEQ ID NO: 2031754 - RNA, 19 nt, Artificial Sequence
  Description of Artificial Sequence: Synthetic oligonucleotide
aaauggugucagugucuaa

SEQ ID NO: 2031755 - RNA, 19 nt, Artificial Sequence
  Description of Artificial Sequence: Synthetic oligonucleotide
uuguggaggagccgaucuc

SEQ ID NO: 2031756 - RNA, 19 nt, Artificial Sequence
  Description of Artificial Sequence: Synthetic oligonucleotide
ccauucaguggccacugcg

SEQ ID NO: 2031757 - RNA, 19 nt, Artificial Sequence
  Description of Artificial Sequence: Synthetic oligonucleotide
cuuggcuuggggaguuuuc

SEQ ID NO: 2031758 - RNA, 19 nt, Artificial Sequence
  Description of Artificial Sequence: Synthetic oligonucleotide
acgccguaucuuuucucag

SEQ ID NO: 2031759 - RNA, 19 nt, Artificial Sequence
  Description of Artificial Sequence: Synthetic oligonucleotide
aaaugaggcuugauauuuu

SEQ ID NO: 2031760 - RNA, 19 nt, Artificial Sequence
  Description of Artificial Sequence: Synthetic oligonucleotide
ccacuacaaacucaauccc

SEQ ID NO: 2031761 - RNA, 19 nt, Artificial Sequence
  Description of Artificial Sequence: Synthetic oligonucleotide
ccuuguuucgcuggguugg

SEQ ID NO: 2031762 - RNA, 19 nt, Artificial Sequence
  Description of Artificial Sequence: Synthetic oligonucleotide
ugcugagacucagaugaaa

SEQ ID NO: 2031763 - RNA, 19 nt, Artificial Sequence
  Description of Artificial Sequence: Synthetic oligonucleotide
agucucuauuagguacagg

SEQ ID NO: 2031764 - RNA, 19 nt, Artificial Sequence
  Description of Artificial Sequence: Synthetic oligonucleotide
auucaauguugccccacuu

SEQ ID NO: 2031765 - RNA, 19 nt, Artificial Sequence
  Description of Artificial Sequence: Synthetic oligonucleotide
gguacuccuccuccagacg

SEQ ID NO: 2031766 - RNA, 19 nt, Artificial Sequence
  Description of Artificial Sequence: Synthetic oligonucleotide
ggcuuggggaguuuucagc

SEQ ID NO: 2031767 - RNA, 19 nt, Artificial Sequence
  Description of Artificial Sequence: Synthetic oligonucleotide
cauuaugcuuguggaggag

SEQ ID NO: 2031768 - RNA, 19 nt, Artificial Sequence
  Description of Artificial Sequence: Synthetic oligonucleotide
uauuguggugauggcuugu

SEQ ID NO: 2031769 - RNA, 19 nt, Artificial Sequence
  Description of Artificial Sequence: Synthetic oligonucleotide
guguugcacaaugugguca

SEQ ID NO: 2031770 - RNA, 19 nt, Artificial Sequence
  Description of Artificial Sequence: Synthetic oligonucleotide
uuugcaacccaggccucac

SEQ ID NO: 2031771 - RNA, 19 nt, Artificial Sequence
  Description of Artificial Sequence: Synthetic oligonucleotide
guagagcuuuccaagcaga

SEQ ID NO: 2031772 - RNA, 19 nt, Artificial Sequence
  Description of Artificial Sequence: Synthetic oligonucleotide
ggcuugauauuuuccagaa

SEQ ID NO: 2031773 - RNA, 19 nt, Artificial Sequence
  Description of Artificial Sequence: Synthetic oligonucleotide
augcuuguggaggagccga

SEQ ID NO: 2031774 - RNA, 19 nt, Artificial Sequence
  Description of Artificial Sequence: Synthetic oligonucleotide
gguacaggccaaaagagcu

SEQ ID NO: 2031775 - RNA, 19 nt, Artificial Sequence
  Description of Artificial Sequence: Synthetic oligonucleotide
uggcugguaagcaccucuc

SEQ ID NO: 2031776 - RNA, 19 nt, Artificial Sequence
  Description of Artificial Sequence: Synthetic oligonucleotide
guugccccacuucuggauc

SEQ ID NO: 2031777 - RNA, 19 nt, Artificial Sequence
  Description of Artificial Sequence: Synthetic oligonucleotide
acucuuguaggagcuugug

SEQ ID NO: 2031778 - RNA, 19 nt, Artificial Sequence
  Description of Artificial Sequence: Synthetic oligonucleotide
cagacgugacagaagcaca

SEQ ID NO: 2031779 - RNA, 19 nt, Artificial Sequence
  Description of Artificial Sequence: Synthetic oligonucleotide
ggacaaguggcugguaagc

SEQ ID NO: 2031780 - RNA, 19 nt, Artificial Sequence
  Description of Artificial Sequence: Synthetic oligonucleotide
gaucagagacccugugucu

SEQ ID NO: 2031781 - RNA, 19 nt, Artificial Sequence
  Description of Artificial Sequence: Synthetic oligonucleotide
ggcugguaagcaccucucg

SEQ ID NO: 2031782 - RNA, 19 nt, Artificial Sequence
  Description of Artificial Sequence: Synthetic oligonucleotide
acuggguacagaguuccaa

SEQ ID NO: 2031783 - RNA, 19 nt, Artificial Sequence
  Description of Artificial Sequence: Synthetic oligonucleotide
cauugguagcagauguaaa

SEQ ID NO: 2031784 - RNA, 19 nt, Artificial Sequence
  Description of Artificial Sequence: Synthetic oligonucleotide
cccacauguuguaagagga

SEQ ID NO: 2031785 - RNA, 19 nt, Artificial Sequence
  Description of Artificial Sequence: Synthetic oligonucleotide
agcugcccggaucaucuga

SEQ ID NO: 2031786 - RNA, 19 nt, Artificial Sequence
  Description of Artificial Sequence: Synthetic oligonucleotide
ccuuucagccagcauuugc

SEQ ID NO: 2031787 - RNA, 19 nt, Artificial Sequence
  Description of Artificial Sequence: Synthetic oligonucleotide
caagcagagguggacaaaa

SEQ ID NO: 2031788 - RNA, 19 nt, Artificial Sequence
  Description of Artificial Sequence: Synthetic oligonucleotide
aaguggcugguaagcaccu

SEQ ID NO: 2031789 - RNA, 19 nt, Artificial Sequence
  Description of Artificial Sequence: Synthetic oligonucleotide
ccagacgugacagaagcac

SEQ ID NO: 2031790 - RNA, 19 nt, Artificial Sequence
  Description of Artificial Sequence: Synthetic oligonucleotide
ccugccgugagguuuccag

SEQ ID NO: 2031791 - RNA, 19 nt, Artificial Sequence
  Description of Artificial Sequence: Synthetic oligonucleotide
uaucuuuucucagcccauu

SEQ ID NO: 2031792 - RNA, 19 nt, Artificial Sequence
  Description of Artificial Sequence: Synthetic oligonucleotide
auuugcaacccaggccuca

SEQ ID NO: 2031793 - RNA, 19 nt, Artificial Sequence
  Description of Artificial Sequence: Synthetic oligonucleotide
ugacuggaucccauucguu

SEQ ID NO: 2031794 - RNA, 19 nt, Artificial Sequence
  Description of Artificial Sequence: Synthetic oligonucleotide
ugaugguauccugcuggga

SEQ ID NO: 2031795 - RNA, 19 nt, Artificial Sequence
  Description of Artificial Sequence: Synthetic oligonucleotide
cauagucgugggcccauuc

SEQ ID NO: 2031796 - RNA, 19 nt, Artificial Sequence
  Description of Artificial Sequence: Synthetic oligonucleotide
guacuccuccuccagacgu

SEQ ID NO: 2031797 - RNA, 19 nt, Artificial Sequence
  Description of Artificial Sequence: Synthetic oligonucleotide
acuaaugucucuggcucuu

SEQ ID NO: 2031798 - RNA, 19 nt, Artificial Sequence
  Description of Artificial Sequence: Synthetic oligonucleotide
cagauguaaaauggugaca

SEQ ID NO: 2031799 - RNA, 19 nt, Artificial Sequence
  Description of Artificial Sequence: Synthetic oligonucleotide
gugcaugguguagaacuug

SEQ ID NO: 2031800 - RNA, 19 nt, Artificial Sequence
  Description of Artificial Sequence: Synthetic oligonucleotide
ugguauccugcugggaguc

SEQ ID NO: 2031801 - RNA, 19 nt, Artificial Sequence
  Description of Artificial Sequence: Synthetic oligonucleotide
caaaagagcuucacugggu

SEQ ID NO: 2031802 - RNA, 19 nt, Artificial Sequence
  Description of Artificial Sequence: Synthetic oligonucleotide
aggccucacucuuguagga

SEQ ID NO: 2031803 - RNA, 19 nt, Artificial Sequence
  Description of Artificial Sequence: Synthetic oligonucleotide
cuugaccguagagcuuucc

SEQ ID NO: 2031804 - RNA, 19 nt, Artificial Sequence
  Description of Artificial Sequence: Synthetic oligonucleotide
caggccaaaagagcuucac

SEQ ID NO: 2031805 - RNA, 19 nt, Artificial Sequence
  Description of Artificial Sequence: Synthetic oligonucleotide
acccuguagcaaauggugu

SEQ ID NO: 2031806 - RNA, 19 nt, Artificial Sequence
  Description of Artificial Sequence: Synthetic oligonucleotide
cagcuuucugugguccagg

SEQ ID NO: 2031807 - RNA, 19 nt, Artificial Sequence
  Description of Artificial Sequence: Synthetic oligonucleotide
agaugcugacguucugaua

SEQ ID NO: 2031808 - RNA, 19 nt, Artificial Sequence
  Description of Artificial Sequence: Synthetic oligonucleotide
cauuugcaacccaggccuc

SEQ ID NO: 2031809 - RNA, 19 nt, Artificial Sequence
  Description of Artificial Sequence: Synthetic oligonucleotide
gguuggauuguccaaggau

SEQ ID NO: 2031810 - RNA, 19 nt, Artificial Sequence
  Description of Artificial Sequence: Synthetic oligonucleotide
acccugugagaugcugacg

SEQ ID NO: 2031811 - RNA, 19 nt, Artificial Sequence
  Description of Artificial Sequence: Synthetic oligonucleotide
ugugucugugcaguuccuu

SEQ ID NO: 2031812 - RNA, 19 nt, Artificial Sequence
  Description of Artificial Sequence: Synthetic oligonucleotide
caaauggugucagugucua

SEQ ID NO: 2031813 - RNA, 19 nt, Artificial Sequence
  Description of Artificial Sequence: Synthetic oligonucleotide
uuucgcuggguuggauugu

SEQ ID NO: 2031814 - RNA, 19 nt, Artificial Sequence
  Description of Artificial Sequence: Synthetic oligonucleotide
gcugacguucugauaaaac

SEQ ID NO: 2031815 - RNA, 19 nt, Artificial Sequence
  Description of Artificial Sequence: Synthetic oligonucleotide
ucuccacgccguaucuuuu

SEQ ID NO: 2031816 - RNA, 19 nt, Artificial Sequence
  Description of Artificial Sequence: Synthetic oligonucleotide
caauguggucaggugcaug

SEQ ID NO: 2031817 - RNA, 19 nt, Artificial Sequence
  Description of Artificial Sequence: Synthetic oligonucleotide
uucgcuggguuggauuguc

SEQ ID NO: 2031818 - RNA, 19 nt, Artificial Sequence
  Description of Artificial Sequence: Synthetic oligonucleotide
cuuguucuugcccuucccu

SEQ ID NO: 2031819 - RNA, 19 nt, Artificial Sequence
  Description of Artificial Sequence: Synthetic oligonucleotide
cguaucuuuucucagccca

SEQ ID NO: 2031820 - RNA, 19 nt, Artificial Sequence
  Description of Artificial Sequence: Synthetic oligonucleotide
ugcuuguggaggagccgau

SEQ ID NO: 2031821 - RNA, 19 nt, Artificial Sequence
  Description of Artificial Sequence: Synthetic oligonucleotide
aggcgccggucaaucaggc

SEQ ID NO: 2031822 - RNA, 19 nt, Artificial Sequence
  Description of Artificial Sequence: Synthetic oligonucleotide
guggcugguaagcaccucu

SEQ ID NO: 2031823 - RNA, 19 nt, Artificial Sequence
  Description of Artificial Sequence: Synthetic oligonucleotide
augcugacguucugauaaa

SEQ ID NO: 2031824 - RNA, 19 nt, Artificial Sequence
  Description of Artificial Sequence: Synthetic oligonucleotide
aguggcugguaagcaccuc

SEQ ID NO: 2031825 - RNA, 19 nt, Artificial Sequence
  Description of Artificial Sequence: Synthetic oligonucleotide
cauucguucuucugaaguu

SEQ ID NO: 2031826 - RNA, 19 nt, Artificial Sequence
  Description of Artificial Sequence: Synthetic oligonucleotide
gcugagacucagaugaaaa

SEQ ID NO: 2031827 - RNA, 19 nt, Artificial Sequence
  Description of Artificial Sequence: Synthetic oligonucleotide
ccacauguuguaagaggac

SEQ ID NO: 2031828 - RNA, 19 nt, Artificial Sequence
  Description of Artificial Sequence: Synthetic oligonucleotide
uccuuucagccagcauuug

SEQ ID NO: 2031829 - RNA, 19 nt, Artificial Sequence
  Description of Artificial Sequence: Synthetic oligonucleotide
aagcaccucucgggucugg

SEQ ID NO: 2031830 - RNA, 19 nt, Artificial Sequence
  Description of Artificial Sequence: Synthetic oligonucleotide
cugagacucagaugaaaau

SEQ ID NO: 2031831 - RNA, 19 nt, Artificial Sequence
  Description of Artificial Sequence: Synthetic oligonucleotide
gugggcccauucaauguug

SEQ ID NO: 2031832 - RNA, 19 nt, Artificial Sequence
  Description of Artificial Sequence: Synthetic oligonucleotide
gguaugcugggucccauua

SEQ ID NO: 2031833 - RNA, 19 nt, Artificial Sequence
  Description of Artificial Sequence: Synthetic oligonucleotide
gcuuggggaguuuucagcu

SEQ ID NO: 2031834 - RNA, 19 nt, Artificial Sequence
  Description of Artificial Sequence: Synthetic oligonucleotide
cugggccacuacaaacuca

SEQ ID NO: 2031835 - RNA, 19 nt, Artificial Sequence
  Description of Artificial Sequence: Synthetic oligonucleotide
ggguaccagcggcagugcg

SEQ ID NO: 2031836 - RNA, 19 nt, Artificial Sequence
  Description of Artificial Sequence: Synthetic oligonucleotide
gaugaaaaugaggcuugau

SEQ ID NO: 2031837 - RNA, 19 nt, Artificial Sequence
  Description of Artificial Sequence: Synthetic oligonucleotide
cccauucuaugacuggauc

SEQ ID NO: 2031838 - RNA, 19 nt, Artificial Sequence
  Description of Artificial Sequence: Synthetic oligonucleotide
uggaucccauucguucuuc

SEQ ID NO: 2031839 - RNA, 19 nt, Artificial Sequence
  Description of Artificial Sequence: Synthetic oligonucleotide
cuaaugucucuggcucuuc

SEQ ID NO: 2031840 - RNA, 19 nt, Artificial Sequence
  Description of Artificial Sequence: Synthetic oligonucleotide
gagcuugugcuugaccgua

SEQ ID NO: 2031841 - RNA, 19 nt, Artificial Sequence
  Description of Artificial Sequence: Synthetic oligonucleotide
aagcuuggcuuggggaguu

SEQ ID NO: 2031842 - RNA, 19 nt, Artificial Sequence
  Description of Artificial Sequence: Synthetic oligonucleotide
ggauuguccaaggaugugu

SEQ ID NO: 2031843 - RNA, 19 nt, Artificial Sequence
  Description of Artificial Sequence: Synthetic oligonucleotide
guccagguuuaucucaaau

SEQ ID NO: 2031844 - RNA, 19 nt, Artificial Sequence
  Description of Artificial Sequence: Synthetic oligonucleotide
auccaccuucacccuguga

SEQ ID NO: 2031845 - RNA, 19 nt, Artificial Sequence
  Description of Artificial Sequence: Synthetic oligonucleotide
guagguaugcuggguccca

SEQ ID NO: 2031846 - RNA, 19 nt, Artificial Sequence
  Description of Artificial Sequence: Synthetic oligonucleotide
gcgagcccgaagcuccugg

SEQ ID NO: 2031847 - RNA, 19 nt, Artificial Sequence
  Description of Artificial Sequence: Synthetic oligonucleotide
acuuuacagcugcccggau

SEQ ID NO: 2031848 - RNA, 19 nt, Artificial Sequence
  Description of Artificial Sequence: Synthetic oligonucleotide
cagaucagagacccugugu

SEQ ID NO: 2031849 - RNA, 19 nt, Artificial Sequence
  Description of Artificial Sequence: Synthetic oligonucleotide
cugguacuccuccuccaga

SEQ ID NO: 2031850 - RNA, 19 nt, Artificial Sequence
  Description of Artificial Sequence: Synthetic oligonucleotide
gguguagaacuugauggua

SEQ ID NO: 2031851 - RNA, 19 nt, Artificial Sequence
  Description of Artificial Sequence: Synthetic oligonucleotide
ugggucccauuaugcuugu

SEQ ID NO: 2031852 - RNA, 19 nt, Artificial Sequence
  Description of Artificial Sequence: Synthetic oligonucleotide
cagggucaagagaaagucu

SEQ ID NO: 2031853 - RNA, 19 nt, Artificial Sequence
  Description of Artificial Sequence: Synthetic oligonucleotide
gagucccauucaguggcca

SEQ ID NO: 2031854 - RNA, 19 nt, Artificial Sequence
  Description of Artificial Sequence: Synthetic oligonucleotide
acaauguggucaggugcau

SEQ ID NO: 2031855 - RNA, 19 nt, Artificial Sequence
  Description of Artificial Sequence: Synthetic oligonucleotide
ccguaucuuuucucagccc

SEQ ID NO: 2031856 - RNA, 19 nt, Artificial Sequence
  Description of Artificial Sequence: Synthetic oligonucleotide
uagggcccacauguuguaa

SEQ ID NO: 2031857 - RNA, 19 nt, Artificial Sequence
  Description of Artificial Sequence: Synthetic oligonucleotide
gucagugucuaagaacuuu

SEQ ID NO: 2031858 - RNA, 19 nt, Artificial Sequence
  Description of Artificial Sequence: Synthetic oligonucleotide
uagguaugcugggucccau

SEQ ID NO: 2031859 - RNA, 19 nt, Artificial Sequence
  Description of Artificial Sequence: Synthetic oligonucleotide
ccuccagacgugacagaag

SEQ ID NO: 2031860 - RNA, 19 nt, Artificial Sequence
  Description of Artificial Sequence: Synthetic oligonucleotide
agucgugggcccauucaau

SEQ ID NO: 2031861 - RNA, 19 nt, Artificial Sequence
  Description of Artificial Sequence: Synthetic oligonucleotide
caccucucgggucugggua

SEQ ID NO: 2031862 - RNA, 19 nt, Artificial Sequence
  Description of Artificial Sequence: Synthetic oligonucleotide
cacuaaugucucuggcucu

SEQ ID NO: 2031863 - RNA, 19 nt, Artificial Sequence
  Description of Artificial Sequence: Synthetic oligonucleotide
ggucaagagaaagucucua

SEQ ID NO: 2031864 - RNA, 19 nt, Artificial Sequence
  Description of Artificial Sequence: Synthetic oligonucleotide
cuauuagguacaggccaaa

SEQ ID NO: 2031865 - RNA, 19 nt, Artificial Sequence
  Description of Artificial Sequence: Synthetic oligonucleotide
cagugcgagcccgaagcuc

SEQ ID NO: 2031866 - RNA, 19 nt, Artificial Sequence
  Description of Artificial Sequence: Synthetic oligonucleotide
cucgggucuggguagguau

SEQ ID NO: 2031867 - RNA, 19 nt, Artificial Sequence
  Description of Artificial Sequence: Synthetic oligonucleotide
gguaccagcggcagugcga

SEQ ID NO: 2031868 - RNA, 19 nt, Artificial Sequence
  Description of Artificial Sequence: Synthetic oligonucleotide
cgccguaucuuuucucagc

SEQ ID NO: 2031869 - RNA, 19 nt, Artificial Sequence
  Description of Artificial Sequence: Synthetic oligonucleotide
caggugcaugguguagaac

SEQ ID NO: 2031870 - RNA, 19 nt, Artificial Sequence
  Description of Artificial Sequence: Synthetic oligonucleotide
ucucgggucuggguaggua

SEQ ID NO: 2031871 - RNA, 19 nt, Artificial Sequence
  Description of Artificial Sequence: Synthetic oligonucleotide
cugcccggaucaucugauc

SEQ ID NO: 2031872 - RNA, 19 nt, Artificial Sequence
  Description of Artificial Sequence: Synthetic oligonucleotide
ccauucguucuucugaagu

SEQ ID NO: 2031873 - RNA, 19 nt, Artificial Sequence
  Description of Artificial Sequence: Synthetic oligonucleotide
uuguuucgcuggguuggau

SEQ ID NO: 2031874 - RNA, 19 nt, Artificial Sequence
  Description of Artificial Sequence: Synthetic oligonucleotide
gucaggcgccggucaauca

SEQ ID NO: 2031875 - RNA, 19 nt, Artificial Sequence
  Description of Artificial Sequence: Synthetic oligonucleotide
gugacagagcuuagauaaa

SEQ ID NO: 2031876 - RNA, 19 nt, Artificial Sequence
  Description of Artificial Sequence: Synthetic oligonucleotide
ccauugguagcagauguaa

SEQ ID NO: 2031877 - RNA, 19 nt, Artificial Sequence
  Description of Artificial Sequence: Synthetic oligonucleotide
cuuguuucgcuggguugga

SEQ ID NO: 2031878 - RNA, 19 nt, Artificial Sequence
  Description of Artificial Sequence: Synthetic oligonucleotide
cccauucguucuucugaag

SEQ ID NO: 2031879 - RNA, 19 nt, Artificial Sequence
  Description of Artificial Sequence: Synthetic oligonucleotide
ggguuggauuguccaagga

SEQ ID NO: 2031880 - RNA, 19 nt, Artificial Sequence
  Description of Artificial Sequence: Synthetic oligonucleotide
ccgaucuccacgccguauc

SEQ ID NO: 2031881 - RNA, 19 nt, Artificial Sequence
  Description of Artificial Sequence: Synthetic oligonucleotide
guaugcugggucccauuau

SEQ ID NO: 2031882 - RNA, 19 nt, Artificial Sequence
  Description of Artificial Sequence: Synthetic oligonucleotide
gcuugugcuugaccguaga

SEQ ID NO: 2031883 - RNA, 19 nt, Artificial Sequence
  Description of Artificial Sequence: Synthetic oligonucleotide
gagccgaucuccacgccgu

SEQ ID NO: 2031884 - RNA, 19 nt, Artificial Sequence
  Description of Artificial Sequence: Synthetic oligonucleotide
uccugcugggagucccauu

SEQ ID NO: 2031885 - RNA, 19 nt, Artificial Sequence
  Description of Artificial Sequence: Synthetic oligonucleotide
cagcggcagugcgagcccg

SEQ ID NO: 2031886 - RNA, 19 nt, Artificial Sequence
  Description of Artificial Sequence: Synthetic oligonucleotide
cacucuuguaggagcuugu

SEQ ID NO: 2031887 - RNA, 19 nt, Artificial Sequence
  Description of Artificial Sequence: Synthetic oligonucleotide
cccugugagaugcugacgu

SEQ ID NO: 2031888 - RNA, 19 nt, Artificial Sequence
  Description of Artificial Sequence: Synthetic oligonucleotide
guaucuuuucucagcccau

SEQ ID NO: 2031889 - RNA, 19 nt, Artificial Sequence
  Description of Artificial Sequence: Synthetic oligonucleotide
ccauucaauguugccccac

SEQ ID NO: 2031890 - RNA, 19 nt, Artificial Sequence
  Description of Artificial Sequence: Synthetic oligonucleotide
gacuugagcugggccacua

SEQ ID NO: 2031891 - RNA, 19 nt, Artificial Sequence
  Description of Artificial Sequence: Synthetic oligonucleotide
gguauccugcugggagucc

SEQ ID NO: 2031892 - RNA, 19 nt, Artificial Sequence
  Description of Artificial Sequence: Synthetic oligonucleotide
ucauagucgugggcccauu

SEQ ID NO: 2031893 - RNA, 19 nt, Artificial Sequence
  Description of Artificial Sequence: Synthetic oligonucleotide
ggagcuugugcuugaccgu

SEQ ID NO: 2031894 - RNA, 19 nt, Artificial Sequence
  Description of Artificial Sequence: Synthetic oligonucleotide
uaccagcggcagugcgagc

SEQ ID NO: 2031895 - RNA, 19 nt, Artificial Sequence
  Description of Artificial Sequence: Synthetic oligonucleotide
ccguagagcuuuccaagca

SEQ ID NO: 2031896 - RNA, 19 nt, Artificial Sequence
  Description of Artificial Sequence: Synthetic oligonucleotide
cacuggguacagaguucca

SEQ ID NO: 2031897 - RNA, 19 nt, Artificial Sequence
  Description of Artificial Sequence: Synthetic oligonucleotide
ggcgccggucaaucaggcc

SEQ ID NO: 2031898 - RNA, 19 nt, Artificial Sequence
  Description of Artificial Sequence: Synthetic oligonucleotide
caaucccuuguagggccca

SEQ ID NO: 2031899 - RNA, 19 nt, Artificial Sequence
  Description of Artificial Sequence: Synthetic oligonucleotide
cuuguagggcccacauguu

SEQ ID NO: 2031900 - RNA, 19 nt, Artificial Sequence
  Description of Artificial Sequence: Synthetic oligonucleotide
ggaucaucugauccuuguu

SEQ ID NO: 2031901 - RNA, 19 nt, Artificial Sequence
  Description of Artificial Sequence: Synthetic oligonucleotide
cuucccugccgugagguuu

SEQ ID NO: 2031902 - RNA, 19 nt, Artificial Sequence
  Description of Artificial Sequence: Synthetic oligonucleotide
guacaggccaaaagagcuu

SEQ ID NO: 2031903 - RNA, 19 nt, Artificial Sequence
  Description of Artificial Sequence: Synthetic oligonucleotide
ccacgccguaucuuuucuc

SEQ ID NO: 2031904 - RNA, 19 nt, Artificial Sequence
  Description of Artificial Sequence: Synthetic oligonucleotide
ggaucccauucguucuucu

SEQ ID NO: 2031905 - RNA, 19 nt, Artificial Sequence
  Description of Artificial Sequence: Synthetic oligonucleotide
gcuuguggaggagccgauc

SEQ ID NO: 2031906 - RNA, 19 nt, Artificial Sequence
  Description of Artificial Sequence: Synthetic oligonucleotide
gcccuucccugccgugagg

SEQ ID NO: 2031907 - RNA, 19 nt, Artificial Sequence
  Description of Artificial Sequence: Synthetic oligonucleotide
ucccugccgugagguuucc

SEQ ID NO: 2031908 - RNA, 19 nt, Artificial Sequence
  Description of Artificial Sequence: Synthetic oligonucleotide
gcaguuccuuucagccagc

SEQ ID NO: 2031909 - RNA, 19 nt, Artificial Sequence
  Description of Artificial Sequence: Synthetic oligonucleotide
ccucucgggucuggguagg

SEQ ID NO: 2031910 - RNA, 19 nt, Artificial Sequence
  Description of Artificial Sequence: Synthetic oligonucleotide
ggccucacuggggacagua

SEQ ID NO: 2031911 - RNA, 19 nt, Artificial Sequence
  Description of Artificial Sequence: Synthetic oligonucleotide
cuggaucccauucguucuu

SEQ ID NO: 2031912 - RNA, 19 nt, Artificial Sequence
  Description of Artificial Sequence: Synthetic oligonucleotide
agcggcagugcgagcccga

SEQ ID NO: 2031913 - RNA, 19 nt, Artificial Sequence
  Description of Artificial Sequence: Synthetic oligonucleotide
gccauugguagcagaugua

SEQ ID NO: 2031914 - RNA, 19 nt, Artificial Sequence
  Description of Artificial Sequence: Synthetic oligonucleotide
gcugggagucccauucagu

SEQ ID NO: 2031915 - RNA, 19 nt, Artificial Sequence
  Description of Artificial Sequence: Synthetic oligonucleotide
ccacugcgauggccaaggc

SEQ ID NO: 2031916 - RNA, 19 nt, Artificial Sequence
  Description of Artificial Sequence: Synthetic oligonucleotide
cucauagucgugggcccau

SEQ ID NO: 2031917 - RNA, 19 nt, Artificial Sequence
  Description of Artificial Sequence: Synthetic oligonucleotide
agcuuggcuuggggaguuu

SEQ ID NO: 2031918 - RNA, 19 nt, Artificial Sequence
  Description of Artificial Sequence: Synthetic oligonucleotide
gcaccucucgggucugggu

SEQ ID NO: 2031919 - RNA, 19 nt, Artificial Sequence
  Description of Artificial Sequence: Synthetic oligonucleotide
cgccggucaaucaggccca

SEQ ID NO: 2031920 - RNA, 19 nt, Artificial Sequence
  Description of Artificial Sequence: Synthetic oligonucleotide
gcuugaccguagagcuuuc

SEQ ID NO: 2031921 - RNA, 19 nt, Artificial Sequence
  Description of Artificial Sequence: Synthetic oligonucleotide
cucacucuuguaggagcuu

SEQ ID NO: 2031922 - RNA, 19 nt, Artificial Sequence
  Description of Artificial Sequence: Synthetic oligonucleotide
ccggucaaucaggcccaag

SEQ ID NO: 2031923 - RNA, 19 nt, Artificial Sequence
  Description of Artificial Sequence: Synthetic oligonucleotide
gcccauucuaugacuggau

SEQ ID NO: 2031924 - RNA, 19 nt, Artificial Sequence
  Description of Artificial Sequence: Synthetic oligonucleotide
gccucacuggggacaguaa

SEQ ID NO: 2031925 - RNA, 19 nt, Artificial Sequence
  Description of Artificial Sequence: Synthetic oligonucleotide
cggcagugcgagcccgaag

SEQ ID NO: 2031926 - RNA, 19 nt, Artificial Sequence
  Description of Artificial Sequence: Synthetic oligonucleotide
cagucaggcgccggucaau

SEQ ID NO: 2031927 - RNA, 19 nt, Artificial Sequence
  Description of Artificial Sequence: Synthetic oligonucleotide
cgaucuccacgccguaucu

SEQ ID NO: 2031928 - RNA, 19 nt, Artificial Sequence
  Description of Artificial Sequence: Synthetic oligonucleotide
gugcgagcccgaagcuccu

SEQ ID NO: 2031929 - RNA, 19 nt, Artificial Sequence
  Description of Artificial Sequence: Synthetic oligonucleotide
ccugugagaugcugacguu

SEQ ID NO: 2031930 - RNA, 19 nt, Artificial Sequence
  Description of Artificial Sequence: Synthetic oligonucleotide
cccuucccugccgugaggu

SEQ ID NO: 2031931 - RNA, 19 nt, Artificial Sequence
  Description of Artificial Sequence: Synthetic oligonucleotide
ccgugagguuuccagccau

SEQ ID NO: 2031932 - RNA, 19 nt, Artificial Sequence
  Description of Artificial Sequence: Synthetic oligonucleotide
cgugggcccauucaauguu

SEQ ID NO: 2031933 - RNA, 19 nt, Artificial Sequence
  Description of Artificial Sequence: Synthetic oligonucleotide
gccggucaaucaggcccaa

SEQ ID NO: 2031934 - RNA, 19 nt, Artificial Sequence
  Description of Artificial Sequence: Synthetic oligonucleotide
cccugccgugagguuucca

SEQ ID NO: 2031935 - RNA, 19 nt, Artificial Sequence
  Description of Artificial Sequence: Synthetic oligonucleotide
aaagacacgaaacggacgc

SEQ ID NO: 2031936 - RNA, 19 nt, Artificial Sequence
  Description of Artificial Sequence: Synthetic oligonucleotide
aaggauuccagucaacagc

SEQ ID NO: 2031937 - RNA, 19 nt, Artificial Sequence
  Description of Artificial Sequence: Synthetic oligonucleotide
gauauuggagaacacaugg

SEQ ID NO: 2031938 - RNA, 19 nt, Artificial Sequence
  Description of Artificial Sequence: Synthetic oligonucleotide
aacaaggccaagcaggacc

SEQ ID NO: 2031939 - RNA, 19 nt, Artificial Sequence
  Description of Artificial Sequence: Synthetic oligonucleotide
uuuaagacucugaacaagg

SEQ ID NO: 2031940 - RNA, 19 nt, Artificial Sequence
  Description of Artificial Sequence: Synthetic oligonucleotide
aaguuugacaaggagacgg

SEQ ID NO: 2031941 - RNA, 19 nt, Artificial Sequence
  Description of Artificial Sequence: Synthetic oligonucleotide
uguuccauuguucaauggg

SEQ ID NO: 2031942 - RNA, 19 nt, Artificial Sequence
  Description of Artificial Sequence: Synthetic oligonucleotide
aaugggguccggcacagcc

SEQ ID NO: 2031943 - RNA, 19 nt, Artificial Sequence
  Description of Artificial Sequence: Synthetic oligonucleotide
agaaguuugacaaggagac

SEQ ID NO: 2031944 - RNA, 19 nt, Artificial Sequence
  Description of Artificial Sequence: Synthetic oligonucleotide
aaggagacgguacuuacag

SEQ ID NO: 2031945 - RNA, 19 nt, Artificial Sequence
  Description of Artificial Sequence: Synthetic oligonucleotide
agguagauauuguuguucc

SEQ ID NO: 2031946 - RNA, 19 nt, Artificial Sequence
  Description of Artificial Sequence: Synthetic oligonucleotide
guucaaaagacacgaaacg

SEQ ID NO: 2031947 - RNA, 19 nt, Artificial Sequence
  Description of Artificial Sequence: Synthetic oligonucleotide
uucaaaagacacgaaacgg

SEQ ID NO: 2031948 - RNA, 19 nt, Artificial Sequence
  Description of Artificial Sequence: Synthetic oligonucleotide
guguuuaagacucugaaca

SEQ ID NO: 2031949 - RNA, 19 nt, Artificial Sequence
  Description of Artificial Sequence: Synthetic oligonucleotide
aauggauagaucuggugca

SEQ ID NO: 2031950 - RNA, 19 nt, Artificial Sequence
  Description of Artificial Sequence: Synthetic oligonucleotide
aguuacacgugccaggagg

SEQ ID NO: 2031951 - RNA, 19 nt, Artificial Sequence
  Description of Artificial Sequence: Synthetic oligonucleotide
caauggauagaucuggugc

SEQ ID NO: 2031952 - RNA, 19 nt, Artificial Sequence
  Description of Artificial Sequence: Synthetic oligonucleotide
aguguuuaagacucugaac

SEQ ID NO: 2031953 - RNA, 19 nt, Artificial Sequence
  Description of Artificial Sequence: Synthetic oligonucleotide
uauuggagaacacaugggu

SEQ ID NO: 2031954 - RNA, 19 nt, Artificial Sequence
  Description of Artificial Sequence: Synthetic oligonucleotide
cuuaucgaggacauucugg

SEQ ID NO: 2031955 - RNA, 19 nt, Artificial Sequence
  Description of Artificial Sequence: Synthetic oligonucleotide
aggacugacagacuugcac

SEQ ID NO: 2031956 - RNA, 19 nt, Artificial Sequence
  Description of Artificial Sequence: Synthetic oligonucleotide
auuguuguuccauuguuca

SEQ ID NO: 2031957 - RNA, 19 nt, Artificial Sequence
  Description of Artificial Sequence: Synthetic oligonucleotide
ugagguugcguccuauggg

SEQ ID NO: 2031958 - RNA, 19 nt, Artificial Sequence
  Description of Artificial Sequence: Synthetic oligonucleotide
uuaucgaggacauucuggu

SEQ ID NO: 2031959 - RNA, 19 nt, Artificial Sequence
  Description of Artificial Sequence: Synthetic oligonucleotide
auaauggccagcccagaac

SEQ ID NO: 2031960 - RNA, 19 nt, Artificial Sequence
  Description of Artificial Sequence: Synthetic oligonucleotide
uuugacaaggagacgguac

SEQ ID NO: 2031961 - RNA, 19 nt, Artificial Sequence
  Description of Artificial Sequence: Synthetic oligonucleotide
auccuagaguuacacgugc

SEQ ID NO: 2031962 - RNA, 19 nt, Artificial Sequence
  Description of Artificial Sequence: Synthetic oligonucleotide
aacggugguggccuucgcc

SEQ ID NO: 2031963 - RNA, 19 nt, Artificial Sequence
  Description of Artificial Sequence: Synthetic oligonucleotide
ugauauuggagaacacaug

SEQ ID NO: 2031964 - RNA, 19 nt, Artificial Sequence
  Description of Artificial Sequence: Synthetic oligonucleotide
caaaagacacgaaacggac

SEQ ID NO: 2031965 - RNA, 19 nt, Artificial Sequence
  Description of Artificial Sequence: Synthetic oligonucleotide
gaacuuaucgaggacauuc

SEQ ID NO: 2031966 - RNA, 19 nt, Artificial Sequence
  Description of Artificial Sequence: Synthetic oligonucleotide
aaaagacacgaaacggacg

SEQ ID NO: 2031967 - RNA, 19 nt, Artificial Sequence
  Description of Artificial Sequence: Synthetic oligonucleotide
gaaggauuccagucaacag

SEQ ID NO: 2031968 - RNA, 19 nt, Artificial Sequence
  Description of Artificial Sequence: Synthetic oligonucleotide
cuugauucaugaaggauuc

SEQ ID NO: 2031969 - RNA, 19 nt, Artificial Sequence
  Description of Artificial Sequence: Synthetic oligonucleotide
uaauggccagcccagaacu

SEQ ID NO: 2031970 - RNA, 19 nt, Artificial Sequence
  Description of Artificial Sequence: Synthetic oligonucleotide
acuccaguguuuaagacuc

SEQ ID NO: 2031971 - RNA, 19 nt, Artificial Sequence
  Description of Artificial Sequence: Synthetic oligonucleotide
aucgaggacauucugguga

SEQ ID NO: 2031972 - RNA, 19 nt, Artificial Sequence
  Description of Artificial Sequence: Synthetic oligonucleotide
ucuaccaaggagcagcaau

SEQ ID NO: 2031973 - RNA, 19 nt, Artificial Sequence
  Description of Artificial Sequence: Synthetic oligonucleotide
agauauuguuguuccauug

SEQ ID NO: 2031974 - RNA, 19 nt, Artificial Sequence
  Description of Artificial Sequence: Synthetic oligonucleotide
ugcaccauccacuugcgca

SEQ ID NO: 2031975 - RNA, 19 nt, Artificial Sequence
  Description of Artificial Sequence: Synthetic oligonucleotide
acaaggagacgguacuuac

SEQ ID NO: 2031976 - RNA, 19 nt, Artificial Sequence
  Description of Artificial Sequence: Synthetic oligonucleotide
ugauucaugaaggauucca

SEQ ID NO: 2031977 - RNA, 19 nt, Artificial Sequence
  Description of Artificial Sequence: Synthetic oligonucleotide
gauuccagucaacagcccc

SEQ ID NO: 2031978 - RNA, 19 nt, Artificial Sequence
  Description of Artificial Sequence: Synthetic oligonucleotide
ugaaggaagucacgaagca

SEQ ID NO: 2031979 - RNA, 19 nt, Artificial Sequence
  Description of Artificial Sequence: Synthetic oligonucleotide
auagaucuggugcaggacu

SEQ ID NO: 2031980 - RNA, 19 nt, Artificial Sequence
  Description of Artificial Sequence: Synthetic oligonucleotide
gaggacauucuggugagcg

SEQ ID NO: 2031981 - RNA, 19 nt, Artificial Sequence
  Description of Artificial Sequence: Synthetic oligonucleotide
uuucuugcgacaccagcug

SEQ ID NO: 2031982 - RNA, 19 nt, Artificial Sequence
  Description of Artificial Sequence: Synthetic oligonucleotide
cacucuggccccauaaugg

SEQ ID NO: 2031983 - RNA, 19 nt, Artificial Sequence
  Description of Artificial Sequence: Synthetic oligonucleotide
guuccauuguucaaugggg

SEQ ID NO: 2031984 - RNA, 19 nt, Artificial Sequence
  Description of Artificial Sequence: Synthetic oligonucleotide
uauuguuguuccauuguuc

SEQ ID NO: 2031985 - RNA, 19 nt, Artificial Sequence
  Description of Artificial Sequence: Synthetic oligonucleotide
gacugacagacuugcacgg

SEQ ID NO: 2031986 - RNA, 19 nt, Artificial Sequence
  Description of Artificial Sequence: Synthetic oligonucleotide
ggagacgguacuuacagcc

SEQ ID NO: 2031987 - RNA, 19 nt, Artificial Sequence
  Description of Artificial Sequence: Synthetic oligonucleotide
ugaaggauuccagucaaca

SEQ ID NO: 2031988 - RNA, 19 nt, Artificial Sequence
  Description of Artificial Sequence: Synthetic oligonucleotide
uugacaaggagacgguacu

SEQ ID NO: 2031989 - RNA, 19 nt, Artificial Sequence
  Description of Artificial Sequence: Synthetic oligonucleotide
caagaaguuugacaaggag

SEQ ID NO: 2031990 - RNA, 19 nt, Artificial Sequence
  Description of Artificial Sequence: Synthetic oligonucleotide
gaacacaugggugaccugc

SEQ ID NO: 2031991 - RNA, 19 nt, Artificial Sequence
  Description of Artificial Sequence: Synthetic oligonucleotide
uccacgaccuguuucuugc

SEQ ID NO: 2031992 - RNA, 19 nt, Artificial Sequence
  Description of Artificial Sequence: Synthetic oligonucleotide
ucaagaaguuugacaagga

SEQ ID NO: 2031993 - RNA, 19 nt, Artificial Sequence
  Description of Artificial Sequence: Synthetic oligonucleotide
agcgcuugauucaugaagg

SEQ ID NO: 2031994 - RNA, 19 nt, Artificial Sequence
  Description of Artificial Sequence: Synthetic oligonucleotide
ucacucuggccccauaaug

SEQ ID NO: 2031995 - RNA, 19 nt, Artificial Sequence
  Description of Artificial Sequence: Synthetic oligonucleotide
ugcgacaccagcugaagga

SEQ ID NO: 2031996 - RNA, 19 nt, Artificial Sequence
  Description of Artificial Sequence: Synthetic oligonucleotide
agacgguacuuacagccac

SEQ ID NO: 2031997 - RNA, 19 nt, Artificial Sequence
  Description of Artificial Sequence: Synthetic oligonucleotide
uguuuaagacucugaacaa

SEQ ID NO: 2031998 - RNA, 19 nt, Artificial Sequence
  Description of Artificial Sequence: Synthetic oligonucleotide
agacacgaaacggacgccc

SEQ ID NO: 2031999 - RNA, 19 nt, Artificial Sequence
  Description of Artificial Sequence: Synthetic oligonucleotide
agcgucaagaaguuugaca

SEQ ID NO: 2032000 - RNA, 19 nt, Artificial Sequence
  Description of Artificial Sequence: Synthetic oligonucleotide
uccuaugggucuucgcgcg

SEQ ID NO: 2032001 - RNA, 19 nt, Artificial Sequence
  Description of Artificial Sequence: Synthetic oligonucleotide
gcagaaguggcccagcggg

SEQ ID NO: 2032002 - RNA, 19 nt, Artificial Sequence
  Description of Artificial Sequence: Synthetic oligonucleotide
ucgccuaggacugacagac

SEQ ID NO: 2032003 - RNA, 19 nt, Artificial Sequence
  Description of Artificial Sequence: Synthetic oligonucleotide
guuuaagacucugaacaag

SEQ ID NO: 2032004 - RNA, 19 nt, Artificial Sequence
  Description of Artificial Sequence: Synthetic oligonucleotide
uggccguccaccauggcgc

SEQ ID NO: 2032005 - RNA, 19 nt, Artificial Sequence
  Description of Artificial Sequence: Synthetic oligonucleotide
uuccauuguucaauggggu

SEQ ID NO: 2032006 - RNA, 19 nt, Artificial Sequence
  Description of Artificial Sequence: Synthetic oligonucleotide
gguacuuacagccacuguc

SEQ ID NO: 2032007 - RNA, 19 nt, Artificial Sequence
  Description of Artificial Sequence: Synthetic oligonucleotide
cagccgagaacuuaucgag

SEQ ID NO: 2032008 - RNA, 19 nt, Artificial Sequence
  Description of Artificial Sequence: Synthetic oligonucleotide
acgaccuguuucuugcgac

SEQ ID NO: 2032009 - RNA, 19 nt, Artificial Sequence
  Description of Artificial Sequence: Synthetic oligonucleotide
acaugggugaccugcaggu

SEQ ID NO: 2032010 - RNA, 19 nt, Artificial Sequence
  Description of Artificial Sequence: Synthetic oligonucleotide
augggugaccugcagguag

SEQ ID NO: 2032011 - RNA, 19 nt, Artificial Sequence
  Description of Artificial Sequence: Synthetic oligonucleotide
ugagcgucaagaaguuuga

SEQ ID NO: 2032012 - RNA, 19 nt, Artificial Sequence
  Description of Artificial Sequence: Synthetic oligonucleotide
ucucgacaaacgguggugg

SEQ ID NO: 2032013 - RNA, 19 nt, Artificial Sequence
  Description of Artificial Sequence: Synthetic oligonucleotide
acagccgagaacuuaucga

SEQ ID NO: 2032014 - RNA, 19 nt, Artificial Sequence
  Description of Artificial Sequence: Synthetic oligonucleotide
uccggcacagccgagaacu

SEQ ID NO: 2032015 - RNA, 19 nt, Artificial Sequence
  Description of Artificial Sequence: Synthetic oligonucleotide
uucaaugggguccggcaca

SEQ ID NO: 2032016 - RNA, 19 nt, Artificial Sequence
  Description of Artificial Sequence: Synthetic oligonucleotide
auauuggagaacacauggg

SEQ ID NO: 2032017 - RNA, 19 nt, Artificial Sequence
  Description of Artificial Sequence: Synthetic oligonucleotide
gugagcgucaagaaguuug

SEQ ID NO: 2032018 - RNA, 19 nt, Artificial Sequence
  Description of Artificial Sequence: Synthetic oligonucleotide
aaacggacgccccuccuga

SEQ ID NO: 2032019 - RNA, 19 nt, Artificial Sequence
  Description of Artificial Sequence: Synthetic oligonucleotide
aagacacgaaacggacgcc

SEQ ID NO: 2032020 - RNA, 19 nt, Artificial Sequence
  Description of Artificial Sequence: Synthetic oligonucleotide
cuaggacugacagacuugc

SEQ ID NO: 2032021 - RNA, 19 nt, Artificial Sequence
  Description of Artificial Sequence: Synthetic oligonucleotide
cagcgcuugauucaugaag

SEQ ID NO: 2032022 - RNA, 19 nt, Artificial Sequence
  Description of Artificial Sequence: Synthetic oligonucleotide
cagacuugcacggucacgc

SEQ ID NO: 2032023 - RNA, 19 nt, Artificial Sequence
  Description of Artificial Sequence: Synthetic oligonucleotide
ugacagacuugcacgguca

SEQ ID NO: 2032024 - RNA, 19 nt, Artificial Sequence
  Description of Artificial Sequence: Synthetic oligonucleotide
uugcgacaccagcugaagg

SEQ ID NO: 2032025 - RNA, 19 nt, Artificial Sequence
  Description of Artificial Sequence: Synthetic oligonucleotide
ugccaggagggaaccagcg

SEQ ID NO: 2032026 - RNA, 19 nt, Artificial Sequence
  Description of Artificial Sequence: Synthetic oligonucleotide
cuugcgcaggccuuccugg

SEQ ID NO: 2032027 - RNA, 19 nt, Artificial Sequence
  Description of Artificial Sequence: Synthetic oligonucleotide
cacgaagcaggucugugag

SEQ ID NO: 2032028 - RNA, 19 nt, Artificial Sequence
  Description of Artificial Sequence: Synthetic oligonucleotide
uccaccggauccuagaguu

SEQ ID NO: 2032029 - RNA, 19 nt, Artificial Sequence
  Description of Artificial Sequence: Synthetic oligonucleotide
acuuaucgaggacauucug

SEQ ID NO: 2032030 - RNA, 19 nt, Artificial Sequence
  Description of Artificial Sequence: Synthetic oligonucleotide
ucgaggacauucuggugag

SEQ ID NO: 2032031 - RNA, 19 nt, Artificial Sequence
  Description of Artificial Sequence: Synthetic oligonucleotide
cacagccgagaacuuaucg

SEQ ID NO: 2032032 - RNA, 19 nt, Artificial Sequence
  Description of Artificial Sequence: Synthetic oligonucleotide
auuggagaacacaugggug

SEQ ID NO: 2032033 - RNA, 19 nt, Artificial Sequence
  Description of Artificial Sequence: Synthetic oligonucleotide
aggagacgguacuuacagc

SEQ ID NO: 2032034 - RNA, 19 nt, Artificial Sequence
  Description of Artificial Sequence: Synthetic oligonucleotide
cauuguucaaugggguccg

SEQ ID NO: 2032035 - RNA, 19 nt, Artificial Sequence
  Description of Artificial Sequence: Synthetic oligonucleotide
cuucgccuaggacugacag

SEQ ID NO: 2032036 - RNA, 19 nt, Artificial Sequence
  Description of Artificial Sequence: Synthetic oligonucleotide
gaaguuugacaaggagacg

SEQ ID NO: 2032037 - RNA, 19 nt, Artificial Sequence
  Description of Artificial Sequence: Synthetic oligonucleotide
guuacacgugccaggaggg

SEQ ID NO: 2032038 - RNA, 19 nt, Artificial Sequence
  Description of Artificial Sequence: Synthetic oligonucleotide
uccuagaguuacacgugcc

SEQ ID NO: 2032039 - RNA, 19 nt, Artificial Sequence
  Description of Artificial Sequence: Synthetic oligonucleotide
cagcaauggauagaucugg

SEQ ID NO: 2032040 - RNA, 19 nt, Artificial Sequence
  Description of Artificial Sequence: Synthetic oligonucleotide
guguucaaaagacacgaaa

SEQ ID NO: 2032041 - RNA, 19 nt, Artificial Sequence
  Description of Artificial Sequence: Synthetic oligonucleotide
ugucucgacaaacgguggu

SEQ ID NO: 2032042 - RNA, 19 nt, Artificial Sequence
  Description of Artificial Sequence: Synthetic oligonucleotide
uggccuucgccuaggacug

SEQ ID NO: 2032043 - RNA, 19 nt, Artificial Sequence
  Description of Artificial Sequence: Synthetic oligonucleotide
acuugcacggucacgcugg

SEQ ID NO: 2032044 - RNA, 19 nt, Artificial Sequence
  Description of Artificial Sequence: Synthetic oligonucleotide
uggugcaggacuccagugu

SEQ ID NO: 2032045 - RNA, 19 nt, Artificial Sequence
  Description of Artificial Sequence: Synthetic oligonucleotide
gauccuagaguuacacgug

SEQ ID NO: 2032046 - RNA, 19 nt, Artificial Sequence
  Description of Artificial Sequence: Synthetic oligonucleotide
acgaaacggacgccccucc

SEQ ID NO: 2032047 - RNA, 19 nt, Artificial Sequence
  Description of Artificial Sequence: Synthetic oligonucleotide
ucuucgcgcgcagaagugg

SEQ ID NO: 2032048 - RNA, 19 nt, Artificial Sequence
  Description of Artificial Sequence: Synthetic oligonucleotide
cuggccguccaccauggcg

SEQ ID NO: 2032049 - RNA, 19 nt, Artificial Sequence
  Description of Artificial Sequence: Synthetic oligonucleotide
cuuacagccacugucaugu

SEQ ID NO: 2032050 - RNA, 19 nt, Artificial Sequence
  Description of Artificial Sequence: Synthetic oligonucleotide
gaaacggacgccccuccug

SEQ ID NO: 2032051 - RNA, 19 nt, Artificial Sequence
  Description of Artificial Sequence: Synthetic oligonucleotide
uccauuguucaaugggguc

SEQ ID NO: 2032052 - RNA, 19 nt, Artificial Sequence
  Description of Artificial Sequence: Synthetic oligonucleotide
auccccgccgugcugcacc

SEQ ID NO: 2032053 - RNA, 19 nt, Artificial Sequence
  Description of Artificial Sequence: Synthetic oligonucleotide
aaacggugguggccuucgc

SEQ ID NO: 2032054 - RNA, 19 nt, Artificial Sequence
  Description of Artificial Sequence: Synthetic oligonucleotide
cuaccacccagccaucccc

SEQ ID NO: 2032055 - RNA, 19 nt, Artificial Sequence
  Description of Artificial Sequence: Synthetic oligonucleotide
uccaguguuuaagacucug

SEQ ID NO: 2032056 - RNA, 19 nt, Artificial Sequence
  Description of Artificial Sequence: Synthetic oligonucleotide
caguguucaaaagacacga

SEQ ID NO: 2032057 - RNA, 19 nt, Artificial Sequence
  Description of Artificial Sequence: Synthetic oligonucleotide
ucuugcgacaccagcugaa

SEQ ID NO: 2032058 - RNA, 19 nt, Artificial Sequence
  Description of Artificial Sequence: Synthetic oligonucleotide
gcgucaagaaguuugacaa

SEQ ID NO: 2032059 - RNA, 19 nt, Artificial Sequence
  Description of Artificial Sequence: Synthetic oligonucleotide
ucgacaaacggugguggcc

SEQ ID NO: 2032060 - RNA, 19 nt, Artificial Sequence
  Description of Artificial Sequence: Synthetic oligonucleotide
uucuugcgacaccagcuga

SEQ ID NO: 2032061 - RNA, 19 nt, Artificial Sequence
  Description of Artificial Sequence: Synthetic oligonucleotide
agaguuacacgugccagga

SEQ ID NO: 2032062 - RNA, 19 nt, Artificial Sequence
  Description of Artificial Sequence: Synthetic oligonucleotide
agacagcaaucuccacacc

SEQ ID NO: 2032063 - RNA, 19 nt, Artificial Sequence
  Description of Artificial Sequence: Synthetic oligonucleotide
uaucgaggacauucuggug

SEQ ID NO: 2032064 - RNA, 19 nt, Artificial Sequence
  Description of Artificial Sequence: Synthetic oligonucleotide
gauagaucuggugcaggac

SEQ ID NO: 2032065 - RNA, 19 nt, Artificial Sequence
  Description of Artificial Sequence: Synthetic oligonucleotide
guccuaugggucuucgcgc

SEQ ID NO: 2032066 - RNA, 19 nt, Artificial Sequence
  Description of Artificial Sequence: Synthetic oligonucleotide
gacuccaguguuuaagacu

SEQ ID NO: 2032067 - RNA, 19 nt, Artificial Sequence
  Description of Artificial Sequence: Synthetic oligonucleotide
cugauauuggagaacacau

SEQ ID NO: 2032068 - RNA, 19 nt, Artificial Sequence
  Description of Artificial Sequence: Synthetic oligonucleotide
cagcugucucgacaaacgg

SEQ ID NO: 2032069 - RNA, 19 nt, Artificial Sequence
  Description of Artificial Sequence: Synthetic oligonucleotide
cuggugagcgucaagaagu

SEQ ID NO: 2032070 - RNA, 19 nt, Artificial Sequence
  Description of Artificial Sequence: Synthetic oligonucleotide
guacuuacagccacuguca

SEQ ID NO: 2032071 - RNA, 19 nt, Artificial Sequence
  Description of Artificial Sequence: Synthetic oligonucleotide
ccaguguucaaaagacacg

SEQ ID NO: 2032072 - RNA, 19 nt, Artificial Sequence
  Description of Artificial Sequence: Synthetic oligonucleotide
cuucgcgcgcagaaguggc

SEQ ID NO: 2032073 - RNA, 19 nt, Artificial Sequence
  Description of Artificial Sequence: Synthetic oligonucleotide
cugucucgacaaacggugg

SEQ ID NO: 2032074 - RNA, 19 nt, Artificial Sequence
  Description of Artificial Sequence: Synthetic oligonucleotide
acuugcgcaggccuuccug

SEQ ID NO: 2032075 - RNA, 19 nt, Artificial Sequence
  Description of Artificial Sequence: Synthetic oligonucleotide
guggccuucgccuaggacu

SEQ ID NO: 2032076 - RNA, 19 nt, Artificial Sequence
  Description of Artificial Sequence: Synthetic oligonucleotide
acggucacgcuggaguugg

SEQ ID NO: 2032077 - RNA, 19 nt, Artificial Sequence
  Description of Artificial Sequence: Synthetic oligonucleotide
ucaaugggguccggcacag

SEQ ID NO: 2032078 - RNA, 19 nt, Artificial Sequence
  Description of Artificial Sequence: Synthetic oligonucleotide
gcugucucgacaaacggug

SEQ ID NO: 2032079 - RNA, 19 nt, Artificial Sequence
  Description of Artificial Sequence: Synthetic oligonucleotide
cagcaaucuccacaccacc

SEQ ID NO: 2032080 - RNA, 19 nt, Artificial Sequence
  Description of Artificial Sequence: Synthetic oligonucleotide
cucgacaaacggugguggc

SEQ ID NO: 2032081 - RNA, 19 nt, Artificial Sequence
  Description of Artificial Sequence: Synthetic oligonucleotide
gucacgcuggaguugguca

SEQ ID NO: 2032082 - RNA, 19 nt, Artificial Sequence
  Description of Artificial Sequence: Synthetic oligonucleotide
uucgccuaggacugacaga

SEQ ID NO: 2032083 - RNA, 19 nt, Artificial Sequence
  Description of Artificial Sequence: Synthetic oligonucleotide
uacuuacagccacugucau

SEQ ID NO: 2032084 - RNA, 19 nt, Artificial Sequence
  Description of Artificial Sequence: Synthetic oligonucleotide
cagugcagcagcagcgagc

SEQ ID NO: 2032085 - RNA, 19 nt, Artificial Sequence
  Description of Artificial Sequence: Synthetic oligonucleotide
caugaaggauuccagucaa

SEQ ID NO: 2032086 - RNA, 19 nt, Artificial Sequence
  Description of Artificial Sequence: Synthetic oligonucleotide
caaggagcagcaauggaua

SEQ ID NO: 2032087 - RNA, 19 nt, Artificial Sequence
  Description of Artificial Sequence: Synthetic oligonucleotide
ucaugucgggcuccccacc

SEQ ID NO: 2032088 - RNA, 19 nt, Artificial Sequence
  Description of Artificial Sequence: Synthetic oligonucleotide
ugggucuucgcgcgcagaa

SEQ ID NO: 2032089 - RNA, 19 nt, Artificial Sequence
  Description of Artificial Sequence: Synthetic oligonucleotide
gagguugcguccuaugggu

SEQ ID NO: 2032090 - RNA, 19 nt, Artificial Sequence
  Description of Artificial Sequence: Synthetic oligonucleotide
caaacggugguggccuucg

SEQ ID NO: 2032091 - RNA, 19 nt, Artificial Sequence
  Description of Artificial Sequence: Synthetic oligonucleotide
agcccagaacugcgugucc

SEQ ID NO: 2032092 - RNA, 19 nt, Artificial Sequence
  Description of Artificial Sequence: Synthetic oligonucleotide
uccugauauuggagaacac

SEQ ID NO: 2032093 - RNA, 19 nt, Artificial Sequence
  Description of Artificial Sequence: Synthetic oligonucleotide
cuccugauauuggagaaca

SEQ ID NO: 2032094 - RNA, 19 nt, Artificial Sequence
  Description of Artificial Sequence: Synthetic oligonucleotide
ccauuguucaauggggucc

SEQ ID NO: 2032095 - RNA, 19 nt, Artificial Sequence
  Description of Artificial Sequence: Synthetic oligonucleotide
cuagggagagcagggcgcg

SEQ ID NO: 2032096 - RNA, 19 nt, Artificial Sequence
  Description of Artificial Sequence: Synthetic oligonucleotide
acagacuugcacggucacg

SEQ ID NO: 2032097 - RNA, 19 nt, Artificial Sequence
  Description of Artificial Sequence: Synthetic oligonucleotide
uuguucaaugggguccggc

SEQ ID NO: 2032098 - RNA, 19 nt, Artificial Sequence
  Description of Artificial Sequence: Synthetic oligonucleotide
gcaauggauagaucuggug

SEQ ID NO: 2032099 - RNA, 19 nt, Artificial Sequence
  Description of Artificial Sequence: Synthetic oligonucleotide
acacgugccaggagggaac

SEQ ID NO: 2032100 - RNA, 19 nt, Artificial Sequence
  Description of Artificial Sequence: Synthetic oligonucleotide
aggacauucuggugagcgu

SEQ ID NO: 2032101 - RNA, 19 nt, Artificial Sequence
  Description of Artificial Sequence: Synthetic oligonucleotide
uugauucaugaaggauucc

SEQ ID NO: 2032102 - RNA, 19 nt, Artificial Sequence
  Description of Artificial Sequence: Synthetic oligonucleotide
aacacaugggugaccugca

SEQ ID NO: 2032103 - RNA, 19 nt, Artificial Sequence
  Description of Artificial Sequence: Synthetic oligonucleotide
gacacgaaacggacgcccc

SEQ ID NO: 2032104 - RNA, 19 nt, Artificial Sequence
  Description of Artificial Sequence: Synthetic oligonucleotide
gacagacuugcacggucac

SEQ ID NO: 2032105 - RNA, 19 nt, Artificial Sequence
  Description of Artificial Sequence: Synthetic oligonucleotide
uggagaacacaugggugac

SEQ ID NO: 2032106 - RNA, 19 nt, Artificial Sequence
  Description of Artificial Sequence: Synthetic oligonucleotide
aggcacagucagcugucuc

SEQ ID NO: 2032107 - RNA, 19 nt, Artificial Sequence
  Description of Artificial Sequence: Synthetic oligonucleotide
gaguuacacgugccaggag

SEQ ID NO: 2032108 - RNA, 19 nt, Artificial Sequence
  Description of Artificial Sequence: Synthetic oligonucleotide
cguccuaugggucuucgcg

SEQ ID NO: 2032109 - RNA, 19 nt, Artificial Sequence
  Description of Artificial Sequence: Synthetic oligonucleotide
cagucaacagccccagcuc

SEQ ID NO: 2032110 - RNA, 19 nt, Artificial Sequence
  Description of Artificial Sequence: Synthetic oligonucleotide
cuugcgacaccagcugaag

SEQ ID NO: 2032111 - RNA, 19 nt, Artificial Sequence
  Description of Artificial Sequence: Synthetic oligonucleotide
caccggauccuagaguuac

SEQ ID NO: 2032112 - RNA, 19 nt, Artificial Sequence
  Description of Artificial Sequence: Synthetic oligonucleotide
gggcacguggcucagcacc

SEQ ID NO: 2032113 - RNA, 19 nt, Artificial Sequence
  Description of Artificial Sequence: Synthetic oligonucleotide
aagucacgaagcaggucug

SEQ ID NO: 2032114 - RNA, 19 nt, Artificial Sequence
  Description of Artificial Sequence: Synthetic oligonucleotide
ggaaccagcgcuugauuca

SEQ ID NO: 2032115 - RNA, 19 nt, Artificial Sequence
  Description of Artificial Sequence: Synthetic oligonucleotide
agccgagaacuuaucgagg

SEQ ID NO: 2032116 - RNA, 19 nt, Artificial Sequence
  Description of Artificial Sequence: Synthetic oligonucleotide
uucgcgcgcagaaguggcc

SEQ ID NO: 2032117 - RNA, 19 nt, Artificial Sequence
  Description of Artificial Sequence: Synthetic oligonucleotide
augaaggauuccagucaac

SEQ ID NO: 2032118 - RNA, 19 nt, Artificial Sequence
  Description of Artificial Sequence: Synthetic oligonucleotide
agcaaucuccacaccacca

SEQ ID NO: 2032119 - RNA, 19 nt, Artificial Sequence
  Description of Artificial Sequence: Synthetic oligonucleotide
uacacgugccaggagggaa

SEQ ID NO: 2032120 - RNA, 19 nt, Artificial Sequence
  Description of Artificial Sequence: Synthetic oligonucleotide
uaggacugacagacuugca

SEQ ID NO: 2032121 - RNA, 19 nt, Artificial Sequence
  Description of Artificial Sequence: Synthetic oligonucleotide
caaggagacgguacuuaca

SEQ ID NO: 2032122 - RNA, 19 nt, Artificial Sequence
  Description of Artificial Sequence: Synthetic oligonucleotide
aguuugacaaggagacggu

SEQ ID NO: 2032123 - RNA, 19 nt, Artificial Sequence
  Description of Artificial Sequence: Synthetic oligonucleotide
gucucgacaaacgguggug

SEQ ID NO: 2032124 - RNA, 19 nt, Artificial Sequence
  Description of Artificial Sequence: Synthetic oligonucleotide
guuucuugcgacaccagcu

SEQ ID NO: 2032125 - RNA, 19 nt, Artificial Sequence
  Description of Artificial Sequence: Synthetic oligonucleotide
cuggugcaggacuccagug

SEQ ID NO: 2032126 - RNA, 19 nt, Artificial Sequence
  Description of Artificial Sequence: Synthetic oligonucleotide
ugucgggcuccccaccagu

SEQ ID NO: 2032127 - RNA, 19 nt, Artificial Sequence
  Description of Artificial Sequence: Synthetic oligonucleotide
gcagggguugcugaugagg

SEQ ID NO: 2032128 - RNA, 19 nt, Artificial Sequence
  Description of Artificial Sequence: Synthetic oligonucleotide
acacgaaacggacgccccu

SEQ ID NO: 2032129 - RNA, 19 nt, Artificial Sequence
  Description of Artificial Sequence: Synthetic oligonucleotide
cccauaauggccagcccag

SEQ ID NO: 2032130 - RNA, 19 nt, Artificial Sequence
  Description of Artificial Sequence: Synthetic oligonucleotide
gggaaccagcgcuugauuc

SEQ ID NO: 2032131 - RNA, 19 nt, Artificial Sequence
  Description of Artificial Sequence: Synthetic oligonucleotide
acgguacuuacagccacug

SEQ ID NO: 2032132 - RNA, 19 nt, Artificial Sequence
  Description of Artificial Sequence: Synthetic oligonucleotide
gucaugucgggcuccccac

SEQ ID NO: 2032133 - RNA, 19 nt, Artificial Sequence
  Description of Artificial Sequence: Synthetic oligonucleotide
cauaauggccagcccagaa

SEQ ID NO: 2032134 - RNA, 19 nt, Artificial Sequence
  Description of Artificial Sequence: Synthetic oligonucleotide
cauucuggugagcgucaag

SEQ ID NO: 2032135 - RNA, 19 nt, Artificial Sequence
  Description of Artificial Sequence: Synthetic oligonucleotide
uggugagcgucaagaaguu

SEQ ID NO: 2032136 - RNA, 19 nt, Artificial Sequence
  Description of Artificial Sequence: Synthetic oligonucleotide
agaacacaugggugaccug

SEQ ID NO: 2032137 - RNA, 19 nt, Artificial Sequence
  Description of Artificial Sequence: Synthetic oligonucleotide
gacaaggagacgguacuua

SEQ ID NO: 2032138 - RNA, 19 nt, Artificial Sequence
  Description of Artificial Sequence: Synthetic oligonucleotide
aggccuuccuggccgcagg

SEQ ID NO: 2032139 - RNA, 19 nt, Artificial Sequence
  Description of Artificial Sequence: Synthetic oligonucleotide
gccgagaacuuaucgagga

SEQ ID NO: 2032140 - RNA, 19 nt, Artificial Sequence
  Description of Artificial Sequence: Synthetic oligonucleotide
agaaguggcccagcgggca

SEQ ID NO: 2032141 - RNA, 19 nt, Artificial Sequence
  Description of Artificial Sequence: Synthetic oligonucleotide
agcugucucgacaaacggu

SEQ ID NO: 2032142 - RNA, 19 nt, Artificial Sequence
  Description of Artificial Sequence: Synthetic oligonucleotide
uggccccaguguucaaaag

SEQ ID NO: 2032143 - RNA, 19 nt, Artificial Sequence
  Description of Artificial Sequence: Synthetic oligonucleotide
gagacgguacuuacagcca

SEQ ID NO: 2032144 - RNA, 19 nt, Artificial Sequence
  Description of Artificial Sequence: Synthetic oligonucleotide
ugcguccuaugggucuucg

SEQ ID NO: 2032145 - RNA, 19 nt, Artificial Sequence
  Description of Artificial Sequence: Synthetic oligonucleotide
guccacgaccuguuucuug

SEQ ID NO: 2032146 - RNA, 19 nt, Artificial Sequence
  Description of Artificial Sequence: Synthetic oligonucleotide
aggcgcggcacacccggcg

SEQ ID NO: 2032147 - RNA, 19 nt, Artificial Sequence
  Description of Artificial Sequence: Synthetic oligonucleotide
cugguuggggcugcuuccg

SEQ ID NO: 2032148 - RNA, 19 nt, Artificial Sequence
  Description of Artificial Sequence: Synthetic oligonucleotide
gacauucuggugagcguca

SEQ ID NO: 2032149 - RNA, 19 nt, Artificial Sequence
  Description of Artificial Sequence: Synthetic oligonucleotide
ccagcugaaggaagucacg

SEQ ID NO: 2032150 - RNA, 19 nt, Artificial Sequence
  Description of Artificial Sequence: Synthetic oligonucleotide
uuacacgugccaggaggga

SEQ ID NO: 2032151 - RNA, 19 nt, Artificial Sequence
  Description of Artificial Sequence: Synthetic oligonucleotide
caccauggcgcgccaggcg

SEQ ID NO: 2032152 - RNA, 19 nt, Artificial Sequence
  Description of Artificial Sequence: Synthetic oligonucleotide
augguccccgcgccccgcc

SEQ ID NO: 2032153 - RNA, 19 nt, Artificial Sequence
  Description of Artificial Sequence: Synthetic oligonucleotide
ggccccaguguucaaaaga

SEQ ID NO: 2032154 - RNA, 19 nt, Artificial Sequence
  Description of Artificial Sequence: Synthetic oligonucleotide
augggguccggcacagccg

SEQ ID NO: 2032155 - RNA, 19 nt, Artificial Sequence
  Description of Artificial Sequence: Synthetic oligonucleotide
agacuugcacggucacgcu

SEQ ID NO: 2032156 - RNA, 19 nt, Artificial Sequence
  Description of Artificial Sequence: Synthetic oligonucleotide
ucgcgcgcagaaguggccc

SEQ ID NO: 2032157 - RNA, 19 nt, Artificial Sequence
  Description of Artificial Sequence: Synthetic oligonucleotide
gagaacuuaucgaggacau

SEQ ID NO: 2032158 - RNA, 19 nt, Artificial Sequence
  Description of Artificial Sequence: Synthetic oligonucleotide
ggacauucuggugagcguc

SEQ ID NO: 2032159 - RNA, 19 nt, Artificial Sequence
  Description of Artificial Sequence: Synthetic oligonucleotide
caacagccccagcuccugg

SEQ ID NO: 2032160 - RNA, 19 nt, Artificial Sequence
  Description of Artificial Sequence: Synthetic oligonucleotide
ccugauauuggagaacaca

SEQ ID NO: 2032161 - RNA, 19 nt, Artificial Sequence
  Description of Artificial Sequence: Synthetic oligonucleotide
uccacuugcgcaggccuuc

SEQ ID NO: 2032162 - RNA, 19 nt, Artificial Sequence
  Description of Artificial Sequence: Synthetic oligonucleotide
auuguucaaugggguccgg

SEQ ID NO: 2032163 - RNA, 19 nt, Artificial Sequence
  Description of Artificial Sequence: Synthetic oligonucleotide
gaacaaggccaagcaggac

SEQ ID NO: 2032164 - RNA, 19 nt, Artificial Sequence
  Description of Artificial Sequence: Synthetic oligonucleotide
ccuaggacugacagacuug

SEQ ID NO: 2032165 - RNA, 19 nt, Artificial Sequence
  Description of Artificial Sequence: Synthetic oligonucleotide
gcuagggagagcagggcgc

SEQ ID NO: 2032166 - RNA, 19 nt, Artificial Sequence
  Description of Artificial Sequence: Synthetic oligonucleotide
aguguucaaaagacacgaa

SEQ ID NO: 2032167 - RNA, 19 nt, Artificial Sequence
  Description of Artificial Sequence: Synthetic oligonucleotide
ggccccauaauggccagcc

SEQ ID NO: 2032168 - RNA, 19 nt, Artificial Sequence
  Description of Artificial Sequence: Synthetic oligonucleotide
agguugcguccuauggguc

SEQ ID NO: 2032169 - RNA, 19 nt, Artificial Sequence
  Description of Artificial Sequence: Synthetic oligonucleotide
gccccaguguucaaaagac

SEQ ID NO: 2032170 - RNA, 19 nt, Artificial Sequence
  Description of Artificial Sequence: Synthetic oligonucleotide
ggaacccaugguccccgcg

SEQ ID NO: 2032171 - RNA, 19 nt, Artificial Sequence
  Description of Artificial Sequence: Synthetic oligonucleotide
acgcuggaguuggucacuc

SEQ ID NO: 2032172 - RNA, 19 nt, Artificial Sequence
  Description of Artificial Sequence: Synthetic oligonucleotide
ggcgcugcggucccgggcc

SEQ ID NO: 2032173 - RNA, 19 nt, Artificial Sequence
  Description of Artificial Sequence: Synthetic oligonucleotide
aacggacgccccuccugau

SEQ ID NO: 2032174 - RNA, 19 nt, Artificial Sequence
  Description of Artificial Sequence: Synthetic oligonucleotide
uggccgcagggguugcuga

SEQ ID NO: 2032175 - RNA, 19 nt, Artificial Sequence
  Description of Artificial Sequence: Synthetic oligonucleotide
ggugguggccuucgccuag

SEQ ID NO: 2032176 - RNA, 19 nt, Artificial Sequence
  Description of Artificial Sequence: Synthetic oligonucleotide
gagcgucaagaaguuugac

SEQ ID NO: 2032177 - RNA, 19 nt, Artificial Sequence
  Description of Artificial Sequence: Synthetic oligonucleotide
gcuugauucaugaaggauu

SEQ ID NO: 2032178 - RNA, 19 nt, Artificial Sequence
  Description of Artificial Sequence: Synthetic oligonucleotide
caugucgggcuccccacca

SEQ ID NO: 2032179 - RNA, 19 nt, Artificial Sequence
  Description of Artificial Sequence: Synthetic oligonucleotide
agucacgaagcaggucugu

SEQ ID NO: 2032180 - RNA, 19 nt, Artificial Sequence
  Description of Artificial Sequence: Synthetic oligonucleotide
cacgaaacggacgccccuc

SEQ ID NO: 2032181 - RNA, 19 nt, Artificial Sequence
  Description of Artificial Sequence: Synthetic oligonucleotide
cacgugccaggagggaacc

SEQ ID NO: 2032182 - RNA, 19 nt, Artificial Sequence
  Description of Artificial Sequence: Synthetic oligonucleotide
gucuucgcgcgcagaagug

SEQ ID NO: 2032183 - RNA, 19 nt, Artificial Sequence
  Description of Artificial Sequence: Synthetic oligonucleotide
ccuagaguuacacgugcca

SEQ ID NO: 2032184 - RNA, 19 nt, Artificial Sequence
  Description of Artificial Sequence: Synthetic oligonucleotide
cagucagagacagcaaucu

SEQ ID NO: 2032185 - RNA, 19 nt, Artificial Sequence
  Description of Artificial Sequence: Synthetic oligonucleotide
cacagucagcugucucgac

SEQ ID NO: 2032186 - RNA, 19 nt, Artificial Sequence
  Description of Artificial Sequence: Synthetic oligonucleotide
cacgaccuguuucuugcga

SEQ ID NO: 2032187 - RNA, 19 nt, Artificial Sequence
  Description of Artificial Sequence: Synthetic oligonucleotide
guuugacaaggagacggua

SEQ ID NO: 2032188 - RNA, 19 nt, Artificial Sequence
  Description of Artificial Sequence: Synthetic oligonucleotide
cacccggcggcagugcagc

SEQ ID NO: 2032189 - RNA, 19 nt, Artificial Sequence
  Description of Artificial Sequence: Synthetic oligonucleotide
ugcguguccuggccccagu

SEQ ID NO: 2032190 - RNA, 19 nt, Artificial Sequence
  Description of Artificial Sequence: Synthetic oligonucleotide
gcagugcagcagcagcgag

SEQ ID NO: 2032191 - RNA, 19 nt, Artificial Sequence
  Description of Artificial Sequence: Synthetic oligonucleotide
gggcacaguuuucuuguuc

SEQ ID NO: 2032192 - RNA, 19 nt, Artificial Sequence
  Description of Artificial Sequence: Synthetic oligonucleotide
ggucacucuggccccauaa

SEQ ID NO: 2032193 - RNA, 19 nt, Artificial Sequence
  Description of Artificial Sequence: Synthetic oligonucleotide
caccauccacuugcgcagg

SEQ ID NO: 2032194 - RNA, 19 nt, Artificial Sequence
  Description of Artificial Sequence: Synthetic oligonucleotide
ccuguuucuugcgacacca

SEQ ID NO: 2032195 - RNA, 19 nt, Artificial Sequence
  Description of Artificial Sequence: Synthetic oligonucleotide
agucagcugucucgacaaa

SEQ ID NO: 2032196 - RNA, 19 nt, Artificial Sequence
  Description of Artificial Sequence: Synthetic oligonucleotide
agaacuuaucgaggacauu

SEQ ID NO: 2032197 - RNA, 19 nt, Artificial Sequence
  Description of Artificial Sequence: Synthetic oligonucleotide
ggucuucgcgcgcagaagu

SEQ ID NO: 2032198 - RNA, 19 nt, Artificial Sequence
  Description of Artificial Sequence: Synthetic oligonucleotide
ccaguguuuaagacucuga

SEQ ID NO: 2032199 - RNA, 19 nt, Artificial Sequence
  Description of Artificial Sequence: Synthetic oligonucleotide
guugcugaugagguugcgu

SEQ ID NO: 2032200 - RNA, 19 nt, Artificial Sequence
  Description of Artificial Sequence: Synthetic oligonucleotide
cggauccuagaguuacacg

SEQ ID NO: 2032201 - RNA, 19 nt, Artificial Sequence
  Description of Artificial Sequence: Synthetic oligonucleotide
ccccauaauggccagccca

SEQ ID NO: 2032202 - RNA, 19 nt, Artificial Sequence
  Description of Artificial Sequence: Synthetic oligonucleotide
gugguggccuucgccuagg

SEQ ID NO: 2032203 - RNA, 19 nt, Artificial Sequence
  Description of Artificial Sequence: Synthetic oligonucleotide
ggcgcggcacacccggcgg

SEQ ID NO: 2032204 - RNA, 19 nt, Artificial Sequence
  Description of Artificial Sequence: Synthetic oligonucleotide
uugcacggucacgcuggag

SEQ ID NO: 2032205 - RNA, 19 nt, Artificial Sequence
  Description of Artificial Sequence: Synthetic oligonucleotide
gguugcguccuaugggucu

SEQ ID NO: 2032206 - RNA, 19 nt, Artificial Sequence
  Description of Artificial Sequence: Synthetic oligonucleotide
ugcggucccgggccagcac

SEQ ID NO: 2032207 - RNA, 19 nt, Artificial Sequence
  Description of Artificial Sequence: Synthetic oligonucleotide
ccuccaccggauccuagag

SEQ ID NO: 2032208 - RNA, 19 nt, Artificial Sequence
  Description of Artificial Sequence: Synthetic oligonucleotide
uggcgcgccaggcgcggca

SEQ ID NO: 2032209 - RNA, 19 nt, Artificial Sequence
  Description of Artificial Sequence: Synthetic oligonucleotide
cacggucacgcuggaguug

SEQ ID NO: 2032210 - RNA, 19 nt, Artificial Sequence
  Description of Artificial Sequence: Synthetic oligonucleotide
acauucuggugagcgucaa

SEQ ID NO: 2032211 - RNA, 19 nt, Artificial Sequence
  Description of Artificial Sequence: Synthetic oligonucleotide
cggcagugcagcagcagcg

SEQ ID NO: 2032212 - RNA, 19 nt, Artificial Sequence
  Description of Artificial Sequence: Synthetic oligonucleotide
ccggauccuagaguuacac

SEQ ID NO: 2032213 - RNA, 19 nt, Artificial Sequence
  Description of Artificial Sequence: Synthetic oligonucleotide
acggacgccccuccugaua

SEQ ID NO: 2032214 - RNA, 19 nt, Artificial Sequence
  Description of Artificial Sequence: Synthetic oligonucleotide
gcggcucagguccagcguc

SEQ ID NO: 2032215 - RNA, 19 nt, Artificial Sequence
  Description of Artificial Sequence: Synthetic oligonucleotide
uccccgccgugcugcacca

SEQ ID NO: 2032216 - RNA, 19 nt, Artificial Sequence
  Description of Artificial Sequence: Synthetic oligonucleotide
ggauuccagucaacagccc

SEQ ID NO: 2032217 - RNA, 19 nt, Artificial Sequence
  Description of Artificial Sequence: Synthetic oligonucleotide
gacgguacuuacagccacu

SEQ ID NO: 2032218 - RNA, 19 nt, Artificial Sequence
  Description of Artificial Sequence: Synthetic oligonucleotide
gcgggcagggcccgucugg

SEQ ID NO: 2032219 - RNA, 19 nt, Artificial Sequence
  Description of Artificial Sequence: Synthetic oligonucleotide
gucacucuggccccauaau

SEQ ID NO: 2032220 - RNA, 19 nt, Artificial Sequence
  Description of Artificial Sequence: Synthetic oligonucleotide
ccccuccugauauuggaga

SEQ ID NO: 2032221 - RNA, 19 nt, Artificial Sequence
  Description of Artificial Sequence: Synthetic oligonucleotide
gcgcuugauucaugaagga

SEQ ID NO: 2032222 - RNA, 19 nt, Artificial Sequence
  Description of Artificial Sequence: Synthetic oligonucleotide
ggaagucacgaagcagguc

SEQ ID NO: 2032223 - RNA, 19 nt, Artificial Sequence
  Description of Artificial Sequence: Synthetic oligonucleotide
ccuccugauauuggagaac

SEQ ID NO: 2032224 - RNA, 19 nt, Artificial Sequence
  Description of Artificial Sequence: Synthetic oligonucleotide
uggucacucuggccccaua

SEQ ID NO: 2032225 - RNA, 19 nt, Artificial Sequence
  Description of Artificial Sequence: Synthetic oligonucleotide
gcaggcagcggcgggcuag

SEQ ID NO: 2032226 - RNA, 19 nt, Artificial Sequence
  Description of Artificial Sequence: Synthetic oligonucleotide
gggucuucgcgcgcagaag

SEQ ID NO: 2032227 - RNA, 19 nt, Artificial Sequence
  Description of Artificial Sequence: Synthetic oligonucleotide
ggugcaggacuccaguguu

SEQ ID NO: 2032228 - RNA, 19 nt, Artificial Sequence
  Description of Artificial Sequence: Synthetic oligonucleotide
ccuaugggucuucgcgcgc

SEQ ID NO: 2032229 - RNA, 19 nt, Artificial Sequence
  Description of Artificial Sequence: Synthetic oligonucleotide
guccggcacagccgagaac

SEQ ID NO: 2032230 - RNA, 19 nt, Artificial Sequence
  Description of Artificial Sequence: Synthetic oligonucleotide
ggagggaaccagcgcuuga

SEQ ID NO: 2032231 - RNA, 19 nt, Artificial Sequence
  Description of Artificial Sequence: Synthetic oligonucleotide
accggauccuagaguuaca

SEQ ID NO: 2032232 - RNA, 19 nt, Artificial Sequence
  Description of Artificial Sequence: Synthetic oligonucleotide
gccccuccugauauuggag

SEQ ID NO: 2032233 - RNA, 19 nt, Artificial Sequence
  Description of Artificial Sequence: Synthetic oligonucleotide
ccgccgugcugcaccaucc

SEQ ID NO: 2032234 - RNA, 19 nt, Artificial Sequence
  Description of Artificial Sequence: Synthetic oligonucleotide
guuggucacucuggcccca

SEQ ID NO: 2032235 - RNA, 19 nt, Artificial Sequence
  Description of Artificial Sequence: Synthetic oligonucleotide
gucgggcuccccaccaguc

SEQ ID NO: 2032236 - RNA, 19 nt, Artificial Sequence
  Description of Artificial Sequence: Synthetic oligonucleotide
ggucacgcuggaguugguc

SEQ ID NO: 2032237 - RNA, 19 nt, Artificial Sequence
  Description of Artificial Sequence: Synthetic oligonucleotide
ccguccaccauggcgcgcc

SEQ ID NO: 2032238 - RNA, 19 nt, Artificial Sequence
  Description of Artificial Sequence: Synthetic oligonucleotide
gcguccuaugggucuucgc

SEQ ID NO: 2032239 - RNA, 19 nt, Artificial Sequence
  Description of Artificial Sequence: Synthetic oligonucleotide
cuccggcuuggggacccgg

SEQ ID NO: 2032240 - RNA, 19 nt, Artificial Sequence
  Description of Artificial Sequence: Synthetic oligonucleotide
ccauccacuugcgcaggcc

SEQ ID NO: 2032241 - RNA, 19 nt, Artificial Sequence
  Description of Artificial Sequence: Synthetic oligonucleotide
ggcagugcagcagcagcga

SEQ ID NO: 2032242 - RNA, 19 nt, Artificial Sequence
  Description of Artificial Sequence: Synthetic oligonucleotide
gccgugcugcaccauccac

SEQ ID NO: 2032243 - RNA, 19 nt, Artificial Sequence
  Description of Artificial Sequence: Synthetic oligonucleotide
ggcccgucugggcgggccg

SEQ ID NO: 2032244 - RNA, 19 nt, Artificial Sequence
  Description of Artificial Sequence: Synthetic oligonucleotide
gguccggcacagccgagaa

SEQ ID NO: 2032245 - RNA, 19 nt, Artificial Sequence
  Description of Artificial Sequence: Synthetic oligonucleotide
caaugggguccggcacagc

SEQ ID NO: 2032246 - RNA, 19 nt, Artificial Sequence
  Description of Artificial Sequence: Synthetic oligonucleotide
aguccacgaccuguuucuu

SEQ ID NO: 2032247 - RNA, 19 nt, Artificial Sequence
  Description of Artificial Sequence: Synthetic oligonucleotide
gcguguccuggccccagug

SEQ ID NO: 2032248 - RNA, 19 nt, Artificial Sequence
  Description of Artificial Sequence: Synthetic oligonucleotide
cccuccugauauuggagaa

SEQ ID NO: 2032249 - RNA, 19 nt, Artificial Sequence
  Description of Artificial Sequence: Synthetic oligonucleotide
ggcacacccggcggcagug

SEQ ID NO: 2032250 - RNA, 19 nt, Artificial Sequence
  Description of Artificial Sequence: Synthetic oligonucleotide
gccccauaauggccagccc

SEQ ID NO: 2032251 - RNA, 19 nt, Artificial Sequence
  Description of Artificial Sequence: Synthetic oligonucleotide
cuccaccggauccuagagu

SEQ ID NO: 2032252 - RNA, 19 nt, Artificial Sequence
  Description of Artificial Sequence: Synthetic oligonucleotide
ggcacagccgagaacuuau

SEQ ID NO: 2032253 - RNA, 19 nt, Artificial Sequence
  Description of Artificial Sequence: Synthetic oligonucleotide
gcgacaccagcugaaggaa

SEQ ID NO: 2032254 - RNA, 19 nt, Artificial Sequence
  Description of Artificial Sequence: Synthetic oligonucleotide
guccaccauggcgcgccag

SEQ ID NO: 2032255 - RNA, 19 nt, Artificial Sequence
  Description of Artificial Sequence: Synthetic oligonucleotide
ggggucgggcuccggcuug

SEQ ID NO: 2032256 - RNA, 19 nt, Artificial Sequence
  Description of Artificial Sequence: Synthetic oligonucleotide
ccacugucaugucgggcuc

SEQ ID NO: 2032257 - RNA, 19 nt, Artificial Sequence
  Description of Artificial Sequence: Synthetic oligonucleotide
ccugcagguagauauuguu

SEQ ID NO: 2032258 - RNA, 19 nt, Artificial Sequence
  Description of Artificial Sequence: Synthetic oligonucleotide
ccgggcacaguuuucuugu

SEQ ID NO: 2032259 - RNA, 19 nt, Artificial Sequence
  Description of Artificial Sequence: Synthetic oligonucleotide
ccaccauggcgcgccaggc

SEQ ID NO: 2032260 - RNA, 19 nt, Artificial Sequence
  Description of Artificial Sequence: Synthetic oligonucleotide
caugggugaccugcaggua

SEQ ID NO: 2032261 - RNA, 19 nt, Artificial Sequence
  Description of Artificial Sequence: Synthetic oligonucleotide
gccgcagggguugcugaug

SEQ ID NO: 2032262 - RNA, 19 nt, Artificial Sequence
  Description of Artificial Sequence: Synthetic oligonucleotide
cuuccuggccgcagggguu

SEQ ID NO: 2032263 - RNA, 19 nt, Artificial Sequence
  Description of Artificial Sequence: Synthetic oligonucleotide
gggucgggcuccggcuugg

SEQ ID NO: 2032264 - RNA, 19 nt, Artificial Sequence
  Description of Artificial Sequence: Synthetic oligonucleotide
ggacccgggcccuggaggu

SEQ ID NO: 2032265 - RNA, 19 nt, Artificial Sequence
  Description of Artificial Sequence: Synthetic oligonucleotide
guugcguccuaugggucuu

SEQ ID NO: 2032266 - RNA, 19 nt, Artificial Sequence
  Description of Artificial Sequence: Synthetic oligonucleotide
acccggcggcagugcagca

SEQ ID NO: 2032267 - RNA, 19 nt, Artificial Sequence
  Description of Artificial Sequence: Synthetic oligonucleotide
gccuucgccuaggacugac

SEQ ID NO: 2032268 - RNA, 19 nt, Artificial Sequence
  Description of Artificial Sequence: Synthetic oligonucleotide
cgggcuccggcuuggggac

SEQ ID NO: 2032269 - RNA, 19 nt, Artificial Sequence
  Description of Artificial Sequence: Synthetic oligonucleotide
gacccgggcccuggagguc

SEQ ID NO: 2032270 - RNA, 19 nt, Artificial Sequence
  Description of Artificial Sequence: Synthetic oligonucleotide
cccgccgugcugcaccauc

SEQ ID NO: 2032271 - RNA, 19 nt, Artificial Sequence
  Description of Artificial Sequence: Synthetic oligonucleotide
ccacuugcgcaggccuucc

SEQ ID NO: 2032272 - RNA, 19 nt, Artificial Sequence
  Description of Artificial Sequence: Synthetic oligonucleotide
ccgugcugcaccauccacu

SEQ ID NO: 2032273 - RNA, 19 nt, Artificial Sequence
  Description of Artificial Sequence: Synthetic oligonucleotide
ggguccggcacagccgaga

SEQ ID NO: 2032274 - RNA, 19 nt, Artificial Sequence
  Description of Artificial Sequence: Synthetic oligonucleotide
ccgcgccccgccugguugg

SEQ ID NO: 2032275 - RNA, 19 nt, Artificial Sequence
  Description of Artificial Sequence: Synthetic oligonucleotide
cauccccgccgugcugcac

SEQ ID NO: 2032276 - RNA, 19 nt, Artificial Sequence
  Description of Artificial Sequence: Synthetic oligonucleotide
ccuucgccuaggacugaca

SEQ ID NO: 2032277 - RNA, 19 nt, Artificial Sequence
  Description of Artificial Sequence: Synthetic oligonucleotide
gcgcgcagaaguggcccag

SEQ ID NO: 2032278 - RNA, 19 nt, Artificial Sequence
  Description of Artificial Sequence: Synthetic oligonucleotide
agggcccgucugggcgggc

SEQ ID NO: 2032279 - RNA, 19 nt, Artificial Sequence
  Description of Artificial Sequence: Synthetic oligonucleotide
gcacagccgagaacuuauc

SEQ ID NO: 2032280 - RNA, 19 nt, Artificial Sequence
  Description of Artificial Sequence: Synthetic oligonucleotide
gcgcggcacacccggcggc

SEQ ID NO: 2032281 - RNA, 19 nt, Artificial Sequence
  Description of Artificial Sequence: Synthetic oligonucleotide
ggugaccugcagguagaua

SEQ ID NO: 2032282 - RNA, 19 nt, Artificial Sequence
  Description of Artificial Sequence: Synthetic oligonucleotide
ggucgggcuccggcuuggg

SEQ ID NO: 2032283 - RNA, 19 nt, Artificial Sequence
  Description of Artificial Sequence: Synthetic oligonucleotide
cacgcuggaguuggucacu

SEQ ID NO: 2032284 - RNA, 19 nt, Artificial Sequence
  Description of Artificial Sequence: Synthetic oligonucleotide
ggcggcucagguccagcgu

SEQ ID NO: 2032285 - RNA, 19 nt, Artificial Sequence
  Description of Artificial Sequence: Synthetic oligonucleotide
ggcgggcuagggagagcag

SEQ ID NO: 2032286 - RNA, 19 nt, Artificial Sequence
  Description of Artificial Sequence: Synthetic oligonucleotide
gcugcggucccgggccagc

SEQ ID NO: 2032287 - RNA, 19 nt, Artificial Sequence
  Description of Artificial Sequence: Synthetic oligonucleotide
ccauaauggccagcccaga

SEQ ID NO: 2032288 - RNA, 19 nt, Artificial Sequence
  Description of Artificial Sequence: Synthetic oligonucleotide
ggacccuccaccggauccu

SEQ ID NO: 2032289 - RNA, 19 nt, Artificial Sequence
  Description of Artificial Sequence: Synthetic oligonucleotide
gcacggucacgcuggaguu

SEQ ID NO: 2032290 - RNA, 19 nt, Artificial Sequence
  Description of Artificial Sequence: Synthetic oligonucleotide
gggcccgucugggcgggcc

SEQ ID NO: 2032291 - RNA, 19 nt, Artificial Sequence
  Description of Artificial Sequence: Synthetic oligonucleotide
cugcggucccgggccagca

SEQ ID NO: 2032292 - RNA, 19 nt, Artificial Sequence
  Description of Artificial Sequence: Synthetic oligonucleotide
gcacacccggcggcagugc

SEQ ID NO: 2032293 - RNA, 19 nt, Artificial Sequence
  Description of Artificial Sequence: Synthetic oligonucleotide
cgacaaacggugguggccu

SEQ ID NO: 2032294 - RNA, 19 nt, Artificial Sequence
  Description of Artificial Sequence: Synthetic oligonucleotide
cacuugcgcaggccuuccu

SEQ ID NO: 2032295 - RNA, 19 nt, Artificial Sequence
  Description of Artificial Sequence: Synthetic oligonucleotide
cgaggacauucuggugagc

SEQ ID NO: 2032296 - RNA, 19 nt, Artificial Sequence
  Description of Artificial Sequence: Synthetic oligonucleotide
ggcgcgccaggcgcggcac

SEQ ID NO: 2032297 - RNA, 19 nt, Artificial Sequence
  Description of Artificial Sequence: Synthetic oligonucleotide
gcuccggcuuggggacccg

SEQ ID NO: 2032298 - RNA, 19 nt, Artificial Sequence
  Description of Artificial Sequence: Synthetic oligonucleotide
ccaccggauccuagaguua

SEQ ID NO: 2032299 - RNA, 19 nt, Artificial Sequence
  Description of Artificial Sequence: Synthetic oligonucleotide
ggugagcgucaagaaguuu

SEQ ID NO: 2032300 - RNA, 19 nt, Artificial Sequence
  Description of Artificial Sequence: Synthetic oligonucleotide
caaggccaagcaggacccu

SEQ ID NO: 2032301 - RNA, 19 nt, Artificial Sequence
  Description of Artificial Sequence: Synthetic oligonucleotide
cgcgcagaaguggcccagc

SEQ ID NO: 2032302 - RNA, 19 nt, Artificial Sequence
  Description of Artificial Sequence: Synthetic oligonucleotide
cggcgggcuagggagagca

SEQ ID NO: 2032303 - RNA, 19 nt, Artificial Sequence
  Description of Artificial Sequence: Synthetic oligonucleotide
gccguccaccauggcgcgc

SEQ ID NO: 2032304 - RNA, 19 nt, Artificial Sequence
  Description of Artificial Sequence: Synthetic oligonucleotide
gcgccaggcgcggcacacc

SEQ ID NO: 2032305 - RNA, 19 nt, Artificial Sequence
  Description of Artificial Sequence: Synthetic oligonucleotide
cgcuugauucaugaaggau

SEQ ID NO: 2032306 - RNA, 19 nt, Artificial Sequence
  Description of Artificial Sequence: Synthetic oligonucleotide
gggccccgggcacaguuuu

SEQ ID NO: 2032307 - RNA, 19 nt, Artificial Sequence
  Description of Artificial Sequence: Synthetic oligonucleotide
ggccgcagggguugcugau

SEQ ID NO: 2032308 - RNA, 19 nt, Artificial Sequence
  Description of Artificial Sequence: Synthetic oligonucleotide
cggacgccccuccugauau

SEQ ID NO: 2032309 - RNA, 19 nt, Artificial Sequence
  Description of Artificial Sequence: Synthetic oligonucleotide
cgcgcgcagaaguggccca

SEQ ID NO: 2032310 - RNA, 19 nt, Artificial Sequence
  Description of Artificial Sequence: Synthetic oligonucleotide
cgcgccaggcgcggcacac

SEQ ID NO: 2032311 - RNA, 19 nt, Artificial Sequence
  Description of Artificial Sequence: Synthetic oligonucleotide
ccauccccgccgugcugca

SEQ ID NO: 2032312 - RNA, 19 nt, Artificial Sequence
  Description of Artificial Sequence: Synthetic oligonucleotide
ggccuucgccuaggacuga

SEQ ID NO: 2032313 - RNA, 19 nt, Artificial Sequence
  Description of Artificial Sequence: Synthetic oligonucleotide
gggugaccugcagguagau

SEQ ID NO: 2032314 - RNA, 19 nt, Artificial Sequence
  Description of Artificial Sequence: Synthetic oligonucleotide
cgguacuuacagccacugu

SEQ ID NO: 2032315 - RNA, 19 nt, Artificial Sequence
  Description of Artificial Sequence: Synthetic oligonucleotide
cgaaacggacgccccuccu

SEQ ID NO: 2032316 - RNA, 19 nt, Artificial Sequence
  Description of Artificial Sequence: Synthetic oligonucleotide
gggccuggccguccaccau

SEQ ID NO: 2032317 - RNA, 19 nt, Artificial Sequence
  Description of Artificial Sequence: Synthetic oligonucleotide
gcgcgccaggcgcggcaca

SEQ ID NO: 2032318 - RNA, 19 nt, Artificial Sequence
  Description of Artificial Sequence: Synthetic oligonucleotide
ggacgccccuccugauauu

SEQ ID NO: 2032319 - RNA, 19 nt, Artificial Sequence
  Description of Artificial Sequence: Synthetic oligonucleotide
cgcgccccgccugguuggg

SEQ ID NO: 2032320 - RNA, 19 nt, Artificial Sequence
  Description of Artificial Sequence: Synthetic oligonucleotide
ccgggcccuggagguccag

SEQ ID NO: 2032321 - RNA, 19 nt, Artificial Sequence
  Description of Artificial Sequence: Synthetic oligonucleotide
cguccaccauggcgcgcca

SEQ ID NO: 2032322 - RNA, 19 nt, Artificial Sequence
  Description of Artificial Sequence: Synthetic oligonucleotide
ggggccccgggcacaguuu

SEQ ID NO: 2032323 - RNA, 19 nt, Artificial Sequence
  Description of Artificial Sequence: Synthetic oligonucleotide
cgccuaggacugacagacu

SEQ ID NO: 2032324 - RNA, 19 nt, Artificial Sequence
  Description of Artificial Sequence: Synthetic oligonucleotide
ccggcacagccgagaacuu

SEQ ID NO: 2032325 - RNA, 19 nt, Artificial Sequence
  Description of Artificial Sequence: Synthetic oligonucleotide
cgggcacaguuuucuuguu

SEQ ID NO: 2032326 - RNA, 19 nt, Artificial Sequence
  Description of Artificial Sequence: Synthetic oligonucleotide
cggucacgcuggaguuggu

SEQ ID NO: 2032327 - RNA, 19 nt, Artificial Sequence
  Description of Artificial Sequence: Synthetic oligonucleotide
cccagcgggcagggcccgu

SEQ ID NO: 2032328 - RNA, 19 nt, Artificial Sequence
  Description of Artificial Sequence: Synthetic oligonucleotide
ccccgcgccccgccugguu

SEQ ID NO: 2032329 - RNA, 19 nt, Artificial Sequence
  Description of Artificial Sequence: Synthetic oligonucleotide
ccgccugguuggggcugcu

SEQ ID NO: 2032330 - RNA, 19 nt, Artificial Sequence
  Description of Artificial Sequence: Synthetic oligonucleotide
ccccgccgugcugcaccau

SEQ ID NO: 2032331 - RNA, 19 nt, Artificial Sequence
  Description of Artificial Sequence: Synthetic oligonucleotide
aauauuuggaauucaaugg

SEQ ID NO: 2032332 - RNA, 19 nt, Artificial Sequence
  Description of Artificial Sequence: Synthetic oligonucleotide
aaaacacaaacaucgagcc

SEQ ID NO: 2032333 - RNA, 19 nt, Artificial Sequence
  Description of Artificial Sequence: Synthetic oligonucleotide
uuacacacuacaaagaaag

SEQ ID NO: 2032334 - RNA, 19 nt, Artificial Sequence
  Description of Artificial Sequence: Synthetic oligonucleotide
aaaacaauccauuuaucag

SEQ ID NO: 2032335 - RNA, 19 nt, Artificial Sequence
  Description of Artificial Sequence: Synthetic oligonucleotide
aagucuaugaguuuuccag

SEQ ID NO: 2032336 - RNA, 19 nt, Artificial Sequence
  Description of Artificial Sequence: Synthetic oligonucleotide
ucugagaacaaagacagcg

SEQ ID NO: 2032337 - RNA, 19 nt, Artificial Sequence
  Description of Artificial Sequence: Synthetic oligonucleotide
uuuuaaaauuccuacacga

SEQ ID NO: 2032338 - RNA, 19 nt, Artificial Sequence
  Description of Artificial Sequence: Synthetic oligonucleotide
ucuuccaucauaauuggag

SEQ ID NO: 2032339 - RNA, 19 nt, Artificial Sequence
  Description of Artificial Sequence: Synthetic oligonucleotide
agauguucuagacauaaac

SEQ ID NO: 2032340 - RNA, 19 nt, Artificial Sequence
  Description of Artificial Sequence: Synthetic oligonucleotide
uuugaaacugaucugguga

SEQ ID NO: 2032341 - RNA, 19 nt, Artificial Sequence
  Description of Artificial Sequence: Synthetic oligonucleotide
aaacaauccauuuaucagu

SEQ ID NO: 2032342 - RNA, 19 nt, Artificial Sequence
  Description of Artificial Sequence: Synthetic oligonucleotide
ggugaaaacacaaacaucg

SEQ ID NO: 2032343 - RNA, 19 nt, Artificial Sequence
  Description of Artificial Sequence: Synthetic oligonucleotide
ucaauggacagcuuuauug

SEQ ID NO: 2032344 - RNA, 19 nt, Artificial Sequence
  Description of Artificial Sequence: Synthetic oligonucleotide
auucauuuauaccaagcac

SEQ ID NO: 2032345 - RNA, 19 nt, Artificial Sequence
  Description of Artificial Sequence: Synthetic oligonucleotide
uaccuuauaaccaauauuu

SEQ ID NO: 2032346 - RNA, 19 nt, Artificial Sequence
  Description of Artificial Sequence: Synthetic oligonucleotide
aaagcuucgaugacaaagc

SEQ ID NO: 2032347 - RNA, 19 nt, Artificial Sequence
  Description of Artificial Sequence: Synthetic oligonucleotide
aagaauuaguauuuuggcu

SEQ ID NO: 2032348 - RNA, 19 nt, Artificial Sequence
  Description of Artificial Sequence: Synthetic oligonucleotide
ugaaagggcaaaaccaagg

SEQ ID NO: 2032349 - RNA, 19 nt, Artificial Sequence
  Description of Artificial Sequence: Synthetic oligonucleotide
uccggauuaauuuuaagca

SEQ ID NO: 2032350 - RNA, 19 nt, Artificial Sequence
  Description of Artificial Sequence: Synthetic oligonucleotide
auuuauaccaagcacucug

SEQ ID NO: 2032351 - RNA, 19 nt, Artificial Sequence
  Description of Artificial Sequence: Synthetic oligonucleotide
augacuauugcuuugucug

SEQ ID NO: 2032352 - RNA, 19 nt, Artificial Sequence
  Description of Artificial Sequence: Synthetic oligonucleotide
uuuggaauucaauggacag

SEQ ID NO: 2032353 - RNA, 19 nt, Artificial Sequence
  Description of Artificial Sequence: Synthetic oligonucleotide
aacaugaaagaguuaucag

SEQ ID NO: 2032354 - RNA, 19 nt, Artificial Sequence
  Description of Artificial Sequence: Synthetic oligonucleotide
ucuagugaaagcuucgaug

SEQ ID NO: 2032355 - RNA, 19 nt, Artificial Sequence
  Description of Artificial Sequence: Synthetic oligonucleotide
caugaaagaguuaucagug

SEQ ID NO: 2032356 - RNA, 19 nt, Artificial Sequence
  Description of Artificial Sequence: Synthetic oligonucleotide
acuacaaagaaagaauuag

SEQ ID NO: 2032357 - RNA, 19 nt, Artificial Sequence
  Description of Artificial Sequence: Synthetic oligonucleotide
aucuggugaaaacacaaac

SEQ ID NO: 2032358 - RNA, 19 nt, Artificial Sequence
  Description of Artificial Sequence: Synthetic oligonucleotide
ugaaagaguuaucaguggc

SEQ ID NO: 2032359 - RNA, 19 nt, Artificial Sequence
  Description of Artificial Sequence: Synthetic oligonucleotide
aaacaugaaagaguuauca

SEQ ID NO: 2032360 - RNA, 19 nt, Artificial Sequence
  Description of Artificial Sequence: Synthetic oligonucleotide
aguggcauaaauuucuuca

SEQ ID NO: 2032361 - RNA, 19 nt, Artificial Sequence
  Description of Artificial Sequence: Synthetic oligonucleotide
cuuuuaacaaugucagggg

SEQ ID NO: 2032362 - RNA, 19 nt, Artificial Sequence
  Description of Artificial Sequence: Synthetic oligonucleotide
aaagaguuaucaguggcuc

SEQ ID NO: 2032363 - RNA, 19 nt, Artificial Sequence
  Description of Artificial Sequence: Synthetic oligonucleotide
aacguaguagucauuguac

SEQ ID NO: 2032364 - RNA, 19 nt, Artificial Sequence
  Description of Artificial Sequence: Synthetic oligonucleotide
gaugguuucucccacuugc

SEQ ID NO: 2032365 - RNA, 19 nt, Artificial Sequence
  Description of Artificial Sequence: Synthetic oligonucleotide
ucuggugaaaacacaaaca

SEQ ID NO: 2032366 - RNA, 19 nt, Artificial Sequence
  Description of Artificial Sequence: Synthetic oligonucleotide
ucugauaucuuuuaacaau

SEQ ID NO: 2032367 - RNA, 19 nt, Artificial Sequence
  Description of Artificial Sequence: Synthetic oligonucleotide
uccuacacgauacugagaa

SEQ ID NO: 2032368 - RNA, 19 nt, Artificial Sequence
  Description of Artificial Sequence: Synthetic oligonucleotide
aucauaauuggagagugac

SEQ ID NO: 2032369 - RNA, 19 nt, Artificial Sequence
  Description of Artificial Sequence: Synthetic oligonucleotide
aaaaugagggcucaugauu

SEQ ID NO: 2032370 - RNA, 19 nt, Artificial Sequence
  Description of Artificial Sequence: Synthetic oligonucleotide
uuuaacaaugucaggggcu

SEQ ID NO: 2032371 - RNA, 19 nt, Artificial Sequence
  Description of Artificial Sequence: Synthetic oligonucleotide
agucauuguacaugucucc

SEQ ID NO: 2032372 - RNA, 19 nt, Artificial Sequence
  Description of Artificial Sequence: Synthetic oligonucleotide
uacacgauacugagaaugg

SEQ ID NO: 2032373 - RNA, 19 nt, Artificial Sequence
  Description of Artificial Sequence: Synthetic oligonucleotide
aagcuucgaugacaaagcc

SEQ ID NO: 2032374 - RNA, 19 nt, Artificial Sequence
  Description of Artificial Sequence: Synthetic oligonucleotide
augacaucaugacuauugc

SEQ ID NO: 2032375 - RNA, 19 nt, Artificial Sequence
  Description of Artificial Sequence: Synthetic oligonucleotide
uccagcaaauuuaagcagc

SEQ ID NO: 2032376 - RNA, 19 nt, Artificial Sequence
  Description of Artificial Sequence: Synthetic oligonucleotide
caaacaucgagccucuucc

SEQ ID NO: 2032377 - RNA, 19 nt, Artificial Sequence
  Description of Artificial Sequence: Synthetic oligonucleotide
aguggcucuaccuuauaac

SEQ ID NO: 2032378 - RNA, 19 nt, Artificial Sequence
  Description of Artificial Sequence: Synthetic oligonucleotide
cuugacucugaguaaagag

SEQ ID NO: 2032379 - RNA, 19 nt, Artificial Sequence
  Description of Artificial Sequence: Synthetic oligonucleotide
aaagccagcuuuccugaac

SEQ ID NO: 2032380 - RNA, 19 nt, Artificial Sequence
  Description of Artificial Sequence: Synthetic oligonucleotide
aauuuuaagcagucuuuga

SEQ ID NO: 2032381 - RNA, 19 nt, Artificial Sequence
  Description of Artificial Sequence: Synthetic oligonucleotide
cuacguuuuccacauaggg

SEQ ID NO: 2032382 - RNA, 19 nt, Artificial Sequence
  Description of Artificial Sequence: Synthetic oligonucleotide
aaugucaggggcugaucac

SEQ ID NO: 2032383 - RNA, 19 nt, Artificial Sequence
  Description of Artificial Sequence: Synthetic oligonucleotide
acaaagaaagaauuaguau

SEQ ID NO: 2032384 - RNA, 19 nt, Artificial Sequence
  Description of Artificial Sequence: Synthetic oligonucleotide
uuuauugccagucuucauu

SEQ ID NO: 2032385 - RNA, 19 nt, Artificial Sequence
  Description of Artificial Sequence: Synthetic oligonucleotide
gaaagggcaaaaccaaggc

SEQ ID NO: 2032386 - RNA, 19 nt, Artificial Sequence
  Description of Artificial Sequence: Synthetic oligonucleotide
uuuuaagcagucuuugaaa

SEQ ID NO: 2032387 - RNA, 19 nt, Artificial Sequence
  Description of Artificial Sequence: Synthetic oligonucleotide
cugauaucuuuuaacaaug

SEQ ID NO: 2032388 - RNA, 19 nt, Artificial Sequence
  Description of Artificial Sequence: Synthetic oligonucleotide
uuuaaaauuccuacacgau

SEQ ID NO: 2032389 - RNA, 19 nt, Artificial Sequence
  Description of Artificial Sequence: Synthetic oligonucleotide
uaagcagucuuugaaacug

SEQ ID NO: 2032390 - RNA, 19 nt, Artificial Sequence
  Description of Artificial Sequence: Synthetic oligonucleotide
aguuucuaaacaugaaaga

SEQ ID NO: 2032391 - RNA, 19 nt, Artificial Sequence
  Description of Artificial Sequence: Synthetic oligonucleotide
aaagaaagaauuaguauuu

SEQ ID NO: 2032392 - RNA, 19 nt, Artificial Sequence
  Description of Artificial Sequence: Synthetic oligonucleotide
guccggauuaauuuuaagc

SEQ ID NO: 2032393 - RNA, 19 nt, Artificial Sequence
  Description of Artificial Sequence: Synthetic oligonucleotide
auuccuacacgauacugag

SEQ ID NO: 2032394 - RNA, 19 nt, Artificial Sequence
  Description of Artificial Sequence: Synthetic oligonucleotide
aaggcaaggauaacccugc

SEQ ID NO: 2032395 - RNA, 19 nt, Artificial Sequence
  Description of Artificial Sequence: Synthetic oligonucleotide
ucugccauucauuuauacc

SEQ ID NO: 2032396 - RNA, 19 nt, Artificial Sequence
  Description of Artificial Sequence: Synthetic oligonucleotide
auuuuaagcagucuuugaa

SEQ ID NO: 2032397 - RNA, 19 nt, Artificial Sequence
  Description of Artificial Sequence: Synthetic oligonucleotide
cuaugaguuuuccaguccg

SEQ ID NO: 2032398 - RNA, 19 nt, Artificial Sequence
  Description of Artificial Sequence: Synthetic oligonucleotide
acguuuuccacauagggau

SEQ ID NO: 2032399 - RNA, 19 nt, Artificial Sequence
  Description of Artificial Sequence: Synthetic oligonucleotide
aaugagucccuacagcaau

SEQ ID NO: 2032400 - RNA, 19 nt, Artificial Sequence
  Description of Artificial Sequence: Synthetic oligonucleotide
uaucaguuccaugacauca

SEQ ID NO: 2032401 - RNA, 19 nt, Artificial Sequence
  Description of Artificial Sequence: Synthetic oligonucleotide
gucuuugaaacugaucugg

SEQ ID NO: 2032402 - RNA, 19 nt, Artificial Sequence
  Description of Artificial Sequence: Synthetic oligonucleotide
uggcuuuuaaaauuccuac

SEQ ID NO: 2032403 - RNA, 19 nt, Artificial Sequence
  Description of Artificial Sequence: Synthetic oligonucleotide
uacguuuuccacauaggga

SEQ ID NO: 2032404 - RNA, 19 nt, Artificial Sequence
  Description of Artificial Sequence: Synthetic oligonucleotide
uuauaaccaauauuuggaa

SEQ ID NO: 2032405 - RNA, 19 nt, Artificial Sequence
  Description of Artificial Sequence: Synthetic oligonucleotide
aaggcuuaggccuccauau

SEQ ID NO: 2032406 - RNA, 19 nt, Artificial Sequence
  Description of Artificial Sequence: Synthetic oligonucleotide
ugaucuggugaaaacacaa

SEQ ID NO: 2032407 - RNA, 19 nt, Artificial Sequence
  Description of Artificial Sequence: Synthetic oligonucleotide
cuagugaaagcuucgauga

SEQ ID NO: 2032408 - RNA, 19 nt, Artificial Sequence
  Description of Artificial Sequence: Synthetic oligonucleotide
uaagcagcugaugacauca

SEQ ID NO: 2032409 - RNA, 19 nt, Artificial Sequence
  Description of Artificial Sequence: Synthetic oligonucleotide
guugauagauguucuagac

SEQ ID NO: 2032410 - RNA, 19 nt, Artificial Sequence
  Description of Artificial Sequence: Synthetic oligonucleotide
ucuaccuuauaaccaauau

SEQ ID NO: 2032411 - RNA, 19 nt, Artificial Sequence
  Description of Artificial Sequence: Synthetic oligonucleotide
gauaacccugccuugggug

SEQ ID NO: 2032412 - RNA, 19 nt, Artificial Sequence
  Description of Artificial Sequence: Synthetic oligonucleotide
ugaguaaagaguugauuaa

SEQ ID NO: 2032413 - RNA, 19 nt, Artificial Sequence
  Description of Artificial Sequence: Synthetic oligonucleotide
guacaugucuccuucacac

SEQ ID NO: 2032414 - RNA, 19 nt, Artificial Sequence
  Description of Artificial Sequence: Synthetic oligonucleotide
ucuaugaguuuuccagucc

SEQ ID NO: 2032415 - RNA, 19 nt, Artificial Sequence
  Description of Artificial Sequence: Synthetic oligonucleotide
accuacguuuuccacauag

SEQ ID NO: 2032416 - RNA, 19 nt, Artificial Sequence
  Description of Artificial Sequence: Synthetic oligonucleotide
uguauucugccauucauuu

SEQ ID NO: 2032417 - RNA, 19 nt, Artificial Sequence
  Description of Artificial Sequence: Synthetic oligonucleotide
uuucuucaaaaugagggcu

SEQ ID NO: 2032418 - RNA, 19 nt, Artificial Sequence
  Description of Artificial Sequence: Synthetic oligonucleotide
agucaagaagucuaugagu

SEQ ID NO: 2032419 - RNA, 19 nt, Artificial Sequence
  Description of Artificial Sequence: Synthetic oligonucleotide
aauuccuacacgauacuga

SEQ ID NO: 2032420 - RNA, 19 nt, Artificial Sequence
  Description of Artificial Sequence: Synthetic oligonucleotide
uaauuggagagugaccugc

SEQ ID NO: 2032421 - RNA, 19 nt, Artificial Sequence
  Description of Artificial Sequence: Synthetic oligonucleotide
uuaacaaugucaggggcug

SEQ ID NO: 2032422 - RNA, 19 nt, Artificial Sequence
  Description of Artificial Sequence: Synthetic oligonucleotide
caucacugcacacagcccc

SEQ ID NO: 2032423 - RNA, 19 nt, Artificial Sequence
  Description of Artificial Sequence: Synthetic oligonucleotide
auacacaaagaguuggcgu

SEQ ID NO: 2032424 - RNA, 19 nt, Artificial Sequence
  Description of Artificial Sequence: Synthetic oligonucleotide
cacauagggaugaaagggc

SEQ ID NO: 2032425 - RNA, 19 nt, Artificial Sequence
  Description of Artificial Sequence: Synthetic oligonucleotide
uuuauaccaagcacucugu

SEQ ID NO: 2032426 - RNA, 19 nt, Artificial Sequence
  Description of Artificial Sequence: Synthetic oligonucleotide
cugcauuggagcuugacuc

SEQ ID NO: 2032427 - RNA, 19 nt, Artificial Sequence
  Description of Artificial Sequence: Synthetic oligonucleotide
aaauuccuacacgauacug

SEQ ID NO: 2032428 - RNA, 19 nt, Artificial Sequence
  Description of Artificial Sequence: Synthetic oligonucleotide
gauguucuagacauaaaca

SEQ ID NO: 2032429 - RNA, 19 nt, Artificial Sequence
  Description of Artificial Sequence: Synthetic oligonucleotide
cuacacgauacugagaaug

SEQ ID NO: 2032430 - RNA, 19 nt, Artificial Sequence
  Description of Artificial Sequence: Synthetic oligonucleotide
aagggcaaaaccaaggcaa

SEQ ID NO: 2032431 - RNA, 19 nt, Artificial Sequence
  Description of Artificial Sequence: Synthetic oligonucleotide
auaacccugccuugggugg

SEQ ID NO: 2032432 - RNA, 19 nt, Artificial Sequence
  Description of Artificial Sequence: Synthetic oligonucleotide
cuccauaugucuacacugg

SEQ ID NO: 2032433 - RNA, 19 nt, Artificial Sequence
  Description of Artificial Sequence: Synthetic oligonucleotide
guggcucuaccuuauaacc

SEQ ID NO: 2032434 - RNA, 19 nt, Artificial Sequence
  Description of Artificial Sequence: Synthetic oligonucleotide
uauggcagucuagugaaag

SEQ ID NO: 2032435 - RNA, 19 nt, Artificial Sequence
  Description of Artificial Sequence: Synthetic oligonucleotide
agaaggaguuucuaaacau

SEQ ID NO: 2032436 - RNA, 19 nt, Artificial Sequence
  Description of Artificial Sequence: Synthetic oligonucleotide
ugggaaugagucccuacag

SEQ ID NO: 2032437 - RNA, 19 nt, Artificial Sequence
  Description of Artificial Sequence: Synthetic oligonucleotide
uuucugaugguuucuccca

SEQ ID NO: 2032438 - RNA, 19 nt, Artificial Sequence
  Description of Artificial Sequence: Synthetic oligonucleotide
uagucauuguacaugucuc

SEQ ID NO: 2032439 - RNA, 19 nt, Artificial Sequence
  Description of Artificial Sequence: Synthetic oligonucleotide
agaagucuaugaguuuucc

SEQ ID NO: 2032440 - RNA, 19 nt, Artificial Sequence
  Description of Artificial Sequence: Synthetic oligonucleotide
aguuaucaguggcucuacc

SEQ ID NO: 2032441 - RNA, 19 nt, Artificial Sequence
  Description of Artificial Sequence: Synthetic oligonucleotide
uuaagcagucuuugaaacu

SEQ ID NO: 2032442 - RNA, 19 nt, Artificial Sequence
  Description of Artificial Sequence: Synthetic oligonucleotide
auaccaagcacucuguauu

SEQ ID NO: 2032443 - RNA, 19 nt, Artificial Sequence
  Description of Artificial Sequence: Synthetic oligonucleotide
uuccugaacacuucaggca

SEQ ID NO: 2032444 - RNA, 19 nt, Artificial Sequence
  Description of Artificial Sequence: Synthetic oligonucleotide
aaagcucaguggcauaaau

SEQ ID NO: 2032445 - RNA, 19 nt, Artificial Sequence
  Description of Artificial Sequence: Synthetic oligonucleotide
uuaguauuuuggcuuuuaa

SEQ ID NO: 2032446 - RNA, 19 nt, Artificial Sequence
  Description of Artificial Sequence: Synthetic oligonucleotide
uuaucaguggcucuaccuu

SEQ ID NO: 2032447 - RNA, 19 nt, Artificial Sequence
  Description of Artificial Sequence: Synthetic oligonucleotide
agcaccuaagucaagaagu

SEQ ID NO: 2032448 - RNA, 19 nt, Artificial Sequence
  Description of Artificial Sequence: Synthetic oligonucleotide
auacuggaacccuguauuc

SEQ ID NO: 2032449 - RNA, 19 nt, Artificial Sequence
  Description of Artificial Sequence: Synthetic oligonucleotide
uaaacaugaaagaguuauc

SEQ ID NO: 2032450 - RNA, 19 nt, Artificial Sequence
  Description of Artificial Sequence: Synthetic oligonucleotide
uacacaaagaguuggcguu

SEQ ID NO: 2032451 - RNA, 19 nt, Artificial Sequence
  Description of Artificial Sequence: Synthetic oligonucleotide
aagacagcgucauccagaa

SEQ ID NO: 2032452 - RNA, 19 nt, Artificial Sequence
  Description of Artificial Sequence: Synthetic oligonucleotide
acaucgagccucuuccuag

SEQ ID NO: 2032453 - RNA, 19 nt, Artificial Sequence
  Description of Artificial Sequence: Synthetic oligonucleotide
ucuuugaaacugaucuggu

SEQ ID NO: 2032454 - RNA, 19 nt, Artificial Sequence
  Description of Artificial Sequence: Synthetic oligonucleotide
auagauguucuagacauaa

SEQ ID NO: 2032455 - RNA, 19 nt, Artificial Sequence
  Description of Artificial Sequence: Synthetic oligonucleotide
caaagaaagaauuaguauu

SEQ ID NO: 2032456 - RNA, 19 nt, Artificial Sequence
  Description of Artificial Sequence: Synthetic oligonucleotide
aagaguuaucaguggcucu

SEQ ID NO: 2032457 - RNA, 19 nt, Artificial Sequence
  Description of Artificial Sequence: Synthetic oligonucleotide
agucuuugaaacugaucug

SEQ ID NO: 2032458 - RNA, 19 nt, Artificial Sequence
  Description of Artificial Sequence: Synthetic oligonucleotide
uuggaauucaauggacagc

SEQ ID NO: 2032459 - RNA, 19 nt, Artificial Sequence
  Description of Artificial Sequence: Synthetic oligonucleotide
aagaagucuaugaguuuuc

SEQ ID NO: 2032460 - RNA, 19 nt, Artificial Sequence
  Description of Artificial Sequence: Synthetic oligonucleotide
uuauugccagucuucauuu

SEQ ID NO: 2032461 - RNA, 19 nt, Artificial Sequence
  Description of Artificial Sequence: Synthetic oligonucleotide
ccuagcaacccguugauag

SEQ ID NO: 2032462 - RNA, 19 nt, Artificial Sequence
  Description of Artificial Sequence: Synthetic oligonucleotide
cagaacguaguagucauug

SEQ ID NO: 2032463 - RNA, 19 nt, Artificial Sequence
  Description of Artificial Sequence: Synthetic oligonucleotide
gggaugaaagggcaaaacc

SEQ ID NO: 2032464 - RNA, 19 nt, Artificial Sequence
  Description of Artificial Sequence: Synthetic oligonucleotide
uccagaacguaguagucau

SEQ ID NO: 2032465 - RNA, 19 nt, Artificial Sequence
  Description of Artificial Sequence: Synthetic oligonucleotide
uacacacuacaaagaaaga

SEQ ID NO: 2032466 - RNA, 19 nt, Artificial Sequence
  Description of Artificial Sequence: Synthetic oligonucleotide
gaacacuucaggcaggcua

SEQ ID NO: 2032467 - RNA, 19 nt, Artificial Sequence
  Description of Artificial Sequence: Synthetic oligonucleotide
uaaccaauauuuggaauuc

SEQ ID NO: 2032468 - RNA, 19 nt, Artificial Sequence
  Description of Artificial Sequence: Synthetic oligonucleotide
cuauucacuuguucuuccc

SEQ ID NO: 2032469 - RNA, 19 nt, Artificial Sequence
  Description of Artificial Sequence: Synthetic oligonucleotide
agugaaagcuucgaugaca

SEQ ID NO: 2032470 - RNA, 19 nt, Artificial Sequence
  Description of Artificial Sequence: Synthetic oligonucleotide
uccaaaauuucugaugguu

SEQ ID NO: 2032471 - RNA, 19 nt, Artificial Sequence
  Description of Artificial Sequence: Synthetic oligonucleotide
uauugcuuugucugggaau

SEQ ID NO: 2032472 - RNA, 19 nt, Artificial Sequence
  Description of Artificial Sequence: Synthetic oligonucleotide
uccaucauaauuggagagu

SEQ ID NO: 2032473 - RNA, 19 nt, Artificial Sequence
  Description of Artificial Sequence: Synthetic oligonucleotide
cacuggucugagaacaaag

SEQ ID NO: 2032474 - RNA, 19 nt, Artificial Sequence
  Description of Artificial Sequence: Synthetic oligonucleotide
aucacaccgauccagcaaa

SEQ ID NO: 2032475 - RNA, 19 nt, Artificial Sequence
  Description of Artificial Sequence: Synthetic oligonucleotide
acgauacugagaauggcag

SEQ ID NO: 2032476 - RNA, 19 nt, Artificial Sequence
  Description of Artificial Sequence: Synthetic oligonucleotide
auuuggaauucaauggaca

SEQ ID NO: 2032477 - RNA, 19 nt, Artificial Sequence
  Description of Artificial Sequence: Synthetic oligonucleotide
cauaauuggagagugaccu

SEQ ID NO: 2032478 - RNA, 19 nt, Artificial Sequence
  Description of Artificial Sequence: Synthetic oligonucleotide
ucuuccuagcaacccguug

SEQ ID NO: 2032479 - RNA, 19 nt, Artificial Sequence
  Description of Artificial Sequence: Synthetic oligonucleotide
ucuacacuggucugagaac

SEQ ID NO: 2032480 - RNA, 19 nt, Artificial Sequence
  Description of Artificial Sequence: Synthetic oligonucleotide
auaauuggagagugaccug

SEQ ID NO: 2032481 - RNA, 19 nt, Artificial Sequence
  Description of Artificial Sequence: Synthetic oligonucleotide
gaagucuaugaguuuucca

SEQ ID NO: 2032482 - RNA, 19 nt, Artificial Sequence
  Description of Artificial Sequence: Synthetic oligonucleotide
ggaaugagucccuacagca

SEQ ID NO: 2032483 - RNA, 19 nt, Artificial Sequence
  Description of Artificial Sequence: Synthetic oligonucleotide
cuugccaccuacguuuucc

SEQ ID NO: 2032484 - RNA, 19 nt, Artificial Sequence
  Description of Artificial Sequence: Synthetic oligonucleotide
gucuacacuggucugagaa

SEQ ID NO: 2032485 - RNA, 19 nt, Artificial Sequence
  Description of Artificial Sequence: Synthetic oligonucleotide
gaacguaguagucauugua

SEQ ID NO: 2032486 - RNA, 19 nt, Artificial Sequence
  Description of Artificial Sequence: Synthetic oligonucleotide
aacaauccauuuaucaguu

SEQ ID NO: 2032487 - RNA, 19 nt, Artificial Sequence
  Description of Artificial Sequence: Synthetic oligonucleotide
aaacaucgagccucuuccu

SEQ ID NO: 2032488 - RNA, 19 nt, Artificial Sequence
  Description of Artificial Sequence: Synthetic oligonucleotide
acucugaguaaagaguuga

SEQ ID NO: 2032489 - RNA, 19 nt, Artificial Sequence
  Description of Artificial Sequence: Synthetic oligonucleotide
cugaucacaccgauccagc

SEQ ID NO: 2032490 - RNA, 19 nt, Artificial Sequence
  Description of Artificial Sequence: Synthetic oligonucleotide
ucagaaagcucaguggcau

SEQ ID NO: 2032491 - RNA, 19 nt, Artificial Sequence
  Description of Artificial Sequence: Synthetic oligonucleotide
aguaaagaguugauuaaaa

SEQ ID NO: 2032492 - RNA, 19 nt, Artificial Sequence
  Description of Artificial Sequence: Synthetic oligonucleotide
agcuuuauugccagucuuc

SEQ ID NO: 2032493 - RNA, 19 nt, Artificial Sequence
  Description of Artificial Sequence: Synthetic oligonucleotide
uugggugggcuccaagaca

SEQ ID NO: 2032494 - RNA, 19 nt, Artificial Sequence
  Description of Artificial Sequence: Synthetic oligonucleotide
acaucaugacuauugcuuu

SEQ ID NO: 2032495 - RNA, 19 nt, Artificial Sequence
  Description of Artificial Sequence: Synthetic oligonucleotide
uggcagucuagugaaagcu

SEQ ID NO: 2032496 - RNA, 19 nt, Artificial Sequence
  Description of Artificial Sequence: Synthetic oligonucleotide
ugacaaagccagcuuuccu

SEQ ID NO: 2032497 - RNA, 19 nt, Artificial Sequence
  Description of Artificial Sequence: Synthetic oligonucleotide
acagguauggcagucuagu

SEQ ID NO: 2032498 - RNA, 19 nt, Artificial Sequence
  Description of Artificial Sequence: Synthetic oligonucleotide
cacgauacugagaauggca

SEQ ID NO: 2032499 - RNA, 19 nt, Artificial Sequence
  Description of Artificial Sequence: Synthetic oligonucleotide
cuuccuagcaacccguuga

SEQ ID NO: 2032500 - RNA, 19 nt, Artificial Sequence
  Description of Artificial Sequence: Synthetic oligonucleotide
uucugccauucauuuauac

SEQ ID NO: 2032501 - RNA, 19 nt, Artificial Sequence
  Description of Artificial Sequence: Synthetic oligonucleotide
auaugucuacacuggucug

SEQ ID NO: 2032502 - RNA, 19 nt, Artificial Sequence
  Description of Artificial Sequence: Synthetic oligonucleotide
ugacaucauacuggaaccc

SEQ ID NO: 2032503 - RNA, 19 nt, Artificial Sequence
  Description of Artificial Sequence: Synthetic oligonucleotide
gacagcuuuauugccaguc

SEQ ID NO: 2032504 - RNA, 19 nt, Artificial Sequence
  Description of Artificial Sequence: Synthetic oligonucleotide
gaugacaaagccagcuuuc

SEQ ID NO: 2032505 - RNA, 19 nt, Artificial Sequence
  Description of Artificial Sequence: Synthetic oligonucleotide
aguccggauuaauuuuaag

SEQ ID NO: 2032506 - RNA, 19 nt, Artificial Sequence
  Description of Artificial Sequence: Synthetic oligonucleotide
uucugaugguuucucccac

SEQ ID NO: 2032507 - RNA, 19 nt, Artificial Sequence
  Description of Artificial Sequence: Synthetic oligonucleotide
aagaaagaauuaguauuuu

SEQ ID NO: 2032508 - RNA, 19 nt, Artificial Sequence
  Description of Artificial Sequence: Synthetic oligonucleotide
ccacauagggaugaaaggg

SEQ ID NO: 2032509 - RNA, 19 nt, Artificial Sequence
  Description of Artificial Sequence: Synthetic oligonucleotide
uuauaccaagcacucugua

SEQ ID NO: 2032510 - RNA, 19 nt, Artificial Sequence
  Description of Artificial Sequence: Synthetic oligonucleotide
aacaucgagccucuuccua

SEQ ID NO: 2032511 - RNA, 19 nt, Artificial Sequence
  Description of Artificial Sequence: Synthetic oligonucleotide
caucaugacuauugcuuug

SEQ ID NO: 2032512 - RNA, 19 nt, Artificial Sequence
  Description of Artificial Sequence: Synthetic oligonucleotide
aguuuuccaguccggauua

SEQ ID NO: 2032513 - RNA, 19 nt, Artificial Sequence
  Description of Artificial Sequence: Synthetic oligonucleotide
ugaucacaccgauccagca

SEQ ID NO: 2032514 - RNA, 19 nt, Artificial Sequence
  Description of Artificial Sequence: Synthetic oligonucleotide
ugcuuugucugggaaugag

SEQ ID NO: 2032515 - RNA, 19 nt, Artificial Sequence
  Description of Artificial Sequence: Synthetic oligonucleotide
uaggccuccauaugucuac

SEQ ID NO: 2032516 - RNA, 19 nt, Artificial Sequence
  Description of Artificial Sequence: Synthetic oligonucleotide
ucccuugauuuccaaaauu

SEQ ID NO: 2032517 - RNA, 19 nt, Artificial Sequence
  Description of Artificial Sequence: Synthetic oligonucleotide
cagcaccuaagucaagaag

SEQ ID NO: 2032518 - RNA, 19 nt, Artificial Sequence
  Description of Artificial Sequence: Synthetic oligonucleotide
guauuuuggcuuuuaaaau

SEQ ID NO: 2032519 - RNA, 19 nt, Artificial Sequence
  Description of Artificial Sequence: Synthetic oligonucleotide
gaauucaauggacagcuuu

SEQ ID NO: 2032520 - RNA, 19 nt, Artificial Sequence
  Description of Artificial Sequence: Synthetic oligonucleotide
aaccaauauuuggaauuca

SEQ ID NO: 2032521 - RNA, 19 nt, Artificial Sequence
  Description of Artificial Sequence: Synthetic oligonucleotide
uggaacccuguauucugcc

SEQ ID NO: 2032522 - RNA, 19 nt, Artificial Sequence
  Description of Artificial Sequence: Synthetic oligonucleotide
augaaagggcaaaaccaag

SEQ ID NO: 2032523 - RNA, 19 nt, Artificial Sequence
  Description of Artificial Sequence: Synthetic oligonucleotide
agaacguaguagucauugu

SEQ ID NO: 2032524 - RNA, 19 nt, Artificial Sequence
  Description of Artificial Sequence: Synthetic oligonucleotide
uagugaaagcuucgaugac

SEQ ID NO: 2032525 - RNA, 19 nt, Artificial Sequence
  Description of Artificial Sequence: Synthetic oligonucleotide
aaugagggcucaugauuuu

SEQ ID NO: 2032526 - RNA, 19 nt, Artificial Sequence
  Description of Artificial Sequence: Synthetic oligonucleotide
cacuccuuuacacacuaca

SEQ ID NO: 2032527 - RNA, 19 nt, Artificial Sequence
  Description of Artificial Sequence: Synthetic oligonucleotide
uuaggccuccauaugucua

SEQ ID NO: 2032528 - RNA, 19 nt, Artificial Sequence
  Description of Artificial Sequence: Synthetic oligonucleotide
augguuucucccacuugcc

SEQ ID NO: 2032529 - RNA, 19 nt, Artificial Sequence
  Description of Artificial Sequence: Synthetic oligonucleotide
aucaugacuauugcuuugu

SEQ ID NO: 2032530 - RNA, 19 nt, Artificial Sequence
  Description of Artificial Sequence: Synthetic oligonucleotide
ccggauuaauuuuaagcag

SEQ ID NO: 2032531 - RNA, 19 nt, Artificial Sequence
  Description of Artificial Sequence: Synthetic oligonucleotide
aguaacagaaggaguuucu

SEQ ID NO: 2032532 - RNA, 19 nt, Artificial Sequence
  Description of Artificial Sequence: Synthetic oligonucleotide
gguauggcagucuagugaa

SEQ ID NO: 2032533 - RNA, 19 nt, Artificial Sequence
  Description of Artificial Sequence: Synthetic oligonucleotide
ucugggaaugagucccuac

SEQ ID NO: 2032534 - RNA, 19 nt, Artificial Sequence
  Description of Artificial Sequence: Synthetic oligonucleotide
ucugaugguuucucccacu

SEQ ID NO: 2032535 - RNA, 19 nt, Artificial Sequence
  Description of Artificial Sequence: Synthetic oligonucleotide
uggacucugaaggcuuagg

SEQ ID NO: 2032536 - RNA, 19 nt, Artificial Sequence
  Description of Artificial Sequence: Synthetic oligonucleotide
uuccaaaauuucugauggu

SEQ ID NO: 2032537 - RNA, 19 nt, Artificial Sequence
  Description of Artificial Sequence: Synthetic oligonucleotide
uuaagcagcugaugacauc

SEQ ID NO: 2032538 - RNA, 19 nt, Artificial Sequence
  Description of Artificial Sequence: Synthetic oligonucleotide
uagauguucuagacauaaa

SEQ ID NO: 2032539 - RNA, 19 nt, Artificial Sequence
  Description of Artificial Sequence: Synthetic oligonucleotide
caaugucaggggcugauca

SEQ ID NO: 2032540 - RNA, 19 nt, Artificial Sequence
  Description of Artificial Sequence: Synthetic oligonucleotide
guuaucaguggcucuaccu

SEQ ID NO: 2032541 - RNA, 19 nt, Artificial Sequence
  Description of Artificial Sequence: Synthetic oligonucleotide
gagagugaccugcauugga

SEQ ID NO: 2032542 - RNA, 19 nt, Artificial Sequence
  Description of Artificial Sequence: Synthetic oligonucleotide
aggcaaggauaacccugcc

SEQ ID NO: 2032543 - RNA, 19 nt, Artificial Sequence
  Description of Artificial Sequence: Synthetic oligonucleotide
cuacacuggucugagaaca

SEQ ID NO: 2032544 - RNA, 19 nt, Artificial Sequence
  Description of Artificial Sequence: Synthetic oligonucleotide
gaucacaccgauccagcaa

SEQ ID NO: 2032545 - RNA, 19 nt, Artificial Sequence
  Description of Artificial Sequence: Synthetic oligonucleotide
ucccacuugccaccuacgu

SEQ ID NO: 2032546 - RNA, 19 nt, Artificial Sequence
  Description of Artificial Sequence: Synthetic oligonucleotide
agaaagcucaguggcauaa

SEQ ID NO: 2032547 - RNA, 19 nt, Artificial Sequence
  Description of Artificial Sequence: Synthetic oligonucleotide
ucauuguacaugucuccuu

SEQ ID NO: 2032548 - RNA, 19 nt, Artificial Sequence
  Description of Artificial Sequence: Synthetic oligonucleotide
uccaugacaucaugacuau

SEQ ID NO: 2032549 - RNA, 19 nt, Artificial Sequence
  Description of Artificial Sequence: Synthetic oligonucleotide
accuaagucaagaagucua

SEQ ID NO: 2032550 - RNA, 19 nt, Artificial Sequence
  Description of Artificial Sequence: Synthetic oligonucleotide
auagggaugaaagggcaaa

SEQ ID NO: 2032551 - RNA, 19 nt, Artificial Sequence
  Description of Artificial Sequence: Synthetic oligonucleotide
gaaagaguuaucaguggcu

SEQ ID NO: 2032552 - RNA, 19 nt, Artificial Sequence
  Description of Artificial Sequence: Synthetic oligonucleotide
acauagggaugaaagggca

SEQ ID NO: 2032553 - RNA, 19 nt, Artificial Sequence
  Description of Artificial Sequence: Synthetic oligonucleotide
ucaugacuauugcuuuguc

SEQ ID NO: 2032554 - RNA, 19 nt, Artificial Sequence
  Description of Artificial Sequence: Synthetic oligonucleotide
cugaacacuucaggcaggc

SEQ ID NO: 2032555 - RNA, 19 nt, Artificial Sequence
  Description of Artificial Sequence: Synthetic oligonucleotide
uuccuacacgauacugaga

SEQ ID NO: 2032556 - RNA, 19 nt, Artificial Sequence
  Description of Artificial Sequence: Synthetic oligonucleotide
agaguuaucaguggcucua

SEQ ID NO: 2032557 - RNA, 19 nt, Artificial Sequence
  Description of Artificial Sequence: Synthetic oligonucleotide
gaaggcuuaggccuccaua

SEQ ID NO: 2032558 - RNA, 19 nt, Artificial Sequence
  Description of Artificial Sequence: Synthetic oligonucleotide
caucgagccucuuccuagc

SEQ ID NO: 2032559 - RNA, 19 nt, Artificial Sequence
  Description of Artificial Sequence: Synthetic oligonucleotide
caggcuauucacuuguucu

SEQ ID NO: 2032560 - RNA, 19 nt, Artificial Sequence
  Description of Artificial Sequence: Synthetic oligonucleotide
gcuauucacuuguucuucc

SEQ ID NO: 2032561 - RNA, 19 nt, Artificial Sequence
  Description of Artificial Sequence: Synthetic oligonucleotide
cacuacaaagaaagaauua

SEQ ID NO: 2032562 - RNA, 19 nt, Artificial Sequence
  Description of Artificial Sequence: Synthetic oligonucleotide
guuuuccacauagggauga

SEQ ID NO: 2032563 - RNA, 19 nt, Artificial Sequence
  Description of Artificial Sequence: Synthetic oligonucleotide
acaaagaguuggcguuuug

SEQ ID NO: 2032564 - RNA, 19 nt, Artificial Sequence
  Description of Artificial Sequence: Synthetic oligonucleotide
cagaucauuguuucagaaa

SEQ ID NO: 2032565 - RNA, 19 nt, Artificial Sequence
  Description of Artificial Sequence: Synthetic oligonucleotide
gcagcugaugacaucauac

SEQ ID NO: 2032566 - RNA, 19 nt, Artificial Sequence
  Description of Artificial Sequence: Synthetic oligonucleotide
uuccuagcaacccguugau

SEQ ID NO: 2032567 - RNA, 19 nt, Artificial Sequence
  Description of Artificial Sequence: Synthetic oligonucleotide
aggcuauucacuuguucuu

SEQ ID NO: 2032568 - RNA, 19 nt, Artificial Sequence
  Description of Artificial Sequence: Synthetic oligonucleotide
ucccaguucugucccuuga

SEQ ID NO: 2032569 - RNA, 19 nt, Artificial Sequence
  Description of Artificial Sequence: Synthetic oligonucleotide
augaguuuuccaguccgga

SEQ ID NO: 2032570 - RNA, 19 nt, Artificial Sequence
  Description of Artificial Sequence: Synthetic oligonucleotide
cacagguauggcagucuag

SEQ ID NO: 2032571 - RNA, 19 nt, Artificial Sequence
  Description of Artificial Sequence: Synthetic oligonucleotide
ggcuccaagacacuucuga

SEQ ID NO: 2032572 - RNA, 19 nt, Artificial Sequence
  Description of Artificial Sequence: Synthetic oligonucleotide
auaguaacagaaggaguuu

SEQ ID NO: 2032573 - RNA, 19 nt, Artificial Sequence
  Description of Artificial Sequence: Synthetic oligonucleotide
auucaauggacagcuuuau

SEQ ID NO: 2032574 - RNA, 19 nt, Artificial Sequence
  Description of Artificial Sequence: Synthetic oligonucleotide
agucuagugaaagcuucga

SEQ ID NO: 2032575 - RNA, 19 nt, Artificial Sequence
  Description of Artificial Sequence: Synthetic oligonucleotide
cugaucuggugaaaacaca

SEQ ID NO: 2032576 - RNA, 19 nt, Artificial Sequence
  Description of Artificial Sequence: Synthetic oligonucleotide
accaagcacucuguauuuc

SEQ ID NO: 2032577 - RNA, 19 nt, Artificial Sequence
  Description of Artificial Sequence: Synthetic oligonucleotide
ggauuaauuuuaagcaguc

SEQ ID NO: 2032578 - RNA, 19 nt, Artificial Sequence
  Description of Artificial Sequence: Synthetic oligonucleotide
uagcaacccguugauagau

SEQ ID NO: 2032579 - RNA, 19 nt, Artificial Sequence
  Description of Artificial Sequence: Synthetic oligonucleotide
gcugaucacaccgauccag

SEQ ID NO: 2032580 - RNA, 19 nt, Artificial Sequence
  Description of Artificial Sequence: Synthetic oligonucleotide
cuagcaacccguugauaga

SEQ ID NO: 2032581 - RNA, 19 nt, Artificial Sequence
  Description of Artificial Sequence: Synthetic oligonucleotide
cagauuccaggguggacuc

SEQ ID NO: 2032582 - RNA, 19 nt, Artificial Sequence
  Description of Artificial Sequence: Synthetic oligonucleotide
acuccuuuacacacuacaa

SEQ ID NO: 2032583 - RNA, 19 nt, Artificial Sequence
  Description of Artificial Sequence: Synthetic oligonucleotide
ugaaacugaucuggugaaa

SEQ ID NO: 2032584 - RNA, 19 nt, Artificial Sequence
  Description of Artificial Sequence: Synthetic oligonucleotide
uaacccugccuuggguggg

SEQ ID NO: 2032585 - RNA, 19 nt, Artificial Sequence
  Description of Artificial Sequence: Synthetic oligonucleotide
uccuucacacagguauggc

SEQ ID NO: 2032586 - RNA, 19 nt, Artificial Sequence
  Description of Artificial Sequence: Synthetic oligonucleotide
cagccccucuucuggaggg

SEQ ID NO: 2032587 - RNA, 19 nt, Artificial Sequence
  Description of Artificial Sequence: Synthetic oligonucleotide
caugacuauugcuuugucu

SEQ ID NO: 2032588 - RNA, 19 nt, Artificial Sequence
  Description of Artificial Sequence: Synthetic oligonucleotide
gaguuuuccaguccggauu

SEQ ID NO: 2032589 - RNA, 19 nt, Artificial Sequence
  Description of Artificial Sequence: Synthetic oligonucleotide
caguggcauaaauuucuuc

SEQ ID NO: 2032590 - RNA, 19 nt, Artificial Sequence
  Description of Artificial Sequence: Synthetic oligonucleotide
ucgagccucuuccuagcaa

SEQ ID NO: 2032591 - RNA, 19 nt, Artificial Sequence
  Description of Artificial Sequence: Synthetic oligonucleotide
auuggagagugaccugcau

SEQ ID NO: 2032592 - RNA, 19 nt, Artificial Sequence
  Description of Artificial Sequence: Synthetic oligonucleotide
aguagucauuguacauguc

SEQ ID NO: 2032593 - RNA, 19 nt, Artificial Sequence
  Description of Artificial Sequence: Synthetic oligonucleotide
agggcagauuccagggugg

SEQ ID NO: 2032594 - RNA, 19 nt, Artificial Sequence
  Description of Artificial Sequence: Synthetic oligonucleotide
caucauaauuggagaguga

SEQ ID NO: 2032595 - RNA, 19 nt, Artificial Sequence
  Description of Artificial Sequence: Synthetic oligonucleotide
gaucuggugaaaacacaaa

SEQ ID NO: 2032596 - RNA, 19 nt, Artificial Sequence
  Description of Artificial Sequence: Synthetic oligonucleotide
agcuucgaugacaaagcca

SEQ ID NO: 2032597 - RNA, 19 nt, Artificial Sequence
  Description of Artificial Sequence: Synthetic oligonucleotide
gccucuuccuagcaacccg

SEQ ID NO: 2032598 - RNA, 19 nt, Artificial Sequence
  Description of Artificial Sequence: Synthetic oligonucleotide
accugcauuggagcuugac

SEQ ID NO: 2032599 - RNA, 19 nt, Artificial Sequence
  Description of Artificial Sequence: Synthetic oligonucleotide
aggcuuaggccuccauaug

SEQ ID NO: 2032600 - RNA, 19 nt, Artificial Sequence
  Description of Artificial Sequence: Synthetic oligonucleotide
ggcaaaaccaaggcaagga

SEQ ID NO: 2032601 - RNA, 19 nt, Artificial Sequence
  Description of Artificial Sequence: Synthetic oligonucleotide
auccauuuaucaguuccau

SEQ ID NO: 2032602 - RNA, 19 nt, Artificial Sequence
  Description of Artificial Sequence: Synthetic oligonucleotide
cucccacuugccaccuacg

SEQ ID NO: 2032603 - RNA, 19 nt, Artificial Sequence
  Description of Artificial Sequence: Synthetic oligonucleotide
acacagguauggcagucua

SEQ ID NO: 2032604 - RNA, 19 nt, Artificial Sequence
  Description of Artificial Sequence: Synthetic oligonucleotide
caccgauccagcaaauuua

SEQ ID NO: 2032605 - RNA, 19 nt, Artificial Sequence
  Description of Artificial Sequence: Synthetic oligonucleotide
uagggaugaaagggcaaaa

SEQ ID NO: 2032606 - RNA, 19 nt, Artificial Sequence
  Description of Artificial Sequence: Synthetic oligonucleotide
acuugccaccuacguuuuc

SEQ ID NO: 2032607 - RNA, 19 nt, Artificial Sequence
  Description of Artificial Sequence: Synthetic oligonucleotide
ugagucccuacagcaauua

SEQ ID NO: 2032608 - RNA, 19 nt, Artificial Sequence
  Description of Artificial Sequence: Synthetic oligonucleotide
ugaaagcuucgaugacaaa

SEQ ID NO: 2032609 - RNA, 19 nt, Artificial Sequence
  Description of Artificial Sequence: Synthetic oligonucleotide
gaguuaucaguggcucuac

SEQ ID NO: 2032610 - RNA, 19 nt, Artificial Sequence
  Description of Artificial Sequence: Synthetic oligonucleotide
ccuuuacacacuacaaaga

SEQ ID NO: 2032611 - RNA, 19 nt, Artificial Sequence
  Description of Artificial Sequence: Synthetic oligonucleotide
cauagggaugaaagggcaa

SEQ ID NO: 2032612 - RNA, 19 nt, Artificial Sequence
  Description of Artificial Sequence: Synthetic oligonucleotide
agacagcgucauccagaac

SEQ ID NO: 2032613 - RNA, 19 nt, Artificial Sequence
  Description of Artificial Sequence: Synthetic oligonucleotide
ccauaugucuacacugguc

SEQ ID NO: 2032614 - RNA, 19 nt, Artificial Sequence
  Description of Artificial Sequence: Synthetic oligonucleotide
ugaaggcuuaggccuccau

SEQ ID NO: 2032615 - RNA, 19 nt, Artificial Sequence
  Description of Artificial Sequence: Synthetic oligonucleotide
cuaccuuauaaccaauauu

SEQ ID NO: 2032616 - RNA, 19 nt, Artificial Sequence
  Description of Artificial Sequence: Synthetic oligonucleotide
ugccaccuacguuuuccac

SEQ ID NO: 2032617 - RNA, 19 nt, Artificial Sequence
  Description of Artificial Sequence: Synthetic oligonucleotide
acagcgucauccagaacgu

SEQ ID NO: 2032618 - RNA, 19 nt, Artificial Sequence
  Description of Artificial Sequence: Synthetic oligonucleotide
guaacagaaggaguuucua

SEQ ID NO: 2032619 - RNA, 19 nt, Artificial Sequence
  Description of Artificial Sequence: Synthetic oligonucleotide
ugucuacacuggucugaga

SEQ ID NO: 2032620 - RNA, 19 nt, Artificial Sequence
  Description of Artificial Sequence: Synthetic oligonucleotide
aucgagccucuuccuagca

SEQ ID NO: 2032621 - RNA, 19 nt, Artificial Sequence
  Description of Artificial Sequence: Synthetic oligonucleotide
gcaaggauaacccugccuu

SEQ ID NO: 2032622 - RNA, 19 nt, Artificial Sequence
  Description of Artificial Sequence: Synthetic oligonucleotide
cucuaccuuauaaccaaua

SEQ ID NO: 2032623 - RNA, 19 nt, Artificial Sequence
  Description of Artificial Sequence: Synthetic oligonucleotide
accgauccagcaaauuuaa

SEQ ID NO: 2032624 - RNA, 19 nt, Artificial Sequence
  Description of Artificial Sequence: Synthetic oligonucleotide
gccaccuacguuuuccaca

SEQ ID NO: 2032625 - RNA, 19 nt, Artificial Sequence
  Description of Artificial Sequence: Synthetic oligonucleotide
ccguugauagauguucuag

SEQ ID NO: 2032626 - RNA, 19 nt, Artificial Sequence
  Description of Artificial Sequence: Synthetic oligonucleotide
guauucugccauucauuua

SEQ ID NO: 2032627 - RNA, 19 nt, Artificial Sequence
  Description of Artificial Sequence: Synthetic oligonucleotide
uaacaaugucaggggcuga

SEQ ID NO: 2032628 - RNA, 19 nt, Artificial Sequence
  Description of Artificial Sequence: Synthetic oligonucleotide
gggcaaaaccaaggcaagg

SEQ ID NO: 2032629 - RNA, 19 nt, Artificial Sequence
  Description of Artificial Sequence: Synthetic oligonucleotide
ucacaccgauccagcaaau

SEQ ID NO: 2032630 - RNA, 19 nt, Artificial Sequence
  Description of Artificial Sequence: Synthetic oligonucleotide
cuuaggccuccauaugucu

SEQ ID NO: 2032631 - RNA, 19 nt, Artificial Sequence
  Description of Artificial Sequence: Synthetic oligonucleotide
gcagucuagugaaagcuuc

SEQ ID NO: 2032632 - RNA, 19 nt, Artificial Sequence
  Description of Artificial Sequence: Synthetic oligonucleotide
uugcuuugucugggaauga

SEQ ID NO: 2032633 - RNA, 19 nt, Artificial Sequence
  Description of Artificial Sequence: Synthetic oligonucleotide
ugaacacuucaggcaggcu

SEQ ID NO: 2032634 - RNA, 19 nt, Artificial Sequence
  Description of Artificial Sequence: Synthetic oligonucleotide
acacuccuuuacacacuac

SEQ ID NO: 2032635 - RNA, 19 nt, Artificial Sequence
  Description of Artificial Sequence: Synthetic oligonucleotide
acacaaagaguuggcguuu

SEQ ID NO: 2032636 - RNA, 19 nt, Artificial Sequence
  Description of Artificial Sequence: Synthetic oligonucleotide
gcuuuccugaacacuucag

SEQ ID NO: 2032637 - RNA, 19 nt, Artificial Sequence
  Description of Artificial Sequence: Synthetic oligonucleotide
acccguugauagauguucu

SEQ ID NO: 2032638 - RNA, 19 nt, Artificial Sequence
  Description of Artificial Sequence: Synthetic oligonucleotide
caaagaguuggcguuuugu

SEQ ID NO: 2032639 - RNA, 19 nt, Artificial Sequence
  Description of Artificial Sequence: Synthetic oligonucleotide
gcaggcuauucacuuguuc

SEQ ID NO: 2032640 - RNA, 19 nt, Artificial Sequence
  Description of Artificial Sequence: Synthetic oligonucleotide
guggacucugaaggcuuag

SEQ ID NO: 2032641 - RNA, 19 nt, Artificial Sequence
  Description of Artificial Sequence: Synthetic oligonucleotide
aucuuccaucauaauugga

SEQ ID NO: 2032642 - RNA, 19 nt, Artificial Sequence
  Description of Artificial Sequence: Synthetic oligonucleotide
gaaagcucaguggcauaaa

SEQ ID NO: 2032643 - RNA, 19 nt, Artificial Sequence
  Description of Artificial Sequence: Synthetic oligonucleotide
cgauacugagaauggcagc

SEQ ID NO: 2032644 - RNA, 19 nt, Artificial Sequence
  Description of Artificial Sequence: Synthetic oligonucleotide
agccccucuucuggagggc

SEQ ID NO: 2032645 - RNA, 19 nt, Artificial Sequence
  Description of Artificial Sequence: Synthetic oligonucleotide
acacuggucugagaacaaa

SEQ ID NO: 2032646 - RNA, 19 nt, Artificial Sequence
  Description of Artificial Sequence: Synthetic oligonucleotide
gcaccuaagucaagaaguc

SEQ ID NO: 2032647 - RNA, 19 nt, Artificial Sequence
  Description of Artificial Sequence: Synthetic oligonucleotide
ggagcuugacucugaguaa

SEQ ID NO: 2032648 - RNA, 19 nt, Artificial Sequence
  Description of Artificial Sequence: Synthetic oligonucleotide
cguugauagauguucuaga

SEQ ID NO: 2032649 - RNA, 19 nt, Artificial Sequence
  Description of Artificial Sequence: Synthetic oligonucleotide
gucuagugaaagcuucgau

SEQ ID NO: 2032650 - RNA, 19 nt, Artificial Sequence
  Description of Artificial Sequence: Synthetic oligonucleotide
cacuucaggcaggcuauuc

SEQ ID NO: 2032651 - RNA, 19 nt, Artificial Sequence
  Description of Artificial Sequence: Synthetic oligonucleotide
agcaacccguugauagaug

SEQ ID NO: 2032652 - RNA, 19 nt, Artificial Sequence
  Description of Artificial Sequence: Synthetic oligonucleotide
cugucccuugauuuccaaa

SEQ ID NO: 2032653 - RNA, 19 nt, Artificial Sequence
  Description of Artificial Sequence: Synthetic oligonucleotide
caguccggauuaauuuuaa

SEQ ID NO: 2032654 - RNA, 19 nt, Artificial Sequence
  Description of Artificial Sequence: Synthetic oligonucleotide
cccuacagcaauuaaguau

SEQ ID NO: 2032655 - RNA, 19 nt, Artificial Sequence
  Description of Artificial Sequence: Synthetic oligonucleotide
gcaaauuuaagcagcugau

SEQ ID NO: 2032656 - RNA, 19 nt, Artificial Sequence
  Description of Artificial Sequence: Synthetic oligonucleotide
ccagaucauuguuucagaa

SEQ ID NO: 2032657 - RNA, 19 nt, Artificial Sequence
  Description of Artificial Sequence: Synthetic oligonucleotide
cugccagaucauuguuuca

SEQ ID NO: 2032658 - RNA, 19 nt, Artificial Sequence
  Description of Artificial Sequence: Synthetic oligonucleotide
gcucaguggcauaaauuuc

SEQ ID NO: 2032659 - RNA, 19 nt, Artificial Sequence
  Description of Artificial Sequence: Synthetic oligonucleotide
cuuuauugccagucuucau

SEQ ID NO: 2032660 - RNA, 19 nt, Artificial Sequence
  Description of Artificial Sequence: Synthetic oligonucleotide
gcuuaggccuccauauguc

SEQ ID NO: 2032661 - RNA, 19 nt, Artificial Sequence
  Description of Artificial Sequence: Synthetic oligonucleotide
gcuugacucugaguaaaga

SEQ ID NO: 2032662 - RNA, 19 nt, Artificial Sequence
  Description of Artificial Sequence: Synthetic oligonucleotide
gcagucuuugaaacugauc

SEQ ID NO: 2032663 - RNA, 19 nt, Artificial Sequence
  Description of Artificial Sequence: Synthetic oligonucleotide
uccuagcaacccguugaua

SEQ ID NO: 2032664 - RNA, 19 nt, Artificial Sequence
  Description of Artificial Sequence: Synthetic oligonucleotide
cauuuauaccaagcacucu

SEQ ID NO: 2032665 - RNA, 19 nt, Artificial Sequence
  Description of Artificial Sequence: Synthetic oligonucleotide
cggauuaauuuuaagcagu

SEQ ID NO: 2032666 - RNA, 19 nt, Artificial Sequence
  Description of Artificial Sequence: Synthetic oligonucleotide
ccgauccagcaaauuuaag

SEQ ID NO: 2032667 - RNA, 19 nt, Artificial Sequence
  Description of Artificial Sequence: Synthetic oligonucleotide
augagucccuacagcaauu

SEQ ID NO: 2032668 - RNA, 19 nt, Artificial Sequence
  Description of Artificial Sequence: Synthetic oligonucleotide
ggcaaggauaacccugccu

SEQ ID NO: 2032669 - RNA, 19 nt, Artificial Sequence
  Description of Artificial Sequence: Synthetic oligonucleotide
ccucacaucacugcacaca

SEQ ID NO: 2032670 - RNA, 19 nt, Artificial Sequence
  Description of Artificial Sequence: Synthetic oligonucleotide
aggccuccauaugucuaca

SEQ ID NO: 2032671 - RNA, 19 nt, Artificial Sequence
  Description of Artificial Sequence: Synthetic oligonucleotide
ggccuccauaugucuacac

SEQ ID NO: 2032672 - RNA, 19 nt, Artificial Sequence
  Description of Artificial Sequence: Synthetic oligonucleotide
cagaaagcucaguggcaua

SEQ ID NO: 2032673 - RNA, 19 nt, Artificial Sequence
  Description of Artificial Sequence: Synthetic oligonucleotide
gccuccauaugucuacacu

SEQ ID NO: 2032674 - RNA, 19 nt, Artificial Sequence
  Description of Artificial Sequence: Synthetic oligonucleotide
caccuaagucaagaagucu

SEQ ID NO: 2032675 - RNA, 19 nt, Artificial Sequence
  Description of Artificial Sequence: Synthetic oligonucleotide
ccaguccggauuaauuuua

SEQ ID NO: 2032676 - RNA, 19 nt, Artificial Sequence
  Description of Artificial Sequence: Synthetic oligonucleotide
ccuaagucaagaagucuau

SEQ ID NO: 2032677 - RNA, 19 nt, Artificial Sequence
  Description of Artificial Sequence: Synthetic oligonucleotide
ggcagauuccaggguggac

SEQ ID NO: 2032678 - RNA, 19 nt, Artificial Sequence
  Description of Artificial Sequence: Synthetic oligonucleotide
ccccucacaucacugcaca

SEQ ID NO: 2032679 - RNA, 19 nt, Artificial Sequence
  Description of Artificial Sequence: Synthetic oligonucleotide
guuuuccaguccggauuaa

SEQ ID NO: 2032680 - RNA, 19 nt, Artificial Sequence
  Description of Artificial Sequence: Synthetic oligonucleotide
cccucacaucacugcacac

SEQ ID NO: 2032681 - RNA, 19 nt, Artificial Sequence
  Description of Artificial Sequence: Synthetic oligonucleotide
ccaccuacguuuuccacau

SEQ ID NO: 2032682 - RNA, 19 nt, Artificial Sequence
  Description of Artificial Sequence: Synthetic oligonucleotide
gcgucauccagaacguagu

SEQ ID NO: 2032683 - RNA, 19 nt, Artificial Sequence
  Description of Artificial Sequence: Synthetic oligonucleotide
caacccguugauagauguu

SEQ ID NO: 2032684 - RNA, 19 nt, Artificial Sequence
  Description of Artificial Sequence: Synthetic oligonucleotide
ggggcugaucacaccgauc

SEQ ID NO: 2032685 - RNA, 19 nt, Artificial Sequence
  Description of Artificial Sequence: Synthetic oligonucleotide
gccagcuuuccugaacacu

SEQ ID NO: 2032686 - RNA, 19 nt, Artificial Sequence
  Description of Artificial Sequence: Synthetic oligonucleotide
ccucuuccuagcaacccgu

SEQ ID NO: 2032687 - RNA, 19 nt, Artificial Sequence
  Description of Artificial Sequence: Synthetic oligonucleotide
gguggacucugaaggcuua

SEQ ID NO: 2032688 - RNA, 19 nt, Artificial Sequence
  Description of Artificial Sequence: Synthetic oligonucleotide
ggcagucuagugaaagcuu

SEQ ID NO: 2032689 - RNA, 19 nt, Artificial Sequence
  Description of Artificial Sequence: Synthetic oligonucleotide
cccguugauagauguucua

SEQ ID NO: 2032690 - RNA, 19 nt, Artificial Sequence
  Description of Artificial Sequence: Synthetic oligonucleotide
cucuuccuagcaacccguu

SEQ ID NO: 2032691 - RNA, 19 nt, Artificial Sequence
  Description of Artificial Sequence: Synthetic oligonucleotide
cacaaagaguuggcguuuu

SEQ ID NO: 2032692 - RNA, 19 nt, Artificial Sequence
  Description of Artificial Sequence: Synthetic oligonucleotide
acccugccuugggugggcu

SEQ ID NO: 2032693 - RNA, 19 nt, Artificial Sequence
  Description of Artificial Sequence: Synthetic oligonucleotide
cacuugccaccuacguuuu

SEQ ID NO: 2032694 - RNA, 19 nt, Artificial Sequence
  Description of Artificial Sequence: Synthetic oligonucleotide
gcacucuguauuucuucuu

SEQ ID NO: 2032695 - RNA, 19 nt, Artificial Sequence
  Description of Artificial Sequence: Synthetic oligonucleotide
ggugggcuccaagacacuu

SEQ ID NO: 2032696 - RNA, 19 nt, Artificial Sequence
  Description of Artificial Sequence: Synthetic oligonucleotide
cuucccaguucugucccuu

SEQ ID NO: 2032697 - RNA, 19 nt, Artificial Sequence
  Description of Artificial Sequence: Synthetic oligonucleotide
gccccucuucuggagggca

SEQ ID NO: 2032698 - RNA, 19 nt, Artificial Sequence
  Description of Artificial Sequence: Synthetic oligonucleotide
gaccugcauuggagcuuga

SEQ ID NO: 2032699 - RNA, 19 nt, Artificial Sequence
  Description of Artificial Sequence: Synthetic oligonucleotide
cagcgucauccagaacgua

SEQ ID NO: 2032700 - RNA, 19 nt, Artificial Sequence
  Description of Artificial Sequence: Synthetic oligonucleotide
cgucauccagaacguagua

SEQ ID NO: 2032701 - RNA, 19 nt, Artificial Sequence
  Description of Artificial Sequence: Synthetic oligonucleotide
gcucuaccuuauaaccaau

SEQ ID NO: 2032702 - RNA, 19 nt, Artificial Sequence
  Description of Artificial Sequence: Synthetic oligonucleotide
ggaauucaauggacagcuu

SEQ ID NO: 2032703 - RNA, 19 nt, Artificial Sequence
  Description of Artificial Sequence: Synthetic oligonucleotide
cccugccuugggugggcuc

SEQ ID NO: 2032704 - RNA, 19 nt, Artificial Sequence
  Description of Artificial Sequence: Synthetic oligonucleotide
caccuacguuuuccacaua

SEQ ID NO: 2032705 - RNA, 19 nt, Artificial Sequence
  Description of Artificial Sequence: Synthetic oligonucleotide
ccuacacgauacugagaau

SEQ ID NO: 2032706 - RNA, 19 nt, Artificial Sequence
  Description of Artificial Sequence: Synthetic oligonucleotide
cccacuugccaccuacguu

SEQ ID NO: 2032707 - RNA, 19 nt, Artificial Sequence
  Description of Artificial Sequence: Synthetic oligonucleotide
ccagaacguaguagucauu

SEQ ID NO: 2032708 - RNA, 19 nt, Artificial Sequence
  Description of Artificial Sequence: Synthetic oligonucleotide
cacaaacaucgagccucuu

SEQ ID NO: 2032709 - RNA, 19 nt, Artificial Sequence
  Description of Artificial Sequence: Synthetic oligonucleotide
gggugggcuccaagacacu

SEQ ID NO: 2032710 - RNA, 19 nt, Artificial Sequence
  Description of Artificial Sequence: Synthetic oligonucleotide
ccaugacaucaugacuauu

SEQ ID NO: 2032711 - RNA, 19 nt, Artificial Sequence
  Description of Artificial Sequence: Synthetic oligonucleotide
aauaagaauccucaagugc

SEQ ID NO: 2032712 - RNA, 19 nt, Artificial Sequence
  Description of Artificial Sequence: Synthetic oligonucleotide
ucaaguuucaaagacaccg

SEQ ID NO: 2032713 - RNA, 19 nt, Artificial Sequence
  Description of Artificial Sequence: Synthetic oligonucleotide
aaaacagauggcuugcugg

SEQ ID NO: 2032714 - RNA, 19 nt, Artificial Sequence
  Description of Artificial Sequence: Synthetic oligonucleotide
acuuauguuacaauaagcc

SEQ ID NO: 2032715 - RNA, 19 nt, Artificial Sequence
  Description of Artificial Sequence: Synthetic oligonucleotide
gaugaaaacagcaaggccc

SEQ ID NO: 2032716 - RNA, 19 nt, Artificial Sequence
  Description of Artificial Sequence: Synthetic oligonucleotide
agugucaagagucuggugg

SEQ ID NO: 2032717 - RNA, 19 nt, Artificial Sequence
  Description of Artificial Sequence: Synthetic oligonucleotide
auaaucagucuguacagcc

SEQ ID NO: 2032718 - RNA, 19 nt, Artificial Sequence
  Description of Artificial Sequence: Synthetic oligonucleotide
auaagaauccucaagugcc

SEQ ID NO: 2032719 - RNA, 19 nt, Artificial Sequence
  Description of Artificial Sequence: Synthetic oligonucleotide
aaagauaaggcuuuugcau

SEQ ID NO: 2032720 - RNA, 19 nt, Artificial Sequence
  Description of Artificial Sequence: Synthetic oligonucleotide
acauucaaguuucaaagac

SEQ ID NO: 2032721 - RNA, 19 nt, Artificial Sequence
  Description of Artificial Sequence: Synthetic oligonucleotide
ucaagugccagcuaggagc

SEQ ID NO: 2032722 - RNA, 19 nt, Artificial Sequence
  Description of Artificial Sequence: Synthetic oligonucleotide
aggaagggaaccuuguucc

SEQ ID NO: 2032723 - RNA, 19 nt, Artificial Sequence
  Description of Artificial Sequence: Synthetic oligonucleotide
uuacuuauguuacaauaag

SEQ ID NO: 2032724 - RNA, 19 nt, Artificial Sequence
  Description of Artificial Sequence: Synthetic oligonucleotide
gaaaguuagaccuugugga

SEQ ID NO: 2032725 - RNA, 19 nt, Artificial Sequence
  Description of Artificial Sequence: Synthetic oligonucleotide
aaaucauuaaagaagaauu

SEQ ID NO: 2032726 - RNA, 19 nt, Artificial Sequence
  Description of Artificial Sequence: Synthetic oligonucleotide
uuauguuacaauaagccuu

SEQ ID NO: 2032727 - RNA, 19 nt, Artificial Sequence
  Description of Artificial Sequence: Synthetic oligonucleotide
aaacagauggcuugcuggg

SEQ ID NO: 2032728 - RNA, 19 nt, Artificial Sequence
  Description of Artificial Sequence: Synthetic oligonucleotide
aauuagacgugaguucugc

SEQ ID NO: 2032729 - RNA, 19 nt, Artificial Sequence
  Description of Artificial Sequence: Synthetic oligonucleotide
uccuagaagauucuagugc

SEQ ID NO: 2032730 - RNA, 19 nt, Artificial Sequence
  Description of Artificial Sequence: Synthetic oligonucleotide
uuuggugaccccaauaaga

SEQ ID NO: 2032731 - RNA, 19 nt, Artificial Sequence
  Description of Artificial Sequence: Synthetic oligonucleotide
augauauaaauaaucaguc

SEQ ID NO: 2032732 - RNA, 19 nt, Artificial Sequence
  Description of Artificial Sequence: Synthetic oligonucleotide
aacauucacagccaaguca

SEQ ID NO: 2032733 - RNA, 19 nt, Artificial Sequence
  Description of Artificial Sequence: Synthetic oligonucleotide
aaaccuugggucuuaaaga

SEQ ID NO: 2032734 - RNA, 19 nt, Artificial Sequence
  Description of Artificial Sequence: Synthetic oligonucleotide
auagcucugucauucaacg

SEQ ID NO: 2032735 - RNA, 19 nt, Artificial Sequence
  Description of Artificial Sequence: Synthetic oligonucleotide
aaccgagucgaccugacag

SEQ ID NO: 2032736 - RNA, 19 nt, Artificial Sequence
  Description of Artificial Sequence: Synthetic oligonucleotide
aaaguuagaccuuguggag

SEQ ID NO: 2032737 - RNA, 19 nt, Artificial Sequence
  Description of Artificial Sequence: Synthetic oligonucleotide
aaaacuccggggcuguugg

SEQ ID NO: 2032738 - RNA, 19 nt, Artificial Sequence
  Description of Artificial Sequence: Synthetic oligonucleotide
uuugcauuagagaauuaga

SEQ ID NO: 2032739 - RNA, 19 nt, Artificial Sequence
  Description of Artificial Sequence: Synthetic oligonucleotide
uugcauuagagaauuagac

SEQ ID NO: 2032740 - RNA, 19 nt, Artificial Sequence
  Description of Artificial Sequence: Synthetic oligonucleotide
ugaguuacagcucugcuuc

SEQ ID NO: 2032741 - RNA, 19 nt, Artificial Sequence
  Description of Artificial Sequence: Synthetic oligonucleotide
auucaaguuucaaagacac

SEQ ID NO: 2032742 - RNA, 19 nt, Artificial Sequence
  Description of Artificial Sequence: Synthetic oligonucleotide
gaagccaaaacucccaaug

SEQ ID NO: 2032743 - RNA, 19 nt, Artificial Sequence
  Description of Artificial Sequence: Synthetic oligonucleotide
ugggucuuaaagauaaggc

SEQ ID NO: 2032744 - RNA, 19 nt, Artificial Sequence
  Description of Artificial Sequence: Synthetic oligonucleotide
uccccuagaguuaaaauca

SEQ ID NO: 2032745 - RNA, 19 nt, Artificial Sequence
  Description of Artificial Sequence: Synthetic oligonucleotide
uguuccucaaccauccgag

SEQ ID NO: 2032746 - RNA, 19 nt, Artificial Sequence
  Description of Artificial Sequence: Synthetic oligonucleotide
uacuuauguuacaauaagc

SEQ ID NO: 2032747 - RNA, 19 nt, Artificial Sequence
  Description of Artificial Sequence: Synthetic oligonucleotide
caaaccuugggucuuaaag

SEQ ID NO: 2032748 - RNA, 19 nt, Artificial Sequence
  Description of Artificial Sequence: Synthetic oligonucleotide
aaacauucacagccaaguc

SEQ ID NO: 2032749 - RNA, 19 nt, Artificial Sequence
  Description of Artificial Sequence: Synthetic oligonucleotide
ugagaggcaagucuaaccu

SEQ ID NO: 2032750 - RNA, 19 nt, Artificial Sequence
  Description of Artificial Sequence: Synthetic oligonucleotide
cuagaaaacagauggcuug

SEQ ID NO: 2032751 - RNA, 19 nt, Artificial Sequence
  Description of Artificial Sequence: Synthetic oligonucleotide
cuaggagccuucuauagcc

SEQ ID NO: 2032752 - RNA, 19 nt, Artificial Sequence
  Description of Artificial Sequence: Synthetic oligonucleotide
aaaacucccaaugauuuca

SEQ ID NO: 2032753 - RNA, 19 nt, Artificial Sequence
  Description of Artificial Sequence: Synthetic oligonucleotide
ucuagugcucuucaauucc

SEQ ID NO: 2032754 - RNA, 19 nt, Artificial Sequence
  Description of Artificial Sequence: Synthetic oligonucleotide
uugacuaucuugcuugucu

SEQ ID NO: 2032755 - RNA, 19 nt, Artificial Sequence
  Description of Artificial Sequence: Synthetic oligonucleotide
gaugauauaaauaaucagu

SEQ ID NO: 2032756 - RNA, 19 nt, Artificial Sequence
  Description of Artificial Sequence: Synthetic oligonucleotide
ucaaagacaccgcagggga

SEQ ID NO: 2032757 - RNA, 19 nt, Artificial Sequence
  Description of Artificial Sequence: Synthetic oligonucleotide
ugauauaaauaaucagucu

SEQ ID NO: 2032758 - RNA, 19 nt, Artificial Sequence
  Description of Artificial Sequence: Synthetic oligonucleotide
uuucuauguagcauuuuca

SEQ ID NO: 2032759 - RNA, 19 nt, Artificial Sequence
  Description of Artificial Sequence: Synthetic oligonucleotide
cucagcagggguuaaaagc

SEQ ID NO: 2032760 - RNA, 19 nt, Artificial Sequence
  Description of Artificial Sequence: Synthetic oligonucleotide
uauguuacaauaagccuuc

SEQ ID NO: 2032761 - RNA, 19 nt, Artificial Sequence
  Description of Artificial Sequence: Synthetic oligonucleotide
aauagcucugucauucaac

SEQ ID NO: 2032762 - RNA, 19 nt, Artificial Sequence
  Description of Artificial Sequence: Synthetic oligonucleotide
ggaaaguuagaccuugugg

SEQ ID NO: 2032763 - RNA, 19 nt, Artificial Sequence
  Description of Artificial Sequence: Synthetic oligonucleotide
uuaacggacacuuccacuc

SEQ ID NO: 2032764 - RNA, 19 nt, Artificial Sequence
  Description of Artificial Sequence: Synthetic oligonucleotide
ugucauucaacguucacau

SEQ ID NO: 2032765 - RNA, 19 nt, Artificial Sequence
  Description of Artificial Sequence: Synthetic oligonucleotide
aauaagccuucauuagucu

SEQ ID NO: 2032766 - RNA, 19 nt, Artificial Sequence
  Description of Artificial Sequence: Synthetic oligonucleotide
acauucacagccaagucac

SEQ ID NO: 2032767 - RNA, 19 nt, Artificial Sequence
  Description of Artificial Sequence: Synthetic oligonucleotide
uuguccuagaagauucuag

SEQ ID NO: 2032768 - RNA, 19 nt, Artificial Sequence
  Description of Artificial Sequence: Synthetic oligonucleotide
cauuccuuguccuagaaga

SEQ ID NO: 2032769 - RNA, 19 nt, Artificial Sequence
  Description of Artificial Sequence: Synthetic oligonucleotide
gauuucauagcagccaggc

SEQ ID NO: 2032770 - RNA, 19 nt, Artificial Sequence
  Description of Artificial Sequence: Synthetic oligonucleotide
aagauaaggcuuuugcauu

SEQ ID NO: 2032771 - RNA, 19 nt, Artificial Sequence
  Description of Artificial Sequence: Synthetic oligonucleotide
caagucuaaccucagcagg

SEQ ID NO: 2032772 - RNA, 19 nt, Artificial Sequence
  Description of Artificial Sequence: Synthetic oligonucleotide
aaguuucaaagacaccgca

SEQ ID NO: 2032773 - RNA, 19 nt, Artificial Sequence
  Description of Artificial Sequence: Synthetic oligonucleotide
uagacccacauacccaacg

SEQ ID NO: 2032774 - RNA, 19 nt, Artificial Sequence
  Description of Artificial Sequence: Synthetic oligonucleotide
uuuuggugaccccaauaag

SEQ ID NO: 2032775 - RNA, 19 nt, Artificial Sequence
  Description of Artificial Sequence: Synthetic oligonucleotide
ucaaccauccgagacacca

SEQ ID NO: 2032776 - RNA, 19 nt, Artificial Sequence
  Description of Artificial Sequence: Synthetic oligonucleotide
aagucuaaccucagcaggg

SEQ ID NO: 2032777 - RNA, 19 nt, Artificial Sequence
  Description of Artificial Sequence: Synthetic oligonucleotide
uagacgugaguucugcuug

SEQ ID NO: 2032778 - RNA, 19 nt, Artificial Sequence
  Description of Artificial Sequence: Synthetic oligonucleotide
ucucucgaaaggaugauau

SEQ ID NO: 2032779 - RNA, 19 nt, Artificial Sequence
  Description of Artificial Sequence: Synthetic oligonucleotide
aacguucacauucaaguuu

SEQ ID NO: 2032780 - RNA, 19 nt, Artificial Sequence
  Description of Artificial Sequence: Synthetic oligonucleotide
uucaacguucacauucaag

SEQ ID NO: 2032781 - RNA, 19 nt, Artificial Sequence
  Description of Artificial Sequence: Synthetic oligonucleotide
uccacucuagaaaacagau

SEQ ID NO: 2032782 - RNA, 19 nt, Artificial Sequence
  Description of Artificial Sequence: Synthetic oligonucleotide
ucgucuuuggcaugcacag

SEQ ID NO: 2032783 - RNA, 19 nt, Artificial Sequence
  Description of Artificial Sequence: Synthetic oligonucleotide
uuagagaauuagacgugag

SEQ ID NO: 2032784 - RNA, 19 nt, Artificial Sequence
  Description of Artificial Sequence: Synthetic oligonucleotide
cuaaugugcaaucuucaug

SEQ ID NO: 2032785 - RNA, 19 nt, Artificial Sequence
  Description of Artificial Sequence: Synthetic oligonucleotide
caauaagccuucauuaguc

SEQ ID NO: 2032786 - RNA, 19 nt, Artificial Sequence
  Description of Artificial Sequence: Synthetic oligonucleotide
ugaguaauaguugacuauc

SEQ ID NO: 2032787 - RNA, 19 nt, Artificial Sequence
  Description of Artificial Sequence: Synthetic oligonucleotide
gacacuuccacucuagaaa

SEQ ID NO: 2032788 - RNA, 19 nt, Artificial Sequence
  Description of Artificial Sequence: Synthetic oligonucleotide
auauaaauaaucagucugu

SEQ ID NO: 2032789 - RNA, 19 nt, Artificial Sequence
  Description of Artificial Sequence: Synthetic oligonucleotide
agaauuagacgugaguucu

SEQ ID NO: 2032790 - RNA, 19 nt, Artificial Sequence
  Description of Artificial Sequence: Synthetic oligonucleotide
caauaagaauccucaagug

SEQ ID NO: 2032791 - RNA, 19 nt, Artificial Sequence
  Description of Artificial Sequence: Synthetic oligonucleotide
ucaagagucuggugggagg

SEQ ID NO: 2032792 - RNA, 19 nt, Artificial Sequence
  Description of Artificial Sequence: Synthetic oligonucleotide
aaaacagcaaggcccuaga

SEQ ID NO: 2032793 - RNA, 19 nt, Artificial Sequence
  Description of Artificial Sequence: Synthetic oligonucleotide
augcgagugguguccaucc

SEQ ID NO: 2032794 - RNA, 19 nt, Artificial Sequence
  Description of Artificial Sequence: Synthetic oligonucleotide
ucuagaaaacagauggcuu

SEQ ID NO: 2032795 - RNA, 19 nt, Artificial Sequence
  Description of Artificial Sequence: Synthetic oligonucleotide
uagagaauuagacgugagu

SEQ ID NO: 2032796 - RNA, 19 nt, Artificial Sequence
  Description of Artificial Sequence: Synthetic oligonucleotide
cucccaaugauuucauagc

SEQ ID NO: 2032797 - RNA, 19 nt, Artificial Sequence
  Description of Artificial Sequence: Synthetic oligonucleotide
aagccaaaacucccaauga

SEQ ID NO: 2032798 - RNA, 19 nt, Artificial Sequence
  Description of Artificial Sequence: Synthetic oligonucleotide
agaauccucaagugccagc

SEQ ID NO: 2032799 - RNA, 19 nt, Artificial Sequence
  Description of Artificial Sequence: Synthetic oligonucleotide
gagaauuagacgugaguuc

SEQ ID NO: 2032800 - RNA, 19 nt, Artificial Sequence
  Description of Artificial Sequence: Synthetic oligonucleotide
gaggaaugcucucguaggg

SEQ ID NO: 2032801 - RNA, 19 nt, Artificial Sequence
  Description of Artificial Sequence: Synthetic oligonucleotide
uuggugaccccaauaagaa

SEQ ID NO: 2032802 - RNA, 19 nt, Artificial Sequence
  Description of Artificial Sequence: Synthetic oligonucleotide
aaaauagcucugucauuca

SEQ ID NO: 2032803 - RNA, 19 nt, Artificial Sequence
  Description of Artificial Sequence: Synthetic oligonucleotide
agagaauuagacgugaguu

SEQ ID NO: 2032804 - RNA, 19 nt, Artificial Sequence
  Description of Artificial Sequence: Synthetic oligonucleotide
ucuucaauuccuugucucu

SEQ ID NO: 2032805 - RNA, 19 nt, Artificial Sequence
  Description of Artificial Sequence: Synthetic oligonucleotide
uaagaauccucaagugcca

SEQ ID NO: 2032806 - RNA, 19 nt, Artificial Sequence
  Description of Artificial Sequence: Synthetic oligonucleotide
caaguuucaaagacaccgc

SEQ ID NO: 2032807 - RNA, 19 nt, Artificial Sequence
  Description of Artificial Sequence: Synthetic oligonucleotide
cugagugucaagagucugg

SEQ ID NO: 2032808 - RNA, 19 nt, Artificial Sequence
  Description of Artificial Sequence: Synthetic oligonucleotide
ucgaaaggaugauauaaau

SEQ ID NO: 2032809 - RNA, 19 nt, Artificial Sequence
  Description of Artificial Sequence: Synthetic oligonucleotide
cauuagagaauuagacgug

SEQ ID NO: 2032810 - RNA, 19 nt, Artificial Sequence
  Description of Artificial Sequence: Synthetic oligonucleotide
uuacuggugaggaaugcuc

SEQ ID NO: 2032811 - RNA, 19 nt, Artificial Sequence
  Description of Artificial Sequence: Synthetic oligonucleotide
agugucgucuuuggcaugc

SEQ ID NO: 2032812 - RNA, 19 nt, Artificial Sequence
  Description of Artificial Sequence: Synthetic oligonucleotide
aaucagucuguacagccua

SEQ ID NO: 2032813 - RNA, 19 nt, Artificial Sequence
  Description of Artificial Sequence: Synthetic oligonucleotide
acccacauacccaacgugc

SEQ ID NO: 2032814 - RNA, 19 nt, Artificial Sequence
  Description of Artificial Sequence: Synthetic oligonucleotide
ucaauuccuugucucugag

SEQ ID NO: 2032815 - RNA, 19 nt, Artificial Sequence
  Description of Artificial Sequence: Synthetic oligonucleotide
cugagaggcaagucuaacc

SEQ ID NO: 2032816 - RNA, 19 nt, Artificial Sequence
  Description of Artificial Sequence: Synthetic oligonucleotide
uuuccugggucuuaacgga

SEQ ID NO: 2032817 - RNA, 19 nt, Artificial Sequence
  Description of Artificial Sequence: Synthetic oligonucleotide
aacuccggggcuguugggc

SEQ ID NO: 2032818 - RNA, 19 nt, Artificial Sequence
  Description of Artificial Sequence: Synthetic oligonucleotide
uuccacucuagaaaacaga

SEQ ID NO: 2032819 - RNA, 19 nt, Artificial Sequence
  Description of Artificial Sequence: Synthetic oligonucleotide
cauccgagacaccagagug

SEQ ID NO: 2032820 - RNA, 19 nt, Artificial Sequence
  Description of Artificial Sequence: Synthetic oligonucleotide
uuguuccucaaccauccga

SEQ ID NO: 2032821 - RNA, 19 nt, Artificial Sequence
  Description of Artificial Sequence: Synthetic oligonucleotide
aaauagcucugucauucaa

SEQ ID NO: 2032822 - RNA, 19 nt, Artificial Sequence
  Description of Artificial Sequence: Synthetic oligonucleotide
uauguagcauuuucauaca

SEQ ID NO: 2032823 - RNA, 19 nt, Artificial Sequence
  Description of Artificial Sequence: Synthetic oligonucleotide
ucuuaacggacacuuccac

SEQ ID NO: 2032824 - RNA, 19 nt, Artificial Sequence
  Description of Artificial Sequence: Synthetic oligonucleotide
ggucuuaacggacacuucc

SEQ ID NO: 2032825 - RNA, 19 nt, Artificial Sequence
  Description of Artificial Sequence: Synthetic oligonucleotide
uagaagauucuagugcucu

SEQ ID NO: 2032826 - RNA, 19 nt, Artificial Sequence
  Description of Artificial Sequence: Synthetic oligonucleotide
auagcagccaggcacacuu

SEQ ID NO: 2032827 - RNA, 19 nt, Artificial Sequence
  Description of Artificial Sequence: Synthetic oligonucleotide
uucaaguuucaaagacacc

SEQ ID NO: 2032828 - RNA, 19 nt, Artificial Sequence
  Description of Artificial Sequence: Synthetic oligonucleotide
gucuuugaguaauaguuga

SEQ ID NO: 2032829 - RNA, 19 nt, Artificial Sequence
  Description of Artificial Sequence: Synthetic oligonucleotide
ugugaguuacagcucugcu

SEQ ID NO: 2032830 - RNA, 19 nt, Artificial Sequence
  Description of Artificial Sequence: Synthetic oligonucleotide
aguuccuaugguuuuacuu

SEQ ID NO: 2032831 - RNA, 19 nt, Artificial Sequence
  Description of Artificial Sequence: Synthetic oligonucleotide
agaacuaaugugcaaucuu

SEQ ID NO: 2032832 - RNA, 19 nt, Artificial Sequence
  Description of Artificial Sequence: Synthetic oligonucleotide
uccaguacagacacagaaa

SEQ ID NO: 2032833 - RNA, 19 nt, Artificial Sequence
  Description of Artificial Sequence: Synthetic oligonucleotide
uagaaaacagauggcuugc

SEQ ID NO: 2032834 - RNA, 19 nt, Artificial Sequence
  Description of Artificial Sequence: Synthetic oligonucleotide
ccuucuauagcccugauga

SEQ ID NO: 2032835 - RNA, 19 nt, Artificial Sequence
  Description of Artificial Sequence: Synthetic oligonucleotide
auuagagaauuagacguga

SEQ ID NO: 2032836 - RNA, 19 nt, Artificial Sequence
  Description of Artificial Sequence: Synthetic oligonucleotide
aacuaaugugcaaucuuca

SEQ ID NO: 2032837 - RNA, 19 nt, Artificial Sequence
  Description of Artificial Sequence: Synthetic oligonucleotide
ugaccugagugucaagagu

SEQ ID NO: 2032838 - RNA, 19 nt, Artificial Sequence
  Description of Artificial Sequence: Synthetic oligonucleotide
uuagaccuuguggagaacu

SEQ ID NO: 2032839 - RNA, 19 nt, Artificial Sequence
  Description of Artificial Sequence: Synthetic oligonucleotide
agguccaguacagacacag

SEQ ID NO: 2032840 - RNA, 19 nt, Artificial Sequence
  Description of Artificial Sequence: Synthetic oligonucleotide
acguucacauucaaguuuc

SEQ ID NO: 2032841 - RNA, 19 nt, Artificial Sequence
  Description of Artificial Sequence: Synthetic oligonucleotide
acucuagaaaacagauggc

SEQ ID NO: 2032842 - RNA, 19 nt, Artificial Sequence
  Description of Artificial Sequence: Synthetic oligonucleotide
uuagacgugaguucugcuu

SEQ ID NO: 2032843 - RNA, 19 nt, Artificial Sequence
  Description of Artificial Sequence: Synthetic oligonucleotide
uacuggugaggaaugcucu

SEQ ID NO: 2032844 - RNA, 19 nt, Artificial Sequence
  Description of Artificial Sequence: Synthetic oligonucleotide
uucuagugcucuucaauuc

SEQ ID NO: 2032845 - RNA, 19 nt, Artificial Sequence
  Description of Artificial Sequence: Synthetic oligonucleotide
aaguuagaccuuguggaga

SEQ ID NO: 2032846 - RNA, 19 nt, Artificial Sequence
  Description of Artificial Sequence: Synthetic oligonucleotide
aguuagaccuuguggagaa

SEQ ID NO: 2032847 - RNA, 19 nt, Artificial Sequence
  Description of Artificial Sequence: Synthetic oligonucleotide
aggaaugcucucguagggc

SEQ ID NO: 2032848 - RNA, 19 nt, Artificial Sequence
  Description of Artificial Sequence: Synthetic oligonucleotide
caagugccagcuaggagcc

SEQ ID NO: 2032849 - RNA, 19 nt, Artificial Sequence
  Description of Artificial Sequence: Synthetic oligonucleotide
aaccuuguuccucaaccau

SEQ ID NO: 2032850 - RNA, 19 nt, Artificial Sequence
  Description of Artificial Sequence: Synthetic oligonucleotide
uggagaacuaaugugcaau

SEQ ID NO: 2032851 - RNA, 19 nt, Artificial Sequence
  Description of Artificial Sequence: Synthetic oligonucleotide
gaggagauccaaaccuugg

SEQ ID NO: 2032852 - RNA, 19 nt, Artificial Sequence
  Description of Artificial Sequence: Synthetic oligonucleotide
uguuacaauaagccuucau

SEQ ID NO: 2032853 - RNA, 19 nt, Artificial Sequence
  Description of Artificial Sequence: Synthetic oligonucleotide
uucauguuccuugaaccga

SEQ ID NO: 2032854 - RNA, 19 nt, Artificial Sequence
  Description of Artificial Sequence: Synthetic oligonucleotide
gugaguucugcuuggaaga

SEQ ID NO: 2032855 - RNA, 19 nt, Artificial Sequence
  Description of Artificial Sequence: Synthetic oligonucleotide
acuaaugugcaaucuucau

SEQ ID NO: 2032856 - RNA, 19 nt, Artificial Sequence
  Description of Artificial Sequence: Synthetic oligonucleotide
auaguugacuaucuugcuu

SEQ ID NO: 2032857 - RNA, 19 nt, Artificial Sequence
  Description of Artificial Sequence: Synthetic oligonucleotide
ucacguccuacauuccuug

SEQ ID NO: 2032858 - RNA, 19 nt, Artificial Sequence
  Description of Artificial Sequence: Synthetic oligonucleotide
acguccuacauuccuuguc

SEQ ID NO: 2032859 - RNA, 19 nt, Artificial Sequence
  Description of Artificial Sequence: Synthetic oligonucleotide
uuuacuggugaggaaugcu

SEQ ID NO: 2032860 - RNA, 19 nt, Artificial Sequence
  Description of Artificial Sequence: Synthetic oligonucleotide
ucuaaccucagcagggguu

SEQ ID NO: 2032861 - RNA, 19 nt, Artificial Sequence
  Description of Artificial Sequence: Synthetic oligonucleotide
uuuuacuggugaggaaugc

SEQ ID NO: 2032862 - RNA, 19 nt, Artificial Sequence
  Description of Artificial Sequence: Synthetic oligonucleotide
agucuuugaguaauaguug

SEQ ID NO: 2032863 - RNA, 19 nt, Artificial Sequence
  Description of Artificial Sequence: Synthetic oligonucleotide
uccgagacaccagagugcc

SEQ ID NO: 2032864 - RNA, 19 nt, Artificial Sequence
  Description of Artificial Sequence: Synthetic oligonucleotide
aagaauccucaagugccag

SEQ ID NO: 2032865 - RNA, 19 nt, Artificial Sequence
  Description of Artificial Sequence: Synthetic oligonucleotide
aaagacaccgcaggggaaa

SEQ ID NO: 2032866 - RNA, 19 nt, Artificial Sequence
  Description of Artificial Sequence: Synthetic oligonucleotide
aacuacccgggauguuuuc

SEQ ID NO: 2032867 - RNA, 19 nt, Artificial Sequence
  Description of Artificial Sequence: Synthetic oligonucleotide
aggcaagucuaaccucagc

SEQ ID NO: 2032868 - RNA, 19 nt, Artificial Sequence
  Description of Artificial Sequence: Synthetic oligonucleotide
uucauacaguuccuauggu

SEQ ID NO: 2032869 - RNA, 19 nt, Artificial Sequence
  Description of Artificial Sequence: Synthetic oligonucleotide
uagcauuuucauacaguuc

SEQ ID NO: 2032870 - RNA, 19 nt, Artificial Sequence
  Description of Artificial Sequence: Synthetic oligonucleotide
gaaccuuguuccucaacca

SEQ ID NO: 2032871 - RNA, 19 nt, Artificial Sequence
  Description of Artificial Sequence: Synthetic oligonucleotide
gagucgaccugacaguguc

SEQ ID NO: 2032872 - RNA, 19 nt, Artificial Sequence
  Description of Artificial Sequence: Synthetic oligonucleotide
ugagugucaagagucuggu

SEQ ID NO: 2032873 - RNA, 19 nt, Artificial Sequence
  Description of Artificial Sequence: Synthetic oligonucleotide
gauaaggcuuuugcauuag

SEQ ID NO: 2032874 - RNA, 19 nt, Artificial Sequence
  Description of Artificial Sequence: Synthetic oligonucleotide
auccgagacaccagagugc

SEQ ID NO: 2032875 - RNA, 19 nt, Artificial Sequence
  Description of Artificial Sequence: Synthetic oligonucleotide
caccgcaggggaaaguuag

SEQ ID NO: 2032876 - RNA, 19 nt, Artificial Sequence
  Description of Artificial Sequence: Synthetic oligonucleotide
acaguuccuaugguuuuac

SEQ ID NO: 2032877 - RNA, 19 nt, Artificial Sequence
  Description of Artificial Sequence: Synthetic oligonucleotide
ugguuuuacuuauguuaca

SEQ ID NO: 2032878 - RNA, 19 nt, Artificial Sequence
  Description of Artificial Sequence: Synthetic oligonucleotide
guuccuugaaccgagucga

SEQ ID NO: 2032879 - RNA, 19 nt, Artificial Sequence
  Description of Artificial Sequence: Synthetic oligonucleotide
agauaaggcuuuugcauua

SEQ ID NO: 2032880 - RNA, 19 nt, Artificial Sequence
  Description of Artificial Sequence: Synthetic oligonucleotide
guccaguacagacacagaa

SEQ ID NO: 2032881 - RNA, 19 nt, Artificial Sequence
  Description of Artificial Sequence: Synthetic oligonucleotide
uacagccuaccauaggaua

SEQ ID NO: 2032882 - RNA, 19 nt, Artificial Sequence
  Description of Artificial Sequence: Synthetic oligonucleotide
acucacguccuacauuccu

SEQ ID NO: 2032883 - RNA, 19 nt, Artificial Sequence
  Description of Artificial Sequence: Synthetic oligonucleotide
gcaagucuaaccucagcag

SEQ ID NO: 2032884 - RNA, 19 nt, Artificial Sequence
  Description of Artificial Sequence: Synthetic oligonucleotide
agucuguacagccuaccau

SEQ ID NO: 2032885 - RNA, 19 nt, Artificial Sequence
  Description of Artificial Sequence: Synthetic oligonucleotide
guccauccugaccugagug

SEQ ID NO: 2032886 - RNA, 19 nt, Artificial Sequence
  Description of Artificial Sequence: Synthetic oligonucleotide
ugacagugucgucuuuggc

SEQ ID NO: 2032887 - RNA, 19 nt, Artificial Sequence
  Description of Artificial Sequence: Synthetic oligonucleotide
cacauacccaacgugcccc

SEQ ID NO: 2032888 - RNA, 19 nt, Artificial Sequence
  Description of Artificial Sequence: Synthetic oligonucleotide
cauucaacguucacauuca

SEQ ID NO: 2032889 - RNA, 19 nt, Artificial Sequence
  Description of Artificial Sequence: Synthetic oligonucleotide
uuggaagaacuacccggga

SEQ ID NO: 2032890 - RNA, 19 nt, Artificial Sequence
  Description of Artificial Sequence: Synthetic oligonucleotide
agucuaaccucagcagggg

SEQ ID NO: 2032891 - RNA, 19 nt, Artificial Sequence
  Description of Artificial Sequence: Synthetic oligonucleotide
agucacccaacacaaccga

SEQ ID NO: 2032892 - RNA, 19 nt, Artificial Sequence
  Description of Artificial Sequence: Synthetic oligonucleotide
gacccacauacccaacgug

SEQ ID NO: 2032893 - RNA, 19 nt, Artificial Sequence
  Description of Artificial Sequence: Synthetic oligonucleotide
ucucguagggcuugagguc

SEQ ID NO: 2032894 - RNA, 19 nt, Artificial Sequence
  Description of Artificial Sequence: Synthetic oligonucleotide
uaacggacacuuccacucu

SEQ ID NO: 2032895 - RNA, 19 nt, Artificial Sequence
  Description of Artificial Sequence: Synthetic oligonucleotide
uccuaugguuuuacuuaug

SEQ ID NO: 2032896 - RNA, 19 nt, Artificial Sequence
  Description of Artificial Sequence: Synthetic oligonucleotide
uaggagccuucuauagccc

SEQ ID NO: 2032897 - RNA, 19 nt, Artificial Sequence
  Description of Artificial Sequence: Synthetic oligonucleotide
aaacuccggggcuguuggg

SEQ ID NO: 2032898 - RNA, 19 nt, Artificial Sequence
  Description of Artificial Sequence: Synthetic oligonucleotide
uagcccugaugaaaacagc

SEQ ID NO: 2032899 - RNA, 19 nt, Artificial Sequence
  Description of Artificial Sequence: Synthetic oligonucleotide
auuagacgugaguucugcu

SEQ ID NO: 2032900 - RNA, 19 nt, Artificial Sequence
  Description of Artificial Sequence: Synthetic oligonucleotide
agacccacauacccaacgu

SEQ ID NO: 2032901 - RNA, 19 nt, Artificial Sequence
  Description of Artificial Sequence: Synthetic oligonucleotide
cuggugaggaaugcucucg

SEQ ID NO: 2032902 - RNA, 19 nt, Artificial Sequence
  Description of Artificial Sequence: Synthetic oligonucleotide
gucuguacagccuaccaua

SEQ ID NO: 2032903 - RNA, 19 nt, Artificial Sequence
  Description of Artificial Sequence: Synthetic oligonucleotide
acccgggauguuuuccugg

SEQ ID NO: 2032904 - RNA, 19 nt, Artificial Sequence
  Description of Artificial Sequence: Synthetic oligonucleotide
gugggaggagauccaaacc

SEQ ID NO: 2032905 - RNA, 19 nt, Artificial Sequence
  Description of Artificial Sequence: Synthetic oligonucleotide
ggugggaggagauccaaac

SEQ ID NO: 2032906 - RNA, 19 nt, Artificial Sequence
  Description of Artificial Sequence: Synthetic oligonucleotide
aguugacuaucuugcuugu

SEQ ID NO: 2032907 - RNA, 19 nt, Artificial Sequence
  Description of Artificial Sequence: Synthetic oligonucleotide
uccuugaaccgagucgacc

SEQ ID NO: 2032908 - RNA, 19 nt, Artificial Sequence
  Description of Artificial Sequence: Synthetic oligonucleotide
ccuagaguuaaaaucauua

SEQ ID NO: 2032909 - RNA, 19 nt, Artificial Sequence
  Description of Artificial Sequence: Synthetic oligonucleotide
auggcuugcugggacacag

SEQ ID NO: 2032910 - RNA, 19 nt, Artificial Sequence
  Description of Artificial Sequence: Synthetic oligonucleotide
caaucuucauguuccuuga

SEQ ID NO: 2032911 - RNA, 19 nt, Artificial Sequence
  Description of Artificial Sequence: Synthetic oligonucleotide
acuuuuggugaccccaaua

SEQ ID NO: 2032912 - RNA, 19 nt, Artificial Sequence
  Description of Artificial Sequence: Synthetic oligonucleotide
auacaguuccuaugguuuu

SEQ ID NO: 2032913 - RNA, 19 nt, Artificial Sequence
  Description of Artificial Sequence: Synthetic oligonucleotide
ucugagaggcaagucuaac

SEQ ID NO: 2032914 - RNA, 19 nt, Artificial Sequence
  Description of Artificial Sequence: Synthetic oligonucleotide
gaauuagacgugaguucug

SEQ ID NO: 2032915 - RNA, 19 nt, Artificial Sequence
  Description of Artificial Sequence: Synthetic oligonucleotide
gagaggcaagucuaaccuc

SEQ ID NO: 2032916 - RNA, 19 nt, Artificial Sequence
  Description of Artificial Sequence: Synthetic oligonucleotide
agaacuacccgggauguuu

SEQ ID NO: 2032917 - RNA, 19 nt, Artificial Sequence
  Description of Artificial Sequence: Synthetic oligonucleotide
aggggaaaguuagaccuug

SEQ ID NO: 2032918 - RNA, 19 nt, Artificial Sequence
  Description of Artificial Sequence: Synthetic oligonucleotide
caggaggaagggaaccuug

SEQ ID NO: 2032919 - RNA, 19 nt, Artificial Sequence
  Description of Artificial Sequence: Synthetic oligonucleotide
ugaaccgagucgaccugac

SEQ ID NO: 2032920 - RNA, 19 nt, Artificial Sequence
  Description of Artificial Sequence: Synthetic oligonucleotide
cuguacagccuaccauagg

SEQ ID NO: 2032921 - RNA, 19 nt, Artificial Sequence
  Description of Artificial Sequence: Synthetic oligonucleotide
uagaccuuguggagaacua

SEQ ID NO: 2032922 - RNA, 19 nt, Artificial Sequence
  Description of Artificial Sequence: Synthetic oligonucleotide
aggagccuucuauagcccu

SEQ ID NO: 2032923 - RNA, 19 nt, Artificial Sequence
  Description of Artificial Sequence: Synthetic oligonucleotide
accgagucgaccugacagu

SEQ ID NO: 2032924 - RNA, 19 nt, Artificial Sequence
  Description of Artificial Sequence: Synthetic oligonucleotide
gggaaaguuagaccuugug

SEQ ID NO: 2032925 - RNA, 19 nt, Artificial Sequence
  Description of Artificial Sequence: Synthetic oligonucleotide
gggucuuaaagauaaggcu

SEQ ID NO: 2032926 - RNA, 19 nt, Artificial Sequence
  Description of Artificial Sequence: Synthetic oligonucleotide
cgugaguucugcuuggaag

SEQ ID NO: 2032927 - RNA, 19 nt, Artificial Sequence
  Description of Artificial Sequence: Synthetic oligonucleotide
aacagauggcuugcuggga

SEQ ID NO: 2032928 - RNA, 19 nt, Artificial Sequence
  Description of Artificial Sequence: Synthetic oligonucleotide
cucucguagggcuugaggu

SEQ ID NO: 2032929 - RNA, 19 nt, Artificial Sequence
  Description of Artificial Sequence: Synthetic oligonucleotide
cuugaaccgagucgaccug

SEQ ID NO: 2032930 - RNA, 19 nt, Artificial Sequence
  Description of Artificial Sequence: Synthetic oligonucleotide
gaguuacagcucugcuucc

SEQ ID NO: 2032931 - RNA, 19 nt, Artificial Sequence
  Description of Artificial Sequence: Synthetic oligonucleotide
gcuaggagccuucuauagc

SEQ ID NO: 2032932 - RNA, 19 nt, Artificial Sequence
  Description of Artificial Sequence: Synthetic oligonucleotide
aacggacacuuccacucua

SEQ ID NO: 2032933 - RNA, 19 nt, Artificial Sequence
  Description of Artificial Sequence: Synthetic oligonucleotide
gagugucaagagucuggug

SEQ ID NO: 2032934 - RNA, 19 nt, Artificial Sequence
  Description of Artificial Sequence: Synthetic oligonucleotide
agauucuagugcucuucaa

SEQ ID NO: 2032935 - RNA, 19 nt, Artificial Sequence
  Description of Artificial Sequence: Synthetic oligonucleotide
acagccuaccauaggauaa

SEQ ID NO: 2032936 - RNA, 19 nt, Artificial Sequence
  Description of Artificial Sequence: Synthetic oligonucleotide
acgugccccagagcuaacc

SEQ ID NO: 2032937 - RNA, 19 nt, Artificial Sequence
  Description of Artificial Sequence: Synthetic oligonucleotide
uagcucugucauucaacgu

SEQ ID NO: 2032938 - RNA, 19 nt, Artificial Sequence
  Description of Artificial Sequence: Synthetic oligonucleotide
ugaguucugcuuggaagaa

SEQ ID NO: 2032939 - RNA, 19 nt, Artificial Sequence
  Description of Artificial Sequence: Synthetic oligonucleotide
aaacgccucagcuccccua

SEQ ID NO: 2032940 - RNA, 19 nt, Artificial Sequence
  Description of Artificial Sequence: Synthetic oligonucleotide
gucgucuuuggcaugcaca

SEQ ID NO: 2032941 - RNA, 19 nt, Artificial Sequence
  Description of Artificial Sequence: Synthetic oligonucleotide
auacccaacgugccccaga

SEQ ID NO: 2032942 - RNA, 19 nt, Artificial Sequence
  Description of Artificial Sequence: Synthetic oligonucleotide
aggcacacuuuuggugacc

SEQ ID NO: 2032943 - RNA, 19 nt, Artificial Sequence
  Description of Artificial Sequence: Synthetic oligonucleotide
ugucaagagucugguggga

SEQ ID NO: 2032944 - RNA, 19 nt, Artificial Sequence
  Description of Artificial Sequence: Synthetic oligonucleotide
uuccuuguccuagaagauu

SEQ ID NO: 2032945 - RNA, 19 nt, Artificial Sequence
  Description of Artificial Sequence: Synthetic oligonucleotide
aguuacagcucugcuucca

SEQ ID NO: 2032946 - RNA, 19 nt, Artificial Sequence
  Description of Artificial Sequence: Synthetic oligonucleotide
auucaacguucacauucaa

SEQ ID NO: 2032947 - RNA, 19 nt, Artificial Sequence
  Description of Artificial Sequence: Synthetic oligonucleotide
gcccuagacccacauaccc

SEQ ID NO: 2032948 - RNA, 19 nt, Artificial Sequence
  Description of Artificial Sequence: Synthetic oligonucleotide
gcucucguagggcuugagg

SEQ ID NO: 2032949 - RNA, 19 nt, Artificial Sequence
  Description of Artificial Sequence: Synthetic oligonucleotide
cguccuacauuccuugucc

SEQ ID NO: 2032950 - RNA, 19 nt, Artificial Sequence
  Description of Artificial Sequence: Synthetic oligonucleotide
gaggcaagucuaaccucag

SEQ ID NO: 2032951 - RNA, 19 nt, Artificial Sequence
  Description of Artificial Sequence: Synthetic oligonucleotide
agcacucacguccuacauu

SEQ ID NO: 2032952 - RNA, 19 nt, Artificial Sequence
  Description of Artificial Sequence: Synthetic oligonucleotide
gaguaauaguugacuaucu

SEQ ID NO: 2032953 - RNA, 19 nt, Artificial Sequence
  Description of Artificial Sequence: Synthetic oligonucleotide
aggcucaugcgaguggugu

SEQ ID NO: 2032954 - RNA, 19 nt, Artificial Sequence
  Description of Artificial Sequence: Synthetic oligonucleotide
gucuuaacggacacuucca

SEQ ID NO: 2032955 - RNA, 19 nt, Artificial Sequence
  Description of Artificial Sequence: Synthetic oligonucleotide
gaagaacuacccgggaugu

SEQ ID NO: 2032956 - RNA, 19 nt, Artificial Sequence
  Description of Artificial Sequence: Synthetic oligonucleotide
ggcuguugggcacccaccc

SEQ ID NO: 2032957 - RNA, 19 nt, Artificial Sequence
  Description of Artificial Sequence: Synthetic oligonucleotide
cuuaacggacacuuccacu

SEQ ID NO: 2032958 - RNA, 19 nt, Artificial Sequence
  Description of Artificial Sequence: Synthetic oligonucleotide
agccuucauuagucucucg

SEQ ID NO: 2032959 - RNA, 19 nt, Artificial Sequence
  Description of Artificial Sequence: Synthetic oligonucleotide
acuccggggcuguugggca

SEQ ID NO: 2032960 - RNA, 19 nt, Artificial Sequence
  Description of Artificial Sequence: Synthetic oligonucleotide
acauacccaacgugcccca

SEQ ID NO: 2032961 - RNA, 19 nt, Artificial Sequence
  Description of Artificial Sequence: Synthetic oligonucleotide
gugccccagagcuaaccug

SEQ ID NO: 2032962 - RNA, 19 nt, Artificial Sequence
  Description of Artificial Sequence: Synthetic oligonucleotide
uuccuugaaccgagucgac

SEQ ID NO: 2032963 - RNA, 19 nt, Artificial Sequence
  Description of Artificial Sequence: Synthetic oligonucleotide
cccacauacccaacgugcc

SEQ ID NO: 2032964 - RNA, 19 nt, Artificial Sequence
  Description of Artificial Sequence: Synthetic oligonucleotide
cuagacccacauacccaac

SEQ ID NO: 2032965 - RNA, 19 nt, Artificial Sequence
  Description of Artificial Sequence: Synthetic oligonucleotide
uacaguuccuaugguuuua

SEQ ID NO: 2032966 - RNA, 19 nt, Artificial Sequence
  Description of Artificial Sequence: Synthetic oligonucleotide
ugcgagugguguccauccu

SEQ ID NO: 2032967 - RNA, 19 nt, Artificial Sequence
  Description of Artificial Sequence: Synthetic oligonucleotide
agucuggugggaggagauc

SEQ ID NO: 2032968 - RNA, 19 nt, Artificial Sequence
  Description of Artificial Sequence: Synthetic oligonucleotide
ggaggagauccaaaccuug

SEQ ID NO: 2032969 - RNA, 19 nt, Artificial Sequence
  Description of Artificial Sequence: Synthetic oligonucleotide
cacagcacucacguccuac

SEQ ID NO: 2032970 - RNA, 19 nt, Artificial Sequence
  Description of Artificial Sequence: Synthetic oligonucleotide
caugcgagugguguccauc

SEQ ID NO: 2032971 - RNA, 19 nt, Artificial Sequence
  Description of Artificial Sequence: Synthetic oligonucleotide
caauuccuugucucugaga

SEQ ID NO: 2032972 - RNA, 19 nt, Artificial Sequence
  Description of Artificial Sequence: Synthetic oligonucleotide
ggucuuaaagauaaggcuu

SEQ ID NO: 2032973 - RNA, 19 nt, Artificial Sequence
  Description of Artificial Sequence: Synthetic oligonucleotide
ggacacuuccacucuagaa

SEQ ID NO: 2032974 - RNA, 19 nt, Artificial Sequence
  Description of Artificial Sequence: Synthetic oligonucleotide
cacucacguccuacauucc

SEQ ID NO: 2032975 - RNA, 19 nt, Artificial Sequence
  Description of Artificial Sequence: Synthetic oligonucleotide
ucguagggcuugaggucca

SEQ ID NO: 2032976 - RNA, 19 nt, Artificial Sequence
  Description of Artificial Sequence: Synthetic oligonucleotide
cacccaacacaaccgaaaa

SEQ ID NO: 2032977 - RNA, 19 nt, Artificial Sequence
  Description of Artificial Sequence: Synthetic oligonucleotide
guggagaacuaaugugcaa

SEQ ID NO: 2032978 - RNA, 19 nt, Artificial Sequence
  Description of Artificial Sequence: Synthetic oligonucleotide
aaggcccuagacccacaua

SEQ ID NO: 2032979 - RNA, 19 nt, Artificial Sequence
  Description of Artificial Sequence: Synthetic oligonucleotide
ccacucuagaaaacagaug

SEQ ID NO: 2032980 - RNA, 19 nt, Artificial Sequence
  Description of Artificial Sequence: Synthetic oligonucleotide
augcacagucuuugaguaa

SEQ ID NO: 2032981 - RNA, 19 nt, Artificial Sequence
  Description of Artificial Sequence: Synthetic oligonucleotide
ggagauccaaaccuugggu

SEQ ID NO: 2032982 - RNA, 19 nt, Artificial Sequence
  Description of Artificial Sequence: Synthetic oligonucleotide
agucgaccugacagugucg

SEQ ID NO: 2032983 - RNA, 19 nt, Artificial Sequence
  Description of Artificial Sequence: Synthetic oligonucleotide
ggcacacuuuuggugaccc

SEQ ID NO: 2032984 - RNA, 19 nt, Artificial Sequence
  Description of Artificial Sequence: Synthetic oligonucleotide
acgugaguucugcuuggaa

SEQ ID NO: 2032985 - RNA, 19 nt, Artificial Sequence
  Description of Artificial Sequence: Synthetic oligonucleotide
aggaggaagggaaccuugu

SEQ ID NO: 2032986 - RNA, 19 nt, Artificial Sequence
  Description of Artificial Sequence: Synthetic oligonucleotide
gaaccgagucgaccugaca

SEQ ID NO: 2032987 - RNA, 19 nt, Artificial Sequence
  Description of Artificial Sequence: Synthetic oligonucleotide
accucagcagggguuaaaa

SEQ ID NO: 2032988 - RNA, 19 nt, Artificial Sequence
  Description of Artificial Sequence: Synthetic oligonucleotide
cuagugcucuucaauuccu

SEQ ID NO: 2032989 - RNA, 19 nt, Artificial Sequence
  Description of Artificial Sequence: Synthetic oligonucleotide
ugaccccaauaagaauccu

SEQ ID NO: 2032990 - RNA, 19 nt, Artificial Sequence
  Description of Artificial Sequence: Synthetic oligonucleotide
gucuuaaagauaaggcuuu

SEQ ID NO: 2032991 - RNA, 19 nt, Artificial Sequence
  Description of Artificial Sequence: Synthetic oligonucleotide
cacagccaagucacccaac

SEQ ID NO: 2032992 - RNA, 19 nt, Artificial Sequence
  Description of Artificial Sequence: Synthetic oligonucleotide
agugccagcuaggagccuu

SEQ ID NO: 2032993 - RNA, 19 nt, Artificial Sequence
  Description of Artificial Sequence: Synthetic oligonucleotide
aaggcucaugcgaguggug

SEQ ID NO: 2032994 - RNA, 19 nt, Artificial Sequence
  Description of Artificial Sequence: Synthetic oligonucleotide
cucugucauucaacguuca

SEQ ID NO: 2032995 - RNA, 19 nt, Artificial Sequence
  Description of Artificial Sequence: Synthetic oligonucleotide
gcucaugcgaguggugucc

SEQ ID NO: 2032996 - RNA, 19 nt, Artificial Sequence
  Description of Artificial Sequence: Synthetic oligonucleotide
cauccugaccugaguguca

SEQ ID NO: 2032997 - RNA, 19 nt, Artificial Sequence
  Description of Artificial Sequence: Synthetic oligonucleotide
uccugaccugagugucaag

SEQ ID NO: 2032998 - RNA, 19 nt, Artificial Sequence
  Description of Artificial Sequence: Synthetic oligonucleotide
cuaaccucagcagggguua

SEQ ID NO: 2032999 - RNA, 19 nt, Artificial Sequence
  Description of Artificial Sequence: Synthetic oligonucleotide
cccgggauguuuuccuggg

SEQ ID NO: 2033000 - RNA, 19 nt, Artificial Sequence
  Description of Artificial Sequence: Synthetic oligonucleotide
gccuucuauagcccugaug

SEQ ID NO: 2033001 - RNA, 19 nt, Artificial Sequence
  Description of Artificial Sequence: Synthetic oligonucleotide
guugacuaucuugcuuguc

SEQ ID NO: 2033002 - RNA, 19 nt, Artificial Sequence
  Description of Artificial Sequence: Synthetic oligonucleotide
cucaaccauccgagacacc

SEQ ID NO: 2033003 - RNA, 19 nt, Artificial Sequence
  Description of Artificial Sequence: Synthetic oligonucleotide
ccucagcagggguuaaaag

SEQ ID NO: 2033004 - RNA, 19 nt, Artificial Sequence
  Description of Artificial Sequence: Synthetic oligonucleotide
agcuccccuagaguuaaaa

SEQ ID NO: 2033005 - RNA, 19 nt, Artificial Sequence
  Description of Artificial Sequence: Synthetic oligonucleotide
cucuacagcagcagcaauu

SEQ ID NO: 2033006 - RNA, 19 nt, Artificial Sequence
  Description of Artificial Sequence: Synthetic oligonucleotide
agucucucgaaaggaugau

SEQ ID NO: 2033007 - RNA, 19 nt, Artificial Sequence
  Description of Artificial Sequence: Synthetic oligonucleotide
cucugagaggcaagucuaa

SEQ ID NO: 2033008 - RNA, 19 nt, Artificial Sequence
  Description of Artificial Sequence: Synthetic oligonucleotide
aagaacuacccgggauguu

SEQ ID NO: 2033009 - RNA, 19 nt, Artificial Sequence
  Description of Artificial Sequence: Synthetic oligonucleotide
aacgugccccagagcuaac

SEQ ID NO: 2033010 - RNA, 19 nt, Artificial Sequence
  Description of Artificial Sequence: Synthetic oligonucleotide
aaccucagcagggguuaaa

SEQ ID NO: 2033011 - RNA, 19 nt, Artificial Sequence
  Description of Artificial Sequence: Synthetic oligonucleotide
ccuagacccacauacccaa

SEQ ID NO: 2033012 - RNA, 19 nt, Artificial Sequence
  Description of Artificial Sequence: Synthetic oligonucleotide
gcucugucauucaacguuc

SEQ ID NO: 2033013 - RNA, 19 nt, Artificial Sequence
  Description of Artificial Sequence: Synthetic oligonucleotide
cgaaaggaugauauaaaua

SEQ ID NO: 2033014 - RNA, 19 nt, Artificial Sequence
  Description of Artificial Sequence: Synthetic oligonucleotide
cucucgaaaggaugauaua

SEQ ID NO: 2033015 - RNA, 19 nt, Artificial Sequence
  Description of Artificial Sequence: Synthetic oligonucleotide
caacgugccccagagcuaa

SEQ ID NO: 2033016 - RNA, 19 nt, Artificial Sequence
  Description of Artificial Sequence: Synthetic oligonucleotide
ccaaaacucccaaugauuu

SEQ ID NO: 2033017 - RNA, 19 nt, Artificial Sequence
  Description of Artificial Sequence: Synthetic oligonucleotide
ccuaugguuuuacuuaugu

SEQ ID NO: 2033018 - RNA, 19 nt, Artificial Sequence
  Description of Artificial Sequence: Synthetic oligonucleotide
ucgaccugacagugucguc

SEQ ID NO: 2033019 - RNA, 19 nt, Artificial Sequence
  Description of Artificial Sequence: Synthetic oligonucleotide
auguuacaauaagccuuca

SEQ ID NO: 2033020 - RNA, 19 nt, Artificial Sequence
  Description of Artificial Sequence: Synthetic oligonucleotide
cuuguccuagaagauucua

SEQ ID NO: 2033021 - RNA, 19 nt, Artificial Sequence
  Description of Artificial Sequence: Synthetic oligonucleotide
ugcucucguagggcuugag

SEQ ID NO: 2033022 - RNA, 19 nt, Artificial Sequence
  Description of Artificial Sequence: Synthetic oligonucleotide
ggggcuguugggcacccac

SEQ ID NO: 2033023 - RNA, 19 nt, Artificial Sequence
  Description of Artificial Sequence: Synthetic oligonucleotide
caacguucacauucaaguu

SEQ ID NO: 2033024 - RNA, 19 nt, Artificial Sequence
  Description of Artificial Sequence: Synthetic oligonucleotide
gacgugaguucugcuugga

SEQ ID NO: 2033025 - RNA, 19 nt, Artificial Sequence
  Description of Artificial Sequence: Synthetic oligonucleotide
cagugucgucuuuggcaug

SEQ ID NO: 2033026 - RNA, 19 nt, Artificial Sequence
  Description of Artificial Sequence: Synthetic oligonucleotide
ccuugaaccgagucgaccu

SEQ ID NO: 2033027 - RNA, 19 nt, Artificial Sequence
  Description of Artificial Sequence: Synthetic oligonucleotide
cauacccaacgugccccag

SEQ ID NO: 2033028 - RNA, 19 nt, Artificial Sequence
  Description of Artificial Sequence: Synthetic oligonucleotide
cuacccgggauguuuuccu

SEQ ID NO: 2033029 - RNA, 19 nt, Artificial Sequence
  Description of Artificial Sequence: Synthetic oligonucleotide
cuuuugcauuagagaauua

SEQ ID NO: 2033030 - RNA, 19 nt, Artificial Sequence
  Description of Artificial Sequence: Synthetic oligonucleotide
ccugaccugagugucaaga

SEQ ID NO: 2033031 - RNA, 19 nt, Artificial Sequence
  Description of Artificial Sequence: Synthetic oligonucleotide
guuagaccuuguggagaac

SEQ ID NO: 2033032 - RNA, 19 nt, Artificial Sequence
  Description of Artificial Sequence: Synthetic oligonucleotide
agccuaccauaggauaaaa

SEQ ID NO: 2033033 - RNA, 19 nt, Artificial Sequence
  Description of Artificial Sequence: Synthetic oligonucleotide
gacaccgcaggggaaaguu

SEQ ID NO: 2033034 - RNA, 19 nt, Artificial Sequence
  Description of Artificial Sequence: Synthetic oligonucleotide
gucgaccugacagugucgu

SEQ ID NO: 2033035 - RNA, 19 nt, Artificial Sequence
  Description of Artificial Sequence: Synthetic oligonucleotide
cagcagggguuaaaagcaa

SEQ ID NO: 2033036 - RNA, 19 nt, Artificial Sequence
  Description of Artificial Sequence: Synthetic oligonucleotide
gucuaaccucagcaggggu

SEQ ID NO: 2033037 - RNA, 19 nt, Artificial Sequence
  Description of Artificial Sequence: Synthetic oligonucleotide
guccuacauuccuuguccu

SEQ ID NO: 2033038 - RNA, 19 nt, Artificial Sequence
  Description of Artificial Sequence: Synthetic oligonucleotide
gggaaccuuguuccucaac

SEQ ID NO: 2033039 - RNA, 19 nt, Artificial Sequence
  Description of Artificial Sequence: Synthetic oligonucleotide
gucucucgaaaggaugaua

SEQ ID NO: 2033040 - RNA, 19 nt, Artificial Sequence
  Description of Artificial Sequence: Synthetic oligonucleotide
uaaccucagcagggguuaa

SEQ ID NO: 2033041 - RNA, 19 nt, Artificial Sequence
  Description of Artificial Sequence: Synthetic oligonucleotide
agggaaccuuguuccucaa

SEQ ID NO: 2033042 - RNA, 19 nt, Artificial Sequence
  Description of Artificial Sequence: Synthetic oligonucleotide
ccaagucacccaacacaac

SEQ ID NO: 2033043 - RNA, 19 nt, Artificial Sequence
  Description of Artificial Sequence: Synthetic oligonucleotide
gucacccaacacaaccgaa

SEQ ID NO: 2033044 - RNA, 19 nt, Artificial Sequence
  Description of Artificial Sequence: Synthetic oligonucleotide
caaggcucaugcgaguggu

SEQ ID NO: 2033045 - RNA, 19 nt, Artificial Sequence
  Description of Artificial Sequence: Synthetic oligonucleotide
ggcccuagacccacauacc

SEQ ID NO: 2033046 - RNA, 19 nt, Artificial Sequence
  Description of Artificial Sequence: Synthetic oligonucleotide
agacaccgcaggggaaagu

SEQ ID NO: 2033047 - RNA, 19 nt, Artificial Sequence
  Description of Artificial Sequence: Synthetic oligonucleotide
cucacguccuacauuccuu

SEQ ID NO: 2033048 - RNA, 19 nt, Artificial Sequence
  Description of Artificial Sequence: Synthetic oligonucleotide
gcagccaggcacacuuuug

SEQ ID NO: 2033049 - RNA, 19 nt, Artificial Sequence
  Description of Artificial Sequence: Synthetic oligonucleotide
gaccugacagugucgucuu

SEQ ID NO: 2033050 - RNA, 19 nt, Artificial Sequence
  Description of Artificial Sequence: Synthetic oligonucleotide
ugccagcuaggagccuucu

SEQ ID NO: 2033051 - RNA, 19 nt, Artificial Sequence
  Description of Artificial Sequence: Synthetic oligonucleotide
cagccuaccauaggauaaa

SEQ ID NO: 2033052 - RNA, 19 nt, Artificial Sequence
  Description of Artificial Sequence: Synthetic oligonucleotide
agccuucuauagcccugau

SEQ ID NO: 2033053 - RNA, 19 nt, Artificial Sequence
  Description of Artificial Sequence: Synthetic oligonucleotide
ccgcaggggaaaguuagac

SEQ ID NO: 2033054 - RNA, 19 nt, Artificial Sequence
  Description of Artificial Sequence: Synthetic oligonucleotide
accgcaggggaaaguuaga

SEQ ID NO: 2033055 - RNA, 19 nt, Artificial Sequence
  Description of Artificial Sequence: Synthetic oligonucleotide
guacagccuaccauaggau

SEQ ID NO: 2033056 - RNA, 19 nt, Artificial Sequence
  Description of Artificial Sequence: Synthetic oligonucleotide
gugcaaucuucauguuccu

SEQ ID NO: 2033057 - RNA, 19 nt, Artificial Sequence
  Description of Artificial Sequence: Synthetic oligonucleotide
ccagcuaggagccuucuau

SEQ ID NO: 2033058 - RNA, 19 nt, Artificial Sequence
  Description of Artificial Sequence: Synthetic oligonucleotide
cucaugcgaguggugucca

SEQ ID NO: 2033059 - RNA, 19 nt, Artificial Sequence
  Description of Artificial Sequence: Synthetic oligonucleotide
gaacuacccgggauguuuu

SEQ ID NO: 2033060 - RNA, 19 nt, Artificial Sequence
  Description of Artificial Sequence: Synthetic oligonucleotide
ccgagucgaccugacagug

SEQ ID NO: 2033061 - RNA, 19 nt, Artificial Sequence
  Description of Artificial Sequence: Synthetic oligonucleotide
cauguuccuugaaccgagu

SEQ ID NO: 2033062 - RNA, 19 nt, Artificial Sequence
  Description of Artificial Sequence: Synthetic oligonucleotide
gcuguugggcacccaccca

SEQ ID NO: 2033063 - RNA, 19 nt, Artificial Sequence
  Description of Artificial Sequence: Synthetic oligonucleotide
gggcuguugggcacccacc

SEQ ID NO: 2033064 - RNA, 19 nt, Artificial Sequence
  Description of Artificial Sequence: Synthetic oligonucleotide
acaccgcaggggaaaguua

SEQ ID NO: 2033065 - RNA, 19 nt, Artificial Sequence
  Description of Artificial Sequence: Synthetic oligonucleotide
accugacagugucgucuuu

SEQ ID NO: 2033066 - RNA, 19 nt, Artificial Sequence
  Description of Artificial Sequence: Synthetic oligonucleotide
gucauucaacguucacauu

SEQ ID NO: 2033067 - RNA, 19 nt, Artificial Sequence
  Description of Artificial Sequence: Synthetic oligonucleotide
caguuccuaugguuuuacu

SEQ ID NO: 2033068 - RNA, 19 nt, Artificial Sequence
  Description of Artificial Sequence: Synthetic oligonucleotide
acacagcacucacguccua

SEQ ID NO: 2033069 - RNA, 19 nt, Artificial Sequence
  Description of Artificial Sequence: Synthetic oligonucleotide
gcuccccuagaguuaaaau

SEQ ID NO: 2033070 - RNA, 19 nt, Artificial Sequence
  Description of Artificial Sequence: Synthetic oligonucleotide
cacguccuacauuccuugu

SEQ ID NO: 2033071 - RNA, 19 nt, Artificial Sequence
  Description of Artificial Sequence: Synthetic oligonucleotide
gugccagcuaggagccuuc

SEQ ID NO: 2033072 - RNA, 19 nt, Artificial Sequence
  Description of Artificial Sequence: Synthetic oligonucleotide
gggucuuaacggacacuuc

SEQ ID NO: 2033073 - RNA, 19 nt, Artificial Sequence
  Description of Artificial Sequence: Synthetic oligonucleotide
gguccaguacagacacaga

SEQ ID NO: 2033074 - RNA, 19 nt, Artificial Sequence
  Description of Artificial Sequence: Synthetic oligonucleotide
ggaggaagggaaccuuguu

SEQ ID NO: 2033075 - RNA, 19 nt, Artificial Sequence
  Description of Artificial Sequence: Synthetic oligonucleotide
ccccaauaagaauccucaa

SEQ ID NO: 2033076 - RNA, 19 nt, Artificial Sequence
  Description of Artificial Sequence: Synthetic oligonucleotide
ccuuguccuagaagauucu

SEQ ID NO: 2033077 - RNA, 19 nt, Artificial Sequence
  Description of Artificial Sequence: Synthetic oligonucleotide
ccaacgugccccagagcua

SEQ ID NO: 2033078 - RNA, 19 nt, Artificial Sequence
  Description of Artificial Sequence: Synthetic oligonucleotide
cgaccugacagugucgucu

SEQ ID NO: 2033079 - RNA, 19 nt, Artificial Sequence
  Description of Artificial Sequence: Synthetic oligonucleotide
gccagcuaggagccuucua

SEQ ID NO: 2033080 - RNA, 19 nt, Artificial Sequence
  Description of Artificial Sequence: Synthetic oligonucleotide
ggggaaaguuagaccuugu

SEQ ID NO: 2033081 - RNA, 19 nt, Artificial Sequence
  Description of Artificial Sequence: Synthetic oligonucleotide
cggacacuuccacucuaga

SEQ ID NO: 2033082 - RNA, 19 nt, Artificial Sequence
  Description of Artificial Sequence: Synthetic oligonucleotide
cagcuccccuagaguuaaa

SEQ ID NO: 2033083 - RNA, 19 nt, Artificial Sequence
  Description of Artificial Sequence: Synthetic oligonucleotide
ccgagacaccagagugcca

SEQ ID NO: 2033084 - RNA, 19 nt, Artificial Sequence
  Description of Artificial Sequence: Synthetic oligonucleotide
cgugccccagagcuaaccu

SEQ ID NO: 2033085 - RNA, 19 nt, Artificial Sequence
  Description of Artificial Sequence: Synthetic oligonucleotide
cgagucgaccugacagugu

SEQ ID NO: 2033086 - RNA, 19 nt, Artificial Sequence
  Description of Artificial Sequence: Synthetic oligonucleotide
ccgggauguuuuccugggu

SEQ ID NO: 2033087 - RNA, 19 nt, Artificial Sequence
  Description of Artificial Sequence: Synthetic oligonucleotide
ucuaacaacaauaaaacgu

SEQ ID NO: 2033088 - RNA, 19 nt, Artificial Sequence
  Description of Artificial Sequence: Synthetic oligonucleotide
aauaaauuuguaucacucg

SEQ ID NO: 2033089 - RNA, 19 nt, Artificial Sequence
  Description of Artificial Sequence: Synthetic oligonucleotide
aauaccaagccauuccacc

SEQ ID NO: 2033090 - RNA, 19 nt, Artificial Sequence
  Description of Artificial Sequence: Synthetic oligonucleotide
ugauauaucaguaaacaca

SEQ ID NO: 2033091 - RNA, 19 nt, Artificial Sequence
  Description of Artificial Sequence: Synthetic oligonucleotide
aacucuacgaccuucuuuc

SEQ ID NO: 2033092 - RNA, 19 nt, Artificial Sequence
  Description of Artificial Sequence: Synthetic oligonucleotide
aauaaaacguucccgaugu

SEQ ID NO: 2033093 - RNA, 19 nt, Artificial Sequence
  Description of Artificial Sequence: Synthetic oligonucleotide
uguugaacguaaaagauca

SEQ ID NO: 2033094 - RNA, 19 nt, Artificial Sequence
  Description of Artificial Sequence: Synthetic oligonucleotide
uuagcuuauagguuggugg

SEQ ID NO: 2033095 - RNA, 19 nt, Artificial Sequence
  Description of Artificial Sequence: Synthetic oligonucleotide
uaaauuuacucccuuagca

SEQ ID NO: 2033096 - RNA, 19 nt, Artificial Sequence
  Description of Artificial Sequence: Synthetic oligonucleotide
aauuuacucccuuagcauc

SEQ ID NO: 2033097 - RNA, 19 nt, Artificial Sequence
  Description of Artificial Sequence: Synthetic oligonucleotide
aacaauaaaacguucccga

SEQ ID NO: 2033098 - RNA, 19 nt, Artificial Sequence
  Description of Artificial Sequence: Synthetic oligonucleotide
uuuguugucaggaugcugc

SEQ ID NO: 2033099 - RNA, 19 nt, Artificial Sequence
  Description of Artificial Sequence: Synthetic oligonucleotide
ugagcuaugagaaucugcc

SEQ ID NO: 2033100 - RNA, 19 nt, Artificial Sequence
  Description of Artificial Sequence: Synthetic oligonucleotide
uuaaucguacuuuagcugc

SEQ ID NO: 2033101 - RNA, 19 nt, Artificial Sequence
  Description of Artificial Sequence: Synthetic oligonucleotide
uuauuuguugucaggaugc

SEQ ID NO: 2033102 - RNA, 19 nt, Artificial Sequence
  Description of Artificial Sequence: Synthetic oligonucleotide
uguacagcaggcuuaaaag

SEQ ID NO: 2033103 - RNA, 19 nt, Artificial Sequence
  Description of Artificial Sequence: Synthetic oligonucleotide
ugaacguaaaagaucauac

SEQ ID NO: 2033104 - RNA, 19 nt, Artificial Sequence
  Description of Artificial Sequence: Synthetic oligonucleotide
ucuuuaaucguacuuuagc

SEQ ID NO: 2033105 - RNA, 19 nt, Artificial Sequence
  Description of Artificial Sequence: Synthetic oligonucleotide
uuugcgaagaccuuaauua

SEQ ID NO: 2033106 - RNA, 19 nt, Artificial Sequence
  Description of Artificial Sequence: Synthetic oligonucleotide
ucuuguugaacguaaaaga

SEQ ID NO: 2033107 - RNA, 19 nt, Artificial Sequence
  Description of Artificial Sequence: Synthetic oligonucleotide
ugaugaugaaucuugauau

SEQ ID NO: 2033108 - RNA, 19 nt, Artificial Sequence
  Description of Artificial Sequence: Synthetic oligonucleotide
uaauacgucauuuauuggu

SEQ ID NO: 2033109 - RNA, 19 nt, Artificial Sequence
  Description of Artificial Sequence: Synthetic oligonucleotide
acugguggcaucuuuaauc

SEQ ID NO: 2033110 - RNA, 19 nt, Artificial Sequence
  Description of Artificial Sequence: Synthetic oligonucleotide
aacguaaaagaucauacuu

SEQ ID NO: 2033111 - RNA, 19 nt, Artificial Sequence
  Description of Artificial Sequence: Synthetic oligonucleotide
aaguuuggagugcuaauuc

SEQ ID NO: 2033112 - RNA, 19 nt, Artificial Sequence
  Description of Artificial Sequence: Synthetic oligonucleotide
ucaguugccagccuaguag

SEQ ID NO: 2033113 - RNA, 19 nt, Artificial Sequence
  Description of Artificial Sequence: Synthetic oligonucleotide
aucuucauaggucugauga

SEQ ID NO: 2033114 - RNA, 19 nt, Artificial Sequence
  Description of Artificial Sequence: Synthetic oligonucleotide
uuuaaucguacuuuagcug

SEQ ID NO: 2033115 - RNA, 19 nt, Artificial Sequence
  Description of Artificial Sequence: Synthetic oligonucleotide
uaucaguaaacacauauuu

SEQ ID NO: 2033116 - RNA, 19 nt, Artificial Sequence
  Description of Artificial Sequence: Synthetic oligonucleotide
ucugccucggagcugagcg

SEQ ID NO: 2033117 - RNA, 19 nt, Artificial Sequence
  Description of Artificial Sequence: Synthetic oligonucleotide
gugcuaauucuauauaugg

SEQ ID NO: 2033118 - RNA, 19 nt, Artificial Sequence
  Description of Artificial Sequence: Synthetic oligonucleotide
uuaaauuuacucccuuagc

SEQ ID NO: 2033119 - RNA, 19 nt, Artificial Sequence
  Description of Artificial Sequence: Synthetic oligonucleotide
uggaaucuggcucaaacug

SEQ ID NO: 2033120 - RNA, 19 nt, Artificial Sequence
  Description of Artificial Sequence: Synthetic oligonucleotide
ucuacgaccuucuuucggg

SEQ ID NO: 2033121 - RNA, 19 nt, Artificial Sequence
  Description of Artificial Sequence: Synthetic oligonucleotide
guaaacacauauuugugug

SEQ ID NO: 2033122 - RNA, 19 nt, Artificial Sequence
  Description of Artificial Sequence: Synthetic oligonucleotide
gucauuagcuuauagguug

SEQ ID NO: 2033123 - RNA, 19 nt, Artificial Sequence
  Description of Artificial Sequence: Synthetic oligonucleotide
gaugugguauguuauauga

SEQ ID NO: 2033124 - RNA, 19 nt, Artificial Sequence
  Description of Artificial Sequence: Synthetic oligonucleotide
ugggucauuagcuuauagg

SEQ ID NO: 2033125 - RNA, 19 nt, Artificial Sequence
  Description of Artificial Sequence: Synthetic oligonucleotide
aaauuuacucccuuagcau

SEQ ID NO: 2033126 - RNA, 19 nt, Artificial Sequence
  Description of Artificial Sequence: Synthetic oligonucleotide
gaugaaucuugauauacuc

SEQ ID NO: 2033127 - RNA, 19 nt, Artificial Sequence
  Description of Artificial Sequence: Synthetic oligonucleotide
gcuaauacgucauuuauug

SEQ ID NO: 2033128 - RNA, 19 nt, Artificial Sequence
  Description of Artificial Sequence: Synthetic oligonucleotide
uuugaaaauuacugguggc

SEQ ID NO: 2033129 - RNA, 19 nt, Artificial Sequence
  Description of Artificial Sequence: Synthetic oligonucleotide
aauucuauauaugguccuc

SEQ ID NO: 2033130 - RNA, 19 nt, Artificial Sequence
  Description of Artificial Sequence: Synthetic oligonucleotide
cucuaacaacaauaaaacg

SEQ ID NO: 2033131 - RNA, 19 nt, Artificial Sequence
  Description of Artificial Sequence: Synthetic oligonucleotide
aauuaaauuuacucccuua

SEQ ID NO: 2033132 - RNA, 19 nt, Artificial Sequence
  Description of Artificial Sequence: Synthetic oligonucleotide
aauggcugaugacuauuuc

SEQ ID NO: 2033133 - RNA, 19 nt, Artificial Sequence
  Description of Artificial Sequence: Synthetic oligonucleotide
uuauaugauauaucaguaa

SEQ ID NO: 2033134 - RNA, 19 nt, Artificial Sequence
  Description of Artificial Sequence: Synthetic oligonucleotide
ucuuucgggaaauaaauuu

SEQ ID NO: 2033135 - RNA, 19 nt, Artificial Sequence
  Description of Artificial Sequence: Synthetic oligonucleotide
cuauuucuugguaaguuug

SEQ ID NO: 2033136 - RNA, 19 nt, Artificial Sequence
  Description of Artificial Sequence: Synthetic oligonucleotide
auaugauauaucaguaaac

SEQ ID NO: 2033137 - RNA, 19 nt, Artificial Sequence
  Description of Artificial Sequence: Synthetic oligonucleotide
ugugguauguuauaugaua

SEQ ID NO: 2033138 - RNA, 19 nt, Artificial Sequence
  Description of Artificial Sequence: Synthetic oligonucleotide
aauacgucauuuauuggug

SEQ ID NO: 2033139 - RNA, 19 nt, Artificial Sequence
  Description of Artificial Sequence: Synthetic oligonucleotide
ucauuagcuuauagguugg

SEQ ID NO: 2033140 - RNA, 19 nt, Artificial Sequence
  Description of Artificial Sequence: Synthetic oligonucleotide
auaggucugaugaugaauc

SEQ ID NO: 2033141 - RNA, 19 nt, Artificial Sequence
  Description of Artificial Sequence: Synthetic oligonucleotide
auuuacucccuuagcaucc

SEQ ID NO: 2033142 - RNA, 19 nt, Artificial Sequence
  Description of Artificial Sequence: Synthetic oligonucleotide
cuuaaaagucuucuucaag

SEQ ID NO: 2033143 - RNA, 19 nt, Artificial Sequence
  Description of Artificial Sequence: Synthetic oligonucleotide
auauaugguccucucuggg

SEQ ID NO: 2033144 - RNA, 19 nt, Artificial Sequence
  Description of Artificial Sequence: Synthetic oligonucleotide
uuguugaacguaaaagauc

SEQ ID NO: 2033145 - RNA, 19 nt, Artificial Sequence
  Description of Artificial Sequence: Synthetic oligonucleotide
ugaugaaucuugauauacu

SEQ ID NO: 2033146 - RNA, 19 nt, Artificial Sequence
  Description of Artificial Sequence: Synthetic oligonucleotide
ugcuaauucuauauauggu

SEQ ID NO: 2033147 - RNA, 19 nt, Artificial Sequence
  Description of Artificial Sequence: Synthetic oligonucleotide
aacgcaaguccugagagca

SEQ ID NO: 2033148 - RNA, 19 nt, Artificial Sequence
  Description of Artificial Sequence: Synthetic oligonucleotide
gauacucuggacuuccuca

SEQ ID NO: 2033149 - RNA, 19 nt, Artificial Sequence
  Description of Artificial Sequence: Synthetic oligonucleotide
uugaaaauuacugguggca

SEQ ID NO: 2033150 - RNA, 19 nt, Artificial Sequence
  Description of Artificial Sequence: Synthetic oligonucleotide
aagaccuuaauuaaauuua

SEQ ID NO: 2033151 - RNA, 19 nt, Artificial Sequence
  Description of Artificial Sequence: Synthetic oligonucleotide
ucuauauaugguccucucu

SEQ ID NO: 2033152 - RNA, 19 nt, Artificial Sequence
  Description of Artificial Sequence: Synthetic oligonucleotide
uauaugguccucucugggc

SEQ ID NO: 2033153 - RNA, 19 nt, Artificial Sequence
  Description of Artificial Sequence: Synthetic oligonucleotide
gucuuguugaacguaaaag

SEQ ID NO: 2033154 - RNA, 19 nt, Artificial Sequence
  Description of Artificial Sequence: Synthetic oligonucleotide
aaauaccaagccauuccac

SEQ ID NO: 2033155 - RNA, 19 nt, Artificial Sequence
  Description of Artificial Sequence: Synthetic oligonucleotide
uaaauguagguuucuugac

SEQ ID NO: 2033156 - RNA, 19 nt, Artificial Sequence
  Description of Artificial Sequence: Synthetic oligonucleotide
acacauauuuguguguuuc

SEQ ID NO: 2033157 - RNA, 19 nt, Artificial Sequence
  Description of Artificial Sequence: Synthetic oligonucleotide
gauggagcaugugauacag

SEQ ID NO: 2033158 - RNA, 19 nt, Artificial Sequence
  Description of Artificial Sequence: Synthetic oligonucleotide
caacaauaaaacguucccg

SEQ ID NO: 2033159 - RNA, 19 nt, Artificial Sequence
  Description of Artificial Sequence: Synthetic oligonucleotide
ucgggaaauaaauuuguau

SEQ ID NO: 2033160 - RNA, 19 nt, Artificial Sequence
  Description of Artificial Sequence: Synthetic oligonucleotide
ugugauacagcuggacuag

SEQ ID NO: 2033161 - RNA, 19 nt, Artificial Sequence
  Description of Artificial Sequence: Synthetic oligonucleotide
gaugacuauuucuugguaa

SEQ ID NO: 2033162 - RNA, 19 nt, Artificial Sequence
  Description of Artificial Sequence: Synthetic oligonucleotide
agaccuuaauuaaauuuac

SEQ ID NO: 2033163 - RNA, 19 nt, Artificial Sequence
  Description of Artificial Sequence: Synthetic oligonucleotide
cuaauacgucauuuauugg

SEQ ID NO: 2033164 - RNA, 19 nt, Artificial Sequence
  Description of Artificial Sequence: Synthetic oligonucleotide
uugaggacaucuucgugcc

SEQ ID NO: 2033165 - RNA, 19 nt, Artificial Sequence
  Description of Artificial Sequence: Synthetic oligonucleotide
uggagugcuaauucuauau

SEQ ID NO: 2033166 - RNA, 19 nt, Artificial Sequence
  Description of Artificial Sequence: Synthetic oligonucleotide
caauaaaacguucccgaug

SEQ ID NO: 2033167 - RNA, 19 nt, Artificial Sequence
  Description of Artificial Sequence: Synthetic oligonucleotide
uagguugguggcuucagug

SEQ ID NO: 2033168 - RNA, 19 nt, Artificial Sequence
  Description of Artificial Sequence: Synthetic oligonucleotide
acgucauuuauuggugucc

SEQ ID NO: 2033169 - RNA, 19 nt, Artificial Sequence
  Description of Artificial Sequence: Synthetic oligonucleotide
caucaaucaagucucucug

SEQ ID NO: 2033170 - RNA, 19 nt, Artificial Sequence
  Description of Artificial Sequence: Synthetic oligonucleotide
auaugguccucucugggcu

SEQ ID NO: 2033171 - RNA, 19 nt, Artificial Sequence
  Description of Artificial Sequence: Synthetic oligonucleotide
gaggacaucuucgugccgg

SEQ ID NO: 2033172 - RNA, 19 nt, Artificial Sequence
  Description of Artificial Sequence: Synthetic oligonucleotide
uccacaccaacaacgcaag

SEQ ID NO: 2033173 - RNA, 19 nt, Artificial Sequence
  Description of Artificial Sequence: Synthetic oligonucleotide
ucauccauaaauguagguu

SEQ ID NO: 2033174 - RNA, 19 nt, Artificial Sequence
  Description of Artificial Sequence: Synthetic oligonucleotide
gguggcaucaucaaucaag

SEQ ID NO: 2033175 - RNA, 19 nt, Artificial Sequence
  Description of Artificial Sequence: Synthetic oligonucleotide
gcuaugagaaucugccucg

SEQ ID NO: 2033176 - RNA, 19 nt, Artificial Sequence
  Description of Artificial Sequence: Synthetic oligonucleotide
gaagaccuuaauuaaauuu

SEQ ID NO: 2033177 - RNA, 19 nt, Artificial Sequence
  Description of Artificial Sequence: Synthetic oligonucleotide
uucugagcuaugagaaucu

SEQ ID NO: 2033178 - RNA, 19 nt, Artificial Sequence
  Description of Artificial Sequence: Synthetic oligonucleotide
ucagcuaauacgucauuua

SEQ ID NO: 2033179 - RNA, 19 nt, Artificial Sequence
  Description of Artificial Sequence: Synthetic oligonucleotide
uuuagcugcuucaguugcc

SEQ ID NO: 2033180 - RNA, 19 nt, Artificial Sequence
  Description of Artificial Sequence: Synthetic oligonucleotide
acgccgagagccuaacugg

SEQ ID NO: 2033181 - RNA, 19 nt, Artificial Sequence
  Description of Artificial Sequence: Synthetic oligonucleotide
auaccaagccauuccacca

SEQ ID NO: 2033182 - RNA, 19 nt, Artificial Sequence
  Description of Artificial Sequence: Synthetic oligonucleotide
ugucuuguugaacguaaaa

SEQ ID NO: 2033183 - RNA, 19 nt, Artificial Sequence
  Description of Artificial Sequence: Synthetic oligonucleotide
cauuuauugguguccguuc

SEQ ID NO: 2033184 - RNA, 19 nt, Artificial Sequence
  Description of Artificial Sequence: Synthetic oligonucleotide
uugggucauuagcuuauag

SEQ ID NO: 2033185 - RNA, 19 nt, Artificial Sequence
  Description of Artificial Sequence: Synthetic oligonucleotide
cuuuaaucguacuuuagcu

SEQ ID NO: 2033186 - RNA, 19 nt, Artificial Sequence
  Description of Artificial Sequence: Synthetic oligonucleotide
agugcuaauucuauauaug

SEQ ID NO: 2033187 - RNA, 19 nt, Artificial Sequence
  Description of Artificial Sequence: Synthetic oligonucleotide
uacucccuuagcauccugc

SEQ ID NO: 2033188 - RNA, 19 nt, Artificial Sequence
  Description of Artificial Sequence: Synthetic oligonucleotide
uggucuuaagguuuucauc

SEQ ID NO: 2033189 - RNA, 19 nt, Artificial Sequence
  Description of Artificial Sequence: Synthetic oligonucleotide
uccaacugugcuuggguca

SEQ ID NO: 2033190 - RNA, 19 nt, Artificial Sequence
  Description of Artificial Sequence: Synthetic oligonucleotide
ugcgaagaccuuaauuaaa

SEQ ID NO: 2033191 - RNA, 19 nt, Artificial Sequence
  Description of Artificial Sequence: Synthetic oligonucleotide
uugaacguaaaagaucaua

SEQ ID NO: 2033192 - RNA, 19 nt, Artificial Sequence
  Description of Artificial Sequence: Synthetic oligonucleotide
gagccgacuggccaucugg

SEQ ID NO: 2033193 - RNA, 19 nt, Artificial Sequence
  Description of Artificial Sequence: Synthetic oligonucleotide
uggauggagcaugugauac

SEQ ID NO: 2033194 - RNA, 19 nt, Artificial Sequence
  Description of Artificial Sequence: Synthetic oligonucleotide
cacucgaucccguucuucc

SEQ ID NO: 2033195 - RNA, 19 nt, Artificial Sequence
  Description of Artificial Sequence: Synthetic oligonucleotide
acauauuuguguguuucug

SEQ ID NO: 2033196 - RNA, 19 nt, Artificial Sequence
  Description of Artificial Sequence: Synthetic oligonucleotide
uuucguagcgugccacuug

SEQ ID NO: 2033197 - RNA, 19 nt, Artificial Sequence
  Description of Artificial Sequence: Synthetic oligonucleotide
uauugguguccguucuucc

SEQ ID NO: 2033198 - RNA, 19 nt, Artificial Sequence
  Description of Artificial Sequence: Synthetic oligonucleotide
ucccguucuucccacgaag

SEQ ID NO: 2033199 - RNA, 19 nt, Artificial Sequence
  Description of Artificial Sequence: Synthetic oligonucleotide
uugcgaagaccuuaauuaa

SEQ ID NO: 2033200 - RNA, 19 nt, Artificial Sequence
  Description of Artificial Sequence: Synthetic oligonucleotide
auguuauaugauauaucag

SEQ ID NO: 2033201 - RNA, 19 nt, Artificial Sequence
  Description of Artificial Sequence: Synthetic oligonucleotide
gaagcuuuucguagcgugc

SEQ ID NO: 2033202 - RNA, 19 nt, Artificial Sequence
  Description of Artificial Sequence: Synthetic oligonucleotide
cugaugaugaaucuugaua

SEQ ID NO: 2033203 - RNA, 19 nt, Artificial Sequence
  Description of Artificial Sequence: Synthetic oligonucleotide
gguggcaaaacucuacgac

SEQ ID NO: 2033204 - RNA, 19 nt, Artificial Sequence
  Description of Artificial Sequence: Synthetic oligonucleotide
auuagcuuauagguuggug

SEQ ID NO: 2033205 - RNA, 19 nt, Artificial Sequence
  Description of Artificial Sequence: Synthetic oligonucleotide
aucguacuuuagcugcuuc

SEQ ID NO: 2033206 - RNA, 19 nt, Artificial Sequence
  Description of Artificial Sequence: Synthetic oligonucleotide
gacagacccgcugugcacg

SEQ ID NO: 2033207 - RNA, 19 nt, Artificial Sequence
  Description of Artificial Sequence: Synthetic oligonucleotide
uucuuucgggaaauaaauu

SEQ ID NO: 2033208 - RNA, 19 nt, Artificial Sequence
  Description of Artificial Sequence: Synthetic oligonucleotide
auacgucauuuauuggugu

SEQ ID NO: 2033209 - RNA, 19 nt, Artificial Sequence
  Description of Artificial Sequence: Synthetic oligonucleotide
cuugauauacucaguggaa

SEQ ID NO: 2033210 - RNA, 19 nt, Artificial Sequence
  Description of Artificial Sequence: Synthetic oligonucleotide
gaggauacucuggacuucc

SEQ ID NO: 2033211 - RNA, 19 nt, Artificial Sequence
  Description of Artificial Sequence: Synthetic oligonucleotide
uacgucauuuauugguguc

SEQ ID NO: 2033212 - RNA, 19 nt, Artificial Sequence
  Description of Artificial Sequence: Synthetic oligonucleotide
gaacguaaaagaucauacu

SEQ ID NO: 2033213 - RNA, 19 nt, Artificial Sequence
  Description of Artificial Sequence: Synthetic oligonucleotide
cacgccgagagccuaacug

SEQ ID NO: 2033214 - RNA, 19 nt, Artificial Sequence
  Description of Artificial Sequence: Synthetic oligonucleotide
ugaugacuauuucuuggua

SEQ ID NO: 2033215 - RNA, 19 nt, Artificial Sequence
  Description of Artificial Sequence: Synthetic oligonucleotide
uucgggaaauaaauuugua

SEQ ID NO: 2033216 - RNA, 19 nt, Artificial Sequence
  Description of Artificial Sequence: Synthetic oligonucleotide
uauagguugguggcuucag

SEQ ID NO: 2033217 - RNA, 19 nt, Artificial Sequence
  Description of Artificial Sequence: Synthetic oligonucleotide
ggcuuaaaagucuucuuca

SEQ ID NO: 2033218 - RNA, 19 nt, Artificial Sequence
  Description of Artificial Sequence: Synthetic oligonucleotide
aacguucccgaugugguau

SEQ ID NO: 2033219 - RNA, 19 nt, Artificial Sequence
  Description of Artificial Sequence: Synthetic oligonucleotide
uugguucucuaacaacaau

SEQ ID NO: 2033220 - RNA, 19 nt, Artificial Sequence
  Description of Artificial Sequence: Synthetic oligonucleotide
guauguuauaugauauauc

SEQ ID NO: 2033221 - RNA, 19 nt, Artificial Sequence
  Description of Artificial Sequence: Synthetic oligonucleotide
ugguauguuauaugauaua

SEQ ID NO: 2033222 - RNA, 19 nt, Artificial Sequence
  Description of Artificial Sequence: Synthetic oligonucleotide
ugccccaccucgaagggcu

SEQ ID NO: 2033223 - RNA, 19 nt, Artificial Sequence
  Description of Artificial Sequence: Synthetic oligonucleotide
cagagcaucggggaggcgc

SEQ ID NO: 2033224 - RNA, 19 nt, Artificial Sequence
  Description of Artificial Sequence: Synthetic oligonucleotide
uuauugguguccguucuuc

SEQ ID NO: 2033225 - RNA, 19 nt, Artificial Sequence
  Description of Artificial Sequence: Synthetic oligonucleotide
ggaaucuggcucaaacugg

SEQ ID NO: 2033226 - RNA, 19 nt, Artificial Sequence
  Description of Artificial Sequence: Synthetic oligonucleotide
gagccuaacuggaaccucc

SEQ ID NO: 2033227 - RNA, 19 nt, Artificial Sequence
  Description of Artificial Sequence: Synthetic oligonucleotide
acguaaaagaucauacuuu

SEQ ID NO: 2033228 - RNA, 19 nt, Artificial Sequence
  Description of Artificial Sequence: Synthetic oligonucleotide
agacccgcugugcacgccg

SEQ ID NO: 2033229 - RNA, 19 nt, Artificial Sequence
  Description of Artificial Sequence: Synthetic oligonucleotide
acucuacgaccuucuuucg

SEQ ID NO: 2033230 - RNA, 19 nt, Artificial Sequence
  Description of Artificial Sequence: Synthetic oligonucleotide
uacauggucuuaagguuuu

SEQ ID NO: 2033231 - RNA, 19 nt, Artificial Sequence
  Description of Artificial Sequence: Synthetic oligonucleotide
ugaggacaucuucgugccg

SEQ ID NO: 2033232 - RNA, 19 nt, Artificial Sequence
  Description of Artificial Sequence: Synthetic oligonucleotide
uucccgaugugguauguua

SEQ ID NO: 2033233 - RNA, 19 nt, Artificial Sequence
  Description of Artificial Sequence: Synthetic oligonucleotide
cuucuuucgggaaauaaau

SEQ ID NO: 2033234 - RNA, 19 nt, Artificial Sequence
  Description of Artificial Sequence: Synthetic oligonucleotide
uuauagguugguggcuuca

SEQ ID NO: 2033235 - RNA, 19 nt, Artificial Sequence
  Description of Artificial Sequence: Synthetic oligonucleotide
acagacccgcugugcacgc

SEQ ID NO: 2033236 - RNA, 19 nt, Artificial Sequence
  Description of Artificial Sequence: Synthetic oligonucleotide
uucaguugccagccuagua

SEQ ID NO: 2033237 - RNA, 19 nt, Artificial Sequence
  Description of Artificial Sequence: Synthetic oligonucleotide
uuguaucacucgaucccgu

SEQ ID NO: 2033238 - RNA, 19 nt, Artificial Sequence
  Description of Artificial Sequence: Synthetic oligonucleotide
auagguugguggcuucagu

SEQ ID NO: 2033239 - RNA, 19 nt, Artificial Sequence
  Description of Artificial Sequence: Synthetic oligonucleotide
ucccgaugugguauguuau

SEQ ID NO: 2033240 - RNA, 19 nt, Artificial Sequence
  Description of Artificial Sequence: Synthetic oligonucleotide
ucugagcuaugagaaucug

SEQ ID NO: 2033241 - RNA, 19 nt, Artificial Sequence
  Description of Artificial Sequence: Synthetic oligonucleotide
agugucuuguugaacguaa

SEQ ID NO: 2033242 - RNA, 19 nt, Artificial Sequence
  Description of Artificial Sequence: Synthetic oligonucleotide
guaucacucgaucccguuc

SEQ ID NO: 2033243 - RNA, 19 nt, Artificial Sequence
  Description of Artificial Sequence: Synthetic oligonucleotide
cuuauagguugguggcuuc

SEQ ID NO: 2033244 - RNA, 19 nt, Artificial Sequence
  Description of Artificial Sequence: Synthetic oligonucleotide
gaacugguggcaucuuuaa

SEQ ID NO: 2033245 - RNA, 19 nt, Artificial Sequence
  Description of Artificial Sequence: Synthetic oligonucleotide
agccuaguagccucuucca

SEQ ID NO: 2033246 - RNA, 19 nt, Artificial Sequence
  Description of Artificial Sequence: Synthetic oligonucleotide
auaaaacguucccgaugug

SEQ ID NO: 2033247 - RNA, 19 nt, Artificial Sequence
  Description of Artificial Sequence: Synthetic oligonucleotide
uucccacgaagcuuuucgu

SEQ ID NO: 2033248 - RNA, 19 nt, Artificial Sequence
  Description of Artificial Sequence: Synthetic oligonucleotide
guacagcaggcuuaaaagu

SEQ ID NO: 2033249 - RNA, 19 nt, Artificial Sequence
  Description of Artificial Sequence: Synthetic oligonucleotide
ccuaguagccucuuccaac

SEQ ID NO: 2033250 - RNA, 19 nt, Artificial Sequence
  Description of Artificial Sequence: Synthetic oligonucleotide
gaucccguucuucccacga

SEQ ID NO: 2033251 - RNA, 19 nt, Artificial Sequence
  Description of Artificial Sequence: Synthetic oligonucleotide
acgaccuucuuucgggaaa

SEQ ID NO: 2033252 - RNA, 19 nt, Artificial Sequence
  Description of Artificial Sequence: Synthetic oligonucleotide
ucccacgaagcuuuucgua

SEQ ID NO: 2033253 - RNA, 19 nt, Artificial Sequence
  Description of Artificial Sequence: Synthetic oligonucleotide
caucuuggugaggauacuc

SEQ ID NO: 2033254 - RNA, 19 nt, Artificial Sequence
  Description of Artificial Sequence: Synthetic oligonucleotide
ggcuucagugguuguacag

SEQ ID NO: 2033255 - RNA, 19 nt, Artificial Sequence
  Description of Artificial Sequence: Synthetic oligonucleotide
gguucucuaacaacaauaa

SEQ ID NO: 2033256 - RNA, 19 nt, Artificial Sequence
  Description of Artificial Sequence: Synthetic oligonucleotide
gguauguuauaugauauau

SEQ ID NO: 2033257 - RNA, 19 nt, Artificial Sequence
  Description of Artificial Sequence: Synthetic oligonucleotide
caacaacgcaaguccugag

SEQ ID NO: 2033258 - RNA, 19 nt, Artificial Sequence
  Description of Artificial Sequence: Synthetic oligonucleotide
cuaguagccucuuccaacu

SEQ ID NO: 2033259 - RNA, 19 nt, Artificial Sequence
  Description of Artificial Sequence: Synthetic oligonucleotide
uuacucccuuagcauccug

SEQ ID NO: 2033260 - RNA, 19 nt, Artificial Sequence
  Description of Artificial Sequence: Synthetic oligonucleotide
accaacaacgcaaguccug

SEQ ID NO: 2033261 - RNA, 19 nt, Artificial Sequence
  Description of Artificial Sequence: Synthetic oligonucleotide
agcuaauacgucauuuauu

SEQ ID NO: 2033262 - RNA, 19 nt, Artificial Sequence
  Description of Artificial Sequence: Synthetic oligonucleotide
aaucguacuuuagcugcuu

SEQ ID NO: 2033263 - RNA, 19 nt, Artificial Sequence
  Description of Artificial Sequence: Synthetic oligonucleotide
uuuucguagcgugccacuu

SEQ ID NO: 2033264 - RNA, 19 nt, Artificial Sequence
  Description of Artificial Sequence: Synthetic oligonucleotide
gguaaguuuggagugcuaa

SEQ ID NO: 2033265 - RNA, 19 nt, Artificial Sequence
  Description of Artificial Sequence: Synthetic oligonucleotide
uggcuucagugguuguaca

SEQ ID NO: 2033266 - RNA, 19 nt, Artificial Sequence
  Description of Artificial Sequence: Synthetic oligonucleotide
ugaggauacucuggacuuc

SEQ ID NO: 2033267 - RNA, 19 nt, Artificial Sequence
  Description of Artificial Sequence: Synthetic oligonucleotide
gucgcgagcagagcaucgg

SEQ ID NO: 2033268 - RNA, 19 nt, Artificial Sequence
  Description of Artificial Sequence: Synthetic oligonucleotide
ccaaaaucuuauccucagc

SEQ ID NO: 2033269 - RNA, 19 nt, Artificial Sequence
  Description of Artificial Sequence: Synthetic oligonucleotide
ucgaucccguucuucccac

SEQ ID NO: 2033270 - RNA, 19 nt, Artificial Sequence
  Description of Artificial Sequence: Synthetic oligonucleotide
agcuuuucguagcgugcca

SEQ ID NO: 2033271 - RNA, 19 nt, Artificial Sequence
  Description of Artificial Sequence: Synthetic oligonucleotide
ucuggucaaugagcagacc

SEQ ID NO: 2033272 - RNA, 19 nt, Artificial Sequence
  Description of Artificial Sequence: Synthetic oligonucleotide
gaccuuaauuaaauuuacu

SEQ ID NO: 2033273 - RNA, 19 nt, Artificial Sequence
  Description of Artificial Sequence: Synthetic oligonucleotide
ugguggcaucuuuaaucgu

SEQ ID NO: 2033274 - RNA, 19 nt, Artificial Sequence
  Description of Artificial Sequence: Synthetic oligonucleotide
gugguauguuauaugauau

SEQ ID NO: 2033275 - RNA, 19 nt, Artificial Sequence
  Description of Artificial Sequence: Synthetic oligonucleotide
aucuuauccucagcuaaua

SEQ ID NO: 2033276 - RNA, 19 nt, Artificial Sequence
  Description of Artificial Sequence: Synthetic oligonucleotide
cucggagcugagcgggcgg

SEQ ID NO: 2033277 - RNA, 19 nt, Artificial Sequence
  Description of Artificial Sequence: Synthetic oligonucleotide
cugccucggagcugagcgg

SEQ ID NO: 2033278 - RNA, 19 nt, Artificial Sequence
  Description of Artificial Sequence: Synthetic oligonucleotide
guaaguuuggagugcuaau

SEQ ID NO: 2033279 - RNA, 19 nt, Artificial Sequence
  Description of Artificial Sequence: Synthetic oligonucleotide
ugccggucuuggcuguaca

SEQ ID NO: 2033280 - RNA, 19 nt, Artificial Sequence
  Description of Artificial Sequence: Synthetic oligonucleotide
cgaagcuuuucguagcgug

SEQ ID NO: 2033281 - RNA, 19 nt, Artificial Sequence
  Description of Artificial Sequence: Synthetic oligonucleotide
acguucccgaugugguaug

SEQ ID NO: 2033282 - RNA, 19 nt, Artificial Sequence
  Description of Artificial Sequence: Synthetic oligonucleotide
cgagagccuaacuggaacc

SEQ ID NO: 2033283 - RNA, 19 nt, Artificial Sequence
  Description of Artificial Sequence: Synthetic oligonucleotide
augugguauguuauaugau

SEQ ID NO: 2033284 - RNA, 19 nt, Artificial Sequence
  Description of Artificial Sequence: Synthetic oligonucleotide
ugguaaguuuggagugcua

SEQ ID NO: 2033285 - RNA, 19 nt, Artificial Sequence
  Description of Artificial Sequence: Synthetic oligonucleotide
ugcggcccgaggacagacc

SEQ ID NO: 2033286 - RNA, 19 nt, Artificial Sequence
  Description of Artificial Sequence: Synthetic oligonucleotide
cacauauuuguguguuucu

SEQ ID NO: 2033287 - RNA, 19 nt, Artificial Sequence
  Description of Artificial Sequence: Synthetic oligonucleotide
guguccguucuuccagaac

SEQ ID NO: 2033288 - RNA, 19 nt, Artificial Sequence
  Description of Artificial Sequence: Synthetic oligonucleotide
cguacuuuagcugcuucag

SEQ ID NO: 2033289 - RNA, 19 nt, Artificial Sequence
  Description of Artificial Sequence: Synthetic oligonucleotide
ggauggagcaugugauaca

SEQ ID NO: 2033290 - RNA, 19 nt, Artificial Sequence
  Description of Artificial Sequence: Synthetic oligonucleotide
cuacgaccuucuuucggga

SEQ ID NO: 2033291 - RNA, 19 nt, Artificial Sequence
  Description of Artificial Sequence: Synthetic oligonucleotide
cccguucuucccacgaagc

SEQ ID NO: 2033292 - RNA, 19 nt, Artificial Sequence
  Description of Artificial Sequence: Synthetic oligonucleotide
gccaucuggauggagcaug

SEQ ID NO: 2033293 - RNA, 19 nt, Artificial Sequence
  Description of Artificial Sequence: Synthetic oligonucleotide
gguggcaucuuuaaucgua

SEQ ID NO: 2033294 - RNA, 19 nt, Artificial Sequence
  Description of Artificial Sequence: Synthetic oligonucleotide
ucacucgaucccguucuuc

SEQ ID NO: 2033295 - RNA, 19 nt, Artificial Sequence
  Description of Artificial Sequence: Synthetic oligonucleotide
guacuuuagcugcuucagu

SEQ ID NO: 2033296 - RNA, 19 nt, Artificial Sequence
  Description of Artificial Sequence: Synthetic oligonucleotide
cagcuaauacgucauuuau

SEQ ID NO: 2033297 - RNA, 19 nt, Artificial Sequence
  Description of Artificial Sequence: Synthetic oligonucleotide
cuucgugccggucuuggcu

SEQ ID NO: 2033298 - RNA, 19 nt, Artificial Sequence
  Description of Artificial Sequence: Synthetic oligonucleotide
aucccguucuucccacgaa

SEQ ID NO: 2033299 - RNA, 19 nt, Artificial Sequence
  Description of Artificial Sequence: Synthetic oligonucleotide
ucaguggaaucuggcucaa

SEQ ID NO: 2033300 - RNA, 19 nt, Artificial Sequence
  Description of Artificial Sequence: Synthetic oligonucleotide
gggcaacacagagauugag

SEQ ID NO: 2033301 - RNA, 19 nt, Artificial Sequence
  Description of Artificial Sequence: Synthetic oligonucleotide
cgaugugguauguuauaug

SEQ ID NO: 2033302 - RNA, 19 nt, Artificial Sequence
  Description of Artificial Sequence: Synthetic oligonucleotide
ugugcacgccgagagccua

SEQ ID NO: 2033303 - RNA, 19 nt, Artificial Sequence
  Description of Artificial Sequence: Synthetic oligonucleotide
gcacggcugccccaccucg

SEQ ID NO: 2033304 - RNA, 19 nt, Artificial Sequence
  Description of Artificial Sequence: Synthetic oligonucleotide
gcggcccgaggacagaccc

SEQ ID NO: 2033305 - RNA, 19 nt, Artificial Sequence
  Description of Artificial Sequence: Synthetic oligonucleotide
gcgagcagagcaucgggga

SEQ ID NO: 2033306 - RNA, 19 nt, Artificial Sequence
  Description of Artificial Sequence: Synthetic oligonucleotide
cauaggucugaugaugaau

SEQ ID NO: 2033307 - RNA, 19 nt, Artificial Sequence
  Description of Artificial Sequence: Synthetic oligonucleotide
ggcaucuuuaaucguacuu

SEQ ID NO: 2033308 - RNA, 19 nt, Artificial Sequence
  Description of Artificial Sequence: Synthetic oligonucleotide
ccaaagugucuuguugaac

SEQ ID NO: 2033309 - RNA, 19 nt, Artificial Sequence
  Description of Artificial Sequence: Synthetic oligonucleotide
ucgugccggucuuggcugu

SEQ ID NO: 2033310 - RNA, 19 nt, Artificial Sequence
  Description of Artificial Sequence: Synthetic oligonucleotide
ugcacgccgagagccuaac

SEQ ID NO: 2033311 - RNA, 19 nt, Artificial Sequence
  Description of Artificial Sequence: Synthetic oligonucleotide
cgcgagcagagcaucgggg

SEQ ID NO: 2033312 - RNA, 19 nt, Artificial Sequence
  Description of Artificial Sequence: Synthetic oligonucleotide
aucacucgaucccguucuu

SEQ ID NO: 2033313 - RNA, 19 nt, Artificial Sequence
  Description of Artificial Sequence: Synthetic oligonucleotide
acgcaaguccugagagcag

SEQ ID NO: 2033314 - RNA, 19 nt, Artificial Sequence
  Description of Artificial Sequence: Synthetic oligonucleotide
ccgcugugcacgccgagag

SEQ ID NO: 2033315 - RNA, 19 nt, Artificial Sequence
  Description of Artificial Sequence: Synthetic oligonucleotide
agccgacuggccaucugga

SEQ ID NO: 2033316 - RNA, 19 nt, Artificial Sequence
  Description of Artificial Sequence: Synthetic oligonucleotide
ccaacaacgcaaguccuga

SEQ ID NO: 2033317 - RNA, 19 nt, Artificial Sequence
  Description of Artificial Sequence: Synthetic oligonucleotide
cuuuggccuccugagccga

SEQ ID NO: 2033318 - RNA, 19 nt, Artificial Sequence
  Description of Artificial Sequence: Synthetic oligonucleotide
caucggggaggcgcugggc

SEQ ID NO: 2033319 - RNA, 19 nt, Artificial Sequence
  Description of Artificial Sequence: Synthetic oligonucleotide
gcgaagaccuuaauuaaau

SEQ ID NO: 2033320 - RNA, 19 nt, Artificial Sequence
  Description of Artificial Sequence: Synthetic oligonucleotide
gugucuuguugaacguaaa

SEQ ID NO: 2033321 - RNA, 19 nt, Artificial Sequence
  Description of Artificial Sequence: Synthetic oligonucleotide
cgcaaguccugagagcagc

SEQ ID NO: 2033322 - RNA, 19 nt, Artificial Sequence
  Description of Artificial Sequence: Synthetic oligonucleotide
aggauacucuggacuuccu

SEQ ID NO: 2033323 - RNA, 19 nt, Artificial Sequence
  Description of Artificial Sequence: Synthetic oligonucleotide
cugcggcccgaggacagac

SEQ ID NO: 2033324 - RNA, 19 nt, Artificial Sequence
  Description of Artificial Sequence: Synthetic oligonucleotide
ccggucuuggcuguacaug

SEQ ID NO: 2033325 - RNA, 19 nt, Artificial Sequence
  Description of Artificial Sequence: Synthetic oligonucleotide
gccuaacuggaaccuccac

SEQ ID NO: 2033326 - RNA, 19 nt, Artificial Sequence
  Description of Artificial Sequence: Synthetic oligonucleotide
gccuaguagccucuuccaa

SEQ ID NO: 2033327 - RNA, 19 nt, Artificial Sequence
  Description of Artificial Sequence: Synthetic oligonucleotide
ccacuugguucucuaacaa

SEQ ID NO: 2033328 - RNA, 19 nt, Artificial Sequence
  Description of Artificial Sequence: Synthetic oligonucleotide
ggucauuagcuuauagguu

SEQ ID NO: 2033329 - RNA, 19 nt, Artificial Sequence
  Description of Artificial Sequence: Synthetic oligonucleotide
cgucgcgagcagagcaucg

SEQ ID NO: 2033330 - RNA, 19 nt, Artificial Sequence
  Description of Artificial Sequence: Synthetic oligonucleotide
agcgugccacuugguucuc

SEQ ID NO: 2033331 - RNA, 19 nt, Artificial Sequence
  Description of Artificial Sequence: Synthetic oligonucleotide
guugaacguaaaagaucau

SEQ ID NO: 2033332 - RNA, 19 nt, Artificial Sequence
  Description of Artificial Sequence: Synthetic oligonucleotide
cacggcugccccaccucga

SEQ ID NO: 2033333 - RNA, 19 nt, Artificial Sequence
  Description of Artificial Sequence: Synthetic oligonucleotide
ggacuaggcugguggcauc

SEQ ID NO: 2033334 - RNA, 19 nt, Artificial Sequence
  Description of Artificial Sequence: Synthetic oligonucleotide
ccucggagcugagcgggcg

SEQ ID NO: 2033335 - RNA, 19 nt, Artificial Sequence
  Description of Artificial Sequence: Synthetic oligonucleotide
cagacccgcugugcacgcc

SEQ ID NO: 2033336 - RNA, 19 nt, Artificial Sequence
  Description of Artificial Sequence: Synthetic oligonucleotide
gugccggucuuggcuguac

SEQ ID NO: 2033337 - RNA, 19 nt, Artificial Sequence
  Description of Artificial Sequence: Synthetic oligonucleotide
ggcacggcugccccaccuc

SEQ ID NO: 2033338 - RNA, 19 nt, Artificial Sequence
  Description of Artificial Sequence: Synthetic oligonucleotide
gacccgcugugcacgccga

SEQ ID NO: 2033339 - RNA, 19 nt, Artificial Sequence
  Description of Artificial Sequence: Synthetic oligonucleotide
gcuugggucauuagcuuau

SEQ ID NO: 2033340 - RNA, 19 nt, Artificial Sequence
  Description of Artificial Sequence: Synthetic oligonucleotide
cccgaugugguauguuaua

SEQ ID NO: 2033341 - RNA, 19 nt, Artificial Sequence
  Description of Artificial Sequence: Synthetic oligonucleotide
gacuggccaucuggaugga

SEQ ID NO: 2033342 - RNA, 19 nt, Artificial Sequence
  Description of Artificial Sequence: Synthetic oligonucleotide
cgaucccguucuucccacg

SEQ ID NO: 2033343 - RNA, 19 nt, Artificial Sequence
  Description of Artificial Sequence: Synthetic oligonucleotide
acugggcaacacagagauu

SEQ ID NO: 2033344 - RNA, 19 nt, Artificial Sequence
  Description of Artificial Sequence: Synthetic oligonucleotide
cugagcgggcggcacggcu

SEQ ID NO: 2033345 - RNA, 19 nt, Artificial Sequence
  Description of Artificial Sequence: Synthetic oligonucleotide
ccgcgucgcgagcagagca

SEQ ID NO: 2033346 - RNA, 19 nt, Artificial Sequence
  Description of Artificial Sequence: Synthetic oligonucleotide
ggcaaaacucuacgaccuu

SEQ ID NO: 2033347 - RNA, 19 nt, Artificial Sequence
  Description of Artificial Sequence: Synthetic oligonucleotide
gugcacgccgagagccuaa

SEQ ID NO: 2033348 - RNA, 19 nt, Artificial Sequence
  Description of Artificial Sequence: Synthetic oligonucleotide
gcgucgcgagcagagcauc

SEQ ID NO: 2033349 - RNA, 19 nt, Artificial Sequence
  Description of Artificial Sequence: Synthetic oligonucleotide
ccugagccgacuggccauc

SEQ ID NO: 2033350 - RNA, 19 nt, Artificial Sequence
  Description of Artificial Sequence: Synthetic oligonucleotide
cggcccgaggacagacccg

SEQ ID NO: 2033351 - RNA, 19 nt, Artificial Sequence
  Description of Artificial Sequence: Synthetic oligonucleotide
ccauaaauguagguuucuu

SEQ ID NO: 2033352 - RNA, 19 nt, Artificial Sequence
  Description of Artificial Sequence: Synthetic oligonucleotide
ccgaugugguauguuauau

SEQ ID NO: 2033353 - RNA, 19 nt, Artificial Sequence
  Description of Artificial Sequence: Synthetic oligonucleotide
guucccgaugugguauguu

SEQ ID NO: 2033354 - RNA, 19 nt, Artificial Sequence
  Description of Artificial Sequence: Synthetic oligonucleotide
caguggaaucuggcucaaa

SEQ ID NO: 2033355 - RNA, 19 nt, Artificial Sequence
  Description of Artificial Sequence: Synthetic oligonucleotide
gccggucuuggcuguacau

SEQ ID NO: 2033356 - RNA, 19 nt, Artificial Sequence
  Description of Artificial Sequence: Synthetic oligonucleotide
gccgacuggccaucuggau

SEQ ID NO: 2033357 - RNA, 19 nt, Artificial Sequence
  Description of Artificial Sequence: Synthetic oligonucleotide
cugagccgacuggccaucu

SEQ ID NO: 2033358 - RNA, 19 nt, Artificial Sequence
  Description of Artificial Sequence: Synthetic oligonucleotide
gcacgccgagagccuaacu

SEQ ID NO: 2033359 - RNA, 19 nt, Artificial Sequence
  Description of Artificial Sequence: Synthetic oligonucleotide
gccccaccucgaagggcug

SEQ ID NO: 2033360 - RNA, 19 nt, Artificial Sequence
  Description of Artificial Sequence: Synthetic oligonucleotide
ccacaccaacaacgcaagu

SEQ ID NO: 2033361 - RNA, 19 nt, Artificial Sequence
  Description of Artificial Sequence: Synthetic oligonucleotide
gggccgcgucgcgagcaga

SEQ ID NO: 2033362 - RNA, 19 nt, Artificial Sequence
  Description of Artificial Sequence: Synthetic oligonucleotide
cgcgucgcgagcagagcau

SEQ ID NO: 2033363 - RNA, 19 nt, Artificial Sequence
  Description of Artificial Sequence: Synthetic oligonucleotide
cguucccgaugugguaugu

SEQ ID NO: 2033364 - RNA, 19 nt, Artificial Sequence
  Description of Artificial Sequence: Synthetic oligonucleotide
cgugccggucuuggcugua

SEQ ID NO: 2033365 - RNA, 19 nt, Artificial Sequence
  Description of Artificial Sequence: Synthetic oligonucleotide
uuauuuagcaccuuaauag

SEQ ID NO: 2033366 - RNA, 19 nt, Artificial Sequence
  Description of Artificial Sequence: Synthetic oligonucleotide
aaaauccccaaacaggugc

SEQ ID NO: 2033367 - RNA, 19 nt, Artificial Sequence
  Description of Artificial Sequence: Synthetic oligonucleotide
uguguugagauuaagaugu

SEQ ID NO: 2033368 - RNA, 19 nt, Artificial Sequence
  Description of Artificial Sequence: Synthetic oligonucleotide
ugaacuuuauguaacuccg

SEQ ID NO: 2033369 - RNA, 19 nt, Artificial Sequence
  Description of Artificial Sequence: Synthetic oligonucleotide
uguuugauaucgcacaacg

SEQ ID NO: 2033370 - RNA, 19 nt, Artificial Sequence
  Description of Artificial Sequence: Synthetic oligonucleotide
cuuguuucaacauugacac

SEQ ID NO: 2033371 - RNA, 19 nt, Artificial Sequence
  Description of Artificial Sequence: Synthetic oligonucleotide
aauauugugguccuggagu

SEQ ID NO: 2033372 - RNA, 19 nt, Artificial Sequence
  Description of Artificial Sequence: Synthetic oligonucleotide
uguuucaacauugacacgg

SEQ ID NO: 2033373 - RNA, 19 nt, Artificial Sequence
  Description of Artificial Sequence: Synthetic oligonucleotide
uuugauaucgcacaacgcu

SEQ ID NO: 2033374 - RNA, 19 nt, Artificial Sequence
  Description of Artificial Sequence: Synthetic oligonucleotide
uaaaguauccaacuggaca

SEQ ID NO: 2033375 - RNA, 19 nt, Artificial Sequence
  Description of Artificial Sequence: Synthetic oligonucleotide
ucuauaaagauguccauca

SEQ ID NO: 2033376 - RNA, 19 nt, Artificial Sequence
  Description of Artificial Sequence: Synthetic oligonucleotide
uccaucauuacaauaaagu

SEQ ID NO: 2033377 - RNA, 19 nt, Artificial Sequence
  Description of Artificial Sequence: Synthetic oligonucleotide
agcaaugagccuuaguucg

SEQ ID NO: 2033378 - RNA, 19 nt, Artificial Sequence
  Description of Artificial Sequence: Synthetic oligonucleotide
uguuguuuccaauacaugu

SEQ ID NO: 2033379 - RNA, 19 nt, Artificial Sequence
  Description of Artificial Sequence: Synthetic oligonucleotide
aucauuacaauaaaguauc

SEQ ID NO: 2033380 - RNA, 19 nt, Artificial Sequence
  Description of Artificial Sequence: Synthetic oligonucleotide
uaguucguuagucagaaca

SEQ ID NO: 2033381 - RNA, 19 nt, Artificial Sequence
  Description of Artificial Sequence: Synthetic oligonucleotide
uucgucaagaaguuugugg

SEQ ID NO: 2033382 - RNA, 19 nt, Artificial Sequence
  Description of Artificial Sequence: Synthetic oligonucleotide
aguuuguggauguugcgcc

SEQ ID NO: 2033383 - RNA, 19 nt, Artificial Sequence
  Description of Artificial Sequence: Synthetic oligonucleotide
ucaacauugacacggcugc

SEQ ID NO: 2033384 - RNA, 19 nt, Artificial Sequence
  Description of Artificial Sequence: Synthetic oligonucleotide
agaacauuagcauccgacg

SEQ ID NO: 2033385 - RNA, 19 nt, Artificial Sequence
  Description of Artificial Sequence: Synthetic oligonucleotide
agcaaagaaacaccaaagg

SEQ ID NO: 2033386 - RNA, 19 nt, Artificial Sequence
  Description of Artificial Sequence: Synthetic oligonucleotide
aaguuuguggauguugcgc

SEQ ID NO: 2033387 - RNA, 19 nt, Artificial Sequence
  Description of Artificial Sequence: Synthetic oligonucleotide
acagcugaaagccauagug

SEQ ID NO: 2033388 - RNA, 19 nt, Artificial Sequence
  Description of Artificial Sequence: Synthetic oligonucleotide
cauugucuuauuuagcacc

SEQ ID NO: 2033389 - RNA, 19 nt, Artificial Sequence
  Description of Artificial Sequence: Synthetic oligonucleotide
aagugcugauuucaaaguc

SEQ ID NO: 2033390 - RNA, 19 nt, Artificial Sequence
  Description of Artificial Sequence: Synthetic oligonucleotide
uuagcauccgacgugaugc

SEQ ID NO: 2033391 - RNA, 19 nt, Artificial Sequence
  Description of Artificial Sequence: Synthetic oligonucleotide
uuauguguugagauuaaga

SEQ ID NO: 2033392 - RNA, 19 nt, Artificial Sequence
  Description of Artificial Sequence: Synthetic oligonucleotide
uccauugucuuauuuagca

SEQ ID NO: 2033393 - RNA, 19 nt, Artificial Sequence
  Description of Artificial Sequence: Synthetic oligonucleotide
aauaaaguauccaacugga

SEQ ID NO: 2033394 - RNA, 19 nt, Artificial Sequence
  Description of Artificial Sequence: Synthetic oligonucleotide
aaaagacuucgucaagaag

SEQ ID NO: 2033395 - RNA, 19 nt, Artificial Sequence
  Description of Artificial Sequence: Synthetic oligonucleotide
uauuuagcaccuuaauagc

SEQ ID NO: 2033396 - RNA, 19 nt, Artificial Sequence
  Description of Artificial Sequence: Synthetic oligonucleotide
acagacacgacaaggaccc

SEQ ID NO: 2033397 - RNA, 19 nt, Artificial Sequence
  Description of Artificial Sequence: Synthetic oligonucleotide
aagccauagugcuuauccc

SEQ ID NO: 2033398 - RNA, 19 nt, Artificial Sequence
  Description of Artificial Sequence: Synthetic oligonucleotide
caaacuguguauaagccug

SEQ ID NO: 2033399 - RNA, 19 nt, Artificial Sequence
  Description of Artificial Sequence: Synthetic oligonucleotide
aacuuuauguaacuccgga

SEQ ID NO: 2033400 - RNA, 19 nt, Artificial Sequence
  Description of Artificial Sequence: Synthetic oligonucleotide
aacauuagcauccgacgug

SEQ ID NO: 2033401 - RNA, 19 nt, Artificial Sequence
  Description of Artificial Sequence: Synthetic oligonucleotide
ugauuucaaagucauuucu

SEQ ID NO: 2033402 - RNA, 19 nt, Artificial Sequence
  Description of Artificial Sequence: Synthetic oligonucleotide
aaauuauguguugagauua

SEQ ID NO: 2033403 - RNA, 19 nt, Artificial Sequence
  Description of Artificial Sequence: Synthetic oligonucleotide
cuguguauaagccuguuug

SEQ ID NO: 2033404 - RNA, 19 nt, Artificial Sequence
  Description of Artificial Sequence: Synthetic oligonucleotide
uccaauagcuuccauggca

SEQ ID NO: 2033405 - RNA, 19 nt, Artificial Sequence
  Description of Artificial Sequence: Synthetic oligonucleotide
cuuacugacauccauuguc

SEQ ID NO: 2033406 - RNA, 19 nt, Artificial Sequence
  Description of Artificial Sequence: Synthetic oligonucleotide
uccaaacuguguauaagcc

SEQ ID NO: 2033407 - RNA, 19 nt, Artificial Sequence
  Description of Artificial Sequence: Synthetic oligonucleotide
gguacaaacgaccuucugg

SEQ ID NO: 2033408 - RNA, 19 nt, Artificial Sequence
  Description of Artificial Sequence: Synthetic oligonucleotide
ucgucaagaaguuugugga

SEQ ID NO: 2033409 - RNA, 19 nt, Artificial Sequence
  Description of Artificial Sequence: Synthetic oligonucleotide
agucauuucuccuucuuug

SEQ ID NO: 2033410 - RNA, 19 nt, Artificial Sequence
  Description of Artificial Sequence: Synthetic oligonucleotide
aacuguucuacuuccuucu

SEQ ID NO: 2033411 - RNA, 19 nt, Artificial Sequence
  Description of Artificial Sequence: Synthetic oligonucleotide
gagauuaagaugucuauaa

SEQ ID NO: 2033412 - RNA, 19 nt, Artificial Sequence
  Description of Artificial Sequence: Synthetic oligonucleotide
ugguacuguaauaaauacc

SEQ ID NO: 2033413 - RNA, 19 nt, Artificial Sequence
  Description of Artificial Sequence: Synthetic oligonucleotide
uugauaucgcacaacgcug

SEQ ID NO: 2033414 - RNA, 19 nt, Artificial Sequence
  Description of Artificial Sequence: Synthetic oligonucleotide
uuaauagcaagagcaagug

SEQ ID NO: 2033415 - RNA, 19 nt, Artificial Sequence
  Description of Artificial Sequence: Synthetic oligonucleotide
aacgcuguaaccaacugcu

SEQ ID NO: 2033416 - RNA, 19 nt, Artificial Sequence
  Description of Artificial Sequence: Synthetic oligonucleotide
caccuuaauagcaagagca

SEQ ID NO: 2033417 - RNA, 19 nt, Artificial Sequence
  Description of Artificial Sequence: Synthetic oligonucleotide
auaagccuguuugauaucg

SEQ ID NO: 2033418 - RNA, 19 nt, Artificial Sequence
  Description of Artificial Sequence: Synthetic oligonucleotide
aaaauauugugguccugga

SEQ ID NO: 2033419 - RNA, 19 nt, Artificial Sequence
  Description of Artificial Sequence: Synthetic oligonucleotide
cuccaaacuguguauaagc

SEQ ID NO: 2033420 - RNA, 19 nt, Artificial Sequence
  Description of Artificial Sequence: Synthetic oligonucleotide
acgacaaggacccaauuca

SEQ ID NO: 2033421 - RNA, 19 nt, Artificial Sequence
  Description of Artificial Sequence: Synthetic oligonucleotide
uuuagcaccuuaauagcaa

SEQ ID NO: 2033422 - RNA, 19 nt, Artificial Sequence
  Description of Artificial Sequence: Synthetic oligonucleotide
uuacugacauccauugucu

SEQ ID NO: 2033423 - RNA, 19 nt, Artificial Sequence
  Description of Artificial Sequence: Synthetic oligonucleotide
auucaguccuauuuccccg

SEQ ID NO: 2033424 - RNA, 19 nt, Artificial Sequence
  Description of Artificial Sequence: Synthetic oligonucleotide
ucguuagucagaacauuag

SEQ ID NO: 2033425 - RNA, 19 nt, Artificial Sequence
  Description of Artificial Sequence: Synthetic oligonucleotide
aguccuauuuccccgauga

SEQ ID NO: 2033426 - RNA, 19 nt, Artificial Sequence
  Description of Artificial Sequence: Synthetic oligonucleotide
ggagcuauaaaauccauga

SEQ ID NO: 2033427 - RNA, 19 nt, Artificial Sequence
  Description of Artificial Sequence: Synthetic oligonucleotide
ugaucaacuguucuacuuc

SEQ ID NO: 2033428 - RNA, 19 nt, Artificial Sequence
  Description of Artificial Sequence: Synthetic oligonucleotide
acuuuauguaacuccggag

SEQ ID NO: 2033429 - RNA, 19 nt, Artificial Sequence
  Description of Artificial Sequence: Synthetic oligonucleotide
aagagcaagugcugauuuc

SEQ ID NO: 2033430 - RNA, 19 nt, Artificial Sequence
  Description of Artificial Sequence: Synthetic oligonucleotide
aaauccccaaacaggugcc

SEQ ID NO: 2033431 - RNA, 19 nt, Artificial Sequence
  Description of Artificial Sequence: Synthetic oligonucleotide
uaucgcacaacgcuguaac

SEQ ID NO: 2033432 - RNA, 19 nt, Artificial Sequence
  Description of Artificial Sequence: Synthetic oligonucleotide
agucauaucuucgagacau

SEQ ID NO: 2033433 - RNA, 19 nt, Artificial Sequence
  Description of Artificial Sequence: Synthetic oligonucleotide
aaguggugccucuaaggag

SEQ ID NO: 2033434 - RNA, 19 nt, Artificial Sequence
  Description of Artificial Sequence: Synthetic oligonucleotide
uaauagcaagagcaagugc

SEQ ID NO: 2033435 - RNA, 19 nt, Artificial Sequence
  Description of Artificial Sequence: Synthetic oligonucleotide
aagaaguuuguggauguug

SEQ ID NO: 2033436 - RNA, 19 nt, Artificial Sequence
  Description of Artificial Sequence: Synthetic oligonucleotide
uuagcaccuuaauagcaag

SEQ ID NO: 2033437 - RNA, 19 nt, Artificial Sequence
  Description of Artificial Sequence: Synthetic oligonucleotide
gacuucgucaagaaguuug

SEQ ID NO: 2033438 - RNA, 19 nt, Artificial Sequence
  Description of Artificial Sequence: Synthetic oligonucleotide
gaaguuuguggauguugcg

SEQ ID NO: 2033439 - RNA, 19 nt, Artificial Sequence
  Description of Artificial Sequence: Synthetic oligonucleotide
gcuaaaauccccaaacagg

SEQ ID NO: 2033440 - RNA, 19 nt, Artificial Sequence
  Description of Artificial Sequence: Synthetic oligonucleotide
auaaagauguccaucauua

SEQ ID NO: 2033441 - RNA, 19 nt, Artificial Sequence
  Description of Artificial Sequence: Synthetic oligonucleotide
ucuuauuuagcaccuuaau

SEQ ID NO: 2033442 - RNA, 19 nt, Artificial Sequence
  Description of Artificial Sequence: Synthetic oligonucleotide
aagcagaacuccaucauug

SEQ ID NO: 2033443 - RNA, 19 nt, Artificial Sequence
  Description of Artificial Sequence: Synthetic oligonucleotide
uguguauaagccuguuuga

SEQ ID NO: 2033444 - RNA, 19 nt, Artificial Sequence
  Description of Artificial Sequence: Synthetic oligonucleotide
aucauuggcuaaaaucccc

SEQ ID NO: 2033445 - RNA, 19 nt, Artificial Sequence
  Description of Artificial Sequence: Synthetic oligonucleotide
uuuguagucuuguuucaac

SEQ ID NO: 2033446 - RNA, 19 nt, Artificial Sequence
  Description of Artificial Sequence: Synthetic oligonucleotide
guaaccaacugcucacacg

SEQ ID NO: 2033447 - RNA, 19 nt, Artificial Sequence
  Description of Artificial Sequence: Synthetic oligonucleotide
uacauguggcuuuccaucc

SEQ ID NO: 2033448 - RNA, 19 nt, Artificial Sequence
  Description of Artificial Sequence: Synthetic oligonucleotide
guacaaacgaccuucugga

SEQ ID NO: 2033449 - RNA, 19 nt, Artificial Sequence
  Description of Artificial Sequence: Synthetic oligonucleotide
agcuuacugacauccauug

SEQ ID NO: 2033450 - RNA, 19 nt, Artificial Sequence
  Description of Artificial Sequence: Synthetic oligonucleotide
ucauuggcuaaaaucccca

SEQ ID NO: 2033451 - RNA, 19 nt, Artificial Sequence
  Description of Artificial Sequence: Synthetic oligonucleotide
uucucucuuguuagugugg

SEQ ID NO: 2033452 - RNA, 19 nt, Artificial Sequence
  Description of Artificial Sequence: Synthetic oligonucleotide
uguugcgccucucugcugc

SEQ ID NO: 2033453 - RNA, 19 nt, Artificial Sequence
  Description of Artificial Sequence: Synthetic oligonucleotide
agcugaaagccauagugcu

SEQ ID NO: 2033454 - RNA, 19 nt, Artificial Sequence
  Description of Artificial Sequence: Synthetic oligonucleotide
cugguacuguaauaaauac

SEQ ID NO: 2033455 - RNA, 19 nt, Artificial Sequence
  Description of Artificial Sequence: Synthetic oligonucleotide
augucuauaaagaugucca

SEQ ID NO: 2033456 - RNA, 19 nt, Artificial Sequence
  Description of Artificial Sequence: Synthetic oligonucleotide
gauguugucuauuuguccu

SEQ ID NO: 2033457 - RNA, 19 nt, Artificial Sequence
  Description of Artificial Sequence: Synthetic oligonucleotide
uucguuagucagaacauua

SEQ ID NO: 2033458 - RNA, 19 nt, Artificial Sequence
  Description of Artificial Sequence: Synthetic oligonucleotide
gaaguggugccucuaagga

SEQ ID NO: 2033459 - RNA, 19 nt, Artificial Sequence
  Description of Artificial Sequence: Synthetic oligonucleotide
auguccaauagcuuccaug

SEQ ID NO: 2033460 - RNA, 19 nt, Artificial Sequence
  Description of Artificial Sequence: Synthetic oligonucleotide
aacauugacacggcugcag

SEQ ID NO: 2033461 - RNA, 19 nt, Artificial Sequence
  Description of Artificial Sequence: Synthetic oligonucleotide
acaaacgaccuucuggaga

SEQ ID NO: 2033462 - RNA, 19 nt, Artificial Sequence
  Description of Artificial Sequence: Synthetic oligonucleotide
uccacuugguacaaacgac

SEQ ID NO: 2033463 - RNA, 19 nt, Artificial Sequence
  Description of Artificial Sequence: Synthetic oligonucleotide
uguaacuccggaggaaaag

SEQ ID NO: 2033464 - RNA, 19 nt, Artificial Sequence
  Description of Artificial Sequence: Synthetic oligonucleotide
agcagaacuccaucauugg

SEQ ID NO: 2033465 - RNA, 19 nt, Artificial Sequence
  Description of Artificial Sequence: Synthetic oligonucleotide
agcaccuuaauagcaagag

SEQ ID NO: 2033466 - RNA, 19 nt, Artificial Sequence
  Description of Artificial Sequence: Synthetic oligonucleotide
aagccuguuugauaucgca

SEQ ID NO: 2033467 - RNA, 19 nt, Artificial Sequence
  Description of Artificial Sequence: Synthetic oligonucleotide
uugagauuaagaugucuau

SEQ ID NO: 2033468 - RNA, 19 nt, Artificial Sequence
  Description of Artificial Sequence: Synthetic oligonucleotide
ggagucauaucuucgagac

SEQ ID NO: 2033469 - RNA, 19 nt, Artificial Sequence
  Description of Artificial Sequence: Synthetic oligonucleotide
uguauaagccuguuugaua

SEQ ID NO: 2033470 - RNA, 19 nt, Artificial Sequence
  Description of Artificial Sequence: Synthetic oligonucleotide
gaaaagacagugaggggug

SEQ ID NO: 2033471 - RNA, 19 nt, Artificial Sequence
  Description of Artificial Sequence: Synthetic oligonucleotide
ugucuuauuuagcaccuua

SEQ ID NO: 2033472 - RNA, 19 nt, Artificial Sequence
  Description of Artificial Sequence: Synthetic oligonucleotide
uccaaguuuuauuccaaaa

SEQ ID NO: 2033473 - RNA, 19 nt, Artificial Sequence
  Description of Artificial Sequence: Synthetic oligonucleotide
uggcuaaaauccccaaaca

SEQ ID NO: 2033474 - RNA, 19 nt, Artificial Sequence
  Description of Artificial Sequence: Synthetic oligonucleotide
auugacacggcugcagcac

SEQ ID NO: 2033475 - RNA, 19 nt, Artificial Sequence
  Description of Artificial Sequence: Synthetic oligonucleotide
acucugaucauggucuuuc

SEQ ID NO: 2033476 - RNA, 19 nt, Artificial Sequence
  Description of Artificial Sequence: Synthetic oligonucleotide
uacuccacuugguacaaac

SEQ ID NO: 2033477 - RNA, 19 nt, Artificial Sequence
  Description of Artificial Sequence: Synthetic oligonucleotide
cugauuucaaagucauuuc

SEQ ID NO: 2033478 - RNA, 19 nt, Artificial Sequence
  Description of Artificial Sequence: Synthetic oligonucleotide
acauguggcuuuccauccc

SEQ ID NO: 2033479 - RNA, 19 nt, Artificial Sequence
  Description of Artificial Sequence: Synthetic oligonucleotide
uggagucauaucuucgaga

SEQ ID NO: 2033480 - RNA, 19 nt, Artificial Sequence
  Description of Artificial Sequence: Synthetic oligonucleotide
auuagcauccgacgugaug

SEQ ID NO: 2033481 - RNA, 19 nt, Artificial Sequence
  Description of Artificial Sequence: Synthetic oligonucleotide
augauguugucuauuuguc

SEQ ID NO: 2033482 - RNA, 19 nt, Artificial Sequence
  Description of Artificial Sequence: Synthetic oligonucleotide
uccugguacuguaauaaau

SEQ ID NO: 2033483 - RNA, 19 nt, Artificial Sequence
  Description of Artificial Sequence: Synthetic oligonucleotide
uguaaccaacugcucacac

SEQ ID NO: 2033484 - RNA, 19 nt, Artificial Sequence
  Description of Artificial Sequence: Synthetic oligonucleotide
uagugcuuaucccagccaa

SEQ ID NO: 2033485 - RNA, 19 nt, Artificial Sequence
  Description of Artificial Sequence: Synthetic oligonucleotide
aucgcacaacgcuguaacc

SEQ ID NO: 2033486 - RNA, 19 nt, Artificial Sequence
  Description of Artificial Sequence: Synthetic oligonucleotide
agccauagugcuuauccca

SEQ ID NO: 2033487 - RNA, 19 nt, Artificial Sequence
  Description of Artificial Sequence: Synthetic oligonucleotide
auaaaguauccaacuggac

SEQ ID NO: 2033488 - RNA, 19 nt, Artificial Sequence
  Description of Artificial Sequence: Synthetic oligonucleotide
acugcucacacggaauugg

SEQ ID NO: 2033489 - RNA, 19 nt, Artificial Sequence
  Description of Artificial Sequence: Synthetic oligonucleotide
uguccaucauuacaauaaa

SEQ ID NO: 2033490 - RNA, 19 nt, Artificial Sequence
  Description of Artificial Sequence: Synthetic oligonucleotide
gguacuguaauaaauaccu

SEQ ID NO: 2033491 - RNA, 19 nt, Artificial Sequence
  Description of Artificial Sequence: Synthetic oligonucleotide
aauccccaaacaggugccc

SEQ ID NO: 2033492 - RNA, 19 nt, Artificial Sequence
  Description of Artificial Sequence: Synthetic oligonucleotide
gaacuuuauguaacuccgg

SEQ ID NO: 2033493 - RNA, 19 nt, Artificial Sequence
  Description of Artificial Sequence: Synthetic oligonucleotide
caucauuacaauaaaguau

SEQ ID NO: 2033494 - RNA, 19 nt, Artificial Sequence
  Description of Artificial Sequence: Synthetic oligonucleotide
uaacuccggaggaaaagac

SEQ ID NO: 2033495 - RNA, 19 nt, Artificial Sequence
  Description of Artificial Sequence: Synthetic oligonucleotide
aagucauuucuccuucuuu

SEQ ID NO: 2033496 - RNA, 19 nt, Artificial Sequence
  Description of Artificial Sequence: Synthetic oligonucleotide
cuuaauagcaagagcaagu

SEQ ID NO: 2033497 - RNA, 19 nt, Artificial Sequence
  Description of Artificial Sequence: Synthetic oligonucleotide
uauguaacuccggaggaaa

SEQ ID NO: 2033498 - RNA, 19 nt, Artificial Sequence
  Description of Artificial Sequence: Synthetic oligonucleotide
aggacucugaucauggucu

SEQ ID NO: 2033499 - RNA, 19 nt, Artificial Sequence
  Description of Artificial Sequence: Synthetic oligonucleotide
aucagcgccgcuuuacuca

SEQ ID NO: 2033500 - RNA, 19 nt, Artificial Sequence
  Description of Artificial Sequence: Synthetic oligonucleotide
agauuaagaugucuauaaa

SEQ ID NO: 2033501 - RNA, 19 nt, Artificial Sequence
  Description of Artificial Sequence: Synthetic oligonucleotide
guauaagccuguuugauau

SEQ ID NO: 2033502 - RNA, 19 nt, Artificial Sequence
  Description of Artificial Sequence: Synthetic oligonucleotide
uugaucaacuguucuacuu

SEQ ID NO: 2033503 - RNA, 19 nt, Artificial Sequence
  Description of Artificial Sequence: Synthetic oligonucleotide
uuugaucaacuguucuacu

SEQ ID NO: 2033504 - RNA, 19 nt, Artificial Sequence
  Description of Artificial Sequence: Synthetic oligonucleotide
cucacacggaauuggcucc

SEQ ID NO: 2033505 - RNA, 19 nt, Artificial Sequence
  Description of Artificial Sequence: Synthetic oligonucleotide
acuguuguuuccaauacau

SEQ ID NO: 2033506 - RNA, 19 nt, Artificial Sequence
  Description of Artificial Sequence: Synthetic oligonucleotide
agagcaagugcugauuuca

SEQ ID NO: 2033507 - RNA, 19 nt, Artificial Sequence
  Description of Artificial Sequence: Synthetic oligonucleotide
uucgagacauggcuucuga

SEQ ID NO: 2033508 - RNA, 19 nt, Artificial Sequence
  Description of Artificial Sequence: Synthetic oligonucleotide
ugagauuaagaugucuaua

SEQ ID NO: 2033509 - RNA, 19 nt, Artificial Sequence
  Description of Artificial Sequence: Synthetic oligonucleotide
uuguuucaacauugacacg

SEQ ID NO: 2033510 - RNA, 19 nt, Artificial Sequence
  Description of Artificial Sequence: Synthetic oligonucleotide
ugagccuuaguucguuagu

SEQ ID NO: 2033511 - RNA, 19 nt, Artificial Sequence
  Description of Artificial Sequence: Synthetic oligonucleotide
uuucaacauugacacggcu

SEQ ID NO: 2033512 - RNA, 19 nt, Artificial Sequence
  Description of Artificial Sequence: Synthetic oligonucleotide
acccaauucaguccuauuu

SEQ ID NO: 2033513 - RNA, 19 nt, Artificial Sequence
  Description of Artificial Sequence: Synthetic oligonucleotide
uauuuccccgaugaucaag

SEQ ID NO: 2033514 - RNA, 19 nt, Artificial Sequence
  Description of Artificial Sequence: Synthetic oligonucleotide
auuuagcaccuuaauagca

SEQ ID NO: 2033515 - RNA, 19 nt, Artificial Sequence
  Description of Artificial Sequence: Synthetic oligonucleotide
ucgcacaacgcuguaacca

SEQ ID NO: 2033516 - RNA, 19 nt, Artificial Sequence
  Description of Artificial Sequence: Synthetic oligonucleotide
agcacuguuguuuccaaua

SEQ ID NO: 2033517 - RNA, 19 nt, Artificial Sequence
  Description of Artificial Sequence: Synthetic oligonucleotide
ucucucuuguuaguguggc

SEQ ID NO: 2033518 - RNA, 19 nt, Artificial Sequence
  Description of Artificial Sequence: Synthetic oligonucleotide
auuauguguugagauuaag

SEQ ID NO: 2033519 - RNA, 19 nt, Artificial Sequence
  Description of Artificial Sequence: Synthetic oligonucleotide
ugaucaaguuagagaagaa

SEQ ID NO: 2033520 - RNA, 19 nt, Artificial Sequence
  Description of Artificial Sequence: Synthetic oligonucleotide
aacuggacagacacgacaa

SEQ ID NO: 2033521 - RNA, 19 nt, Artificial Sequence
  Description of Artificial Sequence: Synthetic oligonucleotide
uccuauuuccccgaugauc

SEQ ID NO: 2033522 - RNA, 19 nt, Artificial Sequence
  Description of Artificial Sequence: Synthetic oligonucleotide
aguguggcgauuuccacuu

SEQ ID NO: 2033523 - RNA, 19 nt, Artificial Sequence
  Description of Artificial Sequence: Synthetic oligonucleotide
cagcugacagcuuacugac

SEQ ID NO: 2033524 - RNA, 19 nt, Artificial Sequence
  Description of Artificial Sequence: Synthetic oligonucleotide
uacaaacgaccuucuggag

SEQ ID NO: 2033525 - RNA, 19 nt, Artificial Sequence
  Description of Artificial Sequence: Synthetic oligonucleotide
ggcgcuuuccuccaaacug

SEQ ID NO: 2033526 - RNA, 19 nt, Artificial Sequence
  Description of Artificial Sequence: Synthetic oligonucleotide
uaagccuguuugauaucgc

SEQ ID NO: 2033527 - RNA, 19 nt, Artificial Sequence
  Description of Artificial Sequence: Synthetic oligonucleotide
agugcugauuucaaaguca

SEQ ID NO: 2033528 - RNA, 19 nt, Artificial Sequence
  Description of Artificial Sequence: Synthetic oligonucleotide
agaacuccaucauuggcua

SEQ ID NO: 2033529 - RNA, 19 nt, Artificial Sequence
  Description of Artificial Sequence: Synthetic oligonucleotide
uuaguguggcgauuuccac

SEQ ID NO: 2033530 - RNA, 19 nt, Artificial Sequence
  Description of Artificial Sequence: Synthetic oligonucleotide
auugucuuauuuagcaccu

SEQ ID NO: 2033531 - RNA, 19 nt, Artificial Sequence
  Description of Artificial Sequence: Synthetic oligonucleotide
cacgacaaggacccaauuc

SEQ ID NO: 2033532 - RNA, 19 nt, Artificial Sequence
  Description of Artificial Sequence: Synthetic oligonucleotide
uagcaccuuaauagcaaga

SEQ ID NO: 2033533 - RNA, 19 nt, Artificial Sequence
  Description of Artificial Sequence: Synthetic oligonucleotide
gaacauuagcauccgacgu

SEQ ID NO: 2033534 - RNA, 19 nt, Artificial Sequence
  Description of Artificial Sequence: Synthetic oligonucleotide
gcuauaaaauccaugaugu

SEQ ID NO: 2033535 - RNA, 19 nt, Artificial Sequence
  Description of Artificial Sequence: Synthetic oligonucleotide
uaucuucgagacauggcuu

SEQ ID NO: 2033536 - RNA, 19 nt, Artificial Sequence
  Description of Artificial Sequence: Synthetic oligonucleotide
uuuccgggguggaaggcca

SEQ ID NO: 2033537 - RNA, 19 nt, Artificial Sequence
  Description of Artificial Sequence: Synthetic oligonucleotide
cauguggcuuuccaucccc

SEQ ID NO: 2033538 - RNA, 19 nt, Artificial Sequence
  Description of Artificial Sequence: Synthetic oligonucleotide
aauguacagcaaagaaaca

SEQ ID NO: 2033539 - RNA, 19 nt, Artificial Sequence
  Description of Artificial Sequence: Synthetic oligonucleotide
aacuccaucauuggcuaaa

SEQ ID NO: 2033540 - RNA, 19 nt, Artificial Sequence
  Description of Artificial Sequence: Synthetic oligonucleotide
uuuccuccaaacuguguau

SEQ ID NO: 2033541 - RNA, 19 nt, Artificial Sequence
  Description of Artificial Sequence: Synthetic oligonucleotide
ucuuuccauucucucuugu

SEQ ID NO: 2033542 - RNA, 19 nt, Artificial Sequence
  Description of Artificial Sequence: Synthetic oligonucleotide
aauuauguguugagauuaa

SEQ ID NO: 2033543 - RNA, 19 nt, Artificial Sequence
  Description of Artificial Sequence: Synthetic oligonucleotide
uucaguccuauuuccccga

SEQ ID NO: 2033544 - RNA, 19 nt, Artificial Sequence
  Description of Artificial Sequence: Synthetic oligonucleotide
acaacgcuguaaccaacug

SEQ ID NO: 2033545 - RNA, 19 nt, Artificial Sequence
  Description of Artificial Sequence: Synthetic oligonucleotide
aaaggggcgcuuuccucca

SEQ ID NO: 2033546 - RNA, 19 nt, Artificial Sequence
  Description of Artificial Sequence: Synthetic oligonucleotide
gucuauaaagauguccauc

SEQ ID NO: 2033547 - RNA, 19 nt, Artificial Sequence
  Description of Artificial Sequence: Synthetic oligonucleotide
ugaugccugccacacugca

SEQ ID NO: 2033548 - RNA, 19 nt, Artificial Sequence
  Description of Artificial Sequence: Synthetic oligonucleotide
cuggagucauaucuucgag

SEQ ID NO: 2033549 - RNA, 19 nt, Artificial Sequence
  Description of Artificial Sequence: Synthetic oligonucleotide
acauuagcauccgacguga

SEQ ID NO: 2033550 - RNA, 19 nt, Artificial Sequence
  Description of Artificial Sequence: Synthetic oligonucleotide
ucagaacauuagcauccga

SEQ ID NO: 2033551 - RNA, 19 nt, Artificial Sequence
  Description of Artificial Sequence: Synthetic oligonucleotide
uccacuuucucagcugaca

SEQ ID NO: 2033552 - RNA, 19 nt, Artificial Sequence
  Description of Artificial Sequence: Synthetic oligonucleotide
guuugauaucgcacaacgc

SEQ ID NO: 2033553 - RNA, 19 nt, Artificial Sequence
  Description of Artificial Sequence: Synthetic oligonucleotide
uugguacaaacgaccuucu

SEQ ID NO: 2033554 - RNA, 19 nt, Artificial Sequence
  Description of Artificial Sequence: Synthetic oligonucleotide
agccuguuugauaucgcac

SEQ ID NO: 2033555 - RNA, 19 nt, Artificial Sequence
  Description of Artificial Sequence: Synthetic oligonucleotide
uccgacgugaugccugcca

SEQ ID NO: 2033556 - RNA, 19 nt, Artificial Sequence
  Description of Artificial Sequence: Synthetic oligonucleotide
agccuuaguucguuaguca

SEQ ID NO: 2033557 - RNA, 19 nt, Artificial Sequence
  Description of Artificial Sequence: Synthetic oligonucleotide
uuauguaacuccggaggaa

SEQ ID NO: 2033558 - RNA, 19 nt, Artificial Sequence
  Description of Artificial Sequence: Synthetic oligonucleotide
ugguacaaacgaccuucug

SEQ ID NO: 2033559 - RNA, 19 nt, Artificial Sequence
  Description of Artificial Sequence: Synthetic oligonucleotide
aaugagccuuaguucguua

SEQ ID NO: 2033560 - RNA, 19 nt, Artificial Sequence
  Description of Artificial Sequence: Synthetic oligonucleotide
aacugcucacacggaauug

SEQ ID NO: 2033561 - RNA, 19 nt, Artificial Sequence
  Description of Artificial Sequence: Synthetic oligonucleotide
aagacuucgucaagaaguu

SEQ ID NO: 2033562 - RNA, 19 nt, Artificial Sequence
  Description of Artificial Sequence: Synthetic oligonucleotide
acaccaaaggggcgcuuuc

SEQ ID NO: 2033563 - RNA, 19 nt, Artificial Sequence
  Description of Artificial Sequence: Synthetic oligonucleotide
cuuaguucguuagucagaa

SEQ ID NO: 2033564 - RNA, 19 nt, Artificial Sequence
  Description of Artificial Sequence: Synthetic oligonucleotide
uuccccgaugaucaaguua

SEQ ID NO: 2033565 - RNA, 19 nt, Artificial Sequence
  Description of Artificial Sequence: Synthetic oligonucleotide
ccacuugguacaaacgacc

SEQ ID NO: 2033566 - RNA, 19 nt, Artificial Sequence
  Description of Artificial Sequence: Synthetic oligonucleotide
aaaaccuuuccggggugga

SEQ ID NO: 2033567 - RNA, 19 nt, Artificial Sequence
  Description of Artificial Sequence: Synthetic oligonucleotide
gucagaacauuagcauccg

SEQ ID NO: 2033568 - RNA, 19 nt, Artificial Sequence
  Description of Artificial Sequence: Synthetic oligonucleotide
accaacugcucacacggaa

SEQ ID NO: 2033569 - RNA, 19 nt, Artificial Sequence
  Description of Artificial Sequence: Synthetic oligonucleotide
gccuuaguucguuagucag

SEQ ID NO: 2033570 - RNA, 19 nt, Artificial Sequence
  Description of Artificial Sequence: Synthetic oligonucleotide
ggcauacuccacuugguac

SEQ ID NO: 2033571 - RNA, 19 nt, Artificial Sequence
  Description of Artificial Sequence: Synthetic oligonucleotide
cugaaguggugccucuaag

SEQ ID NO: 2033572 - RNA, 19 nt, Artificial Sequence
  Description of Artificial Sequence: Synthetic oligonucleotide
aggagcuauaaaauccaug

SEQ ID NO: 2033573 - RNA, 19 nt, Artificial Sequence
  Description of Artificial Sequence: Synthetic oligonucleotide
uggcauacuccacuuggua

SEQ ID NO: 2033574 - RNA, 19 nt, Artificial Sequence
  Description of Artificial Sequence: Synthetic oligonucleotide
agccauguccucauuaagu

SEQ ID NO: 2033575 - RNA, 19 nt, Artificial Sequence
  Description of Artificial Sequence: Synthetic oligonucleotide
auuuccccgaugaucaagu

SEQ ID NO: 2033576 - RNA, 19 nt, Artificial Sequence
  Description of Artificial Sequence: Synthetic oligonucleotide
ugcgccucucugcugcaag

SEQ ID NO: 2033577 - RNA, 19 nt, Artificial Sequence
  Description of Artificial Sequence: Synthetic oligonucleotide
acugcaagccauguccuca

SEQ ID NO: 2033578 - RNA, 19 nt, Artificial Sequence
  Description of Artificial Sequence: Synthetic oligonucleotide
cucucuuguuaguguggcg

SEQ ID NO: 2033579 - RNA, 19 nt, Artificial Sequence
  Description of Artificial Sequence: Synthetic oligonucleotide
agaucagcgccgcuuuacu

SEQ ID NO: 2033580 - RNA, 19 nt, Artificial Sequence
  Description of Artificial Sequence: Synthetic oligonucleotide
guaacuccggaggaaaaga

SEQ ID NO: 2033581 - RNA, 19 nt, Artificial Sequence
  Description of Artificial Sequence: Synthetic oligonucleotide
uugacacggcugcagcacu

SEQ ID NO: 2033582 - RNA, 19 nt, Artificial Sequence
  Description of Artificial Sequence: Synthetic oligonucleotide
gauguugcgccucucugcu

SEQ ID NO: 2033583 - RNA, 19 nt, Artificial Sequence
  Description of Artificial Sequence: Synthetic oligonucleotide
aaacuguguauaagccugu

SEQ ID NO: 2033584 - RNA, 19 nt, Artificial Sequence
  Description of Artificial Sequence: Synthetic oligonucleotide
aguucguuagucagaacau

SEQ ID NO: 2033585 - RNA, 19 nt, Artificial Sequence
  Description of Artificial Sequence: Synthetic oligonucleotide
ggauguugcgccucucugc

SEQ ID NO: 2033586 - RNA, 19 nt, Artificial Sequence
  Description of Artificial Sequence: Synthetic oligonucleotide
uccccaaacaggugcccgc

SEQ ID NO: 2033587 - RNA, 19 nt, Artificial Sequence
  Description of Artificial Sequence: Synthetic oligonucleotide
gagccuuaguucguuaguc

SEQ ID NO: 2033588 - RNA, 19 nt, Artificial Sequence
  Description of Artificial Sequence: Synthetic oligonucleotide
ugacacggcugcagcacug

SEQ ID NO: 2033589 - RNA, 19 nt, Artificial Sequence
  Description of Artificial Sequence: Synthetic oligonucleotide
agcaagugcugauuucaaa

SEQ ID NO: 2033590 - RNA, 19 nt, Artificial Sequence
  Description of Artificial Sequence: Synthetic oligonucleotide
ccucuaaggagcuauaaaa

SEQ ID NO: 2033591 - RNA, 19 nt, Artificial Sequence
  Description of Artificial Sequence: Synthetic oligonucleotide
uagcaagagcaagugcuga

SEQ ID NO: 2033592 - RNA, 19 nt, Artificial Sequence
  Description of Artificial Sequence: Synthetic oligonucleotide
uccaauacauguggcuuuc

SEQ ID NO: 2033593 - RNA, 19 nt, Artificial Sequence
  Description of Artificial Sequence: Synthetic oligonucleotide
gaucagcgccgcuuuacuc

SEQ ID NO: 2033594 - RNA, 19 nt, Artificial Sequence
  Description of Artificial Sequence: Synthetic oligonucleotide
gugcuuaucccagccaaug

SEQ ID NO: 2033595 - RNA, 19 nt, Artificial Sequence
  Description of Artificial Sequence: Synthetic oligonucleotide
ugcagaucagcgccgcuuu

SEQ ID NO: 2033596 - RNA, 19 nt, Artificial Sequence
  Description of Artificial Sequence: Synthetic oligonucleotide
acggaauuggcuccuggua

SEQ ID NO: 2033597 - RNA, 19 nt, Artificial Sequence
  Description of Artificial Sequence: Synthetic oligonucleotide
cauccgacgugaugccugc

SEQ ID NO: 2033598 - RNA, 19 nt, Artificial Sequence
  Description of Artificial Sequence: Synthetic oligonucleotide
uuguggauguugcgccucu

SEQ ID NO: 2033599 - RNA, 19 nt, Artificial Sequence
  Description of Artificial Sequence: Synthetic oligonucleotide
gaauuggcuccugguacug

SEQ ID NO: 2033600 - RNA, 19 nt, Artificial Sequence
  Description of Artificial Sequence: Synthetic oligonucleotide
caagccauguccucauuaa

SEQ ID NO: 2033601 - RNA, 19 nt, Artificial Sequence
  Description of Artificial Sequence: Synthetic oligonucleotide
ccccauaauuuccacuugg

SEQ ID NO: 2033602 - RNA, 19 nt, Artificial Sequence
  Description of Artificial Sequence: Synthetic oligonucleotide
cacggcugcagcacuguug

SEQ ID NO: 2033603 - RNA, 19 nt, Artificial Sequence
  Description of Artificial Sequence: Synthetic oligonucleotide
ugugguccuggagucauau

SEQ ID NO: 2033604 - RNA, 19 nt, Artificial Sequence
  Description of Artificial Sequence: Synthetic oligonucleotide
ccuuaauagcaagagcaag

SEQ ID NO: 2033605 - RNA, 19 nt, Artificial Sequence
  Description of Artificial Sequence: Synthetic oligonucleotide
auccccaaacaggugcccg

SEQ ID NO: 2033606 - RNA, 19 nt, Artificial Sequence
  Description of Artificial Sequence: Synthetic oligonucleotide
uauugugguccuggaguca

SEQ ID NO: 2033607 - RNA, 19 nt, Artificial Sequence
  Description of Artificial Sequence: Synthetic oligonucleotide
gcaccuuaauagcaagagc

SEQ ID NO: 2033608 - RNA, 19 nt, Artificial Sequence
  Description of Artificial Sequence: Synthetic oligonucleotide
acuucgucaagaaguuugu

SEQ ID NO: 2033609 - RNA, 19 nt, Artificial Sequence
  Description of Artificial Sequence: Synthetic oligonucleotide
uuugagcaaugagccuuag

SEQ ID NO: 2033610 - RNA, 19 nt, Artificial Sequence
  Description of Artificial Sequence: Synthetic oligonucleotide
uggcgauuuccacuuucuc

SEQ ID NO: 2033611 - RNA, 19 nt, Artificial Sequence
  Description of Artificial Sequence: Synthetic oligonucleotide
aauuggcuccugguacugu

SEQ ID NO: 2033612 - RNA, 19 nt, Artificial Sequence
  Description of Artificial Sequence: Synthetic oligonucleotide
ugaggacucugaucauggu

SEQ ID NO: 2033613 - RNA, 19 nt, Artificial Sequence
  Description of Artificial Sequence: Synthetic oligonucleotide
uuaguucguuagucagaac

SEQ ID NO: 2033614 - RNA, 19 nt, Artificial Sequence
  Description of Artificial Sequence: Synthetic oligonucleotide
guccaauagcuuccauggc

SEQ ID NO: 2033615 - RNA, 19 nt, Artificial Sequence
  Description of Artificial Sequence: Synthetic oligonucleotide
uuuguggauguugcgccuc

SEQ ID NO: 2033616 - RNA, 19 nt, Artificial Sequence
  Description of Artificial Sequence: Synthetic oligonucleotide
gagucauaucuucgagaca

SEQ ID NO: 2033617 - RNA, 19 nt, Artificial Sequence
  Description of Artificial Sequence: Synthetic oligonucleotide
aaggagcuauaaaauccau

SEQ ID NO: 2033618 - RNA, 19 nt, Artificial Sequence
  Description of Artificial Sequence: Synthetic oligonucleotide
auugugguccuggagucau

SEQ ID NO: 2033619 - RNA, 19 nt, Artificial Sequence
  Description of Artificial Sequence: Synthetic oligonucleotide
cugcuugaggacucugauc

SEQ ID NO: 2033620 - RNA, 19 nt, Artificial Sequence
  Description of Artificial Sequence: Synthetic oligonucleotide
ucgagacauggcuucugaa

SEQ ID NO: 2033621 - RNA, 19 nt, Artificial Sequence
  Description of Artificial Sequence: Synthetic oligonucleotide
cccaauucaguccuauuuc

SEQ ID NO: 2033622 - RNA, 19 nt, Artificial Sequence
  Description of Artificial Sequence: Synthetic oligonucleotide
ccgaugaucaaguuagaga

SEQ ID NO: 2033623 - RNA, 19 nt, Artificial Sequence
  Description of Artificial Sequence: Synthetic oligonucleotide
cuguuugauaucgcacaac

SEQ ID NO: 2033624 - RNA, 19 nt, Artificial Sequence
  Description of Artificial Sequence: Synthetic oligonucleotide
ucuucgagacauggcuucu

SEQ ID NO: 2033625 - RNA, 19 nt, Artificial Sequence
  Description of Artificial Sequence: Synthetic oligonucleotide
cugcaagcagaacuccauc

SEQ ID NO: 2033626 - RNA, 19 nt, Artificial Sequence
  Description of Artificial Sequence: Synthetic oligonucleotide
gcacuguuguuuccaauac

SEQ ID NO: 2033627 - RNA, 19 nt, Artificial Sequence
  Description of Artificial Sequence: Synthetic oligonucleotide
uggcuccugguacuguaau

SEQ ID NO: 2033628 - RNA, 19 nt, Artificial Sequence
  Description of Artificial Sequence: Synthetic oligonucleotide
uacugacauccauugucuu

SEQ ID NO: 2033629 - RNA, 19 nt, Artificial Sequence
  Description of Artificial Sequence: Synthetic oligonucleotide
cuucgucaagaaguuugug

SEQ ID NO: 2033630 - RNA, 19 nt, Artificial Sequence
  Description of Artificial Sequence: Synthetic oligonucleotide
ucaguccuauuuccccgau

SEQ ID NO: 2033631 - RNA, 19 nt, Artificial Sequence
  Description of Artificial Sequence: Synthetic oligonucleotide
cagaucagcgccgcuuuac

SEQ ID NO: 2033632 - RNA, 19 nt, Artificial Sequence
  Description of Artificial Sequence: Synthetic oligonucleotide
ucacucugauacagcugaa

SEQ ID NO: 2033633 - RNA, 19 nt, Artificial Sequence
  Description of Artificial Sequence: Synthetic oligonucleotide
ugccucuaaggagcuauaa

SEQ ID NO: 2033634 - RNA, 19 nt, Artificial Sequence
  Description of Artificial Sequence: Synthetic oligonucleotide
aacuguguauaagccuguu

SEQ ID NO: 2033635 - RNA, 19 nt, Artificial Sequence
  Description of Artificial Sequence: Synthetic oligonucleotide
aaaccuuuccgggguggaa

SEQ ID NO: 2033636 - RNA, 19 nt, Artificial Sequence
  Description of Artificial Sequence: Synthetic oligonucleotide
cugacagcuuacugacauc

SEQ ID NO: 2033637 - RNA, 19 nt, Artificial Sequence
  Description of Artificial Sequence: Synthetic oligonucleotide
ccugguacuguaauaaaua

SEQ ID NO: 2033638 - RNA, 19 nt, Artificial Sequence
  Description of Artificial Sequence: Synthetic oligonucleotide
gagcuauaaaauccaugau

SEQ ID NO: 2033639 - RNA, 19 nt, Artificial Sequence
  Description of Artificial Sequence: Synthetic oligonucleotide
ugcugauuucaaagucauu

SEQ ID NO: 2033640 - RNA, 19 nt, Artificial Sequence
  Description of Artificial Sequence: Synthetic oligonucleotide
caccaaaggggcgcuuucc

SEQ ID NO: 2033641 - RNA, 19 nt, Artificial Sequence
  Description of Artificial Sequence: Synthetic oligonucleotide
agacacgacaaggacccaa

SEQ ID NO: 2033642 - RNA, 19 nt, Artificial Sequence
  Description of Artificial Sequence: Synthetic oligonucleotide
gauaucgcacaacgcugua

SEQ ID NO: 2033643 - RNA, 19 nt, Artificial Sequence
  Description of Artificial Sequence: Synthetic oligonucleotide
auaucgcacaacgcuguaa

SEQ ID NO: 2033644 - RNA, 19 nt, Artificial Sequence
  Description of Artificial Sequence: Synthetic oligonucleotide
cuuugagcaaugagccuua

SEQ ID NO: 2033645 - RNA, 19 nt, Artificial Sequence
  Description of Artificial Sequence: Synthetic oligonucleotide
ucacacggaauuggcuccu

SEQ ID NO: 2033646 - RNA, 19 nt, Artificial Sequence
  Description of Artificial Sequence: Synthetic oligonucleotide
cacuugguacaaacgaccu

SEQ ID NO: 2033647 - RNA, 19 nt, Artificial Sequence
  Description of Artificial Sequence: Synthetic oligonucleotide
uuccgggguggaaggccag

SEQ ID NO: 2033648 - RNA, 19 nt, Artificial Sequence
  Description of Artificial Sequence: Synthetic oligonucleotide
ucuuguuaguguggcgauu

SEQ ID NO: 2033649 - RNA, 19 nt, Artificial Sequence
  Description of Artificial Sequence: Synthetic oligonucleotide
auggcauacuccacuuggu

SEQ ID NO: 2033650 - RNA, 19 nt, Artificial Sequence
  Description of Artificial Sequence: Synthetic oligonucleotide
ugccugccacacugcaagc

SEQ ID NO: 2033651 - RNA, 19 nt, Artificial Sequence
  Description of Artificial Sequence: Synthetic oligonucleotide
agacagugaggggugcaga

SEQ ID NO: 2033652 - RNA, 19 nt, Artificial Sequence
  Description of Artificial Sequence: Synthetic oligonucleotide
caguccuauuuccccgaug

SEQ ID NO: 2033653 - RNA, 19 nt, Artificial Sequence
  Description of Artificial Sequence: Synthetic oligonucleotide
cggaauuggcuccugguac

SEQ ID NO: 2033654 - RNA, 19 nt, Artificial Sequence
  Description of Artificial Sequence: Synthetic oligonucleotide
cacaacgcuguaaccaacu

SEQ ID NO: 2033655 - RNA, 19 nt, Artificial Sequence
  Description of Artificial Sequence: Synthetic oligonucleotide
gcugacagcuuacugacau

SEQ ID NO: 2033656 - RNA, 19 nt, Artificial Sequence
  Description of Artificial Sequence: Synthetic oligonucleotide
uuuccccgaugaucaaguu

SEQ ID NO: 2033657 - RNA, 19 nt, Artificial Sequence
  Description of Artificial Sequence: Synthetic oligonucleotide
gcuccugguacuguaauaa

SEQ ID NO: 2033658 - RNA, 19 nt, Artificial Sequence
  Description of Artificial Sequence: Synthetic oligonucleotide
aaccaacugcucacacgga

SEQ ID NO: 2033659 - RNA, 19 nt, Artificial Sequence
  Description of Artificial Sequence: Synthetic oligonucleotide
gaacuccaucauuggcuaa

SEQ ID NO: 2033660 - RNA, 19 nt, Artificial Sequence
  Description of Artificial Sequence: Synthetic oligonucleotide
cccgaugaucaaguuagag

SEQ ID NO: 2033661 - RNA, 19 nt, Artificial Sequence
  Description of Artificial Sequence: Synthetic oligonucleotide
acacgacaaggacccaauu

SEQ ID NO: 2033662 - RNA, 19 nt, Artificial Sequence
  Description of Artificial Sequence: Synthetic oligonucleotide
guuuguggauguugcgccu

SEQ ID NO: 2033663 - RNA, 19 nt, Artificial Sequence
  Description of Artificial Sequence: Synthetic oligonucleotide
ccaaacaggugcccgcaug

SEQ ID NO: 2033664 - RNA, 19 nt, Artificial Sequence
  Description of Artificial Sequence: Synthetic oligonucleotide
ggaauuggcuccugguacu

SEQ ID NO: 2033665 - RNA, 19 nt, Artificial Sequence
  Description of Artificial Sequence: Synthetic oligonucleotide
guguauaagccuguuugau

SEQ ID NO: 2033666 - RNA, 19 nt, Artificial Sequence
  Description of Artificial Sequence: Synthetic oligonucleotide
agugaggggugcagaucag

SEQ ID NO: 2033667 - RNA, 19 nt, Artificial Sequence
  Description of Artificial Sequence: Synthetic oligonucleotide
gaaacaccaaaggggcgcu

SEQ ID NO: 2033668 - RNA, 19 nt, Artificial Sequence
  Description of Artificial Sequence: Synthetic oligonucleotide
agugcuuaucccagccaau

SEQ ID NO: 2033669 - RNA, 19 nt, Artificial Sequence
  Description of Artificial Sequence: Synthetic oligonucleotide
acgcuguaaccaacugcuc

SEQ ID NO: 2033670 - RNA, 19 nt, Artificial Sequence
  Description of Artificial Sequence: Synthetic oligonucleotide
ccuuaguucguuagucaga

SEQ ID NO: 2033671 - RNA, 19 nt, Artificial Sequence
  Description of Artificial Sequence: Synthetic oligonucleotide
gggucacucugauacagcu

SEQ ID NO: 2033672 - RNA, 19 nt, Artificial Sequence
  Description of Artificial Sequence: Synthetic oligonucleotide
caagagcaagugcugauuu

SEQ ID NO: 2033673 - RNA, 19 nt, Artificial Sequence
  Description of Artificial Sequence: Synthetic oligonucleotide
cgacaaggacccaauucag

SEQ ID NO: 2033674 - RNA, 19 nt, Artificial Sequence
  Description of Artificial Sequence: Synthetic oligonucleotide
auguaacuccggaggaaaa

SEQ ID NO: 2033675 - RNA, 19 nt, Artificial Sequence
  Description of Artificial Sequence: Synthetic oligonucleotide
gcauccgacgugaugccug

SEQ ID NO: 2033676 - RNA, 19 nt, Artificial Sequence
  Description of Artificial Sequence: Synthetic oligonucleotide
uugucuuauuuagcaccuu

SEQ ID NO: 2033677 - RNA, 19 nt, Artificial Sequence
  Description of Artificial Sequence: Synthetic oligonucleotide
auccgacgugaugccugcc

SEQ ID NO: 2033678 - RNA, 19 nt, Artificial Sequence
  Description of Artificial Sequence: Synthetic oligonucleotide
acgaccuucuggagaaaau

SEQ ID NO: 2033679 - RNA, 19 nt, Artificial Sequence
  Description of Artificial Sequence: Synthetic oligonucleotide
agcauccgacgugaugccu

SEQ ID NO: 2033680 - RNA, 19 nt, Artificial Sequence
  Description of Artificial Sequence: Synthetic oligonucleotide
ccaaacuguguauaagccu

SEQ ID NO: 2033681 - RNA, 19 nt, Artificial Sequence
  Description of Artificial Sequence: Synthetic oligonucleotide
ugcaagccauguccucauu

SEQ ID NO: 2033682 - RNA, 19 nt, Artificial Sequence
  Description of Artificial Sequence: Synthetic oligonucleotide
cuguaaccaacugcucaca

SEQ ID NO: 2033683 - RNA, 19 nt, Artificial Sequence
  Description of Artificial Sequence: Synthetic oligonucleotide
uguggauguugcgccucuc

SEQ ID NO: 2033684 - RNA, 19 nt, Artificial Sequence
  Description of Artificial Sequence: Synthetic oligonucleotide
gugcugauuucaaagucau

SEQ ID NO: 2033685 - RNA, 19 nt, Artificial Sequence
  Description of Artificial Sequence: Synthetic oligonucleotide
acgugaugccugccacacu

SEQ ID NO: 2033686 - RNA, 19 nt, Artificial Sequence
  Description of Artificial Sequence: Synthetic oligonucleotide
gcaagccauguccucauua

SEQ ID NO: 2033687 - RNA, 19 nt, Artificial Sequence
  Description of Artificial Sequence: Synthetic oligonucleotide
uugugguccuggagucaua

SEQ ID NO: 2033688 - RNA, 19 nt, Artificial Sequence
  Description of Artificial Sequence: Synthetic oligonucleotide
gacacgacaaggacccaau

SEQ ID NO: 2033689 - RNA, 19 nt, Artificial Sequence
  Description of Artificial Sequence: Synthetic oligonucleotide
aaacgaccuucuggagaaa

SEQ ID NO: 2033690 - RNA, 19 nt, Artificial Sequence
  Description of Artificial Sequence: Synthetic oligonucleotide
aggggcgcuuuccuccaaa

SEQ ID NO: 2033691 - RNA, 19 nt, Artificial Sequence
  Description of Artificial Sequence: Synthetic oligonucleotide
cuauuuccccgaugaucaa

SEQ ID NO: 2033692 - RNA, 19 nt, Artificial Sequence
  Description of Artificial Sequence: Synthetic oligonucleotide
aaacaccaaaggggcgcuu

SEQ ID NO: 2033693 - RNA, 19 nt, Artificial Sequence
  Description of Artificial Sequence: Synthetic oligonucleotide
uccugaaguggugccucua

SEQ ID NO: 2033694 - RNA, 19 nt, Artificial Sequence
  Description of Artificial Sequence: Synthetic oligonucleotide
auguccucauuaaguuuau

SEQ ID NO: 2033695 - RNA, 19 nt, Artificial Sequence
  Description of Artificial Sequence: Synthetic oligonucleotide
agacuucgucaagaaguuu

SEQ ID NO: 2033696 - RNA, 19 nt, Artificial Sequence
  Description of Artificial Sequence: Synthetic oligonucleotide
caauagcuuccauggcaua

SEQ ID NO: 2033697 - RNA, 19 nt, Artificial Sequence
  Description of Artificial Sequence: Synthetic oligonucleotide
ccaacuggacagacacgac

SEQ ID NO: 2033698 - RNA, 19 nt, Artificial Sequence
  Description of Artificial Sequence: Synthetic oligonucleotide
cucuuguuaguguggcgau

SEQ ID NO: 2033699 - RNA, 19 nt, Artificial Sequence
  Description of Artificial Sequence: Synthetic oligonucleotide
ggggugcagaucagcgccg

SEQ ID NO: 2033700 - RNA, 19 nt, Artificial Sequence
  Description of Artificial Sequence: Synthetic oligonucleotide
caacugcucacacggaauu

SEQ ID NO: 2033701 - RNA, 19 nt, Artificial Sequence
  Description of Artificial Sequence: Synthetic oligonucleotide
cagcuuacugacauccauu

SEQ ID NO: 2033702 - RNA, 19 nt, Artificial Sequence
  Description of Artificial Sequence: Synthetic oligonucleotide
ccuguuugauaucgcacaa

SEQ ID NO: 2033703 - RNA, 19 nt, Artificial Sequence
  Description of Artificial Sequence: Synthetic oligonucleotide
ggggcgcuuuccuccaaac

SEQ ID NO: 2033704 - RNA, 19 nt, Artificial Sequence
  Description of Artificial Sequence: Synthetic oligonucleotide
caacauugacacggcugca

SEQ ID NO: 2033705 - RNA, 19 nt, Artificial Sequence
  Description of Artificial Sequence: Synthetic oligonucleotide
ccgacgugaugccugccac

SEQ ID NO: 2033706 - RNA, 19 nt, Artificial Sequence
  Description of Artificial Sequence: Synthetic oligonucleotide
agcugacagcuuacugaca

SEQ ID NO: 2033707 - RNA, 19 nt, Artificial Sequence
  Description of Artificial Sequence: Synthetic oligonucleotide
guucguuagucagaacauu

SEQ ID NO: 2033708 - RNA, 19 nt, Artificial Sequence
  Description of Artificial Sequence: Synthetic oligonucleotide
ccaauagcuuccauggcau

SEQ ID NO: 2033709 - RNA, 19 nt, Artificial Sequence
  Description of Artificial Sequence: Synthetic oligonucleotide
cacacggaauuggcuccug

SEQ ID NO: 2033710 - RNA, 19 nt, Artificial Sequence
  Description of Artificial Sequence: Synthetic oligonucleotide
gacccaauucaguccuauu

SEQ ID NO: 2033711 - RNA, 19 nt, Artificial Sequence
  Description of Artificial Sequence: Synthetic oligonucleotide
ccaauacauguggcuuucc

SEQ ID NO: 2033712 - RNA, 19 nt, Artificial Sequence
  Description of Artificial Sequence: Synthetic oligonucleotide
ccggaggaaaagacaguga

SEQ ID NO: 2033713 - RNA, 19 nt, Artificial Sequence
  Description of Artificial Sequence: Synthetic oligonucleotide
auacuccacuugguacaaa

SEQ ID NO: 2033714 - RNA, 19 nt, Artificial Sequence
  Description of Artificial Sequence: Synthetic oligonucleotide
cagcgccgcuuuacucagc

SEQ ID NO: 2033715 - RNA, 19 nt, Artificial Sequence
  Description of Artificial Sequence: Synthetic oligonucleotide
ggcuccugguacuguaaua

SEQ ID NO: 2033716 - RNA, 19 nt, Artificial Sequence
  Description of Artificial Sequence: Synthetic oligonucleotide
gcuuacugacauccauugu

SEQ ID NO: 2033717 - RNA, 19 nt, Artificial Sequence
  Description of Artificial Sequence: Synthetic oligonucleotide
gcacaacgcuguaaccaac

SEQ ID NO: 2033718 - RNA, 19 nt, Artificial Sequence
  Description of Artificial Sequence: Synthetic oligonucleotide
gggugcagaucagcgccgc

SEQ ID NO: 2033719 - RNA, 19 nt, Artificial Sequence
  Description of Artificial Sequence: Synthetic oligonucleotide
gcauguccaauagcuucca

SEQ ID NO: 2033720 - RNA, 19 nt, Artificial Sequence
  Description of Artificial Sequence: Synthetic oligonucleotide
cgcuuuccuccaaacugug

SEQ ID NO: 2033721 - RNA, 19 nt, Artificial Sequence
  Description of Artificial Sequence: Synthetic oligonucleotide
uugcgccucucugcugcaa

SEQ ID NO: 2033722 - RNA, 19 nt, Artificial Sequence
  Description of Artificial Sequence: Synthetic oligonucleotide
cacuugggucacucugaua

SEQ ID NO: 2033723 - RNA, 19 nt, Artificial Sequence
  Description of Artificial Sequence: Synthetic oligonucleotide
ggcugcagcacuguuguuu

SEQ ID NO: 2033724 - RNA, 19 nt, Artificial Sequence
  Description of Artificial Sequence: Synthetic oligonucleotide
cgcacaacgcuguaaccaa

SEQ ID NO: 2033725 - RNA, 19 nt, Artificial Sequence
  Description of Artificial Sequence: Synthetic oligonucleotide
cugccacacugcaagccau

SEQ ID NO: 2033726 - RNA, 19 nt, Artificial Sequence
  Description of Artificial Sequence: Synthetic oligonucleotide
gcgcuuuccuccaaacugu

SEQ ID NO: 2033727 - RNA, 19 nt, Artificial Sequence
  Description of Artificial Sequence: Synthetic oligonucleotide
gugcagaucagcgccgcuu

SEQ ID NO: 2033728 - RNA, 19 nt, Artificial Sequence
  Description of Artificial Sequence: Synthetic oligonucleotide
caaugagccuuaguucguu

SEQ ID NO: 2033729 - RNA, 19 nt, Artificial Sequence
  Description of Artificial Sequence: Synthetic oligonucleotide
cauuagcauccgacgugau

SEQ ID NO: 2033730 - RNA, 19 nt, Artificial Sequence
  Description of Artificial Sequence: Synthetic oligonucleotide
gggcgcuuuccuccaaacu

SEQ ID NO: 2033731 - RNA, 19 nt, Artificial Sequence
  Description of Artificial Sequence: Synthetic oligonucleotide
gacucugaucauggucuuu

SEQ ID NO: 2033732 - RNA, 19 nt, Artificial Sequence
  Description of Artificial Sequence: Synthetic oligonucleotide
caggugcccgcauguccaa

SEQ ID NO: 2033733 - RNA, 19 nt, Artificial Sequence
  Description of Artificial Sequence: Synthetic oligonucleotide
gcaaugagccuuaguucgu

SEQ ID NO: 2033734 - RNA, 19 nt, Artificial Sequence
  Description of Artificial Sequence: Synthetic oligonucleotide
gcaagagcaagugcugauu

SEQ ID NO: 2033735 - RNA, 19 nt, Artificial Sequence
  Description of Artificial Sequence: Synthetic oligonucleotide
cgaccuucuggagaaaaua

SEQ ID NO: 2033736 - RNA, 19 nt, Artificial Sequence
  Description of Artificial Sequence: Synthetic oligonucleotide
gugccucuaaggagcuaua

SEQ ID NO: 2033737 - RNA, 19 nt, Artificial Sequence
  Description of Artificial Sequence: Synthetic oligonucleotide
ggacccaauucaguccuau

SEQ ID NO: 2033738 - RNA, 19 nt, Artificial Sequence
  Description of Artificial Sequence: Synthetic oligonucleotide
aggacccaauucaguccua

SEQ ID NO: 2033739 - RNA, 19 nt, Artificial Sequence
  Description of Artificial Sequence: Synthetic oligonucleotide
gcagaucagcgccgcuuua

SEQ ID NO: 2033740 - RNA, 19 nt, Artificial Sequence
  Description of Artificial Sequence: Synthetic oligonucleotide
cagacacgacaaggaccca

SEQ ID NO: 2033741 - RNA, 19 nt, Artificial Sequence
  Description of Artificial Sequence: Synthetic oligonucleotide
ggugcagaucagcgccgcu

SEQ ID NO: 2033742 - RNA, 19 nt, Artificial Sequence
  Description of Artificial Sequence: Synthetic oligonucleotide
cgacgugaugccugccaca

SEQ ID NO: 2033743 - RNA, 19 nt, Artificial Sequence
  Description of Artificial Sequence: Synthetic oligonucleotide
ccccaaacaggugcccgca

SEQ ID NO: 2033744 - RNA, 19 nt, Artificial Sequence
  Description of Artificial Sequence: Synthetic oligonucleotide
ccccgaugaucaaguuaga

SEQ ID NO: 2033745 - RNA, 19 nt, Artificial Sequence
  Description of Artificial Sequence: Synthetic oligonucleotide
ccacuugggucacucugau

SEQ ID NO: 2033746 - RNA, 19 nt, Artificial Sequence
  Description of Artificial Sequence: Synthetic oligonucleotide
cggcugcagcacuguuguu

SEQ ID NO: 2033747 - RNA, 19 nt, Artificial Sequence
  Description of Artificial Sequence: Synthetic oligonucleotide
aaaccugugagccaugucc

SEQ ID NO: 2033748 - RNA, 19 nt, Artificial Sequence
  Description of Artificial Sequence: Synthetic oligonucleotide
acugcuauaggccaguggg

SEQ ID NO: 2033749 - RNA, 19 nt, Artificial Sequence
  Description of Artificial Sequence: Synthetic oligonucleotide
cucacuguuccacagaccg

SEQ ID NO: 2033750 - RNA, 19 nt, Artificial Sequence
  Description of Artificial Sequence: Synthetic oligonucleotide
cuuuuggaagacucgaugc

SEQ ID NO: 2033751 - RNA, 19 nt, Artificial Sequence
  Description of Artificial Sequence: Synthetic oligonucleotide
accguuguaacccaaggag

SEQ ID NO: 2033752 - RNA, 19 nt, Artificial Sequence
  Description of Artificial Sequence: Synthetic oligonucleotide
uauucuugggcaaaccugu

SEQ ID NO: 2033753 - RNA, 19 nt, Artificial Sequence
  Description of Artificial Sequence: Synthetic oligonucleotide
ucuugggcaaaccugugag

SEQ ID NO: 2033754 - RNA, 19 nt, Artificial Sequence
  Description of Artificial Sequence: Synthetic oligonucleotide
gacaucacggcacuugggg

SEQ ID NO: 2033755 - RNA, 19 nt, Artificial Sequence
  Description of Artificial Sequence: Synthetic oligonucleotide
ucuuuuggaagacucgaug

SEQ ID NO: 2033756 - RNA, 19 nt, Artificial Sequence
  Description of Artificial Sequence: Synthetic oligonucleotide
uguauucuugggcaaaccu

SEQ ID NO: 2033757 - RNA, 19 nt, Artificial Sequence
  Description of Artificial Sequence: Synthetic oligonucleotide
gaugacacacccugcagag

SEQ ID NO: 2033758 - RNA, 19 nt, Artificial Sequence
  Description of Artificial Sequence: Synthetic oligonucleotide
gaugacuccagccccauac

SEQ ID NO: 2033759 - RNA, 19 nt, Artificial Sequence
  Description of Artificial Sequence: Synthetic oligonucleotide
uuuuggaagacucgaugca

SEQ ID NO: 2033760 - RNA, 19 nt, Artificial Sequence
  Description of Artificial Sequence: Synthetic oligonucleotide
uuggaagacucgaugcagg

SEQ ID NO: 2033761 - RNA, 19 nt, Artificial Sequence
  Description of Artificial Sequence: Synthetic oligonucleotide
aguaagcuccagcaauggc

SEQ ID NO: 2033762 - RNA, 19 nt, Artificial Sequence
  Description of Artificial Sequence: Synthetic oligonucleotide
cuuugacacugcuauaggc

SEQ ID NO: 2033763 - RNA, 19 nt, Artificial Sequence
  Description of Artificial Sequence: Synthetic oligonucleotide
uugaauugggcccgggcag

SEQ ID NO: 2033764 - RNA, 19 nt, Artificial Sequence
  Description of Artificial Sequence: Synthetic oligonucleotide
auugaauugggcccgggca

SEQ ID NO: 2033765 - RNA, 19 nt, Artificial Sequence
  Description of Artificial Sequence: Synthetic oligonucleotide
gaagacucgaugcaggcuc

SEQ ID NO: 2033766 - RNA, 19 nt, Artificial Sequence
  Description of Artificial Sequence: Synthetic oligonucleotide
gaugaggguccucuggagg

SEQ ID NO: 2033767 - RNA, 19 nt, Artificial Sequence
  Description of Artificial Sequence: Synthetic oligonucleotide
uguaacccaaggaggaggc

SEQ ID NO: 2033768 - RNA, 19 nt, Artificial Sequence
  Description of Artificial Sequence: Synthetic oligonucleotide
aucuuugacacugcuauag

SEQ ID NO: 2033769 - RNA, 19 nt, Artificial Sequence
  Description of Artificial Sequence: Synthetic oligonucleotide
auguccaccucgucgaagg

SEQ ID NO: 2033770 - RNA, 19 nt, Artificial Sequence
  Description of Artificial Sequence: Synthetic oligonucleotide
acaucacggcacuuggggc

SEQ ID NO: 2033771 - RNA, 19 nt, Artificial Sequence
  Description of Artificial Sequence: Synthetic oligonucleotide
ucuggaugcagucuggguu

SEQ ID NO: 2033772 - RNA, 19 nt, Artificial Sequence
  Description of Artificial Sequence: Synthetic oligonucleotide
ugagagucgggcaaacuuc

SEQ ID NO: 2033773 - RNA, 19 nt, Artificial Sequence
  Description of Artificial Sequence: Synthetic oligonucleotide
cucuggaggcuguugaagg

SEQ ID NO: 2033774 - RNA, 19 nt, Artificial Sequence
  Description of Artificial Sequence: Synthetic oligonucleotide
ucgucgaaggccucuuugg

SEQ ID NO: 2033775 - RNA, 19 nt, Artificial Sequence
  Description of Artificial Sequence: Synthetic oligonucleotide
acgucugucuccucauagc

SEQ ID NO: 2033776 - RNA, 19 nt, Artificial Sequence
  Description of Artificial Sequence: Synthetic oligonucleotide
uccuucuuguauucuuggg

SEQ ID NO: 2033777 - RNA, 19 nt, Artificial Sequence
  Description of Artificial Sequence: Synthetic oligonucleotide
cugcccuuaggaaugcugg

SEQ ID NO: 2033778 - RNA, 19 nt, Artificial Sequence
  Description of Artificial Sequence: Synthetic oligonucleotide
uggacgcuccuccauaccc

SEQ ID NO: 2033779 - RNA, 19 nt, Artificial Sequence
  Description of Artificial Sequence: Synthetic oligonucleotide
aguagauggcagugggcac

SEQ ID NO: 2033780 - RNA, 19 nt, Artificial Sequence
  Description of Artificial Sequence: Synthetic oligonucleotide
ugcaggauggcaccguugu

SEQ ID NO: 2033781 - RNA, 19 nt, Artificial Sequence
  Description of Artificial Sequence: Synthetic oligonucleotide
gauggcagugggcacagac

SEQ ID NO: 2033782 - RNA, 19 nt, Artificial Sequence
  Description of Artificial Sequence: Synthetic oligonucleotide
ucuuuggcgagcagggacu

SEQ ID NO: 2033783 - RNA, 19 nt, Artificial Sequence
  Description of Artificial Sequence: Synthetic oligonucleotide
gaaggcaccaguuccucac

SEQ ID NO: 2033784 - RNA, 19 nt, Artificial Sequence
  Description of Artificial Sequence: Synthetic oligonucleotide
caacucuuuggcauccagg

SEQ ID NO: 2033785 - RNA, 19 nt, Artificial Sequence
  Description of Artificial Sequence: Synthetic oligonucleotide
ucccauaguaagcuccagc

SEQ ID NO: 2033786 - RNA, 19 nt, Artificial Sequence
  Description of Artificial Sequence: Synthetic oligonucleotide
augacuccagccccauacc

SEQ ID NO: 2033787 - RNA, 19 nt, Artificial Sequence
  Description of Artificial Sequence: Synthetic oligonucleotide
aggagcuucuugaagacag

SEQ ID NO: 2033788 - RNA, 19 nt, Artificial Sequence
  Description of Artificial Sequence: Synthetic oligonucleotide
ucagccugcuggaguaugg

SEQ ID NO: 2033789 - RNA, 19 nt, Artificial Sequence
  Description of Artificial Sequence: Synthetic oligonucleotide
ucauagacaucacggcacu

SEQ ID NO: 2033790 - RNA, 19 nt, Artificial Sequence
  Description of Artificial Sequence: Synthetic oligonucleotide
agcccuuuccauugaauug

SEQ ID NO: 2033791 - RNA, 19 nt, Artificial Sequence
  Description of Artificial Sequence: Synthetic oligonucleotide
cacucuuuuggaagacucg

SEQ ID NO: 2033792 - RNA, 19 nt, Artificial Sequence
  Description of Artificial Sequence: Synthetic oligonucleotide
gucgaaggccucuuuggcg

SEQ ID NO: 2033793 - RNA, 19 nt, Artificial Sequence
  Description of Artificial Sequence: Synthetic oligonucleotide
uccaagaaggcaccaguuc

SEQ ID NO: 2033794 - RNA, 19 nt, Artificial Sequence
  Description of Artificial Sequence: Synthetic oligonucleotide
uagcucagacaccacuucc

SEQ ID NO: 2033795 - RNA, 19 nt, Artificial Sequence
  Description of Artificial Sequence: Synthetic oligonucleotide
ugcaaccuucuucagccug

SEQ ID NO: 2033796 - RNA, 19 nt, Artificial Sequence
  Description of Artificial Sequence: Synthetic oligonucleotide
guauucuugggcaaaccug

SEQ ID NO: 2033797 - RNA, 19 nt, Artificial Sequence
  Description of Artificial Sequence: Synthetic oligonucleotide
gaagguggaggggaucucg

SEQ ID NO: 2033798 - RNA, 19 nt, Artificial Sequence
  Description of Artificial Sequence: Synthetic oligonucleotide
uucugaugggccugacagg

SEQ ID NO: 2033799 - RNA, 19 nt, Artificial Sequence
  Description of Artificial Sequence: Synthetic oligonucleotide
auagacaucacggcacuug

SEQ ID NO: 2033800 - RNA, 19 nt, Artificial Sequence
  Description of Artificial Sequence: Synthetic oligonucleotide
uuaggaaugcuggggcagg

SEQ ID NO: 2033801 - RNA, 19 nt, Artificial Sequence
  Description of Artificial Sequence: Synthetic oligonucleotide
uucccuagcucagacacca

SEQ ID NO: 2033802 - RNA, 19 nt, Artificial Sequence
  Description of Artificial Sequence: Synthetic oligonucleotide
uggaagacucgaugcaggc

SEQ ID NO: 2033803 - RNA, 19 nt, Artificial Sequence
  Description of Artificial Sequence: Synthetic oligonucleotide
uaguaagcuccagcaaugg

SEQ ID NO: 2033804 - RNA, 19 nt, Artificial Sequence
  Description of Artificial Sequence: Synthetic oligonucleotide
acacucuuuuggaagacuc

SEQ ID NO: 2033805 - RNA, 19 nt, Artificial Sequence
  Description of Artificial Sequence: Synthetic oligonucleotide
uucuugggcaaaccuguga

SEQ ID NO: 2033806 - RNA, 19 nt, Artificial Sequence
  Description of Artificial Sequence: Synthetic oligonucleotide
uguccuugguucugauggg

SEQ ID NO: 2033807 - RNA, 19 nt, Artificial Sequence
  Description of Artificial Sequence: Synthetic oligonucleotide
gacucgaaggcagcaaugc

SEQ ID NO: 2033808 - RNA, 19 nt, Artificial Sequence
  Description of Artificial Sequence: Synthetic oligonucleotide
cuccaugcagcgcaggaag

SEQ ID NO: 2033809 - RNA, 19 nt, Artificial Sequence
  Description of Artificial Sequence: Synthetic oligonucleotide
accggccuaagacuccagc

SEQ ID NO: 2033810 - RNA, 19 nt, Artificial Sequence
  Description of Artificial Sequence: Synthetic oligonucleotide
cuggaugcagucuggguug

SEQ ID NO: 2033811 - RNA, 19 nt, Artificial Sequence
  Description of Artificial Sequence: Synthetic oligonucleotide
auacccucugucagggucc

SEQ ID NO: 2033812 - RNA, 19 nt, Artificial Sequence
  Description of Artificial Sequence: Synthetic oligonucleotide
auaguaagcuccagcaaug

SEQ ID NO: 2033813 - RNA, 19 nt, Artificial Sequence
  Description of Artificial Sequence: Synthetic oligonucleotide
cauacccucugucaggguc

SEQ ID NO: 2033814 - RNA, 19 nt, Artificial Sequence
  Description of Artificial Sequence: Synthetic oligonucleotide
ugcccuuaggaaugcuggg

SEQ ID NO: 2033815 - RNA, 19 nt, Artificial Sequence
  Description of Artificial Sequence: Synthetic oligonucleotide
cauugaauugggcccgggc

SEQ ID NO: 2033816 - RNA, 19 nt, Artificial Sequence
  Description of Artificial Sequence: Synthetic oligonucleotide
gagaaccagcuucagguga

SEQ ID NO: 2033817 - RNA, 19 nt, Artificial Sequence
  Description of Artificial Sequence: Synthetic oligonucleotide
cuuaggaaugcuggggcag

SEQ ID NO: 2033818 - RNA, 19 nt, Artificial Sequence
  Description of Artificial Sequence: Synthetic oligonucleotide
agaaccagcuucaggugac

SEQ ID NO: 2033819 - RNA, 19 nt, Artificial Sequence
  Description of Artificial Sequence: Synthetic oligonucleotide
gacaccacuuccucucggc

SEQ ID NO: 2033820 - RNA, 19 nt, Artificial Sequence
  Description of Artificial Sequence: Synthetic oligonucleotide
uccauguggcccacaagcu

SEQ ID NO: 2033821 - RNA, 19 nt, Artificial Sequence
  Description of Artificial Sequence: Synthetic oligonucleotide
cucgaaggcagcaaugcca

SEQ ID NO: 2033822 - RNA, 19 nt, Artificial Sequence
  Description of Artificial Sequence: Synthetic oligonucleotide
ccaagaaggcaccaguucc

SEQ ID NO: 2033823 - RNA, 19 nt, Artificial Sequence
  Description of Artificial Sequence: Synthetic oligonucleotide
agggacugcaccagggccc

SEQ ID NO: 2033824 - RNA, 19 nt, Artificial Sequence
  Description of Artificial Sequence: Synthetic oligonucleotide
uuuggcauccaggaucgac

SEQ ID NO: 2033825 - RNA, 19 nt, Artificial Sequence
  Description of Artificial Sequence: Synthetic oligonucleotide
ugaauugggcccgggcagg

SEQ ID NO: 2033826 - RNA, 19 nt, Artificial Sequence
  Description of Artificial Sequence: Synthetic oligonucleotide
uauggacgcuccuccauac

SEQ ID NO: 2033827 - RNA, 19 nt, Artificial Sequence
  Description of Artificial Sequence: Synthetic oligonucleotide
ucgacugggcaucaccuuc

SEQ ID NO: 2033828 - RNA, 19 nt, Artificial Sequence
  Description of Artificial Sequence: Synthetic oligonucleotide
acagaccggccuaagacuc

SEQ ID NO: 2033829 - RNA, 19 nt, Artificial Sequence
  Description of Artificial Sequence: Synthetic oligonucleotide
cuccauacccaacucuuug

SEQ ID NO: 2033830 - RNA, 19 nt, Artificial Sequence
  Description of Artificial Sequence: Synthetic oligonucleotide
acucuuuuggaagacucga

SEQ ID NO: 2033831 - RNA, 19 nt, Artificial Sequence
  Description of Artificial Sequence: Synthetic oligonucleotide
uggccugcccuuaggaaug

SEQ ID NO: 2033832 - RNA, 19 nt, Artificial Sequence
  Description of Artificial Sequence: Synthetic oligonucleotide
ggaguauggacgcuccucc

SEQ ID NO: 2033833 - RNA, 19 nt, Artificial Sequence
  Description of Artificial Sequence: Synthetic oligonucleotide
cuugggcaaaccugugagc

SEQ ID NO: 2033834 - RNA, 19 nt, Artificial Sequence
  Description of Artificial Sequence: Synthetic oligonucleotide
auggacgcuccuccauacc

SEQ ID NO: 2033835 - RNA, 19 nt, Artificial Sequence
  Description of Artificial Sequence: Synthetic oligonucleotide
auugggcccgggcaggcuc

SEQ ID NO: 2033836 - RNA, 19 nt, Artificial Sequence
  Description of Artificial Sequence: Synthetic oligonucleotide
agauggaguagaugagggu

SEQ ID NO: 2033837 - RNA, 19 nt, Artificial Sequence
  Description of Artificial Sequence: Synthetic oligonucleotide
acuggaugacacacccugc

SEQ ID NO: 2033838 - RNA, 19 nt, Artificial Sequence
  Description of Artificial Sequence: Synthetic oligonucleotide
uucuuguauucuugggcaa

SEQ ID NO: 2033839 - RNA, 19 nt, Artificial Sequence
  Description of Artificial Sequence: Synthetic oligonucleotide
gucagcugggcugagaguc

SEQ ID NO: 2033840 - RNA, 19 nt, Artificial Sequence
  Description of Artificial Sequence: Synthetic oligonucleotide
uccacagaccggccuaaga

SEQ ID NO: 2033841 - RNA, 19 nt, Artificial Sequence
  Description of Artificial Sequence: Synthetic oligonucleotide
aagguggaggggaucucgg

SEQ ID NO: 2033842 - RNA, 19 nt, Artificial Sequence
  Description of Artificial Sequence: Synthetic oligonucleotide
aaccugugagccaugucca

SEQ ID NO: 2033843 - RNA, 19 nt, Artificial Sequence
  Description of Artificial Sequence: Synthetic oligonucleotide
cuuguauucuugggcaaac

SEQ ID NO: 2033844 - RNA, 19 nt, Artificial Sequence
  Description of Artificial Sequence: Synthetic oligonucleotide
ucuuguauucuugggcaaa

SEQ ID NO: 2033845 - RNA, 19 nt, Artificial Sequence
  Description of Artificial Sequence: Synthetic oligonucleotide
uaacccaaggaggaggcau

SEQ ID NO: 2033846 - RNA, 19 nt, Artificial Sequence
  Description of Artificial Sequence: Synthetic oligonucleotide
cacaagcugcuugaggaag

SEQ ID NO: 2033847 - RNA, 19 nt, Artificial Sequence
  Description of Artificial Sequence: Synthetic oligonucleotide
gcccuuuccauugaauugg

SEQ ID NO: 2033848 - RNA, 19 nt, Artificial Sequence
  Description of Artificial Sequence: Synthetic oligonucleotide
agcuauggugucugugucu

SEQ ID NO: 2033849 - RNA, 19 nt, Artificial Sequence
  Description of Artificial Sequence: Synthetic oligonucleotide
ccaucccauaguaagcucc

SEQ ID NO: 2033850 - RNA, 19 nt, Artificial Sequence
  Description of Artificial Sequence: Synthetic oligonucleotide
ccguuguaacccaaggagg

SEQ ID NO: 2033851 - RNA, 19 nt, Artificial Sequence
  Description of Artificial Sequence: Synthetic oligonucleotide
cacacacucuuuuggaaga

SEQ ID NO: 2033852 - RNA, 19 nt, Artificial Sequence
  Description of Artificial Sequence: Synthetic oligonucleotide
acacacucuuuuggaagac

SEQ ID NO: 2033853 - RNA, 19 nt, Artificial Sequence
  Description of Artificial Sequence: Synthetic oligonucleotide
cacugcuauaggccagugg

SEQ ID NO: 2033854 - RNA, 19 nt, Artificial Sequence
  Description of Artificial Sequence: Synthetic oligonucleotide
ggaagugcucacuggauga

SEQ ID NO: 2033855 - RNA, 19 nt, Artificial Sequence
  Description of Artificial Sequence: Synthetic oligonucleotide
agccccauacccucuguca

SEQ ID NO: 2033856 - RNA, 19 nt, Artificial Sequence
  Description of Artificial Sequence: Synthetic oligonucleotide
cuaggugcacagccagugc

SEQ ID NO: 2033857 - RNA, 19 nt, Artificial Sequence
  Description of Artificial Sequence: Synthetic oligonucleotide
agucgggcaaacuucugua

SEQ ID NO: 2033858 - RNA, 19 nt, Artificial Sequence
  Description of Artificial Sequence: Synthetic oligonucleotide
augacacacccugcagagc

SEQ ID NO: 2033859 - RNA, 19 nt, Artificial Sequence
  Description of Artificial Sequence: Synthetic oligonucleotide
ccugcuggaguauggacgc

SEQ ID NO: 2033860 - RNA, 19 nt, Artificial Sequence
  Description of Artificial Sequence: Synthetic oligonucleotide
cucgucgaaggccucuuug

SEQ ID NO: 2033861 - RNA, 19 nt, Artificial Sequence
  Description of Artificial Sequence: Synthetic oligonucleotide
ggcugugacccucacacac

SEQ ID NO: 2033862 - RNA, 19 nt, Artificial Sequence
  Description of Artificial Sequence: Synthetic oligonucleotide
aacccaaggaggaggcaug

SEQ ID NO: 2033863 - RNA, 19 nt, Artificial Sequence
  Description of Artificial Sequence: Synthetic oligonucleotide
cauggcggugucaucugug

SEQ ID NO: 2033864 - RNA, 19 nt, Artificial Sequence
  Description of Artificial Sequence: Synthetic oligonucleotide
cauacccaacucuuuggca

SEQ ID NO: 2033865 - RNA, 19 nt, Artificial Sequence
  Description of Artificial Sequence: Synthetic oligonucleotide
aagugcucacuggaugaca

SEQ ID NO: 2033866 - RNA, 19 nt, Artificial Sequence
  Description of Artificial Sequence: Synthetic oligonucleotide
gacucuggaugcagucugg

SEQ ID NO: 2033867 - RNA, 19 nt, Artificial Sequence
  Description of Artificial Sequence: Synthetic oligonucleotide
caccaagugagauggagua

SEQ ID NO: 2033868 - RNA, 19 nt, Artificial Sequence
  Description of Artificial Sequence: Synthetic oligonucleotide
accaagugagauggaguag

SEQ ID NO: 2033869 - RNA, 19 nt, Artificial Sequence
  Description of Artificial Sequence: Synthetic oligonucleotide
gaggcuguugaagguggag

SEQ ID NO: 2033870 - RNA, 19 nt, Artificial Sequence
  Description of Artificial Sequence: Synthetic oligonucleotide
ggaucgacugggcaucacc

SEQ ID NO: 2033871 - RNA, 19 nt, Artificial Sequence
  Description of Artificial Sequence: Synthetic oligonucleotide
agaaggcaccaguuccuca

SEQ ID NO: 2033872 - RNA, 19 nt, Artificial Sequence
  Description of Artificial Sequence: Synthetic oligonucleotide
gggucagcugggcugagag

SEQ ID NO: 2033873 - RNA, 19 nt, Artificial Sequence
  Description of Artificial Sequence: Synthetic oligonucleotide
gaucucggggucaggcucc

SEQ ID NO: 2033874 - RNA, 19 nt, Artificial Sequence
  Description of Artificial Sequence: Synthetic oligonucleotide
cagcaaugccauucccuag

SEQ ID NO: 2033875 - RNA, 19 nt, Artificial Sequence
  Description of Artificial Sequence: Synthetic oligonucleotide
gaugggccugacagggccg

SEQ ID NO: 2033876 - RNA, 19 nt, Artificial Sequence
  Description of Artificial Sequence: Synthetic oligonucleotide
gaagugcucacuggaugac

SEQ ID NO: 2033877 - RNA, 19 nt, Artificial Sequence
  Description of Artificial Sequence: Synthetic oligonucleotide
cagacaccacuuccucucg

SEQ ID NO: 2033878 - RNA, 19 nt, Artificial Sequence
  Description of Artificial Sequence: Synthetic oligonucleotide
uccauugaauugggcccgg

SEQ ID NO: 2033879 - RNA, 19 nt, Artificial Sequence
  Description of Artificial Sequence: Synthetic oligonucleotide
gucgggcaaacuucuguac

SEQ ID NO: 2033880 - RNA, 19 nt, Artificial Sequence
  Description of Artificial Sequence: Synthetic oligonucleotide
cuugguucugaugggccug

SEQ ID NO: 2033881 - RNA, 19 nt, Artificial Sequence
  Description of Artificial Sequence: Synthetic oligonucleotide
ggccuaagacuccagcccc

SEQ ID NO: 2033882 - RNA, 19 nt, Artificial Sequence
  Description of Artificial Sequence: Synthetic oligonucleotide
cuuccucucggcucaccac

SEQ ID NO: 2033883 - RNA, 19 nt, Artificial Sequence
  Description of Artificial Sequence: Synthetic oligonucleotide
aaggccucuuuggcgagca

SEQ ID NO: 2033884 - RNA, 19 nt, Artificial Sequence
  Description of Artificial Sequence: Synthetic oligonucleotide
cccauaguaagcuccagca

SEQ ID NO: 2033885 - RNA, 19 nt, Artificial Sequence
  Description of Artificial Sequence: Synthetic oligonucleotide
caucccauaguaagcucca

SEQ ID NO: 2033886 - RNA, 19 nt, Artificial Sequence
  Description of Artificial Sequence: Synthetic oligonucleotide
guagauggcagugggcaca

SEQ ID NO: 2033887 - RNA, 19 nt, Artificial Sequence
  Description of Artificial Sequence: Synthetic oligonucleotide
cccucacacacucuuuugg

SEQ ID NO: 2033888 - RNA, 19 nt, Artificial Sequence
  Description of Artificial Sequence: Synthetic oligonucleotide
gcaugggucagcugggcug

SEQ ID NO: 2033889 - RNA, 19 nt, Artificial Sequence
  Description of Artificial Sequence: Synthetic oligonucleotide
ccacagaccggccuaagac

SEQ ID NO: 2033890 - RNA, 19 nt, Artificial Sequence
  Description of Artificial Sequence: Synthetic oligonucleotide
ugugacccucacacacucu

SEQ ID NO: 2033891 - RNA, 19 nt, Artificial Sequence
  Description of Artificial Sequence: Synthetic oligonucleotide
cuauggugucugugucucc

SEQ ID NO: 2033892 - RNA, 19 nt, Artificial Sequence
  Description of Artificial Sequence: Synthetic oligonucleotide
ccauacccaacucuuuggc

SEQ ID NO: 2033893 - RNA, 19 nt, Artificial Sequence
  Description of Artificial Sequence: Synthetic oligonucleotide
cuaagacuccagccccaag

SEQ ID NO: 2033894 - RNA, 19 nt, Artificial Sequence
  Description of Artificial Sequence: Synthetic oligonucleotide
ugucuccaccaagugagau

SEQ ID NO: 2033895 - RNA, 19 nt, Artificial Sequence
  Description of Artificial Sequence: Synthetic oligonucleotide
gaguauggacgcuccucca

SEQ ID NO: 2033896 - RNA, 19 nt, Artificial Sequence
  Description of Artificial Sequence: Synthetic oligonucleotide
aucacggcacuuggggcuc

SEQ ID NO: 2033897 - RNA, 19 nt, Artificial Sequence
  Description of Artificial Sequence: Synthetic oligonucleotide
aagacucgaugcaggcucu

SEQ ID NO: 2033898 - RNA, 19 nt, Artificial Sequence
  Description of Artificial Sequence: Synthetic oligonucleotide
agagcuaggugcacagcca

SEQ ID NO: 2033899 - RNA, 19 nt, Artificial Sequence
  Description of Artificial Sequence: Synthetic oligonucleotide
gagucgggcaaacuucugu

SEQ ID NO: 2033900 - RNA, 19 nt, Artificial Sequence
  Description of Artificial Sequence: Synthetic oligonucleotide
cccuuaggaaugcuggggc

SEQ ID NO: 2033901 - RNA, 19 nt, Artificial Sequence
  Description of Artificial Sequence: Synthetic oligonucleotide
auggcaccguuguaaccca

SEQ ID NO: 2033902 - RNA, 19 nt, Artificial Sequence
  Description of Artificial Sequence: Synthetic oligonucleotide
gagcccuuuccauugaauu

SEQ ID NO: 2033903 - RNA, 19 nt, Artificial Sequence
  Description of Artificial Sequence: Synthetic oligonucleotide
ggaaugcuggggcaggaga

SEQ ID NO: 2033904 - RNA, 19 nt, Artificial Sequence
  Description of Artificial Sequence: Synthetic oligonucleotide
agugaugacuccagcccca

SEQ ID NO: 2033905 - RNA, 19 nt, Artificial Sequence
  Description of Artificial Sequence: Synthetic oligonucleotide
cagaccggccuaagacucc

SEQ ID NO: 2033906 - RNA, 19 nt, Artificial Sequence
  Description of Artificial Sequence: Synthetic oligonucleotide
gcuaggugcacagccagug

SEQ ID NO: 2033907 - RNA, 19 nt, Artificial Sequence
  Description of Artificial Sequence: Synthetic oligonucleotide
caccguuguaacccaagga

SEQ ID NO: 2033908 - RNA, 19 nt, Artificial Sequence
  Description of Artificial Sequence: Synthetic oligonucleotide
aggcaugggucagcugggc

SEQ ID NO: 2033909 - RNA, 19 nt, Artificial Sequence
  Description of Artificial Sequence: Synthetic oligonucleotide
gaucgacugggcaucaccu

SEQ ID NO: 2033910 - RNA, 19 nt, Artificial Sequence
  Description of Artificial Sequence: Synthetic oligonucleotide
cugaugggccugacagggc

SEQ ID NO: 2033911 - RNA, 19 nt, Artificial Sequence
  Description of Artificial Sequence: Synthetic oligonucleotide
ggaucucggggucaggcuc

SEQ ID NO: 2033912 - RNA, 19 nt, Artificial Sequence
  Description of Artificial Sequence: Synthetic oligonucleotide
ccccauugccauaggagcc

SEQ ID NO: 2033913 - RNA, 19 nt, Artificial Sequence
  Description of Artificial Sequence: Synthetic oligonucleotide
gaggggaucucggggucag

SEQ ID NO: 2033914 - RNA, 19 nt, Artificial Sequence
  Description of Artificial Sequence: Synthetic oligonucleotide
ugacccucacacacucuuu

SEQ ID NO: 2033915 - RNA, 19 nt, Artificial Sequence
  Description of Artificial Sequence: Synthetic oligonucleotide
gcuguugaagguggagggg

SEQ ID NO: 2033916 - RNA, 19 nt, Artificial Sequence
  Description of Artificial Sequence: Synthetic oligonucleotide
ccggccuaagacuccagcc

SEQ ID NO: 2033917 - RNA, 19 nt, Artificial Sequence
  Description of Artificial Sequence: Synthetic oligonucleotide
gaauugggcccgggcaggc

SEQ ID NO: 2033918 - RNA, 19 nt, Artificial Sequence
  Description of Artificial Sequence: Synthetic oligonucleotide
cgucugucuccucauagcc

SEQ ID NO: 2033919 - RNA, 19 nt, Artificial Sequence
  Description of Artificial Sequence: Synthetic oligonucleotide
cauguccaccucgucgaag

SEQ ID NO: 2033920 - RNA, 19 nt, Artificial Sequence
  Description of Artificial Sequence: Synthetic oligonucleotide
gccccauacccucugucag

SEQ ID NO: 2033921 - RNA, 19 nt, Artificial Sequence
  Description of Artificial Sequence: Synthetic oligonucleotide
gcuauaggccagugggaug

SEQ ID NO: 2033922 - RNA, 19 nt, Artificial Sequence
  Description of Artificial Sequence: Synthetic oligonucleotide
caaaccugugagccauguc

SEQ ID NO: 2033923 - RNA, 19 nt, Artificial Sequence
  Description of Artificial Sequence: Synthetic oligonucleotide
guauggacgcuccuccaua

SEQ ID NO: 2033924 - RNA, 19 nt, Artificial Sequence
  Description of Artificial Sequence: Synthetic oligonucleotide
cccggggugucacacagcc

SEQ ID NO: 2033925 - RNA, 19 nt, Artificial Sequence
  Description of Artificial Sequence: Synthetic oligonucleotide
caagaaggcaccaguuccu

SEQ ID NO: 2033926 - RNA, 19 nt, Artificial Sequence
  Description of Artificial Sequence: Synthetic oligonucleotide
cugcaggauggcaccguug

SEQ ID NO: 2033927 - RNA, 19 nt, Artificial Sequence
  Description of Artificial Sequence: Synthetic oligonucleotide
ggcccgggcaggcucauag

SEQ ID NO: 2033928 - RNA, 19 nt, Artificial Sequence
  Description of Artificial Sequence: Synthetic oligonucleotide
cugcuauaggccaguggga

SEQ ID NO: 2033929 - RNA, 19 nt, Artificial Sequence
  Description of Artificial Sequence: Synthetic oligonucleotide
gacgcuccuccauacccaa

SEQ ID NO: 2033930 - RNA, 19 nt, Artificial Sequence
  Description of Artificial Sequence: Synthetic oligonucleotide
gcuauggugucugugucuc

SEQ ID NO: 2033931 - RNA, 19 nt, Artificial Sequence
  Description of Artificial Sequence: Synthetic oligonucleotide
aucgacugggcaucaccuu

SEQ ID NO: 2033932 - RNA, 19 nt, Artificial Sequence
  Description of Artificial Sequence: Synthetic oligonucleotide
cuuggccugcccuuaggaa

SEQ ID NO: 2033933 - RNA, 19 nt, Artificial Sequence
  Description of Artificial Sequence: Synthetic oligonucleotide
auucuugggcaaaccugug

SEQ ID NO: 2033934 - RNA, 19 nt, Artificial Sequence
  Description of Artificial Sequence: Synthetic oligonucleotide
caucacggcacuuggggcu

SEQ ID NO: 2033935 - RNA, 19 nt, Artificial Sequence
  Description of Artificial Sequence: Synthetic oligonucleotide
uauaggccagugggaugcc

SEQ ID NO: 2033936 - RNA, 19 nt, Artificial Sequence
  Description of Artificial Sequence: Synthetic oligonucleotide
cccaagggagcccuuggcc

SEQ ID NO: 2033937 - RNA, 19 nt, Artificial Sequence
  Description of Artificial Sequence: Synthetic oligonucleotide
cauagcccucacagcuuug

SEQ ID NO: 2033938 - RNA, 19 nt, Artificial Sequence
  Description of Artificial Sequence: Synthetic oligonucleotide
cuuuggcgagcagggacug

SEQ ID NO: 2033939 - RNA, 19 nt, Artificial Sequence
  Description of Artificial Sequence: Synthetic oligonucleotide
aauugggcccgggcaggcu

SEQ ID NO: 2033940 - RNA, 19 nt, Artificial Sequence
  Description of Artificial Sequence: Synthetic oligonucleotide
gugggaugccugccacccg

SEQ ID NO: 2033941 - RNA, 19 nt, Artificial Sequence
  Description of Artificial Sequence: Synthetic oligonucleotide
aucccauaguaagcuccag

SEQ ID NO: 2033942 - RNA, 19 nt, Artificial Sequence
  Description of Artificial Sequence: Synthetic oligonucleotide
gagagucgggcaaacuucu

SEQ ID NO: 2033943 - RNA, 19 nt, Artificial Sequence
  Description of Artificial Sequence: Synthetic oligonucleotide
gcaaccuucuucagccugc

SEQ ID NO: 2033944 - RNA, 19 nt, Artificial Sequence
  Description of Artificial Sequence: Synthetic oligonucleotide
guacaucuuugacacugcu

SEQ ID NO: 2033945 - RNA, 19 nt, Artificial Sequence
  Description of Artificial Sequence: Synthetic oligonucleotide
cacagaccggccuaagacu

SEQ ID NO: 2033946 - RNA, 19 nt, Artificial Sequence
  Description of Artificial Sequence: Synthetic oligonucleotide
gcuccaucccauaguaagc

SEQ ID NO: 2033947 - RNA, 19 nt, Artificial Sequence
  Description of Artificial Sequence: Synthetic oligonucleotide
ccaagugagauggaguaga

SEQ ID NO: 2033948 - RNA, 19 nt, Artificial Sequence
  Description of Artificial Sequence: Synthetic oligonucleotide
gucaggguccuucuuguau

SEQ ID NO: 2033949 - RNA, 19 nt, Artificial Sequence
  Description of Artificial Sequence: Synthetic oligonucleotide
ccugcccuuaggaaugcug

SEQ ID NO: 2033950 - RNA, 19 nt, Artificial Sequence
  Description of Artificial Sequence: Synthetic oligonucleotide
cccauacccucugucaggg

SEQ ID NO: 2033951 - RNA, 19 nt, Artificial Sequence
  Description of Artificial Sequence: Synthetic oligonucleotide
cugagagucgggcaaacuu

SEQ ID NO: 2033952 - RNA, 19 nt, Artificial Sequence
  Description of Artificial Sequence: Synthetic oligonucleotide
agaccggccuaagacucca

SEQ ID NO: 2033953 - RNA, 19 nt, Artificial Sequence
  Description of Artificial Sequence: Synthetic oligonucleotide
gccauucccuagcucagac

SEQ ID NO: 2033954 - RNA, 19 nt, Artificial Sequence
  Description of Artificial Sequence: Synthetic oligonucleotide
uuccacagaccggccuaag

SEQ ID NO: 2033955 - RNA, 19 nt, Artificial Sequence
  Description of Artificial Sequence: Synthetic oligonucleotide
aggaucgacugggcaucac

SEQ ID NO: 2033956 - RNA, 19 nt, Artificial Sequence
  Description of Artificial Sequence: Synthetic oligonucleotide
ugguagcuauggugucugu

SEQ ID NO: 2033957 - RNA, 19 nt, Artificial Sequence
  Description of Artificial Sequence: Synthetic oligonucleotide
caugggucagcugggcuga

SEQ ID NO: 2033958 - RNA, 19 nt, Artificial Sequence
  Description of Artificial Sequence: Synthetic oligonucleotide
ggcgagcagggacugcacc

SEQ ID NO: 2033959 - RNA, 19 nt, Artificial Sequence
  Description of Artificial Sequence: Synthetic oligonucleotide
agucuggguuguccuuggu

SEQ ID NO: 2033960 - RNA, 19 nt, Artificial Sequence
  Description of Artificial Sequence: Synthetic oligonucleotide
aggcugugacccucacaca

SEQ ID NO: 2033961 - RNA, 19 nt, Artificial Sequence
  Description of Artificial Sequence: Synthetic oligonucleotide
ccccauacccucugucagg

SEQ ID NO: 2033962 - RNA, 19 nt, Artificial Sequence
  Description of Artificial Sequence: Synthetic oligonucleotide
gccaugguagcuauggugu

SEQ ID NO: 2033963 - RNA, 19 nt, Artificial Sequence
  Description of Artificial Sequence: Synthetic oligonucleotide
gcuggaguauggacgcucc

SEQ ID NO: 2033964 - RNA, 19 nt, Artificial Sequence
  Description of Artificial Sequence: Synthetic oligonucleotide
cggccuaagacuccagccc

SEQ ID NO: 2033965 - RNA, 19 nt, Artificial Sequence
  Description of Artificial Sequence: Synthetic oligonucleotide
gguucugaugggccugaca

SEQ ID NO: 2033966 - RNA, 19 nt, Artificial Sequence
  Description of Artificial Sequence: Synthetic oligonucleotide
cccauugccauaggagccc

SEQ ID NO: 2033967 - RNA, 19 nt, Artificial Sequence
  Description of Artificial Sequence: Synthetic oligonucleotide
gugacccucacacacucuu

SEQ ID NO: 2033968 - RNA, 19 nt, Artificial Sequence
  Description of Artificial Sequence: Synthetic oligonucleotide
ggcaccguuguaacccaag

SEQ ID NO: 2033969 - RNA, 19 nt, Artificial Sequence
  Description of Artificial Sequence: Synthetic oligonucleotide
gcgagcagggacugcacca

SEQ ID NO: 2033970 - RNA, 19 nt, Artificial Sequence
  Description of Artificial Sequence: Synthetic oligonucleotide
ggccaggacgucugucucc

SEQ ID NO: 2033971 - RNA, 19 nt, Artificial Sequence
  Description of Artificial Sequence: Synthetic oligonucleotide
gacuccagccccauacccu

SEQ ID NO: 2033972 - RNA, 19 nt, Artificial Sequence
  Description of Artificial Sequence: Synthetic oligonucleotide
ucccuagcucagacaccac

SEQ ID NO: 2033973 - RNA, 19 nt, Artificial Sequence
  Description of Artificial Sequence: Synthetic oligonucleotide
agagucgggcaaacuucug

SEQ ID NO: 2033974 - RNA, 19 nt, Artificial Sequence
  Description of Artificial Sequence: Synthetic oligonucleotide
caucuuugacacugcuaua

SEQ ID NO: 2033975 - RNA, 19 nt, Artificial Sequence
  Description of Artificial Sequence: Synthetic oligonucleotide
gacacugcuauaggccagu

SEQ ID NO: 2033976 - RNA, 19 nt, Artificial Sequence
  Description of Artificial Sequence: Synthetic oligonucleotide
uggcaccguuguaacccaa

SEQ ID NO: 2033977 - RNA, 19 nt, Artificial Sequence
  Description of Artificial Sequence: Synthetic oligonucleotide
cucuuuuggaagacucgau

SEQ ID NO: 2033978 - RNA, 19 nt, Artificial Sequence
  Description of Artificial Sequence: Synthetic oligonucleotide
agccccaagggagcccuug

SEQ ID NO: 2033979 - RNA, 19 nt, Artificial Sequence
  Description of Artificial Sequence: Synthetic oligonucleotide
ggugucacacagcccugca

SEQ ID NO: 2033980 - RNA, 19 nt, Artificial Sequence
  Description of Artificial Sequence: Synthetic oligonucleotide
gccccaagggagcccuugg

SEQ ID NO: 2033981 - RNA, 19 nt, Artificial Sequence
  Description of Artificial Sequence: Synthetic oligonucleotide
caugguagcuauggugucu

SEQ ID NO: 2033982 - RNA, 19 nt, Artificial Sequence
  Description of Artificial Sequence: Synthetic oligonucleotide
agacucgaugcaggcucug

SEQ ID NO: 2033983 - RNA, 19 nt, Artificial Sequence
  Description of Artificial Sequence: Synthetic oligonucleotide
guaacccaaggaggaggca

SEQ ID NO: 2033984 - RNA, 19 nt, Artificial Sequence
  Description of Artificial Sequence: Synthetic oligonucleotide
caagugagauggaguagau

SEQ ID NO: 2033985 - RNA, 19 nt, Artificial Sequence
  Description of Artificial Sequence: Synthetic oligonucleotide
acgcuccuccauacccaac

SEQ ID NO: 2033986 - RNA, 19 nt, Artificial Sequence
  Description of Artificial Sequence: Synthetic oligonucleotide
cucuggaugcagucugggu

SEQ ID NO: 2033987 - RNA, 19 nt, Artificial Sequence
  Description of Artificial Sequence: Synthetic oligonucleotide
cacuuggggcucaggagcu

SEQ ID NO: 2033988 - RNA, 19 nt, Artificial Sequence
  Description of Artificial Sequence: Synthetic oligonucleotide
gccauggcggugucaucug

SEQ ID NO: 2033989 - RNA, 19 nt, Artificial Sequence
  Description of Artificial Sequence: Synthetic oligonucleotide
ccauaguaagcuccagcaa

SEQ ID NO: 2033990 - RNA, 19 nt, Artificial Sequence
  Description of Artificial Sequence: Synthetic oligonucleotide
acggcacuuggggcucagg

SEQ ID NO: 2033991 - RNA, 19 nt, Artificial Sequence
  Description of Artificial Sequence: Synthetic oligonucleotide
gaccggccuaagacuccag

SEQ ID NO: 2033992 - RNA, 19 nt, Artificial Sequence
  Description of Artificial Sequence: Synthetic oligonucleotide
guuccacagaccggccuaa

SEQ ID NO: 2033993 - RNA, 19 nt, Artificial Sequence
  Description of Artificial Sequence: Synthetic oligonucleotide
cacuuccucucggcucacc

SEQ ID NO: 2033994 - RNA, 19 nt, Artificial Sequence
  Description of Artificial Sequence: Synthetic oligonucleotide
ggccgcugaggcugugacc

SEQ ID NO: 2033995 - RNA, 19 nt, Artificial Sequence
  Description of Artificial Sequence: Synthetic oligonucleotide
ggacgcuccuccauaccca

SEQ ID NO: 2033996 - RNA, 19 nt, Artificial Sequence
  Description of Artificial Sequence: Synthetic oligonucleotide
uggccauggcggugucauc

SEQ ID NO: 2033997 - RNA, 19 nt, Artificial Sequence
  Description of Artificial Sequence: Synthetic oligonucleotide
cacacucuuuuggaagacu

SEQ ID NO: 2033998 - RNA, 19 nt, Artificial Sequence
  Description of Artificial Sequence: Synthetic oligonucleotide
ccuuggccugcccuuagga

SEQ ID NO: 2033999 - RNA, 19 nt, Artificial Sequence
  Description of Artificial Sequence: Synthetic oligonucleotide
gaaccagcuucaggugacu

SEQ ID NO: 2034000 - RNA, 19 nt, Artificial Sequence
  Description of Artificial Sequence: Synthetic oligonucleotide
ggcaccaguuccucacugu

SEQ ID NO: 2034001 - RNA, 19 nt, Artificial Sequence
  Description of Artificial Sequence: Synthetic oligonucleotide
ccauugaauugggcccggg

SEQ ID NO: 2034002 - RNA, 19 nt, Artificial Sequence
  Description of Artificial Sequence: Synthetic oligonucleotide
ggaagacucgaugcaggcu

SEQ ID NO: 2034003 - RNA, 19 nt, Artificial Sequence
  Description of Artificial Sequence: Synthetic oligonucleotide
accucgucgaaggccucuu

SEQ ID NO: 2034004 - RNA, 19 nt, Artificial Sequence
  Description of Artificial Sequence: Synthetic oligonucleotide
ccaugcagcgcaggaagca

SEQ ID NO: 2034005 - RNA, 19 nt, Artificial Sequence
  Description of Artificial Sequence: Synthetic oligonucleotide
gggaucucggggucaggcu

SEQ ID NO: 2034006 - RNA, 19 nt, Artificial Sequence
  Description of Artificial Sequence: Synthetic oligonucleotide
cacggcacuuggggcucag

SEQ ID NO: 2034007 - RNA, 19 nt, Artificial Sequence
  Description of Artificial Sequence: Synthetic oligonucleotide
ccuugguucugaugggccu

SEQ ID NO: 2034008 - RNA, 19 nt, Artificial Sequence
  Description of Artificial Sequence: Synthetic oligonucleotide
ggcaaaccugugagccaug

SEQ ID NO: 2034009 - RNA, 19 nt, Artificial Sequence
  Description of Artificial Sequence: Synthetic oligonucleotide
gggcaaaccugugagccau

SEQ ID NO: 2034010 - RNA, 19 nt, Artificial Sequence
  Description of Artificial Sequence: Synthetic oligonucleotide
ggaguagaugaggguccuc

SEQ ID NO: 2034011 - RNA, 19 nt, Artificial Sequence
  Description of Artificial Sequence: Synthetic oligonucleotide
ccggggugucacacagccc

SEQ ID NO: 2034012 - RNA, 19 nt, Artificial Sequence
  Description of Artificial Sequence: Synthetic oligonucleotide
gcaaaccugugagccaugu

SEQ ID NO: 2034013 - RNA, 19 nt, Artificial Sequence
  Description of Artificial Sequence: Synthetic oligonucleotide
gccuaagacuccagcccca

SEQ ID NO: 2034014 - RNA, 19 nt, Artificial Sequence
  Description of Artificial Sequence: Synthetic oligonucleotide
cagcuccaagaaggcacca

SEQ ID NO: 2034015 - RNA, 19 nt, Artificial Sequence
  Description of Artificial Sequence: Synthetic oligonucleotide
ggacgucugucuccucaua

SEQ ID NO: 2034016 - RNA, 19 nt, Artificial Sequence
  Description of Artificial Sequence: Synthetic oligonucleotide
cccuagcucagacaccacu

SEQ ID NO: 2034017 - RNA, 19 nt, Artificial Sequence
  Description of Artificial Sequence: Synthetic oligonucleotide
cgggcaggcucauagacau

SEQ ID NO: 2034018 - RNA, 19 nt, Artificial Sequence
  Description of Artificial Sequence: Synthetic oligonucleotide
cuuuggcauccaggaucga

SEQ ID NO: 2034019 - RNA, 19 nt, Artificial Sequence
  Description of Artificial Sequence: Synthetic oligonucleotide
ggagcccuuuccauugaau

SEQ ID NO: 2034020 - RNA, 19 nt, Artificial Sequence
  Description of Artificial Sequence: Synthetic oligonucleotide
ccuaagacuccagccccaa

SEQ ID NO: 2034021 - RNA, 19 nt, Artificial Sequence
  Description of Artificial Sequence: Synthetic oligonucleotide
gggacugcaccagggcccu

SEQ ID NO: 2034022 - RNA, 19 nt, Artificial Sequence
  Description of Artificial Sequence: Synthetic oligonucleotide
caccucgucgaaggccucu

SEQ ID NO: 2034023 - RNA, 19 nt, Artificial Sequence
  Description of Artificial Sequence: Synthetic oligonucleotide
cauugccauaggagcccuu

SEQ ID NO: 2034024 - RNA, 19 nt, Artificial Sequence
  Description of Artificial Sequence: Synthetic oligonucleotide
cuucagccugcuggaguau

SEQ ID NO: 2034025 - RNA, 19 nt, Artificial Sequence
  Description of Artificial Sequence: Synthetic oligonucleotide
ggggcaggagaaccagcuu

SEQ ID NO: 2034026 - RNA, 19 nt, Artificial Sequence
  Description of Artificial Sequence: Synthetic oligonucleotide
ccaccucgucgaaggccuc

SEQ ID NO: 2034027 - RNA, 19 nt, Artificial Sequence
  Description of Artificial Sequence: Synthetic oligonucleotide
gggcaggcucauagacauc

SEQ ID NO: 2034028 - RNA, 19 nt, Artificial Sequence
  Description of Artificial Sequence: Synthetic oligonucleotide
cugcuggaguauggacgcu

SEQ ID NO: 2034029 - RNA, 19 nt, Artificial Sequence
  Description of Artificial Sequence: Synthetic oligonucleotide
ccauugccauaggagcccu

SEQ ID NO: 2034030 - RNA, 19 nt, Artificial Sequence
  Description of Artificial Sequence: Synthetic oligonucleotide
acccucugucaggguccuu

SEQ ID NO: 2034031 - RNA, 19 nt, Artificial Sequence
  Description of Artificial Sequence: Synthetic oligonucleotide
ccucgucgaaggccucuuu

SEQ ID NO: 2034032 - RNA, 19 nt, Artificial Sequence
  Description of Artificial Sequence: Synthetic oligonucleotide
gggcccgggcaggcucaua

SEQ ID NO: 2034033 - RNA, 19 nt, Artificial Sequence
  Description of Artificial Sequence: Synthetic oligonucleotide
aaguauagaaaguacaucc

SEQ ID NO: 2034034 - RNA, 19 nt, Artificial Sequence
  Description of Artificial Sequence: Synthetic oligonucleotide
auaggcgugaccuagagac

SEQ ID NO: 2034035 - RNA, 19 nt, Artificial Sequence
  Description of Artificial Sequence: Synthetic oligonucleotide
acaauuuguauauuugugc

SEQ ID NO: 2034036 - RNA, 19 nt, Artificial Sequence
  Description of Artificial Sequence: Synthetic oligonucleotide
aauacuuaucgguauuuac

SEQ ID NO: 2034037 - RNA, 19 nt, Artificial Sequence
  Description of Artificial Sequence: Synthetic oligonucleotide
uucgauugaggaaagagag

SEQ ID NO: 2034038 - RNA, 19 nt, Artificial Sequence
  Description of Artificial Sequence: Synthetic oligonucleotide
uauuuagaugguaaggacc

SEQ ID NO: 2034039 - RNA, 19 nt, Artificial Sequence
  Description of Artificial Sequence: Synthetic oligonucleotide
uguauauuugugcaaagac

SEQ ID NO: 2034040 - RNA, 19 nt, Artificial Sequence
  Description of Artificial Sequence: Synthetic oligonucleotide
guagucaaaccuuauauag

SEQ ID NO: 2034041 - RNA, 19 nt, Artificial Sequence
  Description of Artificial Sequence: Synthetic oligonucleotide
aaaguuaccaucugaauuu

SEQ ID NO: 2034042 - RNA, 19 nt, Artificial Sequence
  Description of Artificial Sequence: Synthetic oligonucleotide
auaucagaaagauagccag

SEQ ID NO: 2034043 - RNA, 19 nt, Artificial Sequence
  Description of Artificial Sequence: Synthetic oligonucleotide
uaccauucauaucagaaag

SEQ ID NO: 2034044 - RNA, 19 nt, Artificial Sequence
  Description of Artificial Sequence: Synthetic oligonucleotide
cuuaucgguauuuacaaag

SEQ ID NO: 2034045 - RNA, 19 nt, Artificial Sequence
  Description of Artificial Sequence: Synthetic oligonucleotide
acaaaugugauucuaguga

SEQ ID NO: 2034046 - RNA, 19 nt, Artificial Sequence
  Description of Artificial Sequence: Synthetic oligonucleotide
uucugcaugcauuagagug

SEQ ID NO: 2034047 - RNA, 19 nt, Artificial Sequence
  Description of Artificial Sequence: Synthetic oligonucleotide
auugccagugccuugguac

SEQ ID NO: 2034048 - RNA, 19 nt, Artificial Sequence
  Description of Artificial Sequence: Synthetic oligonucleotide
aauugcagcaugcagcaug

SEQ ID NO: 2034049 - RNA, 19 nt, Artificial Sequence
  Description of Artificial Sequence: Synthetic oligonucleotide
aaugaaaccguauggaauu

SEQ ID NO: 2034050 - RNA, 19 nt, Artificial Sequence
  Description of Artificial Sequence: Synthetic oligonucleotide
agagcuacgaccuuuucag

SEQ ID NO: 2034051 - RNA, 19 nt, Artificial Sequence
  Description of Artificial Sequence: Synthetic oligonucleotide
cuugguaccauucauauca

SEQ ID NO: 2034052 - RNA, 19 nt, Artificial Sequence
  Description of Artificial Sequence: Synthetic oligonucleotide
agaaaguacauccuuucuc

SEQ ID NO: 2034053 - RNA, 19 nt, Artificial Sequence
  Description of Artificial Sequence: Synthetic oligonucleotide
uuaucgguauuuacaaagg

SEQ ID NO: 2034054 - RNA, 19 nt, Artificial Sequence
  Description of Artificial Sequence: Synthetic oligonucleotide
auaccuuuugucugcaagc

SEQ ID NO: 2034055 - RNA, 19 nt, Artificial Sequence
  Description of Artificial Sequence: Synthetic oligonucleotide
aaucagauggauaucugac

SEQ ID NO: 2034056 - RNA, 19 nt, Artificial Sequence
  Description of Artificial Sequence: Synthetic oligonucleotide
agugauaccuuuugucugc

SEQ ID NO: 2034057 - RNA, 19 nt, Artificial Sequence
  Description of Artificial Sequence: Synthetic oligonucleotide
agcuauaccaauaagagcu

SEQ ID NO: 2034058 - RNA, 19 nt, Artificial Sequence
  Description of Artificial Sequence: Synthetic oligonucleotide
gauguauuuagaugguaag

SEQ ID NO: 2034059 - RNA, 19 nt, Artificial Sequence
  Description of Artificial Sequence: Synthetic oligonucleotide
auagaaaguacauccuuuc

SEQ ID NO: 2034060 - RNA, 19 nt, Artificial Sequence
  Description of Artificial Sequence: Synthetic oligonucleotide
ugcauuagagugcauacca

SEQ ID NO: 2034061 - RNA, 19 nt, Artificial Sequence
  Description of Artificial Sequence: Synthetic oligonucleotide
uauaccaauaagagcuacg

SEQ ID NO: 2034062 - RNA, 19 nt, Artificial Sequence
  Description of Artificial Sequence: Synthetic oligonucleotide
uguauuuagaugguaagga

SEQ ID NO: 2034063 - RNA, 19 nt, Artificial Sequence
  Description of Artificial Sequence: Synthetic oligonucleotide
gaugguaaggaccacuccc

SEQ ID NO: 2034064 - RNA, 19 nt, Artificial Sequence
  Description of Artificial Sequence: Synthetic oligonucleotide
uuuaaugaaaccguaugga

SEQ ID NO: 2034065 - RNA, 19 nt, Artificial Sequence
  Description of Artificial Sequence: Synthetic oligonucleotide
uaucgguauuuacaaaggg

SEQ ID NO: 2034066 - RNA, 19 nt, Artificial Sequence
  Description of Artificial Sequence: Synthetic oligonucleotide
uuagagugcauaccaauca

SEQ ID NO: 2034067 - RNA, 19 nt, Artificial Sequence
  Description of Artificial Sequence: Synthetic oligonucleotide
uauuugugcaaagacauca

SEQ ID NO: 2034068 - RNA, 19 nt, Artificial Sequence
  Description of Artificial Sequence: Synthetic oligonucleotide
aucaauagugcaaacaauc

SEQ ID NO: 2034069 - RNA, 19 nt, Artificial Sequence
  Description of Artificial Sequence: Synthetic oligonucleotide
uauguaacaagcaguggug

SEQ ID NO: 2034070 - RNA, 19 nt, Artificial Sequence
  Description of Artificial Sequence: Synthetic oligonucleotide
uaagugggaacccuaaugu

SEQ ID NO: 2034071 - RNA, 19 nt, Artificial Sequence
  Description of Artificial Sequence: Synthetic oligonucleotide
ucaauagugcaaacaauca

SEQ ID NO: 2034072 - RNA, 19 nt, Artificial Sequence
  Description of Artificial Sequence: Synthetic oligonucleotide
ucauaucagaaagauagcc

SEQ ID NO: 2034073 - RNA, 19 nt, Artificial Sequence
  Description of Artificial Sequence: Synthetic oligonucleotide
agcuacgaccuuuucaggc

SEQ ID NO: 2034074 - RNA, 19 nt, Artificial Sequence
  Description of Artificial Sequence: Synthetic oligonucleotide
gauaccuuuugucugcaag

SEQ ID NO: 2034075 - RNA, 19 nt, Artificial Sequence
  Description of Artificial Sequence: Synthetic oligonucleotide
aagugcacggaacuguguc

SEQ ID NO: 2034076 - RNA, 19 nt, Artificial Sequence
  Description of Artificial Sequence: Synthetic oligonucleotide
aagagagugauaccuuuug

SEQ ID NO: 2034077 - RNA, 19 nt, Artificial Sequence
  Description of Artificial Sequence: Synthetic oligonucleotide
ugugauucuagugaacugc

SEQ ID NO: 2034078 - RNA, 19 nt, Artificial Sequence
  Description of Artificial Sequence: Synthetic oligonucleotide
agagugauaccuuuugucu

SEQ ID NO: 2034079 - RNA, 19 nt, Artificial Sequence
  Description of Artificial Sequence: Synthetic oligonucleotide
uguucgauugaggaaagag

SEQ ID NO: 2034080 - RNA, 19 nt, Artificial Sequence
  Description of Artificial Sequence: Synthetic oligonucleotide
uauggaauucgguaaaauc

SEQ ID NO: 2034081 - RNA, 19 nt, Artificial Sequence
  Description of Artificial Sequence: Synthetic oligonucleotide
auaccaaucacaaauguga

SEQ ID NO: 2034082 - RNA, 19 nt, Artificial Sequence
  Description of Artificial Sequence: Synthetic oligonucleotide
ucuagugaacugcaguuga

SEQ ID NO: 2034083 - RNA, 19 nt, Artificial Sequence
  Description of Artificial Sequence: Synthetic oligonucleotide
uuaaugaaaccguauggaa

SEQ ID NO: 2034084 - RNA, 19 nt, Artificial Sequence
  Description of Artificial Sequence: Synthetic oligonucleotide
uggaauucgguaaaauccu

SEQ ID NO: 2034085 - RNA, 19 nt, Artificial Sequence
  Description of Artificial Sequence: Synthetic oligonucleotide
uaaugaaaccguauggaau

SEQ ID NO: 2034086 - RNA, 19 nt, Artificial Sequence
  Description of Artificial Sequence: Synthetic oligonucleotide
ucuuucaaucuucugcaug

SEQ ID NO: 2034087 - RNA, 19 nt, Artificial Sequence
  Description of Artificial Sequence: Synthetic oligonucleotide
uuauauaggcgugaccuag

SEQ ID NO: 2034088 - RNA, 19 nt, Artificial Sequence
  Description of Artificial Sequence: Synthetic oligonucleotide
ucuacaucugggcugauua

SEQ ID NO: 2034089 - RNA, 19 nt, Artificial Sequence
  Description of Artificial Sequence: Synthetic oligonucleotide
aacagaaagugcacggaac

SEQ ID NO: 2034090 - RNA, 19 nt, Artificial Sequence
  Description of Artificial Sequence: Synthetic oligonucleotide
aacuccugaguagucaaac

SEQ ID NO: 2034091 - RNA, 19 nt, Artificial Sequence
  Description of Artificial Sequence: Synthetic oligonucleotide
uauagaaaguacauccuuu

SEQ ID NO: 2034092 - RNA, 19 nt, Artificial Sequence
  Description of Artificial Sequence: Synthetic oligonucleotide
aguagcuauaccaauaaga

SEQ ID NO: 2034093 - RNA, 19 nt, Artificial Sequence
  Description of Artificial Sequence: Synthetic oligonucleotide
uuauaagccagguuuggaa

SEQ ID NO: 2034094 - RNA, 19 nt, Artificial Sequence
  Description of Artificial Sequence: Synthetic oligonucleotide
acccuaauguaucuggguc

SEQ ID NO: 2034095 - RNA, 19 nt, Artificial Sequence
  Description of Artificial Sequence: Synthetic oligonucleotide
aagauagccagggaugaag

SEQ ID NO: 2034096 - RNA, 19 nt, Artificial Sequence
  Description of Artificial Sequence: Synthetic oligonucleotide
auguauuuagaugguaagg

SEQ ID NO: 2034097 - RNA, 19 nt, Artificial Sequence
  Description of Artificial Sequence: Synthetic oligonucleotide
gacaucuacaucugggcug

SEQ ID NO: 2034098 - RNA, 19 nt, Artificial Sequence
  Description of Artificial Sequence: Synthetic oligonucleotide
cagggaugaagauaauucc

SEQ ID NO: 2034099 - RNA, 19 nt, Artificial Sequence
  Description of Artificial Sequence: Synthetic oligonucleotide
ugcauaccaaucacaaaug

SEQ ID NO: 2034100 - RNA, 19 nt, Artificial Sequence
  Description of Artificial Sequence: Synthetic oligonucleotide
guaagugggaacccuaaug

SEQ ID NO: 2034101 - RNA, 19 nt, Artificial Sequence
  Description of Artificial Sequence: Synthetic oligonucleotide
cauaccaaucacaaaugug

SEQ ID NO: 2034102 - RNA, 19 nt, Artificial Sequence
  Description of Artificial Sequence: Synthetic oligonucleotide
caugcauuagagugcauac

SEQ ID NO: 2034103 - RNA, 19 nt, Artificial Sequence
  Description of Artificial Sequence: Synthetic oligonucleotide
guaaaauccuucugggaug

SEQ ID NO: 2034104 - RNA, 19 nt, Artificial Sequence
  Description of Artificial Sequence: Synthetic oligonucleotide
augaagauaauuccuggau

SEQ ID NO: 2034105 - RNA, 19 nt, Artificial Sequence
  Description of Artificial Sequence: Synthetic oligonucleotide
auuuagaugguaaggacca

SEQ ID NO: 2034106 - RNA, 19 nt, Artificial Sequence
  Description of Artificial Sequence: Synthetic oligonucleotide
agaugguaaggaccacucc

SEQ ID NO: 2034107 - RNA, 19 nt, Artificial Sequence
  Description of Artificial Sequence: Synthetic oligonucleotide
ucuuauaagccagguuugg

SEQ ID NO: 2034108 - RNA, 19 nt, Artificial Sequence
  Description of Artificial Sequence: Synthetic oligonucleotide
aaccguauggaauucggua

SEQ ID NO: 2034109 - RNA, 19 nt, Artificial Sequence
  Description of Artificial Sequence: Synthetic oligonucleotide
gagcgugucaaucaaguca

SEQ ID NO: 2034110 - RNA, 19 nt, Artificial Sequence
  Description of Artificial Sequence: Synthetic oligonucleotide
aauuuccaacuccugagua

SEQ ID NO: 2034111 - RNA, 19 nt, Artificial Sequence
  Description of Artificial Sequence: Synthetic oligonucleotide
gauaucugacuuuuccuuc

SEQ ID NO: 2034112 - RNA, 19 nt, Artificial Sequence
  Description of Artificial Sequence: Synthetic oligonucleotide
gaaaccguauggaauucgg

SEQ ID NO: 2034113 - RNA, 19 nt, Artificial Sequence
  Description of Artificial Sequence: Synthetic oligonucleotide
acagaaagugcacggaacu

SEQ ID NO: 2034114 - RNA, 19 nt, Artificial Sequence
  Description of Artificial Sequence: Synthetic oligonucleotide
aauguaucugggucuuuga

SEQ ID NO: 2034115 - RNA, 19 nt, Artificial Sequence
  Description of Artificial Sequence: Synthetic oligonucleotide
ugaugacaucuacaucugg

SEQ ID NO: 2034116 - RNA, 19 nt, Artificial Sequence
  Description of Artificial Sequence: Synthetic oligonucleotide
gagugauaccuuuugucug

SEQ ID NO: 2034117 - RNA, 19 nt, Artificial Sequence
  Description of Artificial Sequence: Synthetic oligonucleotide
ugaccuagagacuugcaaa

SEQ ID NO: 2034118 - RNA, 19 nt, Artificial Sequence
  Description of Artificial Sequence: Synthetic oligonucleotide
uccgacaaggaacccaggc

SEQ ID NO: 2034119 - RNA, 19 nt, Artificial Sequence
  Description of Artificial Sequence: Synthetic oligonucleotide
uuucaggccgugcaauugc

SEQ ID NO: 2034120 - RNA, 19 nt, Artificial Sequence
  Description of Artificial Sequence: Synthetic oligonucleotide
aggaauggggcuauguaac

SEQ ID NO: 2034121 - RNA, 19 nt, Artificial Sequence
  Description of Artificial Sequence: Synthetic oligonucleotide
cauaucagaaagauagcca

SEQ ID NO: 2034122 - RNA, 19 nt, Artificial Sequence
  Description of Artificial Sequence: Synthetic oligonucleotide
aaccuuauauaggcgugac

SEQ ID NO: 2034123 - RNA, 19 nt, Artificial Sequence
  Description of Artificial Sequence: Synthetic oligonucleotide
agaaagauagccagggaug

SEQ ID NO: 2034124 - RNA, 19 nt, Artificial Sequence
  Description of Artificial Sequence: Synthetic oligonucleotide
ggaacccuaauguaucugg

SEQ ID NO: 2034125 - RNA, 19 nt, Artificial Sequence
  Description of Artificial Sequence: Synthetic oligonucleotide
ucauucuguggucacugug

SEQ ID NO: 2034126 - RNA, 19 nt, Artificial Sequence
  Description of Artificial Sequence: Synthetic oligonucleotide
aacccuaauguaucugggu

SEQ ID NO: 2034127 - RNA, 19 nt, Artificial Sequence
  Description of Artificial Sequence: Synthetic oligonucleotide
accuuauauaggcgugacc

SEQ ID NO: 2034128 - RNA, 19 nt, Artificial Sequence
  Description of Artificial Sequence: Synthetic oligonucleotide
ccuuuugucugcaagcugg

SEQ ID NO: 2034129 - RNA, 19 nt, Artificial Sequence
  Description of Artificial Sequence: Synthetic oligonucleotide
aauaagagcuacgaccuuu

SEQ ID NO: 2034130 - RNA, 19 nt, Artificial Sequence
  Description of Artificial Sequence: Synthetic oligonucleotide
uugucugcaagcuggcagc

SEQ ID NO: 2034131 - RNA, 19 nt, Artificial Sequence
  Description of Artificial Sequence: Synthetic oligonucleotide
guauauuugugcaaagaca

SEQ ID NO: 2034132 - RNA, 19 nt, Artificial Sequence
  Description of Artificial Sequence: Synthetic oligonucleotide
aagucaucaauagugcaaa

SEQ ID NO: 2034133 - RNA, 19 nt, Artificial Sequence
  Description of Artificial Sequence: Synthetic oligonucleotide
ugaaaccguauggaauucg

SEQ ID NO: 2034134 - RNA, 19 nt, Artificial Sequence
  Description of Artificial Sequence: Synthetic oligonucleotide
auaccaauaagagcuacga

SEQ ID NO: 2034135 - RNA, 19 nt, Artificial Sequence
  Description of Artificial Sequence: Synthetic oligonucleotide
auaucugacuuuuccuuca

SEQ ID NO: 2034136 - RNA, 19 nt, Artificial Sequence
  Description of Artificial Sequence: Synthetic oligonucleotide
aucagauggauaucugacu

SEQ ID NO: 2034137 - RNA, 19 nt, Artificial Sequence
  Description of Artificial Sequence: Synthetic oligonucleotide
ugggucuuugauuuacuac

SEQ ID NO: 2034138 - RNA, 19 nt, Artificial Sequence
  Description of Artificial Sequence: Synthetic oligonucleotide
auauaggcgugaccuagag

SEQ ID NO: 2034139 - RNA, 19 nt, Artificial Sequence
  Description of Artificial Sequence: Synthetic oligonucleotide
aaguuaccaucugaauuuc

SEQ ID NO: 2034140 - RNA, 19 nt, Artificial Sequence
  Description of Artificial Sequence: Synthetic oligonucleotide
ugaguagucaaaccuuaua

SEQ ID NO: 2034141 - RNA, 19 nt, Artificial Sequence
  Description of Artificial Sequence: Synthetic oligonucleotide
augcauuagagugcauacc

SEQ ID NO: 2034142 - RNA, 19 nt, Artificial Sequence
  Description of Artificial Sequence: Synthetic oligonucleotide
aaguacauccuuucuccau

SEQ ID NO: 2034143 - RNA, 19 nt, Artificial Sequence
  Description of Artificial Sequence: Synthetic oligonucleotide
cuucaugccauggagcaag

SEQ ID NO: 2034144 - RNA, 19 nt, Artificial Sequence
  Description of Artificial Sequence: Synthetic oligonucleotide
ucuguucgauugaggaaag

SEQ ID NO: 2034145 - RNA, 19 nt, Artificial Sequence
  Description of Artificial Sequence: Synthetic oligonucleotide
uauauaggcgugaccuaga

SEQ ID NO: 2034146 - RNA, 19 nt, Artificial Sequence
  Description of Artificial Sequence: Synthetic oligonucleotide
aggaccacuccccuuucac

SEQ ID NO: 2034147 - RNA, 19 nt, Artificial Sequence
  Description of Artificial Sequence: Synthetic oligonucleotide
aucacaaaugugauucuag

SEQ ID NO: 2034148 - RNA, 19 nt, Artificial Sequence
  Description of Artificial Sequence: Synthetic oligonucleotide
aguugagagcgugucaauc

SEQ ID NO: 2034149 - RNA, 19 nt, Artificial Sequence
  Description of Artificial Sequence: Synthetic oligonucleotide
aaaccuuauauaggcguga

SEQ ID NO: 2034150 - RNA, 19 nt, Artificial Sequence
  Description of Artificial Sequence: Synthetic oligonucleotide
gaacccuaauguaucuggg

SEQ ID NO: 2034151 - RNA, 19 nt, Artificial Sequence
  Description of Artificial Sequence: Synthetic oligonucleotide
uccucaauugccagugccu

SEQ ID NO: 2034152 - RNA, 19 nt, Artificial Sequence
  Description of Artificial Sequence: Synthetic oligonucleotide
guugagagcgugucaauca

SEQ ID NO: 2034153 - RNA, 19 nt, Artificial Sequence
  Description of Artificial Sequence: Synthetic oligonucleotide
agagcgugucaaucaaguc

SEQ ID NO: 2034154 - RNA, 19 nt, Artificial Sequence
  Description of Artificial Sequence: Synthetic oligonucleotide
agcuacaucaucaaguaua

SEQ ID NO: 2034155 - RNA, 19 nt, Artificial Sequence
  Description of Artificial Sequence: Synthetic oligonucleotide
uaaaauccuucugggaugu

SEQ ID NO: 2034156 - RNA, 19 nt, Artificial Sequence
  Description of Artificial Sequence: Synthetic oligonucleotide
gauucuagugaacugcagu

SEQ ID NO: 2034157 - RNA, 19 nt, Artificial Sequence
  Description of Artificial Sequence: Synthetic oligonucleotide
uuuugugccucaacagaaa

SEQ ID NO: 2034158 - RNA, 19 nt, Artificial Sequence
  Description of Artificial Sequence: Synthetic oligonucleotide
accguauggaauucgguaa

SEQ ID NO: 2034159 - RNA, 19 nt, Artificial Sequence
  Description of Artificial Sequence: Synthetic oligonucleotide
cuauguaacaagcaguggu

SEQ ID NO: 2034160 - RNA, 19 nt, Artificial Sequence
  Description of Artificial Sequence: Synthetic oligonucleotide
aucugggucuuugauuuac

SEQ ID NO: 2034161 - RNA, 19 nt, Artificial Sequence
  Description of Artificial Sequence: Synthetic oligonucleotide
agaaagugcacggaacugu

SEQ ID NO: 2034162 - RNA, 19 nt, Artificial Sequence
  Description of Artificial Sequence: Synthetic oligonucleotide
aguauagaaaguacauccu

SEQ ID NO: 2034163 - RNA, 19 nt, Artificial Sequence
  Description of Artificial Sequence: Synthetic oligonucleotide
uucuagugaacugcaguug

SEQ ID NO: 2034164 - RNA, 19 nt, Artificial Sequence
  Description of Artificial Sequence: Synthetic oligonucleotide
agagagugauaccuuuugu

SEQ ID NO: 2034165 - RNA, 19 nt, Artificial Sequence
  Description of Artificial Sequence: Synthetic oligonucleotide
ggggcuauguaacaagcag

SEQ ID NO: 2034166 - RNA, 19 nt, Artificial Sequence
  Description of Artificial Sequence: Synthetic oligonucleotide
ucgauugaggaaagagagu

SEQ ID NO: 2034167 - RNA, 19 nt, Artificial Sequence
  Description of Artificial Sequence: Synthetic oligonucleotide
gugcauaccaaucacaaau

SEQ ID NO: 2034168 - RNA, 19 nt, Artificial Sequence
  Description of Artificial Sequence: Synthetic oligonucleotide
aguacauccuuucuccauu

SEQ ID NO: 2034169 - RNA, 19 nt, Artificial Sequence
  Description of Artificial Sequence: Synthetic oligonucleotide
uugugccucaacagaaagu

SEQ ID NO: 2034170 - RNA, 19 nt, Artificial Sequence
  Description of Artificial Sequence: Synthetic oligonucleotide
uuuucaggccgugcaauug

SEQ ID NO: 2034171 - RNA, 19 nt, Artificial Sequence
  Description of Artificial Sequence: Synthetic oligonucleotide
uugagagcgugucaaucaa

SEQ ID NO: 2034172 - RNA, 19 nt, Artificial Sequence
  Description of Artificial Sequence: Synthetic oligonucleotide
aucgguauuuacaaaggga

SEQ ID NO: 2034173 - RNA, 19 nt, Artificial Sequence
  Description of Artificial Sequence: Synthetic oligonucleotide
caaucagauggauaucuga

SEQ ID NO: 2034174 - RNA, 19 nt, Artificial Sequence
  Description of Artificial Sequence: Synthetic oligonucleotide
cuagugaacugcaguugag

SEQ ID NO: 2034175 - RNA, 19 nt, Artificial Sequence
  Description of Artificial Sequence: Synthetic oligonucleotide
uauaggcgugaccuagaga

SEQ ID NO: 2034176 - RNA, 19 nt, Artificial Sequence
  Description of Artificial Sequence: Synthetic oligonucleotide
gcugauuacucugucagcc

SEQ ID NO: 2034177 - RNA, 19 nt, Artificial Sequence
  Description of Artificial Sequence: Synthetic oligonucleotide
cuacgaccuuuucaggccg

SEQ ID NO: 2034178 - RNA, 19 nt, Artificial Sequence
  Description of Artificial Sequence: Synthetic oligonucleotide
uggggcuauguaacaagca

SEQ ID NO: 2034179 - RNA, 19 nt, Artificial Sequence
  Description of Artificial Sequence: Synthetic oligonucleotide
uccugaguagucaaaccuu

SEQ ID NO: 2034180 - RNA, 19 nt, Artificial Sequence
  Description of Artificial Sequence: Synthetic oligonucleotide
agagacgugugccaaggaa

SEQ ID NO: 2034181 - RNA, 19 nt, Artificial Sequence
  Description of Artificial Sequence: Synthetic oligonucleotide
uccggaugaugacaucuac

SEQ ID NO: 2034182 - RNA, 19 nt, Artificial Sequence
  Description of Artificial Sequence: Synthetic oligonucleotide
ggagcaagcgcacagggca

SEQ ID NO: 2034183 - RNA, 19 nt, Artificial Sequence
  Description of Artificial Sequence: Synthetic oligonucleotide
aagugggaacccuaaugua

SEQ ID NO: 2034184 - RNA, 19 nt, Artificial Sequence
  Description of Artificial Sequence: Synthetic oligonucleotide
cuagcgacgcgcucaggcc

SEQ ID NO: 2034185 - RNA, 19 nt, Artificial Sequence
  Description of Artificial Sequence: Synthetic oligonucleotide
guucgauugaggaaagaga

SEQ ID NO: 2034186 - RNA, 19 nt, Artificial Sequence
  Description of Artificial Sequence: Synthetic oligonucleotide
uaccuuuugucugcaagcu

SEQ ID NO: 2034187 - RNA, 19 nt, Artificial Sequence
  Description of Artificial Sequence: Synthetic oligonucleotide
aaggucuguucgauugagg

SEQ ID NO: 2034188 - RNA, 19 nt, Artificial Sequence
  Description of Artificial Sequence: Synthetic oligonucleotide
agcuaauacuuuuguuaca

SEQ ID NO: 2034189 - RNA, 19 nt, Artificial Sequence
  Description of Artificial Sequence: Synthetic oligonucleotide
caggccgugcaauugcagc

SEQ ID NO: 2034190 - RNA, 19 nt, Artificial Sequence
  Description of Artificial Sequence: Synthetic oligonucleotide
gguaaaauccuucugggau

SEQ ID NO: 2034191 - RNA, 19 nt, Artificial Sequence
  Description of Artificial Sequence: Synthetic oligonucleotide
aucaucaaguauagaaagu

SEQ ID NO: 2034192 - RNA, 19 nt, Artificial Sequence
  Description of Artificial Sequence: Synthetic oligonucleotide
agagacuugcaaaacuccu

SEQ ID NO: 2034193 - RNA, 19 nt, Artificial Sequence
  Description of Artificial Sequence: Synthetic oligonucleotide
ggcuauguaacaagcagug

SEQ ID NO: 2034194 - RNA, 19 nt, Artificial Sequence
  Description of Artificial Sequence: Synthetic oligonucleotide
gucuguucgauugaggaaa

SEQ ID NO: 2034195 - RNA, 19 nt, Artificial Sequence
  Description of Artificial Sequence: Synthetic oligonucleotide
agugcacggaacuguguca

SEQ ID NO: 2034196 - RNA, 19 nt, Artificial Sequence
  Description of Artificial Sequence: Synthetic oligonucleotide
agugggaacccuaauguau

SEQ ID NO: 2034197 - RNA, 19 nt, Artificial Sequence
  Description of Artificial Sequence: Synthetic oligonucleotide
uuuggaaggucuguucgau

SEQ ID NO: 2034198 - RNA, 19 nt, Artificial Sequence
  Description of Artificial Sequence: Synthetic oligonucleotide
aaaguaagugggaacccua

SEQ ID NO: 2034199 - RNA, 19 nt, Artificial Sequence
  Description of Artificial Sequence: Synthetic oligonucleotide
gagcuacgaccuuuucagg

SEQ ID NO: 2034200 - RNA, 19 nt, Artificial Sequence
  Description of Artificial Sequence: Synthetic oligonucleotide
aagauaauuccuggauuuu

SEQ ID NO: 2034201 - RNA, 19 nt, Artificial Sequence
  Description of Artificial Sequence: Synthetic oligonucleotide
cuauaccaauaagagcuac

SEQ ID NO: 2034202 - RNA, 19 nt, Artificial Sequence
  Description of Artificial Sequence: Synthetic oligonucleotide
aaaccguauggaauucggu

SEQ ID NO: 2034203 - RNA, 19 nt, Artificial Sequence
  Description of Artificial Sequence: Synthetic oligonucleotide
augaaaccguauggaauuc

SEQ ID NO: 2034204 - RNA, 19 nt, Artificial Sequence
  Description of Artificial Sequence: Synthetic oligonucleotide
ggaacuaugucguccuuca

SEQ ID NO: 2034205 - RNA, 19 nt, Artificial Sequence
  Description of Artificial Sequence: Synthetic oligonucleotide
agauggauaucugacuuuu

SEQ ID NO: 2034206 - RNA, 19 nt, Artificial Sequence
  Description of Artificial Sequence: Synthetic oligonucleotide
acuuaucgguauuuacaaa

SEQ ID NO: 2034207 - RNA, 19 nt, Artificial Sequence
  Description of Artificial Sequence: Synthetic oligonucleotide
acagcagcuaauacuuuug

SEQ ID NO: 2034208 - RNA, 19 nt, Artificial Sequence
  Description of Artificial Sequence: Synthetic oligonucleotide
gcuacgaccuuuucaggcc

SEQ ID NO: 2034209 - RNA, 19 nt, Artificial Sequence
  Description of Artificial Sequence: Synthetic oligonucleotide
accuuuugucugcaagcug

SEQ ID NO: 2034210 - RNA, 19 nt, Artificial Sequence
  Description of Artificial Sequence: Synthetic oligonucleotide
agugcauaccaaucacaaa

SEQ ID NO: 2034211 - RNA, 19 nt, Artificial Sequence
  Description of Artificial Sequence: Synthetic oligonucleotide
ugguaaggaccacuccccu

SEQ ID NO: 2034212 - RNA, 19 nt, Artificial Sequence
  Description of Artificial Sequence: Synthetic oligonucleotide
caguagcuauaccaauaag

SEQ ID NO: 2034213 - RNA, 19 nt, Artificial Sequence
  Description of Artificial Sequence: Synthetic oligonucleotide
aguaagugggaacccuaau

SEQ ID NO: 2034214 - RNA, 19 nt, Artificial Sequence
  Description of Artificial Sequence: Synthetic oligonucleotide
ugggaacccuaauguaucu

SEQ ID NO: 2034215 - RNA, 19 nt, Artificial Sequence
  Description of Artificial Sequence: Synthetic oligonucleotide
gugaccuagagacuugcaa

SEQ ID NO: 2034216 - RNA, 19 nt, Artificial Sequence
  Description of Artificial Sequence: Synthetic oligonucleotide
aggccgugcaauugcagca

SEQ ID NO: 2034217 - RNA, 19 nt, Artificial Sequence
  Description of Artificial Sequence: Synthetic oligonucleotide
gcaauugcagcaugcagca

SEQ ID NO: 2034218 - RNA, 19 nt, Artificial Sequence
  Description of Artificial Sequence: Synthetic oligonucleotide
caggaauggggcuauguaa

SEQ ID NO: 2034219 - RNA, 19 nt, Artificial Sequence
  Description of Artificial Sequence: Synthetic oligonucleotide
aaguaagugggaacccuaa

SEQ ID NO: 2034220 - RNA, 19 nt, Artificial Sequence
  Description of Artificial Sequence: Synthetic oligonucleotide
gauugaggaaagagaguga

SEQ ID NO: 2034221 - RNA, 19 nt, Artificial Sequence
  Description of Artificial Sequence: Synthetic oligonucleotide
guuuggaaggucuguucga

SEQ ID NO: 2034222 - RNA, 19 nt, Artificial Sequence
  Description of Artificial Sequence: Synthetic oligonucleotide
uccgaccaguaucuguggu

SEQ ID NO: 2034223 - RNA, 19 nt, Artificial Sequence
  Description of Artificial Sequence: Synthetic oligonucleotide
uaucugacuuuuccuucau

SEQ ID NO: 2034224 - RNA, 19 nt, Artificial Sequence
  Description of Artificial Sequence: Synthetic oligonucleotide
gcuagcgacgcgcucaggc

SEQ ID NO: 2034225 - RNA, 19 nt, Artificial Sequence
  Description of Artificial Sequence: Synthetic oligonucleotide
aaggaccacuccccuuuca

SEQ ID NO: 2034226 - RNA, 19 nt, Artificial Sequence
  Description of Artificial Sequence: Synthetic oligonucleotide
acaaucagauggauaucug

SEQ ID NO: 2034227 - RNA, 19 nt, Artificial Sequence
  Description of Artificial Sequence: Synthetic oligonucleotide
uccuucauucuguggucac

SEQ ID NO: 2034228 - RNA, 19 nt, Artificial Sequence
  Description of Artificial Sequence: Synthetic oligonucleotide
gcaaaacuccucaauugcc

SEQ ID NO: 2034229 - RNA, 19 nt, Artificial Sequence
  Description of Artificial Sequence: Synthetic oligonucleotide
aaagugcacggaacugugu

SEQ ID NO: 2034230 - RNA, 19 nt, Artificial Sequence
  Description of Artificial Sequence: Synthetic oligonucleotide
uuuagaugguaaggaccac

SEQ ID NO: 2034231 - RNA, 19 nt, Artificial Sequence
  Description of Artificial Sequence: Synthetic oligonucleotide
guauagaaaguacauccuu

SEQ ID NO: 2034232 - RNA, 19 nt, Artificial Sequence
  Description of Artificial Sequence: Synthetic oligonucleotide
aaagauagccagggaugaa

SEQ ID NO: 2034233 - RNA, 19 nt, Artificial Sequence
  Description of Artificial Sequence: Synthetic oligonucleotide
ugccggccgaagaacgcag

SEQ ID NO: 2034234 - RNA, 19 nt, Artificial Sequence
  Description of Artificial Sequence: Synthetic oligonucleotide
agacgugugccaaggaacu

SEQ ID NO: 2034235 - RNA, 19 nt, Artificial Sequence
  Description of Artificial Sequence: Synthetic oligonucleotide
accauucauaucagaaaga

SEQ ID NO: 2034236 - RNA, 19 nt, Artificial Sequence
  Description of Artificial Sequence: Synthetic oligonucleotide
ggccgaagaacgcagccgc

SEQ ID NO: 2034237 - RNA, 19 nt, Artificial Sequence
  Description of Artificial Sequence: Synthetic oligonucleotide
cuugcaaaacuccucaauu

SEQ ID NO: 2034238 - RNA, 19 nt, Artificial Sequence
  Description of Artificial Sequence: Synthetic oligonucleotide
cuuauaagccagguuugga

SEQ ID NO: 2034239 - RNA, 19 nt, Artificial Sequence
  Description of Artificial Sequence: Synthetic oligonucleotide
cuccgaccaguaucugugg

SEQ ID NO: 2034240 - RNA, 19 nt, Artificial Sequence
  Description of Artificial Sequence: Synthetic oligonucleotide
ggauguauuuagaugguaa

SEQ ID NO: 2034241 - RNA, 19 nt, Artificial Sequence
  Description of Artificial Sequence: Synthetic oligonucleotide
uaggcgugaccuagagacu

SEQ ID NO: 2034242 - RNA, 19 nt, Artificial Sequence
  Description of Artificial Sequence: Synthetic oligonucleotide
cugauuacucugucagcca

SEQ ID NO: 2034243 - RNA, 19 nt, Artificial Sequence
  Description of Artificial Sequence: Synthetic oligonucleotide
gugggaacccuaauguauc

SEQ ID NO: 2034244 - RNA, 19 nt, Artificial Sequence
  Description of Artificial Sequence: Synthetic oligonucleotide
gccuuuuagcuucuuauaa

SEQ ID NO: 2034245 - RNA, 19 nt, Artificial Sequence
  Description of Artificial Sequence: Synthetic oligonucleotide
gcuauguaacaagcagugg

SEQ ID NO: 2034246 - RNA, 19 nt, Artificial Sequence
  Description of Artificial Sequence: Synthetic oligonucleotide
gaauggggcuauguaacaa

SEQ ID NO: 2034247 - RNA, 19 nt, Artificial Sequence
  Description of Artificial Sequence: Synthetic oligonucleotide
cugcaaaguuaccaucuga

SEQ ID NO: 2034248 - RNA, 19 nt, Artificial Sequence
  Description of Artificial Sequence: Synthetic oligonucleotide
gagagcgugucaaucaagu

SEQ ID NO: 2034249 - RNA, 19 nt, Artificial Sequence
  Description of Artificial Sequence: Synthetic oligonucleotide
cuuauauaggcgugaccua

SEQ ID NO: 2034250 - RNA, 19 nt, Artificial Sequence
  Description of Artificial Sequence: Synthetic oligonucleotide
cuccugaguagucaaaccu

SEQ ID NO: 2034251 - RNA, 19 nt, Artificial Sequence
  Description of Artificial Sequence: Synthetic oligonucleotide
ccaccuccgacaaggaacc

SEQ ID NO: 2034252 - RNA, 19 nt, Artificial Sequence
  Description of Artificial Sequence: Synthetic oligonucleotide
cauuagagugcauaccaau

SEQ ID NO: 2034253 - RNA, 19 nt, Artificial Sequence
  Description of Artificial Sequence: Synthetic oligonucleotide
gaacgcagccgcccagccc

SEQ ID NO: 2034254 - RNA, 19 nt, Artificial Sequence
  Description of Artificial Sequence: Synthetic oligonucleotide
agcaguagcuauaccaaua

SEQ ID NO: 2034255 - RNA, 19 nt, Artificial Sequence
  Description of Artificial Sequence: Synthetic oligonucleotide
ccuccgacaaggaacccag

SEQ ID NO: 2034256 - RNA, 19 nt, Artificial Sequence
  Description of Artificial Sequence: Synthetic oligonucleotide
gcagagacgugugccaagg

SEQ ID NO: 2034257 - RNA, 19 nt, Artificial Sequence
  Description of Artificial Sequence: Synthetic oligonucleotide
accuuuucaggccgugcaa

SEQ ID NO: 2034258 - RNA, 19 nt, Artificial Sequence
  Description of Artificial Sequence: Synthetic oligonucleotide
uaaggaccacuccccuuuc

SEQ ID NO: 2034259 - RNA, 19 nt, Artificial Sequence
  Description of Artificial Sequence: Synthetic oligonucleotide
ccuuauauaggcgugaccu

SEQ ID NO: 2034260 - RNA, 19 nt, Artificial Sequence
  Description of Artificial Sequence: Synthetic oligonucleotide
gcaguagcuauaccaauaa

SEQ ID NO: 2034261 - RNA, 19 nt, Artificial Sequence
  Description of Artificial Sequence: Synthetic oligonucleotide
agcaagcgcacagggcagg

SEQ ID NO: 2034262 - RNA, 19 nt, Artificial Sequence
  Description of Artificial Sequence: Synthetic oligonucleotide
guaaggaccacuccccuuu

SEQ ID NO: 2034263 - RNA, 19 nt, Artificial Sequence
  Description of Artificial Sequence: Synthetic oligonucleotide
uacgaccuuuucaggccgu

SEQ ID NO: 2034264 - RNA, 19 nt, Artificial Sequence
  Description of Artificial Sequence: Synthetic oligonucleotide
ccucaacagaaagugcacg

SEQ ID NO: 2034265 - RNA, 19 nt, Artificial Sequence
  Description of Artificial Sequence: Synthetic oligonucleotide
auaagagcuacgaccuuuu

SEQ ID NO: 2034266 - RNA, 19 nt, Artificial Sequence
  Description of Artificial Sequence: Synthetic oligonucleotide
acgugugccaaggaacuau

SEQ ID NO: 2034267 - RNA, 19 nt, Artificial Sequence
  Description of Artificial Sequence: Synthetic oligonucleotide
uuggaaggucuguucgauu

SEQ ID NO: 2034268 - RNA, 19 nt, Artificial Sequence
  Description of Artificial Sequence: Synthetic oligonucleotide
cagugccuugguaccauuc

SEQ ID NO: 2034269 - RNA, 19 nt, Artificial Sequence
  Description of Artificial Sequence: Synthetic oligonucleotide
gcuucuuuaaugaaaccgu

SEQ ID NO: 2034270 - RNA, 19 nt, Artificial Sequence
  Description of Artificial Sequence: Synthetic oligonucleotide
accuccgacaaggaaccca

SEQ ID NO: 2034271 - RNA, 19 nt, Artificial Sequence
  Description of Artificial Sequence: Synthetic oligonucleotide
ggcugauuacucugucagc

SEQ ID NO: 2034272 - RNA, 19 nt, Artificial Sequence
  Description of Artificial Sequence: Synthetic oligonucleotide
ggaauggggcuauguaaca

SEQ ID NO: 2034273 - RNA, 19 nt, Artificial Sequence
  Description of Artificial Sequence: Synthetic oligonucleotide
gaccacuccccuuucacuu

SEQ ID NO: 2034274 - RNA, 19 nt, Artificial Sequence
  Description of Artificial Sequence: Synthetic oligonucleotide
cuccgacaaggaacccagg

SEQ ID NO: 2034275 - RNA, 19 nt, Artificial Sequence
  Description of Artificial Sequence: Synthetic oligonucleotide
cugggucuuugauuuacua

SEQ ID NO: 2034276 - RNA, 19 nt, Artificial Sequence
  Description of Artificial Sequence: Synthetic oligonucleotide
uccgggcuagcgacgcgcu

SEQ ID NO: 2034277 - RNA, 19 nt, Artificial Sequence
  Description of Artificial Sequence: Synthetic oligonucleotide
cagcaugcagcaugagcca

SEQ ID NO: 2034278 - RNA, 19 nt, Artificial Sequence
  Description of Artificial Sequence: Synthetic oligonucleotide
gauuacucugucagccacu

SEQ ID NO: 2034279 - RNA, 19 nt, Artificial Sequence
  Description of Artificial Sequence: Synthetic oligonucleotide
gcauaccaaucacaaaugu

SEQ ID NO: 2034280 - RNA, 19 nt, Artificial Sequence
  Description of Artificial Sequence: Synthetic oligonucleotide
ccgugcaauugcagcaugc

SEQ ID NO: 2034281 - RNA, 19 nt, Artificial Sequence
  Description of Artificial Sequence: Synthetic oligonucleotide
gucuuccgggcuagcgacg

SEQ ID NO: 2034282 - RNA, 19 nt, Artificial Sequence
  Description of Artificial Sequence: Synthetic oligonucleotide
agcaugcagcaugagccau

SEQ ID NO: 2034283 - RNA, 19 nt, Artificial Sequence
  Description of Artificial Sequence: Synthetic oligonucleotide
gggaacccuaauguaucug

SEQ ID NO: 2034284 - RNA, 19 nt, Artificial Sequence
  Description of Artificial Sequence: Synthetic oligonucleotide
acgaccuuuucaggccgug

SEQ ID NO: 2034285 - RNA, 19 nt, Artificial Sequence
  Description of Artificial Sequence: Synthetic oligonucleotide
cucggugccggccgaagaa

SEQ ID NO: 2034286 - RNA, 19 nt, Artificial Sequence
  Description of Artificial Sequence: Synthetic oligonucleotide
agcgacgcgcucaggccuc

SEQ ID NO: 2034287 - RNA, 19 nt, Artificial Sequence
  Description of Artificial Sequence: Synthetic oligonucleotide
ccacuugcagagacgugug

SEQ ID NO: 2034288 - RNA, 19 nt, Artificial Sequence
  Description of Artificial Sequence: Synthetic oligonucleotide
uugcagcaugcagcaugag

SEQ ID NO: 2034289 - RNA, 19 nt, Artificial Sequence
  Description of Artificial Sequence: Synthetic oligonucleotide
ugucagccacuugcagaga

SEQ ID NO: 2034290 - RNA, 19 nt, Artificial Sequence
  Description of Artificial Sequence: Synthetic oligonucleotide
caacuccugaguagucaaa

SEQ ID NO: 2034291 - RNA, 19 nt, Artificial Sequence
  Description of Artificial Sequence: Synthetic oligonucleotide
ccugaguagucaaaccuua

SEQ ID NO: 2034292 - RNA, 19 nt, Artificial Sequence
  Description of Artificial Sequence: Synthetic oligonucleotide
ccggaugaugacaucuaca

SEQ ID NO: 2034293 - RNA, 19 nt, Artificial Sequence
  Description of Artificial Sequence: Synthetic oligonucleotide
gccucaacagaaagugcac

SEQ ID NO: 2034294 - RNA, 19 nt, Artificial Sequence
  Description of Artificial Sequence: Synthetic oligonucleotide
ccaacuccugaguagucaa

SEQ ID NO: 2034295 - RNA, 19 nt, Artificial Sequence
  Description of Artificial Sequence: Synthetic oligonucleotide
cugaguagucaaaccuuau

SEQ ID NO: 2034296 - RNA, 19 nt, Artificial Sequence
  Description of Artificial Sequence: Synthetic oligonucleotide
cgugugccaaggaacuaug

SEQ ID NO: 2034297 - RNA, 19 nt, Artificial Sequence
  Description of Artificial Sequence: Synthetic oligonucleotide
gggcuauguaacaagcagu

SEQ ID NO: 2034298 - RNA, 19 nt, Artificial Sequence
  Description of Artificial Sequence: Synthetic oligonucleotide
ccggccgaagaacgcagcc

SEQ ID NO: 2034299 - RNA, 19 nt, Artificial Sequence
  Description of Artificial Sequence: Synthetic oligonucleotide
caaggaacccaggccgcca

SEQ ID NO: 2034300 - RNA, 19 nt, Artificial Sequence
  Description of Artificial Sequence: Synthetic oligonucleotide
ggugccggccgaagaacgc

SEQ ID NO: 2034301 - RNA, 19 nt, Artificial Sequence
  Description of Artificial Sequence: Synthetic oligonucleotide
gaacuaugucguccuucau

SEQ ID NO: 2034302 - RNA, 19 nt, Artificial Sequence
  Description of Artificial Sequence: Synthetic oligonucleotide
gugccuugguaccauucau

SEQ ID NO: 2034303 - RNA, 19 nt, Artificial Sequence
  Description of Artificial Sequence: Synthetic oligonucleotide
gggcuagcgacgcgcucag

SEQ ID NO: 2034304 - RNA, 19 nt, Artificial Sequence
  Description of Artificial Sequence: Synthetic oligonucleotide
gugguccuucagcuacauc

SEQ ID NO: 2034305 - RNA, 19 nt, Artificial Sequence
  Description of Artificial Sequence: Synthetic oligonucleotide
gcauuagagugcauaccaa

SEQ ID NO: 2034306 - RNA, 19 nt, Artificial Sequence
  Description of Artificial Sequence: Synthetic oligonucleotide
gugccggccgaagaacgca

SEQ ID NO: 2034307 - RNA, 19 nt, Artificial Sequence
  Description of Artificial Sequence: Synthetic oligonucleotide
cagagacgugugccaagga

SEQ ID NO: 2034308 - RNA, 19 nt, Artificial Sequence
  Description of Artificial Sequence: Synthetic oligonucleotide
gccgugcaauugcagcaug

SEQ ID NO: 2034309 - RNA, 19 nt, Artificial Sequence
  Description of Artificial Sequence: Synthetic oligonucleotide
cagccacuugcagagacgu

SEQ ID NO: 2034310 - RNA, 19 nt, Artificial Sequence
  Description of Artificial Sequence: Synthetic oligonucleotide
gacgugugccaaggaacua

SEQ ID NO: 2034311 - RNA, 19 nt, Artificial Sequence
  Description of Artificial Sequence: Synthetic oligonucleotide
ccaguaucugugguccuuc

SEQ ID NO: 2034312 - RNA, 19 nt, Artificial Sequence
  Description of Artificial Sequence: Synthetic oligonucleotide
agccacuugcagagacgug

SEQ ID NO: 2034313 - RNA, 19 nt, Artificial Sequence
  Description of Artificial Sequence: Synthetic oligonucleotide
cuguucgauugaggaaaga

SEQ ID NO: 2034314 - RNA, 19 nt, Artificial Sequence
  Description of Artificial Sequence: Synthetic oligonucleotide
gcuauaccaauaagagcua

SEQ ID NO: 2034315 - RNA, 19 nt, Artificial Sequence
  Description of Artificial Sequence: Synthetic oligonucleotide
cggugccggccgaagaacg

SEQ ID NO: 2034316 - RNA, 19 nt, Artificial Sequence
  Description of Artificial Sequence: Synthetic oligonucleotide
ggaccacuccccuuucacu

SEQ ID NO: 2034317 - RNA, 19 nt, Artificial Sequence
  Description of Artificial Sequence: Synthetic oligonucleotide
cacaggaauggggcuaugu

SEQ ID NO: 2034318 - RNA, 19 nt, Artificial Sequence
  Description of Artificial Sequence: Synthetic oligonucleotide
ccguauggaauucgguaaa

SEQ ID NO: 2034319 - RNA, 19 nt, Artificial Sequence
  Description of Artificial Sequence: Synthetic oligonucleotide
cgguaaaauccuucuggga

SEQ ID NO: 2034320 - RNA, 19 nt, Artificial Sequence
  Description of Artificial Sequence: Synthetic oligonucleotide
gcgcucaggccucggugcc

SEQ ID NO: 2034321 - RNA, 19 nt, Artificial Sequence
  Description of Artificial Sequence: Synthetic oligonucleotide
gacgcgcucaggccucggu

SEQ ID NO: 2034322 - RNA, 19 nt, Artificial Sequence
  Description of Artificial Sequence: Synthetic oligonucleotide
ggcuccgaccaguaucugu

SEQ ID NO: 2034323 - RNA, 19 nt, Artificial Sequence
  Description of Artificial Sequence: Synthetic oligonucleotide
caccuccgacaaggaaccc

SEQ ID NO: 2034324 - RNA, 19 nt, Artificial Sequence
  Description of Artificial Sequence: Synthetic oligonucleotide
gguaaggaccacuccccuu

SEQ ID NO: 2034325 - RNA, 19 nt, Artificial Sequence
  Description of Artificial Sequence: Synthetic oligonucleotide
caauaagagcuacgaccuu

SEQ ID NO: 2034326 - RNA, 19 nt, Artificial Sequence
  Description of Artificial Sequence: Synthetic oligonucleotide
cggccgaagaacgcagccg

SEQ ID NO: 2034327 - RNA, 19 nt, Artificial Sequence
  Description of Artificial Sequence: Synthetic oligonucleotide
caguugagagcgugucaau

SEQ ID NO: 2034328 - RNA, 19 nt, Artificial Sequence
  Description of Artificial Sequence: Synthetic oligonucleotide
cgaccuuuucaggccgugc

SEQ ID NO: 2034329 - RNA, 19 nt, Artificial Sequence
  Description of Artificial Sequence: Synthetic oligonucleotide
cgugaccuagagacuugca

SEQ ID NO: 2034330 - RNA, 19 nt, Artificial Sequence
  Description of Artificial Sequence: Synthetic oligonucleotide
cguauggaauucgguaaaa

SEQ ID NO: 2034331 - RNA, 19 nt, Artificial Sequence
  Description of Artificial Sequence: Synthetic oligonucleotide
ggcuagcgacgcgcucagg

SEQ ID NO: 2034332 - RNA, 19 nt, Artificial Sequence
  Description of Artificial Sequence: Synthetic oligonucleotide
gcgacgcgcucaggccucg

SEQ ID NO: 2034333 - RNA, 19 nt, Artificial Sequence
  Description of Artificial Sequence: Synthetic oligonucleotide
ccucggugccggccgaaga

SEQ ID NO: 2034334 - RNA, 19 nt, Artificial Sequence
  Description of Artificial Sequence: Synthetic oligonucleotide
ccuuuucaggccgugcaau

SEQ ID NO: 2034335 - RNA, 19 nt, Artificial Sequence
  Description of Artificial Sequence: Synthetic oligonucleotide
cgggcuagcgacgcgcuca

SEQ ID NO: 2034336 - RNA, 19 nt, Artificial Sequence
  Description of Artificial Sequence: Synthetic oligonucleotide
ccuucaugccauggagcaa

SEQ ID NO: 2034337 - RNA, 19 nt, Artificial Sequence
  Description of Artificial Sequence: Synthetic oligonucleotide
ccucaauugccagugccuu

SEQ ID NO: 2034338 - RNA, 19 nt, Artificial Sequence
  Description of Artificial Sequence: Synthetic oligonucleotide
caauugcagcaugcagcau

SEQ ID NO: 2034339 - RNA, 19 nt, Artificial Sequence
  Description of Artificial Sequence: Synthetic oligonucleotide
cgcucaggccucggugccg

SEQ ID NO: 2034340 - RNA, 19 nt, Artificial Sequence
  Description of Artificial Sequence: Synthetic oligonucleotide
gcaagcgcacagggcaggu

SEQ ID NO: 2034341 - RNA, 19 nt, Artificial Sequence
  Description of Artificial Sequence: Synthetic oligonucleotide
ccgggcuagcgacgcgcuc

SEQ ID NO: 2034342 - RNA, 19 nt, Artificial Sequence
  Description of Artificial Sequence: Synthetic oligonucleotide
cgacgcgcucaggccucgg

SEQ ID NO: 2034343 - RNA, 19 nt, Artificial Sequence
  Description of Artificial Sequence: Synthetic oligonucleotide
ggccucggugccggccgaa

SEQ ID NO: 2034344 - RNA, 19 nt, Artificial Sequence
  Description of Artificial Sequence: Synthetic oligonucleotide
aagucuuagaaacaaaacc

SEQ ID NO: 2034345 - RNA, 19 nt, Artificial Sequence
  Description of Artificial Sequence: Synthetic oligonucleotide
auuacuauuugcuugcugc

SEQ ID NO: 2034346 - RNA, 19 nt, Artificial Sequence
  Description of Artificial Sequence: Synthetic oligonucleotide
aguuugucaagagagaugc

SEQ ID NO: 2034347 - RNA, 19 nt, Artificial Sequence
  Description of Artificial Sequence: Synthetic oligonucleotide
acgucaucaaagcagaagc

SEQ ID NO: 2034348 - RNA, 19 nt, Artificial Sequence
  Description of Artificial Sequence: Synthetic oligonucleotide
aaacuugacaugaagguac

SEQ ID NO: 2034349 - RNA, 19 nt, Artificial Sequence
  Description of Artificial Sequence: Synthetic oligonucleotide
aguaguacaagguaagcag

SEQ ID NO: 2034350 - RNA, 19 nt, Artificial Sequence
  Description of Artificial Sequence: Synthetic oligonucleotide
aaacaaaacccuguggcgc

SEQ ID NO: 2034351 - RNA, 19 nt, Artificial Sequence
  Description of Artificial Sequence: Synthetic oligonucleotide
ucugacgucaucaaagcag

SEQ ID NO: 2034352 - RNA, 19 nt, Artificial Sequence
  Description of Artificial Sequence: Synthetic oligonucleotide
ugcuuaugaacuuugaacu

SEQ ID NO: 2034353 - RNA, 19 nt, Artificial Sequence
  Description of Artificial Sequence: Synthetic oligonucleotide
ucugcuauauuguucagug

SEQ ID NO: 2034354 - RNA, 19 nt, Artificial Sequence
  Description of Artificial Sequence: Synthetic oligonucleotide
aauuuccaguaguacaagg

SEQ ID NO: 2034355 - RNA, 19 nt, Artificial Sequence
  Description of Artificial Sequence: Synthetic oligonucleotide
acuguagucaccuaaauua

SEQ ID NO: 2034356 - RNA, 19 nt, Artificial Sequence
  Description of Artificial Sequence: Synthetic oligonucleotide
aaucccaagcaccacauca

SEQ ID NO: 2034357 - RNA, 19 nt, Artificial Sequence
  Description of Artificial Sequence: Synthetic oligonucleotide
aacaaaacccuguggcgcg

SEQ ID NO: 2034358 - RNA, 19 nt, Artificial Sequence
  Description of Artificial Sequence: Synthetic oligonucleotide
acgccauucaccccaaucc

SEQ ID NO: 2034359 - RNA, 19 nt, Artificial Sequence
  Description of Artificial Sequence: Synthetic oligonucleotide
aguuaaucgaauguuguuc

SEQ ID NO: 2034360 - RNA, 19 nt, Artificial Sequence
  Description of Artificial Sequence: Synthetic oligonucleotide
aggaauuacuauuugcuug

SEQ ID NO: 2034361 - RNA, 19 nt, Artificial Sequence
  Description of Artificial Sequence: Synthetic oligonucleotide
guuaaucgaauguuguucc

SEQ ID NO: 2034362 - RNA, 19 nt, Artificial Sequence
  Description of Artificial Sequence: Synthetic oligonucleotide
uuucccuuggaacugaauc

SEQ ID NO: 2034363 - RNA, 19 nt, Artificial Sequence
  Description of Artificial Sequence: Synthetic oligonucleotide
ugaguuguugcagaauugg

SEQ ID NO: 2034364 - RNA, 19 nt, Artificial Sequence
  Description of Artificial Sequence: Synthetic oligonucleotide
cuucggacgaguaagauca

SEQ ID NO: 2034365 - RNA, 19 nt, Artificial Sequence
  Description of Artificial Sequence: Synthetic oligonucleotide
uaugcacaagcgcuguugg

SEQ ID NO: 2034366 - RNA, 19 nt, Artificial Sequence
  Description of Artificial Sequence: Synthetic oligonucleotide
augggaauggcguacguag

SEQ ID NO: 2034367 - RNA, 19 nt, Artificial Sequence
  Description of Artificial Sequence: Synthetic oligonucleotide
aagucugugugauauuuga

SEQ ID NO: 2034368 - RNA, 19 nt, Artificial Sequence
  Description of Artificial Sequence: Synthetic oligonucleotide
cugcuuaugaacuuugaac

SEQ ID NO: 2034369 - RNA, 19 nt, Artificial Sequence
  Description of Artificial Sequence: Synthetic oligonucleotide
aaucccaucagcuguucug

SEQ ID NO: 2034370 - RNA, 19 nt, Artificial Sequence
  Description of Artificial Sequence: Synthetic oligonucleotide
ucaccuaaauuauaucucu

SEQ ID NO: 2034371 - RNA, 19 nt, Artificial Sequence
  Description of Artificial Sequence: Synthetic oligonucleotide
uccaguaguacaagguaag

SEQ ID NO: 2034372 - RNA, 19 nt, Artificial Sequence
  Description of Artificial Sequence: Synthetic oligonucleotide
cuuaugaacuuugaacucc

SEQ ID NO: 2034373 - RNA, 19 nt, Artificial Sequence
  Description of Artificial Sequence: Synthetic oligonucleotide
aauuacuauuugcuugcug

SEQ ID NO: 2034374 - RNA, 19 nt, Artificial Sequence
  Description of Artificial Sequence: Synthetic oligonucleotide
auucaccccaaucccaagc

SEQ ID NO: 2034375 - RNA, 19 nt, Artificial Sequence
  Description of Artificial Sequence: Synthetic oligonucleotide
cuuggaacugaaucuacag

SEQ ID NO: 2034376 - RNA, 19 nt, Artificial Sequence
  Description of Artificial Sequence: Synthetic oligonucleotide
ugugauauuugaaggcugu

SEQ ID NO: 2034377 - RNA, 19 nt, Artificial Sequence
  Description of Artificial Sequence: Synthetic oligonucleotide
agcuacgucaccuccauug

SEQ ID NO: 2034378 - RNA, 19 nt, Artificial Sequence
  Description of Artificial Sequence: Synthetic oligonucleotide
uuauaucucuuuuccauaa

SEQ ID NO: 2034379 - RNA, 19 nt, Artificial Sequence
  Description of Artificial Sequence: Synthetic oligonucleotide
aaggacgccauucacccca

SEQ ID NO: 2034380 - RNA, 19 nt, Artificial Sequence
  Description of Artificial Sequence: Synthetic oligonucleotide
aagagagaugcgcagugcu

SEQ ID NO: 2034381 - RNA, 19 nt, Artificial Sequence
  Description of Artificial Sequence: Synthetic oligonucleotide
gaacugaaucuacagagga

SEQ ID NO: 2034382 - RNA, 19 nt, Artificial Sequence
  Description of Artificial Sequence: Synthetic oligonucleotide
cauggaaacgcaugugugc

SEQ ID NO: 2034383 - RNA, 19 nt, Artificial Sequence
  Description of Artificial Sequence: Synthetic oligonucleotide
ucuugaaucccaucagcug

SEQ ID NO: 2034384 - RNA, 19 nt, Artificial Sequence
  Description of Artificial Sequence: Synthetic oligonucleotide
aaacgcaugugugcauucc

SEQ ID NO: 2034385 - RNA, 19 nt, Artificial Sequence
  Description of Artificial Sequence: Synthetic oligonucleotide
aucgaauguuguuccaaac

SEQ ID NO: 2034386 - RNA, 19 nt, Artificial Sequence
  Description of Artificial Sequence: Synthetic oligonucleotide
ggaauuacuauuugcuugc

SEQ ID NO: 2034387 - RNA, 19 nt, Artificial Sequence
  Description of Artificial Sequence: Synthetic oligonucleotide
uuuagcacugaagacuggc

SEQ ID NO: 2034388 - RNA, 19 nt, Artificial Sequence
  Description of Artificial Sequence: Synthetic oligonucleotide
uuaugaacuuugaacuccu

SEQ ID NO: 2034389 - RNA, 19 nt, Artificial Sequence
  Description of Artificial Sequence: Synthetic oligonucleotide
uguauacuccugaggcugg

SEQ ID NO: 2034390 - RNA, 19 nt, Artificial Sequence
  Description of Artificial Sequence: Synthetic oligonucleotide
ucugaugcauagcaccuga

SEQ ID NO: 2034391 - RNA, 19 nt, Artificial Sequence
  Description of Artificial Sequence: Synthetic oligonucleotide
gaauccaaagucuuagaaa

SEQ ID NO: 2034392 - RNA, 19 nt, Artificial Sequence
  Description of Artificial Sequence: Synthetic oligonucleotide
aaucgaauguuguuccaaa

SEQ ID NO: 2034393 - RNA, 19 nt, Artificial Sequence
  Description of Artificial Sequence: Synthetic oligonucleotide
agaauccaaagucuuagaa

SEQ ID NO: 2034394 - RNA, 19 nt, Artificial Sequence
  Description of Artificial Sequence: Synthetic oligonucleotide
aacuuugaacuccuuccca

SEQ ID NO: 2034395 - RNA, 19 nt, Artificial Sequence
  Description of Artificial Sequence: Synthetic oligonucleotide
cuauauuguucagugcugg

SEQ ID NO: 2034396 - RNA, 19 nt, Artificial Sequence
  Description of Artificial Sequence: Synthetic oligonucleotide
ugugcauuccauccucccc

SEQ ID NO: 2034397 - RNA, 19 nt, Artificial Sequence
  Description of Artificial Sequence: Synthetic oligonucleotide
uccauaauuuccaguagua

SEQ ID NO: 2034398 - RNA, 19 nt, Artificial Sequence
  Description of Artificial Sequence: Synthetic oligonucleotide
uauuguucagugcuggcuu

SEQ ID NO: 2034399 - RNA, 19 nt, Artificial Sequence
  Description of Artificial Sequence: Synthetic oligonucleotide
uauauuguucagugcuggc

SEQ ID NO: 2034400 - RNA, 19 nt, Artificial Sequence
  Description of Artificial Sequence: Synthetic oligonucleotide
ucguauuugcgcuucggac

SEQ ID NO: 2034401 - RNA, 19 nt, Artificial Sequence
  Description of Artificial Sequence: Synthetic oligonucleotide
gaacugacugcuguuagug

SEQ ID NO: 2034402 - RNA, 19 nt, Artificial Sequence
  Description of Artificial Sequence: Synthetic oligonucleotide
agccuuauccugcuuauga

SEQ ID NO: 2034403 - RNA, 19 nt, Artificial Sequence
  Description of Artificial Sequence: Synthetic oligonucleotide
acugcgcacuagcagaauc

SEQ ID NO: 2034404 - RNA, 19 nt, Artificial Sequence
  Description of Artificial Sequence: Synthetic oligonucleotide
agcgcuguugguguagugc

SEQ ID NO: 2034405 - RNA, 19 nt, Artificial Sequence
  Description of Artificial Sequence: Synthetic oligonucleotide
gacucguaugcacaagcgc

SEQ ID NO: 2034406 - RNA, 19 nt, Artificial Sequence
  Description of Artificial Sequence: Synthetic oligonucleotide
ugcgcuucggacgaguaag

SEQ ID NO: 2034407 - RNA, 19 nt, Artificial Sequence
  Description of Artificial Sequence: Synthetic oligonucleotide
uuacuauuugcuugcugcu

SEQ ID NO: 2034408 - RNA, 19 nt, Artificial Sequence
  Description of Artificial Sequence: Synthetic oligonucleotide
auuauaucucuuuuccaua

SEQ ID NO: 2034409 - RNA, 19 nt, Artificial Sequence
  Description of Artificial Sequence: Synthetic oligonucleotide
gacgucaucaaagcagaag

SEQ ID NO: 2034410 - RNA, 19 nt, Artificial Sequence
  Description of Artificial Sequence: Synthetic oligonucleotide
ugaugcauagcaccugauc

SEQ ID NO: 2034411 - RNA, 19 nt, Artificial Sequence
  Description of Artificial Sequence: Synthetic oligonucleotide
ggaaggacgccauucaccc

SEQ ID NO: 2034412 - RNA, 19 nt, Artificial Sequence
  Description of Artificial Sequence: Synthetic oligonucleotide
augugugcauuccauccuc

SEQ ID NO: 2034413 - RNA, 19 nt, Artificial Sequence
  Description of Artificial Sequence: Synthetic oligonucleotide
uuccgacucaugauuuucc

SEQ ID NO: 2034414 - RNA, 19 nt, Artificial Sequence
  Description of Artificial Sequence: Synthetic oligonucleotide
uguaagcccuuguauacuc

SEQ ID NO: 2034415 - RNA, 19 nt, Artificial Sequence
  Description of Artificial Sequence: Synthetic oligonucleotide
ugggaauggcguacguagg

SEQ ID NO: 2034416 - RNA, 19 nt, Artificial Sequence
  Description of Artificial Sequence: Synthetic oligonucleotide
aacgcaugugugcauucca

SEQ ID NO: 2034417 - RNA, 19 nt, Artificial Sequence
  Description of Artificial Sequence: Synthetic oligonucleotide
auaucucuuuuccauaauu

SEQ ID NO: 2034418 - RNA, 19 nt, Artificial Sequence
  Description of Artificial Sequence: Synthetic oligonucleotide
caaacugcgcacuagcaga

SEQ ID NO: 2034419 - RNA, 19 nt, Artificial Sequence
  Description of Artificial Sequence: Synthetic oligonucleotide
agugcuacugagguguaag

SEQ ID NO: 2034420 - RNA, 19 nt, Artificial Sequence
  Description of Artificial Sequence: Synthetic oligonucleotide
uuaaucgaauguuguucca

SEQ ID NO: 2034421 - RNA, 19 nt, Artificial Sequence
  Description of Artificial Sequence: Synthetic oligonucleotide
aauggcguacguaggcuuc

SEQ ID NO: 2034422 - RNA, 19 nt, Artificial Sequence
  Description of Artificial Sequence: Synthetic oligonucleotide
accuaaauuauaucucuuu

SEQ ID NO: 2034423 - RNA, 19 nt, Artificial Sequence
  Description of Artificial Sequence: Synthetic oligonucleotide
ugucgacggacucguaugc

SEQ ID NO: 2034424 - RNA, 19 nt, Artificial Sequence
  Description of Artificial Sequence: Synthetic oligonucleotide
auuccauccuccccucgcg

SEQ ID NO: 2034425 - RNA, 19 nt, Artificial Sequence
  Description of Artificial Sequence: Synthetic oligonucleotide
aauuggcagcaguacuuga

SEQ ID NO: 2034426 - RNA, 19 nt, Artificial Sequence
  Description of Artificial Sequence: Synthetic oligonucleotide
aaaacccuguggcgcggcg

SEQ ID NO: 2034427 - RNA, 19 nt, Artificial Sequence
  Description of Artificial Sequence: Synthetic oligonucleotide
aacgccucugaugcauagc

SEQ ID NO: 2034428 - RNA, 19 nt, Artificial Sequence
  Description of Artificial Sequence: Synthetic oligonucleotide
uguagucaccuaaauuaua

SEQ ID NO: 2034429 - RNA, 19 nt, Artificial Sequence
  Description of Artificial Sequence: Synthetic oligonucleotide
uccgacucaugauuuuccc

SEQ ID NO: 2034430 - RNA, 19 nt, Artificial Sequence
  Description of Artificial Sequence: Synthetic oligonucleotide
acuauuugcuugcugcuuu

SEQ ID NO: 2034431 - RNA, 19 nt, Artificial Sequence
  Description of Artificial Sequence: Synthetic oligonucleotide
ugugugcauuccauccucc

SEQ ID NO: 2034432 - RNA, 19 nt, Artificial Sequence
  Description of Artificial Sequence: Synthetic oligonucleotide
acaguuaaucgaauguugu

SEQ ID NO: 2034433 - RNA, 19 nt, Artificial Sequence
  Description of Artificial Sequence: Synthetic oligonucleotide
acucguaugcacaagcgcu

SEQ ID NO: 2034434 - RNA, 19 nt, Artificial Sequence
  Description of Artificial Sequence: Synthetic oligonucleotide
gcguacguaggcuucaccg

SEQ ID NO: 2034435 - RNA, 19 nt, Artificial Sequence
  Description of Artificial Sequence: Synthetic oligonucleotide
cugcgcacuagcagaaucc

SEQ ID NO: 2034436 - RNA, 19 nt, Artificial Sequence
  Description of Artificial Sequence: Synthetic oligonucleotide
gaauuggcagcaguacuug

SEQ ID NO: 2034437 - RNA, 19 nt, Artificial Sequence
  Description of Artificial Sequence: Synthetic oligonucleotide
guacguaggcuucaccggc

SEQ ID NO: 2034438 - RNA, 19 nt, Artificial Sequence
  Description of Artificial Sequence: Synthetic oligonucleotide
ugaacugacugcuguuagu

SEQ ID NO: 2034439 - RNA, 19 nt, Artificial Sequence
  Description of Artificial Sequence: Synthetic oligonucleotide
gacucaugauuuucccuug

SEQ ID NO: 2034440 - RNA, 19 nt, Artificial Sequence
  Description of Artificial Sequence: Synthetic oligonucleotide
acgaugggaggacuuuggg

SEQ ID NO: 2034441 - RNA, 19 nt, Artificial Sequence
  Description of Artificial Sequence: Synthetic oligonucleotide
uauaucucuuuuccauaau

SEQ ID NO: 2034442 - RNA, 19 nt, Artificial Sequence
  Description of Artificial Sequence: Synthetic oligonucleotide
gguguaagcccuuguauac

SEQ ID NO: 2034443 - RNA, 19 nt, Artificial Sequence
  Description of Artificial Sequence: Synthetic oligonucleotide
acgucaccuccauugcuac

SEQ ID NO: 2034444 - RNA, 19 nt, Artificial Sequence
  Description of Artificial Sequence: Synthetic oligonucleotide
ugcauagcaccugaucaug

SEQ ID NO: 2034445 - RNA, 19 nt, Artificial Sequence
  Description of Artificial Sequence: Synthetic oligonucleotide
uguugguguagugcuacug

SEQ ID NO: 2034446 - RNA, 19 nt, Artificial Sequence
  Description of Artificial Sequence: Synthetic oligonucleotide
gacgaugggaggacuuugg

SEQ ID NO: 2034447 - RNA, 19 nt, Artificial Sequence
  Description of Artificial Sequence: Synthetic oligonucleotide
cguauuugcgcuucggacg

SEQ ID NO: 2034448 - RNA, 19 nt, Artificial Sequence
  Description of Artificial Sequence: Synthetic oligonucleotide
uaacaaaguugaaccugcu

SEQ ID NO: 2034449 - RNA, 19 nt, Artificial Sequence
  Description of Artificial Sequence: Synthetic oligonucleotide
uaaucgaauguuguuccaa

SEQ ID NO: 2034450 - RNA, 19 nt, Artificial Sequence
  Description of Artificial Sequence: Synthetic oligonucleotide
guauuugcgcuucggacga

SEQ ID NO: 2034451 - RNA, 19 nt, Artificial Sequence
  Description of Artificial Sequence: Synthetic oligonucleotide
agguguaagcccuuguaua

SEQ ID NO: 2034452 - RNA, 19 nt, Artificial Sequence
  Description of Artificial Sequence: Synthetic oligonucleotide
uucaccggcugucucugug

SEQ ID NO: 2034453 - RNA, 19 nt, Artificial Sequence
  Description of Artificial Sequence: Synthetic oligonucleotide
aucuugaaucccaucagcu

SEQ ID NO: 2034454 - RNA, 19 nt, Artificial Sequence
  Description of Artificial Sequence: Synthetic oligonucleotide
auggaaacgcaugugugca

SEQ ID NO: 2034455 - RNA, 19 nt, Artificial Sequence
  Description of Artificial Sequence: Synthetic oligonucleotide
accuuggaaacuugacaug

SEQ ID NO: 2034456 - RNA, 19 nt, Artificial Sequence
  Description of Artificial Sequence: Synthetic oligonucleotide
gaaacuugacaugaaggua

SEQ ID NO: 2034457 - RNA, 19 nt, Artificial Sequence
  Description of Artificial Sequence: Synthetic oligonucleotide
ggaaacuugacaugaaggu

SEQ ID NO: 2034458 - RNA, 19 nt, Artificial Sequence
  Description of Artificial Sequence: Synthetic oligonucleotide
cucguaugcacaagcgcug

SEQ ID NO: 2034459 - RNA, 19 nt, Artificial Sequence
  Description of Artificial Sequence: Synthetic oligonucleotide
cugacgucaucaaagcaga

SEQ ID NO: 2034460 - RNA, 19 nt, Artificial Sequence
  Description of Artificial Sequence: Synthetic oligonucleotide
cuuugaacuccuucccauc

SEQ ID NO: 2034461 - RNA, 19 nt, Artificial Sequence
  Description of Artificial Sequence: Synthetic oligonucleotide
cuugaaucccaucagcugu

SEQ ID NO: 2034462 - RNA, 19 nt, Artificial Sequence
  Description of Artificial Sequence: Synthetic oligonucleotide
ucgacggacucguaugcac

SEQ ID NO: 2034463 - RNA, 19 nt, Artificial Sequence
  Description of Artificial Sequence: Synthetic oligonucleotide
cugucgacggacucguaug

SEQ ID NO: 2034464 - RNA, 19 nt, Artificial Sequence
  Description of Artificial Sequence: Synthetic oligonucleotide
gcaaacugcgcacuagcag

SEQ ID NO: 2034465 - RNA, 19 nt, Artificial Sequence
  Description of Artificial Sequence: Synthetic oligonucleotide
augcauagcaccugaucau

SEQ ID NO: 2034466 - RNA, 19 nt, Artificial Sequence
  Description of Artificial Sequence: Synthetic oligonucleotide
auguuguuccaaacagaac

SEQ ID NO: 2034467 - RNA, 19 nt, Artificial Sequence
  Description of Artificial Sequence: Synthetic oligonucleotide
cauagcaccugaucauguc

SEQ ID NO: 2034468 - RNA, 19 nt, Artificial Sequence
  Description of Artificial Sequence: Synthetic oligonucleotide
cuagcagaauccaaagucu

SEQ ID NO: 2034469 - RNA, 19 nt, Artificial Sequence
  Description of Artificial Sequence: Synthetic oligonucleotide
agcaguacuugaugacuca

SEQ ID NO: 2034470 - RNA, 19 nt, Artificial Sequence
  Description of Artificial Sequence: Synthetic oligonucleotide
gacgccauucaccccaauc

SEQ ID NO: 2034471 - RNA, 19 nt, Artificial Sequence
  Description of Artificial Sequence: Synthetic oligonucleotide
caccugaucauguccccag

SEQ ID NO: 2034472 - RNA, 19 nt, Artificial Sequence
  Description of Artificial Sequence: Synthetic oligonucleotide
accucagacaugaucucuc

SEQ ID NO: 2034473 - RNA, 19 nt, Artificial Sequence
  Description of Artificial Sequence: Synthetic oligonucleotide
gaaacgcaugugugcauuc

SEQ ID NO: 2034474 - RNA, 19 nt, Artificial Sequence
  Description of Artificial Sequence: Synthetic oligonucleotide
cugaaucuacagaggauga

SEQ ID NO: 2034475 - RNA, 19 nt, Artificial Sequence
  Description of Artificial Sequence: Synthetic oligonucleotide
accugaucauguccccagg

SEQ ID NO: 2034476 - RNA, 19 nt, Artificial Sequence
  Description of Artificial Sequence: Synthetic oligonucleotide
cuccccucgcguuccaacg

SEQ ID NO: 2034477 - RNA, 19 nt, Artificial Sequence
  Description of Artificial Sequence: Synthetic oligonucleotide
ugcgcagugcugccgaguc

SEQ ID NO: 2034478 - RNA, 19 nt, Artificial Sequence
  Description of Artificial Sequence: Synthetic oligonucleotide
aacccgaagucugugugau

SEQ ID NO: 2034479 - RNA, 19 nt, Artificial Sequence
  Description of Artificial Sequence: Synthetic oligonucleotide
ugaaucuacagaggaugau

SEQ ID NO: 2034480 - RNA, 19 nt, Artificial Sequence
  Description of Artificial Sequence: Synthetic oligonucleotide
gugugauauuugaaggcug

SEQ ID NO: 2034481 - RNA, 19 nt, Artificial Sequence
  Description of Artificial Sequence: Synthetic oligonucleotide
agaugcgcagugcugccga

SEQ ID NO: 2034482 - RNA, 19 nt, Artificial Sequence
  Description of Artificial Sequence: Synthetic oligonucleotide
ucccaagcaccacaucauc

SEQ ID NO: 2034483 - RNA, 19 nt, Artificial Sequence
  Description of Artificial Sequence: Synthetic oligonucleotide
uacguaggcuucaccggcu

SEQ ID NO: 2034484 - RNA, 19 nt, Artificial Sequence
  Description of Artificial Sequence: Synthetic oligonucleotide
caguaguacaagguaagca

SEQ ID NO: 2034485 - RNA, 19 nt, Artificial Sequence
  Description of Artificial Sequence: Synthetic oligonucleotide
ggaacccgaagucugugug

SEQ ID NO: 2034486 - RNA, 19 nt, Artificial Sequence
  Description of Artificial Sequence: Synthetic oligonucleotide
gaacccgaagucuguguga

SEQ ID NO: 2034487 - RNA, 19 nt, Artificial Sequence
  Description of Artificial Sequence: Synthetic oligonucleotide
ggaccuuggaaacuugaca

SEQ ID NO: 2034488 - RNA, 19 nt, Artificial Sequence
  Description of Artificial Sequence: Synthetic oligonucleotide
uuuuccgacucaugauuuu

SEQ ID NO: 2034489 - RNA, 19 nt, Artificial Sequence
  Description of Artificial Sequence: Synthetic oligonucleotide
gcuuaugaacuuugaacuc

SEQ ID NO: 2034490 - RNA, 19 nt, Artificial Sequence
  Description of Artificial Sequence: Synthetic oligonucleotide
gugcuacugagguguaagc

SEQ ID NO: 2034491 - RNA, 19 nt, Artificial Sequence
  Description of Artificial Sequence: Synthetic oligonucleotide
ugcgcacuagcagaaucca

SEQ ID NO: 2034492 - RNA, 19 nt, Artificial Sequence
  Description of Artificial Sequence: Synthetic oligonucleotide
gggaauggcguacguaggc

SEQ ID NO: 2034493 - RNA, 19 nt, Artificial Sequence
  Description of Artificial Sequence: Synthetic oligonucleotide
cuguuagugauggggauga

SEQ ID NO: 2034494 - RNA, 19 nt, Artificial Sequence
  Description of Artificial Sequence: Synthetic oligonucleotide
aucagcuguucugacguca

SEQ ID NO: 2034495 - RNA, 19 nt, Artificial Sequence
  Description of Artificial Sequence: Synthetic oligonucleotide
ugaugggaauggcguacgu

SEQ ID NO: 2034496 - RNA, 19 nt, Artificial Sequence
  Description of Artificial Sequence: Synthetic oligonucleotide
guagucaccuaaauuauau

SEQ ID NO: 2034497 - RNA, 19 nt, Artificial Sequence
  Description of Artificial Sequence: Synthetic oligonucleotide
gaggaauuacuauuugcuu

SEQ ID NO: 2034498 - RNA, 19 nt, Artificial Sequence
  Description of Artificial Sequence: Synthetic oligonucleotide
ucggacgaguaagaucagc

SEQ ID NO: 2034499 - RNA, 19 nt, Artificial Sequence
  Description of Artificial Sequence: Synthetic oligonucleotide
gaaggacgccauucacccc

SEQ ID NO: 2034500 - RNA, 19 nt, Artificial Sequence
  Description of Artificial Sequence: Synthetic oligonucleotide
gacgaguaagaucagccuu

SEQ ID NO: 2034501 - RNA, 19 nt, Artificial Sequence
  Description of Artificial Sequence: Synthetic oligonucleotide
uuugcgcuucggacgagua

SEQ ID NO: 2034502 - RNA, 19 nt, Artificial Sequence
  Description of Artificial Sequence: Synthetic oligonucleotide
uccccucgcguuccaacgc

SEQ ID NO: 2034503 - RNA, 19 nt, Artificial Sequence
  Description of Artificial Sequence: Synthetic oligonucleotide
uauccugcuuaugaacuuu

SEQ ID NO: 2034504 - RNA, 19 nt, Artificial Sequence
  Description of Artificial Sequence: Synthetic oligonucleotide
uucggacgaguaagaucag

SEQ ID NO: 2034505 - RNA, 19 nt, Artificial Sequence
  Description of Artificial Sequence: Synthetic oligonucleotide
cauucaccccaaucccaag

SEQ ID NO: 2034506 - RNA, 19 nt, Artificial Sequence
  Description of Artificial Sequence: Synthetic oligonucleotide
uccugguguuugaacugac

SEQ ID NO: 2034507 - RNA, 19 nt, Artificial Sequence
  Description of Artificial Sequence: Synthetic oligonucleotide
ggacucguaugcacaagcg

SEQ ID NO: 2034508 - RNA, 19 nt, Artificial Sequence
  Description of Artificial Sequence: Synthetic oligonucleotide
cggacgaguaagaucagcc

SEQ ID NO: 2034509 - RNA, 19 nt, Artificial Sequence
  Description of Artificial Sequence: Synthetic oligonucleotide
aagcgcuguugguguagug

SEQ ID NO: 2034510 - RNA, 19 nt, Artificial Sequence
  Description of Artificial Sequence: Synthetic oligonucleotide
uaugaacuuugaacuccuu

SEQ ID NO: 2034511 - RNA, 19 nt, Artificial Sequence
  Description of Artificial Sequence: Synthetic oligonucleotide
cucguauuugcgcuucgga

SEQ ID NO: 2034512 - RNA, 19 nt, Artificial Sequence
  Description of Artificial Sequence: Synthetic oligonucleotide
gagguguaagcccuuguau

SEQ ID NO: 2034513 - RNA, 19 nt, Artificial Sequence
  Description of Artificial Sequence: Synthetic oligonucleotide
uacuauuugcuugcugcuu

SEQ ID NO: 2034514 - RNA, 19 nt, Artificial Sequence
  Description of Artificial Sequence: Synthetic oligonucleotide
acaagcgcuguugguguag

SEQ ID NO: 2034515 - RNA, 19 nt, Artificial Sequence
  Description of Artificial Sequence: Synthetic oligonucleotide
gcuauauuguucagugcug

SEQ ID NO: 2034516 - RNA, 19 nt, Artificial Sequence
  Description of Artificial Sequence: Synthetic oligonucleotide
agacgaugggaggacuuug

SEQ ID NO: 2034517 - RNA, 19 nt, Artificial Sequence
  Description of Artificial Sequence: Synthetic oligonucleotide
uugcgcuucggacgaguaa

SEQ ID NO: 2034518 - RNA, 19 nt, Artificial Sequence
  Description of Artificial Sequence: Synthetic oligonucleotide
cuugacaugaagguacagu

SEQ ID NO: 2034519 - RNA, 19 nt, Artificial Sequence
  Description of Artificial Sequence: Synthetic oligonucleotide
aagguacaguuaaucgaau

SEQ ID NO: 2034520 - RNA, 19 nt, Artificial Sequence
  Description of Artificial Sequence: Synthetic oligonucleotide
gacggacucguaugcacaa

SEQ ID NO: 2034521 - RNA, 19 nt, Artificial Sequence
  Description of Artificial Sequence: Synthetic oligonucleotide
gaugcgcagugcugccgag

SEQ ID NO: 2034522 - RNA, 19 nt, Artificial Sequence
  Description of Artificial Sequence: Synthetic oligonucleotide
gcuacgucaccuccauugc

SEQ ID NO: 2034523 - RNA, 19 nt, Artificial Sequence
  Description of Artificial Sequence: Synthetic oligonucleotide
ugacgucaucaaagcagaa

SEQ ID NO: 2034524 - RNA, 19 nt, Artificial Sequence
  Description of Artificial Sequence: Synthetic oligonucleotide
cuuggaaacuugacaugaa

SEQ ID NO: 2034525 - RNA, 19 nt, Artificial Sequence
  Description of Artificial Sequence: Synthetic oligonucleotide
cagaagcagcaaacugcgc

SEQ ID NO: 2034526 - RNA, 19 nt, Artificial Sequence
  Description of Artificial Sequence: Synthetic oligonucleotide
acgaguaagaucagccuua

SEQ ID NO: 2034527 - RNA, 19 nt, Artificial Sequence
  Description of Artificial Sequence: Synthetic oligonucleotide
uggaaacgcaugugugcau

SEQ ID NO: 2034528 - RNA, 19 nt, Artificial Sequence
  Description of Artificial Sequence: Synthetic oligonucleotide
uccgugaccuccugguguu

SEQ ID NO: 2034529 - RNA, 19 nt, Artificial Sequence
  Description of Artificial Sequence: Synthetic oligonucleotide
gguguuugaacugacugcu

SEQ ID NO: 2034530 - RNA, 19 nt, Artificial Sequence
  Description of Artificial Sequence: Synthetic oligonucleotide
ugggaacccgaagucugug

SEQ ID NO: 2034531 - RNA, 19 nt, Artificial Sequence
  Description of Artificial Sequence: Synthetic oligonucleotide
ugcauuccauccuccccuc

SEQ ID NO: 2034532 - RNA, 19 nt, Artificial Sequence
  Description of Artificial Sequence: Synthetic oligonucleotide
cguacguaggcuucaccgg

SEQ ID NO: 2034533 - RNA, 19 nt, Artificial Sequence
  Description of Artificial Sequence: Synthetic oligonucleotide
gcuucggacgaguaagauc

SEQ ID NO: 2034534 - RNA, 19 nt, Artificial Sequence
  Description of Artificial Sequence: Synthetic oligonucleotide
augcacaagcgcuguuggu

SEQ ID NO: 2034535 - RNA, 19 nt, Artificial Sequence
  Description of Artificial Sequence: Synthetic oligonucleotide
cuugaugacucagugcacu

SEQ ID NO: 2034536 - RNA, 19 nt, Artificial Sequence
  Description of Artificial Sequence: Synthetic oligonucleotide
ucgcguuccaacgccucug

SEQ ID NO: 2034537 - RNA, 19 nt, Artificial Sequence
  Description of Artificial Sequence: Synthetic oligonucleotide
accccaaucccaagcacca

SEQ ID NO: 2034538 - RNA, 19 nt, Artificial Sequence
  Description of Artificial Sequence: Synthetic oligonucleotide
gcagaauuggcagcaguac

SEQ ID NO: 2034539 - RNA, 19 nt, Artificial Sequence
  Description of Artificial Sequence: Synthetic oligonucleotide
auuugcgcuucggacgagu

SEQ ID NO: 2034540 - RNA, 19 nt, Artificial Sequence
  Description of Artificial Sequence: Synthetic oligonucleotide
gcuguuagugauggggaug

SEQ ID NO: 2034541 - RNA, 19 nt, Artificial Sequence
  Description of Artificial Sequence: Synthetic oligonucleotide
ccugaucauguccccaggc

SEQ ID NO: 2034542 - RNA, 19 nt, Artificial Sequence
  Description of Artificial Sequence: Synthetic oligonucleotide
cauccgugaccuccuggug

SEQ ID NO: 2034543 - RNA, 19 nt, Artificial Sequence
  Description of Artificial Sequence: Synthetic oligonucleotide
guacaguuaaucgaauguu

SEQ ID NO: 2034544 - RNA, 19 nt, Artificial Sequence
  Description of Artificial Sequence: Synthetic oligonucleotide
cacugugggaacccgaagu

SEQ ID NO: 2034545 - RNA, 19 nt, Artificial Sequence
  Description of Artificial Sequence: Synthetic oligonucleotide
cuguagucaccuaaauuau

SEQ ID NO: 2034546 - RNA, 19 nt, Artificial Sequence
  Description of Artificial Sequence: Synthetic oligonucleotide
ugaaucccaucagcuguuc

SEQ ID NO: 2034547 - RNA, 19 nt, Artificial Sequence
  Description of Artificial Sequence: Synthetic oligonucleotide
ggcggcagacgaugggagg

SEQ ID NO: 2034548 - RNA, 19 nt, Artificial Sequence
  Description of Artificial Sequence: Synthetic oligonucleotide
aaacagaaccugaguuguu

SEQ ID NO: 2034549 - RNA, 19 nt, Artificial Sequence
  Description of Artificial Sequence: Synthetic oligonucleotide
cgaugggaggacuuugggc

SEQ ID NO: 2034550 - RNA, 19 nt, Artificial Sequence
  Description of Artificial Sequence: Synthetic oligonucleotide
gcuguugguguagugcuac

SEQ ID NO: 2034551 - RNA, 19 nt, Artificial Sequence
  Description of Artificial Sequence: Synthetic oligonucleotide
gaauggcguacguaggcuu

SEQ ID NO: 2034552 - RNA, 19 nt, Artificial Sequence
  Description of Artificial Sequence: Synthetic oligonucleotide
uauuugcgcuucggacgag

SEQ ID NO: 2034553 - RNA, 19 nt, Artificial Sequence
  Description of Artificial Sequence: Synthetic oligonucleotide
ccaguaguacaagguaagc

SEQ ID NO: 2034554 - RNA, 19 nt, Artificial Sequence
  Description of Artificial Sequence: Synthetic oligonucleotide
gaaucccaucagcuguucu

SEQ ID NO: 2034555 - RNA, 19 nt, Artificial Sequence
  Description of Artificial Sequence: Synthetic oligonucleotide
cauccuccccucgcguucc

SEQ ID NO: 2034556 - RNA, 19 nt, Artificial Sequence
  Description of Artificial Sequence: Synthetic oligonucleotide
uuccaacgccucugaugca

SEQ ID NO: 2034557 - RNA, 19 nt, Artificial Sequence
  Description of Artificial Sequence: Synthetic oligonucleotide
caaaacccuguggcgcggc

SEQ ID NO: 2034558 - RNA, 19 nt, Artificial Sequence
  Description of Artificial Sequence: Synthetic oligonucleotide
acggacucguaugcacaag

SEQ ID NO: 2034559 - RNA, 19 nt, Artificial Sequence
  Description of Artificial Sequence: Synthetic oligonucleotide
caucagcuguucugacguc

SEQ ID NO: 2034560 - RNA, 19 nt, Artificial Sequence
  Description of Artificial Sequence: Synthetic oligonucleotide
gccauggaaacgcaugugu

SEQ ID NO: 2034561 - RNA, 19 nt, Artificial Sequence
  Description of Artificial Sequence: Synthetic oligonucleotide
cggacucguaugcacaagc

SEQ ID NO: 2034562 - RNA, 19 nt, Artificial Sequence
  Description of Artificial Sequence: Synthetic oligonucleotide
auggcguacguaggcuuca

SEQ ID NO: 2034563 - RNA, 19 nt, Artificial Sequence
  Description of Artificial Sequence: Synthetic oligonucleotide
caguacuugaugacucagu

SEQ ID NO: 2034564 - RNA, 19 nt, Artificial Sequence
  Description of Artificial Sequence: Synthetic oligonucleotide
aucauguccccaggcugca

SEQ ID NO: 2034565 - RNA, 19 nt, Artificial Sequence
  Description of Artificial Sequence: Synthetic oligonucleotide
cacugaagacuggcagcgc

SEQ ID NO: 2034566 - RNA, 19 nt, Artificial Sequence
  Description of Artificial Sequence: Synthetic oligonucleotide
gggaccuuggaaacuugac

SEQ ID NO: 2034567 - RNA, 19 nt, Artificial Sequence
  Description of Artificial Sequence: Synthetic oligonucleotide
ggacgaguaagaucagccu

SEQ ID NO: 2034568 - RNA, 19 nt, Artificial Sequence
  Description of Artificial Sequence: Synthetic oligonucleotide
uagugcuacugagguguaa

SEQ ID NO: 2034569 - RNA, 19 nt, Artificial Sequence
  Description of Artificial Sequence: Synthetic oligonucleotide
cacuagcagaauccaaagu

SEQ ID NO: 2034570 - RNA, 19 nt, Artificial Sequence
  Description of Artificial Sequence: Synthetic oligonucleotide
cauugcuacuguguugucu

SEQ ID NO: 2034571 - RNA, 19 nt, Artificial Sequence
  Description of Artificial Sequence: Synthetic oligonucleotide
gcauuccauccuccccucg

SEQ ID NO: 2034572 - RNA, 19 nt, Artificial Sequence
  Description of Artificial Sequence: Synthetic oligonucleotide
acgcaugugugcauuccau

SEQ ID NO: 2034573 - RNA, 19 nt, Artificial Sequence
  Description of Artificial Sequence: Synthetic oligonucleotide
gucugcuauauuguucagu

SEQ ID NO: 2034574 - RNA, 19 nt, Artificial Sequence
  Description of Artificial Sequence: Synthetic oligonucleotide
gcuuuuccgacucaugauu

SEQ ID NO: 2034575 - RNA, 19 nt, Artificial Sequence
  Description of Artificial Sequence: Synthetic oligonucleotide
gccuuauccugcuuaugaa

SEQ ID NO: 2034576 - RNA, 19 nt, Artificial Sequence
  Description of Artificial Sequence: Synthetic oligonucleotide
ccuaaauuauaucucuuuu

SEQ ID NO: 2034577 - RNA, 19 nt, Artificial Sequence
  Description of Artificial Sequence: Synthetic oligonucleotide
ggaugaugggaauggcgua

SEQ ID NO: 2034578 - RNA, 19 nt, Artificial Sequence
  Description of Artificial Sequence: Synthetic oligonucleotide
gcuacuguguugucugcua

SEQ ID NO: 2034579 - RNA, 19 nt, Artificial Sequence
  Description of Artificial Sequence: Synthetic oligonucleotide
ccaucagcuguucugacgu

SEQ ID NO: 2034580 - RNA, 19 nt, Artificial Sequence
  Description of Artificial Sequence: Synthetic oligonucleotide
ggcguacguaggcuucacc

SEQ ID NO: 2034581 - RNA, 19 nt, Artificial Sequence
  Description of Artificial Sequence: Synthetic oligonucleotide
ugcucccagggagcuacgu

SEQ ID NO: 2034582 - RNA, 19 nt, Artificial Sequence
  Description of Artificial Sequence: Synthetic oligonucleotide
cgccauucaccccaauccc

SEQ ID NO: 2034583 - RNA, 19 nt, Artificial Sequence
  Description of Artificial Sequence: Synthetic oligonucleotide
uguuagugauggggaugau

SEQ ID NO: 2034584 - RNA, 19 nt, Artificial Sequence
  Description of Artificial Sequence: Synthetic oligonucleotide
cgcacuagcagaauccaaa

SEQ ID NO: 2034585 - RNA, 19 nt, Artificial Sequence
  Description of Artificial Sequence: Synthetic oligonucleotide
guguaagcccuuguauacu

SEQ ID NO: 2034586 - RNA, 19 nt, Artificial Sequence
  Description of Artificial Sequence: Synthetic oligonucleotide
uggcguacguaggcuucac

SEQ ID NO: 2034587 - RNA, 19 nt, Artificial Sequence
  Description of Artificial Sequence: Synthetic oligonucleotide
gcuucaccggcugucucug

SEQ ID NO: 2034588 - RNA, 19 nt, Artificial Sequence
  Description of Artificial Sequence: Synthetic oligonucleotide
caccuaaauuauaucucuu

SEQ ID NO: 2034589 - RNA, 19 nt, Artificial Sequence
  Description of Artificial Sequence: Synthetic oligonucleotide
cuacgucaccuccauugcu

SEQ ID NO: 2034590 - RNA, 19 nt, Artificial Sequence
  Description of Artificial Sequence: Synthetic oligonucleotide
ccauucaccccaaucccaa

SEQ ID NO: 2034591 - RNA, 19 nt, Artificial Sequence
  Description of Artificial Sequence: Synthetic oligonucleotide
ccugaguuguugcagaauu

SEQ ID NO: 2034592 - RNA, 19 nt, Artificial Sequence
  Description of Artificial Sequence: Synthetic oligonucleotide
gccauucaccccaauccca

SEQ ID NO: 2034593 - RNA, 19 nt, Artificial Sequence
  Description of Artificial Sequence: Synthetic oligonucleotide
gcgcuguugguguagugcu

SEQ ID NO: 2034594 - RNA, 19 nt, Artificial Sequence
  Description of Artificial Sequence: Synthetic oligonucleotide
cgcaugugugcauuccauc

SEQ ID NO: 2034595 - RNA, 19 nt, Artificial Sequence
  Description of Artificial Sequence: Synthetic oligonucleotide
ggggaccuuggaaacuuga

SEQ ID NO: 2034596 - RNA, 19 nt, Artificial Sequence
  Description of Artificial Sequence: Synthetic oligonucleotide
aggaguggcggcagacgau

SEQ ID NO: 2034597 - RNA, 19 nt, Artificial Sequence
  Description of Artificial Sequence: Synthetic oligonucleotide
gcggcagacgaugggagga

SEQ ID NO: 2034598 - RNA, 19 nt, Artificial Sequence
  Description of Artificial Sequence: Synthetic oligonucleotide
ggaauggcguacguaggcu

SEQ ID NO: 2034599 - RNA, 19 nt, Artificial Sequence
  Description of Artificial Sequence: Synthetic oligonucleotide
gcugucgacggacucguau

SEQ ID NO: 2034600 - RNA, 19 nt, Artificial Sequence
  Description of Artificial Sequence: Synthetic oligonucleotide
ccccucgcguuccaacgcc

SEQ ID NO: 2034601 - RNA, 19 nt, Artificial Sequence
  Description of Artificial Sequence: Synthetic oligonucleotide
ccuccccucgcguuccaac

SEQ ID NO: 2034602 - RNA, 19 nt, Artificial Sequence
  Description of Artificial Sequence: Synthetic oligonucleotide
ggagcuacgucaccuccau

SEQ ID NO: 2034603 - RNA, 19 nt, Artificial Sequence
  Description of Artificial Sequence: Synthetic oligonucleotide
ccauccuccccucgcguuc

SEQ ID NO: 2034604 - RNA, 19 nt, Artificial Sequence
  Description of Artificial Sequence: Synthetic oligonucleotide
gugcugccgaguccccaca

SEQ ID NO: 2034605 - RNA, 19 nt, Artificial Sequence
  Description of Artificial Sequence: Synthetic oligonucleotide
acccgaagucugugugaua

SEQ ID NO: 2034606 - RNA, 19 nt, Artificial Sequence
  Description of Artificial Sequence: Synthetic oligonucleotide
ugcugucgacggacucgua

SEQ ID NO: 2034607 - RNA, 19 nt, Artificial Sequence
  Description of Artificial Sequence: Synthetic oligonucleotide
cacaagcgcuguuggugua

SEQ ID NO: 2034608 - RNA, 19 nt, Artificial Sequence
  Description of Artificial Sequence: Synthetic oligonucleotide
cucgcguuccaacgccucu

SEQ ID NO: 2034609 - RNA, 19 nt, Artificial Sequence
  Description of Artificial Sequence: Synthetic oligonucleotide
ccauccgugaccuccuggu

SEQ ID NO: 2034610 - RNA, 19 nt, Artificial Sequence
  Description of Artificial Sequence: Synthetic oligonucleotide
cugaugcauagcaccugau

SEQ ID NO: 2034611 - RNA, 19 nt, Artificial Sequence
  Description of Artificial Sequence: Synthetic oligonucleotide
cccuguggcgcggcggugg

SEQ ID NO: 2034612 - RNA, 19 nt, Artificial Sequence
  Description of Artificial Sequence: Synthetic oligonucleotide
ggaaacgcaugugugcauu

SEQ ID NO: 2034613 - RNA, 19 nt, Artificial Sequence
  Description of Artificial Sequence: Synthetic oligonucleotide
gcaccugaucaugucccca

SEQ ID NO: 2034614 - RNA, 19 nt, Artificial Sequence
  Description of Artificial Sequence: Synthetic oligonucleotide
cccgaagucugugugauau

SEQ ID NO: 2034615 - RNA, 19 nt, Artificial Sequence
  Description of Artificial Sequence: Synthetic oligonucleotide
guagugcuacugaggugua

SEQ ID NO: 2034616 - RNA, 19 nt, Artificial Sequence
  Description of Artificial Sequence: Synthetic oligonucleotide
cgacucaugauuuucccuu

SEQ ID NO: 2034617 - RNA, 19 nt, Artificial Sequence
  Description of Artificial Sequence: Synthetic oligonucleotide
cgccucugaugcauagcac

SEQ ID NO: 2034618 - RNA, 19 nt, Artificial Sequence
  Description of Artificial Sequence: Synthetic oligonucleotide
ccauugcuacuguguuguc

SEQ ID NO: 2034619 - RNA, 19 nt, Artificial Sequence
  Description of Artificial Sequence: Synthetic oligonucleotide
caagcgcuguugguguagu

SEQ ID NO: 2034620 - RNA, 19 nt, Artificial Sequence
  Description of Artificial Sequence: Synthetic oligonucleotide
cuguggcgcggcgguggag

SEQ ID NO: 2034621 - RNA, 19 nt, Artificial Sequence
  Description of Artificial Sequence: Synthetic oligonucleotide
aggacgccauucaccccaa

SEQ ID NO: 2034622 - RNA, 19 nt, Artificial Sequence
  Description of Artificial Sequence: Synthetic oligonucleotide
cagacgaugggaggacuuu

SEQ ID NO: 2034623 - RNA, 19 nt, Artificial Sequence
  Description of Artificial Sequence: Synthetic oligonucleotide
acccuguggcgcggcggug

SEQ ID NO: 2034624 - RNA, 19 nt, Artificial Sequence
  Description of Artificial Sequence: Synthetic oligonucleotide
gcgcuucggacgaguaaga

SEQ ID NO: 2034625 - RNA, 19 nt, Artificial Sequence
  Description of Artificial Sequence: Synthetic oligonucleotide
gagcuacgucaccuccauu

SEQ ID NO: 2034626 - RNA, 19 nt, Artificial Sequence
  Description of Artificial Sequence: Synthetic oligonucleotide
cuucaccggcugucucugu

SEQ ID NO: 2034627 - RNA, 19 nt, Artificial Sequence
  Description of Artificial Sequence: Synthetic oligonucleotide
cgguggaggaauuacuauu

SEQ ID NO: 2034628 - RNA, 19 nt, Artificial Sequence
  Description of Artificial Sequence: Synthetic oligonucleotide
gcgcacuagcagaauccaa

SEQ ID NO: 2034629 - RNA, 19 nt, Artificial Sequence
  Description of Artificial Sequence: Synthetic oligonucleotide
ggcugcaguccugcuccca

SEQ ID NO: 2034630 - RNA, 19 nt, Artificial Sequence
  Description of Artificial Sequence: Synthetic oligonucleotide
ggcagacgaugggaggacu

SEQ ID NO: 2034631 - RNA, 19 nt, Artificial Sequence
  Description of Artificial Sequence: Synthetic oligonucleotide
ggcgcggcgguggaggaau

SEQ ID NO: 2034632 - RNA, 19 nt, Artificial Sequence
  Description of Artificial Sequence: Synthetic oligonucleotide
cgcguuccaacgccucuga

SEQ ID NO: 2034633 - RNA, 19 nt, Artificial Sequence
  Description of Artificial Sequence: Synthetic oligonucleotide
gcguuccaacgccucugau

SEQ ID NO: 2034634 - RNA, 19 nt, Artificial Sequence
  Description of Artificial Sequence: Synthetic oligonucleotide
cgcuguugguguagugcua

SEQ ID NO: 2034635 - RNA, 19 nt, Artificial Sequence
  Description of Artificial Sequence: Synthetic oligonucleotide
cccucgcguuccaacgccu

SEQ ID NO: 2034636 - RNA, 19 nt, Artificial Sequence
  Description of Artificial Sequence: Synthetic oligonucleotide
cgaguaagaucagccuuau

SEQ ID NO: 2034637 - RNA, 19 nt, Artificial Sequence
  Description of Artificial Sequence: Synthetic oligonucleotide
ccgaagucugugugauauu

SEQ ID NO: 2034638 - RNA, 19 nt, Artificial Sequence
  Description of Artificial Sequence: Synthetic oligonucleotide
ggacgccauucaccccaau

SEQ ID NO: 2034639 - RNA, 19 nt, Artificial Sequence
  Description of Artificial Sequence: Synthetic oligonucleotide
cgcuucggacgaguaagau

SEQ ID NO: 2034640 - RNA, 19 nt, Artificial Sequence
  Description of Artificial Sequence: Synthetic oligonucleotide
cgcggcgguggaggaauua

SEQ ID NO: 2034641 - RNA, 19 nt, Artificial Sequence
  Description of Artificial Sequence: Synthetic oligonucleotide
ccgugaccuccugguguuu

SEQ ID NO: 2034642 - RNA, 19 nt, Artificial Sequence
  Description of Artificial Sequence: Synthetic oligonucleotide
uuugcaaugguuaagauaa

SEQ ID NO: 2034643 - RNA, 19 nt, Artificial Sequence
  Description of Artificial Sequence: Synthetic oligonucleotide
aaugcaaaugaucaggcuc

SEQ ID NO: 2034644 - RNA, 19 nt, Artificial Sequence
  Description of Artificial Sequence: Synthetic oligonucleotide
aauacuacgauauuaguaa

SEQ ID NO: 2034645 - RNA, 19 nt, Artificial Sequence
  Description of Artificial Sequence: Synthetic oligonucleotide
ugaguuuagaagaugagag

SEQ ID NO: 2034646 - RNA, 19 nt, Artificial Sequence
  Description of Artificial Sequence: Synthetic oligonucleotide
aaaacugcauuguugcccc

SEQ ID NO: 2034647 - RNA, 19 nt, Artificial Sequence
  Description of Artificial Sequence: Synthetic oligonucleotide
aaaugaucaggcucaauac

SEQ ID NO: 2034648 - RNA, 19 nt, Artificial Sequence
  Description of Artificial Sequence: Synthetic oligonucleotide
aaaccuuacacauugagaa

SEQ ID NO: 2034649 - RNA, 19 nt, Artificial Sequence
  Description of Artificial Sequence: Synthetic oligonucleotide
uuuuaaagccauuacaggc

SEQ ID NO: 2034650 - RNA, 19 nt, Artificial Sequence
  Description of Artificial Sequence: Synthetic oligonucleotide
aauggagaaaagccaacgc

SEQ ID NO: 2034651 - RNA, 19 nt, Artificial Sequence
  Description of Artificial Sequence: Synthetic oligonucleotide
caaugguuaagauaaaucc

SEQ ID NO: 2034652 - RNA, 19 nt, Artificial Sequence
  Description of Artificial Sequence: Synthetic oligonucleotide
uauacuccgaaucuagacg

SEQ ID NO: 2034653 - RNA, 19 nt, Artificial Sequence
  Description of Artificial Sequence: Synthetic oligonucleotide
uaagauaaauccaaccacc

SEQ ID NO: 2034654 - RNA, 19 nt, Artificial Sequence
  Description of Artificial Sequence: Synthetic oligonucleotide
auuacaggcaaucauaaca

SEQ ID NO: 2034655 - RNA, 19 nt, Artificial Sequence
  Description of Artificial Sequence: Synthetic oligonucleotide
uuguuauuagccaagguga

SEQ ID NO: 2034656 - RNA, 19 nt, Artificial Sequence
  Description of Artificial Sequence: Synthetic oligonucleotide
uuaagauaaauccaaccac

SEQ ID NO: 2034657 - RNA, 19 nt, Artificial Sequence
  Description of Artificial Sequence: Synthetic oligonucleotide
auuuagugaguuuagaaga

SEQ ID NO: 2034658 - RNA, 19 nt, Artificial Sequence
  Description of Artificial Sequence: Synthetic oligonucleotide
auacuccgaaucuagacgc

SEQ ID NO: 2034659 - RNA, 19 nt, Artificial Sequence
  Description of Artificial Sequence: Synthetic oligonucleotide
uuacacauugagaauuugg

SEQ ID NO: 2034660 - RNA, 19 nt, Artificial Sequence
  Description of Artificial Sequence: Synthetic oligonucleotide
uuacaggcaaucauaacag

SEQ ID NO: 2034661 - RNA, 19 nt, Artificial Sequence
  Description of Artificial Sequence: Synthetic oligonucleotide
guuguuauuagccaaggug

SEQ ID NO: 2034662 - RNA, 19 nt, Artificial Sequence
  Description of Artificial Sequence: Synthetic oligonucleotide
aaagguaccaccgaggaga

SEQ ID NO: 2034663 - RNA, 19 nt, Artificial Sequence
  Description of Artificial Sequence: Synthetic oligonucleotide
uaaguaugaguccacaacu

SEQ ID NO: 2034664 - RNA, 19 nt, Artificial Sequence
  Description of Artificial Sequence: Synthetic oligonucleotide
uacgauauuaguaaucauc

SEQ ID NO: 2034665 - RNA, 19 nt, Artificial Sequence
  Description of Artificial Sequence: Synthetic oligonucleotide
auaaauccaaccaccagcc

SEQ ID NO: 2034666 - RNA, 19 nt, Artificial Sequence
  Description of Artificial Sequence: Synthetic oligonucleotide
augaguccacaacugaucc

SEQ ID NO: 2034667 - RNA, 19 nt, Artificial Sequence
  Description of Artificial Sequence: Synthetic oligonucleotide
ugagcuuuugcucagcacu

SEQ ID NO: 2034668 - RNA, 19 nt, Artificial Sequence
  Description of Artificial Sequence: Synthetic oligonucleotide
guaucaaccaauugggaag

SEQ ID NO: 2034669 - RNA, 19 nt, Artificial Sequence
  Description of Artificial Sequence: Synthetic oligonucleotide
gucuaagucacucacaaac

SEQ ID NO: 2034670 - RNA, 19 nt, Artificial Sequence
  Description of Artificial Sequence: Synthetic oligonucleotide
cucaauacuacgauauuag

SEQ ID NO: 2034671 - RNA, 19 nt, Artificial Sequence
  Description of Artificial Sequence: Synthetic oligonucleotide
cagaaaacugcauuguugc

SEQ ID NO: 2034672 - RNA, 19 nt, Artificial Sequence
  Description of Artificial Sequence: Synthetic oligonucleotide
aagaaaguucacucucugg

SEQ ID NO: 2034673 - RNA, 19 nt, Artificial Sequence
  Description of Artificial Sequence: Synthetic oligonucleotide
aaagccauuacaggcaauc

SEQ ID NO: 2034674 - RNA, 19 nt, Artificial Sequence
  Description of Artificial Sequence: Synthetic oligonucleotide
aauaaugggccacugcgga

SEQ ID NO: 2034675 - RNA, 19 nt, Artificial Sequence
  Description of Artificial Sequence: Synthetic oligonucleotide
cacauugagaauuuggcug

SEQ ID NO: 2034676 - RNA, 19 nt, Artificial Sequence
  Description of Artificial Sequence: Synthetic oligonucleotide
auaacaggaacaacaaugg

SEQ ID NO: 2034677 - RNA, 19 nt, Artificial Sequence
  Description of Artificial Sequence: Synthetic oligonucleotide
aaauuugcaaugguuaaga

SEQ ID NO: 2034678 - RNA, 19 nt, Artificial Sequence
  Description of Artificial Sequence: Synthetic oligonucleotide
uugaguuucuucuuugggc

SEQ ID NO: 2034679 - RNA, 19 nt, Artificial Sequence
  Description of Artificial Sequence: Synthetic oligonucleotide
guuacagaacacuuggacc

SEQ ID NO: 2034680 - RNA, 19 nt, Artificial Sequence
  Description of Artificial Sequence: Synthetic oligonucleotide
gagacaaacacauccagga

SEQ ID NO: 2034681 - RNA, 19 nt, Artificial Sequence
  Description of Artificial Sequence: Synthetic oligonucleotide
gaguuuagaagaugagagg

SEQ ID NO: 2034682 - RNA, 19 nt, Artificial Sequence
  Description of Artificial Sequence: Synthetic oligonucleotide
agucuaugggcauuucccc

SEQ ID NO: 2034683 - RNA, 19 nt, Artificial Sequence
  Description of Artificial Sequence: Synthetic oligonucleotide
aaagccaacgccaaggaga

SEQ ID NO: 2034684 - RNA, 19 nt, Artificial Sequence
  Description of Artificial Sequence: Synthetic oligonucleotide
uaguaacccagccagaccu

SEQ ID NO: 2034685 - RNA, 19 nt, Artificial Sequence
  Description of Artificial Sequence: Synthetic oligonucleotide
uuauuagccaaggugagcu

SEQ ID NO: 2034686 - RNA, 19 nt, Artificial Sequence
  Description of Artificial Sequence: Synthetic oligonucleotide
agaaaagaaaguucacucu

SEQ ID NO: 2034687 - RNA, 19 nt, Artificial Sequence
  Description of Artificial Sequence: Synthetic oligonucleotide
uguuauuagccaaggugag

SEQ ID NO: 2034688 - RNA, 19 nt, Artificial Sequence
  Description of Artificial Sequence: Synthetic oligonucleotide
agucccaccacugugacuc

SEQ ID NO: 2034689 - RNA, 19 nt, Artificial Sequence
  Description of Artificial Sequence: Synthetic oligonucleotide
gaaaacugcauuguugccc

SEQ ID NO: 2034690 - RNA, 19 nt, Artificial Sequence
  Description of Artificial Sequence: Synthetic oligonucleotide
aauccagaaugcuagggaa

SEQ ID NO: 2034691 - RNA, 19 nt, Artificial Sequence
  Description of Artificial Sequence: Synthetic oligonucleotide
ucuaagucacucacaaaca

SEQ ID NO: 2034692 - RNA, 19 nt, Artificial Sequence
  Description of Artificial Sequence: Synthetic oligonucleotide
uuauacuccgaaucuagac

SEQ ID NO: 2034693 - RNA, 19 nt, Artificial Sequence
  Description of Artificial Sequence: Synthetic oligonucleotide
aguuuagaagaugagagga

SEQ ID NO: 2034694 - RNA, 19 nt, Artificial Sequence
  Description of Artificial Sequence: Synthetic oligonucleotide
acauaauccagaaugcuag

SEQ ID NO: 2034695 - RNA, 19 nt, Artificial Sequence
  Description of Artificial Sequence: Synthetic oligonucleotide
cuaaguaugaguccacaac

SEQ ID NO: 2034696 - RNA, 19 nt, Artificial Sequence
  Description of Artificial Sequence: Synthetic oligonucleotide
uaauccagaaugcuaggga

SEQ ID NO: 2034697 - RNA, 19 nt, Artificial Sequence
  Description of Artificial Sequence: Synthetic oligonucleotide
acaaacaccaacuguguga

SEQ ID NO: 2034698 - RNA, 19 nt, Artificial Sequence
  Description of Artificial Sequence: Synthetic oligonucleotide
agaaaacugcauuguugcc

SEQ ID NO: 2034699 - RNA, 19 nt, Artificial Sequence
  Description of Artificial Sequence: Synthetic oligonucleotide
accauaauaggugcuagcg

SEQ ID NO: 2034700 - RNA, 19 nt, Artificial Sequence
  Description of Artificial Sequence: Synthetic oligonucleotide
aguaucaaccaauugggaa

SEQ ID NO: 2034701 - RNA, 19 nt, Artificial Sequence
  Description of Artificial Sequence: Synthetic oligonucleotide
ucacucacaaacaccaacu

SEQ ID NO: 2034702 - RNA, 19 nt, Artificial Sequence
  Description of Artificial Sequence: Synthetic oligonucleotide
ugaaauuugcaaugguuaa

SEQ ID NO: 2034703 - RNA, 19 nt, Artificial Sequence
  Description of Artificial Sequence: Synthetic oligonucleotide
gcaauaaugggccacugcg

SEQ ID NO: 2034704 - RNA, 19 nt, Artificial Sequence
  Description of Artificial Sequence: Synthetic oligonucleotide
ucuaugggcauuuccccgg

SEQ ID NO: 2034705 - RNA, 19 nt, Artificial Sequence
  Description of Artificial Sequence: Synthetic oligonucleotide
gcauuguuauccaagaugg

SEQ ID NO: 2034706 - RNA, 19 nt, Artificial Sequence
  Description of Artificial Sequence: Synthetic oligonucleotide
uauagcagggccagcuccg

SEQ ID NO: 2034707 - RNA, 19 nt, Artificial Sequence
  Description of Artificial Sequence: Synthetic oligonucleotide
aaaaccccgaggcagcugu

SEQ ID NO: 2034708 - RNA, 19 nt, Artificial Sequence
  Description of Artificial Sequence: Synthetic oligonucleotide
acuacgauauuaguaauca

SEQ ID NO: 2034709 - RNA, 19 nt, Artificial Sequence
  Description of Artificial Sequence: Synthetic oligonucleotide
uuuggcuggacucaccagu

SEQ ID NO: 2034710 - RNA, 19 nt, Artificial Sequence
  Description of Artificial Sequence: Synthetic oligonucleotide
ugagaauuuggcuggacuc

SEQ ID NO: 2034711 - RNA, 19 nt, Artificial Sequence
  Description of Artificial Sequence: Synthetic oligonucleotide
aaaaccuuacacauugaga

SEQ ID NO: 2034712 - RNA, 19 nt, Artificial Sequence
  Description of Artificial Sequence: Synthetic oligonucleotide
gaaaguucacucucugggc

SEQ ID NO: 2034713 - RNA, 19 nt, Artificial Sequence
  Description of Artificial Sequence: Synthetic oligonucleotide
gaaaugcaaaugaucaggc

SEQ ID NO: 2034714 - RNA, 19 nt, Artificial Sequence
  Description of Artificial Sequence: Synthetic oligonucleotide
aaaugcaaaugaucaggcu

SEQ ID NO: 2034715 - RNA, 19 nt, Artificial Sequence
  Description of Artificial Sequence: Synthetic oligonucleotide
uuuagugaguuuagaagau

SEQ ID NO: 2034716 - RNA, 19 nt, Artificial Sequence
  Description of Artificial Sequence: Synthetic oligonucleotide
uccaagaugggcuucccug

SEQ ID NO: 2034717 - RNA, 19 nt, Artificial Sequence
  Description of Artificial Sequence: Synthetic oligonucleotide
ugugcuuggucucucgggc

SEQ ID NO: 2034718 - RNA, 19 nt, Artificial Sequence
  Description of Artificial Sequence: Synthetic oligonucleotide
agaacaggccagugcagcc

SEQ ID NO: 2034719 - RNA, 19 nt, Artificial Sequence
  Description of Artificial Sequence: Synthetic oligonucleotide
gaaauuugcaaugguuaag

SEQ ID NO: 2034720 - RNA, 19 nt, Artificial Sequence
  Description of Artificial Sequence: Synthetic oligonucleotide
agauaaauccaaccaccag

SEQ ID NO: 2034721 - RNA, 19 nt, Artificial Sequence
  Description of Artificial Sequence: Synthetic oligonucleotide
aaugcuagggaaaugcaaa

SEQ ID NO: 2034722 - RNA, 19 nt, Artificial Sequence
  Description of Artificial Sequence: Synthetic oligonucleotide
agggaaaugcaaaugauca

SEQ ID NO: 2034723 - RNA, 19 nt, Artificial Sequence
  Description of Artificial Sequence: Synthetic oligonucleotide
auuggucccaacuggaacu

SEQ ID NO: 2034724 - RNA, 19 nt, Artificial Sequence
  Description of Artificial Sequence: Synthetic oligonucleotide
gguuaagauaaauccaacc

SEQ ID NO: 2034725 - RNA, 19 nt, Artificial Sequence
  Description of Artificial Sequence: Synthetic oligonucleotide
agcagaacaggccagugca

SEQ ID NO: 2034726 - RNA, 19 nt, Artificial Sequence
  Description of Artificial Sequence: Synthetic oligonucleotide
gauauuaguaaucaucuuu

SEQ ID NO: 2034727 - RNA, 19 nt, Artificial Sequence
  Description of Artificial Sequence: Synthetic oligonucleotide
acgauauuaguaaucaucu

SEQ ID NO: 2034728 - RNA, 19 nt, Artificial Sequence
  Description of Artificial Sequence: Synthetic oligonucleotide
uuuagaagaugagaggaaa

SEQ ID NO: 2034729 - RNA, 19 nt, Artificial Sequence
  Description of Artificial Sequence: Synthetic oligonucleotide
gaucaggcucaauacuacg

SEQ ID NO: 2034730 - RNA, 19 nt, Artificial Sequence
  Description of Artificial Sequence: Synthetic oligonucleotide
aagcugaaauuugcaaugg

SEQ ID NO: 2034731 - RNA, 19 nt, Artificial Sequence
  Description of Artificial Sequence: Synthetic oligonucleotide
uagggaaaugcaaaugauc

SEQ ID NO: 2034732 - RNA, 19 nt, Artificial Sequence
  Description of Artificial Sequence: Synthetic oligonucleotide
uuagaagaugagaggaaaa

SEQ ID NO: 2034733 - RNA, 19 nt, Artificial Sequence
  Description of Artificial Sequence: Synthetic oligonucleotide
cuaagucacucacaaacac

SEQ ID NO: 2034734 - RNA, 19 nt, Artificial Sequence
  Description of Artificial Sequence: Synthetic oligonucleotide
uaugugcuuggucucucgg

SEQ ID NO: 2034735 - RNA, 19 nt, Artificial Sequence
  Description of Artificial Sequence: Synthetic oligonucleotide
auaauccagaaugcuaggg

SEQ ID NO: 2034736 - RNA, 19 nt, Artificial Sequence
  Description of Artificial Sequence: Synthetic oligonucleotide
aauccaaccaccagcccuc

SEQ ID NO: 2034737 - RNA, 19 nt, Artificial Sequence
  Description of Artificial Sequence: Synthetic oligonucleotide
ugauccuaguaacccagcc

SEQ ID NO: 2034738 - RNA, 19 nt, Artificial Sequence
  Description of Artificial Sequence: Synthetic oligonucleotide
acaaagguaccaccgagga

SEQ ID NO: 2034739 - RNA, 19 nt, Artificial Sequence
  Description of Artificial Sequence: Synthetic oligonucleotide
caauaaugggccacugcgg

SEQ ID NO: 2034740 - RNA, 19 nt, Artificial Sequence
  Description of Artificial Sequence: Synthetic oligonucleotide
ccaguaucaaccaauuggg

SEQ ID NO: 2034741 - RNA, 19 nt, Artificial Sequence
  Description of Artificial Sequence: Synthetic oligonucleotide
ucaauacuacgauauuagu

SEQ ID NO: 2034742 - RNA, 19 nt, Artificial Sequence
  Description of Artificial Sequence: Synthetic oligonucleotide
ucauguauagcagggccag

SEQ ID NO: 2034743 - RNA, 19 nt, Artificial Sequence
  Description of Artificial Sequence: Synthetic oligonucleotide
cacaacugauccuaguaac

SEQ ID NO: 2034744 - RNA, 19 nt, Artificial Sequence
  Description of Artificial Sequence: Synthetic oligonucleotide
augucuaagucacucacaa

SEQ ID NO: 2034745 - RNA, 19 nt, Artificial Sequence
  Description of Artificial Sequence: Synthetic oligonucleotide
aagauaaauccaaccacca

SEQ ID NO: 2034746 - RNA, 19 nt, Artificial Sequence
  Description of Artificial Sequence: Synthetic oligonucleotide
ggcauuguuauccaagaug

SEQ ID NO: 2034747 - RNA, 19 nt, Artificial Sequence
  Description of Artificial Sequence: Synthetic oligonucleotide
auuguugccccuaaguaug

SEQ ID NO: 2034748 - RNA, 19 nt, Artificial Sequence
  Description of Artificial Sequence: Synthetic oligonucleotide
uuccccuuuccauuuagug

SEQ ID NO: 2034749 - RNA, 19 nt, Artificial Sequence
  Description of Artificial Sequence: Synthetic oligonucleotide
cacaaagguaccaccgagg

SEQ ID NO: 2034750 - RNA, 19 nt, Artificial Sequence
  Description of Artificial Sequence: Synthetic oligonucleotide
uccccuuuccauuuaguga

SEQ ID NO: 2034751 - RNA, 19 nt, Artificial Sequence
  Description of Artificial Sequence: Synthetic oligonucleotide
uacaggcaaucauaacagg

SEQ ID NO: 2034752 - RNA, 19 nt, Artificial Sequence
  Description of Artificial Sequence: Synthetic oligonucleotide
uugccccuaaguaugaguc

SEQ ID NO: 2034753 - RNA, 19 nt, Artificial Sequence
  Description of Artificial Sequence: Synthetic oligonucleotide
guucacggcauuguuaucc

SEQ ID NO: 2034754 - RNA, 19 nt, Artificial Sequence
  Description of Artificial Sequence: Synthetic oligonucleotide
uacuacgauauuaguaauc

SEQ ID NO: 2034755 - RNA, 19 nt, Artificial Sequence
  Description of Artificial Sequence: Synthetic oligonucleotide
gaaacaggccgcaaguuac

SEQ ID NO: 2034756 - RNA, 19 nt, Artificial Sequence
  Description of Artificial Sequence: Synthetic oligonucleotide
ugugacuccuccauugguc

SEQ ID NO: 2034757 - RNA, 19 nt, Artificial Sequence
  Description of Artificial Sequence: Synthetic oligonucleotide
ugaucuagacuuuucuuuu

SEQ ID NO: 2034758 - RNA, 19 nt, Artificial Sequence
  Description of Artificial Sequence: Synthetic oligonucleotide
agcuguugggagcaagagg

SEQ ID NO: 2034759 - RNA, 19 nt, Artificial Sequence
  Description of Artificial Sequence: Synthetic oligonucleotide
ugaucaggcucaauacuac

SEQ ID NO: 2034760 - RNA, 19 nt, Artificial Sequence
  Description of Artificial Sequence: Synthetic oligonucleotide
uccacaacugauccuagua

SEQ ID NO: 2034761 - RNA, 19 nt, Artificial Sequence
  Description of Artificial Sequence: Synthetic oligonucleotide
accaauugggaagaaaaga

SEQ ID NO: 2034762 - RNA, 19 nt, Artificial Sequence
  Description of Artificial Sequence: Synthetic oligonucleotide
uuggacccaauuccucugg

SEQ ID NO: 2034763 - RNA, 19 nt, Artificial Sequence
  Description of Artificial Sequence: Synthetic oligonucleotide
aaguaugaguccacaacug

SEQ ID NO: 2034764 - RNA, 19 nt, Artificial Sequence
  Description of Artificial Sequence: Synthetic oligonucleotide
caaaugaucaggcucaaua

SEQ ID NO: 2034765 - RNA, 19 nt, Artificial Sequence
  Description of Artificial Sequence: Synthetic oligonucleotide
agagacaaacacauccagg

SEQ ID NO: 2034766 - RNA, 19 nt, Artificial Sequence
  Description of Artificial Sequence: Synthetic oligonucleotide
cugaaauuugcaaugguua

SEQ ID NO: 2034767 - RNA, 19 nt, Artificial Sequence
  Description of Artificial Sequence: Synthetic oligonucleotide
uuaccauaauaggugcuag

SEQ ID NO: 2034768 - RNA, 19 nt, Artificial Sequence
  Description of Artificial Sequence: Synthetic oligonucleotide
aaacaggccgcaaguuacc

SEQ ID NO: 2034769 - RNA, 19 nt, Artificial Sequence
  Description of Artificial Sequence: Synthetic oligonucleotide
ugguuaagauaaauccaac

SEQ ID NO: 2034770 - RNA, 19 nt, Artificial Sequence
  Description of Artificial Sequence: Synthetic oligonucleotide
acucacaaacaccaacugu

SEQ ID NO: 2034771 - RNA, 19 nt, Artificial Sequence
  Description of Artificial Sequence: Synthetic oligonucleotide
gucuaugggcauuuccccg

SEQ ID NO: 2034772 - RNA, 19 nt, Artificial Sequence
  Description of Artificial Sequence: Synthetic oligonucleotide
caauacuacgauauuagua

SEQ ID NO: 2034773 - RNA, 19 nt, Artificial Sequence
  Description of Artificial Sequence: Synthetic oligonucleotide
ucaggcucaauacuacgau

SEQ ID NO: 2034774 - RNA, 19 nt, Artificial Sequence
  Description of Artificial Sequence: Synthetic oligonucleotide
guauagcagggccagcucc

SEQ ID NO: 2034775 - RNA, 19 nt, Artificial Sequence
  Description of Artificial Sequence: Synthetic oligonucleotide
aggccagaaaacugcauug

SEQ ID NO: 2034776 - RNA, 19 nt, Artificial Sequence
  Description of Artificial Sequence: Synthetic oligonucleotide
caacaauggagaaaagcca

SEQ ID NO: 2034777 - RNA, 19 nt, Artificial Sequence
  Description of Artificial Sequence: Synthetic oligonucleotide
agaauuuggcuggacucac

SEQ ID NO: 2034778 - RNA, 19 nt, Artificial Sequence
  Description of Artificial Sequence: Synthetic oligonucleotide
accucagaagcccagguau

SEQ ID NO: 2034779 - RNA, 19 nt, Artificial Sequence
  Description of Artificial Sequence: Synthetic oligonucleotide
uaguaaucaucuuuauaua

SEQ ID NO: 2034780 - RNA, 19 nt, Artificial Sequence
  Description of Artificial Sequence: Synthetic oligonucleotide
uaucaaccaauugggaaga

SEQ ID NO: 2034781 - RNA, 19 nt, Artificial Sequence
  Description of Artificial Sequence: Synthetic oligonucleotide
ccaacuggaacuuucuccc

SEQ ID NO: 2034782 - RNA, 19 nt, Artificial Sequence
  Description of Artificial Sequence: Synthetic oligonucleotide
augugcuuggucucucggg

SEQ ID NO: 2034783 - RNA, 19 nt, Artificial Sequence
  Description of Artificial Sequence: Synthetic oligonucleotide
cacggcauuguuauccaag

SEQ ID NO: 2034784 - RNA, 19 nt, Artificial Sequence
  Description of Artificial Sequence: Synthetic oligonucleotide
gguaucaccagcagaacag

SEQ ID NO: 2034785 - RNA, 19 nt, Artificial Sequence
  Description of Artificial Sequence: Synthetic oligonucleotide
cauaauaggugcuagcggu

SEQ ID NO: 2034786 - RNA, 19 nt, Artificial Sequence
  Description of Artificial Sequence: Synthetic oligonucleotide
ugugaucuagacuuuucuu

SEQ ID NO: 2034787 - RNA, 19 nt, Artificial Sequence
  Description of Artificial Sequence: Synthetic oligonucleotide
augguuaagauaaauccaa

SEQ ID NO: 2034788 - RNA, 19 nt, Artificial Sequence
  Description of Artificial Sequence: Synthetic oligonucleotide
uaccauaauaggugcuagc

SEQ ID NO: 2034789 - RNA, 19 nt, Artificial Sequence
  Description of Artificial Sequence: Synthetic oligonucleotide
ugggccaaccucagaagcc

SEQ ID NO: 2034790 - RNA, 19 nt, Artificial Sequence
  Description of Artificial Sequence: Synthetic oligonucleotide
aaccuuacacauugagaau

SEQ ID NO: 2034791 - RNA, 19 nt, Artificial Sequence
  Description of Artificial Sequence: Synthetic oligonucleotide
gucacucacaaacaccaac

SEQ ID NO: 2034792 - RNA, 19 nt, Artificial Sequence
  Description of Artificial Sequence: Synthetic oligonucleotide
agguaucaccagcagaaca

SEQ ID NO: 2034793 - RNA, 19 nt, Artificial Sequence
  Description of Artificial Sequence: Synthetic oligonucleotide
uaaugggccacugcggagc

SEQ ID NO: 2034794 - RNA, 19 nt, Artificial Sequence
  Description of Artificial Sequence: Synthetic oligonucleotide
cuagcggucauugacauaa

SEQ ID NO: 2034795 - RNA, 19 nt, Artificial Sequence
  Description of Artificial Sequence: Synthetic oligonucleotide
gagacuggaggcgaguccc

SEQ ID NO: 2034796 - RNA, 19 nt, Artificial Sequence
  Description of Artificial Sequence: Synthetic oligonucleotide
cagguuguuauuagccaag

SEQ ID NO: 2034797 - RNA, 19 nt, Artificial Sequence
  Description of Artificial Sequence: Synthetic oligonucleotide
agcggucauugacauaauc

SEQ ID NO: 2034798 - RNA, 19 nt, Artificial Sequence
  Description of Artificial Sequence: Synthetic oligonucleotide
uucacuuccccuuuccauu

SEQ ID NO: 2034799 - RNA, 19 nt, Artificial Sequence
  Description of Artificial Sequence: Synthetic oligonucleotide
gugacuccuccauuggucc

SEQ ID NO: 2034800 - RNA, 19 nt, Artificial Sequence
  Description of Artificial Sequence: Synthetic oligonucleotide
gguaccaccgaggagacug

SEQ ID NO: 2034801 - RNA, 19 nt, Artificial Sequence
  Description of Artificial Sequence: Synthetic oligonucleotide
caaggugagcuuuugcuca

SEQ ID NO: 2034802 - RNA, 19 nt, Artificial Sequence
  Description of Artificial Sequence: Synthetic oligonucleotide
cauuggucccaacuggaac

SEQ ID NO: 2034803 - RNA, 19 nt, Artificial Sequence
  Description of Artificial Sequence: Synthetic oligonucleotide
uaauaggugcuagcgguca

SEQ ID NO: 2034804 - RNA, 19 nt, Artificial Sequence
  Description of Artificial Sequence: Synthetic oligonucleotide
cuaguaacccagccagacc

SEQ ID NO: 2034805 - RNA, 19 nt, Artificial Sequence
  Description of Artificial Sequence: Synthetic oligonucleotide
cacugugacuccuccauug

SEQ ID NO: 2034806 - RNA, 19 nt, Artificial Sequence
  Description of Artificial Sequence: Synthetic oligonucleotide
agaaacaggccgcaaguua

SEQ ID NO: 2034807 - RNA, 19 nt, Artificial Sequence
  Description of Artificial Sequence: Synthetic oligonucleotide
augcaaaugaucaggcuca

SEQ ID NO: 2034808 - RNA, 19 nt, Artificial Sequence
  Description of Artificial Sequence: Synthetic oligonucleotide
ccgcaaguuaccauaauag

SEQ ID NO: 2034809 - RNA, 19 nt, Artificial Sequence
  Description of Artificial Sequence: Synthetic oligonucleotide
acggcauuguuauccaaga

SEQ ID NO: 2034810 - RNA, 19 nt, Artificial Sequence
  Description of Artificial Sequence: Synthetic oligonucleotide
auaaugggccacugcggag

SEQ ID NO: 2034811 - RNA, 19 nt, Artificial Sequence
  Description of Artificial Sequence: Synthetic oligonucleotide
caagagggcgaccaaaaca

SEQ ID NO: 2034812 - RNA, 19 nt, Artificial Sequence
  Description of Artificial Sequence: Synthetic oligonucleotide
cuggccuccuuccuuauac

SEQ ID NO: 2034813 - RNA, 19 nt, Artificial Sequence
  Description of Artificial Sequence: Synthetic oligonucleotide
gcuagggaaaugcaaauga

SEQ ID NO: 2034814 - RNA, 19 nt, Artificial Sequence
  Description of Artificial Sequence: Synthetic oligonucleotide
ccccuuuccauuuagugag

SEQ ID NO: 2034815 - RNA, 19 nt, Artificial Sequence
  Description of Artificial Sequence: Synthetic oligonucleotide
uccgaaucuagacgcuucu

SEQ ID NO: 2034816 - RNA, 19 nt, Artificial Sequence
  Description of Artificial Sequence: Synthetic oligonucleotide
gugaguuuagaagaugaga

SEQ ID NO: 2034817 - RNA, 19 nt, Artificial Sequence
  Description of Artificial Sequence: Synthetic oligonucleotide
auaauaggugcuagcgguc

SEQ ID NO: 2034818 - RNA, 19 nt, Artificial Sequence
  Description of Artificial Sequence: Synthetic oligonucleotide
uguuauccaagaugggcuu

SEQ ID NO: 2034819 - RNA, 19 nt, Artificial Sequence
  Description of Artificial Sequence: Synthetic oligonucleotide
agugaguuuagaagaugag

SEQ ID NO: 2034820 - RNA, 19 nt, Artificial Sequence
  Description of Artificial Sequence: Synthetic oligonucleotide
ugcaaugguuaagauaaau

SEQ ID NO: 2034821 - RNA, 19 nt, Artificial Sequence
  Description of Artificial Sequence: Synthetic oligonucleotide
ggugcuagcggucauugac

SEQ ID NO: 2034822 - RNA, 19 nt, Artificial Sequence
  Description of Artificial Sequence: Synthetic oligonucleotide
gagcagagaugucuaaguc

SEQ ID NO: 2034823 - RNA, 19 nt, Artificial Sequence
  Description of Artificial Sequence: Synthetic oligonucleotide
cagccagaccuccaaaggc

SEQ ID NO: 2034824 - RNA, 19 nt, Artificial Sequence
  Description of Artificial Sequence: Synthetic oligonucleotide
cauuacaggcaaucauaac

SEQ ID NO: 2034825 - RNA, 19 nt, Artificial Sequence
  Description of Artificial Sequence: Synthetic oligonucleotide
cuaucauguauagcagggc

SEQ ID NO: 2034826 - RNA, 19 nt, Artificial Sequence
  Description of Artificial Sequence: Synthetic oligonucleotide
cugggccaaccucagaagc

SEQ ID NO: 2034827 - RNA, 19 nt, Artificial Sequence
  Description of Artificial Sequence: Synthetic oligonucleotide
guaucaccagcagaacagg

SEQ ID NO: 2034828 - RNA, 19 nt, Artificial Sequence
  Description of Artificial Sequence: Synthetic oligonucleotide
auugagaauuuggcuggac

SEQ ID NO: 2034829 - RNA, 19 nt, Artificial Sequence
  Description of Artificial Sequence: Synthetic oligonucleotide
agguuguuauuagccaagg

SEQ ID NO: 2034830 - RNA, 19 nt, Artificial Sequence
  Description of Artificial Sequence: Synthetic oligonucleotide
acccaauuccucuggccuc

SEQ ID NO: 2034831 - RNA, 19 nt, Artificial Sequence
  Description of Artificial Sequence: Synthetic oligonucleotide
uucacggcauuguuaucca

SEQ ID NO: 2034832 - RNA, 19 nt, Artificial Sequence
  Description of Artificial Sequence: Synthetic oligonucleotide
ccuuauacuccgaaucuag

SEQ ID NO: 2034833 - RNA, 19 nt, Artificial Sequence
  Description of Artificial Sequence: Synthetic oligonucleotide
cccguuacagaacacuugg

SEQ ID NO: 2034834 - RNA, 19 nt, Artificial Sequence
  Description of Artificial Sequence: Synthetic oligonucleotide
ucaccaguaucaaccaauu

SEQ ID NO: 2034835 - RNA, 19 nt, Artificial Sequence
  Description of Artificial Sequence: Synthetic oligonucleotide
uguauagcagggccagcuc

SEQ ID NO: 2034836 - RNA, 19 nt, Artificial Sequence
  Description of Artificial Sequence: Synthetic oligonucleotide
guuauuagccaaggugagc

SEQ ID NO: 2034837 - RNA, 19 nt, Artificial Sequence
  Description of Artificial Sequence: Synthetic oligonucleotide
cuaugugcuuggucucucg

SEQ ID NO: 2034838 - RNA, 19 nt, Artificial Sequence
  Description of Artificial Sequence: Synthetic oligonucleotide
aagguaccaccgaggagac

SEQ ID NO: 2034839 - RNA, 19 nt, Artificial Sequence
  Description of Artificial Sequence: Synthetic oligonucleotide
agccauuacaggcaaucau

SEQ ID NO: 2034840 - RNA, 19 nt, Artificial Sequence
  Description of Artificial Sequence: Synthetic oligonucleotide
caccagcccuccuaaagcc

SEQ ID NO: 2034841 - RNA, 19 nt, Artificial Sequence
  Description of Artificial Sequence: Synthetic oligonucleotide
cccaacuggaacuuucucc

SEQ ID NO: 2034842 - RNA, 19 nt, Artificial Sequence
  Description of Artificial Sequence: Synthetic oligonucleotide
acugugaucuagacuuuuc

SEQ ID NO: 2034843 - RNA, 19 nt, Artificial Sequence
  Description of Artificial Sequence: Synthetic oligonucleotide
cuuggacccaauuccucug

SEQ ID NO: 2034844 - RNA, 19 nt, Artificial Sequence
  Description of Artificial Sequence: Synthetic oligonucleotide
agggcgaccaaaacagagg

SEQ ID NO: 2034845 - RNA, 19 nt, Artificial Sequence
  Description of Artificial Sequence: Synthetic oligonucleotide
accuuacacauugagaauu

SEQ ID NO: 2034846 - RNA, 19 nt, Artificial Sequence
  Description of Artificial Sequence: Synthetic oligonucleotide
agcugaaauuugcaauggu

SEQ ID NO: 2034847 - RNA, 19 nt, Artificial Sequence
  Description of Artificial Sequence: Synthetic oligonucleotide
aauaggugcuagcggucau

SEQ ID NO: 2034848 - RNA, 19 nt, Artificial Sequence
  Description of Artificial Sequence: Synthetic oligonucleotide
cuuauacuccgaaucuaga

SEQ ID NO: 2034849 - RNA, 19 nt, Artificial Sequence
  Description of Artificial Sequence: Synthetic oligonucleotide
uggucucucgggcugggcu

SEQ ID NO: 2034850 - RNA, 19 nt, Artificial Sequence
  Description of Artificial Sequence: Synthetic oligonucleotide
cacucacaaacaccaacug

SEQ ID NO: 2034851 - RNA, 19 nt, Artificial Sequence
  Description of Artificial Sequence: Synthetic oligonucleotide
gcggucauugacauaaucc

SEQ ID NO: 2034852 - RNA, 19 nt, Artificial Sequence
  Description of Artificial Sequence: Synthetic oligonucleotide
caggcaaucauaacaggaa

SEQ ID NO: 2034853 - RNA, 19 nt, Artificial Sequence
  Description of Artificial Sequence: Synthetic oligonucleotide
cacaaacaccaacugugug

SEQ ID NO: 2034854 - RNA, 19 nt, Artificial Sequence
  Description of Artificial Sequence: Synthetic oligonucleotide
aagccauuacaggcaauca

SEQ ID NO: 2034855 - RNA, 19 nt, Artificial Sequence
  Description of Artificial Sequence: Synthetic oligonucleotide
ugccccuaaguaugagucc

SEQ ID NO: 2034856 - RNA, 19 nt, Artificial Sequence
  Description of Artificial Sequence: Synthetic oligonucleotide
aaugggccacugcggagca

SEQ ID NO: 2034857 - RNA, 19 nt, Artificial Sequence
  Description of Artificial Sequence: Synthetic oligonucleotide
ucaaccaauugggaagaaa

SEQ ID NO: 2034858 - RNA, 19 nt, Artificial Sequence
  Description of Artificial Sequence: Synthetic oligonucleotide
gacucaccaguaucaacca

SEQ ID NO: 2034859 - RNA, 19 nt, Artificial Sequence
  Description of Artificial Sequence: Synthetic oligonucleotide
ccauaauaggugcuagcgg

SEQ ID NO: 2034860 - RNA, 19 nt, Artificial Sequence
  Description of Artificial Sequence: Synthetic oligonucleotide
ugaguccacaacugauccu

SEQ ID NO: 2034861 - RNA, 19 nt, Artificial Sequence
  Description of Artificial Sequence: Synthetic oligonucleotide
caaagguaccaccgaggag

SEQ ID NO: 2034862 - RNA, 19 nt, Artificial Sequence
  Description of Artificial Sequence: Synthetic oligonucleotide
uggacucaccaguaucaac

SEQ ID NO: 2034863 - RNA, 19 nt, Artificial Sequence
  Description of Artificial Sequence: Synthetic oligonucleotide
agcuccgugggcacggccc

SEQ ID NO: 2034864 - RNA, 19 nt, Artificial Sequence
  Description of Artificial Sequence: Synthetic oligonucleotide
uaggugcuagcggucauug

SEQ ID NO: 2034865 - RNA, 19 nt, Artificial Sequence
  Description of Artificial Sequence: Synthetic oligonucleotide
ugcuagcggucauugacau

SEQ ID NO: 2034866 - RNA, 19 nt, Artificial Sequence
  Description of Artificial Sequence: Synthetic oligonucleotide
gacccaauuccucuggccu

SEQ ID NO: 2034867 - RNA, 19 nt, Artificial Sequence
  Description of Artificial Sequence: Synthetic oligonucleotide
cagcagaacaggccagugc

SEQ ID NO: 2034868 - RNA, 19 nt, Artificial Sequence
  Description of Artificial Sequence: Synthetic oligonucleotide
cgcaaguuaccauaauagg

SEQ ID NO: 2034869 - RNA, 19 nt, Artificial Sequence
  Description of Artificial Sequence: Synthetic oligonucleotide
cugauccuaguaacccagc

SEQ ID NO: 2034870 - RNA, 19 nt, Artificial Sequence
  Description of Artificial Sequence: Synthetic oligonucleotide
gcaaugguuaagauaaauc

SEQ ID NO: 2034871 - RNA, 19 nt, Artificial Sequence
  Description of Artificial Sequence: Synthetic oligonucleotide
aucaggcucaauacuacga

SEQ ID NO: 2034872 - RNA, 19 nt, Artificial Sequence
  Description of Artificial Sequence: Synthetic oligonucleotide
agaacacuuggacccaauu

SEQ ID NO: 2034873 - RNA, 19 nt, Artificial Sequence
  Description of Artificial Sequence: Synthetic oligonucleotide
aagccaacgccaaggagaa

SEQ ID NO: 2034874 - RNA, 19 nt, Artificial Sequence
  Description of Artificial Sequence: Synthetic oligonucleotide
cuaugggcauuuccccggg

SEQ ID NO: 2034875 - RNA, 19 nt, Artificial Sequence
  Description of Artificial Sequence: Synthetic oligonucleotide
ugucuaagucacucacaaa

SEQ ID NO: 2034876 - RNA, 19 nt, Artificial Sequence
  Description of Artificial Sequence: Synthetic oligonucleotide
ccaaggagaaacaggccgc

SEQ ID NO: 2034877 - RNA, 19 nt, Artificial Sequence
  Description of Artificial Sequence: Synthetic oligonucleotide
gugaucuagacuuuucuuu

SEQ ID NO: 2034878 - RNA, 19 nt, Artificial Sequence
  Description of Artificial Sequence: Synthetic oligonucleotide
gaguccacaacugauccua

SEQ ID NO: 2034879 - RNA, 19 nt, Artificial Sequence
  Description of Artificial Sequence: Synthetic oligonucleotide
uccuaguaacccagccaga

SEQ ID NO: 2034880 - RNA, 19 nt, Artificial Sequence
  Description of Artificial Sequence: Synthetic oligonucleotide
guuaccauaauaggugcua

SEQ ID NO: 2034881 - RNA, 19 nt, Artificial Sequence
  Description of Artificial Sequence: Synthetic oligonucleotide
aacaggccgcaaguuacca

SEQ ID NO: 2034882 - RNA, 19 nt, Artificial Sequence
  Description of Artificial Sequence: Synthetic oligonucleotide
ugcggagcagagaugucua

SEQ ID NO: 2034883 - RNA, 19 nt, Artificial Sequence
  Description of Artificial Sequence: Synthetic oligonucleotide
uacuccgaaucuagacgcu

SEQ ID NO: 2034884 - RNA, 19 nt, Artificial Sequence
  Description of Artificial Sequence: Synthetic oligonucleotide
uucuuugggcuuccauaaa

SEQ ID NO: 2034885 - RNA, 19 nt, Artificial Sequence
  Description of Artificial Sequence: Synthetic oligonucleotide
ccaccgaggagacuggagg

SEQ ID NO: 2034886 - RNA, 19 nt, Artificial Sequence
  Description of Artificial Sequence: Synthetic oligonucleotide
aggagacuggaggcgaguc

SEQ ID NO: 2034887 - RNA, 19 nt, Artificial Sequence
  Description of Artificial Sequence: Synthetic oligonucleotide
agaaugcuagggaaaugca

SEQ ID NO: 2034888 - RNA, 19 nt, Artificial Sequence
  Description of Artificial Sequence: Synthetic oligonucleotide
uccuuauacuccgaaucua

SEQ ID NO: 2034889 - RNA, 19 nt, Artificial Sequence
  Description of Artificial Sequence: Synthetic oligonucleotide
gaauuuggcuggacucacc

SEQ ID NO: 2034890 - RNA, 19 nt, Artificial Sequence
  Description of Artificial Sequence: Synthetic oligonucleotide
ggcaauaaugggccacugc

SEQ ID NO: 2034891 - RNA, 19 nt, Artificial Sequence
  Description of Artificial Sequence: Synthetic oligonucleotide
ucccaacuggaacuuucuc

SEQ ID NO: 2034892 - RNA, 19 nt, Artificial Sequence
  Description of Artificial Sequence: Synthetic oligonucleotide
guuuagaagaugagaggaa

SEQ ID NO: 2034893 - RNA, 19 nt, Artificial Sequence
  Description of Artificial Sequence: Synthetic oligonucleotide
auuagccaaggugagcuuu

SEQ ID NO: 2034894 - RNA, 19 nt, Artificial Sequence
  Description of Artificial Sequence: Synthetic oligonucleotide
gccaacgccaaggagaaac

SEQ ID NO: 2034895 - RNA, 19 nt, Artificial Sequence
  Description of Artificial Sequence: Synthetic oligonucleotide
ucacuuccccuuuccauuu

SEQ ID NO: 2034896 - RNA, 19 nt, Artificial Sequence
  Description of Artificial Sequence: Synthetic oligonucleotide
cagugcuuucauccaggcc

SEQ ID NO: 2034897 - RNA, 19 nt, Artificial Sequence
  Description of Artificial Sequence: Synthetic oligonucleotide
ccaagaugggcuucccugc

SEQ ID NO: 2034898 - RNA, 19 nt, Artificial Sequence
  Description of Artificial Sequence: Synthetic oligonucleotide
caccaguaucaaccaauug

SEQ ID NO: 2034899 - RNA, 19 nt, Artificial Sequence
  Description of Artificial Sequence: Synthetic oligonucleotide
ugggccacugcggagcaga

SEQ ID NO: 2034900 - RNA, 19 nt, Artificial Sequence
  Description of Artificial Sequence: Synthetic oligonucleotide
uguugccccuaaguaugag

SEQ ID NO: 2034901 - RNA, 19 nt, Artificial Sequence
  Description of Artificial Sequence: Synthetic oligonucleotide
uaaagccauuacaggcaau

SEQ ID NO: 2034902 - RNA, 19 nt, Artificial Sequence
  Description of Artificial Sequence: Synthetic oligonucleotide
augggcuucccugcuaugu

SEQ ID NO: 2034903 - RNA, 19 nt, Artificial Sequence
  Description of Artificial Sequence: Synthetic oligonucleotide
caguaucaaccaauuggga

SEQ ID NO: 2034904 - RNA, 19 nt, Artificial Sequence
  Description of Artificial Sequence: Synthetic oligonucleotide
cuaaagccccacugugauc

SEQ ID NO: 2034905 - RNA, 19 nt, Artificial Sequence
  Description of Artificial Sequence: Synthetic oligonucleotide
uugcaaugguuaagauaaa

SEQ ID NO: 2034906 - RNA, 19 nt, Artificial Sequence
  Description of Artificial Sequence: Synthetic oligonucleotide
ccagccagaccuccaaagg

SEQ ID NO: 2034907 - RNA, 19 nt, Artificial Sequence
  Description of Artificial Sequence: Synthetic oligonucleotide
aaacugcauuguugccccu

SEQ ID NO: 2034908 - RNA, 19 nt, Artificial Sequence
  Description of Artificial Sequence: Synthetic oligonucleotide
uauccaagaugggcuuccc

SEQ ID NO: 2034909 - RNA, 19 nt, Artificial Sequence
  Description of Artificial Sequence: Synthetic oligonucleotide
ccaaggugagcuuuugcuc

SEQ ID NO: 2034910 - RNA, 19 nt, Artificial Sequence
  Description of Artificial Sequence: Synthetic oligonucleotide
cucaccaguaucaaccaau

SEQ ID NO: 2034911 - RNA, 19 nt, Artificial Sequence
  Description of Artificial Sequence: Synthetic oligonucleotide
uauuagccaaggugagcuu

SEQ ID NO: 2034912 - RNA, 19 nt, Artificial Sequence
  Description of Artificial Sequence: Synthetic oligonucleotide
uugggagcaagagggcgac

SEQ ID NO: 2034913 - RNA, 19 nt, Artificial Sequence
  Description of Artificial Sequence: Synthetic oligonucleotide
gaggcgagucccaccacug

SEQ ID NO: 2034914 - RNA, 19 nt, Artificial Sequence
  Description of Artificial Sequence: Synthetic oligonucleotide
aaccccgaggcagcuguug

SEQ ID NO: 2034915 - RNA, 19 nt, Artificial Sequence
  Description of Artificial Sequence: Synthetic oligonucleotide
gggcgaccaaaacagagga

SEQ ID NO: 2034916 - RNA, 19 nt, Artificial Sequence
  Description of Artificial Sequence: Synthetic oligonucleotide
ggagacuggaggcgagucc

SEQ ID NO: 2034917 - RNA, 19 nt, Artificial Sequence
  Description of Artificial Sequence: Synthetic oligonucleotide
cagcacugggccaaccuca

SEQ ID NO: 2034918 - RNA, 19 nt, Artificial Sequence
  Description of Artificial Sequence: Synthetic oligonucleotide
acucaccaguaucaaccaa

SEQ ID NO: 2034919 - RNA, 19 nt, Artificial Sequence
  Description of Artificial Sequence: Synthetic oligonucleotide
cagcuguugggagcaagag

SEQ ID NO: 2034920 - RNA, 19 nt, Artificial Sequence
  Description of Artificial Sequence: Synthetic oligonucleotide
ccuaguaacccagccagac

SEQ ID NO: 2034921 - RNA, 19 nt, Artificial Sequence
  Description of Artificial Sequence: Synthetic oligonucleotide
cuagggaaaugcaaaugau

SEQ ID NO: 2034922 - RNA, 19 nt, Artificial Sequence
  Description of Artificial Sequence: Synthetic oligonucleotide
accaacugugugaggaagu

SEQ ID NO: 2034923 - RNA, 19 nt, Artificial Sequence
  Description of Artificial Sequence: Synthetic oligonucleotide
cugugaucuagacuuuucu

SEQ ID NO: 2034924 - RNA, 19 nt, Artificial Sequence
  Description of Artificial Sequence: Synthetic oligonucleotide
uggccuccuuccuuauacu

SEQ ID NO: 2034925 - RNA, 19 nt, Artificial Sequence
  Description of Artificial Sequence: Synthetic oligonucleotide
guugccccuaaguaugagu

SEQ ID NO: 2034926 - RNA, 19 nt, Artificial Sequence
  Description of Artificial Sequence: Synthetic oligonucleotide
ggagcagagaugucuaagu

SEQ ID NO: 2034927 - RNA, 19 nt, Artificial Sequence
  Description of Artificial Sequence: Synthetic oligonucleotide
caggccgcaaguuaccaua

SEQ ID NO: 2034928 - RNA, 19 nt, Artificial Sequence
  Description of Artificial Sequence: Synthetic oligonucleotide
ggagaaacaggccgcaagu

SEQ ID NO: 2034929 - RNA, 19 nt, Artificial Sequence
  Description of Artificial Sequence: Synthetic oligonucleotide
cggucauugacauaaucca

SEQ ID NO: 2034930 - RNA, 19 nt, Artificial Sequence
  Description of Artificial Sequence: Synthetic oligonucleotide
ggcgagucccaccacugug

SEQ ID NO: 2034931 - RNA, 19 nt, Artificial Sequence
  Description of Artificial Sequence: Synthetic oligonucleotide
ucacggcauuguuauccaa

SEQ ID NO: 2034932 - RNA, 19 nt, Artificial Sequence
  Description of Artificial Sequence: Synthetic oligonucleotide
ugcaaaugaucaggcucaa

SEQ ID NO: 2034933 - RNA, 19 nt, Artificial Sequence
  Description of Artificial Sequence: Synthetic oligonucleotide
acaggccgcaaguuaccau

SEQ ID NO: 2034934 - RNA, 19 nt, Artificial Sequence
  Description of Artificial Sequence: Synthetic oligonucleotide
gcuggacucaccaguauca

SEQ ID NO: 2034935 - RNA, 19 nt, Artificial Sequence
  Description of Artificial Sequence: Synthetic oligonucleotide
guaccaccgaggagacugg

SEQ ID NO: 2034936 - RNA, 19 nt, Artificial Sequence
  Description of Artificial Sequence: Synthetic oligonucleotide
aguccacaacugauccuag

SEQ ID NO: 2034937 - RNA, 19 nt, Artificial Sequence
  Description of Artificial Sequence: Synthetic oligonucleotide
caggaacaacaauggagaa

SEQ ID NO: 2034938 - RNA, 19 nt, Artificial Sequence
  Description of Artificial Sequence: Synthetic oligonucleotide
gugcuagcggucauugaca

SEQ ID NO: 2034939 - RNA, 19 nt, Artificial Sequence
  Description of Artificial Sequence: Synthetic oligonucleotide
ggcccacaaagguaccacc

SEQ ID NO: 2034940 - RNA, 19 nt, Artificial Sequence
  Description of Artificial Sequence: Synthetic oligonucleotide
ggcuggacucaccaguauc

SEQ ID NO: 2034941 - RNA, 19 nt, Artificial Sequence
  Description of Artificial Sequence: Synthetic oligonucleotide
accaccgaggagacuggag

SEQ ID NO: 2034942 - RNA, 19 nt, Artificial Sequence
  Description of Artificial Sequence: Synthetic oligonucleotide
cagguucacggcauuguua

SEQ ID NO: 2034943 - RNA, 19 nt, Artificial Sequence
  Description of Artificial Sequence: Synthetic oligonucleotide
ccagugcuuucauccaggc

SEQ ID NO: 2034944 - RNA, 19 nt, Artificial Sequence
  Description of Artificial Sequence: Synthetic oligonucleotide
aggcaauaaugggccacug

SEQ ID NO: 2034945 - RNA, 19 nt, Artificial Sequence
  Description of Artificial Sequence: Synthetic oligonucleotide
gggccaaccucagaagccc

SEQ ID NO: 2034946 - RNA, 19 nt, Artificial Sequence
  Description of Artificial Sequence: Synthetic oligonucleotide
aggcgagucccaccacugu

SEQ ID NO: 2034947 - RNA, 19 nt, Artificial Sequence
  Description of Artificial Sequence: Synthetic oligonucleotide
cucugggccaaaaccccga

SEQ ID NO: 2034948 - RNA, 19 nt, Artificial Sequence
  Description of Artificial Sequence: Synthetic oligonucleotide
gccguuuucuaucauguau

SEQ ID NO: 2034949 - RNA, 19 nt, Artificial Sequence
  Description of Artificial Sequence: Synthetic oligonucleotide
caggcucaauacuacgaua

SEQ ID NO: 2034950 - RNA, 19 nt, Artificial Sequence
  Description of Artificial Sequence: Synthetic oligonucleotide
gagcaagagggcgaccaaa

SEQ ID NO: 2034951 - RNA, 19 nt, Artificial Sequence
  Description of Artificial Sequence: Synthetic oligonucleotide
aguaggccaggcccacaaa

SEQ ID NO: 2034952 - RNA, 19 nt, Artificial Sequence
  Description of Artificial Sequence: Synthetic oligonucleotide
aggugcuagcggucauuga

SEQ ID NO: 2034953 - RNA, 19 nt, Artificial Sequence
  Description of Artificial Sequence: Synthetic oligonucleotide
gccgcaaguuaccauaaua

SEQ ID NO: 2034954 - RNA, 19 nt, Artificial Sequence
  Description of Artificial Sequence: Synthetic oligonucleotide
acuccgaaucuagacgcuu

SEQ ID NO: 2034955 - RNA, 19 nt, Artificial Sequence
  Description of Artificial Sequence: Synthetic oligonucleotide
ccguuuucuaucauguaua

SEQ ID NO: 2034956 - RNA, 19 nt, Artificial Sequence
  Description of Artificial Sequence: Synthetic oligonucleotide
gacuggaggcgagucccac

SEQ ID NO: 2034957 - RNA, 19 nt, Artificial Sequence
  Description of Artificial Sequence: Synthetic oligonucleotide
caaagucuaugggcauuuc

SEQ ID NO: 2034958 - RNA, 19 nt, Artificial Sequence
  Description of Artificial Sequence: Synthetic oligonucleotide
ccagguuguuauuagccaa

SEQ ID NO: 2034959 - RNA, 19 nt, Artificial Sequence
  Description of Artificial Sequence: Synthetic oligonucleotide
ccuaaguaugaguccacaa

SEQ ID NO: 2034960 - RNA, 19 nt, Artificial Sequence
  Description of Artificial Sequence: Synthetic oligonucleotide
auaggugcuagcggucauu

SEQ ID NO: 2034961 - RNA, 19 nt, Artificial Sequence
  Description of Artificial Sequence: Synthetic oligonucleotide
cacugcggagcagagaugu

SEQ ID NO: 2034962 - RNA, 19 nt, Artificial Sequence
  Description of Artificial Sequence: Synthetic oligonucleotide
auuuccccggggccguuuu

SEQ ID NO: 2034963 - RNA, 19 nt, Artificial Sequence
  Description of Artificial Sequence: Synthetic oligonucleotide
uggaggcgagucccaccac

SEQ ID NO: 2034964 - RNA, 19 nt, Artificial Sequence
  Description of Artificial Sequence: Synthetic oligonucleotide
ccccguuacagaacacuug

SEQ ID NO: 2034965 - RNA, 19 nt, Artificial Sequence
  Description of Artificial Sequence: Synthetic oligonucleotide
acugcggagcagagauguc

SEQ ID NO: 2034966 - RNA, 19 nt, Artificial Sequence
  Description of Artificial Sequence: Synthetic oligonucleotide
uuuccccggggccguuuuc

SEQ ID NO: 2034967 - RNA, 19 nt, Artificial Sequence
  Description of Artificial Sequence: Synthetic oligonucleotide
ggucccaacuggaacuuuc

SEQ ID NO: 2034968 - RNA, 19 nt, Artificial Sequence
  Description of Artificial Sequence: Synthetic oligonucleotide
cagaccuccaaaggcaaua

SEQ ID NO: 2034969 - RNA, 19 nt, Artificial Sequence
  Description of Artificial Sequence: Synthetic oligonucleotide
gccccuaaguaugagucca

SEQ ID NO: 2034970 - RNA, 19 nt, Artificial Sequence
  Description of Artificial Sequence: Synthetic oligonucleotide
caaaaccccgaggcagcug

SEQ ID NO: 2034971 - RNA, 19 nt, Artificial Sequence
  Description of Artificial Sequence: Synthetic oligonucleotide
gguuguuauuagccaaggu

SEQ ID NO: 2034972 - RNA, 19 nt, Artificial Sequence
  Description of Artificial Sequence: Synthetic oligonucleotide
ccaaccucagaagcccagg

SEQ ID NO: 2034973 - RNA, 19 nt, Artificial Sequence
  Description of Artificial Sequence: Synthetic oligonucleotide
cuacgauauuaguaaucau

SEQ ID NO: 2034974 - RNA, 19 nt, Artificial Sequence
  Description of Artificial Sequence: Synthetic oligonucleotide
auagcagggccagcuccgu

SEQ ID NO: 2034975 - RNA, 19 nt, Artificial Sequence
  Description of Artificial Sequence: Synthetic oligonucleotide
cauugagaauuuggcugga

SEQ ID NO: 2034976 - RNA, 19 nt, Artificial Sequence
  Description of Artificial Sequence: Synthetic oligonucleotide
gcugaaauuugcaaugguu

SEQ ID NO: 2034977 - RNA, 19 nt, Artificial Sequence
  Description of Artificial Sequence: Synthetic oligonucleotide
ccucagaagcccagguauc

SEQ ID NO: 2034978 - RNA, 19 nt, Artificial Sequence
  Description of Artificial Sequence: Synthetic oligonucleotide
gcagaacaggccagugcag

SEQ ID NO: 2034979 - RNA, 19 nt, Artificial Sequence
  Description of Artificial Sequence: Synthetic oligonucleotide
aucaaccaauugggaagaa

SEQ ID NO: 2034980 - RNA, 19 nt, Artificial Sequence
  Description of Artificial Sequence: Synthetic oligonucleotide
caaccucagaagcccaggu

SEQ ID NO: 2034981 - RNA, 19 nt, Artificial Sequence
  Description of Artificial Sequence: Synthetic oligonucleotide
cucagcacugggccaaccu

SEQ ID NO: 2034982 - RNA, 19 nt, Artificial Sequence
  Description of Artificial Sequence: Synthetic oligonucleotide
guccacaacugauccuagu

SEQ ID NO: 2034983 - RNA, 19 nt, Artificial Sequence
  Description of Artificial Sequence: Synthetic oligonucleotide
cugcggagcagagaugucu

SEQ ID NO: 2034984 - RNA, 19 nt, Artificial Sequence
  Description of Artificial Sequence: Synthetic oligonucleotide
gucccaccacugugacucc

SEQ ID NO: 2034985 - RNA, 19 nt, Artificial Sequence
  Description of Artificial Sequence: Synthetic oligonucleotide
gccaaccucagaagcccag

SEQ ID NO: 2034986 - RNA, 19 nt, Artificial Sequence
  Description of Artificial Sequence: Synthetic oligonucleotide
cuggacucaccaguaucaa

SEQ ID NO: 2034987 - RNA, 19 nt, Artificial Sequence
  Description of Artificial Sequence: Synthetic oligonucleotide
cugugacuccuccauuggu

SEQ ID NO: 2034988 - RNA, 19 nt, Artificial Sequence
  Description of Artificial Sequence: Synthetic oligonucleotide
gggcacggccccguuacag

SEQ ID NO: 2034989 - RNA, 19 nt, Artificial Sequence
  Description of Artificial Sequence: Synthetic oligonucleotide
ccaacgccaaggagaaaca

SEQ ID NO: 2034990 - RNA, 19 nt, Artificial Sequence
  Description of Artificial Sequence: Synthetic oligonucleotide
caccaggccagugcuuuca

SEQ ID NO: 2034991 - RNA, 19 nt, Artificial Sequence
  Description of Artificial Sequence: Synthetic oligonucleotide
ccagaaugcuagggaaaug

SEQ ID NO: 2034992 - RNA, 19 nt, Artificial Sequence
  Description of Artificial Sequence: Synthetic oligonucleotide
gguucacggcauuguuauc

SEQ ID NO: 2034993 - RNA, 19 nt, Artificial Sequence
  Description of Artificial Sequence: Synthetic oligonucleotide
uccgugggcacggccccgu

SEQ ID NO: 2034994 - RNA, 19 nt, Artificial Sequence
  Description of Artificial Sequence: Synthetic oligonucleotide
aggccgcaaguuaccauaa

SEQ ID NO: 2034995 - RNA, 19 nt, Artificial Sequence
  Description of Artificial Sequence: Synthetic oligonucleotide
ggaggcgagucccaccacu

SEQ ID NO: 2034996 - RNA, 19 nt, Artificial Sequence
  Description of Artificial Sequence: Synthetic oligonucleotide
cccggggccguuuucuauc

SEQ ID NO: 2034997 - RNA, 19 nt, Artificial Sequence
  Description of Artificial Sequence: Synthetic oligonucleotide
gucccaacuggaacuuucu

SEQ ID NO: 2034998 - RNA, 19 nt, Artificial Sequence
  Description of Artificial Sequence: Synthetic oligonucleotide
gcgagucccaccacuguga

SEQ ID NO: 2034999 - RNA, 19 nt, Artificial Sequence
  Description of Artificial Sequence: Synthetic oligonucleotide
ccccuaaguaugaguccac

SEQ ID NO: 2035000 - RNA, 19 nt, Artificial Sequence
  Description of Artificial Sequence: Synthetic oligonucleotide
cggagcagagaugucuaag

SEQ ID NO: 2035001 - RNA, 19 nt, Artificial Sequence
  Description of Artificial Sequence: Synthetic oligonucleotide
gagucccaccacugugacu

SEQ ID NO: 2035002 - RNA, 19 nt, Artificial Sequence
  Description of Artificial Sequence: Synthetic oligonucleotide
gcuaugugcuuggucucuc

SEQ ID NO: 2035003 - RNA, 19 nt, Artificial Sequence
  Description of Artificial Sequence: Synthetic oligonucleotide
ggagcaagagggcgaccaa

SEQ ID NO: 2035004 - RNA, 19 nt, Artificial Sequence
  Description of Artificial Sequence: Synthetic oligonucleotide
gaggagacuggaggcgagu

SEQ ID NO: 2035005 - RNA, 19 nt, Artificial Sequence
  Description of Artificial Sequence: Synthetic oligonucleotide
uggucccaacuggaacuuu

SEQ ID NO: 2035006 - RNA, 19 nt, Artificial Sequence
  Description of Artificial Sequence: Synthetic oligonucleotide
ccaaccaccagcccuccua

SEQ ID NO: 2035007 - RNA, 19 nt, Artificial Sequence
  Description of Artificial Sequence: Synthetic oligonucleotide
ccagcagaacaggccagug

SEQ ID NO: 2035008 - RNA, 19 nt, Artificial Sequence
  Description of Artificial Sequence: Synthetic oligonucleotide
cuccgugggcacggccccg

SEQ ID NO: 2035009 - RNA, 19 nt, Artificial Sequence
  Description of Artificial Sequence: Synthetic oligonucleotide
ccguuacagaacacuugga

SEQ ID NO: 2035010 - RNA, 19 nt, Artificial Sequence
  Description of Artificial Sequence: Synthetic oligonucleotide
aaaccccgaggcagcuguu

SEQ ID NO: 2035011 - RNA, 19 nt, Artificial Sequence
  Description of Artificial Sequence: Synthetic oligonucleotide
cgaggagacuggaggcgag

SEQ ID NO: 2035012 - RNA, 19 nt, Artificial Sequence
  Description of Artificial Sequence: Synthetic oligonucleotide
ggccguuuucuaucaugua

SEQ ID NO: 2035013 - RNA, 19 nt, Artificial Sequence
  Description of Artificial Sequence: Synthetic oligonucleotide
ucucucgggcugggcugcu

SEQ ID NO: 2035014 - RNA, 19 nt, Artificial Sequence
  Description of Artificial Sequence: Synthetic oligonucleotide
cccuaaguaugaguccaca

SEQ ID NO: 2035015 - RNA, 19 nt, Artificial Sequence
  Description of Artificial Sequence: Synthetic oligonucleotide
agguaccaccgaggagacu

SEQ ID NO: 2035016 - RNA, 19 nt, Artificial Sequence
  Description of Artificial Sequence: Synthetic oligonucleotide
ccaacugugugaggaagua

SEQ ID NO: 2035017 - RNA, 19 nt, Artificial Sequence
  Description of Artificial Sequence: Synthetic oligonucleotide
gcugaccaccaggccagug

SEQ ID NO: 2035018 - RNA, 19 nt, Artificial Sequence
  Description of Artificial Sequence: Synthetic oligonucleotide
ggcucaauacuacgauauu

SEQ ID NO: 2035019 - RNA, 19 nt, Artificial Sequence
  Description of Artificial Sequence: Synthetic oligonucleotide
cacuuccccuuuccauuua

SEQ ID NO: 2035020 - RNA, 19 nt, Artificial Sequence
  Description of Artificial Sequence: Synthetic oligonucleotide
cucucgggcugggcugcug

SEQ ID NO: 2035021 - RNA, 19 nt, Artificial Sequence
  Description of Artificial Sequence: Synthetic oligonucleotide
gcggagcagagaugucuaa

SEQ ID NO: 2035022 - RNA, 19 nt, Artificial Sequence
  Description of Artificial Sequence: Synthetic oligonucleotide
gcuagcggucauugacaua

SEQ ID NO: 2035023 - RNA, 19 nt, Artificial Sequence
  Description of Artificial Sequence: Synthetic oligonucleotide
gcucagcacugggccaacc

SEQ ID NO: 2035024 - RNA, 19 nt, Artificial Sequence
  Description of Artificial Sequence: Synthetic oligonucleotide
ggccaaccucagaagccca

SEQ ID NO: 2035025 - RNA, 19 nt, Artificial Sequence
  Description of Artificial Sequence: Synthetic oligonucleotide
ccaccaggccagugcuuuc

SEQ ID NO: 2035026 - RNA, 19 nt, Artificial Sequence
  Description of Artificial Sequence: Synthetic oligonucleotide
aggaagcagugggcugcuu

SEQ ID NO: 2035027 - RNA, 19 nt, Artificial Sequence
  Description of Artificial Sequence: Synthetic oligonucleotide
cgauauuaguaaucaucuu

SEQ ID NO: 2035028 - RNA, 19 nt, Artificial Sequence
  Description of Artificial Sequence: Synthetic oligonucleotide
gccccguuacagaacacuu

SEQ ID NO: 2035029 - RNA, 19 nt, Artificial Sequence
  Description of Artificial Sequence: Synthetic oligonucleotide
cucuggccuccuuccuuau

SEQ ID NO: 2035030 - RNA, 19 nt, Artificial Sequence
  Description of Artificial Sequence: Synthetic oligonucleotide
ggccgcaaguuaccauaau

SEQ ID NO: 2035031 - RNA, 19 nt, Artificial Sequence
  Description of Artificial Sequence: Synthetic oligonucleotide
ccuuuccauuuagugaguu

SEQ ID NO: 2035032 - RNA, 19 nt, Artificial Sequence
  Description of Artificial Sequence: Synthetic oligonucleotide
cccuuuccauuuagugagu

SEQ ID NO: 2035033 - RNA, 19 nt, Artificial Sequence
  Description of Artificial Sequence: Synthetic oligonucleotide
gcuucccugcuaugugcuu

SEQ ID NO: 2035034 - RNA, 19 nt, Artificial Sequence
  Description of Artificial Sequence: Synthetic oligonucleotide
gcccuccuaaagccccacu

SEQ ID NO: 2035035 - RNA, 19 nt, Artificial Sequence
  Description of Artificial Sequence: Synthetic oligonucleotide
cauuuccccggggccguuu

SEQ ID NO: 2035036 - RNA, 19 nt, Artificial Sequence
  Description of Artificial Sequence: Synthetic oligonucleotide
cggccccguuacagaacac

SEQ ID NO: 2035037 - RNA, 19 nt, Artificial Sequence
  Description of Artificial Sequence: Synthetic oligonucleotide
cggcauuguuauccaagau

SEQ ID NO: 2035038 - RNA, 19 nt, Artificial Sequence
  Description of Artificial Sequence: Synthetic oligonucleotide
ccacugugacuccuccauu

SEQ ID NO: 2035039 - RNA, 19 nt, Artificial Sequence
  Description of Artificial Sequence: Synthetic oligonucleotide
cgugggcacggccccguua

SEQ ID NO: 2035040 - RNA, 19 nt, Artificial Sequence
  Description of Artificial Sequence: Synthetic oligonucleotide
cggggccguuuucuaucau

SEQ ID NO: 2035041 - RNA, 19 nt, Artificial Sequence
  Description of Artificial Sequence: Synthetic oligonucleotide
ccgugggcacggccccguu

SEQ ID NO: 2035042 - RNA, 19 nt, Artificial Sequence
  Description of Artificial Sequence: Synthetic oligonucleotide
aaacggaagaaccaaagcc

SEQ ID NO: 2035043 - RNA, 19 nt, Artificial Sequence
  Description of Artificial Sequence: Synthetic oligonucleotide
ucaaauuuguccauuaagg

SEQ ID NO: 2035044 - RNA, 19 nt, Artificial Sequence
  Description of Artificial Sequence: Synthetic oligonucleotide
uaauauuugaggaagaugu

SEQ ID NO: 2035045 - RNA, 19 nt, Artificial Sequence
  Description of Artificial Sequence: Synthetic oligonucleotide
aaauacacaagucaaaaga

SEQ ID NO: 2035046 - RNA, 19 nt, Artificial Sequence
  Description of Artificial Sequence: Synthetic oligonucleotide
aauguucaaacauucuggc

SEQ ID NO: 2035047 - RNA, 19 nt, Artificial Sequence
  Description of Artificial Sequence: Synthetic oligonucleotide
uuuaaguuacacuugauca

SEQ ID NO: 2035048 - RNA, 19 nt, Artificial Sequence
  Description of Artificial Sequence: Synthetic oligonucleotide
aauuguuuaaguuacacuu

SEQ ID NO: 2035049 - RNA, 19 nt, Artificial Sequence
  Description of Artificial Sequence: Synthetic oligonucleotide
aucuuuucaagauucauac

SEQ ID NO: 2035050 - RNA, 19 nt, Artificial Sequence
  Description of Artificial Sequence: Synthetic oligonucleotide
cuuaguaguauuuuggugc

SEQ ID NO: 2035051 - RNA, 19 nt, Artificial Sequence
  Description of Artificial Sequence: Synthetic oligonucleotide
aacacuugcaccaacagac

SEQ ID NO: 2035052 - RNA, 19 nt, Artificial Sequence
  Description of Artificial Sequence: Synthetic oligonucleotide
gaagauguauaauauacag

SEQ ID NO: 2035053 - RNA, 19 nt, Artificial Sequence
  Description of Artificial Sequence: Synthetic oligonucleotide
aaaacggaagaaccaaagc

SEQ ID NO: 2035054 - RNA, 19 nt, Artificial Sequence
  Description of Artificial Sequence: Synthetic oligonucleotide
uuacuuaguaguauuuugg

SEQ ID NO: 2035055 - RNA, 19 nt, Artificial Sequence
  Description of Artificial Sequence: Synthetic oligonucleotide
aaauuuguccauuaaggcu

SEQ ID NO: 2035056 - RNA, 19 nt, Artificial Sequence
  Description of Artificial Sequence: Synthetic oligonucleotide
aaauaugccccauacaccu

SEQ ID NO: 2035057 - RNA, 19 nt, Artificial Sequence
  Description of Artificial Sequence: Synthetic oligonucleotide
acucggaggaaacagaagc

SEQ ID NO: 2035058 - RNA, 19 nt, Artificial Sequence
  Description of Artificial Sequence: Synthetic oligonucleotide
uguauugccuuucugaaug

SEQ ID NO: 2035059 - RNA, 19 nt, Artificial Sequence
  Description of Artificial Sequence: Synthetic oligonucleotide
uuugcucuaauauuugagg

SEQ ID NO: 2035060 - RNA, 19 nt, Artificial Sequence
  Description of Artificial Sequence: Synthetic oligonucleotide
uacauguacacacaaagga

SEQ ID NO: 2035061 - RNA, 19 nt, Artificial Sequence
  Description of Artificial Sequence: Synthetic oligonucleotide
aaaauacacaagucaaaag

SEQ ID NO: 2035062 - RNA, 19 nt, Artificial Sequence
  Description of Artificial Sequence: Synthetic oligonucleotide
aauuucuuaaugcacugca

SEQ ID NO: 2035063 - RNA, 19 nt, Artificial Sequence
  Description of Artificial Sequence: Synthetic oligonucleotide
uguuacugcaguuugaacu

SEQ ID NO: 2035064 - RNA, 19 nt, Artificial Sequence
  Description of Artificial Sequence: Synthetic oligonucleotide
uucaaauuuguccauuaag

SEQ ID NO: 2035065 - RNA, 19 nt, Artificial Sequence
  Description of Artificial Sequence: Synthetic oligonucleotide
aacagacccugucugaccc

SEQ ID NO: 2035066 - RNA, 19 nt, Artificial Sequence
  Description of Artificial Sequence: Synthetic oligonucleotide
auguauaauauacagaaaa

SEQ ID NO: 2035067 - RNA, 19 nt, Artificial Sequence
  Description of Artificial Sequence: Synthetic oligonucleotide
aacccuagcacucauucuc

SEQ ID NO: 2035068 - RNA, 19 nt, Artificial Sequence
  Description of Artificial Sequence: Synthetic oligonucleotide
uccauguucgacaugaucu

SEQ ID NO: 2035069 - RNA, 19 nt, Artificial Sequence
  Description of Artificial Sequence: Synthetic oligonucleotide
gauuuugucaccuugccca

SEQ ID NO: 2035070 - RNA, 19 nt, Artificial Sequence
  Description of Artificial Sequence: Synthetic oligonucleotide
aaaauaugccccauacacc

SEQ ID NO: 2035071 - RNA, 19 nt, Artificial Sequence
  Description of Artificial Sequence: Synthetic oligonucleotide
agaacuauaaaaucugcca

SEQ ID NO: 2035072 - RNA, 19 nt, Artificial Sequence
  Description of Artificial Sequence: Synthetic oligonucleotide
uuaacuacaccugccaugg

SEQ ID NO: 2035073 - RNA, 19 nt, Artificial Sequence
  Description of Artificial Sequence: Synthetic oligonucleotide
uucaaguuaaauaaguguu

SEQ ID NO: 2035074 - RNA, 19 nt, Artificial Sequence
  Description of Artificial Sequence: Synthetic oligonucleotide
aggaagauguauaauauac

SEQ ID NO: 2035075 - RNA, 19 nt, Artificial Sequence
  Description of Artificial Sequence: Synthetic oligonucleotide
aaaauucccuuuuacaaau

SEQ ID NO: 2035076 - RNA, 19 nt, Artificial Sequence
  Description of Artificial Sequence: Synthetic oligonucleotide
aaauacacauuucaucaca

SEQ ID NO: 2035077 - RNA, 19 nt, Artificial Sequence
  Description of Artificial Sequence: Synthetic oligonucleotide
uuuaucacauuucuuggca

SEQ ID NO: 2035078 - RNA, 19 nt, Artificial Sequence
  Description of Artificial Sequence: Synthetic oligonucleotide
aaugcuagcuuugucaaag

SEQ ID NO: 2035079 - RNA, 19 nt, Artificial Sequence
  Description of Artificial Sequence: Synthetic oligonucleotide
uacagaacuauaaaaucug

SEQ ID NO: 2035080 - RNA, 19 nt, Artificial Sequence
  Description of Artificial Sequence: Synthetic oligonucleotide
uccauauugagaucaaggc

SEQ ID NO: 2035081 - RNA, 19 nt, Artificial Sequence
  Description of Artificial Sequence: Synthetic oligonucleotide
cuagagugcaacuuuauac

SEQ ID NO: 2035082 - RNA, 19 nt, Artificial Sequence
  Description of Artificial Sequence: Synthetic oligonucleotide
caaaggauguuucagacac

SEQ ID NO: 2035083 - RNA, 19 nt, Artificial Sequence
  Description of Artificial Sequence: Synthetic oligonucleotide
ugcaacuuuauacauguac

SEQ ID NO: 2035084 - RNA, 19 nt, Artificial Sequence
  Description of Artificial Sequence: Synthetic oligonucleotide
uguguuugaacauccaaug

SEQ ID NO: 2035085 - RNA, 19 nt, Artificial Sequence
  Description of Artificial Sequence: Synthetic oligonucleotide
uauucugacaaaauuacuu

SEQ ID NO: 2035086 - RNA, 19 nt, Artificial Sequence
  Description of Artificial Sequence: Synthetic oligonucleotide
uguaguacuacucauugua

SEQ ID NO: 2035087 - RNA, 19 nt, Artificial Sequence
  Description of Artificial Sequence: Synthetic oligonucleotide
aaggauguuucagacacac

SEQ ID NO: 2035088 - RNA, 19 nt, Artificial Sequence
  Description of Artificial Sequence: Synthetic oligonucleotide
uccauuaaggcugaaaucu

SEQ ID NO: 2035089 - RNA, 19 nt, Artificial Sequence
  Description of Artificial Sequence: Synthetic oligonucleotide
guuaaauaaguguuucucc

SEQ ID NO: 2035090 - RNA, 19 nt, Artificial Sequence
  Description of Artificial Sequence: Synthetic oligonucleotide
uguaucuuccauuuguugu

SEQ ID NO: 2035091 - RNA, 19 nt, Artificial Sequence
  Description of Artificial Sequence: Synthetic oligonucleotide
acuaaugcuagcuuuguca

SEQ ID NO: 2035092 - RNA, 19 nt, Artificial Sequence
  Description of Artificial Sequence: Synthetic oligonucleotide
aaugcacugcaaaauacac

SEQ ID NO: 2035093 - RNA, 19 nt, Artificial Sequence
  Description of Artificial Sequence: Synthetic oligonucleotide
cauauugagaucaaggcca

SEQ ID NO: 2035094 - RNA, 19 nt, Artificial Sequence
  Description of Artificial Sequence: Synthetic oligonucleotide
auuacuuaguaguauuuug

SEQ ID NO: 2035095 - RNA, 19 nt, Artificial Sequence
  Description of Artificial Sequence: Synthetic oligonucleotide
uauaaaaucugccaauguu

SEQ ID NO: 2035096 - RNA, 19 nt, Artificial Sequence
  Description of Artificial Sequence: Synthetic oligonucleotide
uaaguuacacuugaucacg

SEQ ID NO: 2035097 - RNA, 19 nt, Artificial Sequence
  Description of Artificial Sequence: Synthetic oligonucleotide
uugaucacgaagacgagca

SEQ ID NO: 2035098 - RNA, 19 nt, Artificial Sequence
  Description of Artificial Sequence: Synthetic oligonucleotide
uaaauaauguucaaacauu

SEQ ID NO: 2035099 - RNA, 19 nt, Artificial Sequence
  Description of Artificial Sequence: Synthetic oligonucleotide
accuuuacacauaauauac

SEQ ID NO: 2035100 - RNA, 19 nt, Artificial Sequence
  Description of Artificial Sequence: Synthetic oligonucleotide
uagauuuaacuacaccugc

SEQ ID NO: 2035101 - RNA, 19 nt, Artificial Sequence
  Description of Artificial Sequence: Synthetic oligonucleotide
uggaauuucuuaaugcacu

SEQ ID NO: 2035102 - RNA, 19 nt, Artificial Sequence
  Description of Artificial Sequence: Synthetic oligonucleotide
aguauuuuggugcuagaug

SEQ ID NO: 2035103 - RNA, 19 nt, Artificial Sequence
  Description of Artificial Sequence: Synthetic oligonucleotide
uuuacacauaauauacaga

SEQ ID NO: 2035104 - RNA, 19 nt, Artificial Sequence
  Description of Artificial Sequence: Synthetic oligonucleotide
uuuaacuacaccugccaug

SEQ ID NO: 2035105 - RNA, 19 nt, Artificial Sequence
  Description of Artificial Sequence: Synthetic oligonucleotide
cauccauagauuuaacuac

SEQ ID NO: 2035106 - RNA, 19 nt, Artificial Sequence
  Description of Artificial Sequence: Synthetic oligonucleotide
agaagcaacacuugcacca

SEQ ID NO: 2035107 - RNA, 19 nt, Artificial Sequence
  Description of Artificial Sequence: Synthetic oligonucleotide
uuguuuaaguuacacuuga

SEQ ID NO: 2035108 - RNA, 19 nt, Artificial Sequence
  Description of Artificial Sequence: Synthetic oligonucleotide
uucuguauugccuuucuga

SEQ ID NO: 2035109 - RNA, 19 nt, Artificial Sequence
  Description of Artificial Sequence: Synthetic oligonucleotide
aguacuacucauuguaucu

SEQ ID NO: 2035110 - RNA, 19 nt, Artificial Sequence
  Description of Artificial Sequence: Synthetic oligonucleotide
aacuauaaaaucugccaau

SEQ ID NO: 2035111 - RNA, 19 nt, Artificial Sequence
  Description of Artificial Sequence: Synthetic oligonucleotide
auuaaguuccuuugcagca

SEQ ID NO: 2035112 - RNA, 19 nt, Artificial Sequence
  Description of Artificial Sequence: Synthetic oligonucleotide
uucgacaugaucucacgag

SEQ ID NO: 2035113 - RNA, 19 nt, Artificial Sequence
  Description of Artificial Sequence: Synthetic oligonucleotide
uaaggcugaaaucuuuuca

SEQ ID NO: 2035114 - RNA, 19 nt, Artificial Sequence
  Description of Artificial Sequence: Synthetic oligonucleotide
guuucagacacacucggag

SEQ ID NO: 2035115 - RNA, 19 nt, Artificial Sequence
  Description of Artificial Sequence: Synthetic oligonucleotide
uuucagacacacucggagg

SEQ ID NO: 2035116 - RNA, 19 nt, Artificial Sequence
  Description of Artificial Sequence: Synthetic oligonucleotide
uuucuuaaugcacugcaaa

SEQ ID NO: 2035117 - RNA, 19 nt, Artificial Sequence
  Description of Artificial Sequence: Synthetic oligonucleotide
ucugacaaaauuacuuagu

SEQ ID NO: 2035118 - RNA, 19 nt, Artificial Sequence
  Description of Artificial Sequence: Synthetic oligonucleotide
uaaugcacugcaaaauaca

SEQ ID NO: 2035119 - RNA, 19 nt, Artificial Sequence
  Description of Artificial Sequence: Synthetic oligonucleotide
uucccuuuuacaaauuuaa

SEQ ID NO: 2035120 - RNA, 19 nt, Artificial Sequence
  Description of Artificial Sequence: Synthetic oligonucleotide
aaaacuaaugcuagcuuug

SEQ ID NO: 2035121 - RNA, 19 nt, Artificial Sequence
  Description of Artificial Sequence: Synthetic oligonucleotide
ugacggauugcauuuuccg

SEQ ID NO: 2035122 - RNA, 19 nt, Artificial Sequence
  Description of Artificial Sequence: Synthetic oligonucleotide
gaaacagaagcgccaauug

SEQ ID NO: 2035123 - RNA, 19 nt, Artificial Sequence
  Description of Artificial Sequence: Synthetic oligonucleotide
cauagauuuaacuacaccu

SEQ ID NO: 2035124 - RNA, 19 nt, Artificial Sequence
  Description of Artificial Sequence: Synthetic oligonucleotide
gauguuucagacacacucg

SEQ ID NO: 2035125 - RNA, 19 nt, Artificial Sequence
  Description of Artificial Sequence: Synthetic oligonucleotide
aaacagaagcgccaauugu

SEQ ID NO: 2035126 - RNA, 19 nt, Artificial Sequence
  Description of Artificial Sequence: Synthetic oligonucleotide
aaggcugaaaucuuuucaa

SEQ ID NO: 2035127 - RNA, 19 nt, Artificial Sequence
  Description of Artificial Sequence: Synthetic oligonucleotide
caagucaaaagaaaacauc

SEQ ID NO: 2035128 - RNA, 19 nt, Artificial Sequence
  Description of Artificial Sequence: Synthetic oligonucleotide
agcuuugucaaagacaucu

SEQ ID NO: 2035129 - RNA, 19 nt, Artificial Sequence
  Description of Artificial Sequence: Synthetic oligonucleotide
aaacugauguucaaauuug

SEQ ID NO: 2035130 - RNA, 19 nt, Artificial Sequence
  Description of Artificial Sequence: Synthetic oligonucleotide
cagaacuauaaaaucugcc

SEQ ID NO: 2035131 - RNA, 19 nt, Artificial Sequence
  Description of Artificial Sequence: Synthetic oligonucleotide
aacuaaugcuagcuuuguc

SEQ ID NO: 2035132 - RNA, 19 nt, Artificial Sequence
  Description of Artificial Sequence: Synthetic oligonucleotide
guuuaaguuacacuugauc

SEQ ID NO: 2035133 - RNA, 19 nt, Artificial Sequence
  Description of Artificial Sequence: Synthetic oligonucleotide
ugcaguuugaacucuggcu

SEQ ID NO: 2035134 - RNA, 19 nt, Artificial Sequence
  Description of Artificial Sequence: Synthetic oligonucleotide
aacggaagaaccaaagccu

SEQ ID NO: 2035135 - RNA, 19 nt, Artificial Sequence
  Description of Artificial Sequence: Synthetic oligonucleotide
uccuuugcagcaaacuuca

SEQ ID NO: 2035136 - RNA, 19 nt, Artificial Sequence
  Description of Artificial Sequence: Synthetic oligonucleotide
cuuuaucacauuucuuggc

SEQ ID NO: 2035137 - RNA, 19 nt, Artificial Sequence
  Description of Artificial Sequence: Synthetic oligonucleotide
acuuaguaguauuuuggug

SEQ ID NO: 2035138 - RNA, 19 nt, Artificial Sequence
  Description of Artificial Sequence: Synthetic oligonucleotide
uuguguuugaacauccaau

SEQ ID NO: 2035139 - RNA, 19 nt, Artificial Sequence
  Description of Artificial Sequence: Synthetic oligonucleotide
aaaucugccaauguugaaa

SEQ ID NO: 2035140 - RNA, 19 nt, Artificial Sequence
  Description of Artificial Sequence: Synthetic oligonucleotide
uuugucaccuugcccauug

SEQ ID NO: 2035141 - RNA, 19 nt, Artificial Sequence
  Description of Artificial Sequence: Synthetic oligonucleotide
uguugaaauucacuggaau

SEQ ID NO: 2035142 - RNA, 19 nt, Artificial Sequence
  Description of Artificial Sequence: Synthetic oligonucleotide
uccuauuaaguuccuuugc

SEQ ID NO: 2035143 - RNA, 19 nt, Artificial Sequence
  Description of Artificial Sequence: Synthetic oligonucleotide
auacagaacuauaaaaucu

SEQ ID NO: 2035144 - RNA, 19 nt, Artificial Sequence
  Description of Artificial Sequence: Synthetic oligonucleotide
uuguuguguuugaacaucc

SEQ ID NO: 2035145 - RNA, 19 nt, Artificial Sequence
  Description of Artificial Sequence: Synthetic oligonucleotide
ucaacccuagcacucauuc

SEQ ID NO: 2035146 - RNA, 19 nt, Artificial Sequence
  Description of Artificial Sequence: Synthetic oligonucleotide
auagauuuaacuacaccug

SEQ ID NO: 2035147 - RNA, 19 nt, Artificial Sequence
  Description of Artificial Sequence: Synthetic oligonucleotide
uuauucugacaaaauuacu

SEQ ID NO: 2035148 - RNA, 19 nt, Artificial Sequence
  Description of Artificial Sequence: Synthetic oligonucleotide
aguaguauuuuggugcuag

SEQ ID NO: 2035149 - RNA, 19 nt, Artificial Sequence
  Description of Artificial Sequence: Synthetic oligonucleotide
acacaagucaaaagaaaac

SEQ ID NO: 2035150 - RNA, 19 nt, Artificial Sequence
  Description of Artificial Sequence: Synthetic oligonucleotide
aauucacuggaauuucuua

SEQ ID NO: 2035151 - RNA, 19 nt, Artificial Sequence
  Description of Artificial Sequence: Synthetic oligonucleotide
uuuuccgcauguauucuug

SEQ ID NO: 2035152 - RNA, 19 nt, Artificial Sequence
  Description of Artificial Sequence: Synthetic oligonucleotide
guagaagcaacacuugcac

SEQ ID NO: 2035153 - RNA, 19 nt, Artificial Sequence
  Description of Artificial Sequence: Synthetic oligonucleotide
acagaacuauaaaaucugc

SEQ ID NO: 2035154 - RNA, 19 nt, Artificial Sequence
  Description of Artificial Sequence: Synthetic oligonucleotide
acgagcaagccucugugac

SEQ ID NO: 2035155 - RNA, 19 nt, Artificial Sequence
  Description of Artificial Sequence: Synthetic oligonucleotide
aauaauguucaaacauucu

SEQ ID NO: 2035156 - RNA, 19 nt, Artificial Sequence
  Description of Artificial Sequence: Synthetic oligonucleotide
ucuguauugccuuucugaa

SEQ ID NO: 2035157 - RNA, 19 nt, Artificial Sequence
  Description of Artificial Sequence: Synthetic oligonucleotide
uacuuaguaguauuuuggu

SEQ ID NO: 2035158 - RNA, 19 nt, Artificial Sequence
  Description of Artificial Sequence: Synthetic oligonucleotide
ucacuggaauuucuuaaug

SEQ ID NO: 2035159 - RNA, 19 nt, Artificial Sequence
  Description of Artificial Sequence: Synthetic oligonucleotide
aauucccuuuuacaaauuu

SEQ ID NO: 2035160 - RNA, 19 nt, Artificial Sequence
  Description of Artificial Sequence: Synthetic oligonucleotide
uuuuggugcuagauguuug

SEQ ID NO: 2035161 - RNA, 19 nt, Artificial Sequence
  Description of Artificial Sequence: Synthetic oligonucleotide
aaacuucaaguuaaauaag

SEQ ID NO: 2035162 - RNA, 19 nt, Artificial Sequence
  Description of Artificial Sequence: Synthetic oligonucleotide
acuauaaaaucugccaaug

SEQ ID NO: 2035163 - RNA, 19 nt, Artificial Sequence
  Description of Artificial Sequence: Synthetic oligonucleotide
uguucgacaugaucucacg

SEQ ID NO: 2035164 - RNA, 19 nt, Artificial Sequence
  Description of Artificial Sequence: Synthetic oligonucleotide
uuuggugcuagauguuugc

SEQ ID NO: 2035165 - RNA, 19 nt, Artificial Sequence
  Description of Artificial Sequence: Synthetic oligonucleotide
aagauguauaauauacaga

SEQ ID NO: 2035166 - RNA, 19 nt, Artificial Sequence
  Description of Artificial Sequence: Synthetic oligonucleotide
acgaagacgagcaagccuc

SEQ ID NO: 2035167 - RNA, 19 nt, Artificial Sequence
  Description of Artificial Sequence: Synthetic oligonucleotide
aacuacaccugccauggau

SEQ ID NO: 2035168 - RNA, 19 nt, Artificial Sequence
  Description of Artificial Sequence: Synthetic oligonucleotide
cacaaaggauguuucagac

SEQ ID NO: 2035169 - RNA, 19 nt, Artificial Sequence
  Description of Artificial Sequence: Synthetic oligonucleotide
ugagaucaaggccagcuuc

SEQ ID NO: 2035170 - RNA, 19 nt, Artificial Sequence
  Description of Artificial Sequence: Synthetic oligonucleotide
uucuuaaugcacugcaaaa

SEQ ID NO: 2035171 - RNA, 19 nt, Artificial Sequence
  Description of Artificial Sequence: Synthetic oligonucleotide
ugaacauccaauguuucaa

SEQ ID NO: 2035172 - RNA, 19 nt, Artificial Sequence
  Description of Artificial Sequence: Synthetic oligonucleotide
acugcaaaauacacaaguc

SEQ ID NO: 2035173 - RNA, 19 nt, Artificial Sequence
  Description of Artificial Sequence: Synthetic oligonucleotide
uccaauguuucaaacugau

SEQ ID NO: 2035174 - RNA, 19 nt, Artificial Sequence
  Description of Artificial Sequence: Synthetic oligonucleotide
gguucugugguguuguuag

SEQ ID NO: 2035175 - RNA, 19 nt, Artificial Sequence
  Description of Artificial Sequence: Synthetic oligonucleotide
aguucauccugcucuguag

SEQ ID NO: 2035176 - RNA, 19 nt, Artificial Sequence
  Description of Artificial Sequence: Synthetic oligonucleotide
auuugaggaagauguauaa

SEQ ID NO: 2035177 - RNA, 19 nt, Artificial Sequence
  Description of Artificial Sequence: Synthetic oligonucleotide
uguuugcucuaauauuuga

SEQ ID NO: 2035178 - RNA, 19 nt, Artificial Sequence
  Description of Artificial Sequence: Synthetic oligonucleotide
auucacuggaauuucuuaa

SEQ ID NO: 2035179 - RNA, 19 nt, Artificial Sequence
  Description of Artificial Sequence: Synthetic oligonucleotide
acggauugcauuuuccgca

SEQ ID NO: 2035180 - RNA, 19 nt, Artificial Sequence
  Description of Artificial Sequence: Synthetic oligonucleotide
cucggaggaaacagaagcg

SEQ ID NO: 2035181 - RNA, 19 nt, Artificial Sequence
  Description of Artificial Sequence: Synthetic oligonucleotide
gacggauugcauuuuccgc

SEQ ID NO: 2035182 - RNA, 19 nt, Artificial Sequence
  Description of Artificial Sequence: Synthetic oligonucleotide
ucgacaugaucucacgagu

SEQ ID NO: 2035183 - RNA, 19 nt, Artificial Sequence
  Description of Artificial Sequence: Synthetic oligonucleotide
uacacuugaucacgaagac

SEQ ID NO: 2035184 - RNA, 19 nt, Artificial Sequence
  Description of Artificial Sequence: Synthetic oligonucleotide
ucuuaaugcacugcaaaau

SEQ ID NO: 2035185 - RNA, 19 nt, Artificial Sequence
  Description of Artificial Sequence: Synthetic oligonucleotide
ugcucuaauauuugaggaa

SEQ ID NO: 2035186 - RNA, 19 nt, Artificial Sequence
  Description of Artificial Sequence: Synthetic oligonucleotide
guuugcucuaauauuugag

SEQ ID NO: 2035187 - RNA, 19 nt, Artificial Sequence
  Description of Artificial Sequence: Synthetic oligonucleotide
uguuguuaggguuguagua

SEQ ID NO: 2035188 - RNA, 19 nt, Artificial Sequence
  Description of Artificial Sequence: Synthetic oligonucleotide
gaucacgaagacgagcaag

SEQ ID NO: 2035189 - RNA, 19 nt, Artificial Sequence
  Description of Artificial Sequence: Synthetic oligonucleotide
cuagcacucauucucaaga

SEQ ID NO: 2035190 - RNA, 19 nt, Artificial Sequence
  Description of Artificial Sequence: Synthetic oligonucleotide
uuuguuguguuugaacauc

SEQ ID NO: 2035191 - RNA, 19 nt, Artificial Sequence
  Description of Artificial Sequence: Synthetic oligonucleotide
acuucaaguuaaauaagug

SEQ ID NO: 2035192 - RNA, 19 nt, Artificial Sequence
  Description of Artificial Sequence: Synthetic oligonucleotide
guuguuaggguuguaguac

SEQ ID NO: 2035193 - RNA, 19 nt, Artificial Sequence
  Description of Artificial Sequence: Synthetic oligonucleotide
cugcaaaauacacaaguca

SEQ ID NO: 2035194 - RNA, 19 nt, Artificial Sequence
  Description of Artificial Sequence: Synthetic oligonucleotide
uaguacuacucauuguauc

SEQ ID NO: 2035195 - RNA, 19 nt, Artificial Sequence
  Description of Artificial Sequence: Synthetic oligonucleotide
cauguauucuugcaacuuc

SEQ ID NO: 2035196 - RNA, 19 nt, Artificial Sequence
  Description of Artificial Sequence: Synthetic oligonucleotide
auuguuuaaguuacacuug

SEQ ID NO: 2035197 - RNA, 19 nt, Artificial Sequence
  Description of Artificial Sequence: Synthetic oligonucleotide
uguucaaauuuguccauua

SEQ ID NO: 2035198 - RNA, 19 nt, Artificial Sequence
  Description of Artificial Sequence: Synthetic oligonucleotide
aggguuguaguacuacuca

SEQ ID NO: 2035199 - RNA, 19 nt, Artificial Sequence
  Description of Artificial Sequence: Synthetic oligonucleotide
cuagcuuugucaaagacau

SEQ ID NO: 2035200 - RNA, 19 nt, Artificial Sequence
  Description of Artificial Sequence: Synthetic oligonucleotide
uugcccauuguuacugcag

SEQ ID NO: 2035201 - RNA, 19 nt, Artificial Sequence
  Description of Artificial Sequence: Synthetic oligonucleotide
uuaaggcugaaaucuuuuc

SEQ ID NO: 2035202 - RNA, 19 nt, Artificial Sequence
  Description of Artificial Sequence: Synthetic oligonucleotide
uuucugacggauugcauuu

SEQ ID NO: 2035203 - RNA, 19 nt, Artificial Sequence
  Description of Artificial Sequence: Synthetic oligonucleotide
uaggguuguaguacuacuc

SEQ ID NO: 2035204 - RNA, 19 nt, Artificial Sequence
  Description of Artificial Sequence: Synthetic oligonucleotide
uuugaacucuggcugccac

SEQ ID NO: 2035205 - RNA, 19 nt, Artificial Sequence
  Description of Artificial Sequence: Synthetic oligonucleotide
acugauguucaaauuuguc

SEQ ID NO: 2035206 - RNA, 19 nt, Artificial Sequence
  Description of Artificial Sequence: Synthetic oligonucleotide
ugaaauucacuggaauuuc

SEQ ID NO: 2035207 - RNA, 19 nt, Artificial Sequence
  Description of Artificial Sequence: Synthetic oligonucleotide
uacucauuguaucuuccau

SEQ ID NO: 2035208 - RNA, 19 nt, Artificial Sequence
  Description of Artificial Sequence: Synthetic oligonucleotide
aaauuacuuaguaguauuu

SEQ ID NO: 2035209 - RNA, 19 nt, Artificial Sequence
  Description of Artificial Sequence: Synthetic oligonucleotide
acaaaggauguuucagaca

SEQ ID NO: 2035210 - RNA, 19 nt, Artificial Sequence
  Description of Artificial Sequence: Synthetic oligonucleotide
uccgcauguauucuugcaa

SEQ ID NO: 2035211 - RNA, 19 nt, Artificial Sequence
  Description of Artificial Sequence: Synthetic oligonucleotide
ugcuagcuuugucaaagac

SEQ ID NO: 2035212 - RNA, 19 nt, Artificial Sequence
  Description of Artificial Sequence: Synthetic oligonucleotide
aggcugaaaucuuuucaag

SEQ ID NO: 2035213 - RNA, 19 nt, Artificial Sequence
  Description of Artificial Sequence: Synthetic oligonucleotide
cacacaaaggauguuucag

SEQ ID NO: 2035214 - RNA, 19 nt, Artificial Sequence
  Description of Artificial Sequence: Synthetic oligonucleotide
ucuuuucaagauucauacu

SEQ ID NO: 2035215 - RNA, 19 nt, Artificial Sequence
  Description of Artificial Sequence: Synthetic oligonucleotide
cuugaucacgaagacgagc

SEQ ID NO: 2035216 - RNA, 19 nt, Artificial Sequence
  Description of Artificial Sequence: Synthetic oligonucleotide
aacagaagcgccaauuguu

SEQ ID NO: 2035217 - RNA, 19 nt, Artificial Sequence
  Description of Artificial Sequence: Synthetic oligonucleotide
uuguuaggguuguaguacu

SEQ ID NO: 2035218 - RNA, 19 nt, Artificial Sequence
  Description of Artificial Sequence: Synthetic oligonucleotide
aaacuaaugcuagcuuugu

SEQ ID NO: 2035219 - RNA, 19 nt, Artificial Sequence
  Description of Artificial Sequence: Synthetic oligonucleotide
ccauauugagaucaaggcc

SEQ ID NO: 2035220 - RNA, 19 nt, Artificial Sequence
  Description of Artificial Sequence: Synthetic oligonucleotide
uuucuagcuagagugcaac

SEQ ID NO: 2035221 - RNA, 19 nt, Artificial Sequence
  Description of Artificial Sequence: Synthetic oligonucleotide
uugcauuuuccgcauguau

SEQ ID NO: 2035222 - RNA, 19 nt, Artificial Sequence
  Description of Artificial Sequence: Synthetic oligonucleotide
uggaagcuccauauugaga

SEQ ID NO: 2035223 - RNA, 19 nt, Artificial Sequence
  Description of Artificial Sequence: Synthetic oligonucleotide
gacaugaucucacgaguuc

SEQ ID NO: 2035224 - RNA, 19 nt, Artificial Sequence
  Description of Artificial Sequence: Synthetic oligonucleotide
uuuucuagcuagagugcaa

SEQ ID NO: 2035225 - RNA, 19 nt, Artificial Sequence
  Description of Artificial Sequence: Synthetic oligonucleotide
gcucuaauauuugaggaag

SEQ ID NO: 2035226 - RNA, 19 nt, Artificial Sequence
  Description of Artificial Sequence: Synthetic oligonucleotide
agagugcaacuuuauacau

SEQ ID NO: 2035227 - RNA, 19 nt, Artificial Sequence
  Description of Artificial Sequence: Synthetic oligonucleotide
uacuacucauuguaucuuc

SEQ ID NO: 2035228 - RNA, 19 nt, Artificial Sequence
  Description of Artificial Sequence: Synthetic oligonucleotide
ugcccauuguuacugcagu

SEQ ID NO: 2035229 - RNA, 19 nt, Artificial Sequence
  Description of Artificial Sequence: Synthetic oligonucleotide
agacgagcaagccucugug

SEQ ID NO: 2035230 - RNA, 19 nt, Artificial Sequence
  Description of Artificial Sequence: Synthetic oligonucleotide
gaaauugauugcuugguuu

SEQ ID NO: 2035231 - RNA, 19 nt, Artificial Sequence
  Description of Artificial Sequence: Synthetic oligonucleotide
cacuugcaccaacagaccc

SEQ ID NO: 2035232 - RNA, 19 nt, Artificial Sequence
  Description of Artificial Sequence: Synthetic oligonucleotide
aauguagcauccauagauu

SEQ ID NO: 2035233 - RNA, 19 nt, Artificial Sequence
  Description of Artificial Sequence: Synthetic oligonucleotide
acaagucaaaagaaaacau

SEQ ID NO: 2035234 - RNA, 19 nt, Artificial Sequence
  Description of Artificial Sequence: Synthetic oligonucleotide
agaaauugauugcuugguu

SEQ ID NO: 2035235 - RNA, 19 nt, Artificial Sequence
  Description of Artificial Sequence: Synthetic oligonucleotide
gcaaacuucaaguuaaaua

SEQ ID NO: 2035236 - RNA, 19 nt, Artificial Sequence
  Description of Artificial Sequence: Synthetic oligonucleotide
guauugccuuucugaaugg

SEQ ID NO: 2035237 - RNA, 19 nt, Artificial Sequence
  Description of Artificial Sequence: Synthetic oligonucleotide
uguuuaaguuacacuugau

SEQ ID NO: 2035238 - RNA, 19 nt, Artificial Sequence
  Description of Artificial Sequence: Synthetic oligonucleotide
cugacggauugcauuuucc

SEQ ID NO: 2035239 - RNA, 19 nt, Artificial Sequence
  Description of Artificial Sequence: Synthetic oligonucleotide
ugcaccaacagacccuguc

SEQ ID NO: 2035240 - RNA, 19 nt, Artificial Sequence
  Description of Artificial Sequence: Synthetic oligonucleotide
agaagcgccaauuguuuaa

SEQ ID NO: 2035241 - RNA, 19 nt, Artificial Sequence
  Description of Artificial Sequence: Synthetic oligonucleotide
uuuccgcauguauucuugc

SEQ ID NO: 2035242 - RNA, 19 nt, Artificial Sequence
  Description of Artificial Sequence: Synthetic oligonucleotide
auuguuacugcaguuugaa

SEQ ID NO: 2035243 - RNA, 19 nt, Artificial Sequence
  Description of Artificial Sequence: Synthetic oligonucleotide
ggcauuccuauuaaguucc

SEQ ID NO: 2035244 - RNA, 19 nt, Artificial Sequence
  Description of Artificial Sequence: Synthetic oligonucleotide
cuaaugcuagcuuugucaa

SEQ ID NO: 2035245 - RNA, 19 nt, Artificial Sequence
  Description of Artificial Sequence: Synthetic oligonucleotide
uuguaguacuacucauugu

SEQ ID NO: 2035246 - RNA, 19 nt, Artificial Sequence
  Description of Artificial Sequence: Synthetic oligonucleotide
caguuugaacucuggcugc

SEQ ID NO: 2035247 - RNA, 19 nt, Artificial Sequence
  Description of Artificial Sequence: Synthetic oligonucleotide
gaagcgccaauuguuuaag

SEQ ID NO: 2035248 - RNA, 19 nt, Artificial Sequence
  Description of Artificial Sequence: Synthetic oligonucleotide
uaguauuuuggugcuagau

SEQ ID NO: 2035249 - RNA, 19 nt, Artificial Sequence
  Description of Artificial Sequence: Synthetic oligonucleotide
auguucgacaugaucucac

SEQ ID NO: 2035250 - RNA, 19 nt, Artificial Sequence
  Description of Artificial Sequence: Synthetic oligonucleotide
cugacaaaauuacuuagua

SEQ ID NO: 2035251 - RNA, 19 nt, Artificial Sequence
  Description of Artificial Sequence: Synthetic oligonucleotide
uuugaggaagauguauaau

SEQ ID NO: 2035252 - RNA, 19 nt, Artificial Sequence
  Description of Artificial Sequence: Synthetic oligonucleotide
ucugacggauugcauuuuc

SEQ ID NO: 2035253 - RNA, 19 nt, Artificial Sequence
  Description of Artificial Sequence: Synthetic oligonucleotide
uaucacauuucuuggcauu

SEQ ID NO: 2035254 - RNA, 19 nt, Artificial Sequence
  Description of Artificial Sequence: Synthetic oligonucleotide
acacacucggaggaaacag

SEQ ID NO: 2035255 - RNA, 19 nt, Artificial Sequence
  Description of Artificial Sequence: Synthetic oligonucleotide
uccacuugguucuguggug

SEQ ID NO: 2035256 - RNA, 19 nt, Artificial Sequence
  Description of Artificial Sequence: Synthetic oligonucleotide
acaaaauuacuuaguagua

SEQ ID NO: 2035257 - RNA, 19 nt, Artificial Sequence
  Description of Artificial Sequence: Synthetic oligonucleotide
cugacccuguggaagcucc

SEQ ID NO: 2035258 - RNA, 19 nt, Artificial Sequence
  Description of Artificial Sequence: Synthetic oligonucleotide
gagugcaacuuuauacaug

SEQ ID NO: 2035259 - RNA, 19 nt, Artificial Sequence
  Description of Artificial Sequence: Synthetic oligonucleotide
aagccuuuauucugacaaa

SEQ ID NO: 2035260 - RNA, 19 nt, Artificial Sequence
  Description of Artificial Sequence: Synthetic oligonucleotide
ucuagcuagagugcaacuu

SEQ ID NO: 2035261 - RNA, 19 nt, Artificial Sequence
  Description of Artificial Sequence: Synthetic oligonucleotide
ugcucuguagaagcaacac

SEQ ID NO: 2035262 - RNA, 19 nt, Artificial Sequence
  Description of Artificial Sequence: Synthetic oligonucleotide
uggugcuagauguuugcuc

SEQ ID NO: 2035263 - RNA, 19 nt, Artificial Sequence
  Description of Artificial Sequence: Synthetic oligonucleotide
caagauucauacuucucaa

SEQ ID NO: 2035264 - RNA, 19 nt, Artificial Sequence
  Description of Artificial Sequence: Synthetic oligonucleotide
uuaaguuccuuugcagcaa

SEQ ID NO: 2035265 - RNA, 19 nt, Artificial Sequence
  Description of Artificial Sequence: Synthetic oligonucleotide
gguguuguuaggguuguag

SEQ ID NO: 2035266 - RNA, 19 nt, Artificial Sequence
  Description of Artificial Sequence: Synthetic oligonucleotide
agcgccaauuguuuaaguu

SEQ ID NO: 2035267 - RNA, 19 nt, Artificial Sequence
  Description of Artificial Sequence: Synthetic oligonucleotide
uuccgcauguauucuugca

SEQ ID NO: 2035268 - RNA, 19 nt, Artificial Sequence
  Description of Artificial Sequence: Synthetic oligonucleotide
acacuugcaccaacagacc

SEQ ID NO: 2035269 - RNA, 19 nt, Artificial Sequence
  Description of Artificial Sequence: Synthetic oligonucleotide
uuguuacugcaguuugaac

SEQ ID NO: 2035270 - RNA, 19 nt, Artificial Sequence
  Description of Artificial Sequence: Synthetic oligonucleotide
guccauuaaggcugaaauc

SEQ ID NO: 2035271 - RNA, 19 nt, Artificial Sequence
  Description of Artificial Sequence: Synthetic oligonucleotide
gccccauacaccuuuacac

SEQ ID NO: 2035272 - RNA, 19 nt, Artificial Sequence
  Description of Artificial Sequence: Synthetic oligonucleotide
uucuagcuagagugcaacu

SEQ ID NO: 2035273 - RNA, 19 nt, Artificial Sequence
  Description of Artificial Sequence: Synthetic oligonucleotide
auacacaagucaaaagaaa

SEQ ID NO: 2035274 - RNA, 19 nt, Artificial Sequence
  Description of Artificial Sequence: Synthetic oligonucleotide
auauugagaucaaggccag

SEQ ID NO: 2035275 - RNA, 19 nt, Artificial Sequence
  Description of Artificial Sequence: Synthetic oligonucleotide
gcaacuuuauacauguaca

SEQ ID NO: 2035276 - RNA, 19 nt, Artificial Sequence
  Description of Artificial Sequence: Synthetic oligonucleotide
ucaaacauucuggcaugug

SEQ ID NO: 2035277 - RNA, 19 nt, Artificial Sequence
  Description of Artificial Sequence: Synthetic oligonucleotide
ggauuuugucaccuugccc

SEQ ID NO: 2035278 - RNA, 19 nt, Artificial Sequence
  Description of Artificial Sequence: Synthetic oligonucleotide
cauacaccuuuacacauaa

SEQ ID NO: 2035279 - RNA, 19 nt, Artificial Sequence
  Description of Artificial Sequence: Synthetic oligonucleotide
caacagacccugucugacc

SEQ ID NO: 2035280 - RNA, 19 nt, Artificial Sequence
  Description of Artificial Sequence: Synthetic oligonucleotide
aaguuacacuugaucacga

SEQ ID NO: 2035281 - RNA, 19 nt, Artificial Sequence
  Description of Artificial Sequence: Synthetic oligonucleotide
cuugcaccaacagacccug

SEQ ID NO: 2035282 - RNA, 19 nt, Artificial Sequence
  Description of Artificial Sequence: Synthetic oligonucleotide
auaugccccauacaccuuu

SEQ ID NO: 2035283 - RNA, 19 nt, Artificial Sequence
  Description of Artificial Sequence: Synthetic oligonucleotide
aagcgccaauuguuuaagu

SEQ ID NO: 2035284 - RNA, 19 nt, Artificial Sequence
  Description of Artificial Sequence: Synthetic oligonucleotide
agucaaaagaaaacaucau

SEQ ID NO: 2035285 - RNA, 19 nt, Artificial Sequence
  Description of Artificial Sequence: Synthetic oligonucleotide
cucuguagaagcaacacuu

SEQ ID NO: 2035286 - RNA, 19 nt, Artificial Sequence
  Description of Artificial Sequence: Synthetic oligonucleotide
auuuuccgcauguauucuu

SEQ ID NO: 2035287 - RNA, 19 nt, Artificial Sequence
  Description of Artificial Sequence: Synthetic oligonucleotide
guucauccugcucuguaga

SEQ ID NO: 2035288 - RNA, 19 nt, Artificial Sequence
  Description of Artificial Sequence: Synthetic oligonucleotide
aguuacacuugaucacgaa

SEQ ID NO: 2035289 - RNA, 19 nt, Artificial Sequence
  Description of Artificial Sequence: Synthetic oligonucleotide
caauuguuuaaguuacacu

SEQ ID NO: 2035290 - RNA, 19 nt, Artificial Sequence
  Description of Artificial Sequence: Synthetic oligonucleotide
uaaugcuagcuuugucaaa

SEQ ID NO: 2035291 - RNA, 19 nt, Artificial Sequence
  Description of Artificial Sequence: Synthetic oligonucleotide
auuuuggugcuagauguuu

SEQ ID NO: 2035292 - RNA, 19 nt, Artificial Sequence
  Description of Artificial Sequence: Synthetic oligonucleotide
caaacauucuggcaugugu

SEQ ID NO: 2035293 - RNA, 19 nt, Artificial Sequence
  Description of Artificial Sequence: Synthetic oligonucleotide
gagaucaaggccagcuuca

SEQ ID NO: 2035294 - RNA, 19 nt, Artificial Sequence
  Description of Artificial Sequence: Synthetic oligonucleotide
uguuaggguuguaguacua

SEQ ID NO: 2035295 - RNA, 19 nt, Artificial Sequence
  Description of Artificial Sequence: Synthetic oligonucleotide
auuaaggcugaaaucuuuu

SEQ ID NO: 2035296 - RNA, 19 nt, Artificial Sequence
  Description of Artificial Sequence: Synthetic oligonucleotide
auuuugucaccuugcccau

SEQ ID NO: 2035297 - RNA, 19 nt, Artificial Sequence
  Description of Artificial Sequence: Synthetic oligonucleotide
auucuggcauguguggugu

SEQ ID NO: 2035298 - RNA, 19 nt, Artificial Sequence
  Description of Artificial Sequence: Synthetic oligonucleotide
cuucuguauugccuuucug

SEQ ID NO: 2035299 - RNA, 19 nt, Artificial Sequence
  Description of Artificial Sequence: Synthetic oligonucleotide
cacucggaggaaacagaag

SEQ ID NO: 2035300 - RNA, 19 nt, Artificial Sequence
  Description of Artificial Sequence: Synthetic oligonucleotide
guucgacaugaucucacga

SEQ ID NO: 2035301 - RNA, 19 nt, Artificial Sequence
  Description of Artificial Sequence: Synthetic oligonucleotide
augccccauacaccuuuac

SEQ ID NO: 2035302 - RNA, 19 nt, Artificial Sequence
  Description of Artificial Sequence: Synthetic oligonucleotide
ggaagauguauaauauaca

SEQ ID NO: 2035303 - RNA, 19 nt, Artificial Sequence
  Description of Artificial Sequence: Synthetic oligonucleotide
ccaauuguuuaaguuacac

SEQ ID NO: 2035304 - RNA, 19 nt, Artificial Sequence
  Description of Artificial Sequence: Synthetic oligonucleotide
ugaucacgaagacgagcaa

SEQ ID NO: 2035305 - RNA, 19 nt, Artificial Sequence
  Description of Artificial Sequence: Synthetic oligonucleotide
guauucuugcaacuucugu

SEQ ID NO: 2035306 - RNA, 19 nt, Artificial Sequence
  Description of Artificial Sequence: Synthetic oligonucleotide
aaaggauguuucagacaca

SEQ ID NO: 2035307 - RNA, 19 nt, Artificial Sequence
  Description of Artificial Sequence: Synthetic oligonucleotide
agcaacacuugcaccaaca

SEQ ID NO: 2035308 - RNA, 19 nt, Artificial Sequence
  Description of Artificial Sequence: Synthetic oligonucleotide
ccuauuaaguuccuuugca

SEQ ID NO: 2035309 - RNA, 19 nt, Artificial Sequence
  Description of Artificial Sequence: Synthetic oligonucleotide
cagaaaacuaaugcuagcu

SEQ ID NO: 2035310 - RNA, 19 nt, Artificial Sequence
  Description of Artificial Sequence: Synthetic oligonucleotide
acuugcaccaacagacccu

SEQ ID NO: 2035311 - RNA, 19 nt, Artificial Sequence
  Description of Artificial Sequence: Synthetic oligonucleotide
ugcuagauguuugcucuaa

SEQ ID NO: 2035312 - RNA, 19 nt, Artificial Sequence
  Description of Artificial Sequence: Synthetic oligonucleotide
uagcauccauagauuuaac

SEQ ID NO: 2035313 - RNA, 19 nt, Artificial Sequence
  Description of Artificial Sequence: Synthetic oligonucleotide
uuacugcaguuugaacucu

SEQ ID NO: 2035314 - RNA, 19 nt, Artificial Sequence
  Description of Artificial Sequence: Synthetic oligonucleotide
uuuccugaagcagcauauc

SEQ ID NO: 2035315 - RNA, 19 nt, Artificial Sequence
  Description of Artificial Sequence: Synthetic oligonucleotide
gcuagcuuugucaaagaca

SEQ ID NO: 2035316 - RNA, 19 nt, Artificial Sequence
  Description of Artificial Sequence: Synthetic oligonucleotide
gacgagcaagccucuguga

SEQ ID NO: 2035317 - RNA, 19 nt, Artificial Sequence
  Description of Artificial Sequence: Synthetic oligonucleotide
acuugguucugugguguug

SEQ ID NO: 2035318 - RNA, 19 nt, Artificial Sequence
  Description of Artificial Sequence: Synthetic oligonucleotide
gacccugucugacccugug

SEQ ID NO: 2035319 - RNA, 19 nt, Artificial Sequence
  Description of Artificial Sequence: Synthetic oligonucleotide
auccaauguuucaaacuga

SEQ ID NO: 2035320 - RNA, 19 nt, Artificial Sequence
  Description of Artificial Sequence: Synthetic oligonucleotide
augcuagcuuugucaaaga

SEQ ID NO: 2035321 - RNA, 19 nt, Artificial Sequence
  Description of Artificial Sequence: Synthetic oligonucleotide
guaguauuuuggugcuaga

SEQ ID NO: 2035322 - RNA, 19 nt, Artificial Sequence
  Description of Artificial Sequence: Synthetic oligonucleotide
cgccaauuguuuaaguuac

SEQ ID NO: 2035323 - RNA, 19 nt, Artificial Sequence
  Description of Artificial Sequence: Synthetic oligonucleotide
guguuguuaggguuguagu

SEQ ID NO: 2035324 - RNA, 19 nt, Artificial Sequence
  Description of Artificial Sequence: Synthetic oligonucleotide
gacacacucggaggaaaca

SEQ ID NO: 2035325 - RNA, 19 nt, Artificial Sequence
  Description of Artificial Sequence: Synthetic oligonucleotide
agcagcauauccacuuggu

SEQ ID NO: 2035326 - RNA, 19 nt, Artificial Sequence
  Description of Artificial Sequence: Synthetic oligonucleotide
cacacucggaggaaacaga

SEQ ID NO: 2035327 - RNA, 19 nt, Artificial Sequence
  Description of Artificial Sequence: Synthetic oligonucleotide
cuugcccauuguuacugca

SEQ ID NO: 2035328 - RNA, 19 nt, Artificial Sequence
  Description of Artificial Sequence: Synthetic oligonucleotide
acagaagcgccaauuguuu

SEQ ID NO: 2035329 - RNA, 19 nt, Artificial Sequence
  Description of Artificial Sequence: Synthetic oligonucleotide
acuacaccugccauggauu

SEQ ID NO: 2035330 - RNA, 19 nt, Artificial Sequence
  Description of Artificial Sequence: Synthetic oligonucleotide
acacucggaggaaacagaa

SEQ ID NO: 2035331 - RNA, 19 nt, Artificial Sequence
  Description of Artificial Sequence: Synthetic oligonucleotide
acuugaucacgaagacgag

SEQ ID NO: 2035332 - RNA, 19 nt, Artificial Sequence
  Description of Artificial Sequence: Synthetic oligonucleotide
caaagccuuuauucugaca

SEQ ID NO: 2035333 - RNA, 19 nt, Artificial Sequence
  Description of Artificial Sequence: Synthetic oligonucleotide
gaagacgagcaagccucug

SEQ ID NO: 2035334 - RNA, 19 nt, Artificial Sequence
  Description of Artificial Sequence: Synthetic oligonucleotide
gucaccuugcccauuguua

SEQ ID NO: 2035335 - RNA, 19 nt, Artificial Sequence
  Description of Artificial Sequence: Synthetic oligonucleotide
ccaauguuucaaacugaug

SEQ ID NO: 2035336 - RNA, 19 nt, Artificial Sequence
  Description of Artificial Sequence: Synthetic oligonucleotide
uaacuacaccugccaugga

SEQ ID NO: 2035337 - RNA, 19 nt, Artificial Sequence
  Description of Artificial Sequence: Synthetic oligonucleotide
ccuuuacacauaauauaca

SEQ ID NO: 2035338 - RNA, 19 nt, Artificial Sequence
  Description of Artificial Sequence: Synthetic oligonucleotide
ucuggcaugugugguguuu

SEQ ID NO: 2035339 - RNA, 19 nt, Artificial Sequence
  Description of Artificial Sequence: Synthetic oligonucleotide
ccuagcacucauucucaag

SEQ ID NO: 2035340 - RNA, 19 nt, Artificial Sequence
  Description of Artificial Sequence: Synthetic oligonucleotide
gcgccaauuguuuaaguua

SEQ ID NO: 2035341 - RNA, 19 nt, Artificial Sequence
  Description of Artificial Sequence: Synthetic oligonucleotide
ccauguucgacaugaucuc

SEQ ID NO: 2035342 - RNA, 19 nt, Artificial Sequence
  Description of Artificial Sequence: Synthetic oligonucleotide
cugcucuguagaagcaaca

SEQ ID NO: 2035343 - RNA, 19 nt, Artificial Sequence
  Description of Artificial Sequence: Synthetic oligonucleotide
auguugaaauucacuggaa

SEQ ID NO: 2035344 - RNA, 19 nt, Artificial Sequence
  Description of Artificial Sequence: Synthetic oligonucleotide
gguguugggaauuuccuuu

SEQ ID NO: 2035345 - RNA, 19 nt, Artificial Sequence
  Description of Artificial Sequence: Synthetic oligonucleotide
cauguucgacaugaucuca

SEQ ID NO: 2035346 - RNA, 19 nt, Artificial Sequence
  Description of Artificial Sequence: Synthetic oligonucleotide
cuagcuagagugcaacuuu

SEQ ID NO: 2035347 - RNA, 19 nt, Artificial Sequence
  Description of Artificial Sequence: Synthetic oligonucleotide
acggaagaaccaaagccuu

SEQ ID NO: 2035348 - RNA, 19 nt, Artificial Sequence
  Description of Artificial Sequence: Synthetic oligonucleotide
uagcuuugucaaagacauc

SEQ ID NO: 2035349 - RNA, 19 nt, Artificial Sequence
  Description of Artificial Sequence: Synthetic oligonucleotide
ugguucugugguguuguua

SEQ ID NO: 2035350 - RNA, 19 nt, Artificial Sequence
  Description of Artificial Sequence: Synthetic oligonucleotide
aauaugccccauacaccuu

SEQ ID NO: 2035351 - RNA, 19 nt, Artificial Sequence
  Description of Artificial Sequence: Synthetic oligonucleotide
acauuucuuggcauuccua

SEQ ID NO: 2035352 - RNA, 19 nt, Artificial Sequence
  Description of Artificial Sequence: Synthetic oligonucleotide
cacgaagacgagcaagccu

SEQ ID NO: 2035353 - RNA, 19 nt, Artificial Sequence
  Description of Artificial Sequence: Synthetic oligonucleotide
gcuagagugcaacuuuaua

SEQ ID NO: 2035354 - RNA, 19 nt, Artificial Sequence
  Description of Artificial Sequence: Synthetic oligonucleotide
agcuagagugcaacuuuau

SEQ ID NO: 2035355 - RNA, 19 nt, Artificial Sequence
  Description of Artificial Sequence: Synthetic oligonucleotide
guaguacuacucauuguau

SEQ ID NO: 2035356 - RNA, 19 nt, Artificial Sequence
  Description of Artificial Sequence: Synthetic oligonucleotide
ccaacagacccugucugac

SEQ ID NO: 2035357 - RNA, 19 nt, Artificial Sequence
  Description of Artificial Sequence: Synthetic oligonucleotide
acccuguggaagcuccaua

SEQ ID NO: 2035358 - RNA, 19 nt, Artificial Sequence
  Description of Artificial Sequence: Synthetic oligonucleotide
cagaagcgccaauuguuua

SEQ ID NO: 2035359 - RNA, 19 nt, Artificial Sequence
  Description of Artificial Sequence: Synthetic oligonucleotide
ccccauacaccuuuacaca

SEQ ID NO: 2035360 - RNA, 19 nt, Artificial Sequence
  Description of Artificial Sequence: Synthetic oligonucleotide
ggauugcauuuuccgcaug

SEQ ID NO: 2035361 - RNA, 19 nt, Artificial Sequence
  Description of Artificial Sequence: Synthetic oligonucleotide
aggauguuucagacacacu

SEQ ID NO: 2035362 - RNA, 19 nt, Artificial Sequence
  Description of Artificial Sequence: Synthetic oligonucleotide
uucugacggauugcauuuu

SEQ ID NO: 2035363 - RNA, 19 nt, Artificial Sequence
  Description of Artificial Sequence: Synthetic oligonucleotide
uugcaccaacagacccugu

SEQ ID NO: 2035364 - RNA, 19 nt, Artificial Sequence
  Description of Artificial Sequence: Synthetic oligonucleotide
gccacagcaucaacccuag

SEQ ID NO: 2035365 - RNA, 19 nt, Artificial Sequence
  Description of Artificial Sequence: Synthetic oligonucleotide
gcucuguagaagcaacacu

SEQ ID NO: 2035366 - RNA, 19 nt, Artificial Sequence
  Description of Artificial Sequence: Synthetic oligonucleotide
cccugucugacccugugga

SEQ ID NO: 2035367 - RNA, 19 nt, Artificial Sequence
  Description of Artificial Sequence: Synthetic oligonucleotide
cauuuuccgcauguauucu

SEQ ID NO: 2035368 - RNA, 19 nt, Artificial Sequence
  Description of Artificial Sequence: Synthetic oligonucleotide
caacccuagcacucauucu

SEQ ID NO: 2035369 - RNA, 19 nt, Artificial Sequence
  Description of Artificial Sequence: Synthetic oligonucleotide
agcuccauauugagaucaa

SEQ ID NO: 2035370 - RNA, 19 nt, Artificial Sequence
  Description of Artificial Sequence: Synthetic oligonucleotide
guacuacucauuguaucuu

SEQ ID NO: 2035371 - RNA, 19 nt, Artificial Sequence
  Description of Artificial Sequence: Synthetic oligonucleotide
cuacaccugccauggauuu

SEQ ID NO: 2035372 - RNA, 19 nt, Artificial Sequence
  Description of Artificial Sequence: Synthetic oligonucleotide
agcaagccucugugacagu

SEQ ID NO: 2035373 - RNA, 19 nt, Artificial Sequence
  Description of Artificial Sequence: Synthetic oligonucleotide
gcaucaacccuagcacuca

SEQ ID NO: 2035374 - RNA, 19 nt, Artificial Sequence
  Description of Artificial Sequence: Synthetic oligonucleotide
aucaacccuagcacucauu

SEQ ID NO: 2035375 - RNA, 19 nt, Artificial Sequence
  Description of Artificial Sequence: Synthetic oligonucleotide
auacaccuuuacacauaau

SEQ ID NO: 2035376 - RNA, 19 nt, Artificial Sequence
  Description of Artificial Sequence: Synthetic oligonucleotide
gguuguaguacuacucauu

SEQ ID NO: 2035377 - RNA, 19 nt, Artificial Sequence
  Description of Artificial Sequence: Synthetic oligonucleotide
ccauacaccuuuacacaua

SEQ ID NO: 2035378 - RNA, 19 nt, Artificial Sequence
  Description of Artificial Sequence: Synthetic oligonucleotide
gcagcauauccacuugguu

SEQ ID NO: 2035379 - RNA, 19 nt, Artificial Sequence
  Description of Artificial Sequence: Synthetic oligonucleotide
ugguguuguuaggguugua

SEQ ID NO: 2035380 - RNA, 19 nt, Artificial Sequence
  Description of Artificial Sequence: Synthetic oligonucleotide
cgagcaagccucugugaca

SEQ ID NO: 2035381 - RNA, 19 nt, Artificial Sequence
  Description of Artificial Sequence: Synthetic oligonucleotide
gccuuuauucugacaaaau

SEQ ID NO: 2035382 - RNA, 19 nt, Artificial Sequence
  Description of Artificial Sequence: Synthetic oligonucleotide
gcaagccucugugacaguu

SEQ ID NO: 2035383 - RNA, 19 nt, Artificial Sequence
  Description of Artificial Sequence: Synthetic oligonucleotide
cgcauguauucuugcaacu

SEQ ID NO: 2035384 - RNA, 19 nt, Artificial Sequence
  Description of Artificial Sequence: Synthetic oligonucleotide
cacuugguucugugguguu

SEQ ID NO: 2035385 - RNA, 19 nt, Artificial Sequence
  Description of Artificial Sequence: Synthetic oligonucleotide
cccuagcacucauucucaa

SEQ ID NO: 2035386 - RNA, 19 nt, Artificial Sequence
  Description of Artificial Sequence: Synthetic oligonucleotide
caccugccauggauuuugu

SEQ ID NO: 2035387 - RNA, 19 nt, Artificial Sequence
  Description of Artificial Sequence: Synthetic oligonucleotide
ccacuugguucuguggugu

SEQ ID NO: 2035388 - RNA, 19 nt, Artificial Sequence
  Description of Artificial Sequence: Synthetic oligonucleotide
gcccauuguuacugcaguu

SEQ ID NO: 2035389 - RNA, 19 nt, Artificial Sequence
  Description of Artificial Sequence: Synthetic oligonucleotide
cgacaugaucucacgaguu

SEQ ID NO: 2035390 - RNA, 19 nt, Artificial Sequence
  Description of Artificial Sequence: Synthetic oligonucleotide
gcauuccuauuaaguuccu

SEQ ID NO: 2035391 - RNA, 19 nt, Artificial Sequence
  Description of Artificial Sequence: Synthetic oligonucleotide
cggauugcauuuuccgcau

SEQ ID NO: 2035392 - RNA, 19 nt, Artificial Sequence
  Description of Artificial Sequence: Synthetic oligonucleotide
cgaagacgagcaagccucu

SEQ ID NO: 2035393 - RNA, 19 nt, Artificial Sequence
  Description of Artificial Sequence: Synthetic oligonucleotide
guaucauuaacagugaugg

SEQ ID NO: 2035394 - RNA, 19 nt, Artificial Sequence
  Description of Artificial Sequence: Synthetic oligonucleotide
uauaggagagagaaaaucc

SEQ ID NO: 2035395 - RNA, 19 nt, Artificial Sequence
  Description of Artificial Sequence: Synthetic oligonucleotide
uucauaggcaguacgaacg

SEQ ID NO: 2035396 - RNA, 19 nt, Artificial Sequence
  Description of Artificial Sequence: Synthetic oligonucleotide
aacgucuuccccuugcacc

SEQ ID NO: 2035397 - RNA, 19 nt, Artificial Sequence
  Description of Artificial Sequence: Synthetic oligonucleotide
gaaugcauuuuccugaggg

SEQ ID NO: 2035398 - RNA, 19 nt, Artificial Sequence
  Description of Artificial Sequence: Synthetic oligonucleotide
uguagagucgucuuuauca

SEQ ID NO: 2035399 - RNA, 19 nt, Artificial Sequence
  Description of Artificial Sequence: Synthetic oligonucleotide
uuuggugugaagcuucucg

SEQ ID NO: 2035400 - RNA, 19 nt, Artificial Sequence
  Description of Artificial Sequence: Synthetic oligonucleotide
ugcuccaggaaucuuaacg

SEQ ID NO: 2035401 - RNA, 19 nt, Artificial Sequence
  Description of Artificial Sequence: Synthetic oligonucleotide
auaagcagcucucuuauuc

SEQ ID NO: 2035402 - RNA, 19 nt, Artificial Sequence
  Description of Artificial Sequence: Synthetic oligonucleotide
ucuuuaucauuucucgggg

SEQ ID NO: 2035403 - RNA, 19 nt, Artificial Sequence
  Description of Artificial Sequence: Synthetic oligonucleotide
aacagugaugguuggaaag

SEQ ID NO: 2035404 - RNA, 19 nt, Artificial Sequence
  Description of Artificial Sequence: Synthetic oligonucleotide
uuuccuucccgaaugaagc

SEQ ID NO: 2035405 - RNA, 19 nt, Artificial Sequence
  Description of Artificial Sequence: Synthetic oligonucleotide
uacauuuucucagugauga

SEQ ID NO: 2035406 - RNA, 19 nt, Artificial Sequence
  Description of Artificial Sequence: Synthetic oligonucleotide
agcuucugaaaauugccgc

SEQ ID NO: 2035407 - RNA, 19 nt, Artificial Sequence
  Description of Artificial Sequence: Synthetic oligonucleotide
uuuguguauaugaagugcu

SEQ ID NO: 2035408 - RNA, 19 nt, Artificial Sequence
  Description of Artificial Sequence: Synthetic oligonucleotide
ucgucuuuaucauuucucg

SEQ ID NO: 2035409 - RNA, 19 nt, Artificial Sequence
  Description of Artificial Sequence: Synthetic oligonucleotide
uauaugaagugcuggagca

SEQ ID NO: 2035410 - RNA, 19 nt, Artificial Sequence
  Description of Artificial Sequence: Synthetic oligonucleotide
auauaguuuucuuccaguc

SEQ ID NO: 2035411 - RNA, 19 nt, Artificial Sequence
  Description of Artificial Sequence: Synthetic oligonucleotide
uuuggguaggguauaagca

SEQ ID NO: 2035412 - RNA, 19 nt, Artificial Sequence
  Description of Artificial Sequence: Synthetic oligonucleotide
gaaaauugccgccaggcug

SEQ ID NO: 2035413 - RNA, 19 nt, Artificial Sequence
  Description of Artificial Sequence: Synthetic oligonucleotide
uugaccuuaccacagguca

SEQ ID NO: 2035414 - RNA, 19 nt, Artificial Sequence
  Description of Artificial Sequence: Synthetic oligonucleotide
cuuggagugagcaaauccc

SEQ ID NO: 2035415 - RNA, 19 nt, Artificial Sequence
  Description of Artificial Sequence: Synthetic oligonucleotide
uguacauuuucucagugau

SEQ ID NO: 2035416 - RNA, 19 nt, Artificial Sequence
  Description of Artificial Sequence: Synthetic oligonucleotide
aggacagaugacuuggugg

SEQ ID NO: 2035417 - RNA, 19 nt, Artificial Sequence
  Description of Artificial Sequence: Synthetic oligonucleotide
aaaauugccgccaggcugg

SEQ ID NO: 2035418 - RNA, 19 nt, Artificial Sequence
  Description of Artificial Sequence: Synthetic oligonucleotide
caccauauaguuuucuucc

SEQ ID NO: 2035419 - RNA, 19 nt, Artificial Sequence
  Description of Artificial Sequence: Synthetic oligonucleotide
gagagagagagagagagag

SEQ ID NO: 2035420 - RNA, 19 nt, Artificial Sequence
  Description of Artificial Sequence: Synthetic oligonucleotide
gaacaaaaucccuuugacc

SEQ ID NO: 2035421 - RNA, 19 nt, Artificial Sequence
  Description of Artificial Sequence: Synthetic oligonucleotide
uugaacaaaaucccuuuga

SEQ ID NO: 2035422 - RNA, 19 nt, Artificial Sequence
  Description of Artificial Sequence: Synthetic oligonucleotide
agagaaaauccgcaguguc

SEQ ID NO: 2035423 - RNA, 19 nt, Artificial Sequence
  Description of Artificial Sequence: Synthetic oligonucleotide
auuuucucagugaugaagg

SEQ ID NO: 2035424 - RNA, 19 nt, Artificial Sequence
  Description of Artificial Sequence: Synthetic oligonucleotide
cacacacacacacagagag

SEQ ID NO: 2035425 - RNA, 19 nt, Artificial Sequence
  Description of Artificial Sequence: Synthetic oligonucleotide
cuuuggguaggguauaagc

SEQ ID NO: 2035426 - RNA, 19 nt, Artificial Sequence
  Description of Artificial Sequence: Synthetic oligonucleotide
cauuggacuucccugaggg

SEQ ID NO: 2035427 - RNA, 19 nt, Artificial Sequence
  Description of Artificial Sequence: Synthetic oligonucleotide
uuccccuugcaccauauag

SEQ ID NO: 2035428 - RNA, 19 nt, Artificial Sequence
  Description of Artificial Sequence: Synthetic oligonucleotide
ucaucauuggacuucccug

SEQ ID NO: 2035429 - RNA, 19 nt, Artificial Sequence
  Description of Artificial Sequence: Synthetic oligonucleotide
ugaugaaggaguugucccg

SEQ ID NO: 2035430 - RNA, 19 nt, Artificial Sequence
  Description of Artificial Sequence: Synthetic oligonucleotide
uauaguuuucuuccagucu

SEQ ID NO: 2035431 - RNA, 19 nt, Artificial Sequence
  Description of Artificial Sequence: Synthetic oligonucleotide
ucucuucauaggcaguacg

SEQ ID NO: 2035432 - RNA, 19 nt, Artificial Sequence
  Description of Artificial Sequence: Synthetic oligonucleotide
gaaaguccgcuccagacug

SEQ ID NO: 2035433 - RNA, 19 nt, Artificial Sequence
  Description of Artificial Sequence: Synthetic oligonucleotide
uccagcuuuguguauauga

SEQ ID NO: 2035434 - RNA, 19 nt, Artificial Sequence
  Description of Artificial Sequence: Synthetic oligonucleotide
agggaccagauuuugacag

SEQ ID NO: 2035435 - RNA, 19 nt, Artificial Sequence
  Description of Artificial Sequence: Synthetic oligonucleotide
cacacagagagagagagag

SEQ ID NO: 2035436 - RNA, 19 nt, Artificial Sequence
  Description of Artificial Sequence: Synthetic oligonucleotide
gagagagagagagagagac

SEQ ID NO: 2035437 - RNA, 19 nt, Artificial Sequence
  Description of Artificial Sequence: Synthetic oligonucleotide
aaaauccgcagugucauca

SEQ ID NO: 2035438 - RNA, 19 nt, Artificial Sequence
  Description of Artificial Sequence: Synthetic oligonucleotide
gaaggaguugucccggagg

SEQ ID NO: 2035439 - RNA, 19 nt, Artificial Sequence
  Description of Artificial Sequence: Synthetic oligonucleotide
uauucucguagguugaccu

SEQ ID NO: 2035440 - RNA, 19 nt, Artificial Sequence
  Description of Artificial Sequence: Synthetic oligonucleotide
cacacacacacacacagag

SEQ ID NO: 2035441 - RNA, 19 nt, Artificial Sequence
  Description of Artificial Sequence: Synthetic oligonucleotide
auaggagagagaaaauccg

SEQ ID NO: 2035442 - RNA, 19 nt, Artificial Sequence
  Description of Artificial Sequence: Synthetic oligonucleotide
cacagagagagagagagag

SEQ ID NO: 2035443 - RNA, 19 nt, Artificial Sequence
  Description of Artificial Sequence: Synthetic oligonucleotide
acagugagcauccuugaug

SEQ ID NO: 2035444 - RNA, 19 nt, Artificial Sequence
  Description of Artificial Sequence: Synthetic oligonucleotide
cacacacacacacacacag

SEQ ID NO: 2035445 - RNA, 19 nt, Artificial Sequence
  Description of Artificial Sequence: Synthetic oligonucleotide
ugcauuuuccugagggucc

SEQ ID NO: 2035446 - RNA, 19 nt, Artificial Sequence
  Description of Artificial Sequence: Synthetic oligonucleotide
uugugcaccacuuuggaua

SEQ ID NO: 2035447 - RNA, 19 nt, Artificial Sequence
  Description of Artificial Sequence: Synthetic oligonucleotide
cugaacaguaucauuaaca

SEQ ID NO: 2035448 - RNA, 19 nt, Artificial Sequence
  Description of Artificial Sequence: Synthetic oligonucleotide
cagagagagagagagagag

SEQ ID NO: 2035449 - RNA, 19 nt, Artificial Sequence
  Description of Artificial Sequence: Synthetic oligonucleotide
agacucuuggugcagagga

SEQ ID NO: 2035450 - RNA, 19 nt, Artificial Sequence
  Description of Artificial Sequence: Synthetic oligonucleotide
gauggcguaggcaaugucc

SEQ ID NO: 2035451 - RNA, 19 nt, Artificial Sequence
  Description of Artificial Sequence: Synthetic oligonucleotide
ucugaaaauugccgccagg

SEQ ID NO: 2035452 - RNA, 19 nt, Artificial Sequence
  Description of Artificial Sequence: Synthetic oligonucleotide
uuggagugagcaaaucccc

SEQ ID NO: 2035453 - RNA, 19 nt, Artificial Sequence
  Description of Artificial Sequence: Synthetic oligonucleotide
aaaucccuuugaccuuacc

SEQ ID NO: 2035454 - RNA, 19 nt, Artificial Sequence
  Description of Artificial Sequence: Synthetic oligonucleotide
aggagugcccuucugcugg

SEQ ID NO: 2035455 - RNA, 19 nt, Artificial Sequence
  Description of Artificial Sequence: Synthetic oligonucleotide
cacacacacacagagagag

SEQ ID NO: 2035456 - RNA, 19 nt, Artificial Sequence
  Description of Artificial Sequence: Synthetic oligonucleotide
ugugcaccacuuuggauag

SEQ ID NO: 2035457 - RNA, 19 nt, Artificial Sequence
  Description of Artificial Sequence: Synthetic oligonucleotide
ucgaagaaggggaauggcu

SEQ ID NO: 2035458 - RNA, 19 nt, Artificial Sequence
  Description of Artificial Sequence: Synthetic oligonucleotide
agagagagacgucaggacu

SEQ ID NO: 2035459 - RNA, 19 nt, Artificial Sequence
  Description of Artificial Sequence: Synthetic oligonucleotide
cacacacacacacacacac

SEQ ID NO: 2035460 - RNA, 19 nt, Artificial Sequence
  Description of Artificial Sequence: Synthetic oligonucleotide
acgucaggacuucaucugc

SEQ ID NO: 2035461 - RNA, 19 nt, Artificial Sequence
  Description of Artificial Sequence: Synthetic oligonucleotide
cacaggaaguauaggagag

SEQ ID NO: 2035462 - RNA, 19 nt, Artificial Sequence
  Description of Artificial Sequence: Synthetic oligonucleotide
aggugcagagcaaaagucc

SEQ ID NO: 2035463 - RNA, 19 nt, Artificial Sequence
  Description of Artificial Sequence: Synthetic oligonucleotide
uucucguagguugaccugg

SEQ ID NO: 2035464 - RNA, 19 nt, Artificial Sequence
  Description of Artificial Sequence: Synthetic oligonucleotide
ucccgaaugaagccagggg

SEQ ID NO: 2035465 - RNA, 19 nt, Artificial Sequence
  Description of Artificial Sequence: Synthetic oligonucleotide
cugaaaauugccgccaggc

SEQ ID NO: 2035466 - RNA, 19 nt, Artificial Sequence
  Description of Artificial Sequence: Synthetic oligonucleotide
aucauuaacagugaugguu

SEQ ID NO: 2035467 - RNA, 19 nt, Artificial Sequence
  Description of Artificial Sequence: Synthetic oligonucleotide
ugaaaauugccgccaggcu

SEQ ID NO: 2035468 - RNA, 19 nt, Artificial Sequence
  Description of Artificial Sequence: Synthetic oligonucleotide
aauucccuuggagugagca

SEQ ID NO: 2035469 - RNA, 19 nt, Artificial Sequence
  Description of Artificial Sequence: Synthetic oligonucleotide
uaugaagugcuggagcagc

SEQ ID NO: 2035470 - RNA, 19 nt, Artificial Sequence
  Description of Artificial Sequence: Synthetic oligonucleotide
aguaucauuaacagugaug

SEQ ID NO: 2035471 - RNA, 19 nt, Artificial Sequence
  Description of Artificial Sequence: Synthetic oligonucleotide
ucguagguugaccuggcug

SEQ ID NO: 2035472 - RNA, 19 nt, Artificial Sequence
  Description of Artificial Sequence: Synthetic oligonucleotide
uuguguauaugaagugcug

SEQ ID NO: 2035473 - RNA, 19 nt, Artificial Sequence
  Description of Artificial Sequence: Synthetic oligonucleotide
uuguacauuuucucaguga

SEQ ID NO: 2035474 - RNA, 19 nt, Artificial Sequence
  Description of Artificial Sequence: Synthetic oligonucleotide
ugguuggaaaguccgcucc

SEQ ID NO: 2035475 - RNA, 19 nt, Artificial Sequence
  Description of Artificial Sequence: Synthetic oligonucleotide
ugagcaaauccccugccuc

SEQ ID NO: 2035476 - RNA, 19 nt, Artificial Sequence
  Description of Artificial Sequence: Synthetic oligonucleotide
cuucauaggcaguacgaac

SEQ ID NO: 2035477 - RNA, 19 nt, Artificial Sequence
  Description of Artificial Sequence: Synthetic oligonucleotide
cacacacagagagagagag

SEQ ID NO: 2035478 - RNA, 19 nt, Artificial Sequence
  Description of Artificial Sequence: Synthetic oligonucleotide
augcauuuuccugaggguc

SEQ ID NO: 2035479 - RNA, 19 nt, Artificial Sequence
  Description of Artificial Sequence: Synthetic oligonucleotide
gcaaaaguccuucugcucc

SEQ ID NO: 2035480 - RNA, 19 nt, Artificial Sequence
  Description of Artificial Sequence: Synthetic oligonucleotide
cagugauuuggugugaagc

SEQ ID NO: 2035481 - RNA, 19 nt, Artificial Sequence
  Description of Artificial Sequence: Synthetic oligonucleotide
uggugugaagcuucucggg

SEQ ID NO: 2035482 - RNA, 19 nt, Artificial Sequence
  Description of Artificial Sequence: Synthetic oligonucleotide
ugagguugcuguuggaggu

SEQ ID NO: 2035483 - RNA, 19 nt, Artificial Sequence
  Description of Artificial Sequence: Synthetic oligonucleotide
uaggcaauguccagcuuug

SEQ ID NO: 2035484 - RNA, 19 nt, Artificial Sequence
  Description of Artificial Sequence: Synthetic oligonucleotide
cuuaacgucuuccccuugc

SEQ ID NO: 2035485 - RNA, 19 nt, Artificial Sequence
  Description of Artificial Sequence: Synthetic oligonucleotide
uggaaaguccgcuccagac

SEQ ID NO: 2035486 - RNA, 19 nt, Artificial Sequence
  Description of Artificial Sequence: Synthetic oligonucleotide
gagagagagagacgucagg

SEQ ID NO: 2035487 - RNA, 19 nt, Artificial Sequence
  Description of Artificial Sequence: Synthetic oligonucleotide
uccgcagugucaucauugg

SEQ ID NO: 2035488 - RNA, 19 nt, Artificial Sequence
  Description of Artificial Sequence: Synthetic oligonucleotide
uuuggauagagggaccaga

SEQ ID NO: 2035489 - RNA, 19 nt, Artificial Sequence
  Description of Artificial Sequence: Synthetic oligonucleotide
gucacaggaaguauaggag

SEQ ID NO: 2035490 - RNA, 19 nt, Artificial Sequence
  Description of Artificial Sequence: Synthetic oligonucleotide
ggugagaacauugugcacc

SEQ ID NO: 2035491 - RNA, 19 nt, Artificial Sequence
  Description of Artificial Sequence: Synthetic oligonucleotide
guauaggagagagaaaauc

SEQ ID NO: 2035492 - RNA, 19 nt, Artificial Sequence
  Description of Artificial Sequence: Synthetic oligonucleotide
gacgucaggacuucaucug

SEQ ID NO: 2035493 - RNA, 19 nt, Artificial Sequence
  Description of Artificial Sequence: Synthetic oligonucleotide
agacgucaggacuucaucu

SEQ ID NO: 2035494 - RNA, 19 nt, Artificial Sequence
  Description of Artificial Sequence: Synthetic oligonucleotide
uaggguauaagcagcucuc

SEQ ID NO: 2035495 - RNA, 19 nt, Artificial Sequence
  Description of Artificial Sequence: Synthetic oligonucleotide
caggaaguauaggagagag

SEQ ID NO: 2035496 - RNA, 19 nt, Artificial Sequence
  Description of Artificial Sequence: Synthetic oligonucleotide
uuugaagcuucugaaaauu

SEQ ID NO: 2035497 - RNA, 19 nt, Artificial Sequence
  Description of Artificial Sequence: Synthetic oligonucleotide
ugcaccacuuuggauagag

SEQ ID NO: 2035498 - RNA, 19 nt, Artificial Sequence
  Description of Artificial Sequence: Synthetic oligonucleotide
ugaaugcauuuuccugagg

SEQ ID NO: 2035499 - RNA, 19 nt, Artificial Sequence
  Description of Artificial Sequence: Synthetic oligonucleotide
uuugaccuuaccacagguc

SEQ ID NO: 2035500 - RNA, 19 nt, Artificial Sequence
  Description of Artificial Sequence: Synthetic oligonucleotide
uccccuugcaccauauagu

SEQ ID NO: 2035501 - RNA, 19 nt, Artificial Sequence
  Description of Artificial Sequence: Synthetic oligonucleotide
uggaagacucugcaguggu

SEQ ID NO: 2035502 - RNA, 19 nt, Artificial Sequence
  Description of Artificial Sequence: Synthetic oligonucleotide
ucauaggcaguacgaacgu

SEQ ID NO: 2035503 - RNA, 19 nt, Artificial Sequence
  Description of Artificial Sequence: Synthetic oligonucleotide
cuggugagaacauugugca

SEQ ID NO: 2035504 - RNA, 19 nt, Artificial Sequence
  Description of Artificial Sequence: Synthetic oligonucleotide
caggucacaggaaguauag

SEQ ID NO: 2035505 - RNA, 19 nt, Artificial Sequence
  Description of Artificial Sequence: Synthetic oligonucleotide
ugaugguuggaaaguccgc

SEQ ID NO: 2035506 - RNA, 19 nt, Artificial Sequence
  Description of Artificial Sequence: Synthetic oligonucleotide
uuaacgucuuccccuugca

SEQ ID NO: 2035507 - RNA, 19 nt, Artificial Sequence
  Description of Artificial Sequence: Synthetic oligonucleotide
cagauuuugacaggcuugc

SEQ ID NO: 2035508 - RNA, 19 nt, Artificial Sequence
  Description of Artificial Sequence: Synthetic oligonucleotide
gagugagcaaauccccugc

SEQ ID NO: 2035509 - RNA, 19 nt, Artificial Sequence
  Description of Artificial Sequence: Synthetic oligonucleotide
cuucucggggcucacagac

SEQ ID NO: 2035510 - RNA, 19 nt, Artificial Sequence
  Description of Artificial Sequence: Synthetic oligonucleotide
ugugaagcuucucggggcu

SEQ ID NO: 2035511 - RNA, 19 nt, Artificial Sequence
  Description of Artificial Sequence: Synthetic oligonucleotide
ggugugaagcuucucgggg

SEQ ID NO: 2035512 - RNA, 19 nt, Artificial Sequence
  Description of Artificial Sequence: Synthetic oligonucleotide
uugcagagauuccuuguac

SEQ ID NO: 2035513 - RNA, 19 nt, Artificial Sequence
  Description of Artificial Sequence: Synthetic oligonucleotide
agaaaauccgcagugucau

SEQ ID NO: 2035514 - RNA, 19 nt, Artificial Sequence
  Description of Artificial Sequence: Synthetic oligonucleotide
gaucucagugauuuggugu

SEQ ID NO: 2035515 - RNA, 19 nt, Artificial Sequence
  Description of Artificial Sequence: Synthetic oligonucleotide
agguugaccuggcugaaca

SEQ ID NO: 2035516 - RNA, 19 nt, Artificial Sequence
  Description of Artificial Sequence: Synthetic oligonucleotide
ucagugauuuggugugaag

SEQ ID NO: 2035517 - RNA, 19 nt, Artificial Sequence
  Description of Artificial Sequence: Synthetic oligonucleotide
ggucacaggaaguauagga

SEQ ID NO: 2035518 - RNA, 19 nt, Artificial Sequence
  Description of Artificial Sequence: Synthetic oligonucleotide
agaguccggaaggagugcc

SEQ ID NO: 2035519 - RNA, 19 nt, Artificial Sequence
  Description of Artificial Sequence: Synthetic oligonucleotide
gagagagagagagacguca

SEQ ID NO: 2035520 - RNA, 19 nt, Artificial Sequence
  Description of Artificial Sequence: Synthetic oligonucleotide
gggguauucucguagguug

SEQ ID NO: 2035521 - RNA, 19 nt, Artificial Sequence
  Description of Artificial Sequence: Synthetic oligonucleotide
acggcugugugagaagggc

SEQ ID NO: 2035522 - RNA, 19 nt, Artificial Sequence
  Description of Artificial Sequence: Synthetic oligonucleotide
ucccuuugaccuuaccaca

SEQ ID NO: 2035523 - RNA, 19 nt, Artificial Sequence
  Description of Artificial Sequence: Synthetic oligonucleotide
uauucucuucauaggcagu

SEQ ID NO: 2035524 - RNA, 19 nt, Artificial Sequence
  Description of Artificial Sequence: Synthetic oligonucleotide
uuuccugaggguccuugcu

SEQ ID NO: 2035525 - RNA, 19 nt, Artificial Sequence
  Description of Artificial Sequence: Synthetic oligonucleotide
uucaaggcguuggucacag

SEQ ID NO: 2035526 - RNA, 19 nt, Artificial Sequence
  Description of Artificial Sequence: Synthetic oligonucleotide
uggagugagcaaauccccu

SEQ ID NO: 2035527 - RNA, 19 nt, Artificial Sequence
  Description of Artificial Sequence: Synthetic oligonucleotide
accauauaguuuucuucca

SEQ ID NO: 2035528 - RNA, 19 nt, Artificial Sequence
  Description of Artificial Sequence: Synthetic oligonucleotide
gagagagagagagagacgu

SEQ ID NO: 2035529 - RNA, 19 nt, Artificial Sequence
  Description of Artificial Sequence: Synthetic oligonucleotide
uugguggagaugguucggg

SEQ ID NO: 2035530 - RNA, 19 nt, Artificial Sequence
  Description of Artificial Sequence: Synthetic oligonucleotide
gagaaaauccgcaguguca

SEQ ID NO: 2035531 - RNA, 19 nt, Artificial Sequence
  Description of Artificial Sequence: Synthetic oligonucleotide
aucauuggacuucccugag

SEQ ID NO: 2035532 - RNA, 19 nt, Artificial Sequence
  Description of Artificial Sequence: Synthetic oligonucleotide
uucccgaaugaagccaggg

SEQ ID NO: 2035533 - RNA, 19 nt, Artificial Sequence
  Description of Artificial Sequence: Synthetic oligonucleotide
ucgguuggggcuuugggua

SEQ ID NO: 2035534 - RNA, 19 nt, Artificial Sequence
  Description of Artificial Sequence: Synthetic oligonucleotide
caucauuggacuucccuga

SEQ ID NO: 2035535 - RNA, 19 nt, Artificial Sequence
  Description of Artificial Sequence: Synthetic oligonucleotide
ugaccuuaccacaggucac

SEQ ID NO: 2035536 - RNA, 19 nt, Artificial Sequence
  Description of Artificial Sequence: Synthetic oligonucleotide
uuccuucccgaaugaagcc

SEQ ID NO: 2035537 - RNA, 19 nt, Artificial Sequence
  Description of Artificial Sequence: Synthetic oligonucleotide
uuuugaccuggccuuuccu

SEQ ID NO: 2035538 - RNA, 19 nt, Artificial Sequence
  Description of Artificial Sequence: Synthetic oligonucleotide
ucacacacacacacacaca

SEQ ID NO: 2035539 - RNA, 19 nt, Artificial Sequence
  Description of Artificial Sequence: Synthetic oligonucleotide
agucgucuuuaucauuucu

SEQ ID NO: 2035540 - RNA, 19 nt, Artificial Sequence
  Description of Artificial Sequence: Synthetic oligonucleotide
accagauuuugacaggcuu

SEQ ID NO: 2035541 - RNA, 19 nt, Artificial Sequence
  Description of Artificial Sequence: Synthetic oligonucleotide
ucccggagggcuucgaaga

SEQ ID NO: 2035542 - RNA, 19 nt, Artificial Sequence
  Description of Artificial Sequence: Synthetic oligonucleotide
uuggaaaguccgcuccaga

SEQ ID NO: 2035543 - RNA, 19 nt, Artificial Sequence
  Description of Artificial Sequence: Synthetic oligonucleotide
uagagggaccagauuuuga

SEQ ID NO: 2035544 - RNA, 19 nt, Artificial Sequence
  Description of Artificial Sequence: Synthetic oligonucleotide
cuuuugaccuggccuuucc

SEQ ID NO: 2035545 - RNA, 19 nt, Artificial Sequence
  Description of Artificial Sequence: Synthetic oligonucleotide
gugugaagcuucucggggc

SEQ ID NO: 2035546 - RNA, 19 nt, Artificial Sequence
  Description of Artificial Sequence: Synthetic oligonucleotide
cucuucauaggcaguacga

SEQ ID NO: 2035547 - RNA, 19 nt, Artificial Sequence
  Description of Artificial Sequence: Synthetic oligonucleotide
auucucguagguugaccug

SEQ ID NO: 2035548 - RNA, 19 nt, Artificial Sequence
  Description of Artificial Sequence: Synthetic oligonucleotide
aaauccgcagugucaucau

SEQ ID NO: 2035549 - RNA, 19 nt, Artificial Sequence
  Description of Artificial Sequence: Synthetic oligonucleotide
ugcaccauauaguuuucuu

SEQ ID NO: 2035550 - RNA, 19 nt, Artificial Sequence
  Description of Artificial Sequence: Synthetic oligonucleotide
ggucuuuccuucccgaaug

SEQ ID NO: 2035551 - RNA, 19 nt, Artificial Sequence
  Description of Artificial Sequence: Synthetic oligonucleotide
agguugcuguuggaggugc

SEQ ID NO: 2035552 - RNA, 19 nt, Artificial Sequence
  Description of Artificial Sequence: Synthetic oligonucleotide
ugcaguggucuuuccuucc

SEQ ID NO: 2035553 - RNA, 19 nt, Artificial Sequence
  Description of Artificial Sequence: Synthetic oligonucleotide
gcucacagacucuuggugc

SEQ ID NO: 2035554 - RNA, 19 nt, Artificial Sequence
  Description of Artificial Sequence: Synthetic oligonucleotide
gagacgucaggacuucauc

SEQ ID NO: 2035555 - RNA, 19 nt, Artificial Sequence
  Description of Artificial Sequence: Synthetic oligonucleotide
uaacgucuuccccuugcac

SEQ ID NO: 2035556 - RNA, 19 nt, Artificial Sequence
  Description of Artificial Sequence: Synthetic oligonucleotide
auaugaagugcuggagcag

SEQ ID NO: 2035557 - RNA, 19 nt, Artificial Sequence
  Description of Artificial Sequence: Synthetic oligonucleotide
aaggcguuggucacaguga

SEQ ID NO: 2035558 - RNA, 19 nt, Artificial Sequence
  Description of Artificial Sequence: Synthetic oligonucleotide
ggaaggagugcccuucugc

SEQ ID NO: 2035559 - RNA, 19 nt, Artificial Sequence
  Description of Artificial Sequence: Synthetic oligonucleotide
agagucgucuuuaucauuu

SEQ ID NO: 2035560 - RNA, 19 nt, Artificial Sequence
  Description of Artificial Sequence: Synthetic oligonucleotide
acuuuggauagagggacca

SEQ ID NO: 2035561 - RNA, 19 nt, Artificial Sequence
  Description of Artificial Sequence: Synthetic oligonucleotide
auagagggaccagauuuug

SEQ ID NO: 2035562 - RNA, 19 nt, Artificial Sequence
  Description of Artificial Sequence: Synthetic oligonucleotide
agagagagagagagagacg

SEQ ID NO: 2035563 - RNA, 19 nt, Artificial Sequence
  Description of Artificial Sequence: Synthetic oligonucleotide
gcuuuguguauaugaagug

SEQ ID NO: 2035564 - RNA, 19 nt, Artificial Sequence
  Description of Artificial Sequence: Synthetic oligonucleotide
aggagagagaaaauccgca

SEQ ID NO: 2035565 - RNA, 19 nt, Artificial Sequence
  Description of Artificial Sequence: Synthetic oligonucleotide
ucucguagguugaccuggc

SEQ ID NO: 2035566 - RNA, 19 nt, Artificial Sequence
  Description of Artificial Sequence: Synthetic oligonucleotide
ccuuggagugagcaaaucc

SEQ ID NO: 2035567 - RNA, 19 nt, Artificial Sequence
  Description of Artificial Sequence: Synthetic oligonucleotide
gagagagaaaauccgcagu

SEQ ID NO: 2035568 - RNA, 19 nt, Artificial Sequence
  Description of Artificial Sequence: Synthetic oligonucleotide
guaggguauaagcagcucu

SEQ ID NO: 2035569 - RNA, 19 nt, Artificial Sequence
  Description of Artificial Sequence: Synthetic oligonucleotide
gagggaccagauuuugaca

SEQ ID NO: 2035570 - RNA, 19 nt, Artificial Sequence
  Description of Artificial Sequence: Synthetic oligonucleotide
acagaugacuugguggaga

SEQ ID NO: 2035571 - RNA, 19 nt, Artificial Sequence
  Description of Artificial Sequence: Synthetic oligonucleotide
acaaaaucccuuugaccuu

SEQ ID NO: 2035572 - RNA, 19 nt, Artificial Sequence
  Description of Artificial Sequence: Synthetic oligonucleotide
ucucagugaugaaggaguu

SEQ ID NO: 2035573 - RNA, 19 nt, Artificial Sequence
  Description of Artificial Sequence: Synthetic oligonucleotide
auuaacagugaugguugga

SEQ ID NO: 2035574 - RNA, 19 nt, Artificial Sequence
  Description of Artificial Sequence: Synthetic oligonucleotide
uccgcuccagacuggugag

SEQ ID NO: 2035575 - RNA, 19 nt, Artificial Sequence
  Description of Artificial Sequence: Synthetic oligonucleotide
cacuuuggauagagggacc

SEQ ID NO: 2035576 - RNA, 19 nt, Artificial Sequence
  Description of Artificial Sequence: Synthetic oligonucleotide
auuuuccugaggguccuug

SEQ ID NO: 2035577 - RNA, 19 nt, Artificial Sequence
  Description of Artificial Sequence: Synthetic oligonucleotide
cucgucacccuuuucuuga

SEQ ID NO: 2035578 - RNA, 19 nt, Artificial Sequence
  Description of Artificial Sequence: Synthetic oligonucleotide
gguauaagcagcucucuua

SEQ ID NO: 2035579 - RNA, 19 nt, Artificial Sequence
  Description of Artificial Sequence: Synthetic oligonucleotide
ucuuaacgucuuccccuug

SEQ ID NO: 2035580 - RNA, 19 nt, Artificial Sequence
  Description of Artificial Sequence: Synthetic oligonucleotide
uggggcuuuggguagggua

SEQ ID NO: 2035581 - RNA, 19 nt, Artificial Sequence
  Description of Artificial Sequence: Synthetic oligonucleotide
agagagagagagacgucag

SEQ ID NO: 2035582 - RNA, 19 nt, Artificial Sequence
  Description of Artificial Sequence: Synthetic oligonucleotide
cuggaagacucugcagugg

SEQ ID NO: 2035583 - RNA, 19 nt, Artificial Sequence
  Description of Artificial Sequence: Synthetic oligonucleotide
cauauaguuuucuuccagu

SEQ ID NO: 2035584 - RNA, 19 nt, Artificial Sequence
  Description of Artificial Sequence: Synthetic oligonucleotide
ugccucauucugaaugcau

SEQ ID NO: 2035585 - RNA, 19 nt, Artificial Sequence
  Description of Artificial Sequence: Synthetic oligonucleotide
uguugauggcguaggcaau

SEQ ID NO: 2035586 - RNA, 19 nt, Artificial Sequence
  Description of Artificial Sequence: Synthetic oligonucleotide
agagagacgucaggacuuc

SEQ ID NO: 2035587 - RNA, 19 nt, Artificial Sequence
  Description of Artificial Sequence: Synthetic oligonucleotide
uccuucccgaaugaagcca

SEQ ID NO: 2035588 - RNA, 19 nt, Artificial Sequence
  Description of Artificial Sequence: Synthetic oligonucleotide
ugaagcuucucggggcuca

SEQ ID NO: 2035589 - RNA, 19 nt, Artificial Sequence
  Description of Artificial Sequence: Synthetic oligonucleotide
accacuuuggauagaggga

SEQ ID NO: 2035590 - RNA, 19 nt, Artificial Sequence
  Description of Artificial Sequence: Synthetic oligonucleotide
auccgcagugucaucauug

SEQ ID NO: 2035591 - RNA, 19 nt, Artificial Sequence
  Description of Artificial Sequence: Synthetic oligonucleotide
uaggcaguacgaacguuuu

SEQ ID NO: 2035592 - RNA, 19 nt, Artificial Sequence
  Description of Artificial Sequence: Synthetic oligonucleotide
aaauucccuuggagugagc

SEQ ID NO: 2035593 - RNA, 19 nt, Artificial Sequence
  Description of Artificial Sequence: Synthetic oligonucleotide
auaggcaguacgaacguuu

SEQ ID NO: 2035594 - RNA, 19 nt, Artificial Sequence
  Description of Artificial Sequence: Synthetic oligonucleotide
guauaagcagcucucuuau

SEQ ID NO: 2035595 - RNA, 19 nt, Artificial Sequence
  Description of Artificial Sequence: Synthetic oligonucleotide
ggggcucacagacucuugg

SEQ ID NO: 2035596 - RNA, 19 nt, Artificial Sequence
  Description of Artificial Sequence: Synthetic oligonucleotide
gaccuggcugaacaguauc

SEQ ID NO: 2035597 - RNA, 19 nt, Artificial Sequence
  Description of Artificial Sequence: Synthetic oligonucleotide
guauucucguagguugacc

SEQ ID NO: 2035598 - RNA, 19 nt, Artificial Sequence
  Description of Artificial Sequence: Synthetic oligonucleotide
guacauuuucucagugaug

SEQ ID NO: 2035599 - RNA, 19 nt, Artificial Sequence
  Description of Artificial Sequence: Synthetic oligonucleotide
gcaccauauaguuuucuuc

SEQ ID NO: 2035600 - RNA, 19 nt, Artificial Sequence
  Description of Artificial Sequence: Synthetic oligonucleotide
guccgcuccagacugguga

SEQ ID NO: 2035601 - RNA, 19 nt, Artificial Sequence
  Description of Artificial Sequence: Synthetic oligonucleotide
ccauauaguuuucuuccag

SEQ ID NO: 2035602 - RNA, 19 nt, Artificial Sequence
  Description of Artificial Sequence: Synthetic oligonucleotide
augaagugcuggagcagcg

SEQ ID NO: 2035603 - RNA, 19 nt, Artificial Sequence
  Description of Artificial Sequence: Synthetic oligonucleotide
aaaguccgcuccagacugg

SEQ ID NO: 2035604 - RNA, 19 nt, Artificial Sequence
  Description of Artificial Sequence: Synthetic oligonucleotide
ggauagagggaccagauuu

SEQ ID NO: 2035605 - RNA, 19 nt, Artificial Sequence
  Description of Artificial Sequence: Synthetic oligonucleotide
cuugguggagaugguucgg

SEQ ID NO: 2035606 - RNA, 19 nt, Artificial Sequence
  Description of Artificial Sequence: Synthetic oligonucleotide
aauccgcagugucaucauu

SEQ ID NO: 2035607 - RNA, 19 nt, Artificial Sequence
  Description of Artificial Sequence: Synthetic oligonucleotide
uguuggaggugcagagcaa

SEQ ID NO: 2035608 - RNA, 19 nt, Artificial Sequence
  Description of Artificial Sequence: Synthetic oligonucleotide
uuggugcagaggacagaug

SEQ ID NO: 2035609 - RNA, 19 nt, Artificial Sequence
  Description of Artificial Sequence: Synthetic oligonucleotide
uggauagagggaccagauu

SEQ ID NO: 2035610 - RNA, 19 nt, Artificial Sequence
  Description of Artificial Sequence: Synthetic oligonucleotide
cauugugcaccacuuugga

SEQ ID NO: 2035611 - RNA, 19 nt, Artificial Sequence
  Description of Artificial Sequence: Synthetic oligonucleotide
ggaggcacggcugugugag

SEQ ID NO: 2035612 - RNA, 19 nt, Artificial Sequence
  Description of Artificial Sequence: Synthetic oligonucleotide
gccucuuucaaggcguugg

SEQ ID NO: 2035613 - RNA, 19 nt, Artificial Sequence
  Description of Artificial Sequence: Synthetic oligonucleotide
uggcuuguugauggcguag

SEQ ID NO: 2035614 - RNA, 19 nt, Artificial Sequence
  Description of Artificial Sequence: Synthetic oligonucleotide
gucccggagggcuucgaag

SEQ ID NO: 2035615 - RNA, 19 nt, Artificial Sequence
  Description of Artificial Sequence: Synthetic oligonucleotide
ucgucacccuuuucuugag

SEQ ID NO: 2035616 - RNA, 19 nt, Artificial Sequence
  Description of Artificial Sequence: Synthetic oligonucleotide
auuggacuucccugaggga

SEQ ID NO: 2035617 - RNA, 19 nt, Artificial Sequence
  Description of Artificial Sequence: Synthetic oligonucleotide
gcaauguccagcuuugugu

SEQ ID NO: 2035618 - RNA, 19 nt, Artificial Sequence
  Description of Artificial Sequence: Synthetic oligonucleotide
aagggcugggcugcucauc

SEQ ID NO: 2035619 - RNA, 19 nt, Artificial Sequence
  Description of Artificial Sequence: Synthetic oligonucleotide
aguauaggagagagaaaau

SEQ ID NO: 2035620 - RNA, 19 nt, Artificial Sequence
  Description of Artificial Sequence: Synthetic oligonucleotide
cuucccgaaugaagccagg

SEQ ID NO: 2035621 - RNA, 19 nt, Artificial Sequence
  Description of Artificial Sequence: Synthetic oligonucleotide
cacggcugugugagaaggg

SEQ ID NO: 2035622 - RNA, 19 nt, Artificial Sequence
  Description of Artificial Sequence: Synthetic oligonucleotide
agagagagagagagacguc

SEQ ID NO: 2035623 - RNA, 19 nt, Artificial Sequence
  Description of Artificial Sequence: Synthetic oligonucleotide
aggucacaggaaguauagg

SEQ ID NO: 2035624 - RNA, 19 nt, Artificial Sequence
  Description of Artificial Sequence: Synthetic oligonucleotide
ugguggagaugguucgggu

SEQ ID NO: 2035625 - RNA, 19 nt, Artificial Sequence
  Description of Artificial Sequence: Synthetic oligonucleotide
ggaccagauuuugacaggc

SEQ ID NO: 2035626 - RNA, 19 nt, Artificial Sequence
  Description of Artificial Sequence: Synthetic oligonucleotide
gcuucgaagaaggggaaug

SEQ ID NO: 2035627 - RNA, 19 nt, Artificial Sequence
  Description of Artificial Sequence: Synthetic oligonucleotide
uccccugccucauucugaa

SEQ ID NO: 2035628 - RNA, 19 nt, Artificial Sequence
  Description of Artificial Sequence: Synthetic oligonucleotide
aggaguugucccggagggc

SEQ ID NO: 2035629 - RNA, 19 nt, Artificial Sequence
  Description of Artificial Sequence: Synthetic oligonucleotide
ggcugggguauucucguag

SEQ ID NO: 2035630 - RNA, 19 nt, Artificial Sequence
  Description of Artificial Sequence: Synthetic oligonucleotide
cagcgccucuuucaaggcg

SEQ ID NO: 2035631 - RNA, 19 nt, Artificial Sequence
  Description of Artificial Sequence: Synthetic oligonucleotide
aaauugccgccaggcuggg

SEQ ID NO: 2035632 - RNA, 19 nt, Artificial Sequence
  Description of Artificial Sequence: Synthetic oligonucleotide
cugcaguggucuuuccuuc

SEQ ID NO: 2035633 - RNA, 19 nt, Artificial Sequence
  Description of Artificial Sequence: Synthetic oligonucleotide
gaccuuaccacaggucaca

SEQ ID NO: 2035634 - RNA, 19 nt, Artificial Sequence
  Description of Artificial Sequence: Synthetic oligonucleotide
ucuuccccuugcaccauau

SEQ ID NO: 2035635 - RNA, 19 nt, Artificial Sequence
  Description of Artificial Sequence: Synthetic oligonucleotide
cagucuuuugaccuggccu

SEQ ID NO: 2035636 - RNA, 19 nt, Artificial Sequence
  Description of Artificial Sequence: Synthetic oligonucleotide
ggucgguuggggcuuuggg

SEQ ID NO: 2035637 - RNA, 19 nt, Artificial Sequence
  Description of Artificial Sequence: Synthetic oligonucleotide
cuguagagucgucuuuauc

SEQ ID NO: 2035638 - RNA, 19 nt, Artificial Sequence
  Description of Artificial Sequence: Synthetic oligonucleotide
gagucgucuuuaucauuuc

SEQ ID NO: 2035639 - RNA, 19 nt, Artificial Sequence
  Description of Artificial Sequence: Synthetic oligonucleotide
uggcguaggcaauguccag

SEQ ID NO: 2035640 - RNA, 19 nt, Artificial Sequence
  Description of Artificial Sequence: Synthetic oligonucleotide
guaggcaauguccagcuuu

SEQ ID NO: 2035641 - RNA, 19 nt, Artificial Sequence
  Description of Artificial Sequence: Synthetic oligonucleotide
gaaguauaggagagagaaa

SEQ ID NO: 2035642 - RNA, 19 nt, Artificial Sequence
  Description of Artificial Sequence: Synthetic oligonucleotide
ccacuuuggauagagggac

SEQ ID NO: 2035643 - RNA, 19 nt, Artificial Sequence
  Description of Artificial Sequence: Synthetic oligonucleotide
ugcucgucacccuuuucuu

SEQ ID NO: 2035644 - RNA, 19 nt, Artificial Sequence
  Description of Artificial Sequence: Synthetic oligonucleotide
aaguccgcuccagacuggu

SEQ ID NO: 2035645 - RNA, 19 nt, Artificial Sequence
  Description of Artificial Sequence: Synthetic oligonucleotide
gcguuggucacagugagca

SEQ ID NO: 2035646 - RNA, 19 nt, Artificial Sequence
  Description of Artificial Sequence: Synthetic oligonucleotide
uagagucgucuuuaucauu

SEQ ID NO: 2035647 - RNA, 19 nt, Artificial Sequence
  Description of Artificial Sequence: Synthetic oligonucleotide
cgucuuuaucauuucucgg

SEQ ID NO: 2035648 - RNA, 19 nt, Artificial Sequence
  Description of Artificial Sequence: Synthetic oligonucleotide
ugggguauucucguagguu

SEQ ID NO: 2035649 - RNA, 19 nt, Artificial Sequence
  Description of Artificial Sequence: Synthetic oligonucleotide
uugcaccauauaguuuucu

SEQ ID NO: 2035650 - RNA, 19 nt, Artificial Sequence
  Description of Artificial Sequence: Synthetic oligonucleotide
ucuuggugcagaggacaga

SEQ ID NO: 2035651 - RNA, 19 nt, Artificial Sequence
  Description of Artificial Sequence: Synthetic oligonucleotide
ucuuuccuucccgaaugaa

SEQ ID NO: 2035652 - RNA, 19 nt, Artificial Sequence
  Description of Artificial Sequence: Synthetic oligonucleotide
aggaucucagugauuuggu

SEQ ID NO: 2035653 - RNA, 19 nt, Artificial Sequence
  Description of Artificial Sequence: Synthetic oligonucleotide
ugaggguccuugcuucauu

SEQ ID NO: 2035654 - RNA, 19 nt, Artificial Sequence
  Description of Artificial Sequence: Synthetic oligonucleotide
ucucagugauuugguguga

SEQ ID NO: 2035655 - RNA, 19 nt, Artificial Sequence
  Description of Artificial Sequence: Synthetic oligonucleotide
guagagucgucuuuaucau

SEQ ID NO: 2035656 - RNA, 19 nt, Artificial Sequence
  Description of Artificial Sequence: Synthetic oligonucleotide
gguugaccuggcugaacag

SEQ ID NO: 2035657 - RNA, 19 nt, Artificial Sequence
  Description of Artificial Sequence: Synthetic oligonucleotide
agcgccucuuucaaggcgu

SEQ ID NO: 2035658 - RNA, 19 nt, Artificial Sequence
  Description of Artificial Sequence: Synthetic oligonucleotide
cagugaugguuggaaaguc

SEQ ID NO: 2035659 - RNA, 19 nt, Artificial Sequence
  Description of Artificial Sequence: Synthetic oligonucleotide
ggguccuugcuucauuuuc

SEQ ID NO: 2035660 - RNA, 19 nt, Artificial Sequence
  Description of Artificial Sequence: Synthetic oligonucleotide
gagcagcgccucuuucaag

SEQ ID NO: 2035661 - RNA, 19 nt, Artificial Sequence
  Description of Artificial Sequence: Synthetic oligonucleotide
cccuuugaccuuaccacag

SEQ ID NO: 2035662 - RNA, 19 nt, Artificial Sequence
  Description of Artificial Sequence: Synthetic oligonucleotide
uccggaaggagugcccuuc

SEQ ID NO: 2035663 - RNA, 19 nt, Artificial Sequence
  Description of Artificial Sequence: Synthetic oligonucleotide
gcagaguccggaaggagug

SEQ ID NO: 2035664 - RNA, 19 nt, Artificial Sequence
  Description of Artificial Sequence: Synthetic oligonucleotide
aguccggaaggagugcccu

SEQ ID NO: 2035665 - RNA, 19 nt, Artificial Sequence
  Description of Artificial Sequence: Synthetic oligonucleotide
gcuccaggaaucuuaacgu

SEQ ID NO: 2035666 - RNA, 19 nt, Artificial Sequence
  Description of Artificial Sequence: Synthetic oligonucleotide
aauugccgccaggcugggg

SEQ ID NO: 2035667 - RNA, 19 nt, Artificial Sequence
  Description of Artificial Sequence: Synthetic oligonucleotide
agagagagagagagagaga

SEQ ID NO: 2035668 - RNA, 19 nt, Artificial Sequence
  Description of Artificial Sequence: Synthetic oligonucleotide
ugucccggagggcuucgaa

SEQ ID NO: 2035669 - RNA, 19 nt, Artificial Sequence
  Description of Artificial Sequence: Synthetic oligonucleotide
ucugcucgucacccuuuuc

SEQ ID NO: 2035670 - RNA, 19 nt, Artificial Sequence
  Description of Artificial Sequence: Synthetic oligonucleotide
accuuaccacaggucacag

SEQ ID NO: 2035671 - RNA, 19 nt, Artificial Sequence
  Description of Artificial Sequence: Synthetic oligonucleotide
cucuuucaaggcguugguc

SEQ ID NO: 2035672 - RNA, 19 nt, Artificial Sequence
  Description of Artificial Sequence: Synthetic oligonucleotide
ggggcgucucuguagaguc

SEQ ID NO: 2035673 - RNA, 19 nt, Artificial Sequence
  Description of Artificial Sequence: Synthetic oligonucleotide
aggaaguauaggagagaga

SEQ ID NO: 2035674 - RNA, 19 nt, Artificial Sequence
  Description of Artificial Sequence: Synthetic oligonucleotide
gucuuuccuucccgaauga

SEQ ID NO: 2035675 - RNA, 19 nt, Artificial Sequence
  Description of Artificial Sequence: Synthetic oligonucleotide
cuuugaccuuaccacaggu

SEQ ID NO: 2035676 - RNA, 19 nt, Artificial Sequence
  Description of Artificial Sequence: Synthetic oligonucleotide
acacacacacacacagaga

SEQ ID NO: 2035677 - RNA, 19 nt, Artificial Sequence
  Description of Artificial Sequence: Synthetic oligonucleotide
acagagagagagagagaga

SEQ ID NO: 2035678 - RNA, 19 nt, Artificial Sequence
  Description of Artificial Sequence: Synthetic oligonucleotide
agauuuugacaggcuugca

SEQ ID NO: 2035679 - RNA, 19 nt, Artificial Sequence
  Description of Artificial Sequence: Synthetic oligonucleotide
ggcguaggcaauguccagc

SEQ ID NO: 2035680 - RNA, 19 nt, Artificial Sequence
  Description of Artificial Sequence: Synthetic oligonucleotide
auguccagcuuuguguaua

SEQ ID NO: 2035681 - RNA, 19 nt, Artificial Sequence
  Description of Artificial Sequence: Synthetic oligonucleotide
caaaaucccuuugaccuua

SEQ ID NO: 2035682 - RNA, 19 nt, Artificial Sequence
  Description of Artificial Sequence: Synthetic oligonucleotide
agagacgucaggacuucau

SEQ ID NO: 2035683 - RNA, 19 nt, Artificial Sequence
  Description of Artificial Sequence: Synthetic oligonucleotide
gaguccggaaggagugccc

SEQ ID NO: 2035684 - RNA, 19 nt, Artificial Sequence
  Description of Artificial Sequence: Synthetic oligonucleotide
gucgguuggggcuuugggu

SEQ ID NO: 2035685 - RNA, 19 nt, Artificial Sequence
  Description of Artificial Sequence: Synthetic oligonucleotide
gauagagggaccagauuuu

SEQ ID NO: 2035686 - RNA, 19 nt, Artificial Sequence
  Description of Artificial Sequence: Synthetic oligonucleotide
cugcugggucgguuggggc

SEQ ID NO: 2035687 - RNA, 19 nt, Artificial Sequence
  Description of Artificial Sequence: Synthetic oligonucleotide
cugcucgucacccuuuucu

SEQ ID NO: 2035688 - RNA, 19 nt, Artificial Sequence
  Description of Artificial Sequence: Synthetic oligonucleotide
acacacacacacacacaca

SEQ ID NO: 2035689 - RNA, 19 nt, Artificial Sequence
  Description of Artificial Sequence: Synthetic oligonucleotide
gcucgucacccuuuucuug

SEQ ID NO: 2035690 - RNA, 19 nt, Artificial Sequence
  Description of Artificial Sequence: Synthetic oligonucleotide
cguagguugaccuggcuga

SEQ ID NO: 2035691 - RNA, 19 nt, Artificial Sequence
  Description of Artificial Sequence: Synthetic oligonucleotide
auggcuuguugauggcgua

SEQ ID NO: 2035692 - RNA, 19 nt, Artificial Sequence
  Description of Artificial Sequence: Synthetic oligonucleotide
acacacacacacagagaga

SEQ ID NO: 2035693 - RNA, 19 nt, Artificial Sequence
  Description of Artificial Sequence: Synthetic oligonucleotide
uagguugaccuggcugaac

SEQ ID NO: 2035694 - RNA, 19 nt, Artificial Sequence
  Description of Artificial Sequence: Synthetic oligonucleotide
ggaaaguccgcuccagacu

SEQ ID NO: 2035695 - RNA, 19 nt, Artificial Sequence
  Description of Artificial Sequence: Synthetic oligonucleotide
gguuggaaaguccgcucca

SEQ ID NO: 2035696 - RNA, 19 nt, Artificial Sequence
  Description of Artificial Sequence: Synthetic oligonucleotide
acacacacacacacacaga

SEQ ID NO: 2035697 - RNA, 19 nt, Artificial Sequence
  Description of Artificial Sequence: Synthetic oligonucleotide
gagagagacgucaggacuu

SEQ ID NO: 2035698 - RNA, 19 nt, Artificial Sequence
  Description of Artificial Sequence: Synthetic oligonucleotide
ccuugcaccauauaguuuu

SEQ ID NO: 2035699 - RNA, 19 nt, Artificial Sequence
  Description of Artificial Sequence: Synthetic oligonucleotide
ccagcuuuguguauaugaa

SEQ ID NO: 2035700 - RNA, 19 nt, Artificial Sequence
  Description of Artificial Sequence: Synthetic oligonucleotide
cuuggugcagaggacagau

SEQ ID NO: 2035701 - RNA, 19 nt, Artificial Sequence
  Description of Artificial Sequence: Synthetic oligonucleotide
gguauucucguagguugac

SEQ ID NO: 2035702 - RNA, 19 nt, Artificial Sequence
  Description of Artificial Sequence: Synthetic oligonucleotide
ccagucuuuugaccuggcc

SEQ ID NO: 2035703 - RNA, 19 nt, Artificial Sequence
  Description of Artificial Sequence: Synthetic oligonucleotide
guugaccuggcugaacagu

SEQ ID NO: 2035704 - RNA, 19 nt, Artificial Sequence
  Description of Artificial Sequence: Synthetic oligonucleotide
aucugcucgucacccuuuu

SEQ ID NO: 2035705 - RNA, 19 nt, Artificial Sequence
  Description of Artificial Sequence: Synthetic oligonucleotide
guggucuuuccuucccgaa

SEQ ID NO: 2035706 - RNA, 19 nt, Artificial Sequence
  Description of Artificial Sequence: Synthetic oligonucleotide
aggcacggcugugugagaa

SEQ ID NO: 2035707 - RNA, 19 nt, Artificial Sequence
  Description of Artificial Sequence: Synthetic oligonucleotide
aggguccuugcuucauuuu

SEQ ID NO: 2035708 - RNA, 19 nt, Artificial Sequence
  Description of Artificial Sequence: Synthetic oligonucleotide
acacacagagagagagaga

SEQ ID NO: 2035709 - RNA, 19 nt, Artificial Sequence
  Description of Artificial Sequence: Synthetic oligonucleotide
acacagagagagagagaga

SEQ ID NO: 2035710 - RNA, 19 nt, Artificial Sequence
  Description of Artificial Sequence: Synthetic oligonucleotide
guugucccggagggcuucg

SEQ ID NO: 2035711 - RNA, 19 nt, Artificial Sequence
  Description of Artificial Sequence: Synthetic oligonucleotide
ggagugcccuucugcuggg

SEQ ID NO: 2035712 - RNA, 19 nt, Artificial Sequence
  Description of Artificial Sequence: Synthetic oligonucleotide
cugcuccaggaaucuuaac

SEQ ID NO: 2035713 - RNA, 19 nt, Artificial Sequence
  Description of Artificial Sequence: Synthetic oligonucleotide
ucggggcucacagacucuu

SEQ ID NO: 2035714 - RNA, 19 nt, Artificial Sequence
  Description of Artificial Sequence: Synthetic oligonucleotide
aagcuucucggggcucaca

SEQ ID NO: 2035715 - RNA, 19 nt, Artificial Sequence
  Description of Artificial Sequence: Synthetic oligonucleotide
ggagcagcgccucuuucaa

SEQ ID NO: 2035716 - RNA, 19 nt, Artificial Sequence
  Description of Artificial Sequence: Synthetic oligonucleotide
ccuuuccuccuuuuaauua

SEQ ID NO: 2035717 - RNA, 19 nt, Artificial Sequence
  Description of Artificial Sequence: Synthetic oligonucleotide
gcuuuggguaggguauaag

SEQ ID NO: 2035718 - RNA, 19 nt, Artificial Sequence
  Description of Artificial Sequence: Synthetic oligonucleotide
ggcacggcugugugagaag

SEQ ID NO: 2035719 - RNA, 19 nt, Artificial Sequence
  Description of Artificial Sequence: Synthetic oligonucleotide
guggcagcagaguccggaa

SEQ ID NO: 2035720 - RNA, 19 nt, Artificial Sequence
  Description of Artificial Sequence: Synthetic oligonucleotide
caggcuugcagagauuccu

SEQ ID NO: 2035721 - RNA, 19 nt, Artificial Sequence
  Description of Artificial Sequence: Synthetic oligonucleotide
cucagugauuuggugugaa

SEQ ID NO: 2035722 - RNA, 19 nt, Artificial Sequence
  Description of Artificial Sequence: Synthetic oligonucleotide
gagagacgucaggacuuca

SEQ ID NO: 2035723 - RNA, 19 nt, Artificial Sequence
  Description of Artificial Sequence: Synthetic oligonucleotide
caguaucauuaacagugau

SEQ ID NO: 2035724 - RNA, 19 nt, Artificial Sequence
  Description of Artificial Sequence: Synthetic oligonucleotide
gaccagauuuugacaggcu

SEQ ID NO: 2035725 - RNA, 19 nt, Artificial Sequence
  Description of Artificial Sequence: Synthetic oligonucleotide
ggacuucaucugcucguca

SEQ ID NO: 2035726 - RNA, 19 nt, Artificial Sequence
  Description of Artificial Sequence: Synthetic oligonucleotide
guagguugaccuggcugaa

SEQ ID NO: 2035727 - RNA, 19 nt, Artificial Sequence
  Description of Artificial Sequence: Synthetic oligonucleotide
aggcaauguccagcuuugu

SEQ ID NO: 2035728 - RNA, 19 nt, Artificial Sequence
  Description of Artificial Sequence: Synthetic oligonucleotide
gggcgucucuguagagucg

SEQ ID NO: 2035729 - RNA, 19 nt, Artificial Sequence
  Description of Artificial Sequence: Synthetic oligonucleotide
caguggcagcagaguccgg

SEQ ID NO: 2035730 - RNA, 19 nt, Artificial Sequence
  Description of Artificial Sequence: Synthetic oligonucleotide
ccaggaucucagugauuug

SEQ ID NO: 2035731 - RNA, 19 nt, Artificial Sequence
  Description of Artificial Sequence: Synthetic oligonucleotide
aggcuugcagagauuccuu

SEQ ID NO: 2035732 - RNA, 19 nt, Artificial Sequence
  Description of Artificial Sequence: Synthetic oligonucleotide
cucauucugaaugcauuuu

SEQ ID NO: 2035733 - RNA, 19 nt, Artificial Sequence
  Description of Artificial Sequence: Synthetic oligonucleotide
cugggguauucucguaggu

SEQ ID NO: 2035734 - RNA, 19 nt, Artificial Sequence
  Description of Artificial Sequence: Synthetic oligonucleotide
ggccuuuccuccuuuuaau

SEQ ID NO: 2035735 - RNA, 19 nt, Artificial Sequence
  Description of Artificial Sequence: Synthetic oligonucleotide
aguccgcuccagacuggug

SEQ ID NO: 2035736 - RNA, 19 nt, Artificial Sequence
  Description of Artificial Sequence: Synthetic oligonucleotide
cgucacccuuuucuugagg

SEQ ID NO: 2035737 - RNA, 19 nt, Artificial Sequence
  Description of Artificial Sequence: Synthetic oligonucleotide
uugucccggagggcuucga

SEQ ID NO: 2035738 - RNA, 19 nt, Artificial Sequence
  Description of Artificial Sequence: Synthetic oligonucleotide
gggucgguuggggcuuugg

SEQ ID NO: 2035739 - RNA, 19 nt, Artificial Sequence
  Description of Artificial Sequence: Synthetic oligonucleotide
aggcugggguauucucgua

SEQ ID NO: 2035740 - RNA, 19 nt, Artificial Sequence
  Description of Artificial Sequence: Synthetic oligonucleotide
cacagugagcauccuugau

SEQ ID NO: 2035741 - RNA, 19 nt, Artificial Sequence
  Description of Artificial Sequence: Synthetic oligonucleotide
ggggcuuuggguaggguau

SEQ ID NO: 2035742 - RNA, 19 nt, Artificial Sequence
  Description of Artificial Sequence: Synthetic oligonucleotide
ccggagggcuucgaagaag

SEQ ID NO: 2035743 - RNA, 19 nt, Artificial Sequence
  Description of Artificial Sequence: Synthetic oligonucleotide
ggguauaagcagcucucuu

SEQ ID NO: 2035744 - RNA, 19 nt, Artificial Sequence
  Description of Artificial Sequence: Synthetic oligonucleotide
cgguuggggcuuuggguag

SEQ ID NO: 2035745 - RNA, 19 nt, Artificial Sequence
  Description of Artificial Sequence: Synthetic oligonucleotide
ccucauucugaaugcauuu

SEQ ID NO: 2035746 - RNA, 19 nt, Artificial Sequence
  Description of Artificial Sequence: Synthetic oligonucleotide
ggcgucucuguagagucgu

SEQ ID NO: 2035747 - RNA, 19 nt, Artificial Sequence
  Description of Artificial Sequence: Synthetic oligonucleotide
cgaagaaggggaauggcuu

SEQ ID NO: 2035748 - RNA, 19 nt, Artificial Sequence
  Description of Artificial Sequence: Synthetic oligonucleotide
gagauuccuuguacauuuu

SEQ ID NO: 2035749 - RNA, 19 nt, Artificial Sequence
  Description of Artificial Sequence: Synthetic oligonucleotide
ugggucgguuggggcuuug

SEQ ID NO: 2035750 - RNA, 19 nt, Artificial Sequence
  Description of Artificial Sequence: Synthetic oligonucleotide
cucguagguugaccuggcu

SEQ ID NO: 2035751 - RNA, 19 nt, Artificial Sequence
  Description of Artificial Sequence: Synthetic oligonucleotide
auccaggaucucagugauu

SEQ ID NO: 2035752 - RNA, 19 nt, Artificial Sequence
  Description of Artificial Sequence: Synthetic oligonucleotide
ggcuuuggguaggguauaa

SEQ ID NO: 2035753 - RNA, 19 nt, Artificial Sequence
  Description of Artificial Sequence: Synthetic oligonucleotide
gccucauucugaaugcauu

SEQ ID NO: 2035754 - RNA, 19 nt, Artificial Sequence
  Description of Artificial Sequence: Synthetic oligonucleotide
gcauuuuccugaggguccu

SEQ ID NO: 2035755 - RNA, 19 nt, Artificial Sequence
  Description of Artificial Sequence: Synthetic oligonucleotide
ccccuugcaccauauaguu

SEQ ID NO: 2035756 - RNA, 19 nt, Artificial Sequence
  Description of Artificial Sequence: Synthetic oligonucleotide
gggcuucgaagaaggggaa

SEQ ID NO: 2035757 - RNA, 19 nt, Artificial Sequence
  Description of Artificial Sequence: Synthetic oligonucleotide
cggaaggagugcccuucug

SEQ ID NO: 2035758 - RNA, 19 nt, Artificial Sequence
  Description of Artificial Sequence: Synthetic oligonucleotide
gaguugucccggagggcuu

SEQ ID NO: 2035759 - RNA, 19 nt, Artificial Sequence
  Description of Artificial Sequence: Synthetic oligonucleotide
ggggcaguggcagcagagu

SEQ ID NO: 2035760 - RNA, 19 nt, Artificial Sequence
  Description of Artificial Sequence: Synthetic oligonucleotide
gugcaccacuuuggauaga

SEQ ID NO: 2035761 - RNA, 19 nt, Artificial Sequence
  Description of Artificial Sequence: Synthetic oligonucleotide
guccggaaggagugcccuu

SEQ ID NO: 2035762 - RNA, 19 nt, Artificial Sequence
  Description of Artificial Sequence: Synthetic oligonucleotide
gggcuuuggguaggguaua

SEQ ID NO: 2035763 - RNA, 19 nt, Artificial Sequence
  Description of Artificial Sequence: Synthetic oligonucleotide
ggcuucgaagaaggggaau

SEQ ID NO: 2035764 - RNA, 19 nt, Artificial Sequence
  Description of Artificial Sequence: Synthetic oligonucleotide
cccggagggcuucgaagaa

SEQ ID NO: 2035765 - RNA, 19 nt, Artificial Sequence
  Description of Artificial Sequence: Synthetic oligonucleotide
gcgucucuguagagucguc

SEQ ID NO: 2035766 - RNA, 19 nt, Artificial Sequence
  Description of Artificial Sequence: Synthetic oligonucleotide
gcaaauccccugccucauu

SEQ ID NO: 2035767 - RNA, 19 nt, Artificial Sequence
  Description of Artificial Sequence: Synthetic oligonucleotide
cggcugugugagaagggcu

SEQ ID NO: 2035768 - RNA, 19 nt, Artificial Sequence
  Description of Artificial Sequence: Synthetic oligonucleotide
cccuugcaccauauaguuu

SEQ ID NO: 2035769 - RNA, 19 nt, Artificial Sequence
  Description of Artificial Sequence: Synthetic oligonucleotide
gcugggucgguuggggcuu

SEQ ID NO: 2035770 - RNA, 19 nt, Artificial Sequence
  Description of Artificial Sequence: Synthetic oligonucleotide
cgccucuuucaaggcguug

SEQ ID NO: 2035771 - RNA, 19 nt, Artificial Sequence
  Description of Artificial Sequence: Synthetic oligonucleotide
ccggaaggagugcccuucu

SEQ ID NO: 2035772 - RNA, 19 nt, Artificial Sequence
  Description of Artificial Sequence: Synthetic oligonucleotide
ccgccaggcugggguauuc

SEQ ID NO: 2035773 - RNA, 19 nt, Artificial Sequence
  Description of Artificial Sequence: Synthetic oligonucleotide
ccagacuggugagaacauu

SEQ ID NO: 2035774 - RNA, 19 nt, Artificial Sequence
  Description of Artificial Sequence: Synthetic oligonucleotide
ccgcuccagacuggugaga

SEQ ID NO: 2035775 - RNA, 19 nt, Artificial Sequence
  Description of Artificial Sequence: Synthetic oligonucleotide
cugggucgguuggggcuuu

SEQ ID NO: 2035776 - RNA, 19 nt, Artificial Sequence
  Description of Artificial Sequence: Synthetic oligonucleotide
gcgccucuuucaaggcguu

SEQ ID NO: 2035777 - RNA, 19 nt, Artificial Sequence
  Description of Artificial Sequence: Synthetic oligonucleotide
gccgccaggcugggguauu

SEQ ID NO: 2035778 - RNA, 19 nt, Artificial Sequence
  Description of Artificial Sequence: Synthetic oligonucleotide
cccuucugcugggucgguu

SEQ ID NO: 2035779 - RNA, 19 nt, Artificial Sequence
  Description of Artificial Sequence: Synthetic oligonucleotide
gcccuucugcugggucggu

SEQ ID NO: 2035780 - RNA, 19 nt, Artificial Sequence
  Description of Artificial Sequence: Synthetic oligonucleotide
cgccaggcugggguauucu

SEQ ID NO: 2035781 - RNA, 19 nt, Artificial Sequence
  Description of Artificial Sequence: Synthetic oligonucleotide
aauuuaaagaguuccaagg

SEQ ID NO: 2035782 - RNA, 19 nt, Artificial Sequence
  Description of Artificial Sequence: Synthetic oligonucleotide
uuauugaaaauccagacaa

SEQ ID NO: 2035783 - RNA, 19 nt, Artificial Sequence
  Description of Artificial Sequence: Synthetic oligonucleotide
gacauuauuaauuuaaaga

SEQ ID NO: 2035784 - RNA, 19 nt, Artificial Sequence
  Description of Artificial Sequence: Synthetic oligonucleotide
uuugguaacuucuugaaca

SEQ ID NO: 2035785 - RNA, 19 nt, Artificial Sequence
  Description of Artificial Sequence: Synthetic oligonucleotide
uuuaaaacuuccauauucc

SEQ ID NO: 2035786 - RNA, 19 nt, Artificial Sequence
  Description of Artificial Sequence: Synthetic oligonucleotide
uaagaugucauuccacucg

SEQ ID NO: 2035787 - RNA, 19 nt, Artificial Sequence
  Description of Artificial Sequence: Synthetic oligonucleotide
gacaauaugucauaucaag

SEQ ID NO: 2035788 - RNA, 19 nt, Artificial Sequence
  Description of Artificial Sequence: Synthetic oligonucleotide
aguaaucugucuucgaugg

SEQ ID NO: 2035789 - RNA, 19 nt, Artificial Sequence
  Description of Artificial Sequence: Synthetic oligonucleotide
aacgucuccaaauuuguuc

SEQ ID NO: 2035790 - RNA, 19 nt, Artificial Sequence
  Description of Artificial Sequence: Synthetic oligonucleotide
ucugaaauguauaaaauuu

SEQ ID NO: 2035791 - RNA, 19 nt, Artificial Sequence
  Description of Artificial Sequence: Synthetic oligonucleotide
uaggaaaacacauauuuga

SEQ ID NO: 2035792 - RNA, 19 nt, Artificial Sequence
  Description of Artificial Sequence: Synthetic oligonucleotide
aaaacuuccauauuccuuu

SEQ ID NO: 2035793 - RNA, 19 nt, Artificial Sequence
  Description of Artificial Sequence: Synthetic oligonucleotide
uaauuggguaugcaggucg

SEQ ID NO: 2035794 - RNA, 19 nt, Artificial Sequence
  Description of Artificial Sequence: Synthetic oligonucleotide
aagguuagaaaccaaaaua

SEQ ID NO: 2035795 - RNA, 19 nt, Artificial Sequence
  Description of Artificial Sequence: Synthetic oligonucleotide
uuaucaaggaacagagggg

SEQ ID NO: 2035796 - RNA, 19 nt, Artificial Sequence
  Description of Artificial Sequence: Synthetic oligonucleotide
uuugacaaacuucacguca

SEQ ID NO: 2035797 - RNA, 19 nt, Artificial Sequence
  Description of Artificial Sequence: Synthetic oligonucleotide
uauguuuucaccacugacu

SEQ ID NO: 2035798 - RNA, 19 nt, Artificial Sequence
  Description of Artificial Sequence: Synthetic oligonucleotide
uuguacagguguaagauca

SEQ ID NO: 2035799 - RNA, 19 nt, Artificial Sequence
  Description of Artificial Sequence: Synthetic oligonucleotide
aauacugugggcagauucc

SEQ ID NO: 2035800 - RNA, 19 nt, Artificial Sequence
  Description of Artificial Sequence: Synthetic oligonucleotide
guacuaaacaauuucauga

SEQ ID NO: 2035801 - RNA, 19 nt, Artificial Sequence
  Description of Artificial Sequence: Synthetic oligonucleotide
aaauccagacaauauguca

SEQ ID NO: 2035802 - RNA, 19 nt, Artificial Sequence
  Description of Artificial Sequence: Synthetic oligonucleotide
uuagaaaccaaaauaugau

SEQ ID NO: 2035803 - RNA, 19 nt, Artificial Sequence
  Description of Artificial Sequence: Synthetic oligonucleotide
cacauauuugacauaaagc

SEQ ID NO: 2035804 - RNA, 19 nt, Artificial Sequence
  Description of Artificial Sequence: Synthetic oligonucleotide
uugaacauaauccuucccu

SEQ ID NO: 2035805 - RNA, 19 nt, Artificial Sequence
  Description of Artificial Sequence: Synthetic oligonucleotide
caauaugucauaucaagac

SEQ ID NO: 2035806 - RNA, 19 nt, Artificial Sequence
  Description of Artificial Sequence: Synthetic oligonucleotide
gauacacgaauacuguggg

SEQ ID NO: 2035807 - RNA, 19 nt, Artificial Sequence
  Description of Artificial Sequence: Synthetic oligonucleotide
aacauaauccuucccugag

SEQ ID NO: 2035808 - RNA, 19 nt, Artificial Sequence
  Description of Artificial Sequence: Synthetic oligonucleotide
aguacuaaacaauuucaug

SEQ ID NO: 2035809 - RNA, 19 nt, Artificial Sequence
  Description of Artificial Sequence: Synthetic oligonucleotide
aggaccaaugaacugugcc

SEQ ID NO: 2035810 - RNA, 19 nt, Artificial Sequence
  Description of Artificial Sequence: Synthetic oligonucleotide
ugauuugcugaaauacagg

SEQ ID NO: 2035811 - RNA, 19 nt, Artificial Sequence
  Description of Artificial Sequence: Synthetic oligonucleotide
uuugacauaaagcuuguuu

SEQ ID NO: 2035812 - RNA, 19 nt, Artificial Sequence
  Description of Artificial Sequence: Synthetic oligonucleotide
agacauuauuaauuuaaag

SEQ ID NO: 2035813 - RNA, 19 nt, Artificial Sequence
  Description of Artificial Sequence: Synthetic oligonucleotide
ucaccauccagauacacga

SEQ ID NO: 2035814 - RNA, 19 nt, Artificial Sequence
  Description of Artificial Sequence: Synthetic oligonucleotide
uccaggucagucuugauug

SEQ ID NO: 2035815 - RNA, 19 nt, Artificial Sequence
  Description of Artificial Sequence: Synthetic oligonucleotide
uaauccuucccugagaucu

SEQ ID NO: 2035816 - RNA, 19 nt, Artificial Sequence
  Description of Artificial Sequence: Synthetic oligonucleotide
auuuaaagaguuccaagga

SEQ ID NO: 2035817 - RNA, 19 nt, Artificial Sequence
  Description of Artificial Sequence: Synthetic oligonucleotide
uugacauaaagcuuguuua

SEQ ID NO: 2035818 - RNA, 19 nt, Artificial Sequence
  Description of Artificial Sequence: Synthetic oligonucleotide
ucaugauuugcugaaauac

SEQ ID NO: 2035819 - RNA, 19 nt, Artificial Sequence
  Description of Artificial Sequence: Synthetic oligonucleotide
uccuuauugaaaauccaga

SEQ ID NO: 2035820 - RNA, 19 nt, Artificial Sequence
  Description of Artificial Sequence: Synthetic oligonucleotide
ucucucgucagguucaugc

SEQ ID NO: 2035821 - RNA, 19 nt, Artificial Sequence
  Description of Artificial Sequence: Synthetic oligonucleotide
uucacgucaggaaacuucc

SEQ ID NO: 2035822 - RNA, 19 nt, Artificial Sequence
  Description of Artificial Sequence: Synthetic oligonucleotide
auaugucauaucaagacag

SEQ ID NO: 2035823 - RNA, 19 nt, Artificial Sequence
  Description of Artificial Sequence: Synthetic oligonucleotide
uugacaaacuucacgucag

SEQ ID NO: 2035824 - RNA, 19 nt, Artificial Sequence
  Description of Artificial Sequence: Synthetic oligonucleotide
ugaacauaauccuucccug

SEQ ID NO: 2035825 - RNA, 19 nt, Artificial Sequence
  Description of Artificial Sequence: Synthetic oligonucleotide
ugucauaucaagacaguuc

SEQ ID NO: 2035826 - RNA, 19 nt, Artificial Sequence
  Description of Artificial Sequence: Synthetic oligonucleotide
aaaauccagacaauauguc

SEQ ID NO: 2035827 - RNA, 19 nt, Artificial Sequence
  Description of Artificial Sequence: Synthetic oligonucleotide
ucauauguuuucaccacug

SEQ ID NO: 2035828 - RNA, 19 nt, Artificial Sequence
  Description of Artificial Sequence: Synthetic oligonucleotide
uucuugaacauaauccuuc

SEQ ID NO: 2035829 - RNA, 19 nt, Artificial Sequence
  Description of Artificial Sequence: Synthetic oligonucleotide
uuuacaguggcugcuaucu

SEQ ID NO: 2035830 - RNA, 19 nt, Artificial Sequence
  Description of Artificial Sequence: Synthetic oligonucleotide
guggcugcuaucuuagucg

SEQ ID NO: 2035831 - RNA, 19 nt, Artificial Sequence
  Description of Artificial Sequence: Synthetic oligonucleotide
gucauaucaagacaguuca

SEQ ID NO: 2035832 - RNA, 19 nt, Artificial Sequence
  Description of Artificial Sequence: Synthetic oligonucleotide
ugagaucucuaaaacgucu

SEQ ID NO: 2035833 - RNA, 19 nt, Artificial Sequence
  Description of Artificial Sequence: Synthetic oligonucleotide
ucuaaaacgucuccaaauu

SEQ ID NO: 2035834 - RNA, 19 nt, Artificial Sequence
  Description of Artificial Sequence: Synthetic oligonucleotide
uacacgaauacugugggca

SEQ ID NO: 2035835 - RNA, 19 nt, Artificial Sequence
  Description of Artificial Sequence: Synthetic oligonucleotide
agauacacgaauacugugg

SEQ ID NO: 2035836 - RNA, 19 nt, Artificial Sequence
  Description of Artificial Sequence: Synthetic oligonucleotide
cuuaaagagacauuauuaa

SEQ ID NO: 2035837 - RNA, 19 nt, Artificial Sequence
  Description of Artificial Sequence: Synthetic oligonucleotide
cagacaauaugucauauca

SEQ ID NO: 2035838 - RNA, 19 nt, Artificial Sequence
  Description of Artificial Sequence: Synthetic oligonucleotide
uuaaaacuuccauauuccu

SEQ ID NO: 2035839 - RNA, 19 nt, Artificial Sequence
  Description of Artificial Sequence: Synthetic oligonucleotide
uucuuaaagagacauuauu

SEQ ID NO: 2035840 - RNA, 19 nt, Artificial Sequence
  Description of Artificial Sequence: Synthetic oligonucleotide
uaagaucacccacaagccc

SEQ ID NO: 2035841 - RNA, 19 nt, Artificial Sequence
  Description of Artificial Sequence: Synthetic oligonucleotide
augaacugugccuugauau

SEQ ID NO: 2035842 - RNA, 19 nt, Artificial Sequence
  Description of Artificial Sequence: Synthetic oligonucleotide
uccauauuccuuucuacac

SEQ ID NO: 2035843 - RNA, 19 nt, Artificial Sequence
  Description of Artificial Sequence: Synthetic oligonucleotide
gaauacugugggcagauuc

SEQ ID NO: 2035844 - RNA, 19 nt, Artificial Sequence
  Description of Artificial Sequence: Synthetic oligonucleotide
uaaucugucuucgaugggc

SEQ ID NO: 2035845 - RNA, 19 nt, Artificial Sequence
  Description of Artificial Sequence: Synthetic oligonucleotide
ucuugaacauaauccuucc

SEQ ID NO: 2035846 - RNA, 19 nt, Artificial Sequence
  Description of Artificial Sequence: Synthetic oligonucleotide
cuccuuauugaaaauccag

SEQ ID NO: 2035847 - RNA, 19 nt, Artificial Sequence
  Description of Artificial Sequence: Synthetic oligonucleotide
acgucaggaaacuuccugg

SEQ ID NO: 2035848 - RNA, 19 nt, Artificial Sequence
  Description of Artificial Sequence: Synthetic oligonucleotide
ugaguugcuuuccacucag

SEQ ID NO: 2035849 - RNA, 19 nt, Artificial Sequence
  Description of Artificial Sequence: Synthetic oligonucleotide
ucuacacaguugcagguca

SEQ ID NO: 2035850 - RNA, 19 nt, Artificial Sequence
  Description of Artificial Sequence: Synthetic oligonucleotide
aacagagccucgcacugag

SEQ ID NO: 2035851 - RNA, 19 nt, Artificial Sequence
  Description of Artificial Sequence: Synthetic oligonucleotide
aaucccuuguuuguacagg

SEQ ID NO: 2035852 - RNA, 19 nt, Artificial Sequence
  Description of Artificial Sequence: Synthetic oligonucleotide
uaaaacuuccauauuccuu

SEQ ID NO: 2035853 - RNA, 19 nt, Artificial Sequence
  Description of Artificial Sequence: Synthetic oligonucleotide
uacuaaacaauuucaugau

SEQ ID NO: 2035854 - RNA, 19 nt, Artificial Sequence
  Description of Artificial Sequence: Synthetic oligonucleotide
uuugcguaagaugucauuc

SEQ ID NO: 2035855 - RNA, 19 nt, Artificial Sequence
  Description of Artificial Sequence: Synthetic oligonucleotide
guggagauggcuuugacaa

SEQ ID NO: 2035856 - RNA, 19 nt, Artificial Sequence
  Description of Artificial Sequence: Synthetic oligonucleotide
aauccagacaauaugucau

SEQ ID NO: 2035857 - RNA, 19 nt, Artificial Sequence
  Description of Artificial Sequence: Synthetic oligonucleotide
gguuuaucaaggaacagag

SEQ ID NO: 2035858 - RNA, 19 nt, Artificial Sequence
  Description of Artificial Sequence: Synthetic oligonucleotide
ugguuuaucaaggaacaga

SEQ ID NO: 2035859 - RNA, 19 nt, Artificial Sequence
  Description of Artificial Sequence: Synthetic oligonucleotide
agcucguucguccuccucg

SEQ ID NO: 2035860 - RNA, 19 nt, Artificial Sequence
  Description of Artificial Sequence: Synthetic oligonucleotide
acauaaagcuuguuuaaau

SEQ ID NO: 2035861 - RNA, 19 nt, Artificial Sequence
  Description of Artificial Sequence: Synthetic oligonucleotide
agagacauuauuaauuuaa

SEQ ID NO: 2035862 - RNA, 19 nt, Artificial Sequence
  Description of Artificial Sequence: Synthetic oligonucleotide
auaucaagacaguucaaaa

SEQ ID NO: 2035863 - RNA, 19 nt, Artificial Sequence
  Description of Artificial Sequence: Synthetic oligonucleotide
uccaacucgucucucguca

SEQ ID NO: 2035864 - RNA, 19 nt, Artificial Sequence
  Description of Artificial Sequence: Synthetic oligonucleotide
uuccaaggaauuaaauaaa

SEQ ID NO: 2035865 - RNA, 19 nt, Artificial Sequence
  Description of Artificial Sequence: Synthetic oligonucleotide
ugucauuccacucgguguc

SEQ ID NO: 2035866 - RNA, 19 nt, Artificial Sequence
  Description of Artificial Sequence: Synthetic oligonucleotide
auacacgaauacugugggc

SEQ ID NO: 2035867 - RNA, 19 nt, Artificial Sequence
  Description of Artificial Sequence: Synthetic oligonucleotide
caucucgauagcucguucg

SEQ ID NO: 2035868 - RNA, 19 nt, Artificial Sequence
  Description of Artificial Sequence: Synthetic oligonucleotide
uaaagaguuccaaggaauu

SEQ ID NO: 2035869 - RNA, 19 nt, Artificial Sequence
  Description of Artificial Sequence: Synthetic oligonucleotide
ugcguaagaugucauucca

SEQ ID NO: 2035870 - RNA, 19 nt, Artificial Sequence
  Description of Artificial Sequence: Synthetic oligonucleotide
uucaggcuuucuuucgggg

SEQ ID NO: 2035871 - RNA, 19 nt, Artificial Sequence
  Description of Artificial Sequence: Synthetic oligonucleotide
uugcguaagaugucauucc

SEQ ID NO: 2035872 - RNA, 19 nt, Artificial Sequence
  Description of Artificial Sequence: Synthetic oligonucleotide
gaaaauccagacaauaugu

SEQ ID NO: 2035873 - RNA, 19 nt, Artificial Sequence
  Description of Artificial Sequence: Synthetic oligonucleotide
agguuagaaaccaaaauau

SEQ ID NO: 2035874 - RNA, 19 nt, Artificial Sequence
  Description of Artificial Sequence: Synthetic oligonucleotide
gaaucccuuguuuguacag

SEQ ID NO: 2035875 - RNA, 19 nt, Artificial Sequence
  Description of Artificial Sequence: Synthetic oligonucleotide
ugacaaacuucacgucagg

SEQ ID NO: 2035876 - RNA, 19 nt, Artificial Sequence
  Description of Artificial Sequence: Synthetic oligonucleotide
uauuugacauaaagcuugu

SEQ ID NO: 2035877 - RNA, 19 nt, Artificial Sequence
  Description of Artificial Sequence: Synthetic oligonucleotide
uccaaagucauaucuucau

SEQ ID NO: 2035878 - RNA, 19 nt, Artificial Sequence
  Description of Artificial Sequence: Synthetic oligonucleotide
cucggugucugcauugggg

SEQ ID NO: 2035879 - RNA, 19 nt, Artificial Sequence
  Description of Artificial Sequence: Synthetic oligonucleotide
aaccaaaauaugauaaauu

SEQ ID NO: 2035880 - RNA, 19 nt, Artificial Sequence
  Description of Artificial Sequence: Synthetic oligonucleotide
cuucacgucaggaaacuuc

SEQ ID NO: 2035881 - RNA, 19 nt, Artificial Sequence
  Description of Artificial Sequence: Synthetic oligonucleotide
cuuagucguccucagaauc

SEQ ID NO: 2035882 - RNA, 19 nt, Artificial Sequence
  Description of Artificial Sequence: Synthetic oligonucleotide
ggcuuugacaaacuucacg

SEQ ID NO: 2035883 - RNA, 19 nt, Artificial Sequence
  Description of Artificial Sequence: Synthetic oligonucleotide
acaguaaucugucuucgau

SEQ ID NO: 2035884 - RNA, 19 nt, Artificial Sequence
  Description of Artificial Sequence: Synthetic oligonucleotide
gaaacuuccuggcgagucc

SEQ ID NO: 2035885 - RNA, 19 nt, Artificial Sequence
  Description of Artificial Sequence: Synthetic oligonucleotide
augucauuccacucggugu

SEQ ID NO: 2035886 - RNA, 19 nt, Artificial Sequence
  Description of Artificial Sequence: Synthetic oligonucleotide
aaugaacugugccuugaua

SEQ ID NO: 2035887 - RNA, 19 nt, Artificial Sequence
  Description of Artificial Sequence: Synthetic oligonucleotide
uccuucaggcuuucuuucg

SEQ ID NO: 2035888 - RNA, 19 nt, Artificial Sequence
  Description of Artificial Sequence: Synthetic oligonucleotide
guaagaucacccacaagcc

SEQ ID NO: 2035889 - RNA, 19 nt, Artificial Sequence
  Description of Artificial Sequence: Synthetic oligonucleotide
aaguacuaaacaauuucau

SEQ ID NO: 2035890 - RNA, 19 nt, Artificial Sequence
  Description of Artificial Sequence: Synthetic oligonucleotide
ucucuaaaacgucuccaaa

SEQ ID NO: 2035891 - RNA, 19 nt, Artificial Sequence
  Description of Artificial Sequence: Synthetic oligonucleotide
guaggaaaacacauauuug

SEQ ID NO: 2035892 - RNA, 19 nt, Artificial Sequence
  Description of Artificial Sequence: Synthetic oligonucleotide
cuccucguugaacucaucc

SEQ ID NO: 2035893 - RNA, 19 nt, Artificial Sequence
  Description of Artificial Sequence: Synthetic oligonucleotide
uccugucgggguaauuggg

SEQ ID NO: 2035894 - RNA, 19 nt, Artificial Sequence
  Description of Artificial Sequence: Synthetic oligonucleotide
caguaaucugucuucgaug

SEQ ID NO: 2035895 - RNA, 19 nt, Artificial Sequence
  Description of Artificial Sequence: Synthetic oligonucleotide
aggaacagaggggaauccc

SEQ ID NO: 2035896 - RNA, 19 nt, Artificial Sequence
  Description of Artificial Sequence: Synthetic oligonucleotide
ugcauugggguccugcauc

SEQ ID NO: 2035897 - RNA, 19 nt, Artificial Sequence
  Description of Artificial Sequence: Synthetic oligonucleotide
auuccugucgggguaauug

SEQ ID NO: 2035898 - RNA, 19 nt, Artificial Sequence
  Description of Artificial Sequence: Synthetic oligonucleotide
ucguccuccucguugaacu

SEQ ID NO: 2035899 - RNA, 19 nt, Artificial Sequence
  Description of Artificial Sequence: Synthetic oligonucleotide
cauccagauacacgaauac

SEQ ID NO: 2035900 - RNA, 19 nt, Artificial Sequence
  Description of Artificial Sequence: Synthetic oligonucleotide
ccuuauugaaaauccagac

SEQ ID NO: 2035901 - RNA, 19 nt, Artificial Sequence
  Description of Artificial Sequence: Synthetic oligonucleotide
uucaugauuugcugaaaua

SEQ ID NO: 2035902 - RNA, 19 nt, Artificial Sequence
  Description of Artificial Sequence: Synthetic oligonucleotide
uugccuucaaucacucgga

SEQ ID NO: 2035903 - RNA, 19 nt, Artificial Sequence
  Description of Artificial Sequence: Synthetic oligonucleotide
ucucaugggaacagagccu

SEQ ID NO: 2035904 - RNA, 19 nt, Artificial Sequence
  Description of Artificial Sequence: Synthetic oligonucleotide
cuuugguaacuucuugaac

SEQ ID NO: 2035905 - RNA, 19 nt, Artificial Sequence
  Description of Artificial Sequence: Synthetic oligonucleotide
ucacccacaagcccucgcc

SEQ ID NO: 2035906 - RNA, 19 nt, Artificial Sequence
  Description of Artificial Sequence: Synthetic oligonucleotide
acaauaugucauaucaaga

SEQ ID NO: 2035907 - RNA, 19 nt, Artificial Sequence
  Description of Artificial Sequence: Synthetic oligonucleotide
ugugccuugauaucaccau

SEQ ID NO: 2035908 - RNA, 19 nt, Artificial Sequence
  Description of Artificial Sequence: Synthetic oligonucleotide
uaucuucauauguuuucac

SEQ ID NO: 2035909 - RNA, 19 nt, Artificial Sequence
  Description of Artificial Sequence: Synthetic oligonucleotide
aucaccauccagauacacg

SEQ ID NO: 2035910 - RNA, 19 nt, Artificial Sequence
  Description of Artificial Sequence: Synthetic oligonucleotide
ugaacugugccuugauauc

SEQ ID NO: 2035911 - RNA, 19 nt, Artificial Sequence
  Description of Artificial Sequence: Synthetic oligonucleotide
cuucgaugggcuucuuggg

SEQ ID NO: 2035912 - RNA, 19 nt, Artificial Sequence
  Description of Artificial Sequence: Synthetic oligonucleotide
gauagcucguucguccucc

SEQ ID NO: 2035913 - RNA, 19 nt, Artificial Sequence
  Description of Artificial Sequence: Synthetic oligonucleotide
ucguucguccuccucguug

SEQ ID NO: 2035914 - RNA, 19 nt, Artificial Sequence
  Description of Artificial Sequence: Synthetic oligonucleotide
ucagcugaguugcuuucca

SEQ ID NO: 2035915 - RNA, 19 nt, Artificial Sequence
  Description of Artificial Sequence: Synthetic oligonucleotide
ggguaauuggguaugcagg

SEQ ID NO: 2035916 - RNA, 19 nt, Artificial Sequence
  Description of Artificial Sequence: Synthetic oligonucleotide
acuaaacaauuucaugauu

SEQ ID NO: 2035917 - RNA, 19 nt, Artificial Sequence
  Description of Artificial Sequence: Synthetic oligonucleotide
uccucguugaacucauccu

SEQ ID NO: 2035918 - RNA, 19 nt, Artificial Sequence
  Description of Artificial Sequence: Synthetic oligonucleotide
accacugacugcuggagga

SEQ ID NO: 2035919 - RNA, 19 nt, Artificial Sequence
  Description of Artificial Sequence: Synthetic oligonucleotide
auaauccuucccugagauc

SEQ ID NO: 2035920 - RNA, 19 nt, Artificial Sequence
  Description of Artificial Sequence: Synthetic oligonucleotide
cagauacacgaauacugug

SEQ ID NO: 2035921 - RNA, 19 nt, Artificial Sequence
  Description of Artificial Sequence: Synthetic oligonucleotide
acacgaauacugugggcag

SEQ ID NO: 2035922 - RNA, 19 nt, Artificial Sequence
  Description of Artificial Sequence: Synthetic oligonucleotide
ucugcauugggguccugca

SEQ ID NO: 2035923 - RNA, 19 nt, Artificial Sequence
  Description of Artificial Sequence: Synthetic oligonucleotide
gaguccacucaagugcugg

SEQ ID NO: 2035924 - RNA, 19 nt, Artificial Sequence
  Description of Artificial Sequence: Synthetic oligonucleotide
aaucacugucccuucucau

SEQ ID NO: 2035925 - RNA, 19 nt, Artificial Sequence
  Description of Artificial Sequence: Synthetic oligonucleotide
guuuaucaaggaacagagg

SEQ ID NO: 2035926 - RNA, 19 nt, Artificial Sequence
  Description of Artificial Sequence: Synthetic oligonucleotide
agugcugguuuaucaagga

SEQ ID NO: 2035927 - RNA, 19 nt, Artificial Sequence
  Description of Artificial Sequence: Synthetic oligonucleotide
aaagaguuccaaggaauua

SEQ ID NO: 2035928 - RNA, 19 nt, Artificial Sequence
  Description of Artificial Sequence: Synthetic oligonucleotide
agagccucgcacugaggac

SEQ ID NO: 2035929 - RNA, 19 nt, Artificial Sequence
  Description of Artificial Sequence: Synthetic oligonucleotide
ucagucuugauugccccug

SEQ ID NO: 2035930 - RNA, 19 nt, Artificial Sequence
  Description of Artificial Sequence: Synthetic oligonucleotide
gggguaauuggguaugcag

SEQ ID NO: 2035931 - RNA, 19 nt, Artificial Sequence
  Description of Artificial Sequence: Synthetic oligonucleotide
gaggaguugcugcuccucc

SEQ ID NO: 2035932 - RNA, 19 nt, Artificial Sequence
  Description of Artificial Sequence: Synthetic oligonucleotide
ugucccuucucaugggaac

SEQ ID NO: 2035933 - RNA, 19 nt, Artificial Sequence
  Description of Artificial Sequence: Synthetic oligonucleotide
uguacagguguaagaucac

SEQ ID NO: 2035934 - RNA, 19 nt, Artificial Sequence
  Description of Artificial Sequence: Synthetic oligonucleotide
acuuccauauuccuuucua

SEQ ID NO: 2035935 - RNA, 19 nt, Artificial Sequence
  Description of Artificial Sequence: Synthetic oligonucleotide
uaucuuagucguccucaga

SEQ ID NO: 2035936 - RNA, 19 nt, Artificial Sequence
  Description of Artificial Sequence: Synthetic oligonucleotide
gaacugugccuugauauca

SEQ ID NO: 2035937 - RNA, 19 nt, Artificial Sequence
  Description of Artificial Sequence: Synthetic oligonucleotide
aacuucacgucaggaaacu

SEQ ID NO: 2035938 - RNA, 19 nt, Artificial Sequence
  Description of Artificial Sequence: Synthetic oligonucleotide
aaucugucuucgaugggcu

SEQ ID NO: 2035939 - RNA, 19 nt, Artificial Sequence
  Description of Artificial Sequence: Synthetic oligonucleotide
ucgucucucgucagguuca

SEQ ID NO: 2035940 - RNA, 19 nt, Artificial Sequence
  Description of Artificial Sequence: Synthetic oligonucleotide
cucaagugcugguuuauca

SEQ ID NO: 2035941 - RNA, 19 nt, Artificial Sequence
  Description of Artificial Sequence: Synthetic oligonucleotide
guaaucugucuucgauggg

SEQ ID NO: 2035942 - RNA, 19 nt, Artificial Sequence
  Description of Artificial Sequence: Synthetic oligonucleotide
acaucucgauagcucguuc

SEQ ID NO: 2035943 - RNA, 19 nt, Artificial Sequence
  Description of Artificial Sequence: Synthetic oligonucleotide
ucaaggaacagaggggaau

SEQ ID NO: 2035944 - RNA, 19 nt, Artificial Sequence
  Description of Artificial Sequence: Synthetic oligonucleotide
agucuugauugccccugac

SEQ ID NO: 2035945 - RNA, 19 nt, Artificial Sequence
  Description of Artificial Sequence: Synthetic oligonucleotide
cucgucagguucaugccac

SEQ ID NO: 2035946 - RNA, 19 nt, Artificial Sequence
  Description of Artificial Sequence: Synthetic oligonucleotide
aaauuuacaguggcugcua

SEQ ID NO: 2035947 - RNA, 19 nt, Artificial Sequence
  Description of Artificial Sequence: Synthetic oligonucleotide
cacgucaggaaacuuccug

SEQ ID NO: 2035948 - RNA, 19 nt, Artificial Sequence
  Description of Artificial Sequence: Synthetic oligonucleotide
uuuugcguaagaugucauu

SEQ ID NO: 2035949 - RNA, 19 nt, Artificial Sequence
  Description of Artificial Sequence: Synthetic oligonucleotide
cugagaucucuaaaacguc

SEQ ID NO: 2035950 - RNA, 19 nt, Artificial Sequence
  Description of Artificial Sequence: Synthetic oligonucleotide
gacucagacaguuuccacu

SEQ ID NO: 2035951 - RNA, 19 nt, Artificial Sequence
  Description of Artificial Sequence: Synthetic oligonucleotide
uggguaugcaggucgugga

SEQ ID NO: 2035952 - RNA, 19 nt, Artificial Sequence
  Description of Artificial Sequence: Synthetic oligonucleotide
aucucgauagcucguucgu

SEQ ID NO: 2035953 - RNA, 19 nt, Artificial Sequence
  Description of Artificial Sequence: Synthetic oligonucleotide
cacuccaacucgucucucg

SEQ ID NO: 2035954 - RNA, 19 nt, Artificial Sequence
  Description of Artificial Sequence: Synthetic oligonucleotide
cauaucaagacaguucaaa

SEQ ID NO: 2035955 - RNA, 19 nt, Artificial Sequence
  Description of Artificial Sequence: Synthetic oligonucleotide
ucuuagucguccucagaau

SEQ ID NO: 2035956 - RNA, 19 nt, Artificial Sequence
  Description of Artificial Sequence: Synthetic oligonucleotide
cagguguaagaucacccac

SEQ ID NO: 2035957 - RNA, 19 nt, Artificial Sequence
  Description of Artificial Sequence: Synthetic oligonucleotide
aacucgucucucgucaggu

SEQ ID NO: 2035958 - RNA, 19 nt, Artificial Sequence
  Description of Artificial Sequence: Synthetic oligonucleotide
gauugccccugacucagac

SEQ ID NO: 2035959 - RNA, 19 nt, Artificial Sequence
  Description of Artificial Sequence: Synthetic oligonucleotide
aggggaaucccuuguuugu

SEQ ID NO: 2035960 - RNA, 19 nt, Artificial Sequence
  Description of Artificial Sequence: Synthetic oligonucleotide
ucauaucaagacaguucaa

SEQ ID NO: 2035961 - RNA, 19 nt, Artificial Sequence
  Description of Artificial Sequence: Synthetic oligonucleotide
cucucgucagguucaugcc

SEQ ID NO: 2035962 - RNA, 19 nt, Artificial Sequence
  Description of Artificial Sequence: Synthetic oligonucleotide
acccacaagcccucgccgg

SEQ ID NO: 2035963 - RNA, 19 nt, Artificial Sequence
  Description of Artificial Sequence: Synthetic oligonucleotide
uggcgaguccacucaagug

SEQ ID NO: 2035964 - RNA, 19 nt, Artificial Sequence
  Description of Artificial Sequence: Synthetic oligonucleotide
auacagguaggaaaacaca

SEQ ID NO: 2035965 - RNA, 19 nt, Artificial Sequence
  Description of Artificial Sequence: Synthetic oligonucleotide
gagaucucuaaaacgucuc

SEQ ID NO: 2035966 - RNA, 19 nt, Artificial Sequence
  Description of Artificial Sequence: Synthetic oligonucleotide
uucaaucacucggaccagc

SEQ ID NO: 2035967 - RNA, 19 nt, Artificial Sequence
  Description of Artificial Sequence: Synthetic oligonucleotide
agucauaucuucauauguu

SEQ ID NO: 2035968 - RNA, 19 nt, Artificial Sequence
  Description of Artificial Sequence: Synthetic oligonucleotide
ucccuuguuuguacaggug

SEQ ID NO: 2035969 - RNA, 19 nt, Artificial Sequence
  Description of Artificial Sequence: Synthetic oligonucleotide
accagaggaccaaugaacu

SEQ ID NO: 2035970 - RNA, 19 nt, Artificial Sequence
  Description of Artificial Sequence: Synthetic oligonucleotide
cccugagaucucuaaaacg

SEQ ID NO: 2035971 - RNA, 19 nt, Artificial Sequence
  Description of Artificial Sequence: Synthetic oligonucleotide
cucgucucucgucagguuc

SEQ ID NO: 2035972 - RNA, 19 nt, Artificial Sequence
  Description of Artificial Sequence: Synthetic oligonucleotide
aauuggguaugcaggucgu

SEQ ID NO: 2035973 - RNA, 19 nt, Artificial Sequence
  Description of Artificial Sequence: Synthetic oligonucleotide
aauccuucccugagaucuc

SEQ ID NO: 2035974 - RNA, 19 nt, Artificial Sequence
  Description of Artificial Sequence: Synthetic oligonucleotide
ugggcagauuccugucggg

SEQ ID NO: 2035975 - RNA, 19 nt, Artificial Sequence
  Description of Artificial Sequence: Synthetic oligonucleotide
accaaugaacugugccuug

SEQ ID NO: 2035976 - RNA, 19 nt, Artificial Sequence
  Description of Artificial Sequence: Synthetic oligonucleotide
ucgauagcucguucguccu

SEQ ID NO: 2035977 - RNA, 19 nt, Artificial Sequence
  Description of Artificial Sequence: Synthetic oligonucleotide
uggcugcuaucuuagucgu

SEQ ID NO: 2035978 - RNA, 19 nt, Artificial Sequence
  Description of Artificial Sequence: Synthetic oligonucleotide
guacagguguaagaucacc

SEQ ID NO: 2035979 - RNA, 19 nt, Artificial Sequence
  Description of Artificial Sequence: Synthetic oligonucleotide
cucguugaacucauccuca

SEQ ID NO: 2035980 - RNA, 19 nt, Artificial Sequence
  Description of Artificial Sequence: Synthetic oligonucleotide
ucgcacugaggacaguaau

SEQ ID NO: 2035981 - RNA, 19 nt, Artificial Sequence
  Description of Artificial Sequence: Synthetic oligonucleotide
gacaguaaucugucuucga

SEQ ID NO: 2035982 - RNA, 19 nt, Artificial Sequence
  Description of Artificial Sequence: Synthetic oligonucleotide
ugucgggguaauuggguau

SEQ ID NO: 2035983 - RNA, 19 nt, Artificial Sequence
  Description of Artificial Sequence: Synthetic oligonucleotide
ugacugcuggaggaguugc

SEQ ID NO: 2035984 - RNA, 19 nt, Artificial Sequence
  Description of Artificial Sequence: Synthetic oligonucleotide
uucuacacaguugcagguc

SEQ ID NO: 2035985 - RNA, 19 nt, Artificial Sequence
  Description of Artificial Sequence: Synthetic oligonucleotide
cauauguuuucaccacuga

SEQ ID NO: 2035986 - RNA, 19 nt, Artificial Sequence
  Description of Artificial Sequence: Synthetic oligonucleotide
uccagacaauaugucauau

SEQ ID NO: 2035987 - RNA, 19 nt, Artificial Sequence
  Description of Artificial Sequence: Synthetic oligonucleotide
ugcuaucuuagucguccuc

SEQ ID NO: 2035988 - RNA, 19 nt, Artificial Sequence
  Description of Artificial Sequence: Synthetic oligonucleotide
ggacaguaaucugucuucg

SEQ ID NO: 2035989 - RNA, 19 nt, Artificial Sequence
  Description of Artificial Sequence: Synthetic oligonucleotide
acucggugucugcauuggg

SEQ ID NO: 2035990 - RNA, 19 nt, Artificial Sequence
  Description of Artificial Sequence: Synthetic oligonucleotide
cauaaagcuuguuuaaauu

SEQ ID NO: 2035991 - RNA, 19 nt, Artificial Sequence
  Description of Artificial Sequence: Synthetic oligonucleotide
acugucccuucucauggga

SEQ ID NO: 2035992 - RNA, 19 nt, Artificial Sequence
  Description of Artificial Sequence: Synthetic oligonucleotide
agguguaagaucacccaca

SEQ ID NO: 2035993 - RNA, 19 nt, Artificial Sequence
  Description of Artificial Sequence: Synthetic oligonucleotide
caacucgucucucgucagg

SEQ ID NO: 2035994 - RNA, 19 nt, Artificial Sequence
  Description of Artificial Sequence: Synthetic oligonucleotide
cagagccucgcacugagga

SEQ ID NO: 2035995 - RNA, 19 nt, Artificial Sequence
  Description of Artificial Sequence: Synthetic oligonucleotide
agaggggaaucccuuguuu

SEQ ID NO: 2035996 - RNA, 19 nt, Artificial Sequence
  Description of Artificial Sequence: Synthetic oligonucleotide
caccacugacugcuggagg

SEQ ID NO: 2035997 - RNA, 19 nt, Artificial Sequence
  Description of Artificial Sequence: Synthetic oligonucleotide
ggcuuugguaacuucuuga

SEQ ID NO: 2035998 - RNA, 19 nt, Artificial Sequence
  Description of Artificial Sequence: Synthetic oligonucleotide
augucauaucaagacaguu

SEQ ID NO: 2035999 - RNA, 19 nt, Artificial Sequence
  Description of Artificial Sequence: Synthetic oligonucleotide
auccagacaauaugucaua

SEQ ID NO: 2036000 - RNA, 19 nt, Artificial Sequence
  Description of Artificial Sequence: Synthetic oligonucleotide
gguaauuggguaugcaggu

SEQ ID NO: 2036001 - RNA, 19 nt, Artificial Sequence
  Description of Artificial Sequence: Synthetic oligonucleotide
ccuucucaugggaacagag

SEQ ID NO: 2036002 - RNA, 19 nt, Artificial Sequence
  Description of Artificial Sequence: Synthetic oligonucleotide
cugguuuaucaaggaacag

SEQ ID NO: 2036003 - RNA, 19 nt, Artificial Sequence
  Description of Artificial Sequence: Synthetic oligonucleotide
ccuuucuacacaguugcag

SEQ ID NO: 2036004 - RNA, 19 nt, Artificial Sequence
  Description of Artificial Sequence: Synthetic oligonucleotide
cucagacaguuuccacucc

SEQ ID NO: 2036005 - RNA, 19 nt, Artificial Sequence
  Description of Artificial Sequence: Synthetic oligonucleotide
gaggacaguaaucugucuu

SEQ ID NO: 2036006 - RNA, 19 nt, Artificial Sequence
  Description of Artificial Sequence: Synthetic oligonucleotide
gucauaucuucauauguuu

SEQ ID NO: 2036007 - RNA, 19 nt, Artificial Sequence
  Description of Artificial Sequence: Synthetic oligonucleotide
cagguaggaaaacacauau

SEQ ID NO: 2036008 - RNA, 19 nt, Artificial Sequence
  Description of Artificial Sequence: Synthetic oligonucleotide
agacaauaugucauaucaa

SEQ ID NO: 2036009 - RNA, 19 nt, Artificial Sequence
  Description of Artificial Sequence: Synthetic oligonucleotide
auuuguucuucagcugagu

SEQ ID NO: 2036010 - RNA, 19 nt, Artificial Sequence
  Description of Artificial Sequence: Synthetic oligonucleotide
cauaauccuucccugagau

SEQ ID NO: 2036011 - RNA, 19 nt, Artificial Sequence
  Description of Artificial Sequence: Synthetic oligonucleotide
cacugaggacaguaaucug

SEQ ID NO: 2036012 - RNA, 19 nt, Artificial Sequence
  Description of Artificial Sequence: Synthetic oligonucleotide
ucguugaacucauccucau

SEQ ID NO: 2036013 - RNA, 19 nt, Artificial Sequence
  Description of Artificial Sequence: Synthetic oligonucleotide
ccugagaucucuaaaacgu

SEQ ID NO: 2036014 - RNA, 19 nt, Artificial Sequence
  Description of Artificial Sequence: Synthetic oligonucleotide
auugccccugacucagaca

SEQ ID NO: 2036015 - RNA, 19 nt, Artificial Sequence
  Description of Artificial Sequence: Synthetic oligonucleotide
aguccacucaagugcuggu

SEQ ID NO: 2036016 - RNA, 19 nt, Artificial Sequence
  Description of Artificial Sequence: Synthetic oligonucleotide
gcugaguugcuuuccacuc

SEQ ID NO: 2036017 - RNA, 19 nt, Artificial Sequence
  Description of Artificial Sequence: Synthetic oligonucleotide
aggaguugcugcuccuccu

SEQ ID NO: 2036018 - RNA, 19 nt, Artificial Sequence
  Description of Artificial Sequence: Synthetic oligonucleotide
ucacgucaggaaacuuccu

SEQ ID NO: 2036019 - RNA, 19 nt, Artificial Sequence
  Description of Artificial Sequence: Synthetic oligonucleotide
aacuuccuggcgaguccac

SEQ ID NO: 2036020 - RNA, 19 nt, Artificial Sequence
  Description of Artificial Sequence: Synthetic oligonucleotide
gcugguuuaucaaggaaca

SEQ ID NO: 2036021 - RNA, 19 nt, Artificial Sequence
  Description of Artificial Sequence: Synthetic oligonucleotide
gccaugauuauuucugaaa

SEQ ID NO: 2036022 - RNA, 19 nt, Artificial Sequence
  Description of Artificial Sequence: Synthetic oligonucleotide
cuuugcugccgguacaucu

SEQ ID NO: 2036023 - RNA, 19 nt, Artificial Sequence
  Description of Artificial Sequence: Synthetic oligonucleotide
cacugucccuucucauggg

SEQ ID NO: 2036024 - RNA, 19 nt, Artificial Sequence
  Description of Artificial Sequence: Synthetic oligonucleotide
gugccuugauaucaccauc

SEQ ID NO: 2036025 - RNA, 19 nt, Artificial Sequence
  Description of Artificial Sequence: Synthetic oligonucleotide
aacacauauuugacauaaa

SEQ ID NO: 2036026 - RNA, 19 nt, Artificial Sequence
  Description of Artificial Sequence: Synthetic oligonucleotide
gguguaagaucacccacaa

SEQ ID NO: 2036027 - RNA, 19 nt, Artificial Sequence
  Description of Artificial Sequence: Synthetic oligonucleotide
ccuugauaucaccauccag

SEQ ID NO: 2036028 - RNA, 19 nt, Artificial Sequence
  Description of Artificial Sequence: Synthetic oligonucleotide
aaacgucuccaaauuuguu

SEQ ID NO: 2036029 - RNA, 19 nt, Artificial Sequence
  Description of Artificial Sequence: Synthetic oligonucleotide
ccuucaggcuuucuuucgg

SEQ ID NO: 2036030 - RNA, 19 nt, Artificial Sequence
  Description of Artificial Sequence: Synthetic oligonucleotide
gucgggguaauuggguaug

SEQ ID NO: 2036031 - RNA, 19 nt, Artificial Sequence
  Description of Artificial Sequence: Synthetic oligonucleotide
guaauuggguaugcagguc

SEQ ID NO: 2036032 - RNA, 19 nt, Artificial Sequence
  Description of Artificial Sequence: Synthetic oligonucleotide
cagguucaugccacugaac

SEQ ID NO: 2036033 - RNA, 19 nt, Artificial Sequence
  Description of Artificial Sequence: Synthetic oligonucleotide
uacaucucgauagcucguu

SEQ ID NO: 2036034 - RNA, 19 nt, Artificial Sequence
  Description of Artificial Sequence: Synthetic oligonucleotide
cagccuuugcugccgguac

SEQ ID NO: 2036035 - RNA, 19 nt, Artificial Sequence
  Description of Artificial Sequence: Synthetic oligonucleotide
acgaauacugugggcagau

SEQ ID NO: 2036036 - RNA, 19 nt, Artificial Sequence
  Description of Artificial Sequence: Synthetic oligonucleotide
ucucgauagcucguucguc

SEQ ID NO: 2036037 - RNA, 19 nt, Artificial Sequence
  Description of Artificial Sequence: Synthetic oligonucleotide
cuuguuuguacagguguaa

SEQ ID NO: 2036038 - RNA, 19 nt, Artificial Sequence
  Description of Artificial Sequence: Synthetic oligonucleotide
uuacaguggcugcuaucuu

SEQ ID NO: 2036039 - RNA, 19 nt, Artificial Sequence
  Description of Artificial Sequence: Synthetic oligonucleotide
gaguugcugcuccuccuuc

SEQ ID NO: 2036040 - RNA, 19 nt, Artificial Sequence
  Description of Artificial Sequence: Synthetic oligonucleotide
aguuuccacuccaacucgu

SEQ ID NO: 2036041 - RNA, 19 nt, Artificial Sequence
  Description of Artificial Sequence: Synthetic oligonucleotide
ggguaugcaggucguggag

SEQ ID NO: 2036042 - RNA, 19 nt, Artificial Sequence
  Description of Artificial Sequence: Synthetic oligonucleotide
gggaaucccuuguuuguac

SEQ ID NO: 2036043 - RNA, 19 nt, Artificial Sequence
  Description of Artificial Sequence: Synthetic oligonucleotide
aggucguggagauggcuuu

SEQ ID NO: 2036044 - RNA, 19 nt, Artificial Sequence
  Description of Artificial Sequence: Synthetic oligonucleotide
ggaccaaugaacugugccu

SEQ ID NO: 2036045 - RNA, 19 nt, Artificial Sequence
  Description of Artificial Sequence: Synthetic oligonucleotide
cugaguugcuuuccacuca

SEQ ID NO: 2036046 - RNA, 19 nt, Artificial Sequence
  Description of Artificial Sequence: Synthetic oligonucleotide
ccacugaacaccagaggac

SEQ ID NO: 2036047 - RNA, 19 nt, Artificial Sequence
  Description of Artificial Sequence: Synthetic oligonucleotide
uaugcaggucguggagaug

SEQ ID NO: 2036048 - RNA, 19 nt, Artificial Sequence
  Description of Artificial Sequence: Synthetic oligonucleotide
ucgggguaauuggguaugc

SEQ ID NO: 2036049 - RNA, 19 nt, Artificial Sequence
  Description of Artificial Sequence: Synthetic oligonucleotide
cagaggaccaaugaacugu

SEQ ID NO: 2036050 - RNA, 19 nt, Artificial Sequence
  Description of Artificial Sequence: Synthetic oligonucleotide
uucguccuccucguugaac

SEQ ID NO: 2036051 - RNA, 19 nt, Artificial Sequence
  Description of Artificial Sequence: Synthetic oligonucleotide
acugaacaccagaggacca

SEQ ID NO: 2036052 - RNA, 19 nt, Artificial Sequence
  Description of Artificial Sequence: Synthetic oligonucleotide
uucuucagcugaguugcuu

SEQ ID NO: 2036053 - RNA, 19 nt, Artificial Sequence
  Description of Artificial Sequence: Synthetic oligonucleotide
cuccaacucgucucucguc

SEQ ID NO: 2036054 - RNA, 19 nt, Artificial Sequence
  Description of Artificial Sequence: Synthetic oligonucleotide
uuccacucggugucugcau

SEQ ID NO: 2036055 - RNA, 19 nt, Artificial Sequence
  Description of Artificial Sequence: Synthetic oligonucleotide
gucuugauugccccugacu

SEQ ID NO: 2036056 - RNA, 19 nt, Artificial Sequence
  Description of Artificial Sequence: Synthetic oligonucleotide
gggcagauuccugucgggg

SEQ ID NO: 2036057 - RNA, 19 nt, Artificial Sequence
  Description of Artificial Sequence: Synthetic oligonucleotide
cuaaaacgucuccaaauuu

SEQ ID NO: 2036058 - RNA, 19 nt, Artificial Sequence
  Description of Artificial Sequence: Synthetic oligonucleotide
gaggaccaaugaacugugc

SEQ ID NO: 2036059 - RNA, 19 nt, Artificial Sequence
  Description of Artificial Sequence: Synthetic oligonucleotide
gugcugguuuaucaaggaa

SEQ ID NO: 2036060 - RNA, 19 nt, Artificial Sequence
  Description of Artificial Sequence: Synthetic oligonucleotide
uccuggcgaguccacucaa

SEQ ID NO: 2036061 - RNA, 19 nt, Artificial Sequence
  Description of Artificial Sequence: Synthetic oligonucleotide
ugauugccccugacucaga

SEQ ID NO: 2036062 - RNA, 19 nt, Artificial Sequence
  Description of Artificial Sequence: Synthetic oligonucleotide
cucagaaucacugucccuu

SEQ ID NO: 2036063 - RNA, 19 nt, Artificial Sequence
  Description of Artificial Sequence: Synthetic oligonucleotide
ugguaacuucuugaacaua

SEQ ID NO: 2036064 - RNA, 19 nt, Artificial Sequence
  Description of Artificial Sequence: Synthetic oligonucleotide
ucgucagguucaugccacu

SEQ ID NO: 2036065 - RNA, 19 nt, Artificial Sequence
  Description of Artificial Sequence: Synthetic oligonucleotide
uccacucagccagccuuug

SEQ ID NO: 2036066 - RNA, 19 nt, Artificial Sequence
  Description of Artificial Sequence: Synthetic oligonucleotide
auagcucguucguccuccu

SEQ ID NO: 2036067 - RNA, 19 nt, Artificial Sequence
  Description of Artificial Sequence: Synthetic oligonucleotide
guaugcaggucguggagau

SEQ ID NO: 2036068 - RNA, 19 nt, Artificial Sequence
  Description of Artificial Sequence: Synthetic oligonucleotide
gaacagagccucgcacuga

SEQ ID NO: 2036069 - RNA, 19 nt, Artificial Sequence
  Description of Artificial Sequence: Synthetic oligonucleotide
gguaugcaggucguggaga

SEQ ID NO: 2036070 - RNA, 19 nt, Artificial Sequence
  Description of Artificial Sequence: Synthetic oligonucleotide
gucccuucucaugggaaca

SEQ ID NO: 2036071 - RNA, 19 nt, Artificial Sequence
  Description of Artificial Sequence: Synthetic oligonucleotide
gccgguacaucucgauagc

SEQ ID NO: 2036072 - RNA, 19 nt, Artificial Sequence
  Description of Artificial Sequence: Synthetic oligonucleotide
agguaggaaaacacauauu

SEQ ID NO: 2036073 - RNA, 19 nt, Artificial Sequence
  Description of Artificial Sequence: Synthetic oligonucleotide
cugucgggguaauugggua

SEQ ID NO: 2036074 - RNA, 19 nt, Artificial Sequence
  Description of Artificial Sequence: Synthetic oligonucleotide
gcacugaggacaguaaucu

SEQ ID NO: 2036075 - RNA, 19 nt, Artificial Sequence
  Description of Artificial Sequence: Synthetic oligonucleotide
cugucccuucucaugggaa

SEQ ID NO: 2036076 - RNA, 19 nt, Artificial Sequence
  Description of Artificial Sequence: Synthetic oligonucleotide
cuacacaguugcaggucaa

SEQ ID NO: 2036077 - RNA, 19 nt, Artificial Sequence
  Description of Artificial Sequence: Synthetic oligonucleotide
ccuccuuauugaaaaucca

SEQ ID NO: 2036078 - RNA, 19 nt, Artificial Sequence
  Description of Artificial Sequence: Synthetic oligonucleotide
gaguuccaaggaauuaaau

SEQ ID NO: 2036079 - RNA, 19 nt, Artificial Sequence
  Description of Artificial Sequence: Synthetic oligonucleotide
cugaacaccagaggaccaa

SEQ ID NO: 2036080 - RNA, 19 nt, Artificial Sequence
  Description of Artificial Sequence: Synthetic oligonucleotide
ugccccugacucagacagu

SEQ ID NO: 2036081 - RNA, 19 nt, Artificial Sequence
  Description of Artificial Sequence: Synthetic oligonucleotide
ccaggucagucuugauugc

SEQ ID NO: 2036082 - RNA, 19 nt, Artificial Sequence
  Description of Artificial Sequence: Synthetic oligonucleotide
ccagauacacgaauacugu

SEQ ID NO: 2036083 - RNA, 19 nt, Artificial Sequence
  Description of Artificial Sequence: Synthetic oligonucleotide
agccucgcacugaggacag

SEQ ID NO: 2036084 - RNA, 19 nt, Artificial Sequence
  Description of Artificial Sequence: Synthetic oligonucleotide
gcguaagaugucauuccac

SEQ ID NO: 2036085 - RNA, 19 nt, Artificial Sequence
  Description of Artificial Sequence: Synthetic oligonucleotide
aggaaacuuccuggcgagu

SEQ ID NO: 2036086 - RNA, 19 nt, Artificial Sequence
  Description of Artificial Sequence: Synthetic oligonucleotide
cguaagaugucauuccacu

SEQ ID NO: 2036087 - RNA, 19 nt, Artificial Sequence
  Description of Artificial Sequence: Synthetic oligonucleotide
cuggcgaguccacucaagu

SEQ ID NO: 2036088 - RNA, 19 nt, Artificial Sequence
  Description of Artificial Sequence: Synthetic oligonucleotide
cacgaauacugugggcaga

SEQ ID NO: 2036089 - RNA, 19 nt, Artificial Sequence
  Description of Artificial Sequence: Synthetic oligonucleotide
gcagauuccugucggggua

SEQ ID NO: 2036090 - RNA, 19 nt, Artificial Sequence
  Description of Artificial Sequence: Synthetic oligonucleotide
gucguggagauggcuuuga

SEQ ID NO: 2036091 - RNA, 19 nt, Artificial Sequence
  Description of Artificial Sequence: Synthetic oligonucleotide
ccacucggugucugcauug

SEQ ID NO: 2036092 - RNA, 19 nt, Artificial Sequence
  Description of Artificial Sequence: Synthetic oligonucleotide
gaacagaggggaaucccuu

SEQ ID NO: 2036093 - RNA, 19 nt, Artificial Sequence
  Description of Artificial Sequence: Synthetic oligonucleotide
cagucuugauugccccuga

SEQ ID NO: 2036094 - RNA, 19 nt, Artificial Sequence
  Description of Artificial Sequence: Synthetic oligonucleotide
ggcagauuccugucggggu

SEQ ID NO: 2036095 - RNA, 19 nt, Artificial Sequence
  Description of Artificial Sequence: Synthetic oligonucleotide
ccuggcgaguccacucaag

SEQ ID NO: 2036096 - RNA, 19 nt, Artificial Sequence
  Description of Artificial Sequence: Synthetic oligonucleotide
gcuuuccacucagccagcc

SEQ ID NO: 2036097 - RNA, 19 nt, Artificial Sequence
  Description of Artificial Sequence: Synthetic oligonucleotide
cccacaagcccucgccggc

SEQ ID NO: 2036098 - RNA, 19 nt, Artificial Sequence
  Description of Artificial Sequence: Synthetic oligonucleotide
cccuuguuuguacaggugu

SEQ ID NO: 2036099 - RNA, 19 nt, Artificial Sequence
  Description of Artificial Sequence: Synthetic oligonucleotide
caccauccagauacacgaa

SEQ ID NO: 2036100 - RNA, 19 nt, Artificial Sequence
  Description of Artificial Sequence: Synthetic oligonucleotide
cugccgguacaucucgaua

SEQ ID NO: 2036101 - RNA, 19 nt, Artificial Sequence
  Description of Artificial Sequence: Synthetic oligonucleotide
ggucguggagauggcuuug

SEQ ID NO: 2036102 - RNA, 19 nt, Artificial Sequence
  Description of Artificial Sequence: Synthetic oligonucleotide
caggucguggagauggcuu

SEQ ID NO: 2036103 - RNA, 19 nt, Artificial Sequence
  Description of Artificial Sequence: Synthetic oligonucleotide
guacaucucgauagcucgu

SEQ ID NO: 2036104 - RNA, 19 nt, Artificial Sequence
  Description of Artificial Sequence: Synthetic oligonucleotide
ggguccugcaucuugccuu

SEQ ID NO: 2036105 - RNA, 19 nt, Artificial Sequence
  Description of Artificial Sequence: Synthetic oligonucleotide
caaugaacugugccuugau

SEQ ID NO: 2036106 - RNA, 19 nt, Artificial Sequence
  Description of Artificial Sequence: Synthetic oligonucleotide
gcauugggguccugcaucu

SEQ ID NO: 2036107 - RNA, 19 nt, Artificial Sequence
  Description of Artificial Sequence: Synthetic oligonucleotide
agauuccugucgggguaau

SEQ ID NO: 2036108 - RNA, 19 nt, Artificial Sequence
  Description of Artificial Sequence: Synthetic oligonucleotide
agcccucgccggcuuuggu

SEQ ID NO: 2036109 - RNA, 19 nt, Artificial Sequence
  Description of Artificial Sequence: Synthetic oligonucleotide
gucucucgucagguucaug

SEQ ID NO: 2036110 - RNA, 19 nt, Artificial Sequence
  Description of Artificial Sequence: Synthetic oligonucleotide
ccacucagccagccuuugc

SEQ ID NO: 2036111 - RNA, 19 nt, Artificial Sequence
  Description of Artificial Sequence: Synthetic oligonucleotide
ccaaugaacugugccuuga

SEQ ID NO: 2036112 - RNA, 19 nt, Artificial Sequence
  Description of Artificial Sequence: Synthetic oligonucleotide
ccuucccugagaucucuaa

SEQ ID NO: 2036113 - RNA, 19 nt, Artificial Sequence
  Description of Artificial Sequence: Synthetic oligonucleotide
ucgccggcuuugguaacuu

SEQ ID NO: 2036114 - RNA, 19 nt, Artificial Sequence
  Description of Artificial Sequence: Synthetic oligonucleotide
guucguccuccucguugaa

SEQ ID NO: 2036115 - RNA, 19 nt, Artificial Sequence
  Description of Artificial Sequence: Synthetic oligonucleotide
gccggcuuugguaacuucu

SEQ ID NO: 2036116 - RNA, 19 nt, Artificial Sequence
  Description of Artificial Sequence: Synthetic oligonucleotide
cccucgccggcuuugguaa

SEQ ID NO: 2036117 - RNA, 19 nt, Artificial Sequence
  Description of Artificial Sequence: Synthetic oligonucleotide
cugcauugggguccugcau

SEQ ID NO: 2036118 - RNA, 19 nt, Artificial Sequence
  Description of Artificial Sequence: Synthetic oligonucleotide
ccugucgggguaauugggu

SEQ ID NO: 2036119 - RNA, 19 nt, Artificial Sequence
  Description of Artificial Sequence: Synthetic oligonucleotide
ugucugcauugggguccug

SEQ ID NO: 2036120 - RNA, 19 nt, Artificial Sequence
  Description of Artificial Sequence: Synthetic oligonucleotide
gcucguucguccuccucgu

SEQ ID NO: 2036121 - RNA, 19 nt, Artificial Sequence
  Description of Artificial Sequence: Synthetic oligonucleotide
cagaggggaaucccuuguu

SEQ ID NO: 2036122 - RNA, 19 nt, Artificial Sequence
  Description of Artificial Sequence: Synthetic oligonucleotide
gauuccugucgggguaauu

SEQ ID NO: 2036123 - RNA, 19 nt, Artificial Sequence
  Description of Artificial Sequence: Synthetic oligonucleotide
guccacucaagugcugguu

SEQ ID NO: 2036124 - RNA, 19 nt, Artificial Sequence
  Description of Artificial Sequence: Synthetic oligonucleotide
gcccucgccggcuuuggua

SEQ ID NO: 2036125 - RNA, 19 nt, Artificial Sequence
  Description of Artificial Sequence: Synthetic oligonucleotide
cgaguccacucaagugcug

SEQ ID NO: 2036126 - RNA, 19 nt, Artificial Sequence
  Description of Artificial Sequence: Synthetic oligonucleotide
ggcugcuaucuuagucguc

SEQ ID NO: 2036127 - RNA, 19 nt, Artificial Sequence
  Description of Artificial Sequence: Synthetic oligonucleotide
ccucgcacugaggacagua

SEQ ID NO: 2036128 - RNA, 19 nt, Artificial Sequence
  Description of Artificial Sequence: Synthetic oligonucleotide
cucgccggcuuugguaacu

SEQ ID NO: 2036129 - RNA, 19 nt, Artificial Sequence
  Description of Artificial Sequence: Synthetic oligonucleotide
ccuuugcugccgguacauc

SEQ ID NO: 2036130 - RNA, 19 nt, Artificial Sequence
  Description of Artificial Sequence: Synthetic oligonucleotide
ccucgccggcuuugguaac

SEQ ID NO: 2036131 - RNA, 19 nt, Artificial Sequence
  Description of Artificial Sequence: Synthetic oligonucleotide
ccuccucguugaacucauc

SEQ ID NO: 2036132 - RNA, 19 nt, Artificial Sequence
  Description of Artificial Sequence: Synthetic oligonucleotide
gccccugacucagacaguu

SEQ ID NO: 2036133 - RNA, 19 nt, Artificial Sequence
  Description of Artificial Sequence: Synthetic oligonucleotide
gcaggucguggagauggcu

SEQ ID NO: 2036134 - RNA, 19 nt, Artificial Sequence
  Description of Artificial Sequence: Synthetic oligonucleotide
gccuuugcugccgguacau

SEQ ID NO: 2036135 - RNA, 19 nt, Artificial Sequence
  Description of Artificial Sequence: Synthetic oligonucleotide
ccgguacaucucgauagcu

SEQ ID NO: 2036136 - RNA, 19 nt, Artificial Sequence
  Description of Artificial Sequence: Synthetic oligonucleotide
cgggguaauuggguaugca

SEQ ID NO: 2036137 - RNA, 19 nt, Artificial Sequence
  Description of Artificial Sequence: Synthetic oligonucleotide
cgccggcuuugguaacuuc

SEQ ID NO: 2036138 - RNA, 19 nt, Artificial Sequence
  Description of Artificial Sequence: Synthetic oligonucleotide
cucguucguccuccucguu

SEQ ID NO: 2036139 - RNA, 19 nt, Artificial Sequence
  Description of Artificial Sequence: Synthetic oligonucleotide
gccagccuuugcugccggu

SEQ ID NO: 2036140 - RNA, 19 nt, Artificial Sequence
  Description of Artificial Sequence: Synthetic oligonucleotide
cguugaacucauccucauu

SEQ ID NO: 2036141 - RNA, 19 nt, Artificial Sequence
  Description of Artificial Sequence: Synthetic oligonucleotide
ccccugacucagacaguuu

SEQ ID NO: 2036142 - RNA, 19 nt, Artificial Sequence
  Description of Artificial Sequence: Synthetic oligonucleotide
gccucgcacugaggacagu

SEQ ID NO: 2036143 - RNA, 19 nt, Artificial Sequence
  Description of Artificial Sequence: Synthetic oligonucleotide
aauuaguuaagcuaaaugg

SEQ ID NO: 2036144 - RNA, 19 nt, Artificial Sequence
  Description of Artificial Sequence: Synthetic oligonucleotide
acucgugugacauaaaugc

SEQ ID NO: 2036145 - RNA, 19 nt, Artificial Sequence
  Description of Artificial Sequence: Synthetic oligonucleotide
aauuggcuuagucacacgc

SEQ ID NO: 2036146 - RNA, 19 nt, Artificial Sequence
  Description of Artificial Sequence: Synthetic oligonucleotide
aaccaauuggcuuagucac

SEQ ID NO: 2036147 - RNA, 19 nt, Artificial Sequence
  Description of Artificial Sequence: Synthetic oligonucleotide
cuauacauaagguuggugg

SEQ ID NO: 2036148 - RNA, 19 nt, Artificial Sequence
  Description of Artificial Sequence: Synthetic oligonucleotide
aacucuuugcacuacggcg

SEQ ID NO: 2036149 - RNA, 19 nt, Artificial Sequence
  Description of Artificial Sequence: Synthetic oligonucleotide
aacuuaugaauuucaacuc

SEQ ID NO: 2036150 - RNA, 19 nt, Artificial Sequence
  Description of Artificial Sequence: Synthetic oligonucleotide
aaaucugacaagccgacag

SEQ ID NO: 2036151 - RNA, 19 nt, Artificial Sequence
  Description of Artificial Sequence: Synthetic oligonucleotide
ucaugugugaccaugguca

SEQ ID NO: 2036152 - RNA, 19 nt, Artificial Sequence
  Description of Artificial Sequence: Synthetic oligonucleotide
aauuucaacucuuugcacu

SEQ ID NO: 2036153 - RNA, 19 nt, Artificial Sequence
  Description of Artificial Sequence: Synthetic oligonucleotide
ugugaauuaguuaagcuaa

SEQ ID NO: 2036154 - RNA, 19 nt, Artificial Sequence
  Description of Artificial Sequence: Synthetic oligonucleotide
uuccauaguaaccaauugg

SEQ ID NO: 2036155 - RNA, 19 nt, Artificial Sequence
  Description of Artificial Sequence: Synthetic oligonucleotide
uccauaguaaccaauuggc

SEQ ID NO: 2036156 - RNA, 19 nt, Artificial Sequence
  Description of Artificial Sequence: Synthetic oligonucleotide
uauacauaagguugguggg

SEQ ID NO: 2036157 - RNA, 19 nt, Artificial Sequence
  Description of Artificial Sequence: Synthetic oligonucleotide
uuaagcuaaauggagaggc

SEQ ID NO: 2036158 - RNA, 19 nt, Artificial Sequence
  Description of Artificial Sequence: Synthetic oligonucleotide
gaauuaguuaagcuaaaug

SEQ ID NO: 2036159 - RNA, 19 nt, Artificial Sequence
  Description of Artificial Sequence: Synthetic oligonucleotide
gaaacauggcccuaccugg

SEQ ID NO: 2036160 - RNA, 19 nt, Artificial Sequence
  Description of Artificial Sequence: Synthetic oligonucleotide
aagcccuuauuuccaaucc

SEQ ID NO: 2036161 - RNA, 19 nt, Artificial Sequence
  Description of Artificial Sequence: Synthetic oligonucleotide
aguuaagcuaaauggagag

SEQ ID NO: 2036162 - RNA, 19 nt, Artificial Sequence
  Description of Artificial Sequence: Synthetic oligonucleotide
aaucugacaagccgacagc

SEQ ID NO: 2036163 - RNA, 19 nt, Artificial Sequence
  Description of Artificial Sequence: Synthetic oligonucleotide
acucaaaucugacaagccg

SEQ ID NO: 2036164 - RNA, 19 nt, Artificial Sequence
  Description of Artificial Sequence: Synthetic oligonucleotide
uguuuauugggcacaagug

SEQ ID NO: 2036165 - RNA, 19 nt, Artificial Sequence
  Description of Artificial Sequence: Synthetic oligonucleotide
aggagauacagacauagug

SEQ ID NO: 2036166 - RNA, 19 nt, Artificial Sequence
  Description of Artificial Sequence: Synthetic oligonucleotide
auguaggacauuucgacuc

SEQ ID NO: 2036167 - RNA, 19 nt, Artificial Sequence
  Description of Artificial Sequence: Synthetic oligonucleotide
acuggauacuacuccaagc

SEQ ID NO: 2036168 - RNA, 19 nt, Artificial Sequence
  Description of Artificial Sequence: Synthetic oligonucleotide
uuguuuauugggcacaagu

SEQ ID NO: 2036169 - RNA, 19 nt, Artificial Sequence
  Description of Artificial Sequence: Synthetic oligonucleotide
cauauuuggguccagcccc

SEQ ID NO: 2036170 - RNA, 19 nt, Artificial Sequence
  Description of Artificial Sequence: Synthetic oligonucleotide
guuuuaucuuccgagaagg

SEQ ID NO: 2036171 - RNA, 19 nt, Artificial Sequence
  Description of Artificial Sequence: Synthetic oligonucleotide
acacgcuacaaguugcugc

SEQ ID NO: 2036172 - RNA, 19 nt, Artificial Sequence
  Description of Artificial Sequence: Synthetic oligonucleotide
uuagucacacgcuacaagu

SEQ ID NO: 2036173 - RNA, 19 nt, Artificial Sequence
  Description of Artificial Sequence: Synthetic oligonucleotide
gagauacagacauagugug

SEQ ID NO: 2036174 - RNA, 19 nt, Artificial Sequence
  Description of Artificial Sequence: Synthetic oligonucleotide
cuuauuuccaauccucagc

SEQ ID NO: 2036175 - RNA, 19 nt, Artificial Sequence
  Description of Artificial Sequence: Synthetic oligonucleotide
acaaguguugagcaugggg

SEQ ID NO: 2036176 - RNA, 19 nt, Artificial Sequence
  Description of Artificial Sequence: Synthetic oligonucleotide
uucauccagagcaaauggg

SEQ ID NO: 2036177 - RNA, 19 nt, Artificial Sequence
  Description of Artificial Sequence: Synthetic oligonucleotide
uguguugucacuauacaua

SEQ ID NO: 2036178 - RNA, 19 nt, Artificial Sequence
  Description of Artificial Sequence: Synthetic oligonucleotide
caagagagaaagcuggucc

SEQ ID NO: 2036179 - RNA, 19 nt, Artificial Sequence
  Description of Artificial Sequence: Synthetic oligonucleotide
ucgugugacauaaaugccc

SEQ ID NO: 2036180 - RNA, 19 nt, Artificial Sequence
  Description of Artificial Sequence: Synthetic oligonucleotide
uuaucuuccgagaagggau

SEQ ID NO: 2036181 - RNA, 19 nt, Artificial Sequence
  Description of Artificial Sequence: Synthetic oligonucleotide
aguuguuaccccucagagc

SEQ ID NO: 2036182 - RNA, 19 nt, Artificial Sequence
  Description of Artificial Sequence: Synthetic oligonucleotide
ugggguagcaucauacugc

SEQ ID NO: 2036183 - RNA, 19 nt, Artificial Sequence
  Description of Artificial Sequence: Synthetic oligonucleotide
aggugugugaauuaguuaa

SEQ ID NO: 2036184 - RNA, 19 nt, Artificial Sequence
  Description of Artificial Sequence: Synthetic oligonucleotide
uaguuaagcuaaauggaga

SEQ ID NO: 2036185 - RNA, 19 nt, Artificial Sequence
  Description of Artificial Sequence: Synthetic oligonucleotide
acagacauaguguggaugu

SEQ ID NO: 2036186 - RNA, 19 nt, Artificial Sequence
  Description of Artificial Sequence: Synthetic oligonucleotide
uuuccauaguaaccaauug

SEQ ID NO: 2036187 - RNA, 19 nt, Artificial Sequence
  Description of Artificial Sequence: Synthetic oligonucleotide
gguagcaucauacugcccc

SEQ ID NO: 2036188 - RNA, 19 nt, Artificial Sequence
  Description of Artificial Sequence: Synthetic oligonucleotide
accuccaauacugaagccc

SEQ ID NO: 2036189 - RNA, 19 nt, Artificial Sequence
  Description of Artificial Sequence: Synthetic oligonucleotide
uucaacucuuugcacuacg

SEQ ID NO: 2036190 - RNA, 19 nt, Artificial Sequence
  Description of Artificial Sequence: Synthetic oligonucleotide
ugcacuacggcggugacag

SEQ ID NO: 2036191 - RNA, 19 nt, Artificial Sequence
  Description of Artificial Sequence: Synthetic oligonucleotide
cuugggaucaguuguuacc

SEQ ID NO: 2036192 - RNA, 19 nt, Artificial Sequence
  Description of Artificial Sequence: Synthetic oligonucleotide
ugugugaauuaguuaagcu

SEQ ID NO: 2036193 - RNA, 19 nt, Artificial Sequence
  Description of Artificial Sequence: Synthetic oligonucleotide
auuaguuaagcuaaaugga

SEQ ID NO: 2036194 - RNA, 19 nt, Artificial Sequence
  Description of Artificial Sequence: Synthetic oligonucleotide
auaguaaccaauuggcuua

SEQ ID NO: 2036195 - RNA, 19 nt, Artificial Sequence
  Description of Artificial Sequence: Synthetic oligonucleotide
uccgagaagggauucuggg

SEQ ID NO: 2036196 - RNA, 19 nt, Artificial Sequence
  Description of Artificial Sequence: Synthetic oligonucleotide
ugggcacaagucaagacug

SEQ ID NO: 2036197 - RNA, 19 nt, Artificial Sequence
  Description of Artificial Sequence: Synthetic oligonucleotide
ugugacauaaaugcccuug

SEQ ID NO: 2036198 - RNA, 19 nt, Artificial Sequence
  Description of Artificial Sequence: Synthetic oligonucleotide
ugccggguuaccaacaggc

SEQ ID NO: 2036199 - RNA, 19 nt, Artificial Sequence
  Description of Artificial Sequence: Synthetic oligonucleotide
gauacagacauagugugga

SEQ ID NO: 2036200 - RNA, 19 nt, Artificial Sequence
  Description of Artificial Sequence: Synthetic oligonucleotide
aguguggauguguugucac

SEQ ID NO: 2036201 - RNA, 19 nt, Artificial Sequence
  Description of Artificial Sequence: Synthetic oligonucleotide
uuauugggcacaaguguug

SEQ ID NO: 2036202 - RNA, 19 nt, Artificial Sequence
  Description of Artificial Sequence: Synthetic oligonucleotide
uuuaucuuccgagaaggga

SEQ ID NO: 2036203 - RNA, 19 nt, Artificial Sequence
  Description of Artificial Sequence: Synthetic oligonucleotide
ucaguuguuaccccucaga

SEQ ID NO: 2036204 - RNA, 19 nt, Artificial Sequence
  Description of Artificial Sequence: Synthetic oligonucleotide
ucaaaucugacaagccgac

SEQ ID NO: 2036205 - RNA, 19 nt, Artificial Sequence
  Description of Artificial Sequence: Synthetic oligonucleotide
ugugaccauggucaugucc

SEQ ID NO: 2036206 - RNA, 19 nt, Artificial Sequence
  Description of Artificial Sequence: Synthetic oligonucleotide
gaucccaccuccaauacug

SEQ ID NO: 2036207 - RNA, 19 nt, Artificial Sequence
  Description of Artificial Sequence: Synthetic oligonucleotide
ugagcaugggguagcauca

SEQ ID NO: 2036208 - RNA, 19 nt, Artificial Sequence
  Description of Artificial Sequence: Synthetic oligonucleotide
uuccaguauuguuuauugg

SEQ ID NO: 2036209 - RNA, 19 nt, Artificial Sequence
  Description of Artificial Sequence: Synthetic oligonucleotide
ugacugcuaagacagcaug

SEQ ID NO: 2036210 - RNA, 19 nt, Artificial Sequence
  Description of Artificial Sequence: Synthetic oligonucleotide
uaagcuaaauggagaggcc

SEQ ID NO: 2036211 - RNA, 19 nt, Artificial Sequence
  Description of Artificial Sequence: Synthetic oligonucleotide
uugucacuauacauaaggu

SEQ ID NO: 2036212 - RNA, 19 nt, Artificial Sequence
  Description of Artificial Sequence: Synthetic oligonucleotide
uacaaguugcugcuuccag

SEQ ID NO: 2036213 - RNA, 19 nt, Artificial Sequence
  Description of Artificial Sequence: Synthetic oligonucleotide
uguacggccuucugcagag

SEQ ID NO: 2036214 - RNA, 19 nt, Artificial Sequence
  Description of Artificial Sequence: Synthetic oligonucleotide
aagccgacagcgcccagcg

SEQ ID NO: 2036215 - RNA, 19 nt, Artificial Sequence
  Description of Artificial Sequence: Synthetic oligonucleotide
agucacacgcuacaaguug

SEQ ID NO: 2036216 - RNA, 19 nt, Artificial Sequence
  Description of Artificial Sequence: Synthetic oligonucleotide
gaaccuauggucacugcag

SEQ ID NO: 2036217 - RNA, 19 nt, Artificial Sequence
  Description of Artificial Sequence: Synthetic oligonucleotide
aaguguuuccugacugccc

SEQ ID NO: 2036218 - RNA, 19 nt, Artificial Sequence
  Description of Artificial Sequence: Synthetic oligonucleotide
agucaagacuggcugacug

SEQ ID NO: 2036219 - RNA, 19 nt, Artificial Sequence
  Description of Artificial Sequence: Synthetic oligonucleotide
uguaggacauuucgacuca

SEQ ID NO: 2036220 - RNA, 19 nt, Artificial Sequence
  Description of Artificial Sequence: Synthetic oligonucleotide
cugacaagccgacagcgcc

SEQ ID NO: 2036221 - RNA, 19 nt, Artificial Sequence
  Description of Artificial Sequence: Synthetic oligonucleotide
acucuuugcacuacggcgg

SEQ ID NO: 2036222 - RNA, 19 nt, Artificial Sequence
  Description of Artificial Sequence: Synthetic oligonucleotide
gauguguugucacuauaca

SEQ ID NO: 2036223 - RNA, 19 nt, Artificial Sequence
  Description of Artificial Sequence: Synthetic oligonucleotide
aagcuaaauggagaggcca

SEQ ID NO: 2036224 - RNA, 19 nt, Artificial Sequence
  Description of Artificial Sequence: Synthetic oligonucleotide
aagggucuuggucgauccc

SEQ ID NO: 2036225 - RNA, 19 nt, Artificial Sequence
  Description of Artificial Sequence: Synthetic oligonucleotide
gacuggauacuacuccaag

SEQ ID NO: 2036226 - RNA, 19 nt, Artificial Sequence
  Description of Artificial Sequence: Synthetic oligonucleotide
caguuguuaccccucagag

SEQ ID NO: 2036227 - RNA, 19 nt, Artificial Sequence
  Description of Artificial Sequence: Synthetic oligonucleotide
cucaaaucugacaagccga

SEQ ID NO: 2036228 - RNA, 19 nt, Artificial Sequence
  Description of Artificial Sequence: Synthetic oligonucleotide
uuucgacucaaaucugaca

SEQ ID NO: 2036229 - RNA, 19 nt, Artificial Sequence
  Description of Artificial Sequence: Synthetic oligonucleotide
cauccaagagagaaagcug

SEQ ID NO: 2036230 - RNA, 19 nt, Artificial Sequence
  Description of Artificial Sequence: Synthetic oligonucleotide
uaaauggagaggccagcac

SEQ ID NO: 2036231 - RNA, 19 nt, Artificial Sequence
  Description of Artificial Sequence: Synthetic oligonucleotide
guuaagcuaaauggagagg

SEQ ID NO: 2036232 - RNA, 19 nt, Artificial Sequence
  Description of Artificial Sequence: Synthetic oligonucleotide
auuucgacucaaaucugac

SEQ ID NO: 2036233 - RNA, 19 nt, Artificial Sequence
  Description of Artificial Sequence: Synthetic oligonucleotide
ggauguaggacauuucgac

SEQ ID NO: 2036234 - RNA, 19 nt, Artificial Sequence
  Description of Artificial Sequence: Synthetic oligonucleotide
agcauggacugcuguacgg

SEQ ID NO: 2036235 - RNA, 19 nt, Artificial Sequence
  Description of Artificial Sequence: Synthetic oligonucleotide
uggaccuugggaucaguug

SEQ ID NO: 2036236 - RNA, 19 nt, Artificial Sequence
  Description of Artificial Sequence: Synthetic oligonucleotide
gugugaauuaguuaagcua

SEQ ID NO: 2036237 - RNA, 19 nt, Artificial Sequence
  Description of Artificial Sequence: Synthetic oligonucleotide
gaaggacagggccaagccc

SEQ ID NO: 2036238 - RNA, 19 nt, Artificial Sequence
  Description of Artificial Sequence: Synthetic oligonucleotide
auacucgugugacauaaau

SEQ ID NO: 2036239 - RNA, 19 nt, Artificial Sequence
  Description of Artificial Sequence: Synthetic oligonucleotide
cucgugugacauaaaugcc

SEQ ID NO: 2036240 - RNA, 19 nt, Artificial Sequence
  Description of Artificial Sequence: Synthetic oligonucleotide
guuaccaacaggcgcacca

SEQ ID NO: 2036241 - RNA, 19 nt, Artificial Sequence
  Description of Artificial Sequence: Synthetic oligonucleotide
ucgacucaaaucugacaag

SEQ ID NO: 2036242 - RNA, 19 nt, Artificial Sequence
  Description of Artificial Sequence: Synthetic oligonucleotide
ucugacaagccgacagcgc

SEQ ID NO: 2036243 - RNA, 19 nt, Artificial Sequence
  Description of Artificial Sequence: Synthetic oligonucleotide
accuauggucacugcagac

SEQ ID NO: 2036244 - RNA, 19 nt, Artificial Sequence
  Description of Artificial Sequence: Synthetic oligonucleotide
auguguugucacuauacau

SEQ ID NO: 2036245 - RNA, 19 nt, Artificial Sequence
  Description of Artificial Sequence: Synthetic oligonucleotide
uacauaagguuggugggca

SEQ ID NO: 2036246 - RNA, 19 nt, Artificial Sequence
  Description of Artificial Sequence: Synthetic oligonucleotide
ugggacccagcacacagca

SEQ ID NO: 2036247 - RNA, 19 nt, Artificial Sequence
  Description of Artificial Sequence: Synthetic oligonucleotide
aggacauuucgacucaaau

SEQ ID NO: 2036248 - RNA, 19 nt, Artificial Sequence
  Description of Artificial Sequence: Synthetic oligonucleotide
uuggcuuagucacacgcua

SEQ ID NO: 2036249 - RNA, 19 nt, Artificial Sequence
  Description of Artificial Sequence: Synthetic oligonucleotide
ucucuggcauauuuggguc

SEQ ID NO: 2036250 - RNA, 19 nt, Artificial Sequence
  Description of Artificial Sequence: Synthetic oligonucleotide
uugacgcaacuuaugaauu

SEQ ID NO: 2036251 - RNA, 19 nt, Artificial Sequence
  Description of Artificial Sequence: Synthetic oligonucleotide
gagcaaauggggaaacaug

SEQ ID NO: 2036252 - RNA, 19 nt, Artificial Sequence
  Description of Artificial Sequence: Synthetic oligonucleotide
ggauuaaguucucaccuug

SEQ ID NO: 2036253 - RNA, 19 nt, Artificial Sequence
  Description of Artificial Sequence: Synthetic oligonucleotide
ugaauuaguuaagcuaaau

SEQ ID NO: 2036254 - RNA, 19 nt, Artificial Sequence
  Description of Artificial Sequence: Synthetic oligonucleotide
agauacagacauagugugg

SEQ ID NO: 2036255 - RNA, 19 nt, Artificial Sequence
  Description of Artificial Sequence: Synthetic oligonucleotide
ccaguauuguuuauugggc

SEQ ID NO: 2036256 - RNA, 19 nt, Artificial Sequence
  Description of Artificial Sequence: Synthetic oligonucleotide
ugacaagccgacagcgccc

SEQ ID NO: 2036257 - RNA, 19 nt, Artificial Sequence
  Description of Artificial Sequence: Synthetic oligonucleotide
agacugccggguuaccaac

SEQ ID NO: 2036258 - RNA, 19 nt, Artificial Sequence
  Description of Artificial Sequence: Synthetic oligonucleotide
cauggacugcuguacggcc

SEQ ID NO: 2036259 - RNA, 19 nt, Artificial Sequence
  Description of Artificial Sequence: Synthetic oligonucleotide
caagcccuuauuuccaauc

SEQ ID NO: 2036260 - RNA, 19 nt, Artificial Sequence
  Description of Artificial Sequence: Synthetic oligonucleotide
aaguucucaccuugacgca

SEQ ID NO: 2036261 - RNA, 19 nt, Artificial Sequence
  Description of Artificial Sequence: Synthetic oligonucleotide
acauaagguuggugggcac

SEQ ID NO: 2036262 - RNA, 19 nt, Artificial Sequence
  Description of Artificial Sequence: Synthetic oligonucleotide
uuggugggcacaagucaag

SEQ ID NO: 2036263 - RNA, 19 nt, Artificial Sequence
  Description of Artificial Sequence: Synthetic oligonucleotide
gacucaaaucugacaagcc

SEQ ID NO: 2036264 - RNA, 19 nt, Artificial Sequence
  Description of Artificial Sequence: Synthetic oligonucleotide
ugccccauuuccauaguaa

SEQ ID NO: 2036265 - RNA, 19 nt, Artificial Sequence
  Description of Artificial Sequence: Synthetic oligonucleotide
acugcuaagacagcaugga

SEQ ID NO: 2036266 - RNA, 19 nt, Artificial Sequence
  Description of Artificial Sequence: Synthetic oligonucleotide
aacauggcccuaccuggca

SEQ ID NO: 2036267 - RNA, 19 nt, Artificial Sequence
  Description of Artificial Sequence: Synthetic oligonucleotide
cuuggucgaucccaccucc

SEQ ID NO: 2036268 - RNA, 19 nt, Artificial Sequence
  Description of Artificial Sequence: Synthetic oligonucleotide
auuuccauaguaaccaauu

SEQ ID NO: 2036269 - RNA, 19 nt, Artificial Sequence
  Description of Artificial Sequence: Synthetic oligonucleotide
ucaggccgaaccuaugguc

SEQ ID NO: 2036270 - RNA, 19 nt, Artificial Sequence
  Description of Artificial Sequence: Synthetic oligonucleotide
acccauuagggaaaugaag

SEQ ID NO: 2036271 - RNA, 19 nt, Artificial Sequence
  Description of Artificial Sequence: Synthetic oligonucleotide
agguggccuucauacaguc

SEQ ID NO: 2036272 - RNA, 19 nt, Artificial Sequence
  Description of Artificial Sequence: Synthetic oligonucleotide
agagcaaauggggaaacau

SEQ ID NO: 2036273 - RNA, 19 nt, Artificial Sequence
  Description of Artificial Sequence: Synthetic oligonucleotide
caguauuguuuauugggca

SEQ ID NO: 2036274 - RNA, 19 nt, Artificial Sequence
  Description of Artificial Sequence: Synthetic oligonucleotide
caucauacugccccauuuc

SEQ ID NO: 2036275 - RNA, 19 nt, Artificial Sequence
  Description of Artificial Sequence: Synthetic oligonucleotide
acauaguguggauguguug

SEQ ID NO: 2036276 - RNA, 19 nt, Artificial Sequence
  Description of Artificial Sequence: Synthetic oligonucleotide
gauguaggacauuucgacu

SEQ ID NO: 2036277 - RNA, 19 nt, Artificial Sequence
  Description of Artificial Sequence: Synthetic oligonucleotide
cucuggcauauuugggucc

SEQ ID NO: 2036278 - RNA, 19 nt, Artificial Sequence
  Description of Artificial Sequence: Synthetic oligonucleotide
cuugacgcaacuuaugaau

SEQ ID NO: 2036279 - RNA, 19 nt, Artificial Sequence
  Description of Artificial Sequence: Synthetic oligonucleotide
acuauacauaagguuggug

SEQ ID NO: 2036280 - RNA, 19 nt, Artificial Sequence
  Description of Artificial Sequence: Synthetic oligonucleotide
ucuuggucgaucccaccuc

SEQ ID NO: 2036281 - RNA, 19 nt, Artificial Sequence
  Description of Artificial Sequence: Synthetic oligonucleotide
gugugugaauuaguuaagc

SEQ ID NO: 2036282 - RNA, 19 nt, Artificial Sequence
  Description of Artificial Sequence: Synthetic oligonucleotide
acugcagacuggauacuac

SEQ ID NO: 2036283 - RNA, 19 nt, Artificial Sequence
  Description of Artificial Sequence: Synthetic oligonucleotide
ugaagguagugggagccug

SEQ ID NO: 2036284 - RNA, 19 nt, Artificial Sequence
  Description of Artificial Sequence: Synthetic oligonucleotide
uauuguuuauugggcacaa

SEQ ID NO: 2036285 - RNA, 19 nt, Artificial Sequence
  Description of Artificial Sequence: Synthetic oligonucleotide
gcauauuuggguccagccc

SEQ ID NO: 2036286 - RNA, 19 nt, Artificial Sequence
  Description of Artificial Sequence: Synthetic oligonucleotide
uccaagcuuuggcagcucu

SEQ ID NO: 2036287 - RNA, 19 nt, Artificial Sequence
  Description of Artificial Sequence: Synthetic oligonucleotide
gugggucucaggccgaacc

SEQ ID NO: 2036288 - RNA, 19 nt, Artificial Sequence
  Description of Artificial Sequence: Synthetic oligonucleotide
uggcccgggauguaggaca

SEQ ID NO: 2036289 - RNA, 19 nt, Artificial Sequence
  Description of Artificial Sequence: Synthetic oligonucleotide
gacgcaacuuaugaauuuc

SEQ ID NO: 2036290 - RNA, 19 nt, Artificial Sequence
  Description of Artificial Sequence: Synthetic oligonucleotide
agacauaguguggaugugu

SEQ ID NO: 2036291 - RNA, 19 nt, Artificial Sequence
  Description of Artificial Sequence: Synthetic oligonucleotide
uacuacuccaagcccuuau

SEQ ID NO: 2036292 - RNA, 19 nt, Artificial Sequence
  Description of Artificial Sequence: Synthetic oligonucleotide
ucacacgcuacaaguugcu

SEQ ID NO: 2036293 - RNA, 19 nt, Artificial Sequence
  Description of Artificial Sequence: Synthetic oligonucleotide
aucaguuguuaccccucag

SEQ ID NO: 2036294 - RNA, 19 nt, Artificial Sequence
  Description of Artificial Sequence: Synthetic oligonucleotide
acugccggguuaccaacag

SEQ ID NO: 2036295 - RNA, 19 nt, Artificial Sequence
  Description of Artificial Sequence: Synthetic oligonucleotide
gucaugugugaccaugguc

SEQ ID NO: 2036296 - RNA, 19 nt, Artificial Sequence
  Description of Artificial Sequence: Synthetic oligonucleotide
aaguugcugcuuccaggug

SEQ ID NO: 2036297 - RNA, 19 nt, Artificial Sequence
  Description of Artificial Sequence: Synthetic oligonucleotide
cauaguaaccaauuggcuu

SEQ ID NO: 2036298 - RNA, 19 nt, Artificial Sequence
  Description of Artificial Sequence: Synthetic oligonucleotide
uaguaaccaauuggcuuag

SEQ ID NO: 2036299 - RNA, 19 nt, Artificial Sequence
  Description of Artificial Sequence: Synthetic oligonucleotide
ugacgcaacuuaugaauuu

SEQ ID NO: 2036300 - RNA, 19 nt, Artificial Sequence
  Description of Artificial Sequence: Synthetic oligonucleotide
aggccgaaccuauggucac

SEQ ID NO: 2036301 - RNA, 19 nt, Artificial Sequence
  Description of Artificial Sequence: Synthetic oligonucleotide
caagucaagacuggcugac

SEQ ID NO: 2036302 - RNA, 19 nt, Artificial Sequence
  Description of Artificial Sequence: Synthetic oligonucleotide
ucgaucccaccuccaauac

SEQ ID NO: 2036303 - RNA, 19 nt, Artificial Sequence
  Description of Artificial Sequence: Synthetic oligonucleotide
uggcuuagucacacgcuac

SEQ ID NO: 2036304 - RNA, 19 nt, Artificial Sequence
  Description of Artificial Sequence: Synthetic oligonucleotide
ccaccuccaauacugaagc

SEQ ID NO: 2036305 - RNA, 19 nt, Artificial Sequence
  Description of Artificial Sequence: Synthetic oligonucleotide
ugggucucaggccgaaccu

SEQ ID NO: 2036306 - RNA, 19 nt, Artificial Sequence
  Description of Artificial Sequence: Synthetic oligonucleotide
agcccuuauuuccaauccu

SEQ ID NO: 2036307 - RNA, 19 nt, Artificial Sequence
  Description of Artificial Sequence: Synthetic oligonucleotide
gucacacgcuacaaguugc

SEQ ID NO: 2036308 - RNA, 19 nt, Artificial Sequence
  Description of Artificial Sequence: Synthetic oligonucleotide
caggauuaaguucucaccu

SEQ ID NO: 2036309 - RNA, 19 nt, Artificial Sequence
  Description of Artificial Sequence: Synthetic oligonucleotide
aggauuaaguucucaccuu

SEQ ID NO: 2036310 - RNA, 19 nt, Artificial Sequence
  Description of Artificial Sequence: Synthetic oligonucleotide
aaugcccuugucuguuuua

SEQ ID NO: 2036311 - RNA, 19 nt, Artificial Sequence
  Description of Artificial Sequence: Synthetic oligonucleotide
aggccagcacccauuaggg

SEQ ID NO: 2036312 - RNA, 19 nt, Artificial Sequence
  Description of Artificial Sequence: Synthetic oligonucleotide
guauuguuuauugggcaca

SEQ ID NO: 2036313 - RNA, 19 nt, Artificial Sequence
  Description of Artificial Sequence: Synthetic oligonucleotide
cuggcugacugcuaagaca

SEQ ID NO: 2036314 - RNA, 19 nt, Artificial Sequence
  Description of Artificial Sequence: Synthetic oligonucleotide
uagucacacgcuacaaguu

SEQ ID NO: 2036315 - RNA, 19 nt, Artificial Sequence
  Description of Artificial Sequence: Synthetic oligonucleotide
gauucugggaagggucuug

SEQ ID NO: 2036316 - RNA, 19 nt, Artificial Sequence
  Description of Artificial Sequence: Synthetic oligonucleotide
caauuggcuuagucacacg

SEQ ID NO: 2036317 - RNA, 19 nt, Artificial Sequence
  Description of Artificial Sequence: Synthetic oligonucleotide
uaguguggauguguuguca

SEQ ID NO: 2036318 - RNA, 19 nt, Artificial Sequence
  Description of Artificial Sequence: Synthetic oligonucleotide
auaaaugcccuugucuguu

SEQ ID NO: 2036319 - RNA, 19 nt, Artificial Sequence
  Description of Artificial Sequence: Synthetic oligonucleotide
ucccucagauacucgugug

SEQ ID NO: 2036320 - RNA, 19 nt, Artificial Sequence
  Description of Artificial Sequence: Synthetic oligonucleotide
cucaccuugacgcaacuua

SEQ ID NO: 2036321 - RNA, 19 nt, Artificial Sequence
  Description of Artificial Sequence: Synthetic oligonucleotide
ggauguguugucacuauac

SEQ ID NO: 2036322 - RNA, 19 nt, Artificial Sequence
  Description of Artificial Sequence: Synthetic oligonucleotide
uaggacauuucgacucaaa

SEQ ID NO: 2036323 - RNA, 19 nt, Artificial Sequence
  Description of Artificial Sequence: Synthetic oligonucleotide
cagcauggacugcuguacg

SEQ ID NO: 2036324 - RNA, 19 nt, Artificial Sequence
  Description of Artificial Sequence: Synthetic oligonucleotide
uggauguguugucacuaua

SEQ ID NO: 2036325 - RNA, 19 nt, Artificial Sequence
  Description of Artificial Sequence: Synthetic oligonucleotide
gggguagcaucauacugcc

SEQ ID NO: 2036326 - RNA, 19 nt, Artificial Sequence
  Description of Artificial Sequence: Synthetic oligonucleotide
uggucccauggccucagac

SEQ ID NO: 2036327 - RNA, 19 nt, Artificial Sequence
  Description of Artificial Sequence: Synthetic oligonucleotide
uuugcacuacggcggugac

SEQ ID NO: 2036328 - RNA, 19 nt, Artificial Sequence
  Description of Artificial Sequence: Synthetic oligonucleotide
ucauacagucucuggcaua

SEQ ID NO: 2036329 - RNA, 19 nt, Artificial Sequence
  Description of Artificial Sequence: Synthetic oligonucleotide
gucucuggcauauuugggu

SEQ ID NO: 2036330 - RNA, 19 nt, Artificial Sequence
  Description of Artificial Sequence: Synthetic oligonucleotide
cuuccgagaagggauucug

SEQ ID NO: 2036331 - RNA, 19 nt, Artificial Sequence
  Description of Artificial Sequence: Synthetic oligonucleotide
ggcacaaguguugagcaug

SEQ ID NO: 2036332 - RNA, 19 nt, Artificial Sequence
  Description of Artificial Sequence: Synthetic oligonucleotide
auuggcuuagucacacgcu

SEQ ID NO: 2036333 - RNA, 19 nt, Artificial Sequence
  Description of Artificial Sequence: Synthetic oligonucleotide
ccaauccucagcauccaag

SEQ ID NO: 2036334 - RNA, 19 nt, Artificial Sequence
  Description of Artificial Sequence: Synthetic oligonucleotide
gagacugccggguuaccaa

SEQ ID NO: 2036335 - RNA, 19 nt, Artificial Sequence
  Description of Artificial Sequence: Synthetic oligonucleotide
caggccgaaccuaugguca

SEQ ID NO: 2036336 - RNA, 19 nt, Artificial Sequence
  Description of Artificial Sequence: Synthetic oligonucleotide
gaagguagugggagccugc

SEQ ID NO: 2036337 - RNA, 19 nt, Artificial Sequence
  Description of Artificial Sequence: Synthetic oligonucleotide
uauuuccaauccucagcau

SEQ ID NO: 2036338 - RNA, 19 nt, Artificial Sequence
  Description of Artificial Sequence: Synthetic oligonucleotide
acuacuccaagcccuuauu

SEQ ID NO: 2036339 - RNA, 19 nt, Artificial Sequence
  Description of Artificial Sequence: Synthetic oligonucleotide
gacaggcuggcccgggaug

SEQ ID NO: 2036340 - RNA, 19 nt, Artificial Sequence
  Description of Artificial Sequence: Synthetic oligonucleotide
cuaaauggagaggccagca

SEQ ID NO: 2036341 - RNA, 19 nt, Artificial Sequence
  Description of Artificial Sequence: Synthetic oligonucleotide
uuaccaacaggcgcaccac

SEQ ID NO: 2036342 - RNA, 19 nt, Artificial Sequence
  Description of Artificial Sequence: Synthetic oligonucleotide
ugucccagccguucaccug

SEQ ID NO: 2036343 - RNA, 19 nt, Artificial Sequence
  Description of Artificial Sequence: Synthetic oligonucleotide
auuguuuauugggcacaag

SEQ ID NO: 2036344 - RNA, 19 nt, Artificial Sequence
  Description of Artificial Sequence: Synthetic oligonucleotide
caccuugacgcaacuuaug

SEQ ID NO: 2036345 - RNA, 19 nt, Artificial Sequence
  Description of Artificial Sequence: Synthetic oligonucleotide
cgggauguaggacauuucg

SEQ ID NO: 2036346 - RNA, 19 nt, Artificial Sequence
  Description of Artificial Sequence: Synthetic oligonucleotide
gcuacaaguugcugcuucc

SEQ ID NO: 2036347 - RNA, 19 nt, Artificial Sequence
  Description of Artificial Sequence: Synthetic oligonucleotide
ggagauacagacauagugu

SEQ ID NO: 2036348 - RNA, 19 nt, Artificial Sequence
  Description of Artificial Sequence: Synthetic oligonucleotide
uggucgaucccaccuccaa

SEQ ID NO: 2036349 - RNA, 19 nt, Artificial Sequence
  Description of Artificial Sequence: Synthetic oligonucleotide
uccaauccucagcauccaa

SEQ ID NO: 2036350 - RNA, 19 nt, Artificial Sequence
  Description of Artificial Sequence: Synthetic oligonucleotide
auacugaagcccaggauua

SEQ ID NO: 2036351 - RNA, 19 nt, Artificial Sequence
  Description of Artificial Sequence: Synthetic oligonucleotide
uggggaaacauggcccuac

SEQ ID NO: 2036352 - RNA, 19 nt, Artificial Sequence
  Description of Artificial Sequence: Synthetic oligonucleotide
ggugugugaauuaguuaag

SEQ ID NO: 2036353 - RNA, 19 nt, Artificial Sequence
  Description of Artificial Sequence: Synthetic oligonucleotide
cauuagggaaaugaaggua

SEQ ID NO: 2036354 - RNA, 19 nt, Artificial Sequence
  Description of Artificial Sequence: Synthetic oligonucleotide
gucgaucccaccuccaaua

SEQ ID NO: 2036355 - RNA, 19 nt, Artificial Sequence
  Description of Artificial Sequence: Synthetic oligonucleotide
gacagggccaagcccuuca

SEQ ID NO: 2036356 - RNA, 19 nt, Artificial Sequence
  Description of Artificial Sequence: Synthetic oligonucleotide
aagucaagacuggcugacu

SEQ ID NO: 2036357 - RNA, 19 nt, Artificial Sequence
  Description of Artificial Sequence: Synthetic oligonucleotide
auaagguuggugggcacaa

SEQ ID NO: 2036358 - RNA, 19 nt, Artificial Sequence
  Description of Artificial Sequence: Synthetic oligonucleotide
uucucaccuugacgcaacu

SEQ ID NO: 2036359 - RNA, 19 nt, Artificial Sequence
  Description of Artificial Sequence: Synthetic oligonucleotide
uuggucgaucccaccucca

SEQ ID NO: 2036360 - RNA, 19 nt, Artificial Sequence
  Description of Artificial Sequence: Synthetic oligonucleotide
caagcuuuggcagcucuca

SEQ ID NO: 2036361 - RNA, 19 nt, Artificial Sequence
  Description of Artificial Sequence: Synthetic oligonucleotide
uggugggcacaagucaaga

SEQ ID NO: 2036362 - RNA, 19 nt, Artificial Sequence
  Description of Artificial Sequence: Synthetic oligonucleotide
ccuaccuggcauuuccaag

SEQ ID NO: 2036363 - RNA, 19 nt, Artificial Sequence
  Description of Artificial Sequence: Synthetic oligonucleotide
guucaccugcaugaucuug

SEQ ID NO: 2036364 - RNA, 19 nt, Artificial Sequence
  Description of Artificial Sequence: Synthetic oligonucleotide
caaucugcagcccagcaau

SEQ ID NO: 2036365 - RNA, 19 nt, Artificial Sequence
  Description of Artificial Sequence: Synthetic oligonucleotide
uggacugcuguacggccuu

SEQ ID NO: 2036366 - RNA, 19 nt, Artificial Sequence
  Description of Artificial Sequence: Synthetic oligonucleotide
gcacccauuagggaaauga

SEQ ID NO: 2036367 - RNA, 19 nt, Artificial Sequence
  Description of Artificial Sequence: Synthetic oligonucleotide
ggcccuaccuggcauuucc

SEQ ID NO: 2036368 - RNA, 19 nt, Artificial Sequence
  Description of Artificial Sequence: Synthetic oligonucleotide
gccccauuuccauaguaac

SEQ ID NO: 2036369 - RNA, 19 nt, Artificial Sequence
  Description of Artificial Sequence: Synthetic oligonucleotide
aguucucaccuugacgcaa

SEQ ID NO: 2036370 - RNA, 19 nt, Artificial Sequence
  Description of Artificial Sequence: Synthetic oligonucleotide
gcacaaguguugagcaugg

SEQ ID NO: 2036371 - RNA, 19 nt, Artificial Sequence
  Description of Artificial Sequence: Synthetic oligonucleotide
gcauccaagagagaaagcu

SEQ ID NO: 2036372 - RNA, 19 nt, Artificial Sequence
  Description of Artificial Sequence: Synthetic oligonucleotide
acgcaacuuaugaauuuca

SEQ ID NO: 2036373 - RNA, 19 nt, Artificial Sequence
  Description of Artificial Sequence: Synthetic oligonucleotide
ccggguuaccaacaggcgc

SEQ ID NO: 2036374 - RNA, 19 nt, Artificial Sequence
  Description of Artificial Sequence: Synthetic oligonucleotide
caagccgacagcgcccagc

SEQ ID NO: 2036375 - RNA, 19 nt, Artificial Sequence
  Description of Artificial Sequence: Synthetic oligonucleotide
ccuucauccagagcaaaug

SEQ ID NO: 2036376 - RNA, 19 nt, Artificial Sequence
  Description of Artificial Sequence: Synthetic oligonucleotide
aagcauggagagaggcacu

SEQ ID NO: 2036377 - RNA, 19 nt, Artificial Sequence
  Description of Artificial Sequence: Synthetic oligonucleotide
guguugagcaugggguagc

SEQ ID NO: 2036378 - RNA, 19 nt, Artificial Sequence
  Description of Artificial Sequence: Synthetic oligonucleotide
gcaugggguagcaucauac

SEQ ID NO: 2036379 - RNA, 19 nt, Artificial Sequence
  Description of Artificial Sequence: Synthetic oligonucleotide
acauggcccuaccuggcau

SEQ ID NO: 2036380 - RNA, 19 nt, Artificial Sequence
  Description of Artificial Sequence: Synthetic oligonucleotide
cugccggguuaccaacagg

SEQ ID NO: 2036381 - RNA, 19 nt, Artificial Sequence
  Description of Artificial Sequence: Synthetic oligonucleotide
cacgcuacaaguugcugcu

SEQ ID NO: 2036382 - RNA, 19 nt, Artificial Sequence
  Description of Artificial Sequence: Synthetic oligonucleotide
uauuuggguccagccccag

SEQ ID NO: 2036383 - RNA, 19 nt, Artificial Sequence
  Description of Artificial Sequence: Synthetic oligonucleotide
ggugggcacaagucaagac

SEQ ID NO: 2036384 - RNA, 19 nt, Artificial Sequence
  Description of Artificial Sequence: Synthetic oligonucleotide
cgacucaaaucugacaagc

SEQ ID NO: 2036385 - RNA, 19 nt, Artificial Sequence
  Description of Artificial Sequence: Synthetic oligonucleotide
guguuuccugacugcccag

SEQ ID NO: 2036386 - RNA, 19 nt, Artificial Sequence
  Description of Artificial Sequence: Synthetic oligonucleotide
uccgagcguuuggugagcc

SEQ ID NO: 2036387 - RNA, 19 nt, Artificial Sequence
  Description of Artificial Sequence: Synthetic oligonucleotide
gcggugacaggcuggcccg

SEQ ID NO: 2036388 - RNA, 19 nt, Artificial Sequence
  Description of Artificial Sequence: Synthetic oligonucleotide
ccuccaauacugaagccca

SEQ ID NO: 2036389 - RNA, 19 nt, Artificial Sequence
  Description of Artificial Sequence: Synthetic oligonucleotide
ggcuuagucacacgcuaca

SEQ ID NO: 2036390 - RNA, 19 nt, Artificial Sequence
  Description of Artificial Sequence: Synthetic oligonucleotide
agcaucauacugccccauu

SEQ ID NO: 2036391 - RNA, 19 nt, Artificial Sequence
  Description of Artificial Sequence: Synthetic oligonucleotide
ugcccuugucuguuuuauc

SEQ ID NO: 2036392 - RNA, 19 nt, Artificial Sequence
  Description of Artificial Sequence: Synthetic oligonucleotide
auauuuggguccagcccca

SEQ ID NO: 2036393 - RNA, 19 nt, Artificial Sequence
  Description of Artificial Sequence: Synthetic oligonucleotide
accaauuggcuuagucaca

SEQ ID NO: 2036394 - RNA, 19 nt, Artificial Sequence
  Description of Artificial Sequence: Synthetic oligonucleotide
augaagguagugggagccu

SEQ ID NO: 2036395 - RNA, 19 nt, Artificial Sequence
  Description of Artificial Sequence: Synthetic oligonucleotide
gacaagccgacagcgccca

SEQ ID NO: 2036396 - RNA, 19 nt, Artificial Sequence
  Description of Artificial Sequence: Synthetic oligonucleotide
cacaaguguugagcauggg

SEQ ID NO: 2036397 - RNA, 19 nt, Artificial Sequence
  Description of Artificial Sequence: Synthetic oligonucleotide
gggaggaagguuggcuugg

SEQ ID NO: 2036398 - RNA, 19 nt, Artificial Sequence
  Description of Artificial Sequence: Synthetic oligonucleotide
uugcacuacggcggugaca

SEQ ID NO: 2036399 - RNA, 19 nt, Artificial Sequence
  Description of Artificial Sequence: Synthetic oligonucleotide
uacugaagcccaggauuaa

SEQ ID NO: 2036400 - RNA, 19 nt, Artificial Sequence
  Description of Artificial Sequence: Synthetic oligonucleotide
guagugggagccugcccuc

SEQ ID NO: 2036401 - RNA, 19 nt, Artificial Sequence
  Description of Artificial Sequence: Synthetic oligonucleotide
caggugugugaauuaguua

SEQ ID NO: 2036402 - RNA, 19 nt, Artificial Sequence
  Description of Artificial Sequence: Synthetic oligonucleotide
augcccuugucuguuuuau

SEQ ID NO: 2036403 - RNA, 19 nt, Artificial Sequence
  Description of Artificial Sequence: Synthetic oligonucleotide
cauuuccauaguaaccaau

SEQ ID NO: 2036404 - RNA, 19 nt, Artificial Sequence
  Description of Artificial Sequence: Synthetic oligonucleotide
gugaauuaguuaagcuaaa

SEQ ID NO: 2036405 - RNA, 19 nt, Artificial Sequence
  Description of Artificial Sequence: Synthetic oligonucleotide
ggauacuacuccaagcccu

SEQ ID NO: 2036406 - RNA, 19 nt, Artificial Sequence
  Description of Artificial Sequence: Synthetic oligonucleotide
ccucagauacucgugugac

SEQ ID NO: 2036407 - RNA, 19 nt, Artificial Sequence
  Description of Artificial Sequence: Synthetic oligonucleotide
agcaugggguagcaucaua

SEQ ID NO: 2036408 - RNA, 19 nt, Artificial Sequence
  Description of Artificial Sequence: Synthetic oligonucleotide
cacacgcuacaaguugcug

SEQ ID NO: 2036409 - RNA, 19 nt, Artificial Sequence
  Description of Artificial Sequence: Synthetic oligonucleotide
ucuuugcacuacggcggug

SEQ ID NO: 2036410 - RNA, 19 nt, Artificial Sequence
  Description of Artificial Sequence: Synthetic oligonucleotide
uggccaaguagugggucuc

SEQ ID NO: 2036411 - RNA, 19 nt, Artificial Sequence
  Description of Artificial Sequence: Synthetic oligonucleotide
caugggguagcaucauacu

SEQ ID NO: 2036412 - RNA, 19 nt, Artificial Sequence
  Description of Artificial Sequence: Synthetic oligonucleotide
ccuugggaucaguuguuac

SEQ ID NO: 2036413 - RNA, 19 nt, Artificial Sequence
  Description of Artificial Sequence: Synthetic oligonucleotide
gggauguaggacauuucga

SEQ ID NO: 2036414 - RNA, 19 nt, Artificial Sequence
  Description of Artificial Sequence: Synthetic oligonucleotide
gacauaguguggauguguu

SEQ ID NO: 2036415 - RNA, 19 nt, Artificial Sequence
  Description of Artificial Sequence: Synthetic oligonucleotide
uggucacugcagacuggau

SEQ ID NO: 2036416 - RNA, 19 nt, Artificial Sequence
  Description of Artificial Sequence: Synthetic oligonucleotide
cuccuccgagcguuuggug

SEQ ID NO: 2036417 - RNA, 19 nt, Artificial Sequence
  Description of Artificial Sequence: Synthetic oligonucleotide
aucugcagcccagcaauuu

SEQ ID NO: 2036418 - RNA, 19 nt, Artificial Sequence
  Description of Artificial Sequence: Synthetic oligonucleotide
cccuuauuuccaauccuca

SEQ ID NO: 2036419 - RNA, 19 nt, Artificial Sequence
  Description of Artificial Sequence: Synthetic oligonucleotide
ucucaccuugacgcaacuu

SEQ ID NO: 2036420 - RNA, 19 nt, Artificial Sequence
  Description of Artificial Sequence: Synthetic oligonucleotide
gcccuuauuuccaauccuc

SEQ ID NO: 2036421 - RNA, 19 nt, Artificial Sequence
  Description of Artificial Sequence: Synthetic oligonucleotide
gacugccggguuaccaaca

SEQ ID NO: 2036422 - RNA, 19 nt, Artificial Sequence
  Description of Artificial Sequence: Synthetic oligonucleotide
ccagccguucaccugcaug

SEQ ID NO: 2036423 - RNA, 19 nt, Artificial Sequence
  Description of Artificial Sequence: Synthetic oligonucleotide
ggucuuggucgaucccacc

SEQ ID NO: 2036424 - RNA, 19 nt, Artificial Sequence
  Description of Artificial Sequence: Synthetic oligonucleotide
cgagaagggauucugggaa

SEQ ID NO: 2036425 - RNA, 19 nt, Artificial Sequence
  Description of Artificial Sequence: Synthetic oligonucleotide
uggucaugucccagccguu

SEQ ID NO: 2036426 - RNA, 19 nt, Artificial Sequence
  Description of Artificial Sequence: Synthetic oligonucleotide
cagggccaagcccuucauc

SEQ ID NO: 2036427 - RNA, 19 nt, Artificial Sequence
  Description of Artificial Sequence: Synthetic oligonucleotide
guguggauguguugucacu

SEQ ID NO: 2036428 - RNA, 19 nt, Artificial Sequence
  Description of Artificial Sequence: Synthetic oligonucleotide
cucccucagauacucgugu

SEQ ID NO: 2036429 - RNA, 19 nt, Artificial Sequence
  Description of Artificial Sequence: Synthetic oligonucleotide
aggcuggcccgggauguag

SEQ ID NO: 2036430 - RNA, 19 nt, Artificial Sequence
  Description of Artificial Sequence: Synthetic oligonucleotide
gccggguuaccaacaggcg

SEQ ID NO: 2036431 - RNA, 19 nt, Artificial Sequence
  Description of Artificial Sequence: Synthetic oligonucleotide
cugacugcuaagacagcau

SEQ ID NO: 2036432 - RNA, 19 nt, Artificial Sequence
  Description of Artificial Sequence: Synthetic oligonucleotide
cuacuccaagcccuuauuu

SEQ ID NO: 2036433 - RNA, 19 nt, Artificial Sequence
  Description of Artificial Sequence: Synthetic oligonucleotide
gucucaggccgaaccuaug

SEQ ID NO: 2036434 - RNA, 19 nt, Artificial Sequence
  Description of Artificial Sequence: Synthetic oligonucleotide
acggccuucugcagagacu

SEQ ID NO: 2036435 - RNA, 19 nt, Artificial Sequence
  Description of Artificial Sequence: Synthetic oligonucleotide
ccaagcuuuggcagcucuc

SEQ ID NO: 2036436 - RNA, 19 nt, Artificial Sequence
  Description of Artificial Sequence: Synthetic oligonucleotide
ccgagaagggauucuggga

SEQ ID NO: 2036437 - RNA, 19 nt, Artificial Sequence
  Description of Artificial Sequence: Synthetic oligonucleotide
gccgaaccuauggucacug

SEQ ID NO: 2036438 - RNA, 19 nt, Artificial Sequence
  Description of Artificial Sequence: Synthetic oligonucleotide
acaagccgacagcgcccag

SEQ ID NO: 2036439 - RNA, 19 nt, Artificial Sequence
  Description of Artificial Sequence: Synthetic oligonucleotide
cggguuaccaacaggcgca

SEQ ID NO: 2036440 - RNA, 19 nt, Artificial Sequence
  Description of Artificial Sequence: Synthetic oligonucleotide
cgaaccuauggucacugca

SEQ ID NO: 2036441 - RNA, 19 nt, Artificial Sequence
  Description of Artificial Sequence: Synthetic oligonucleotide
cuccgagcguuuggugagc

SEQ ID NO: 2036442 - RNA, 19 nt, Artificial Sequence
  Description of Artificial Sequence: Synthetic oligonucleotide
ccauaguaaccaauuggcu

SEQ ID NO: 2036443 - RNA, 19 nt, Artificial Sequence
  Description of Artificial Sequence: Synthetic oligonucleotide
ggcuuggaccuugggauca

SEQ ID NO: 2036444 - RNA, 19 nt, Artificial Sequence
  Description of Artificial Sequence: Synthetic oligonucleotide
guaggacauuucgacucaa

SEQ ID NO: 2036445 - RNA, 19 nt, Artificial Sequence
  Description of Artificial Sequence: Synthetic oligonucleotide
cuggcccgggauguaggac

SEQ ID NO: 2036446 - RNA, 19 nt, Artificial Sequence
  Description of Artificial Sequence: Synthetic oligonucleotide
cucaggccgaaccuauggu

SEQ ID NO: 2036447 - RNA, 19 nt, Artificial Sequence
  Description of Artificial Sequence: Synthetic oligonucleotide
gagagaaagcuggucccau

SEQ ID NO: 2036448 - RNA, 19 nt, Artificial Sequence
  Description of Artificial Sequence: Synthetic oligonucleotide
ccuugacgcaacuuaugaa

SEQ ID NO: 2036449 - RNA, 19 nt, Artificial Sequence
  Description of Artificial Sequence: Synthetic oligonucleotide
uagugggucucaggccgaa

SEQ ID NO: 2036450 - RNA, 19 nt, Artificial Sequence
  Description of Artificial Sequence: Synthetic oligonucleotide
agcacccauuagggaaaug

SEQ ID NO: 2036451 - RNA, 19 nt, Artificial Sequence
  Description of Artificial Sequence: Synthetic oligonucleotide
cuuccauccagguggccuu

SEQ ID NO: 2036452 - RNA, 19 nt, Artificial Sequence
  Description of Artificial Sequence: Synthetic oligonucleotide
caugugugaccauggucau

SEQ ID NO: 2036453 - RNA, 19 nt, Artificial Sequence
  Description of Artificial Sequence: Synthetic oligonucleotide
cgcuacaaguugcugcuuc

SEQ ID NO: 2036454 - RNA, 19 nt, Artificial Sequence
  Description of Artificial Sequence: Synthetic oligonucleotide
agcuggucccauggccuca

SEQ ID NO: 2036455 - RNA, 19 nt, Artificial Sequence
  Description of Artificial Sequence: Synthetic oligonucleotide
auacuacuccaagcccuua

SEQ ID NO: 2036456 - RNA, 19 nt, Artificial Sequence
  Description of Artificial Sequence: Synthetic oligonucleotide
guagugggucucaggccga

SEQ ID NO: 2036457 - RNA, 19 nt, Artificial Sequence
  Description of Artificial Sequence: Synthetic oligonucleotide
gcuuagucacacgcuacaa

SEQ ID NO: 2036458 - RNA, 19 nt, Artificial Sequence
  Description of Artificial Sequence: Synthetic oligonucleotide
cucuuugcacuacggcggu

SEQ ID NO: 2036459 - RNA, 19 nt, Artificial Sequence
  Description of Artificial Sequence: Synthetic oligonucleotide
cccucagauacucguguga

SEQ ID NO: 2036460 - RNA, 19 nt, Artificial Sequence
  Description of Artificial Sequence: Synthetic oligonucleotide
ccagcacccauuagggaaa

SEQ ID NO: 2036461 - RNA, 19 nt, Artificial Sequence
  Description of Artificial Sequence: Synthetic oligonucleotide
gcaucauacugccccauuu

SEQ ID NO: 2036462 - RNA, 19 nt, Artificial Sequence
  Description of Artificial Sequence: Synthetic oligonucleotide
ccgaaccuauggucacugc

SEQ ID NO: 2036463 - RNA, 19 nt, Artificial Sequence
  Description of Artificial Sequence: Synthetic oligonucleotide
cacuauacauaagguuggu

SEQ ID NO: 2036464 - RNA, 19 nt, Artificial Sequence
  Description of Artificial Sequence: Synthetic oligonucleotide
ggucaugugugaccauggu

SEQ ID NO: 2036465 - RNA, 19 nt, Artificial Sequence
  Description of Artificial Sequence: Synthetic oligonucleotide
gguccagccccaggcuggg

SEQ ID NO: 2036466 - RNA, 19 nt, Artificial Sequence
  Description of Artificial Sequence: Synthetic oligonucleotide
gggaaacauggcccuaccu

SEQ ID NO: 2036467 - RNA, 19 nt, Artificial Sequence
  Description of Artificial Sequence: Synthetic oligonucleotide
ccgagcguuuggugagccg

SEQ ID NO: 2036468 - RNA, 19 nt, Artificial Sequence
  Description of Artificial Sequence: Synthetic oligonucleotide
gguuaccaacaggcgcacc

SEQ ID NO: 2036469 - RNA, 19 nt, Artificial Sequence
  Description of Artificial Sequence: Synthetic oligonucleotide
ccaggugugugaauuaguu

SEQ ID NO: 2036470 - RNA, 19 nt, Artificial Sequence
  Description of Artificial Sequence: Synthetic oligonucleotide
agcguuuggugagccgcuu

SEQ ID NO: 2036471 - RNA, 19 nt, Artificial Sequence
  Description of Artificial Sequence: Synthetic oligonucleotide
gagcguuuggugagccgcu

SEQ ID NO: 2036472 - RNA, 19 nt, Artificial Sequence
  Description of Artificial Sequence: Synthetic oligonucleotide
auggggaaacauggcccua

SEQ ID NO: 2036473 - RNA, 19 nt, Artificial Sequence
  Description of Artificial Sequence: Synthetic oligonucleotide
ccgggauguaggacauuuc

SEQ ID NO: 2036474 - RNA, 19 nt, Artificial Sequence
  Description of Artificial Sequence: Synthetic oligonucleotide
agccgacagcgcccagcga

SEQ ID NO: 2036475 - RNA, 19 nt, Artificial Sequence
  Description of Artificial Sequence: Synthetic oligonucleotide
ggguuaccaacaggcgcac

SEQ ID NO: 2036476 - RNA, 19 nt, Artificial Sequence
  Description of Artificial Sequence: Synthetic oligonucleotide
uggcccuaccuggcauuuc

SEQ ID NO: 2036477 - RNA, 19 nt, Artificial Sequence
  Description of Artificial Sequence: Synthetic oligonucleotide
ggguagcaucauacugccc

SEQ ID NO: 2036478 - RNA, 19 nt, Artificial Sequence
  Description of Artificial Sequence: Synthetic oligonucleotide
gggacccagcacacagcag

SEQ ID NO: 2036479 - RNA, 19 nt, Artificial Sequence
  Description of Artificial Sequence: Synthetic oligonucleotide
ggccucccucagauacucg

SEQ ID NO: 2036480 - RNA, 19 nt, Artificial Sequence
  Description of Artificial Sequence: Synthetic oligonucleotide
gaagguuggcuuggaccuu

SEQ ID NO: 2036481 - RNA, 19 nt, Artificial Sequence
  Description of Artificial Sequence: Synthetic oligonucleotide
cccuaccuggcauuuccaa

SEQ ID NO: 2036482 - RNA, 19 nt, Artificial Sequence
  Description of Artificial Sequence: Synthetic oligonucleotide
gugugacauaaaugcccuu

SEQ ID NO: 2036483 - RNA, 19 nt, Artificial Sequence
  Description of Artificial Sequence: Synthetic oligonucleotide
ggccaaguagugggucuca

SEQ ID NO: 2036484 - RNA, 19 nt, Artificial Sequence
  Description of Artificial Sequence: Synthetic oligonucleotide
acgcuacaaguugcugcuu

SEQ ID NO: 2036485 - RNA, 19 nt, Artificial Sequence
  Description of Artificial Sequence: Synthetic oligonucleotide
gccaagcccuucauccaga

SEQ ID NO: 2036486 - RNA, 19 nt, Artificial Sequence
  Description of Artificial Sequence: Synthetic oligonucleotide
ggucucaggccgaaccuau

SEQ ID NO: 2036487 - RNA, 19 nt, Artificial Sequence
  Description of Artificial Sequence: Synthetic oligonucleotide
gggucucaggccgaaccua

SEQ ID NO: 2036488 - RNA, 19 nt, Artificial Sequence
  Description of Artificial Sequence: Synthetic oligonucleotide
cagcucucaggaaguguuu

SEQ ID NO: 2036489 - RNA, 19 nt, Artificial Sequence
  Description of Artificial Sequence: Synthetic oligonucleotide
guacggccuucugcagaga

SEQ ID NO: 2036490 - RNA, 19 nt, Artificial Sequence
  Description of Artificial Sequence: Synthetic oligonucleotide
cuuggaccuugggaucagu

SEQ ID NO: 2036491 - RNA, 19 nt, Artificial Sequence
  Description of Artificial Sequence: Synthetic oligonucleotide
gguggccuucauacagucu

SEQ ID NO: 2036492 - RNA, 19 nt, Artificial Sequence
  Description of Artificial Sequence: Synthetic oligonucleotide
ggagaggccagcacccauu

SEQ ID NO: 2036493 - RNA, 19 nt, Artificial Sequence
  Description of Artificial Sequence: Synthetic oligonucleotide
cuggucccauggccucaga

SEQ ID NO: 2036494 - RNA, 19 nt, Artificial Sequence
  Description of Artificial Sequence: Synthetic oligonucleotide
ggacagggccaagcccuuc

SEQ ID NO: 2036495 - RNA, 19 nt, Artificial Sequence
  Description of Artificial Sequence: Synthetic oligonucleotide
gcccuaccuggcauuucca

SEQ ID NO: 2036496 - RNA, 19 nt, Artificial Sequence
  Description of Artificial Sequence: Synthetic oligonucleotide
gcccuucauccagagcaaa

SEQ ID NO: 2036497 - RNA, 19 nt, Artificial Sequence
  Description of Artificial Sequence: Synthetic oligonucleotide
cugcagagacugccggguu

SEQ ID NO: 2036498 - RNA, 19 nt, Artificial Sequence
  Description of Artificial Sequence: Synthetic oligonucleotide
ggacugcuguacggccuuc

SEQ ID NO: 2036499 - RNA, 19 nt, Artificial Sequence
  Description of Artificial Sequence: Synthetic oligonucleotide
ccucagcauccaagagaga

SEQ ID NO: 2036500 - RNA, 19 nt, Artificial Sequence
  Description of Artificial Sequence: Synthetic oligonucleotide
cccgggauguaggacauuu

SEQ ID NO: 2036501 - RNA, 19 nt, Artificial Sequence
  Description of Artificial Sequence: Synthetic oligonucleotide
ggccgaaccuauggucacu

SEQ ID NO: 2036502 - RNA, 19 nt, Artificial Sequence
  Description of Artificial Sequence: Synthetic oligonucleotide
cagcacccauuagggaaau

SEQ ID NO: 2036503 - RNA, 19 nt, Artificial Sequence
  Description of Artificial Sequence: Synthetic oligonucleotide
ccuccuccgagcguuuggu

SEQ ID NO: 2036504 - RNA, 19 nt, Artificial Sequence
  Description of Artificial Sequence: Synthetic oligonucleotide
cggugacaggcuggcccgg

SEQ ID NO: 2036505 - RNA, 19 nt, Artificial Sequence
  Description of Artificial Sequence: Synthetic oligonucleotide
ggcccgggauguaggacau

SEQ ID NO: 2036506 - RNA, 19 nt, Artificial Sequence
  Description of Artificial Sequence: Synthetic oligonucleotide
gggaagggucuuggucgau

SEQ ID NO: 2036507 - RNA, 19 nt, Artificial Sequence
  Description of Artificial Sequence: Synthetic oligonucleotide
ccccugcuguggccaagua

SEQ ID NO: 2036508 - RNA, 19 nt, Artificial Sequence
  Description of Artificial Sequence: Synthetic oligonucleotide
cgcuuccgagccuggucau

SEQ ID NO: 2036509 - RNA, 19 nt, Artificial Sequence
  Description of Artificial Sequence: Synthetic oligonucleotide
cccagccguucaccugcau

SEQ ID NO: 2036510 - RNA, 19 nt, Artificial Sequence
  Description of Artificial Sequence: Synthetic oligonucleotide
gcccgggauguaggacauu

SEQ ID NO: 2036511 - RNA, 19 nt, Artificial Sequence
  Description of Artificial Sequence: Synthetic oligonucleotide
aauuaaugaacacugucac

SEQ ID NO: 2036512 - RNA, 19 nt, Artificial Sequence
  Description of Artificial Sequence: Synthetic oligonucleotide
aauaauaauacaaauagga

SEQ ID NO: 2036513 - RNA, 19 nt, Artificial Sequence
  Description of Artificial Sequence: Synthetic oligonucleotide
aauauauggauacugagga

SEQ ID NO: 2036514 - RNA, 19 nt, Artificial Sequence
  Description of Artificial Sequence: Synthetic oligonucleotide
uacaauucaaacaauggcg

SEQ ID NO: 2036515 - RNA, 19 nt, Artificial Sequence
  Description of Artificial Sequence: Synthetic oligonucleotide
aaagguauaauugguaagc

SEQ ID NO: 2036516 - RNA, 19 nt, Artificial Sequence
  Description of Artificial Sequence: Synthetic oligonucleotide
aauaauacaaauaggaagu

SEQ ID NO: 2036517 - RNA, 19 nt, Artificial Sequence
  Description of Artificial Sequence: Synthetic oligonucleotide
aaaauguaugaguagaaca

SEQ ID NO: 2036518 - RNA, 19 nt, Artificial Sequence
  Description of Artificial Sequence: Synthetic oligonucleotide
auaaaauugaaccugcuca

SEQ ID NO: 2036519 - RNA, 19 nt, Artificial Sequence
  Description of Artificial Sequence: Synthetic oligonucleotide
uguaccaaagguauaauug

SEQ ID NO: 2036520 - RNA, 19 nt, Artificial Sequence
  Description of Artificial Sequence: Synthetic oligonucleotide
aacacugucacauguuuac

SEQ ID NO: 2036521 - RNA, 19 nt, Artificial Sequence
  Description of Artificial Sequence: Synthetic oligonucleotide
uuacucuucaaacaggaag

SEQ ID NO: 2036522 - RNA, 19 nt, Artificial Sequence
  Description of Artificial Sequence: Synthetic oligonucleotide
cauguuuacaccacuaucc

SEQ ID NO: 2036523 - RNA, 19 nt, Artificial Sequence
  Description of Artificial Sequence: Synthetic oligonucleotide
uauauggauacugaggagg

SEQ ID NO: 2036524 - RNA, 19 nt, Artificial Sequence
  Description of Artificial Sequence: Synthetic oligonucleotide
auaauugguaagcggauac

SEQ ID NO: 2036525 - RNA, 19 nt, Artificial Sequence
  Description of Artificial Sequence: Synthetic oligonucleotide
gaauauauggauacugagg

SEQ ID NO: 2036526 - RNA, 19 nt, Artificial Sequence
  Description of Artificial Sequence: Synthetic oligonucleotide
aauacaaauaggaagucca

SEQ ID NO: 2036527 - RNA, 19 nt, Artificial Sequence
  Description of Artificial Sequence: Synthetic oligonucleotide
uucgggacugcaaacaagg

SEQ ID NO: 2036528 - RNA, 19 nt, Artificial Sequence
  Description of Artificial Sequence: Synthetic oligonucleotide
uuuuacucuucaaacagga

SEQ ID NO: 2036529 - RNA, 19 nt, Artificial Sequence
  Description of Artificial Sequence: Synthetic oligonucleotide
aucuugacgacccaguauc

SEQ ID NO: 2036530 - RNA, 19 nt, Artificial Sequence
  Description of Artificial Sequence: Synthetic oligonucleotide
ucuacaauucuucuaugug

SEQ ID NO: 2036531 - RNA, 19 nt, Artificial Sequence
  Description of Artificial Sequence: Synthetic oligonucleotide
uaacacaugggguagccgg

SEQ ID NO: 2036532 - RNA, 19 nt, Artificial Sequence
  Description of Artificial Sequence: Synthetic oligonucleotide
uguaauaugugcaggaaua

SEQ ID NO: 2036533 - RNA, 19 nt, Artificial Sequence
  Description of Artificial Sequence: Synthetic oligonucleotide
acaauucaaacaauggcgc

SEQ ID NO: 2036534 - RNA, 19 nt, Artificial Sequence
  Description of Artificial Sequence: Synthetic oligonucleotide
uuuaucaaauuccucccgc

SEQ ID NO: 2036535 - RNA, 19 nt, Artificial Sequence
  Description of Artificial Sequence: Synthetic oligonucleotide
ugugcaggaauucaguugu

SEQ ID NO: 2036536 - RNA, 19 nt, Artificial Sequence
  Description of Artificial Sequence: Synthetic oligonucleotide
agcggauacagguuaaugg

SEQ ID NO: 2036537 - RNA, 19 nt, Artificial Sequence
  Description of Artificial Sequence: Synthetic oligonucleotide
ucuuuuguaccaaagguau

SEQ ID NO: 2036538 - RNA, 19 nt, Artificial Sequence
  Description of Artificial Sequence: Synthetic oligonucleotide
uguaugaguagaacaaaca

SEQ ID NO: 2036539 - RNA, 19 nt, Artificial Sequence
  Description of Artificial Sequence: Synthetic oligonucleotide
uuucuagaguuuaaugaag

SEQ ID NO: 2036540 - RNA, 19 nt, Artificial Sequence
  Description of Artificial Sequence: Synthetic oligonucleotide
uugucauacaauucaaaca

SEQ ID NO: 2036541 - RNA, 19 nt, Artificial Sequence
  Description of Artificial Sequence: Synthetic oligonucleotide
guuaccaaugcagucaucg

SEQ ID NO: 2036542 - RNA, 19 nt, Artificial Sequence
  Description of Artificial Sequence: Synthetic oligonucleotide
guaucucugucauuaagcg

SEQ ID NO: 2036543 - RNA, 19 nt, Artificial Sequence
  Description of Artificial Sequence: Synthetic oligonucleotide
caaacaauggcgcagcuac

SEQ ID NO: 2036544 - RNA, 19 nt, Artificial Sequence
  Description of Artificial Sequence: Synthetic oligonucleotide
aagaaaguuguucccagcu

SEQ ID NO: 2036545 - RNA, 19 nt, Artificial Sequence
  Description of Artificial Sequence: Synthetic oligonucleotide
aauucaaacaauggcgcag

SEQ ID NO: 2036546 - RNA, 19 nt, Artificial Sequence
  Description of Artificial Sequence: Synthetic oligonucleotide
uuaauggugcgcuccaggg

SEQ ID NO: 2036547 - RNA, 19 nt, Artificial Sequence
  Description of Artificial Sequence: Synthetic oligonucleotide
acaaauaggaaguccaccu

SEQ ID NO: 2036548 - RNA, 19 nt, Artificial Sequence
  Description of Artificial Sequence: Synthetic oligonucleotide
acagagacggcuucguuac

SEQ ID NO: 2036549 - RNA, 19 nt, Artificial Sequence
  Description of Artificial Sequence: Synthetic oligonucleotide
aauaugugcaggaauauau

SEQ ID NO: 2036550 - RNA, 19 nt, Artificial Sequence
  Description of Artificial Sequence: Synthetic oligonucleotide
uaugaguagaacaaacaau

SEQ ID NO: 2036551 - RNA, 19 nt, Artificial Sequence
  Description of Artificial Sequence: Synthetic oligonucleotide
aacuucuuauguuccuugg

SEQ ID NO: 2036552 - RNA, 19 nt, Artificial Sequence
  Description of Artificial Sequence: Synthetic oligonucleotide
aauugguaagcggauacag

SEQ ID NO: 2036553 - RNA, 19 nt, Artificial Sequence
  Description of Artificial Sequence: Synthetic oligonucleotide
aauucucuacaauucuucu

SEQ ID NO: 2036554 - RNA, 19 nt, Artificial Sequence
  Description of Artificial Sequence: Synthetic oligonucleotide
uagggaacaagagaaaacc

SEQ ID NO: 2036555 - RNA, 19 nt, Artificial Sequence
  Description of Artificial Sequence: Synthetic oligonucleotide
aaauguaugaguagaacaa

SEQ ID NO: 2036556 - RNA, 19 nt, Artificial Sequence
  Description of Artificial Sequence: Synthetic oligonucleotide
uucuagaguuuaaugaaga

SEQ ID NO: 2036557 - RNA, 19 nt, Artificial Sequence
  Description of Artificial Sequence: Synthetic oligonucleotide
uucaguuguauauaaaauu

SEQ ID NO: 2036558 - RNA, 19 nt, Artificial Sequence
  Description of Artificial Sequence: Synthetic oligonucleotide
ugggcuuuguaauaugugc

SEQ ID NO: 2036559 - RNA, 19 nt, Artificial Sequence
  Description of Artificial Sequence: Synthetic oligonucleotide
uugguaagcggauacaggu

SEQ ID NO: 2036560 - RNA, 19 nt, Artificial Sequence
  Description of Artificial Sequence: Synthetic oligonucleotide
aaucagaaccccuucuaca

SEQ ID NO: 2036561 - RNA, 19 nt, Artificial Sequence
  Description of Artificial Sequence: Synthetic oligonucleotide
aagguauaauugguaagcg

SEQ ID NO: 2036562 - RNA, 19 nt, Artificial Sequence
  Description of Artificial Sequence: Synthetic oligonucleotide
uuaacagucgagagcaaga

SEQ ID NO: 2036563 - RNA, 19 nt, Artificial Sequence
  Description of Artificial Sequence: Synthetic oligonucleotide
aaugauggguccauauccg

SEQ ID NO: 2036564 - RNA, 19 nt, Artificial Sequence
  Description of Artificial Sequence: Synthetic oligonucleotide
ugaagaaaguuguucccag

SEQ ID NO: 2036565 - RNA, 19 nt, Artificial Sequence
  Description of Artificial Sequence: Synthetic oligonucleotide
aucagaaccccuucuacag

SEQ ID NO: 2036566 - RNA, 19 nt, Artificial Sequence
  Description of Artificial Sequence: Synthetic oligonucleotide
uuagggaacaagagaaaac

SEQ ID NO: 2036567 - RNA, 19 nt, Artificial Sequence
  Description of Artificial Sequence: Synthetic oligonucleotide
agguauaauugguaagcgg

SEQ ID NO: 2036568 - RNA, 19 nt, Artificial Sequence
  Description of Artificial Sequence: Synthetic oligonucleotide
caauuaaugaacacuguca

SEQ ID NO: 2036569 - RNA, 19 nt, Artificial Sequence
  Description of Artificial Sequence: Synthetic oligonucleotide
cucgugcacaaucagaacc

SEQ ID NO: 2036570 - RNA, 19 nt, Artificial Sequence
  Description of Artificial Sequence: Synthetic oligonucleotide
aacagucgagagcaagagg

SEQ ID NO: 2036571 - RNA, 19 nt, Artificial Sequence
  Description of Artificial Sequence: Synthetic oligonucleotide
auucaaacaauggcgcagc

SEQ ID NO: 2036572 - RNA, 19 nt, Artificial Sequence
  Description of Artificial Sequence: Synthetic oligonucleotide
gauacagguuaauggugcg

SEQ ID NO: 2036573 - RNA, 19 nt, Artificial Sequence
  Description of Artificial Sequence: Synthetic oligonucleotide
aacaaacaauuaaugaaca

SEQ ID NO: 2036574 - RNA, 19 nt, Artificial Sequence
  Description of Artificial Sequence: Synthetic oligonucleotide
aaauaggaaguccaccuuu

SEQ ID NO: 2036575 - RNA, 19 nt, Artificial Sequence
  Description of Artificial Sequence: Synthetic oligonucleotide
agcgcuuuaggccuucaac

SEQ ID NO: 2036576 - RNA, 19 nt, Artificial Sequence
  Description of Artificial Sequence: Synthetic oligonucleotide
uucguuacuucugugcagg

SEQ ID NO: 2036577 - RNA, 19 nt, Artificial Sequence
  Description of Artificial Sequence: Synthetic oligonucleotide
gagacgugcagaaagccgg

SEQ ID NO: 2036578 - RNA, 19 nt, Artificial Sequence
  Description of Artificial Sequence: Synthetic oligonucleotide
ggaagacuagaaaugaugg

SEQ ID NO: 2036579 - RNA, 19 nt, Artificial Sequence
  Description of Artificial Sequence: Synthetic oligonucleotide
caaagguauaauugguaag

SEQ ID NO: 2036580 - RNA, 19 nt, Artificial Sequence
  Description of Artificial Sequence: Synthetic oligonucleotide
uauguguguaagcugugcu

SEQ ID NO: 2036581 - RNA, 19 nt, Artificial Sequence
  Description of Artificial Sequence: Synthetic oligonucleotide
ucugcgagcgguucggcgg

SEQ ID NO: 2036582 - RNA, 19 nt, Artificial Sequence
  Description of Artificial Sequence: Synthetic oligonucleotide
ucgugcacaaucagaaccc

SEQ ID NO: 2036583 - RNA, 19 nt, Artificial Sequence
  Description of Artificial Sequence: Synthetic oligonucleotide
uaaguucaccaccagguaa

SEQ ID NO: 2036584 - RNA, 19 nt, Artificial Sequence
  Description of Artificial Sequence: Synthetic oligonucleotide
guacuuguugccaaacugg

SEQ ID NO: 2036585 - RNA, 19 nt, Artificial Sequence
  Description of Artificial Sequence: Synthetic oligonucleotide
aucucugucauuaagcgcu

SEQ ID NO: 2036586 - RNA, 19 nt, Artificial Sequence
  Description of Artificial Sequence: Synthetic oligonucleotide
ugaggaagacuagaaauga

SEQ ID NO: 2036587 - RNA, 19 nt, Artificial Sequence
  Description of Artificial Sequence: Synthetic oligonucleotide
gacuagaaaugaugggucc

SEQ ID NO: 2036588 - RNA, 19 nt, Artificial Sequence
  Description of Artificial Sequence: Synthetic oligonucleotide
uucuccgggguuaaguuca

SEQ ID NO: 2036589 - RNA, 19 nt, Artificial Sequence
  Description of Artificial Sequence: Synthetic oligonucleotide
aaacaaggcuuucucuuga

SEQ ID NO: 2036590 - RNA, 19 nt, Artificial Sequence
  Description of Artificial Sequence: Synthetic oligonucleotide
auguaugaguagaacaaac

SEQ ID NO: 2036591 - RNA, 19 nt, Artificial Sequence
  Description of Artificial Sequence: Synthetic oligonucleotide
aaggagguggcaauuuagg

SEQ ID NO: 2036592 - RNA, 19 nt, Artificial Sequence
  Description of Artificial Sequence: Synthetic oligonucleotide
ggaauauauggauacugag

SEQ ID NO: 2036593 - RNA, 19 nt, Artificial Sequence
  Description of Artificial Sequence: Synthetic oligonucleotide
uguuuacaccacuauccag

SEQ ID NO: 2036594 - RNA, 19 nt, Artificial Sequence
  Description of Artificial Sequence: Synthetic oligonucleotide
aggguuaggggcuuggucu

SEQ ID NO: 2036595 - RNA, 19 nt, Artificial Sequence
  Description of Artificial Sequence: Synthetic oligonucleotide
guuaauggugcgcuccagg

SEQ ID NO: 2036596 - RNA, 19 nt, Artificial Sequence
  Description of Artificial Sequence: Synthetic oligonucleotide
uuguaauaugugcaggaau

SEQ ID NO: 2036597 - RNA, 19 nt, Artificial Sequence
  Description of Artificial Sequence: Synthetic oligonucleotide
ugcucgugcacaaucagaa

SEQ ID NO: 2036598 - RNA, 19 nt, Artificial Sequence
  Description of Artificial Sequence: Synthetic oligonucleotide
uuaucaaauuccucccgca

SEQ ID NO: 2036599 - RNA, 19 nt, Artificial Sequence
  Description of Artificial Sequence: Synthetic oligonucleotide
uucuuauguuccuugggcu

SEQ ID NO: 2036600 - RNA, 19 nt, Artificial Sequence
  Description of Artificial Sequence: Synthetic oligonucleotide
uccgauacaggagacgugc

SEQ ID NO: 2036601 - RNA, 19 nt, Artificial Sequence
  Description of Artificial Sequence: Synthetic oligonucleotide
ugcgcugaaaucuggcugc

SEQ ID NO: 2036602 - RNA, 19 nt, Artificial Sequence
  Description of Artificial Sequence: Synthetic oligonucleotide
aguucauauuaauuuuacu

SEQ ID NO: 2036603 - RNA, 19 nt, Artificial Sequence
  Description of Artificial Sequence: Synthetic oligonucleotide
augaguagaacaaacaauu

SEQ ID NO: 2036604 - RNA, 19 nt, Artificial Sequence
  Description of Artificial Sequence: Synthetic oligonucleotide
agcugaaccagaaacaacu

SEQ ID NO: 2036605 - RNA, 19 nt, Artificial Sequence
  Description of Artificial Sequence: Synthetic oligonucleotide
gaaaugauggguccauauc

SEQ ID NO: 2036606 - RNA, 19 nt, Artificial Sequence
  Description of Artificial Sequence: Synthetic oligonucleotide
acagcuccgauacaggaga

SEQ ID NO: 2036607 - RNA, 19 nt, Artificial Sequence
  Description of Artificial Sequence: Synthetic oligonucleotide
auuuuacucuucaaacagg

SEQ ID NO: 2036608 - RNA, 19 nt, Artificial Sequence
  Description of Artificial Sequence: Synthetic oligonucleotide
auuaacagucgagagcaag

SEQ ID NO: 2036609 - RNA, 19 nt, Artificial Sequence
  Description of Artificial Sequence: Synthetic oligonucleotide
uaucucugucauuaagcgc

SEQ ID NO: 2036610 - RNA, 19 nt, Artificial Sequence
  Description of Artificial Sequence: Synthetic oligonucleotide
ucuagaguuuaaugaagaa

SEQ ID NO: 2036611 - RNA, 19 nt, Artificial Sequence
  Description of Artificial Sequence: Synthetic oligonucleotide
caguucauauuaauuuuac

SEQ ID NO: 2036612 - RNA, 19 nt, Artificial Sequence
  Description of Artificial Sequence: Synthetic oligonucleotide
cuuuguaauaugugcagga

SEQ ID NO: 2036613 - RNA, 19 nt, Artificial Sequence
  Description of Artificial Sequence: Synthetic oligonucleotide
gaagaaaguuguucccagc

SEQ ID NO: 2036614 - RNA, 19 nt, Artificial Sequence
  Description of Artificial Sequence: Synthetic oligonucleotide
auacugaggagguucaaaa

SEQ ID NO: 2036615 - RNA, 19 nt, Artificial Sequence
  Description of Artificial Sequence: Synthetic oligonucleotide
uuucgggacugcaaacaag

SEQ ID NO: 2036616 - RNA, 19 nt, Artificial Sequence
  Description of Artificial Sequence: Synthetic oligonucleotide
uccauauccgggugcauug

SEQ ID NO: 2036617 - RNA, 19 nt, Artificial Sequence
  Description of Artificial Sequence: Synthetic oligonucleotide
uugggcuuuguaauaugug

SEQ ID NO: 2036618 - RNA, 19 nt, Artificial Sequence
  Description of Artificial Sequence: Synthetic oligonucleotide
accaccagguaauuugaag

SEQ ID NO: 2036619 - RNA, 19 nt, Artificial Sequence
  Description of Artificial Sequence: Synthetic oligonucleotide
uaacagucgagagcaagag

SEQ ID NO: 2036620 - RNA, 19 nt, Artificial Sequence
  Description of Artificial Sequence: Synthetic oligonucleotide
ugaguagaacaaacaauua

SEQ ID NO: 2036621 - RNA, 19 nt, Artificial Sequence
  Description of Artificial Sequence: Synthetic oligonucleotide
cugaacagcuccgauacag

SEQ ID NO: 2036622 - RNA, 19 nt, Artificial Sequence
  Description of Artificial Sequence: Synthetic oligonucleotide
aggaagacuagaaaugaug

SEQ ID NO: 2036623 - RNA, 19 nt, Artificial Sequence
  Description of Artificial Sequence: Synthetic oligonucleotide
ucuugaagcugaaccagaa

SEQ ID NO: 2036624 - RNA, 19 nt, Artificial Sequence
  Description of Artificial Sequence: Synthetic oligonucleotide
uccgggguuaaguucacca

SEQ ID NO: 2036625 - RNA, 19 nt, Artificial Sequence
  Description of Artificial Sequence: Synthetic oligonucleotide
auguuuacaccacuaucca

SEQ ID NO: 2036626 - RNA, 19 nt, Artificial Sequence
  Description of Artificial Sequence: Synthetic oligonucleotide
aaucuggcugcaacagagc

SEQ ID NO: 2036627 - RNA, 19 nt, Artificial Sequence
  Description of Artificial Sequence: Synthetic oligonucleotide
gguauaauugguaagcgga

SEQ ID NO: 2036628 - RNA, 19 nt, Artificial Sequence
  Description of Artificial Sequence: Synthetic oligonucleotide
cuguagcaguaacacaugg

SEQ ID NO: 2036629 - RNA, 19 nt, Artificial Sequence
  Description of Artificial Sequence: Synthetic oligonucleotide
uaccaaugcagucaucgau

SEQ ID NO: 2036630 - RNA, 19 nt, Artificial Sequence
  Description of Artificial Sequence: Synthetic oligonucleotide
auacagguuaauggugcgc

SEQ ID NO: 2036631 - RNA, 19 nt, Artificial Sequence
  Description of Artificial Sequence: Synthetic oligonucleotide
cuucugugcaggaauucag

SEQ ID NO: 2036632 - RNA, 19 nt, Artificial Sequence
  Description of Artificial Sequence: Synthetic oligonucleotide
augauggguccauauccgg

SEQ ID NO: 2036633 - RNA, 19 nt, Artificial Sequence
  Description of Artificial Sequence: Synthetic oligonucleotide
uuuucgggacugcaaacaa

SEQ ID NO: 2036634 - RNA, 19 nt, Artificial Sequence
  Description of Artificial Sequence: Synthetic oligonucleotide
ccagguaauuugaagaaag

SEQ ID NO: 2036635 - RNA, 19 nt, Artificial Sequence
  Description of Artificial Sequence: Synthetic oligonucleotide
aaagccggggccugcggag

SEQ ID NO: 2036636 - RNA, 19 nt, Artificial Sequence
  Description of Artificial Sequence: Synthetic oligonucleotide
aguuguauauaaaauugaa

SEQ ID NO: 2036637 - RNA, 19 nt, Artificial Sequence
  Description of Artificial Sequence: Synthetic oligonucleotide
uacagguuaauggugcgcu

SEQ ID NO: 2036638 - RNA, 19 nt, Artificial Sequence
  Description of Artificial Sequence: Synthetic oligonucleotide
uucuucuauguguguaagc

SEQ ID NO: 2036639 - RNA, 19 nt, Artificial Sequence
  Description of Artificial Sequence: Synthetic oligonucleotide
uucaaaauuuggucuccac

SEQ ID NO: 2036640 - RNA, 19 nt, Artificial Sequence
  Description of Artificial Sequence: Synthetic oligonucleotide
uuaucugcgucccgcucag

SEQ ID NO: 2036641 - RNA, 19 nt, Artificial Sequence
  Description of Artificial Sequence: Synthetic oligonucleotide
uuaaguucaccaccaggua

SEQ ID NO: 2036642 - RNA, 19 nt, Artificial Sequence
  Description of Artificial Sequence: Synthetic oligonucleotide
aaacaauggcgcagcuacc

SEQ ID NO: 2036643 - RNA, 19 nt, Artificial Sequence
  Description of Artificial Sequence: Synthetic oligonucleotide
uuuguaauaugugcaggaa

SEQ ID NO: 2036644 - RNA, 19 nt, Artificial Sequence
  Description of Artificial Sequence: Synthetic oligonucleotide
agcuguagcaguaacacau

SEQ ID NO: 2036645 - RNA, 19 nt, Artificial Sequence
  Description of Artificial Sequence: Synthetic oligonucleotide
aauuccucccgcaugcgcu

SEQ ID NO: 2036646 - RNA, 19 nt, Artificial Sequence
  Description of Artificial Sequence: Synthetic oligonucleotide
aggagacgugcagaaagcc

SEQ ID NO: 2036647 - RNA, 19 nt, Artificial Sequence
  Description of Artificial Sequence: Synthetic oligonucleotide
ugcggagacuuccgcaggg

SEQ ID NO: 2036648 - RNA, 19 nt, Artificial Sequence
  Description of Artificial Sequence: Synthetic oligonucleotide
uuuacucuucaaacaggaa

SEQ ID NO: 2036649 - RNA, 19 nt, Artificial Sequence
  Description of Artificial Sequence: Synthetic oligonucleotide
ucuauguguguaagcugug

SEQ ID NO: 2036650 - RNA, 19 nt, Artificial Sequence
  Description of Artificial Sequence: Synthetic oligonucleotide
augcgcugaaaucuggcug

SEQ ID NO: 2036651 - RNA, 19 nt, Artificial Sequence
  Description of Artificial Sequence: Synthetic oligonucleotide
uggauacugaggagguuca

SEQ ID NO: 2036652 - RNA, 19 nt, Artificial Sequence
  Description of Artificial Sequence: Synthetic oligonucleotide
ucuccaccaguuaccaaug

SEQ ID NO: 2036653 - RNA, 19 nt, Artificial Sequence
  Description of Artificial Sequence: Synthetic oligonucleotide
gcugugcucacagagacgg

SEQ ID NO: 2036654 - RNA, 19 nt, Artificial Sequence
  Description of Artificial Sequence: Synthetic oligonucleotide
guuaaguucaccaccaggu

SEQ ID NO: 2036655 - RNA, 19 nt, Artificial Sequence
  Description of Artificial Sequence: Synthetic oligonucleotide
uucucaucccaauuuuauc

SEQ ID NO: 2036656 - RNA, 19 nt, Artificial Sequence
  Description of Artificial Sequence: Synthetic oligonucleotide
ucuuauguuccuugggcuu

SEQ ID NO: 2036657 - RNA, 19 nt, Artificial Sequence
  Description of Artificial Sequence: Synthetic oligonucleotide
gauacaggagacgugcaga

SEQ ID NO: 2036658 - RNA, 19 nt, Artificial Sequence
  Description of Artificial Sequence: Synthetic oligonucleotide
ucugucauuaagcgcuuua

SEQ ID NO: 2036659 - RNA, 19 nt, Artificial Sequence
  Description of Artificial Sequence: Synthetic oligonucleotide
uuaccaaugcagucaucga

SEQ ID NO: 2036660 - RNA, 19 nt, Artificial Sequence
  Description of Artificial Sequence: Synthetic oligonucleotide
ugacgacccaguaucucug

SEQ ID NO: 2036661 - RNA, 19 nt, Artificial Sequence
  Description of Artificial Sequence: Synthetic oligonucleotide
uggcaauuuagggaacaag

SEQ ID NO: 2036662 - RNA, 19 nt, Artificial Sequence
  Description of Artificial Sequence: Synthetic oligonucleotide
caaacaauuaaugaacacu

SEQ ID NO: 2036663 - RNA, 19 nt, Artificial Sequence
  Description of Artificial Sequence: Synthetic oligonucleotide
aaccagaaacaacuucuua

SEQ ID NO: 2036664 - RNA, 19 nt, Artificial Sequence
  Description of Artificial Sequence: Synthetic oligonucleotide
gagacuuccgcagggcggg

SEQ ID NO: 2036665 - RNA, 19 nt, Artificial Sequence
  Description of Artificial Sequence: Synthetic oligonucleotide
gaagcugaaccagaaacaa

SEQ ID NO: 2036666 - RNA, 19 nt, Artificial Sequence
  Description of Artificial Sequence: Synthetic oligonucleotide
uccgggugcauugucauac

SEQ ID NO: 2036667 - RNA, 19 nt, Artificial Sequence
  Description of Artificial Sequence: Synthetic oligonucleotide
aagcggauacagguuaaug

SEQ ID NO: 2036668 - RNA, 19 nt, Artificial Sequence
  Description of Artificial Sequence: Synthetic oligonucleotide
ggcuuuguaauaugugcag

SEQ ID NO: 2036669 - RNA, 19 nt, Artificial Sequence
  Description of Artificial Sequence: Synthetic oligonucleotide
cuacaauucuucuaugugu

SEQ ID NO: 2036670 - RNA, 19 nt, Artificial Sequence
  Description of Artificial Sequence: Synthetic oligonucleotide
ucucuacaauucuucuaug

SEQ ID NO: 2036671 - RNA, 19 nt, Artificial Sequence
  Description of Artificial Sequence: Synthetic oligonucleotide
cugaaccagaaacaacuuc

SEQ ID NO: 2036672 - RNA, 19 nt, Artificial Sequence
  Description of Artificial Sequence: Synthetic oligonucleotide
gcaauuuagggaacaagag

SEQ ID NO: 2036673 - RNA, 19 nt, Artificial Sequence
  Description of Artificial Sequence: Synthetic oligonucleotide
auucuucuauguguguaag

SEQ ID NO: 2036674 - RNA, 19 nt, Artificial Sequence
  Description of Artificial Sequence: Synthetic oligonucleotide
uaauugguaagcggauaca

SEQ ID NO: 2036675 - RNA, 19 nt, Artificial Sequence
  Description of Artificial Sequence: Synthetic oligonucleotide
agguaauuugaagaaaguu

SEQ ID NO: 2036676 - RNA, 19 nt, Artificial Sequence
  Description of Artificial Sequence: Synthetic oligonucleotide
auaugugcaggaauauaug

SEQ ID NO: 2036677 - RNA, 19 nt, Artificial Sequence
  Description of Artificial Sequence: Synthetic oligonucleotide
caauggcgcagcuaccagc

SEQ ID NO: 2036678 - RNA, 19 nt, Artificial Sequence
  Description of Artificial Sequence: Synthetic oligonucleotide
ugcgcuccaggguuagggg

SEQ ID NO: 2036679 - RNA, 19 nt, Artificial Sequence
  Description of Artificial Sequence: Synthetic oligonucleotide
acaaucagaaccccuucua

SEQ ID NO: 2036680 - RNA, 19 nt, Artificial Sequence
  Description of Artificial Sequence: Synthetic oligonucleotide
guuaucugcgucccgcuca

SEQ ID NO: 2036681 - RNA, 19 nt, Artificial Sequence
  Description of Artificial Sequence: Synthetic oligonucleotide
caggagacgugcagaaagc

SEQ ID NO: 2036682 - RNA, 19 nt, Artificial Sequence
  Description of Artificial Sequence: Synthetic oligonucleotide
gaaaucuggcugcaacaga

SEQ ID NO: 2036683 - RNA, 19 nt, Artificial Sequence
  Description of Artificial Sequence: Synthetic oligonucleotide
cagaaccccuucuacaguc

SEQ ID NO: 2036684 - RNA, 19 nt, Artificial Sequence
  Description of Artificial Sequence: Synthetic oligonucleotide
gccauuaacagucgagagc

SEQ ID NO: 2036685 - RNA, 19 nt, Artificial Sequence
  Description of Artificial Sequence: Synthetic oligonucleotide
cuauguguguaagcugugc

SEQ ID NO: 2036686 - RNA, 19 nt, Artificial Sequence
  Description of Artificial Sequence: Synthetic oligonucleotide
aauaggaaguccaccuuuu

SEQ ID NO: 2036687 - RNA, 19 nt, Artificial Sequence
  Description of Artificial Sequence: Synthetic oligonucleotide
agaguuuaaugaagaaacu

SEQ ID NO: 2036688 - RNA, 19 nt, Artificial Sequence
  Description of Artificial Sequence: Synthetic oligonucleotide
ucuugacgacccaguaucu

SEQ ID NO: 2036689 - RNA, 19 nt, Artificial Sequence
  Description of Artificial Sequence: Synthetic oligonucleotide
ucugcgucccgcucagcag

SEQ ID NO: 2036690 - RNA, 19 nt, Artificial Sequence
  Description of Artificial Sequence: Synthetic oligonucleotide
ccaccaguuaccaaugcag

SEQ ID NO: 2036691 - RNA, 19 nt, Artificial Sequence
  Description of Artificial Sequence: Synthetic oligonucleotide
uucggcggcaccacagaca

SEQ ID NO: 2036692 - RNA, 19 nt, Artificial Sequence
  Description of Artificial Sequence: Synthetic oligonucleotide
auauggauacugaggaggu

SEQ ID NO: 2036693 - RNA, 19 nt, Artificial Sequence
  Description of Artificial Sequence: Synthetic oligonucleotide
agucaucgaugacccaguc

SEQ ID NO: 2036694 - RNA, 19 nt, Artificial Sequence
  Description of Artificial Sequence: Synthetic oligonucleotide
acaauggcgcagcuaccag

SEQ ID NO: 2036695 - RNA, 19 nt, Artificial Sequence
  Description of Artificial Sequence: Synthetic oligonucleotide
ggcggcaccacagacaugc

SEQ ID NO: 2036696 - RNA, 19 nt, Artificial Sequence
  Description of Artificial Sequence: Synthetic oligonucleotide
ggagguggcaauuuaggga

SEQ ID NO: 2036697 - RNA, 19 nt, Artificial Sequence
  Description of Artificial Sequence: Synthetic oligonucleotide
cagguuaauggugcgcucc

SEQ ID NO: 2036698 - RNA, 19 nt, Artificial Sequence
  Description of Artificial Sequence: Synthetic oligonucleotide
guuacuucugugcaggaau

SEQ ID NO: 2036699 - RNA, 19 nt, Artificial Sequence
  Description of Artificial Sequence: Synthetic oligonucleotide
uucaaacaauggcgcagcu

SEQ ID NO: 2036700 - RNA, 19 nt, Artificial Sequence
  Description of Artificial Sequence: Synthetic oligonucleotide
ggcuucguuacuucugugc

SEQ ID NO: 2036701 - RNA, 19 nt, Artificial Sequence
  Description of Artificial Sequence: Synthetic oligonucleotide
caauucaaacaauggcgca

SEQ ID NO: 2036702 - RNA, 19 nt, Artificial Sequence
  Description of Artificial Sequence: Synthetic oligonucleotide
auauaaaauugaaccugcu

SEQ ID NO: 2036703 - RNA, 19 nt, Artificial Sequence
  Description of Artificial Sequence: Synthetic oligonucleotide
uggguccauauccgggugc

SEQ ID NO: 2036704 - RNA, 19 nt, Artificial Sequence
  Description of Artificial Sequence: Synthetic oligonucleotide
acggcuucguuacuucugu

SEQ ID NO: 2036705 - RNA, 19 nt, Artificial Sequence
  Description of Artificial Sequence: Synthetic oligonucleotide
augugcaggaauauaugga

SEQ ID NO: 2036706 - RNA, 19 nt, Artificial Sequence
  Description of Artificial Sequence: Synthetic oligonucleotide
guugccaaacugguugacc

SEQ ID NO: 2036707 - RNA, 19 nt, Artificial Sequence
  Description of Artificial Sequence: Synthetic oligonucleotide
uguucccagcuguagcagu

SEQ ID NO: 2036708 - RNA, 19 nt, Artificial Sequence
  Description of Artificial Sequence: Synthetic oligonucleotide
gcuuuguaauaugugcagg

SEQ ID NO: 2036709 - RNA, 19 nt, Artificial Sequence
  Description of Artificial Sequence: Synthetic oligonucleotide
guaacacaugggguagccg

SEQ ID NO: 2036710 - RNA, 19 nt, Artificial Sequence
  Description of Artificial Sequence: Synthetic oligonucleotide
gcagucaucgaugacccag

SEQ ID NO: 2036711 - RNA, 19 nt, Artificial Sequence
  Description of Artificial Sequence: Synthetic oligonucleotide
gauggguccauauccgggu

SEQ ID NO: 2036712 - RNA, 19 nt, Artificial Sequence
  Description of Artificial Sequence: Synthetic oligonucleotide
ggagacgugcagaaagccg

SEQ ID NO: 2036713 - RNA, 19 nt, Artificial Sequence
  Description of Artificial Sequence: Synthetic oligonucleotide
uucuacaguccuucucauc

SEQ ID NO: 2036714 - RNA, 19 nt, Artificial Sequence
  Description of Artificial Sequence: Synthetic oligonucleotide
ugguaagcggauacagguu

SEQ ID NO: 2036715 - RNA, 19 nt, Artificial Sequence
  Description of Artificial Sequence: Synthetic oligonucleotide
augacccagucuuguagga

SEQ ID NO: 2036716 - RNA, 19 nt, Artificial Sequence
  Description of Artificial Sequence: Synthetic oligonucleotide
ugcaggaauucaguuguau

SEQ ID NO: 2036717 - RNA, 19 nt, Artificial Sequence
  Description of Artificial Sequence: Synthetic oligonucleotide
agggaacaagagaaaacca

SEQ ID NO: 2036718 - RNA, 19 nt, Artificial Sequence
  Description of Artificial Sequence: Synthetic oligonucleotide
caccagguaauuugaagaa

SEQ ID NO: 2036719 - RNA, 19 nt, Artificial Sequence
  Description of Artificial Sequence: Synthetic oligonucleotide
gacggcuucguuacuucug

SEQ ID NO: 2036720 - RNA, 19 nt, Artificial Sequence
  Description of Artificial Sequence: Synthetic oligonucleotide
gacccagucuuguaggacu

SEQ ID NO: 2036721 - RNA, 19 nt, Artificial Sequence
  Description of Artificial Sequence: Synthetic oligonucleotide
ucaaacaauggcgcagcua

SEQ ID NO: 2036722 - RNA, 19 nt, Artificial Sequence
  Description of Artificial Sequence: Synthetic oligonucleotide
cugcgucccgcucagcagc

SEQ ID NO: 2036723 - RNA, 19 nt, Artificial Sequence
  Description of Artificial Sequence: Synthetic oligonucleotide
uuacaccacuauccaguuc

SEQ ID NO: 2036724 - RNA, 19 nt, Artificial Sequence
  Description of Artificial Sequence: Synthetic oligonucleotide
aguccuucucaucccaauu

SEQ ID NO: 2036725 - RNA, 19 nt, Artificial Sequence
  Description of Artificial Sequence: Synthetic oligonucleotide
gucugcgagcgguucggcg

SEQ ID NO: 2036726 - RNA, 19 nt, Artificial Sequence
  Description of Artificial Sequence: Synthetic oligonucleotide
acuuccgcagggcgggcag

SEQ ID NO: 2036727 - RNA, 19 nt, Artificial Sequence
  Description of Artificial Sequence: Synthetic oligonucleotide
ggaacaagagaaaaccaaa

SEQ ID NO: 2036728 - RNA, 19 nt, Artificial Sequence
  Description of Artificial Sequence: Synthetic oligonucleotide
gcuucguuacuucugugca

SEQ ID NO: 2036729 - RNA, 19 nt, Artificial Sequence
  Description of Artificial Sequence: Synthetic oligonucleotide
acucuucaaacaggaagga

SEQ ID NO: 2036730 - RNA, 19 nt, Artificial Sequence
  Description of Artificial Sequence: Synthetic oligonucleotide
ggugcauugucauacaauu

SEQ ID NO: 2036731 - RNA, 19 nt, Artificial Sequence
  Description of Artificial Sequence: Synthetic oligonucleotide
gagacggcuucguuacuuc

SEQ ID NO: 2036732 - RNA, 19 nt, Artificial Sequence
  Description of Artificial Sequence: Synthetic oligonucleotide
gguaagcggauacagguua

SEQ ID NO: 2036733 - RNA, 19 nt, Artificial Sequence
  Description of Artificial Sequence: Synthetic oligonucleotide
augggguagccggugcucg

SEQ ID NO: 2036734 - RNA, 19 nt, Artificial Sequence
  Description of Artificial Sequence: Synthetic oligonucleotide
gcagcgguuaucugcgucc

SEQ ID NO: 2036735 - RNA, 19 nt, Artificial Sequence
  Description of Artificial Sequence: Synthetic oligonucleotide
cuuggucugcuggauguac

SEQ ID NO: 2036736 - RNA, 19 nt, Artificial Sequence
  Description of Artificial Sequence: Synthetic oligonucleotide
gguucaaaauuuggucucc

SEQ ID NO: 2036737 - RNA, 19 nt, Artificial Sequence
  Description of Artificial Sequence: Synthetic oligonucleotide
ccaccagguaauuugaaga

SEQ ID NO: 2036738 - RNA, 19 nt, Artificial Sequence
  Description of Artificial Sequence: Synthetic oligonucleotide
agcuccgauacaggagacg

SEQ ID NO: 2036739 - RNA, 19 nt, Artificial Sequence
  Description of Artificial Sequence: Synthetic oligonucleotide
uccuugggcuuuguaauau

SEQ ID NO: 2036740 - RNA, 19 nt, Artificial Sequence
  Description of Artificial Sequence: Synthetic oligonucleotide
aaaguuguucccagcugua

SEQ ID NO: 2036741 - RNA, 19 nt, Artificial Sequence
  Description of Artificial Sequence: Synthetic oligonucleotide
cucuugaagcugaaccaga

SEQ ID NO: 2036742 - RNA, 19 nt, Artificial Sequence
  Description of Artificial Sequence: Synthetic oligonucleotide
agacggcuucguuacuucu

SEQ ID NO: 2036743 - RNA, 19 nt, Artificial Sequence
  Description of Artificial Sequence: Synthetic oligonucleotide
auggguccauauccgggug

SEQ ID NO: 2036744 - RNA, 19 nt, Artificial Sequence
  Description of Artificial Sequence: Synthetic oligonucleotide
gaaagccggggccugcgga

SEQ ID NO: 2036745 - RNA, 19 nt, Artificial Sequence
  Description of Artificial Sequence: Synthetic oligonucleotide
auauccgggugcauuguca

SEQ ID NO: 2036746 - RNA, 19 nt, Artificial Sequence
  Description of Artificial Sequence: Synthetic oligonucleotide
gcagcuaccagcuuguaau

SEQ ID NO: 2036747 - RNA, 19 nt, Artificial Sequence
  Description of Artificial Sequence: Synthetic oligonucleotide
cacagagacggcuucguua

SEQ ID NO: 2036748 - RNA, 19 nt, Artificial Sequence
  Description of Artificial Sequence: Synthetic oligonucleotide
ggugcucgugcacaaucag

SEQ ID NO: 2036749 - RNA, 19 nt, Artificial Sequence
  Description of Artificial Sequence: Synthetic oligonucleotide
ccuucuacaguccuucuca

SEQ ID NO: 2036750 - RNA, 19 nt, Artificial Sequence
  Description of Artificial Sequence: Synthetic oligonucleotide
acaugggguagccggugcu

SEQ ID NO: 2036751 - RNA, 19 nt, Artificial Sequence
  Description of Artificial Sequence: Synthetic oligonucleotide
cauauccgggugcauuguc

SEQ ID NO: 2036752 - RNA, 19 nt, Artificial Sequence
  Description of Artificial Sequence: Synthetic oligonucleotide
ggagacuuccgcagggcgg

SEQ ID NO: 2036753 - RNA, 19 nt, Artificial Sequence
  Description of Artificial Sequence: Synthetic oligonucleotide
ucccgcaugcgcugaaauc

SEQ ID NO: 2036754 - RNA, 19 nt, Artificial Sequence
  Description of Artificial Sequence: Synthetic oligonucleotide
aagcgcuuuaggccuucaa

SEQ ID NO: 2036755 - RNA, 19 nt, Artificial Sequence
  Description of Artificial Sequence: Synthetic oligonucleotide
uuaggggcuuggucugcug

SEQ ID NO: 2036756 - RNA, 19 nt, Artificial Sequence
  Description of Artificial Sequence: Synthetic oligonucleotide
cauagaggggcucuuuugu

SEQ ID NO: 2036757 - RNA, 19 nt, Artificial Sequence
  Description of Artificial Sequence: Synthetic oligonucleotide
agcgguuaucugcgucccg

SEQ ID NO: 2036758 - RNA, 19 nt, Artificial Sequence
  Description of Artificial Sequence: Synthetic oligonucleotide
caggguuaggggcuugguc

SEQ ID NO: 2036759 - RNA, 19 nt, Artificial Sequence
  Description of Artificial Sequence: Synthetic oligonucleotide
cuucucaucccaauuuuau

SEQ ID NO: 2036760 - RNA, 19 nt, Artificial Sequence
  Description of Artificial Sequence: Synthetic oligonucleotide
cuugacgacccaguaucuc

SEQ ID NO: 2036761 - RNA, 19 nt, Artificial Sequence
  Description of Artificial Sequence: Synthetic oligonucleotide
uuuaggccuucaacuucau

SEQ ID NO: 2036762 - RNA, 19 nt, Artificial Sequence
  Description of Artificial Sequence: Synthetic oligonucleotide
agacgugcagaaagccggg

SEQ ID NO: 2036763 - RNA, 19 nt, Artificial Sequence
  Description of Artificial Sequence: Synthetic oligonucleotide
gcuuuaggccuucaacuuc

SEQ ID NO: 2036764 - RNA, 19 nt, Artificial Sequence
  Description of Artificial Sequence: Synthetic oligonucleotide
ccugcggagacuuccgcag

SEQ ID NO: 2036765 - RNA, 19 nt, Artificial Sequence
  Description of Artificial Sequence: Synthetic oligonucleotide
cuccgauacaggagacgug

SEQ ID NO: 2036766 - RNA, 19 nt, Artificial Sequence
  Description of Artificial Sequence: Synthetic oligonucleotide
caaugcagucaucgaugac

SEQ ID NO: 2036767 - RNA, 19 nt, Artificial Sequence
  Description of Artificial Sequence: Synthetic oligonucleotide
uaagcggauacagguuaau

SEQ ID NO: 2036768 - RNA, 19 nt, Artificial Sequence
  Description of Artificial Sequence: Synthetic oligonucleotide
acccagucuuguaggacuc

SEQ ID NO: 2036769 - RNA, 19 nt, Artificial Sequence
  Description of Artificial Sequence: Synthetic oligonucleotide
gaacacugucacauguuua

SEQ ID NO: 2036770 - RNA, 19 nt, Artificial Sequence
  Description of Artificial Sequence: Synthetic oligonucleotide
acacugucacauguuuaca

SEQ ID NO: 2036771 - RNA, 19 nt, Artificial Sequence
  Description of Artificial Sequence: Synthetic oligonucleotide
ucucugucauuaagcgcuu

SEQ ID NO: 2036772 - RNA, 19 nt, Artificial Sequence
  Description of Artificial Sequence: Synthetic oligonucleotide
guguguaagcugugcucac

SEQ ID NO: 2036773 - RNA, 19 nt, Artificial Sequence
  Description of Artificial Sequence: Synthetic oligonucleotide
gacccaguaucucugucau

SEQ ID NO: 2036774 - RNA, 19 nt, Artificial Sequence
  Description of Artificial Sequence: Synthetic oligonucleotide
gugcauugucauacaauuc

SEQ ID NO: 2036775 - RNA, 19 nt, Artificial Sequence
  Description of Artificial Sequence: Synthetic oligonucleotide
agagacggcuucguuacuu

SEQ ID NO: 2036776 - RNA, 19 nt, Artificial Sequence
  Description of Artificial Sequence: Synthetic oligonucleotide
guucggcggcaccacagac

SEQ ID NO: 2036777 - RNA, 19 nt, Artificial Sequence
  Description of Artificial Sequence: Synthetic oligonucleotide
gcggauacagguuaauggu

SEQ ID NO: 2036778 - RNA, 19 nt, Artificial Sequence
  Description of Artificial Sequence: Synthetic oligonucleotide
cagguaauuugaagaaagu

SEQ ID NO: 2036779 - RNA, 19 nt, Artificial Sequence
  Description of Artificial Sequence: Synthetic oligonucleotide
cagaaagccggggccugcg

SEQ ID NO: 2036780 - RNA, 19 nt, Artificial Sequence
  Description of Artificial Sequence: Synthetic oligonucleotide
acaugcugaacagcuccga

SEQ ID NO: 2036781 - RNA, 19 nt, Artificial Sequence
  Description of Artificial Sequence: Synthetic oligonucleotide
guauaauugguaagcggau

SEQ ID NO: 2036782 - RNA, 19 nt, Artificial Sequence
  Description of Artificial Sequence: Synthetic oligonucleotide
ccgcccgccauuaacaguc

SEQ ID NO: 2036783 - RNA, 19 nt, Artificial Sequence
  Description of Artificial Sequence: Synthetic oligonucleotide
cccgccauuaacagucgag

SEQ ID NO: 2036784 - RNA, 19 nt, Artificial Sequence
  Description of Artificial Sequence: Synthetic oligonucleotide
agcagcugaggaagacuag

SEQ ID NO: 2036785 - RNA, 19 nt, Artificial Sequence
  Description of Artificial Sequence: Synthetic oligonucleotide
aguuaccaaugcagucauc

SEQ ID NO: 2036786 - RNA, 19 nt, Artificial Sequence
  Description of Artificial Sequence: Synthetic oligonucleotide
ccaguuaccaaugcaguca

SEQ ID NO: 2036787 - RNA, 19 nt, Artificial Sequence
  Description of Artificial Sequence: Synthetic oligonucleotide
cugcgagcgguucggcggc

SEQ ID NO: 2036788 - RNA, 19 nt, Artificial Sequence
  Description of Artificial Sequence: Synthetic oligonucleotide
acuccaucuugacgaccca

SEQ ID NO: 2036789 - RNA, 19 nt, Artificial Sequence
  Description of Artificial Sequence: Synthetic oligonucleotide
guagccggugcucgugcac

SEQ ID NO: 2036790 - RNA, 19 nt, Artificial Sequence
  Description of Artificial Sequence: Synthetic oligonucleotide
ucucauagaggggcucuuu

SEQ ID NO: 2036791 - RNA, 19 nt, Artificial Sequence
  Description of Artificial Sequence: Synthetic oligonucleotide
cgaugacccagucuuguag

SEQ ID NO: 2036792 - RNA, 19 nt, Artificial Sequence
  Description of Artificial Sequence: Synthetic oligonucleotide
agguggcaauuuagggaac

SEQ ID NO: 2036793 - RNA, 19 nt, Artificial Sequence
  Description of Artificial Sequence: Synthetic oligonucleotide
uuaagcgcuuuaggccuuc

SEQ ID NO: 2036794 - RNA, 19 nt, Artificial Sequence
  Description of Artificial Sequence: Synthetic oligonucleotide
caugcgcugaaaucuggcu

SEQ ID NO: 2036795 - RNA, 19 nt, Artificial Sequence
  Description of Artificial Sequence: Synthetic oligonucleotide
caccaguuaccaaugcagu

SEQ ID NO: 2036796 - RNA, 19 nt, Artificial Sequence
  Description of Artificial Sequence: Synthetic oligonucleotide
cagcgguuaucugcguccc

SEQ ID NO: 2036797 - RNA, 19 nt, Artificial Sequence
  Description of Artificial Sequence: Synthetic oligonucleotide
gcgcuuuaggccuucaacu

SEQ ID NO: 2036798 - RNA, 19 nt, Artificial Sequence
  Description of Artificial Sequence: Synthetic oligonucleotide
cggauacagguuaauggug

SEQ ID NO: 2036799 - RNA, 19 nt, Artificial Sequence
  Description of Artificial Sequence: Synthetic oligonucleotide
cagcuguagcaguaacaca

SEQ ID NO: 2036800 - RNA, 19 nt, Artificial Sequence
  Description of Artificial Sequence: Synthetic oligonucleotide
gacugcaaacaaggcuuuc

SEQ ID NO: 2036801 - RNA, 19 nt, Artificial Sequence
  Description of Artificial Sequence: Synthetic oligonucleotide
gcgguuaucugcgucccgc

SEQ ID NO: 2036802 - RNA, 19 nt, Artificial Sequence
  Description of Artificial Sequence: Synthetic oligonucleotide
cagcuccgauacaggagac

SEQ ID NO: 2036803 - RNA, 19 nt, Artificial Sequence
  Description of Artificial Sequence: Synthetic oligonucleotide
cgccauuaacagucgagag

SEQ ID NO: 2036804 - RNA, 19 nt, Artificial Sequence
  Description of Artificial Sequence: Synthetic oligonucleotide
caugggguagccggugcuc

SEQ ID NO: 2036805 - RNA, 19 nt, Artificial Sequence
  Description of Artificial Sequence: Synthetic oligonucleotide
gcuguagcaguaacacaug

SEQ ID NO: 2036806 - RNA, 19 nt, Artificial Sequence
  Description of Artificial Sequence: Synthetic oligonucleotide
ugggguagccggugcucgu

SEQ ID NO: 2036807 - RNA, 19 nt, Artificial Sequence
  Description of Artificial Sequence: Synthetic oligonucleotide
gguuaauggugcgcuccag

SEQ ID NO: 2036808 - RNA, 19 nt, Artificial Sequence
  Description of Artificial Sequence: Synthetic oligonucleotide
uauguuccuugggcuuugu

SEQ ID NO: 2036809 - RNA, 19 nt, Artificial Sequence
  Description of Artificial Sequence: Synthetic oligonucleotide
cccaguaucucugucauua

SEQ ID NO: 2036810 - RNA, 19 nt, Artificial Sequence
  Description of Artificial Sequence: Synthetic oligonucleotide
uggugcgcuccaggguuag

SEQ ID NO: 2036811 - RNA, 19 nt, Artificial Sequence
  Description of Artificial Sequence: Synthetic oligonucleotide
gguuaucugcgucccgcuc

SEQ ID NO: 2036812 - RNA, 19 nt, Artificial Sequence
  Description of Artificial Sequence: Synthetic oligonucleotide
uaagcgcuuuaggccuuca

SEQ ID NO: 2036813 - RNA, 19 nt, Artificial Sequence
  Description of Artificial Sequence: Synthetic oligonucleotide
gugcucgugcacaaucaga

SEQ ID NO: 2036814 - RNA, 19 nt, Artificial Sequence
  Description of Artificial Sequence: Synthetic oligonucleotide
ccgggguuaaguucaccac

SEQ ID NO: 2036815 - RNA, 19 nt, Artificial Sequence
  Description of Artificial Sequence: Synthetic oligonucleotide
ggaaggagguggcaauuua

SEQ ID NO: 2036816 - RNA, 19 nt, Artificial Sequence
  Description of Artificial Sequence: Synthetic oligonucleotide
agacuuccgcagggcgggc

SEQ ID NO: 2036817 - RNA, 19 nt, Artificial Sequence
  Description of Artificial Sequence: Synthetic oligonucleotide
gaaccagaaacaacuucuu

SEQ ID NO: 2036818 - RNA, 19 nt, Artificial Sequence
  Description of Artificial Sequence: Synthetic oligonucleotide
cuagaaaugauggguccau

SEQ ID NO: 2036819 - RNA, 19 nt, Artificial Sequence
  Description of Artificial Sequence: Synthetic oligonucleotide
gcaugcgcugaaaucuggc

SEQ ID NO: 2036820 - RNA, 19 nt, Artificial Sequence
  Description of Artificial Sequence: Synthetic oligonucleotide
auguuccuugggcuuugua

SEQ ID NO: 2036821 - RNA, 19 nt, Artificial Sequence
  Description of Artificial Sequence: Synthetic oligonucleotide
ccuugggcuuuguaauaug

SEQ ID NO: 2036822 - RNA, 19 nt, Artificial Sequence
  Description of Artificial Sequence: Synthetic oligonucleotide
agggcgggcagcgguuauc

SEQ ID NO: 2036823 - RNA, 19 nt, Artificial Sequence
  Description of Artificial Sequence: Synthetic oligonucleotide
gagcgguucggcggcacca

SEQ ID NO: 2036824 - RNA, 19 nt, Artificial Sequence
  Description of Artificial Sequence: Synthetic oligonucleotide
caucuugacgacccaguau

SEQ ID NO: 2036825 - RNA, 19 nt, Artificial Sequence
  Description of Artificial Sequence: Synthetic oligonucleotide
gacgacccaguaucucugu

SEQ ID NO: 2036826 - RNA, 19 nt, Artificial Sequence
  Description of Artificial Sequence: Synthetic oligonucleotide
auuaagcgcuuuaggccuu

SEQ ID NO: 2036827 - RNA, 19 nt, Artificial Sequence
  Description of Artificial Sequence: Synthetic oligonucleotide
ggcagcgguuaucugcguc

SEQ ID NO: 2036828 - RNA, 19 nt, Artificial Sequence
  Description of Artificial Sequence: Synthetic oligonucleotide
caguuaccaaugcagucau

SEQ ID NO: 2036829 - RNA, 19 nt, Artificial Sequence
  Description of Artificial Sequence: Synthetic oligonucleotide
ggguagccggugcucgugc

SEQ ID NO: 2036830 - RNA, 19 nt, Artificial Sequence
  Description of Artificial Sequence: Synthetic oligonucleotide
cagucaucgaugacccagu

SEQ ID NO: 2036831 - RNA, 19 nt, Artificial Sequence
  Description of Artificial Sequence: Synthetic oligonucleotide
uccgcagggcgggcagcgg

SEQ ID NO: 2036832 - RNA, 19 nt, Artificial Sequence
  Description of Artificial Sequence: Synthetic oligonucleotide
gcuccgauacaggagacgu

SEQ ID NO: 2036833 - RNA, 19 nt, Artificial Sequence
  Description of Artificial Sequence: Synthetic oligonucleotide
cggagacuuccgcagggcg

SEQ ID NO: 2036834 - RNA, 19 nt, Artificial Sequence
  Description of Artificial Sequence: Synthetic oligonucleotide
gguucggcggcaccacaga

SEQ ID NO: 2036835 - RNA, 19 nt, Artificial Sequence
  Description of Artificial Sequence: Synthetic oligonucleotide
acaguccuucucaucccaa

SEQ ID NO: 2036836 - RNA, 19 nt, Artificial Sequence
  Description of Artificial Sequence: Synthetic oligonucleotide
cccuucuacaguccuucuc

SEQ ID NO: 2036837 - RNA, 19 nt, Artificial Sequence
  Description of Artificial Sequence: Synthetic oligonucleotide
uccucccgcaugcgcugaa

SEQ ID NO: 2036838 - RNA, 19 nt, Artificial Sequence
  Description of Artificial Sequence: Synthetic oligonucleotide
cgcaugcgcugaaaucugg

SEQ ID NO: 2036839 - RNA, 19 nt, Artificial Sequence
  Description of Artificial Sequence: Synthetic oligonucleotide
cucauagaggggcucuuuu

SEQ ID NO: 2036840 - RNA, 19 nt, Artificial Sequence
  Description of Artificial Sequence: Synthetic oligonucleotide
cuccgggguuaaguucacc

SEQ ID NO: 2036841 - RNA, 19 nt, Artificial Sequence
  Description of Artificial Sequence: Synthetic oligonucleotide
gacuuccgcagggcgggca

SEQ ID NO: 2036842 - RNA, 19 nt, Artificial Sequence
  Description of Artificial Sequence: Synthetic oligonucleotide
gguuaggggcuuggucugc

SEQ ID NO: 2036843 - RNA, 19 nt, Artificial Sequence
  Description of Artificial Sequence: Synthetic oligonucleotide
acccaguaucucugucauu

SEQ ID NO: 2036844 - RNA, 19 nt, Artificial Sequence
  Description of Artificial Sequence: Synthetic oligonucleotide
aggggcucuuuuguaccaa

SEQ ID NO: 2036845 - RNA, 19 nt, Artificial Sequence
  Description of Artificial Sequence: Synthetic oligonucleotide
gucccgcucagcagccgcc

SEQ ID NO: 2036846 - RNA, 19 nt, Artificial Sequence
  Description of Artificial Sequence: Synthetic oligonucleotide
ccgcaugcgcugaaaucug

SEQ ID NO: 2036847 - RNA, 19 nt, Artificial Sequence
  Description of Artificial Sequence: Synthetic oligonucleotide
gccugcggagacuuccgca

SEQ ID NO: 2036848 - RNA, 19 nt, Artificial Sequence
  Description of Artificial Sequence: Synthetic oligonucleotide
ccgccauuaacagucgaga

SEQ ID NO: 2036849 - RNA, 19 nt, Artificial Sequence
  Description of Artificial Sequence: Synthetic oligonucleotide
ccuucucaucccaauuuua

SEQ ID NO: 2036850 - RNA, 19 nt, Artificial Sequence
  Description of Artificial Sequence: Synthetic oligonucleotide
gggccugcggagacuuccg

SEQ ID NO: 2036851 - RNA, 19 nt, Artificial Sequence
  Description of Artificial Sequence: Synthetic oligonucleotide
ggggcucuuuuguaccaaa

SEQ ID NO: 2036852 - RNA, 19 nt, Artificial Sequence
  Description of Artificial Sequence: Synthetic oligonucleotide
cgacccaguaucucuguca

SEQ ID NO: 2036853 - RNA, 19 nt, Artificial Sequence
  Description of Artificial Sequence: Synthetic oligonucleotide
cgugcacaaucagaacccc

SEQ ID NO: 2036854 - RNA, 19 nt, Artificial Sequence
  Description of Artificial Sequence: Synthetic oligonucleotide
acaccacuauccaguucau

SEQ ID NO: 2036855 - RNA, 19 nt, Artificial Sequence
  Description of Artificial Sequence: Synthetic oligonucleotide
gccgccgcccgccauuaac

SEQ ID NO: 2036856 - RNA, 19 nt, Artificial Sequence
  Description of Artificial Sequence: Synthetic oligonucleotide
cucacagagacggcuucgu

SEQ ID NO: 2036857 - RNA, 19 nt, Artificial Sequence
  Description of Artificial Sequence: Synthetic oligonucleotide
guuaggggcuuggucugcu

SEQ ID NO: 2036858 - RNA, 19 nt, Artificial Sequence
  Description of Artificial Sequence: Synthetic oligonucleotide
ccgucugcgagcgguucgg

SEQ ID NO: 2036859 - RNA, 19 nt, Artificial Sequence
  Description of Artificial Sequence: Synthetic oligonucleotide
cccgcaugcgcugaaaucu

SEQ ID NO: 2036860 - RNA, 19 nt, Artificial Sequence
  Description of Artificial Sequence: Synthetic oligonucleotide
auggcgcagcuaccagcuu

SEQ ID NO: 2036861 - RNA, 19 nt, Artificial Sequence
  Description of Artificial Sequence: Synthetic oligonucleotide
gcaggaauauauggauacu

SEQ ID NO: 2036862 - RNA, 19 nt, Artificial Sequence
  Description of Artificial Sequence: Synthetic oligonucleotide
gcggagacuuccgcagggc

SEQ ID NO: 2036863 - RNA, 19 nt, Artificial Sequence
  Description of Artificial Sequence: Synthetic oligonucleotide
ugcgagcgguucggcggca

SEQ ID NO: 2036864 - RNA, 19 nt, Artificial Sequence
  Description of Artificial Sequence: Synthetic oligonucleotide
gggugcauugucauacaau

SEQ ID NO: 2036865 - RNA, 19 nt, Artificial Sequence
  Description of Artificial Sequence: Synthetic oligonucleotide
ggugcgcuccaggguuagg

SEQ ID NO: 2036866 - RNA, 19 nt, Artificial Sequence
  Description of Artificial Sequence: Synthetic oligonucleotide
cccggggccagcccgucug

SEQ ID NO: 2036867 - RNA, 19 nt, Artificial Sequence
  Description of Artificial Sequence: Synthetic oligonucleotide
cgucccgcucagcagccgc

SEQ ID NO: 2036868 - RNA, 19 nt, Artificial Sequence
  Description of Artificial Sequence: Synthetic oligonucleotide
ccgccgcccgccauuaaca

SEQ ID NO: 2036869 - RNA, 19 nt, Artificial Sequence
  Description of Artificial Sequence: Synthetic oligonucleotide
cgggacugcaaacaaggcu

SEQ ID NO: 2036870 - RNA, 19 nt, Artificial Sequence
  Description of Artificial Sequence: Synthetic oligonucleotide
cggugcucgugcacaauca

SEQ ID NO: 2036871 - RNA, 19 nt, Artificial Sequence
  Description of Artificial Sequence: Synthetic oligonucleotide
ggcgcagcuaccagcuugu

SEQ ID NO: 2036872 - RNA, 19 nt, Artificial Sequence
  Description of Artificial Sequence: Synthetic oligonucleotide
cgccgcccgccauuaacag

SEQ ID NO: 2036873 - RNA, 19 nt, Artificial Sequence
  Description of Artificial Sequence: Synthetic oligonucleotide
gcugaaccagaaacaacuu

SEQ ID NO: 2036874 - RNA, 19 nt, Artificial Sequence
  Description of Artificial Sequence: Synthetic oligonucleotide
gcccgccauuaacagucga

SEQ ID NO: 2036875 - RNA, 19 nt, Artificial Sequence
  Description of Artificial Sequence: Synthetic oligonucleotide
cgcccgccauuaacagucg

SEQ ID NO: 2036876 - RNA, 19 nt, Artificial Sequence
  Description of Artificial Sequence: Synthetic oligonucleotide
cgagcgguucggcggcacc

SEQ ID NO: 2036877 - RNA, 19 nt, Artificial Sequence
  Description of Artificial Sequence: Synthetic oligonucleotide
ccgggugcauugucauaca

SEQ ID NO: 2036878 - RNA, 19 nt, Artificial Sequence
  Description of Artificial Sequence: Synthetic oligonucleotide
cguuacuucugugcaggaa

SEQ ID NO: 2036879 - RNA, 19 nt, Artificial Sequence
  Description of Artificial Sequence: Synthetic oligonucleotide
gcgguucggcggcaccaca

SEQ ID NO: 2036880 - RNA, 19 nt, Artificial Sequence
  Description of Artificial Sequence: Synthetic oligonucleotide
gcgcugaaaucuggcugca

SEQ ID NO: 2036881 - RNA, 19 nt, Artificial Sequence
  Description of Artificial Sequence: Synthetic oligonucleotide
cgcagcuaccagcuuguaa

SEQ ID NO: 2036882 - RNA, 19 nt, Artificial Sequence
  Description of Artificial Sequence: Synthetic oligonucleotide
cagagacggcuucguuacu

SEQ ID NO: 2036883 - RNA, 19 nt, Artificial Sequence
  Description of Artificial Sequence: Synthetic oligonucleotide
agcccgucugcgagcgguu

SEQ ID NO: 2036884 - RNA, 19 nt, Artificial Sequence
  Description of Artificial Sequence: Synthetic oligonucleotide
gcgucccgcucagcagccg

SEQ ID NO: 2036885 - RNA, 19 nt, Artificial Sequence
  Description of Artificial Sequence: Synthetic oligonucleotide
gccgcccgccauuaacagu

SEQ ID NO: 2036886 - RNA, 19 nt, Artificial Sequence
  Description of Artificial Sequence: Synthetic oligonucleotide
cgggugcauugucauacaa

SEQ ID NO: 2036887 - RNA, 19 nt, Artificial Sequence
  Description of Artificial Sequence: Synthetic oligonucleotide
ccagcccgucugcgagcgg

SEQ ID NO: 2036888 - RNA, 19 nt, Artificial Sequence
  Description of Artificial Sequence: Synthetic oligonucleotide
gcccgucugcgagcgguuc

SEQ ID NO: 2036889 - RNA, 19 nt, Artificial Sequence
  Description of Artificial Sequence: Synthetic oligonucleotide
gcgagcgguucggcggcac

SEQ ID NO: 2036890 - RNA, 19 nt, Artificial Sequence
  Description of Artificial Sequence: Synthetic oligonucleotide
cgucugcgagcgguucggc

SEQ ID NO: 2036891 - RNA, 19 nt, Artificial Sequence
  Description of Artificial Sequence: Synthetic oligonucleotide
ccauauccgggugcauugu

SEQ ID NO: 2036892 - RNA, 19 nt, Artificial Sequence
  Description of Artificial Sequence: Synthetic oligonucleotide
gcagggcgggcagcgguua

SEQ ID NO: 2036893 - RNA, 19 nt, Artificial Sequence
  Description of Artificial Sequence: Synthetic oligonucleotide
cagggcgggcagcgguuau

SEQ ID NO: 2036894 - RNA, 19 nt, Artificial Sequence
  Description of Artificial Sequence: Synthetic oligonucleotide
cgguuaucugcgucccgcu

SEQ ID NO: 2036895 - RNA, 19 nt, Artificial Sequence
  Description of Artificial Sequence: Synthetic oligonucleotide
gguccauauccgggugcau

SEQ ID NO: 2036896 - RNA, 19 nt, Artificial Sequence
  Description of Artificial Sequence: Synthetic oligonucleotide
ccccuucuacaguccuucu

SEQ ID NO: 2036897 - RNA, 19 nt, Artificial Sequence
  Description of Artificial Sequence: Synthetic oligonucleotide
cgcugaaaucuggcugcaa

SEQ ID NO: 2036898 - RNA, 19 nt, Artificial Sequence
  Description of Artificial Sequence: Synthetic oligonucleotide
cggcggcaccacagacaug

SEQ ID NO: 2036899 - RNA, 19 nt, Artificial Sequence
  Description of Artificial Sequence: Synthetic oligonucleotide
gcgcagcuaccagcuugua

SEQ ID NO: 2036900 - RNA, 19 nt, Artificial Sequence
  Description of Artificial Sequence: Synthetic oligonucleotide
ccggggccugcggagacuu

SEQ ID NO: 2036901 - RNA, 19 nt, Artificial Sequence
  Description of Artificial Sequence: Synthetic oligonucleotide
ugggauuuaaacaggagcg

SEQ ID NO: 2036902 - RNA, 19 nt, Artificial Sequence
  Description of Artificial Sequence: Synthetic oligonucleotide
ucucaaacagcgcagaccg

SEQ ID NO: 2036903 - RNA, 19 nt, Artificial Sequence
  Description of Artificial Sequence: Synthetic oligonucleotide
aacuuagcaacccuacuac

SEQ ID NO: 2036904 - RNA, 19 nt, Artificial Sequence
  Description of Artificial Sequence: Synthetic oligonucleotide
ucuauuagugcaaacucug

SEQ ID NO: 2036905 - RNA, 19 nt, Artificial Sequence
  Description of Artificial Sequence: Synthetic oligonucleotide
uuuguguaggaaauaaacu

SEQ ID NO: 2036906 - RNA, 19 nt, Artificial Sequence
  Description of Artificial Sequence: Synthetic oligonucleotide
uccuagacaaagcacagug

SEQ ID NO: 2036907 - RNA, 19 nt, Artificial Sequence
  Description of Artificial Sequence: Synthetic oligonucleotide
ucuucuagacccaccacgg

SEQ ID NO: 2036908 - RNA, 19 nt, Artificial Sequence
  Description of Artificial Sequence: Synthetic oligonucleotide
acggaggcgacucaguucc

SEQ ID NO: 2036909 - RNA, 19 nt, Artificial Sequence
  Description of Artificial Sequence: Synthetic oligonucleotide
aaauaaacuggcgacggag

SEQ ID NO: 2036910 - RNA, 19 nt, Artificial Sequence
  Description of Artificial Sequence: Synthetic oligonucleotide
uguaggaaauaaacuggcg

SEQ ID NO: 2036911 - RNA, 19 nt, Artificial Sequence
  Description of Artificial Sequence: Synthetic oligonucleotide
auaaacuggcgacggaggc

SEQ ID NO: 2036912 - RNA, 19 nt, Artificial Sequence
  Description of Artificial Sequence: Synthetic oligonucleotide
ucaagggccggguaaacgg

SEQ ID NO: 2036913 - RNA, 19 nt, Artificial Sequence
  Description of Artificial Sequence: Synthetic oligonucleotide
agagucgggaucuucaaag

SEQ ID NO: 2036914 - RNA, 19 nt, Artificial Sequence
  Description of Artificial Sequence: Synthetic oligonucleotide
agcaucguccaccacgugc

SEQ ID NO: 2036915 - RNA, 19 nt, Artificial Sequence
  Description of Artificial Sequence: Synthetic oligonucleotide
ucuagggccacgcaugugc

SEQ ID NO: 2036916 - RNA, 19 nt, Artificial Sequence
  Description of Artificial Sequence: Synthetic oligonucleotide
uuugcuagugagccggcgg

SEQ ID NO: 2036917 - RNA, 19 nt, Artificial Sequence
  Description of Artificial Sequence: Synthetic oligonucleotide
aaacuuagcaacccuacua

SEQ ID NO: 2036918 - RNA, 19 nt, Artificial Sequence
  Description of Artificial Sequence: Synthetic oligonucleotide
uccgccaaggucaagggcc

SEQ ID NO: 2036919 - RNA, 19 nt, Artificial Sequence
  Description of Artificial Sequence: Synthetic oligonucleotide
aauaaacuggcgacggagg

SEQ ID NO: 2036920 - RNA, 19 nt, Artificial Sequence
  Description of Artificial Sequence: Synthetic oligonucleotide
cuuagcaacccuacuacag

SEQ ID NO: 2036921 - RNA, 19 nt, Artificial Sequence
  Description of Artificial Sequence: Synthetic oligonucleotide
cacaucuccggguacagcg

SEQ ID NO: 2036922 - RNA, 19 nt, Artificial Sequence
  Description of Artificial Sequence: Synthetic oligonucleotide
aaagcgcugcgccaaggac

SEQ ID NO: 2036923 - RNA, 19 nt, Artificial Sequence
  Description of Artificial Sequence: Synthetic oligonucleotide
ucaaacuuagcaacccuac

SEQ ID NO: 2036924 - RNA, 19 nt, Artificial Sequence
  Description of Artificial Sequence: Synthetic oligonucleotide
uggugcagaaaguugcccg

SEQ ID NO: 2036925 - RNA, 19 nt, Artificial Sequence
  Description of Artificial Sequence: Synthetic oligonucleotide
cucuucuagacccaccacg

SEQ ID NO: 2036926 - RNA, 19 nt, Artificial Sequence
  Description of Artificial Sequence: Synthetic oligonucleotide
aacagcgcagaccggaucu

SEQ ID NO: 2036927 - RNA, 19 nt, Artificial Sequence
  Description of Artificial Sequence: Synthetic oligonucleotide
uucuagacccaccacggug

SEQ ID NO: 2036928 - RNA, 19 nt, Artificial Sequence
  Description of Artificial Sequence: Synthetic oligonucleotide
uuagcaacccuacuacagu

SEQ ID NO: 2036929 - RNA, 19 nt, Artificial Sequence
  Description of Artificial Sequence: Synthetic oligonucleotide
uaaaccaggcagagcgucg

SEQ ID NO: 2036930 - RNA, 19 nt, Artificial Sequence
  Description of Artificial Sequence: Synthetic oligonucleotide
gaugaccacguccugccgg

SEQ ID NO: 2036931 - RNA, 19 nt, Artificial Sequence
  Description of Artificial Sequence: Synthetic oligonucleotide
uagcucuucgguacgcugg

SEQ ID NO: 2036932 - RNA, 19 nt, Artificial Sequence
  Description of Artificial Sequence: Synthetic oligonucleotide
uacuacagugcgcucugcg

SEQ ID NO: 2036933 - RNA, 19 nt, Artificial Sequence
  Description of Artificial Sequence: Synthetic oligonucleotide
aaguguuagcacaucuccg

SEQ ID NO: 2036934 - RNA, 19 nt, Artificial Sequence
  Description of Artificial Sequence: Synthetic oligonucleotide
uaccggaagcccuugaugu

SEQ ID NO: 2036935 - RNA, 19 nt, Artificial Sequence
  Description of Artificial Sequence: Synthetic oligonucleotide
aacccuacuacagugcgcu

SEQ ID NO: 2036936 - RNA, 19 nt, Artificial Sequence
  Description of Artificial Sequence: Synthetic oligonucleotide
aguuccgccaaggucaagg

SEQ ID NO: 2036937 - RNA, 19 nt, Artificial Sequence
  Description of Artificial Sequence: Synthetic oligonucleotide
accacggugaacaaagguc

SEQ ID NO: 2036938 - RNA, 19 nt, Artificial Sequence
  Description of Artificial Sequence: Synthetic oligonucleotide
aaacagcgcagaccggauc

SEQ ID NO: 2036939 - RNA, 19 nt, Artificial Sequence
  Description of Artificial Sequence: Synthetic oligonucleotide
caacggcucuucuagaccc

SEQ ID NO: 2036940 - RNA, 19 nt, Artificial Sequence
  Description of Artificial Sequence: Synthetic oligonucleotide
gauguaguucaccgagucc

SEQ ID NO: 2036941 - RNA, 19 nt, Artificial Sequence
  Description of Artificial Sequence: Synthetic oligonucleotide
ugcagaaaguugcccgagg

SEQ ID NO: 2036942 - RNA, 19 nt, Artificial Sequence
  Description of Artificial Sequence: Synthetic oligonucleotide
ucaaacagcgcagaccgga

SEQ ID NO: 2036943 - RNA, 19 nt, Artificial Sequence
  Description of Artificial Sequence: Synthetic oligonucleotide
uucucaaacagcgcagacc

SEQ ID NO: 2036944 - RNA, 19 nt, Artificial Sequence
  Description of Artificial Sequence: Synthetic oligonucleotide
gucaacaccuggcucgugg

SEQ ID NO: 2036945 - RNA, 19 nt, Artificial Sequence
  Description of Artificial Sequence: Synthetic oligonucleotide
auuucuuccggauccaguu

SEQ ID NO: 2036946 - RNA, 19 nt, Artificial Sequence
  Description of Artificial Sequence: Synthetic oligonucleotide
ggaaauaaacuggcgacgg

SEQ ID NO: 2036947 - RNA, 19 nt, Artificial Sequence
  Description of Artificial Sequence: Synthetic oligonucleotide
uaaacuggcgacggaggcg

SEQ ID NO: 2036948 - RNA, 19 nt, Artificial Sequence
  Description of Artificial Sequence: Synthetic oligonucleotide
uagcaacccuacuacagug

SEQ ID NO: 2036949 - RNA, 19 nt, Artificial Sequence
  Description of Artificial Sequence: Synthetic oligonucleotide
ugcaguaaaccaggcagag

SEQ ID NO: 2036950 - RNA, 19 nt, Artificial Sequence
  Description of Artificial Sequence: Synthetic oligonucleotide
agcucuucgguacgcuggc

SEQ ID NO: 2036951 - RNA, 19 nt, Artificial Sequence
  Description of Artificial Sequence: Synthetic oligonucleotide
accucuauuagugcaaacu

SEQ ID NO: 2036952 - RNA, 19 nt, Artificial Sequence
  Description of Artificial Sequence: Synthetic oligonucleotide
gugaacaaaggucgguccc

SEQ ID NO: 2036953 - RNA, 19 nt, Artificial Sequence
  Description of Artificial Sequence: Synthetic oligonucleotide
agcugguagguuugacggc

SEQ ID NO: 2036954 - RNA, 19 nt, Artificial Sequence
  Description of Artificial Sequence: Synthetic oligonucleotide
gacugcguagacugauggg

SEQ ID NO: 2036955 - RNA, 19 nt, Artificial Sequence
  Description of Artificial Sequence: Synthetic oligonucleotide
uugcuagugagccggcggc

SEQ ID NO: 2036956 - RNA, 19 nt, Artificial Sequence
  Description of Artificial Sequence: Synthetic oligonucleotide
agcgccaucccacuaccuc

SEQ ID NO: 2036957 - RNA, 19 nt, Artificial Sequence
  Description of Artificial Sequence: Synthetic oligonucleotide
gguacagcgcucuucuggg

SEQ ID NO: 2036958 - RNA, 19 nt, Artificial Sequence
  Description of Artificial Sequence: Synthetic oligonucleotide
aggagcgccaucccacuac

SEQ ID NO: 2036959 - RNA, 19 nt, Artificial Sequence
  Description of Artificial Sequence: Synthetic oligonucleotide
cugaccauucuuccuagac

SEQ ID NO: 2036960 - RNA, 19 nt, Artificial Sequence
  Description of Artificial Sequence: Synthetic oligonucleotide
ccacggugaacaaaggucg

SEQ ID NO: 2036961 - RNA, 19 nt, Artificial Sequence
  Description of Artificial Sequence: Synthetic oligonucleotide
aaggacuccaagaguuggg

SEQ ID NO: 2036962 - RNA, 19 nt, Artificial Sequence
  Description of Artificial Sequence: Synthetic oligonucleotide
agucaaacuuagcaacccu

SEQ ID NO: 2036963 - RNA, 19 nt, Artificial Sequence
  Description of Artificial Sequence: Synthetic oligonucleotide
aaacgggaagugcuccgug

SEQ ID NO: 2036964 - RNA, 19 nt, Artificial Sequence
  Description of Artificial Sequence: Synthetic oligonucleotide
guguuagcacaucuccggg

SEQ ID NO: 2036965 - RNA, 19 nt, Artificial Sequence
  Description of Artificial Sequence: Synthetic oligonucleotide
uacagcgcucuucugggcu

SEQ ID NO: 2036966 - RNA, 19 nt, Artificial Sequence
  Description of Artificial Sequence: Synthetic oligonucleotide
cccacuaccucuauuagug

SEQ ID NO: 2036967 - RNA, 19 nt, Artificial Sequence
  Description of Artificial Sequence: Synthetic oligonucleotide
ugccccguuugcuagugag

SEQ ID NO: 2036968 - RNA, 19 nt, Artificial Sequence
  Description of Artificial Sequence: Synthetic oligonucleotide
cucucuagggccacgcaug

SEQ ID NO: 2036969 - RNA, 19 nt, Artificial Sequence
  Description of Artificial Sequence: Synthetic oligonucleotide
ugaacaaaggucgguccca

SEQ ID NO: 2036970 - RNA, 19 nt, Artificial Sequence
  Description of Artificial Sequence: Synthetic oligonucleotide
aaaguugcccgaggcuagg

SEQ ID NO: 2036971 - RNA, 19 nt, Artificial Sequence
  Description of Artificial Sequence: Synthetic oligonucleotide
agcaacccuacuacagugc

SEQ ID NO: 2036972 - RNA, 19 nt, Artificial Sequence
  Description of Artificial Sequence: Synthetic oligonucleotide
aggacuccaagaguugggg

SEQ ID NO: 2036973 - RNA, 19 nt, Artificial Sequence
  Description of Artificial Sequence: Synthetic oligonucleotide
acuuagcaacccuacuaca

SEQ ID NO: 2036974 - RNA, 19 nt, Artificial Sequence
  Description of Artificial Sequence: Synthetic oligonucleotide
guugcccgaggcuaggggc

SEQ ID NO: 2036975 - RNA, 19 nt, Artificial Sequence
  Description of Artificial Sequence: Synthetic oligonucleotide
ggguacagcgcucuucugg

SEQ ID NO: 2036976 - RNA, 19 nt, Artificial Sequence
  Description of Artificial Sequence: Synthetic oligonucleotide
acuccaagaguuggggagg

SEQ ID NO: 2036977 - RNA, 19 nt, Artificial Sequence
  Description of Artificial Sequence: Synthetic oligonucleotide
agaaaguugcccgaggcua

SEQ ID NO: 2036978 - RNA, 19 nt, Artificial Sequence
  Description of Artificial Sequence: Synthetic oligonucleotide
ucuucgguacgcuggcucu

SEQ ID NO: 2036979 - RNA, 19 nt, Artificial Sequence
  Description of Artificial Sequence: Synthetic oligonucleotide
uuugcgggcuccucggacu

SEQ ID NO: 2036980 - RNA, 19 nt, Artificial Sequence
  Description of Artificial Sequence: Synthetic oligonucleotide
gaaauaaacuggcgacgga

SEQ ID NO: 2036981 - RNA, 19 nt, Artificial Sequence
  Description of Artificial Sequence: Synthetic oligonucleotide
ugguagguuugacggcggg

SEQ ID NO: 2036982 - RNA, 19 nt, Artificial Sequence
  Description of Artificial Sequence: Synthetic oligonucleotide
ggauuuaaacaggagcgcc

SEQ ID NO: 2036983 - RNA, 19 nt, Artificial Sequence
  Description of Artificial Sequence: Synthetic oligonucleotide
uugacggcgggauuucuuc

SEQ ID NO: 2036984 - RNA, 19 nt, Artificial Sequence
  Description of Artificial Sequence: Synthetic oligonucleotide
uguuggucagcuggggcag

SEQ ID NO: 2036985 - RNA, 19 nt, Artificial Sequence
  Description of Artificial Sequence: Synthetic oligonucleotide
gucgggaucuucaaagcgc

SEQ ID NO: 2036986 - RNA, 19 nt, Artificial Sequence
  Description of Artificial Sequence: Synthetic oligonucleotide
ggacugcguagacugaugg

SEQ ID NO: 2036987 - RNA, 19 nt, Artificial Sequence
  Description of Artificial Sequence: Synthetic oligonucleotide
ggugaacaaaggucggucc

SEQ ID NO: 2036988 - RNA, 19 nt, Artificial Sequence
  Description of Artificial Sequence: Synthetic oligonucleotide
aucccacuaccucuauuag

SEQ ID NO: 2036989 - RNA, 19 nt, Artificial Sequence
  Description of Artificial Sequence: Synthetic oligonucleotide
gcagcugguagguuugacg

SEQ ID NO: 2036990 - RNA, 19 nt, Artificial Sequence
  Description of Artificial Sequence: Synthetic oligonucleotide
guucucguuguugggaugc

SEQ ID NO: 2036991 - RNA, 19 nt, Artificial Sequence
  Description of Artificial Sequence: Synthetic oligonucleotide
guuccgccaaggucaaggg

SEQ ID NO: 2036992 - RNA, 19 nt, Artificial Sequence
  Description of Artificial Sequence: Synthetic oligonucleotide
gcaacccuacuacagugcg

SEQ ID NO: 2036993 - RNA, 19 nt, Artificial Sequence
  Description of Artificial Sequence: Synthetic oligonucleotide
caccguguggcccucgccg

SEQ ID NO: 2036994 - RNA, 19 nt, Artificial Sequence
  Description of Artificial Sequence: Synthetic oligonucleotide
cccuugauguaguucaccg

SEQ ID NO: 2036995 - RNA, 19 nt, Artificial Sequence
  Description of Artificial Sequence: Synthetic oligonucleotide
cagaccggaucucagccag

SEQ ID NO: 2036996 - RNA, 19 nt, Artificial Sequence
  Description of Artificial Sequence: Synthetic oligonucleotide
caagggccggguaaacggg

SEQ ID NO: 2036997 - RNA, 19 nt, Artificial Sequence
  Description of Artificial Sequence: Synthetic oligonucleotide
ucccacuaccucuauuagu

SEQ ID NO: 2036998 - RNA, 19 nt, Artificial Sequence
  Description of Artificial Sequence: Synthetic oligonucleotide
ugcguagacugauggggug

SEQ ID NO: 2036999 - RNA, 19 nt, Artificial Sequence
  Description of Artificial Sequence: Synthetic oligonucleotide
guaccggaagcccuugaug

SEQ ID NO: 2037000 - RNA, 19 nt, Artificial Sequence
  Description of Artificial Sequence: Synthetic oligonucleotide
agcaccgaagcaucgucca

SEQ ID NO: 2037001 - RNA, 19 nt, Artificial Sequence
  Description of Artificial Sequence: Synthetic oligonucleotide
ggggcaacggcucuucuag

SEQ ID NO: 2037002 - RNA, 19 nt, Artificial Sequence
  Description of Artificial Sequence: Synthetic oligonucleotide
guucaccgaguccaggaug

SEQ ID NO: 2037003 - RNA, 19 nt, Artificial Sequence
  Description of Artificial Sequence: Synthetic oligonucleotide
gaacaaaggucggucccag

SEQ ID NO: 2037004 - RNA, 19 nt, Artificial Sequence
  Description of Artificial Sequence: Synthetic oligonucleotide
guaugcaguaaaccaggca

SEQ ID NO: 2037005 - RNA, 19 nt, Artificial Sequence
  Description of Artificial Sequence: Synthetic oligonucleotide
uuuaaacaggagcgccauc

SEQ ID NO: 2037006 - RNA, 19 nt, Artificial Sequence
  Description of Artificial Sequence: Synthetic oligonucleotide
agugggauuuaaacaggag

SEQ ID NO: 2037007 - RNA, 19 nt, Artificial Sequence
  Description of Artificial Sequence: Synthetic oligonucleotide
agucgccguacaccgucgc

SEQ ID NO: 2037008 - RNA, 19 nt, Artificial Sequence
  Description of Artificial Sequence: Synthetic oligonucleotide
gaggcgacucaguuccgcc

SEQ ID NO: 2037009 - RNA, 19 nt, Artificial Sequence
  Description of Artificial Sequence: Synthetic oligonucleotide
guagcucuucgguacgcug

SEQ ID NO: 2037010 - RNA, 19 nt, Artificial Sequence
  Description of Artificial Sequence: Synthetic oligonucleotide
gcugguagguuugacggcg

SEQ ID NO: 2037011 - RNA, 19 nt, Artificial Sequence
  Description of Artificial Sequence: Synthetic oligonucleotide
cacuaccucuauuagugca

SEQ ID NO: 2037012 - RNA, 19 nt, Artificial Sequence
  Description of Artificial Sequence: Synthetic oligonucleotide
acaucuccggguacagcgc

SEQ ID NO: 2037013 - RNA, 19 nt, Artificial Sequence
  Description of Artificial Sequence: Synthetic oligonucleotide
gccggguucucaaacagcg

SEQ ID NO: 2037014 - RNA, 19 nt, Artificial Sequence
  Description of Artificial Sequence: Synthetic oligonucleotide
aggcagagcgucgugcgcg

SEQ ID NO: 2037015 - RNA, 19 nt, Artificial Sequence
  Description of Artificial Sequence: Synthetic oligonucleotide
auccucucuagggccacgc

SEQ ID NO: 2037016 - RNA, 19 nt, Artificial Sequence
  Description of Artificial Sequence: Synthetic oligonucleotide
acauguuggucagcugggg

SEQ ID NO: 2037017 - RNA, 19 nt, Artificial Sequence
  Description of Artificial Sequence: Synthetic oligonucleotide
uacaccgucgcguccuggu

SEQ ID NO: 2037018 - RNA, 19 nt, Artificial Sequence
  Description of Artificial Sequence: Synthetic oligonucleotide
aaguugcccgaggcuaggg

SEQ ID NO: 2037019 - RNA, 19 nt, Artificial Sequence
  Description of Artificial Sequence: Synthetic oligonucleotide
uaaacgggaagugcuccgu

SEQ ID NO: 2037020 - RNA, 19 nt, Artificial Sequence
  Description of Artificial Sequence: Synthetic oligonucleotide
gucaagggccggguaaacg

SEQ ID NO: 2037021 - RNA, 19 nt, Artificial Sequence
  Description of Artificial Sequence: Synthetic oligonucleotide
gaccgcagcgccuucucac

SEQ ID NO: 2037022 - RNA, 19 nt, Artificial Sequence
  Description of Artificial Sequence: Synthetic oligonucleotide
ccucuauuagugcaaacuc

SEQ ID NO: 2037023 - RNA, 19 nt, Artificial Sequence
  Description of Artificial Sequence: Synthetic oligonucleotide
ucgacggcagcccgcagaa

SEQ ID NO: 2037024 - RNA, 19 nt, Artificial Sequence
  Description of Artificial Sequence: Synthetic oligonucleotide
cuacagugcgcucugcgca

SEQ ID NO: 2037025 - RNA, 19 nt, Artificial Sequence
  Description of Artificial Sequence: Synthetic oligonucleotide
cuucucacgggcggagucg

SEQ ID NO: 2037026 - RNA, 19 nt, Artificial Sequence
  Description of Artificial Sequence: Synthetic oligonucleotide
gcggagucgccguacaccg

SEQ ID NO: 2037027 - RNA, 19 nt, Artificial Sequence
  Description of Artificial Sequence: Synthetic oligonucleotide
uacagugcgcucugcgcac

SEQ ID NO: 2037028 - RNA, 19 nt, Artificial Sequence
  Description of Artificial Sequence: Synthetic oligonucleotide
caccgaagcaucguccacc

SEQ ID NO: 2037029 - RNA, 19 nt, Artificial Sequence
  Description of Artificial Sequence: Synthetic oligonucleotide
caacccuacuacagugcgc

SEQ ID NO: 2037030 - RNA, 19 nt, Artificial Sequence
  Description of Artificial Sequence: Synthetic oligonucleotide
uugcccgaggcuaggggcu

SEQ ID NO: 2037031 - RNA, 19 nt, Artificial Sequence
  Description of Artificial Sequence: Synthetic oligonucleotide
ugcuagugagccggcggcg

SEQ ID NO: 2037032 - RNA, 19 nt, Artificial Sequence
  Description of Artificial Sequence: Synthetic oligonucleotide
cucugcgcacuuucugacc

SEQ ID NO: 2037033 - RNA, 19 nt, Artificial Sequence
  Description of Artificial Sequence: Synthetic oligonucleotide
accguguggcccucgccgg

SEQ ID NO: 2037034 - RNA, 19 nt, Artificial Sequence
  Description of Artificial Sequence: Synthetic oligonucleotide
gggcguaugcaguaaacca

SEQ ID NO: 2037035 - RNA, 19 nt, Artificial Sequence
  Description of Artificial Sequence: Synthetic oligonucleotide
gacggaggcgacucaguuc

SEQ ID NO: 2037036 - RNA, 19 nt, Artificial Sequence
  Description of Artificial Sequence: Synthetic oligonucleotide
cagugggauuuaaacagga

SEQ ID NO: 2037037 - RNA, 19 nt, Artificial Sequence
  Description of Artificial Sequence: Synthetic oligonucleotide
cuagugagccggcggcgcg

SEQ ID NO: 2037038 - RNA, 19 nt, Artificial Sequence
  Description of Artificial Sequence: Synthetic oligonucleotide
cucuucgguacgcuggcuc

SEQ ID NO: 2037039 - RNA, 19 nt, Artificial Sequence
  Description of Artificial Sequence: Synthetic oligonucleotide
guuugcuagugagccggcg

SEQ ID NO: 2037040 - RNA, 19 nt, Artificial Sequence
  Description of Artificial Sequence: Synthetic oligonucleotide
uagggccacgcaugugcgg

SEQ ID NO: 2037041 - RNA, 19 nt, Artificial Sequence
  Description of Artificial Sequence: Synthetic oligonucleotide
gggauuuaaacaggagcgc

SEQ ID NO: 2037042 - RNA, 19 nt, Artificial Sequence
  Description of Artificial Sequence: Synthetic oligonucleotide
acgggaagugcuccguggu

SEQ ID NO: 2037043 - RNA, 19 nt, Artificial Sequence
  Description of Artificial Sequence: Synthetic oligonucleotide
cuuugcgggcuccucggac

SEQ ID NO: 2037044 - RNA, 19 nt, Artificial Sequence
  Description of Artificial Sequence: Synthetic oligonucleotide
acuaccucuauuagugcaa

SEQ ID NO: 2037045 - RNA, 19 nt, Artificial Sequence
  Description of Artificial Sequence: Synthetic oligonucleotide
uaccucuauuagugcaaac

SEQ ID NO: 2037046 - RNA, 19 nt, Artificial Sequence
  Description of Artificial Sequence: Synthetic oligonucleotide
uuccuagacaaagcacagu

SEQ ID NO: 2037047 - RNA, 19 nt, Artificial Sequence
  Description of Artificial Sequence: Synthetic oligonucleotide
uacgcuggcucuugccgcu

SEQ ID NO: 2037048 - RNA, 19 nt, Artificial Sequence
  Description of Artificial Sequence: Synthetic oligonucleotide
aaccaggcagagcgucgug

SEQ ID NO: 2037049 - RNA, 19 nt, Artificial Sequence
  Description of Artificial Sequence: Synthetic oligonucleotide
cagcccgcagaacaccacc

SEQ ID NO: 2037050 - RNA, 19 nt, Artificial Sequence
  Description of Artificial Sequence: Synthetic oligonucleotide
uucucacgggcggagucgc

SEQ ID NO: 2037051 - RNA, 19 nt, Artificial Sequence
  Description of Artificial Sequence: Synthetic oligonucleotide
ucguggccugauccaacug

SEQ ID NO: 2037052 - RNA, 19 nt, Artificial Sequence
  Description of Artificial Sequence: Synthetic oligonucleotide
cucacgggcggagucgccg

SEQ ID NO: 2037053 - RNA, 19 nt, Artificial Sequence
  Description of Artificial Sequence: Synthetic oligonucleotide
ugcgcucugcgcacuuucu

SEQ ID NO: 2037054 - RNA, 19 nt, Artificial Sequence
  Description of Artificial Sequence: Synthetic oligonucleotide
gucgccguacaccgucgcg

SEQ ID NO: 2037055 - RNA, 19 nt, Artificial Sequence
  Description of Artificial Sequence: Synthetic oligonucleotide
acaggagcgccaucccacu

SEQ ID NO: 2037056 - RNA, 19 nt, Artificial Sequence
  Description of Artificial Sequence: Synthetic oligonucleotide
gaagcaucguccaccacgu

SEQ ID NO: 2037057 - RNA, 19 nt, Artificial Sequence
  Description of Artificial Sequence: Synthetic oligonucleotide
gcaacggcucuucuagacc

SEQ ID NO: 2037058 - RNA, 19 nt, Artificial Sequence
  Description of Artificial Sequence: Synthetic oligonucleotide
ucgccguacaccgucgcgu

SEQ ID NO: 2037059 - RNA, 19 nt, Artificial Sequence
  Description of Artificial Sequence: Synthetic oligonucleotide
aggucggucccagcgguuc

SEQ ID NO: 2037060 - RNA, 19 nt, Artificial Sequence
  Description of Artificial Sequence: Synthetic oligonucleotide
gagagucgggaucuucaaa

SEQ ID NO: 2037061 - RNA, 19 nt, Artificial Sequence
  Description of Artificial Sequence: Synthetic oligonucleotide
ggcuuugcgggcuccucgg

SEQ ID NO: 2037062 - RNA, 19 nt, Artificial Sequence
  Description of Artificial Sequence: Synthetic oligonucleotide
uccucucuagggccacgca

SEQ ID NO: 2037063 - RNA, 19 nt, Artificial Sequence
  Description of Artificial Sequence: Synthetic oligonucleotide
ccguuugcuagugagccgg

SEQ ID NO: 2037064 - RNA, 19 nt, Artificial Sequence
  Description of Artificial Sequence: Synthetic oligonucleotide
ggugcagaaaguugcccga

SEQ ID NO: 2037065 - RNA, 19 nt, Artificial Sequence
  Description of Artificial Sequence: Synthetic oligonucleotide
uccguggugccaggaagug

SEQ ID NO: 2037066 - RNA, 19 nt, Artificial Sequence
  Description of Artificial Sequence: Synthetic oligonucleotide
uucgguacgcuggcucuug

SEQ ID NO: 2037067 - RNA, 19 nt, Artificial Sequence
  Description of Artificial Sequence: Synthetic oligonucleotide
aggcgacucaguuccgcca

SEQ ID NO: 2037068 - RNA, 19 nt, Artificial Sequence
  Description of Artificial Sequence: Synthetic oligonucleotide
uggcucguggccugaucca

SEQ ID NO: 2037069 - RNA, 19 nt, Artificial Sequence
  Description of Artificial Sequence: Synthetic oligonucleotide
gguuccgagagucgggauc

SEQ ID NO: 2037070 - RNA, 19 nt, Artificial Sequence
  Description of Artificial Sequence: Synthetic oligonucleotide
ggaagugcuccguggugcc

SEQ ID NO: 2037071 - RNA, 19 nt, Artificial Sequence
  Description of Artificial Sequence: Synthetic oligonucleotide
cuauuagugcaaacucugu

SEQ ID NO: 2037072 - RNA, 19 nt, Artificial Sequence
  Description of Artificial Sequence: Synthetic oligonucleotide
ucgguacgcuggcucuugc

SEQ ID NO: 2037073 - RNA, 19 nt, Artificial Sequence
  Description of Artificial Sequence: Synthetic oligonucleotide
ugcuccguggugccaggaa

SEQ ID NO: 2037074 - RNA, 19 nt, Artificial Sequence
  Description of Artificial Sequence: Synthetic oligonucleotide
agguuugacggcgggauuu

SEQ ID NO: 2037075 - RNA, 19 nt, Artificial Sequence
  Description of Artificial Sequence: Synthetic oligonucleotide
ugggacugcguagacugau

SEQ ID NO: 2037076 - RNA, 19 nt, Artificial Sequence
  Description of Artificial Sequence: Synthetic oligonucleotide
aagcaucguccaccacgug

SEQ ID NO: 2037077 - RNA, 19 nt, Artificial Sequence
  Description of Artificial Sequence: Synthetic oligonucleotide
caccgucgcguccugguug

SEQ ID NO: 2037078 - RNA, 19 nt, Artificial Sequence
  Description of Artificial Sequence: Synthetic oligonucleotide
gcggcauccucucuagggc

SEQ ID NO: 2037079 - RNA, 19 nt, Artificial Sequence
  Description of Artificial Sequence: Synthetic oligonucleotide
gagucgccguacaccgucg

SEQ ID NO: 2037080 - RNA, 19 nt, Artificial Sequence
  Description of Artificial Sequence: Synthetic oligonucleotide
guacagcgcucuucugggc

SEQ ID NO: 2037081 - RNA, 19 nt, Artificial Sequence
  Description of Artificial Sequence: Synthetic oligonucleotide
gauuucuuccggauccagu

SEQ ID NO: 2037082 - RNA, 19 nt, Artificial Sequence
  Description of Artificial Sequence: Synthetic oligonucleotide
ggcguagcucuucgguacg

SEQ ID NO: 2037083 - RNA, 19 nt, Artificial Sequence
  Description of Artificial Sequence: Synthetic oligonucleotide
acggugaacaaaggucggu

SEQ ID NO: 2037084 - RNA, 19 nt, Artificial Sequence
  Description of Artificial Sequence: Synthetic oligonucleotide
ggagucgccguacaccguc

SEQ ID NO: 2037085 - RNA, 19 nt, Artificial Sequence
  Description of Artificial Sequence: Synthetic oligonucleotide
guagacugauggggugggg

SEQ ID NO: 2037086 - RNA, 19 nt, Artificial Sequence
  Description of Artificial Sequence: Synthetic oligonucleotide
uagguuugacggcgggauu

SEQ ID NO: 2037087 - RNA, 19 nt, Artificial Sequence
  Description of Artificial Sequence: Synthetic oligonucleotide
agcgguuccgagagucggg

SEQ ID NO: 2037088 - RNA, 19 nt, Artificial Sequence
  Description of Artificial Sequence: Synthetic oligonucleotide
gucgcguccugguugccca

SEQ ID NO: 2037089 - RNA, 19 nt, Artificial Sequence
  Description of Artificial Sequence: Synthetic oligonucleotide
agaccgggcguaugcagua

SEQ ID NO: 2037090 - RNA, 19 nt, Artificial Sequence
  Description of Artificial Sequence: Synthetic oligonucleotide
caaacuuagcaacccuacu

SEQ ID NO: 2037091 - RNA, 19 nt, Artificial Sequence
  Description of Artificial Sequence: Synthetic oligonucleotide
ggguucucaaacagcgcag

SEQ ID NO: 2037092 - RNA, 19 nt, Artificial Sequence
  Description of Artificial Sequence: Synthetic oligonucleotide
cagagcgucgugcgcgcag

SEQ ID NO: 2037093 - RNA, 19 nt, Artificial Sequence
  Description of Artificial Sequence: Synthetic oligonucleotide
gggccggguucucaaacag

SEQ ID NO: 2037094 - RNA, 19 nt, Artificial Sequence
  Description of Artificial Sequence: Synthetic oligonucleotide
gacucaguuccgccaaggu

SEQ ID NO: 2037095 - RNA, 19 nt, Artificial Sequence
  Description of Artificial Sequence: Synthetic oligonucleotide
aacggcucuucuagaccca

SEQ ID NO: 2037096 - RNA, 19 nt, Artificial Sequence
  Description of Artificial Sequence: Synthetic oligonucleotide
uucucguuguugggaugca

SEQ ID NO: 2037097 - RNA, 19 nt, Artificial Sequence
  Description of Artificial Sequence: Synthetic oligonucleotide
agcucguaccggaagcccu

SEQ ID NO: 2037098 - RNA, 19 nt, Artificial Sequence
  Description of Artificial Sequence: Synthetic oligonucleotide
ccuacuacagugcgcucug

SEQ ID NO: 2037099 - RNA, 19 nt, Artificial Sequence
  Description of Artificial Sequence: Synthetic oligonucleotide
gacggcaggcgggacugcc

SEQ ID NO: 2037100 - RNA, 19 nt, Artificial Sequence
  Description of Artificial Sequence: Synthetic oligonucleotide
guagguuugacggcgggau

SEQ ID NO: 2037101 - RNA, 19 nt, Artificial Sequence
  Description of Artificial Sequence: Synthetic oligonucleotide
acccuacuacagugcgcuc

SEQ ID NO: 2037102 - RNA, 19 nt, Artificial Sequence
  Description of Artificial Sequence: Synthetic oligonucleotide
gguucucguuguugggaug

SEQ ID NO: 2037103 - RNA, 19 nt, Artificial Sequence
  Description of Artificial Sequence: Synthetic oligonucleotide
ucucacgggcggagucgcc

SEQ ID NO: 2037104 - RNA, 19 nt, Artificial Sequence
  Description of Artificial Sequence: Synthetic oligonucleotide
aggggcaacggcucuucua

SEQ ID NO: 2037105 - RNA, 19 nt, Artificial Sequence
  Description of Artificial Sequence: Synthetic oligonucleotide
ucucguuguugggaugcau

SEQ ID NO: 2037106 - RNA, 19 nt, Artificial Sequence
  Description of Artificial Sequence: Synthetic oligonucleotide
guuccgagagucgggaucu

SEQ ID NO: 2037107 - RNA, 19 nt, Artificial Sequence
  Description of Artificial Sequence: Synthetic oligonucleotide
cagguucucguuguuggga

SEQ ID NO: 2037108 - RNA, 19 nt, Artificial Sequence
  Description of Artificial Sequence: Synthetic oligonucleotide
ggcgggacugccccguuug

SEQ ID NO: 2037109 - RNA, 19 nt, Artificial Sequence
  Description of Artificial Sequence: Synthetic oligonucleotide
agcgcagaccggaucucag

SEQ ID NO: 2037110 - RNA, 19 nt, Artificial Sequence
  Description of Artificial Sequence: Synthetic oligonucleotide
uagugagccggcggcgcgc

SEQ ID NO: 2037111 - RNA, 19 nt, Artificial Sequence
  Description of Artificial Sequence: Synthetic oligonucleotide
ggcggagucgccguacacc

SEQ ID NO: 2037112 - RNA, 19 nt, Artificial Sequence
  Description of Artificial Sequence: Synthetic oligonucleotide
gcucugcgcacuuucugac

SEQ ID NO: 2037113 - RNA, 19 nt, Artificial Sequence
  Description of Artificial Sequence: Synthetic oligonucleotide
cguaugcaguaaaccaggc

SEQ ID NO: 2037114 - RNA, 19 nt, Artificial Sequence
  Description of Artificial Sequence: Synthetic oligonucleotide
gacaaagcacagugggauu

SEQ ID NO: 2037115 - RNA, 19 nt, Artificial Sequence
  Description of Artificial Sequence: Synthetic oligonucleotide
cucgacggcagcccgcaga

SEQ ID NO: 2037116 - RNA, 19 nt, Artificial Sequence
  Description of Artificial Sequence: Synthetic oligonucleotide
gucggucccagcgguuccg

SEQ ID NO: 2037117 - RNA, 19 nt, Artificial Sequence
  Description of Artificial Sequence: Synthetic oligonucleotide
ccacuaccucuauuagugc

SEQ ID NO: 2037118 - RNA, 19 nt, Artificial Sequence
  Description of Artificial Sequence: Synthetic oligonucleotide
gguucucaaacagcgcaga

SEQ ID NO: 2037119 - RNA, 19 nt, Artificial Sequence
  Description of Artificial Sequence: Synthetic oligonucleotide
accgggcguaugcaguaaa

SEQ ID NO: 2037120 - RNA, 19 nt, Artificial Sequence
  Description of Artificial Sequence: Synthetic oligonucleotide
acgggcggagucgccguac

SEQ ID NO: 2037121 - RNA, 19 nt, Artificial Sequence
  Description of Artificial Sequence: Synthetic oligonucleotide
cagaaaguugcccgaggcu

SEQ ID NO: 2037122 - RNA, 19 nt, Artificial Sequence
  Description of Artificial Sequence: Synthetic oligonucleotide
cgcagaccggaucucagcc

SEQ ID NO: 2037123 - RNA, 19 nt, Artificial Sequence
  Description of Artificial Sequence: Synthetic oligonucleotide
ggacuccaagaguugggga

SEQ ID NO: 2037124 - RNA, 19 nt, Artificial Sequence
  Description of Artificial Sequence: Synthetic oligonucleotide
gugcgcucugcgcacuuuc

SEQ ID NO: 2037125 - RNA, 19 nt, Artificial Sequence
  Description of Artificial Sequence: Synthetic oligonucleotide
cuacuacagugcgcucugc

SEQ ID NO: 2037126 - RNA, 19 nt, Artificial Sequence
  Description of Artificial Sequence: Synthetic oligonucleotide
cccgcagaacaccaccagc

SEQ ID NO: 2037127 - RNA, 19 nt, Artificial Sequence
  Description of Artificial Sequence: Synthetic oligonucleotide
acgcaugugcggacguuug

SEQ ID NO: 2037128 - RNA, 19 nt, Artificial Sequence
  Description of Artificial Sequence: Synthetic oligonucleotide
cuaccucuauuagugcaaa

SEQ ID NO: 2037129 - RNA, 19 nt, Artificial Sequence
  Description of Artificial Sequence: Synthetic oligonucleotide
gagcgucgugcgcgcagcc

SEQ ID NO: 2037130 - RNA, 19 nt, Artificial Sequence
  Description of Artificial Sequence: Synthetic oligonucleotide
ugcgcacuuucugaccauu

SEQ ID NO: 2037131 - RNA, 19 nt, Artificial Sequence
  Description of Artificial Sequence: Synthetic oligonucleotide
ggucccagcgguuccgaga

SEQ ID NO: 2037132 - RNA, 19 nt, Artificial Sequence
  Description of Artificial Sequence: Synthetic oligonucleotide
aucuccggguacagcgcuc

SEQ ID NO: 2037133 - RNA, 19 nt, Artificial Sequence
  Description of Artificial Sequence: Synthetic oligonucleotide
ccagaccgggcguaugcag

SEQ ID NO: 2037134 - RNA, 19 nt, Artificial Sequence
  Description of Artificial Sequence: Synthetic oligonucleotide
aacuggcgacggaggcgac

SEQ ID NO: 2037135 - RNA, 19 nt, Artificial Sequence
  Description of Artificial Sequence: Synthetic oligonucleotide
cugcguagacugauggggu

SEQ ID NO: 2037136 - RNA, 19 nt, Artificial Sequence
  Description of Artificial Sequence: Synthetic oligonucleotide
ucgugcgcgcagcccgcgc

SEQ ID NO: 2037137 - RNA, 19 nt, Artificial Sequence
  Description of Artificial Sequence: Synthetic oligonucleotide
agaccggaucucagccagg

SEQ ID NO: 2037138 - RNA, 19 nt, Artificial Sequence
  Description of Artificial Sequence: Synthetic oligonucleotide
ccgccaaggucaagggccg

SEQ ID NO: 2037139 - RNA, 19 nt, Artificial Sequence
  Description of Artificial Sequence: Synthetic oligonucleotide
ccggguaaacgggaagugc

SEQ ID NO: 2037140 - RNA, 19 nt, Artificial Sequence
  Description of Artificial Sequence: Synthetic oligonucleotide
agcccgcagaacaccacca

SEQ ID NO: 2037141 - RNA, 19 nt, Artificial Sequence
  Description of Artificial Sequence: Synthetic oligonucleotide
ggaggcgacucaguuccgc

SEQ ID NO: 2037142 - RNA, 19 nt, Artificial Sequence
  Description of Artificial Sequence: Synthetic oligonucleotide
acuggcgacggaggcgacu

SEQ ID NO: 2037143 - RNA, 19 nt, Artificial Sequence
  Description of Artificial Sequence: Synthetic oligonucleotide
agacggcaggcgggacugc

SEQ ID NO: 2037144 - RNA, 19 nt, Artificial Sequence
  Description of Artificial Sequence: Synthetic oligonucleotide
ggguaaacgggaagugcuc

SEQ ID NO: 2037145 - RNA, 19 nt, Artificial Sequence
  Description of Artificial Sequence: Synthetic oligonucleotide
gcccgcagaacaccaccag

SEQ ID NO: 2037146 - RNA, 19 nt, Artificial Sequence
  Description of Artificial Sequence: Synthetic oligonucleotide
gcgcagaccggaucucagc

SEQ ID NO: 2037147 - RNA, 19 nt, Artificial Sequence
  Description of Artificial Sequence: Synthetic oligonucleotide
gguagguuugacggcggga

SEQ ID NO: 2037148 - RNA, 19 nt, Artificial Sequence
  Description of Artificial Sequence: Synthetic oligonucleotide
acaccgucgcguccugguu

SEQ ID NO: 2037149 - RNA, 19 nt, Artificial Sequence
  Description of Artificial Sequence: Synthetic oligonucleotide
gcuagugagccggcggcgc

SEQ ID NO: 2037150 - RNA, 19 nt, Artificial Sequence
  Description of Artificial Sequence: Synthetic oligonucleotide
ggcgacggaggcgacucag

SEQ ID NO: 2037151 - RNA, 19 nt, Artificial Sequence
  Description of Artificial Sequence: Synthetic oligonucleotide
cggguucucaaacagcgca

SEQ ID NO: 2037152 - RNA, 19 nt, Artificial Sequence
  Description of Artificial Sequence: Synthetic oligonucleotide
gcgggauuucuuccggauc

SEQ ID NO: 2037153 - RNA, 19 nt, Artificial Sequence
  Description of Artificial Sequence: Synthetic oligonucleotide
uagacccaccacggugaac

SEQ ID NO: 2037154 - RNA, 19 nt, Artificial Sequence
  Description of Artificial Sequence: Synthetic oligonucleotide
cucguggccugauccaacu

SEQ ID NO: 2037155 - RNA, 19 nt, Artificial Sequence
  Description of Artificial Sequence: Synthetic oligonucleotide
ggucggucccagcgguucc

SEQ ID NO: 2037156 - RNA, 19 nt, Artificial Sequence
  Description of Artificial Sequence: Synthetic oligonucleotide
cucguaccggaagcccuug

SEQ ID NO: 2037157 - RNA, 19 nt, Artificial Sequence
  Description of Artificial Sequence: Synthetic oligonucleotide
gcagaccggaucucagcca

SEQ ID NO: 2037158 - RNA, 19 nt, Artificial Sequence
  Description of Artificial Sequence: Synthetic oligonucleotide
gccgcucgacggcagcccg

SEQ ID NO: 2037159 - RNA, 19 nt, Artificial Sequence
  Description of Artificial Sequence: Synthetic oligonucleotide
gggacugcguagacugaug

SEQ ID NO: 2037160 - RNA, 19 nt, Artificial Sequence
  Description of Artificial Sequence: Synthetic oligonucleotide
cagaccgggcguaugcagu

SEQ ID NO: 2037161 - RNA, 19 nt, Artificial Sequence
  Description of Artificial Sequence: Synthetic oligonucleotide
gggacugccccguuugcua

SEQ ID NO: 2037162 - RNA, 19 nt, Artificial Sequence
  Description of Artificial Sequence: Synthetic oligonucleotide
cgggcguaugcaguaaacc

SEQ ID NO: 2037163 - RNA, 19 nt, Artificial Sequence
  Description of Artificial Sequence: Synthetic oligonucleotide
ccggguucucaaacagcgc

SEQ ID NO: 2037164 - RNA, 19 nt, Artificial Sequence
  Description of Artificial Sequence: Synthetic oligonucleotide
cguagacugaugggguggg

SEQ ID NO: 2037165 - RNA, 19 nt, Artificial Sequence
  Description of Artificial Sequence: Synthetic oligonucleotide
gcgcucugcgcacuuucug

SEQ ID NO: 2037166 - RNA, 19 nt, Artificial Sequence
  Description of Artificial Sequence: Synthetic oligonucleotide
ggccacgcaugugcggacg

SEQ ID NO: 2037167 - RNA, 19 nt, Artificial Sequence
  Description of Artificial Sequence: Synthetic oligonucleotide
cuggagacggcaggcggga

SEQ ID NO: 2037168 - RNA, 19 nt, Artificial Sequence
  Description of Artificial Sequence: Synthetic oligonucleotide
ggggccggguucucaaaca

SEQ ID NO: 2037169 - RNA, 19 nt, Artificial Sequence
  Description of Artificial Sequence: Synthetic oligonucleotide
gguuugacggcgggauuuc

SEQ ID NO: 2037170 - RNA, 19 nt, Artificial Sequence
  Description of Artificial Sequence: Synthetic oligonucleotide
acagugcgcucugcgcacu

SEQ ID NO: 2037171 - RNA, 19 nt, Artificial Sequence
  Description of Artificial Sequence: Synthetic oligonucleotide
cggcguagcucuucgguac

SEQ ID NO: 2037172 - RNA, 19 nt, Artificial Sequence
  Description of Artificial Sequence: Synthetic oligonucleotide
ccgggcguaugcaguaaac

SEQ ID NO: 2037173 - RNA, 19 nt, Artificial Sequence
  Description of Artificial Sequence: Synthetic oligonucleotide
cuagacccaccacggugaa

SEQ ID NO: 2037174 - RNA, 19 nt, Artificial Sequence
  Description of Artificial Sequence: Synthetic oligonucleotide
caucuccggguacagcgcu

SEQ ID NO: 2037175 - RNA, 19 nt, Artificial Sequence
  Description of Artificial Sequence: Synthetic oligonucleotide
agucaacaccuggcucgug

SEQ ID NO: 2037176 - RNA, 19 nt, Artificial Sequence
  Description of Artificial Sequence: Synthetic oligonucleotide
caaacagcgcagaccggau

SEQ ID NO: 2037177 - RNA, 19 nt, Artificial Sequence
  Description of Artificial Sequence: Synthetic oligonucleotide
ggccggguucucaaacagc

SEQ ID NO: 2037178 - RNA, 19 nt, Artificial Sequence
  Description of Artificial Sequence: Synthetic oligonucleotide
cuucuagacccaccacggu

SEQ ID NO: 2037179 - RNA, 19 nt, Artificial Sequence
  Description of Artificial Sequence: Synthetic oligonucleotide
cccagcgguuccgagaguc

SEQ ID NO: 2037180 - RNA, 19 nt, Artificial Sequence
  Description of Artificial Sequence: Synthetic oligonucleotide
ucccagcgguuccgagagu

SEQ ID NO: 2037181 - RNA, 19 nt, Artificial Sequence
  Description of Artificial Sequence: Synthetic oligonucleotide
acccaccacggugaacaaa

SEQ ID NO: 2037182 - RNA, 19 nt, Artificial Sequence
  Description of Artificial Sequence: Synthetic oligonucleotide
cucgccggccagcgcccgg

SEQ ID NO: 2037183 - RNA, 19 nt, Artificial Sequence
  Description of Artificial Sequence: Synthetic oligonucleotide
gccccguuugcuagugagc

SEQ ID NO: 2037184 - RNA, 19 nt, Artificial Sequence
  Description of Artificial Sequence: Synthetic oligonucleotide
cggugaacaaaggucgguc

SEQ ID NO: 2037185 - RNA, 19 nt, Artificial Sequence
  Description of Artificial Sequence: Synthetic oligonucleotide
caguucccuggagacggca

SEQ ID NO: 2037186 - RNA, 19 nt, Artificial Sequence
  Description of Artificial Sequence: Synthetic oligonucleotide
cacguccugccggcucagg

SEQ ID NO: 2037187 - RNA, 19 nt, Artificial Sequence
  Description of Artificial Sequence: Synthetic oligonucleotide
ggucaagggccggguaaac

SEQ ID NO: 2037188 - RNA, 19 nt, Artificial Sequence
  Description of Artificial Sequence: Synthetic oligonucleotide
gccguacaccgucgcgucc

SEQ ID NO: 2037189 - RNA, 19 nt, Artificial Sequence
  Description of Artificial Sequence: Synthetic oligonucleotide
gcgccaucccacuaccucu

SEQ ID NO: 2037190 - RNA, 19 nt, Artificial Sequence
  Description of Artificial Sequence: Synthetic oligonucleotide
agggccggguaaacgggaa

SEQ ID NO: 2037191 - RNA, 19 nt, Artificial Sequence
  Description of Artificial Sequence: Synthetic oligonucleotide
agugcgcucugcgcacuuu

SEQ ID NO: 2037192 - RNA, 19 nt, Artificial Sequence
  Description of Artificial Sequence: Synthetic oligonucleotide
cggguaaacgggaagugcu

SEQ ID NO: 2037193 - RNA, 19 nt, Artificial Sequence
  Description of Artificial Sequence: Synthetic oligonucleotide
aggcgggacugccccguuu

SEQ ID NO: 2037194 - RNA, 19 nt, Artificial Sequence
  Description of Artificial Sequence: Synthetic oligonucleotide
cguuugcuagugagccggc

SEQ ID NO: 2037195 - RNA, 19 nt, Artificial Sequence
  Description of Artificial Sequence: Synthetic oligonucleotide
gugcgcgcagcccgcgcca

SEQ ID NO: 2037196 - RNA, 19 nt, Artificial Sequence
  Description of Artificial Sequence: Synthetic oligonucleotide
gaccgggcguaugcaguaa

SEQ ID NO: 2037197 - RNA, 19 nt, Artificial Sequence
  Description of Artificial Sequence: Synthetic oligonucleotide
cccgcgccaggcaguacag

SEQ ID NO: 2037198 - RNA, 19 nt, Artificial Sequence
  Description of Artificial Sequence: Synthetic oligonucleotide
cgguacgcuggcucuugcc

SEQ ID NO: 2037199 - RNA, 19 nt, Artificial Sequence
  Description of Artificial Sequence: Synthetic oligonucleotide
cgcucugcgcacuuucuga

SEQ ID NO: 2037200 - RNA, 19 nt, Artificial Sequence
  Description of Artificial Sequence: Synthetic oligonucleotide
guuugacggcgggauuucu

SEQ ID NO: 2037201 - RNA, 19 nt, Artificial Sequence
  Description of Artificial Sequence: Synthetic oligonucleotide
ggcgggauuucuuccggau

SEQ ID NO: 2037202 - RNA, 19 nt, Artificial Sequence
  Description of Artificial Sequence: Synthetic oligonucleotide
gcgguuccgagagucggga

SEQ ID NO: 2037203 - RNA, 19 nt, Artificial Sequence
  Description of Artificial Sequence: Synthetic oligonucleotide
ccaggaaguguuagcacau

SEQ ID NO: 2037204 - RNA, 19 nt, Artificial Sequence
  Description of Artificial Sequence: Synthetic oligonucleotide
gcgggacugccccguuugc

SEQ ID NO: 2037205 - RNA, 19 nt, Artificial Sequence
  Description of Artificial Sequence: Synthetic oligonucleotide
gcgcacuuucugaccauuc

SEQ ID NO: 2037206 - RNA, 19 nt, Artificial Sequence
  Description of Artificial Sequence: Synthetic oligonucleotide
gcuuugcgggcuccucgga

SEQ ID NO: 2037207 - RNA, 19 nt, Artificial Sequence
  Description of Artificial Sequence: Synthetic oligonucleotide
gggcggagucgccguacac

SEQ ID NO: 2037208 - RNA, 19 nt, Artificial Sequence
  Description of Artificial Sequence: Synthetic oligonucleotide
cagcgcccggcguagcucu

SEQ ID NO: 2037209 - RNA, 19 nt, Artificial Sequence
  Description of Artificial Sequence: Synthetic oligonucleotide
gcccggcguagcucuucgg

SEQ ID NO: 2037210 - RNA, 19 nt, Artificial Sequence
  Description of Artificial Sequence: Synthetic oligonucleotide
cgugcgcgcagcccgcgcc

SEQ ID NO: 2037211 - RNA, 19 nt, Artificial Sequence
  Description of Artificial Sequence: Synthetic oligonucleotide
gggccacgcaugugcggac

SEQ ID NO: 2037212 - RNA, 19 nt, Artificial Sequence
  Description of Artificial Sequence: Synthetic oligonucleotide
agcccgcgccaggcaguac

SEQ ID NO: 2037213 - RNA, 19 nt, Artificial Sequence
  Description of Artificial Sequence: Synthetic oligonucleotide
cggcucuucuagacccacc

SEQ ID NO: 2037214 - RNA, 19 nt, Artificial Sequence
  Description of Artificial Sequence: Synthetic oligonucleotide
cacgcaugugcggacguuu

SEQ ID NO: 2037215 - RNA, 19 nt, Artificial Sequence
  Description of Artificial Sequence: Synthetic oligonucleotide
ccguguggcccucgccggc

SEQ ID NO: 2037216 - RNA, 19 nt, Artificial Sequence
  Description of Artificial Sequence: Synthetic oligonucleotide
gccagaccgggcguaugca

SEQ ID NO: 2037217 - RNA, 19 nt, Artificial Sequence
  Description of Artificial Sequence: Synthetic oligonucleotide
cccuacuacagugcgcucu

SEQ ID NO: 2037218 - RNA, 19 nt, Artificial Sequence
  Description of Artificial Sequence: Synthetic oligonucleotide
ccggcguagcucuucggua

SEQ ID NO: 2037219 - RNA, 19 nt, Artificial Sequence
  Description of Artificial Sequence: Synthetic oligonucleotide
ccgcucgacggcagcccgc

SEQ ID NO: 2037220 - RNA, 19 nt, Artificial Sequence
  Description of Artificial Sequence: Synthetic oligonucleotide
cgccguacaccgucgcguc

SEQ ID NO: 2037221 - RNA, 19 nt, Artificial Sequence
  Description of Artificial Sequence: Synthetic oligonucleotide
gagcgccaucccacuaccu

SEQ ID NO: 2037222 - RNA, 19 nt, Artificial Sequence
  Description of Artificial Sequence: Synthetic oligonucleotide
ccucucuagggccacgcau

SEQ ID NO: 2037223 - RNA, 19 nt, Artificial Sequence
  Description of Artificial Sequence: Synthetic oligonucleotide
cgucgcguccugguugccc

SEQ ID NO: 2037224 - RNA, 19 nt, Artificial Sequence
  Description of Artificial Sequence: Synthetic oligonucleotide
ccgaagcaucguccaccac

SEQ ID NO: 2037225 - RNA, 19 nt, Artificial Sequence
  Description of Artificial Sequence: Synthetic oligonucleotide
cugcgcacuuucugaccau

SEQ ID NO: 2037226 - RNA, 19 nt, Artificial Sequence
  Description of Artificial Sequence: Synthetic oligonucleotide
cccggcguagcucuucggu

SEQ ID NO: 2037227 - RNA, 19 nt, Artificial Sequence
  Description of Artificial Sequence: Synthetic oligonucleotide
ccagcgcccggcguagcuc

SEQ ID NO: 2037228 - RNA, 19 nt, Artificial Sequence
  Description of Artificial Sequence: Synthetic oligonucleotide
gccacgcaugugcggacgu

SEQ ID NO: 2037229 - RNA, 19 nt, Artificial Sequence
  Description of Artificial Sequence: Synthetic oligonucleotide
cuucgguacgcuggcucuu

SEQ ID NO: 2037230 - RNA, 19 nt, Artificial Sequence
  Description of Artificial Sequence: Synthetic oligonucleotide
caggggcaacggcucuucu

SEQ ID NO: 2037231 - RNA, 19 nt, Artificial Sequence
  Description of Artificial Sequence: Synthetic oligonucleotide
cacgggcggagucgccgua

SEQ ID NO: 2037232 - RNA, 19 nt, Artificial Sequence
  Description of Artificial Sequence: Synthetic oligonucleotide
caccuggcucguggccuga

SEQ ID NO: 2037233 - RNA, 19 nt, Artificial Sequence
  Description of Artificial Sequence: Synthetic oligonucleotide
gccggcucaggcgccgcuc

SEQ ID NO: 2037234 - RNA, 19 nt, Artificial Sequence
  Description of Artificial Sequence: Synthetic oligonucleotide
ccgcgccaggcaguacagc

SEQ ID NO: 2037235 - RNA, 19 nt, Artificial Sequence
  Description of Artificial Sequence: Synthetic oligonucleotide
cgcugcgccaaggacucca

SEQ ID NO: 2037236 - RNA, 19 nt, Artificial Sequence
  Description of Artificial Sequence: Synthetic oligonucleotide
cagcccgcgccaggcagua

SEQ ID NO: 2037237 - RNA, 19 nt, Artificial Sequence
  Description of Artificial Sequence: Synthetic oligonucleotide
gcaggcgggacugccccgu

SEQ ID NO: 2037238 - RNA, 19 nt, Artificial Sequence
  Description of Artificial Sequence: Synthetic oligonucleotide
gcucguaccggaagcccuu

SEQ ID NO: 2037239 - RNA, 19 nt, Artificial Sequence
  Description of Artificial Sequence: Synthetic oligonucleotide
cgccaaggacuccaagagu

SEQ ID NO: 2037240 - RNA, 19 nt, Artificial Sequence
  Description of Artificial Sequence: Synthetic oligonucleotide
gcgacggaggcgacucagu

SEQ ID NO: 2037241 - RNA, 19 nt, Artificial Sequence
  Description of Artificial Sequence: Synthetic oligonucleotide
gcgcagcccgcgccaggca

SEQ ID NO: 2037242 - RNA, 19 nt, Artificial Sequence
  Description of Artificial Sequence: Synthetic oligonucleotide
cggcgggauuucuuccgga

SEQ ID NO: 2037243 - RNA, 19 nt, Artificial Sequence
  Description of Artificial Sequence: Synthetic oligonucleotide
cagugcgcucugcgcacuu

SEQ ID NO: 2037244 - RNA, 19 nt, Artificial Sequence
  Description of Artificial Sequence: Synthetic oligonucleotide
gcucuucgguacgcuggcu

SEQ ID NO: 2037245 - RNA, 19 nt, Artificial Sequence
  Description of Artificial Sequence: Synthetic oligonucleotide
agcgcccggcguagcucuu

SEQ ID NO: 2037246 - RNA, 19 nt, Artificial Sequence
  Description of Artificial Sequence: Synthetic oligonucleotide
cgcucgacggcagcccgca

SEQ ID NO: 2037247 - RNA, 19 nt, Artificial Sequence
  Description of Artificial Sequence: Synthetic oligonucleotide
cgggcggagucgccguaca

SEQ ID NO: 2037248 - RNA, 19 nt, Artificial Sequence
  Description of Artificial Sequence: Synthetic oligonucleotide
cgacggaggcgacucaguu

SEQ ID NO: 2037249 - RNA, 19 nt, Artificial Sequence
  Description of Artificial Sequence: Synthetic oligonucleotide
gcgcugcgccaaggacucc

SEQ ID NO: 2037250 - RNA, 19 nt, Artificial Sequence
  Description of Artificial Sequence: Synthetic oligonucleotide
ccgucgcguccugguugcc

SEQ ID NO: 2037251 - RNA, 19 nt, Artificial Sequence
  Description of Artificial Sequence: Synthetic oligonucleotide
ccguggugccaggaagugu

SEQ ID NO: 2037252 - RNA, 19 nt, Artificial Sequence
  Description of Artificial Sequence: Synthetic oligonucleotide
gccggccagcgcccggcgu

SEQ ID NO: 2037253 - RNA, 19 nt, Artificial Sequence
  Description of Artificial Sequence: Synthetic oligonucleotide
gcgcggaccgcagcgccuu

SEQ ID NO: 2037254 - RNA, 19 nt, Artificial Sequence
  Description of Artificial Sequence: Synthetic oligonucleotide
cccggccagaccgggcgua

SEQ ID NO: 2037255 - RNA, 19 nt, Artificial Sequence
  Description of Artificial Sequence: Synthetic oligonucleotide
cgcggaccgcagcgccuuc

SEQ ID NO: 2037256 - RNA, 19 nt, Artificial Sequence
  Description of Artificial Sequence: Synthetic oligonucleotide
cggagucgccguacaccgu

SEQ ID NO: 2037257 - RNA, 19 nt, Artificial Sequence
  Description of Artificial Sequence: Synthetic oligonucleotide
ccacgcaugugcggacguu

SEQ ID NO: 2037258 - RNA, 19 nt, Artificial Sequence
  Description of Artificial Sequence: Synthetic oligonucleotide
ccggccagaccgggcguau

SEQ ID NO: 2037259 - RNA, 19 nt, Artificial Sequence
  Description of Artificial Sequence: Synthetic oligonucleotide
aaugggaugaagcagcagc

SEQ ID NO: 2037260 - RNA, 19 nt, Artificial Sequence
  Description of Artificial Sequence: Synthetic oligonucleotide
aaacuuaagauucuuuggg

SEQ ID NO: 2037261 - RNA, 19 nt, Artificial Sequence
  Description of Artificial Sequence: Synthetic oligonucleotide
aacaaucacaguuaguggg

SEQ ID NO: 2037262 - RNA, 19 nt, Artificial Sequence
  Description of Artificial Sequence: Synthetic oligonucleotide
aaaacuugaaagccguggc

SEQ ID NO: 2037263 - RNA, 19 nt, Artificial Sequence
  Description of Artificial Sequence: Synthetic oligonucleotide
uauuaaaacuugaaagccg

SEQ ID NO: 2037264 - RNA, 19 nt, Artificial Sequence
  Description of Artificial Sequence: Synthetic oligonucleotide
aacuuaagauucuuugggc

SEQ ID NO: 2037265 - RNA, 19 nt, Artificial Sequence
  Description of Artificial Sequence: Synthetic oligonucleotide
uuuguuacuguuuugacac

SEQ ID NO: 2037266 - RNA, 19 nt, Artificial Sequence
  Description of Artificial Sequence: Synthetic oligonucleotide
aaugccacucguuagcaac

SEQ ID NO: 2037267 - RNA, 19 nt, Artificial Sequence
  Description of Artificial Sequence: Synthetic oligonucleotide
uuuguuuaaaagcagugga

SEQ ID NO: 2037268 - RNA, 19 nt, Artificial Sequence
  Description of Artificial Sequence: Synthetic oligonucleotide
gaaacuuaagauucuuugg

SEQ ID NO: 2037269 - RNA, 19 nt, Artificial Sequence
  Description of Artificial Sequence: Synthetic oligonucleotide
auagcaggugaacugaagc

SEQ ID NO: 2037270 - RNA, 19 nt, Artificial Sequence
  Description of Artificial Sequence: Synthetic oligonucleotide
aaacuugaaagccguggcc

SEQ ID NO: 2037271 - RNA, 19 nt, Artificial Sequence
  Description of Artificial Sequence: Synthetic oligonucleotide
aaaucuucgaaugccacuc

SEQ ID NO: 2037272 - RNA, 19 nt, Artificial Sequence
  Description of Artificial Sequence: Synthetic oligonucleotide
uaugaaggaggauucaugc

SEQ ID NO: 2037273 - RNA, 19 nt, Artificial Sequence
  Description of Artificial Sequence: Synthetic oligonucleotide
guuguguauaguaugaagg

SEQ ID NO: 2037274 - RNA, 19 nt, Artificial Sequence
  Description of Artificial Sequence: Synthetic oligonucleotide
uauuuguuuaaaagcagug

SEQ ID NO: 2037275 - RNA, 19 nt, Artificial Sequence
  Description of Artificial Sequence: Synthetic oligonucleotide
uguuuugacacccuucccc

SEQ ID NO: 2037276 - RNA, 19 nt, Artificial Sequence
  Description of Artificial Sequence: Synthetic oligonucleotide
uuagcaacggucaucuugc

SEQ ID NO: 2037277 - RNA, 19 nt, Artificial Sequence
  Description of Artificial Sequence: Synthetic oligonucleotide
uaaaacuugaaagccgugg

SEQ ID NO: 2037278 - RNA, 19 nt, Artificial Sequence
  Description of Artificial Sequence: Synthetic oligonucleotide
uguauaguaugaaggagga

SEQ ID NO: 2037279 - RNA, 19 nt, Artificial Sequence
  Description of Artificial Sequence: Synthetic oligonucleotide
aaagccguggccugcugcc

SEQ ID NO: 2037280 - RNA, 19 nt, Artificial Sequence
  Description of Artificial Sequence: Synthetic oligonucleotide
auuuguuuaaaagcagugg

SEQ ID NO: 2037281 - RNA, 19 nt, Artificial Sequence
  Description of Artificial Sequence: Synthetic oligonucleotide
uaacaaucacaguuagugg

SEQ ID NO: 2037282 - RNA, 19 nt, Artificial Sequence
  Description of Artificial Sequence: Synthetic oligonucleotide
ugggguaacaaucacaguu

SEQ ID NO: 2037283 - RNA, 19 nt, Artificial Sequence
  Description of Artificial Sequence: Synthetic oligonucleotide
guuuaaaagcaguggagag

SEQ ID NO: 2037284 - RNA, 19 nt, Artificial Sequence
  Description of Artificial Sequence: Synthetic oligonucleotide
ucuaaacagagaaacuuaa

SEQ ID NO: 2037285 - RNA, 19 nt, Artificial Sequence
  Description of Artificial Sequence: Synthetic oligonucleotide
uaacuguugacacccacug

SEQ ID NO: 2037286 - RNA, 19 nt, Artificial Sequence
  Description of Artificial Sequence: Synthetic oligonucleotide
uuguguauaguaugaagga

SEQ ID NO: 2037287 - RNA, 19 nt, Artificial Sequence
  Description of Artificial Sequence: Synthetic oligonucleotide
agggcuuugcaguuggggc

SEQ ID NO: 2037288 - RNA, 19 nt, Artificial Sequence
  Description of Artificial Sequence: Synthetic oligonucleotide
guguauaguaugaaggagg

SEQ ID NO: 2037289 - RNA, 19 nt, Artificial Sequence
  Description of Artificial Sequence: Synthetic oligonucleotide
ugucucuucauaaguuggg

SEQ ID NO: 2037290 - RNA, 19 nt, Artificial Sequence
  Description of Artificial Sequence: Synthetic oligonucleotide
caugcaucuaccaucuccc

SEQ ID NO: 2037291 - RNA, 19 nt, Artificial Sequence
  Description of Artificial Sequence: Synthetic oligonucleotide
ugggaauugcagaagggcc

SEQ ID NO: 2037292 - RNA, 19 nt, Artificial Sequence
  Description of Artificial Sequence: Synthetic oligonucleotide
uggaaacacaacacaaggc

SEQ ID NO: 2037293 - RNA, 19 nt, Artificial Sequence
  Description of Artificial Sequence: Synthetic oligonucleotide
uccuacaagcgcuuguagg

SEQ ID NO: 2037294 - RNA, 19 nt, Artificial Sequence
  Description of Artificial Sequence: Synthetic oligonucleotide
ugggucacgaucaucuugc

SEQ ID NO: 2037295 - RNA, 19 nt, Artificial Sequence
  Description of Artificial Sequence: Synthetic oligonucleotide
acuuaagauucuuugggca

SEQ ID NO: 2037296 - RNA, 19 nt, Artificial Sequence
  Description of Artificial Sequence: Synthetic oligonucleotide
agggcaucuacgcagaaug

SEQ ID NO: 2037297 - RNA, 19 nt, Artificial Sequence
  Description of Artificial Sequence: Synthetic oligonucleotide
gaugaaaucaagggcuggg

SEQ ID NO: 2037298 - RNA, 19 nt, Artificial Sequence
  Description of Artificial Sequence: Synthetic oligonucleotide
uguguauaguaugaaggag

SEQ ID NO: 2037299 - RNA, 19 nt, Artificial Sequence
  Description of Artificial Sequence: Synthetic oligonucleotide
gacaggacggucauaaaag

SEQ ID NO: 2037300 - RNA, 19 nt, Artificial Sequence
  Description of Artificial Sequence: Synthetic oligonucleotide
auugcauuggcguugggaa

SEQ ID NO: 2037301 - RNA, 19 nt, Artificial Sequence
  Description of Artificial Sequence: Synthetic oligonucleotide
ugaaaucaagggcugggca

SEQ ID NO: 2037302 - RNA, 19 nt, Artificial Sequence
  Description of Artificial Sequence: Synthetic oligonucleotide
gaugaagcagcagccagcg

SEQ ID NO: 2037303 - RNA, 19 nt, Artificial Sequence
  Description of Artificial Sequence: Synthetic oligonucleotide
gacauuuuaccgccgcccg

SEQ ID NO: 2037304 - RNA, 19 nt, Artificial Sequence
  Description of Artificial Sequence: Synthetic oligonucleotide
acagguuguguauaguaug

SEQ ID NO: 2037305 - RNA, 19 nt, Artificial Sequence
  Description of Artificial Sequence: Synthetic oligonucleotide
auaguaugaaggaggauuc

SEQ ID NO: 2037306 - RNA, 19 nt, Artificial Sequence
  Description of Artificial Sequence: Synthetic oligonucleotide
aguaaugguccacaucuug

SEQ ID NO: 2037307 - RNA, 19 nt, Artificial Sequence
  Description of Artificial Sequence: Synthetic oligonucleotide
aaucuucgaaugccacucg

SEQ ID NO: 2037308 - RNA, 19 nt, Artificial Sequence
  Description of Artificial Sequence: Synthetic oligonucleotide
cuaaacagagaaacuuaag

SEQ ID NO: 2037309 - RNA, 19 nt, Artificial Sequence
  Description of Artificial Sequence: Synthetic oligonucleotide
ucuugcugcaggauggaca

SEQ ID NO: 2037310 - RNA, 19 nt, Artificial Sequence
  Description of Artificial Sequence: Synthetic oligonucleotide
auuggcguugggaacaggc

SEQ ID NO: 2037311 - RNA, 19 nt, Artificial Sequence
  Description of Artificial Sequence: Synthetic oligonucleotide
auuaaaacuugaaagccgu

SEQ ID NO: 2037312 - RNA, 19 nt, Artificial Sequence
  Description of Artificial Sequence: Synthetic oligonucleotide
acaggacggucauaaaagg

SEQ ID NO: 2037313 - RNA, 19 nt, Artificial Sequence
  Description of Artificial Sequence: Synthetic oligonucleotide
uaaugaguccuguggcugg

SEQ ID NO: 2037314 - RNA, 19 nt, Artificial Sequence
  Description of Artificial Sequence: Synthetic oligonucleotide
ucgaaugccacucguuagc

SEQ ID NO: 2037315 - RNA, 19 nt, Artificial Sequence
  Description of Artificial Sequence: Synthetic oligonucleotide
aaaagcaguggagagguaa

SEQ ID NO: 2037316 - RNA, 19 nt, Artificial Sequence
  Description of Artificial Sequence: Synthetic oligonucleotide
uguuacuguuuugacaccc

SEQ ID NO: 2037317 - RNA, 19 nt, Artificial Sequence
  Description of Artificial Sequence: Synthetic oligonucleotide
uuuaccgccgcccgcgccg

SEQ ID NO: 2037318 - RNA, 19 nt, Artificial Sequence
  Description of Artificial Sequence: Synthetic oligonucleotide
acggcaauugcauuggcgu

SEQ ID NO: 2037319 - RNA, 19 nt, Artificial Sequence
  Description of Artificial Sequence: Synthetic oligonucleotide
ugcagaagggccugcagcc

SEQ ID NO: 2037320 - RNA, 19 nt, Artificial Sequence
  Description of Artificial Sequence: Synthetic oligonucleotide
uccgguagcaugcaucuac

SEQ ID NO: 2037321 - RNA, 19 nt, Artificial Sequence
  Description of Artificial Sequence: Synthetic oligonucleotide
uuuucuauagcaggugaac

SEQ ID NO: 2037322 - RNA, 19 nt, Artificial Sequence
  Description of Artificial Sequence: Synthetic oligonucleotide
aauugcauuggcguuggga

SEQ ID NO: 2037323 - RNA, 19 nt, Artificial Sequence
  Description of Artificial Sequence: Synthetic oligonucleotide
ucaagguccaugucuuugc

SEQ ID NO: 2037324 - RNA, 19 nt, Artificial Sequence
  Description of Artificial Sequence: Synthetic oligonucleotide
guagcaugcaucuaccauc

SEQ ID NO: 2037325 - RNA, 19 nt, Artificial Sequence
  Description of Artificial Sequence: Synthetic oligonucleotide
uucgaaugccacucguuag

SEQ ID NO: 2037326 - RNA, 19 nt, Artificial Sequence
  Description of Artificial Sequence: Synthetic oligonucleotide
acacucaagguccaugucu

SEQ ID NO: 2037327 - RNA, 19 nt, Artificial Sequence
  Description of Artificial Sequence: Synthetic oligonucleotide
uuguaggacagcuggguca

SEQ ID NO: 2037328 - RNA, 19 nt, Artificial Sequence
  Description of Artificial Sequence: Synthetic oligonucleotide
uuaaaacuugaaagccgug

SEQ ID NO: 2037329 - RNA, 19 nt, Artificial Sequence
  Description of Artificial Sequence: Synthetic oligonucleotide
ucacgaaggauuuucuaaa

SEQ ID NO: 2037330 - RNA, 19 nt, Artificial Sequence
  Description of Artificial Sequence: Synthetic oligonucleotide
cuguaaugaguccuguggc

SEQ ID NO: 2037331 - RNA, 19 nt, Artificial Sequence
  Description of Artificial Sequence: Synthetic oligonucleotide
augaaaucaagggcugggc

SEQ ID NO: 2037332 - RNA, 19 nt, Artificial Sequence
  Description of Artificial Sequence: Synthetic oligonucleotide
aagcccuugaaacacucaa

SEQ ID NO: 2037333 - RNA, 19 nt, Artificial Sequence
  Description of Artificial Sequence: Synthetic oligonucleotide
augucuuugcaugugcagg

SEQ ID NO: 2037334 - RNA, 19 nt, Artificial Sequence
  Description of Artificial Sequence: Synthetic oligonucleotide
aagacacacgaagauggag

SEQ ID NO: 2037335 - RNA, 19 nt, Artificial Sequence
  Description of Artificial Sequence: Synthetic oligonucleotide
aaugaguccuguggcuggc

SEQ ID NO: 2037336 - RNA, 19 nt, Artificial Sequence
  Description of Artificial Sequence: Synthetic oligonucleotide
uggguaguaacuguugaca

SEQ ID NO: 2037337 - RNA, 19 nt, Artificial Sequence
  Description of Artificial Sequence: Synthetic oligonucleotide
guuuguuacuguuuugaca

SEQ ID NO: 2037338 - RNA, 19 nt, Artificial Sequence
  Description of Artificial Sequence: Synthetic oligonucleotide
aggacggucauaaaaggag

SEQ ID NO: 2037339 - RNA, 19 nt, Artificial Sequence
  Description of Artificial Sequence: Synthetic oligonucleotide
uggccaaguccuacaagcg

SEQ ID NO: 2037340 - RNA, 19 nt, Artificial Sequence
  Description of Artificial Sequence: Synthetic oligonucleotide
uccaugucuuugcaugugc

SEQ ID NO: 2037341 - RNA, 19 nt, Artificial Sequence
  Description of Artificial Sequence: Synthetic oligonucleotide
cugccaucgaugaugcccg

SEQ ID NO: 2037342 - RNA, 19 nt, Artificial Sequence
  Description of Artificial Sequence: Synthetic oligonucleotide
acauuuuaccgccgcccgc

SEQ ID NO: 2037343 - RNA, 19 nt, Artificial Sequence
  Description of Artificial Sequence: Synthetic oligonucleotide
ucaccgagugaccaaagau

SEQ ID NO: 2037344 - RNA, 19 nt, Artificial Sequence
  Description of Artificial Sequence: Synthetic oligonucleotide
acaaucacaguuagugggg

SEQ ID NO: 2037345 - RNA, 19 nt, Artificial Sequence
  Description of Artificial Sequence: Synthetic oligonucleotide
uagcaugcaucuaccaucu

SEQ ID NO: 2037346 - RNA, 19 nt, Artificial Sequence
  Description of Artificial Sequence: Synthetic oligonucleotide
aaaugggguaacaaucaca

SEQ ID NO: 2037347 - RNA, 19 nt, Artificial Sequence
  Description of Artificial Sequence: Synthetic oligonucleotide
uggagccgacauuuuaccg

SEQ ID NO: 2037348 - RNA, 19 nt, Artificial Sequence
  Description of Artificial Sequence: Synthetic oligonucleotide
caaaagacacacgaagaug

SEQ ID NO: 2037349 - RNA, 19 nt, Artificial Sequence
  Description of Artificial Sequence: Synthetic oligonucleotide
ucuacgcagaaugggauga

SEQ ID NO: 2037350 - RNA, 19 nt, Artificial Sequence
  Description of Artificial Sequence: Synthetic oligonucleotide
gaaaucaagggcugggcaa

SEQ ID NO: 2037351 - RNA, 19 nt, Artificial Sequence
  Description of Artificial Sequence: Synthetic oligonucleotide
acgaagauggagcccauga

SEQ ID NO: 2037352 - RNA, 19 nt, Artificial Sequence
  Description of Artificial Sequence: Synthetic oligonucleotide
agguaaaugggguaacaau

SEQ ID NO: 2037353 - RNA, 19 nt, Artificial Sequence
  Description of Artificial Sequence: Synthetic oligonucleotide
gaugcaccccagcagacac

SEQ ID NO: 2037354 - RNA, 19 nt, Artificial Sequence
  Description of Artificial Sequence: Synthetic oligonucleotide
acgcagaaugggaugaagc

SEQ ID NO: 2037355 - RNA, 19 nt, Artificial Sequence
  Description of Artificial Sequence: Synthetic oligonucleotide
gagccgacauuuuaccgcc

SEQ ID NO: 2037356 - RNA, 19 nt, Artificial Sequence
  Description of Artificial Sequence: Synthetic oligonucleotide
gacuugggcaggcaagaag

SEQ ID NO: 2037357 - RNA, 19 nt, Artificial Sequence
  Description of Artificial Sequence: Synthetic oligonucleotide
acgaaggauuuucuaaaca

SEQ ID NO: 2037358 - RNA, 19 nt, Artificial Sequence
  Description of Artificial Sequence: Synthetic oligonucleotide
caugucuuugcaugugcag

SEQ ID NO: 2037359 - RNA, 19 nt, Artificial Sequence
  Description of Artificial Sequence: Synthetic oligonucleotide
ucguuagcaacggucaucu

SEQ ID NO: 2037360 - RNA, 19 nt, Artificial Sequence
  Description of Artificial Sequence: Synthetic oligonucleotide
ugggcaggcaagaagcccu

SEQ ID NO: 2037361 - RNA, 19 nt, Artificial Sequence
  Description of Artificial Sequence: Synthetic oligonucleotide
gcccuugaaacacucaagg

SEQ ID NO: 2037362 - RNA, 19 nt, Artificial Sequence
  Description of Artificial Sequence: Synthetic oligonucleotide
gguaaaugggguaacaauc

SEQ ID NO: 2037363 - RNA, 19 nt, Artificial Sequence
  Description of Artificial Sequence: Synthetic oligonucleotide
cauuuuaccgccgcccgcg

SEQ ID NO: 2037364 - RNA, 19 nt, Artificial Sequence
  Description of Artificial Sequence: Synthetic oligonucleotide
gaaacacucaagguccaug

SEQ ID NO: 2037365 - RNA, 19 nt, Artificial Sequence
  Description of Artificial Sequence: Synthetic oligonucleotide
guuggggcaguaauggucc

SEQ ID NO: 2037366 - RNA, 19 nt, Artificial Sequence
  Description of Artificial Sequence: Synthetic oligonucleotide
ugcacggcaauugcauugg

SEQ ID NO: 2037367 - RNA, 19 nt, Artificial Sequence
  Description of Artificial Sequence: Synthetic oligonucleotide
gaagcgcucaccgagugac

SEQ ID NO: 2037368 - RNA, 19 nt, Artificial Sequence
  Description of Artificial Sequence: Synthetic oligonucleotide
cacggcaauugcauuggcg

SEQ ID NO: 2037369 - RNA, 19 nt, Artificial Sequence
  Description of Artificial Sequence: Synthetic oligonucleotide
uacuguuuugacacccuuc

SEQ ID NO: 2037370 - RNA, 19 nt, Artificial Sequence
  Description of Artificial Sequence: Synthetic oligonucleotide
caugugcagggcaugacuc

SEQ ID NO: 2037371 - RNA, 19 nt, Artificial Sequence
  Description of Artificial Sequence: Synthetic oligonucleotide
aaguccuacaagcgcuugu

SEQ ID NO: 2037372 - RNA, 19 nt, Artificial Sequence
  Description of Artificial Sequence: Synthetic oligonucleotide
agguuuguuacuguuuuga

SEQ ID NO: 2037373 - RNA, 19 nt, Artificial Sequence
  Description of Artificial Sequence: Synthetic oligonucleotide
caugaagagaugaaaucaa

SEQ ID NO: 2037374 - RNA, 19 nt, Artificial Sequence
  Description of Artificial Sequence: Synthetic oligonucleotide
ugcauuggcguugggaaca

SEQ ID NO: 2037375 - RNA, 19 nt, Artificial Sequence
  Description of Artificial Sequence: Synthetic oligonucleotide
gucacgaaggauuuucuaa

SEQ ID NO: 2037376 - RNA, 19 nt, Artificial Sequence
  Description of Artificial Sequence: Synthetic oligonucleotide
uggcguugggaacaggcac

SEQ ID NO: 2037377 - RNA, 19 nt, Artificial Sequence
  Description of Artificial Sequence: Synthetic oligonucleotide
agcgaugcaccccagcaga

SEQ ID NO: 2037378 - RNA, 19 nt, Artificial Sequence
  Description of Artificial Sequence: Synthetic oligonucleotide
ucuuggcauuuuauuaaaa

SEQ ID NO: 2037379 - RNA, 19 nt, Artificial Sequence
  Description of Artificial Sequence: Synthetic oligonucleotide
guaugaaggaggauucaug

SEQ ID NO: 2037380 - RNA, 19 nt, Artificial Sequence
  Description of Artificial Sequence: Synthetic oligonucleotide
cuggagccgacauuuuacc

SEQ ID NO: 2037381 - RNA, 19 nt, Artificial Sequence
  Description of Artificial Sequence: Synthetic oligonucleotide
aucuacgcagaaugggaug

SEQ ID NO: 2037382 - RNA, 19 nt, Artificial Sequence
  Description of Artificial Sequence: Synthetic oligonucleotide
gguaguaacuguugacacc

SEQ ID NO: 2037383 - RNA, 19 nt, Artificial Sequence
  Description of Artificial Sequence: Synthetic oligonucleotide
uugaaacacucaaggucca

SEQ ID NO: 2037384 - RNA, 19 nt, Artificial Sequence
  Description of Artificial Sequence: Synthetic oligonucleotide
gugggaauugcagaagggc

SEQ ID NO: 2037385 - RNA, 19 nt, Artificial Sequence
  Description of Artificial Sequence: Synthetic oligonucleotide
gcaguaaugguccacaucu

SEQ ID NO: 2037386 - RNA, 19 nt, Artificial Sequence
  Description of Artificial Sequence: Synthetic oligonucleotide
agaugaaaucaagggcugg

SEQ ID NO: 2037387 - RNA, 19 nt, Artificial Sequence
  Description of Artificial Sequence: Synthetic oligonucleotide
ccugguaagguccuggagc

SEQ ID NO: 2037388 - RNA, 19 nt, Artificial Sequence
  Description of Artificial Sequence: Synthetic oligonucleotide
uuggcguugggaacaggca

SEQ ID NO: 2037389 - RNA, 19 nt, Artificial Sequence
  Description of Artificial Sequence: Synthetic oligonucleotide
cacgaaggauuuucuaaac

SEQ ID NO: 2037390 - RNA, 19 nt, Artificial Sequence
  Description of Artificial Sequence: Synthetic oligonucleotide
uaaaaggagacaggcugcu

SEQ ID NO: 2037391 - RNA, 19 nt, Artificial Sequence
  Description of Artificial Sequence: Synthetic oligonucleotide
ucaugcccuucccauccgg

SEQ ID NO: 2037392 - RNA, 19 nt, Artificial Sequence
  Description of Artificial Sequence: Synthetic oligonucleotide
gcaugcaucuaccaucucc

SEQ ID NO: 2037393 - RNA, 19 nt, Artificial Sequence
  Description of Artificial Sequence: Synthetic oligonucleotide
aaucaagggcugggcaagg

SEQ ID NO: 2037394 - RNA, 19 nt, Artificial Sequence
  Description of Artificial Sequence: Synthetic oligonucleotide
gaaagccguggccugcugc

SEQ ID NO: 2037395 - RNA, 19 nt, Artificial Sequence
  Description of Artificial Sequence: Synthetic oligonucleotide
ugucugcacggcaauugca

SEQ ID NO: 2037396 - RNA, 19 nt, Artificial Sequence
  Description of Artificial Sequence: Synthetic oligonucleotide
caagggucaggugacuucc

SEQ ID NO: 2037397 - RNA, 19 nt, Artificial Sequence
  Description of Artificial Sequence: Synthetic oligonucleotide
auuuuaccgccgcccgcgc

SEQ ID NO: 2037398 - RNA, 19 nt, Artificial Sequence
  Description of Artificial Sequence: Synthetic oligonucleotide
gaccaaagauuuuauuugu

SEQ ID NO: 2037399 - RNA, 19 nt, Artificial Sequence
  Description of Artificial Sequence: Synthetic oligonucleotide
ugcaccccagcagacacag

SEQ ID NO: 2037400 - RNA, 19 nt, Artificial Sequence
  Description of Artificial Sequence: Synthetic oligonucleotide
uguaggacagcugggucac

SEQ ID NO: 2037401 - RNA, 19 nt, Artificial Sequence
  Description of Artificial Sequence: Synthetic oligonucleotide
agugggaauugcagaaggg

SEQ ID NO: 2037402 - RNA, 19 nt, Artificial Sequence
  Description of Artificial Sequence: Synthetic oligonucleotide
ugcagggcaugacuccaag

SEQ ID NO: 2037403 - RNA, 19 nt, Artificial Sequence
  Description of Artificial Sequence: Synthetic oligonucleotide
aagcagcaacuucuggggu

SEQ ID NO: 2037404 - RNA, 19 nt, Artificial Sequence
  Description of Artificial Sequence: Synthetic oligonucleotide
uuugggcaaugccuggaaa

SEQ ID NO: 2037405 - RNA, 19 nt, Artificial Sequence
  Description of Artificial Sequence: Synthetic oligonucleotide
uguugacacccacugucuc

SEQ ID NO: 2037406 - RNA, 19 nt, Artificial Sequence
  Description of Artificial Sequence: Synthetic oligonucleotide
ugggcaaugccuggaaaca

SEQ ID NO: 2037407 - RNA, 19 nt, Artificial Sequence
  Description of Artificial Sequence: Synthetic oligonucleotide
agggucaggugacuuccgg

SEQ ID NO: 2037408 - RNA, 19 nt, Artificial Sequence
  Description of Artificial Sequence: Synthetic oligonucleotide
aguaugaaggaggauucau

SEQ ID NO: 2037409 - RNA, 19 nt, Artificial Sequence
  Description of Artificial Sequence: Synthetic oligonucleotide
agugaccaaagauuuuauu

SEQ ID NO: 2037410 - RNA, 19 nt, Artificial Sequence
  Description of Artificial Sequence: Synthetic oligonucleotide
caggacagccaggugaggg

SEQ ID NO: 2037411 - RNA, 19 nt, Artificial Sequence
  Description of Artificial Sequence: Synthetic oligonucleotide
cagccaaaucuucgaaugc

SEQ ID NO: 2037412 - RNA, 19 nt, Artificial Sequence
  Description of Artificial Sequence: Synthetic oligonucleotide
gacuccaagcagcaacuuc

SEQ ID NO: 2037413 - RNA, 19 nt, Artificial Sequence
  Description of Artificial Sequence: Synthetic oligonucleotide
gacggucauaaaaggagac

SEQ ID NO: 2037414 - RNA, 19 nt, Artificial Sequence
  Description of Artificial Sequence: Synthetic oligonucleotide
uuacuguuuugacacccuu

SEQ ID NO: 2037415 - RNA, 19 nt, Artificial Sequence
  Description of Artificial Sequence: Synthetic oligonucleotide
ucuucgaaugccacucguu

SEQ ID NO: 2037416 - RNA, 19 nt, Artificial Sequence
  Description of Artificial Sequence: Synthetic oligonucleotide
uacgcagaaugggaugaag

SEQ ID NO: 2037417 - RNA, 19 nt, Artificial Sequence
  Description of Artificial Sequence: Synthetic oligonucleotide
cacucguuagcaacgguca

SEQ ID NO: 2037418 - RNA, 19 nt, Artificial Sequence
  Description of Artificial Sequence: Synthetic oligonucleotide
uggagguuuguuacuguuu

SEQ ID NO: 2037419 - RNA, 19 nt, Artificial Sequence
  Description of Artificial Sequence: Synthetic oligonucleotide
ggucauaaaaggagacagg

SEQ ID NO: 2037420 - RNA, 19 nt, Artificial Sequence
  Description of Artificial Sequence: Synthetic oligonucleotide
ucacgaucaucuugcugca

SEQ ID NO: 2037421 - RNA, 19 nt, Artificial Sequence
  Description of Artificial Sequence: Synthetic oligonucleotide
agcaacggucaucuugcug

SEQ ID NO: 2037422 - RNA, 19 nt, Artificial Sequence
  Description of Artificial Sequence: Synthetic oligonucleotide
uuggagguuuguuacuguu

SEQ ID NO: 2037423 - RNA, 19 nt, Artificial Sequence
  Description of Artificial Sequence: Synthetic oligonucleotide
aucuucgaaugccacucgu

SEQ ID NO: 2037424 - RNA, 19 nt, Artificial Sequence
  Description of Artificial Sequence: Synthetic oligonucleotide
ggacagcacaucuggacag

SEQ ID NO: 2037425 - RNA, 19 nt, Artificial Sequence
  Description of Artificial Sequence: Synthetic oligonucleotide
ggguuuggagguuuguuac

SEQ ID NO: 2037426 - RNA, 19 nt, Artificial Sequence
  Description of Artificial Sequence: Synthetic oligonucleotide
cugggucacgaucaucuug

SEQ ID NO: 2037427 - RNA, 19 nt, Artificial Sequence
  Description of Artificial Sequence: Synthetic oligonucleotide
ggcaucuacgcagaauggg

SEQ ID NO: 2037428 - RNA, 19 nt, Artificial Sequence
  Description of Artificial Sequence: Synthetic oligonucleotide
ggugcagugggaauugcag

SEQ ID NO: 2037429 - RNA, 19 nt, Artificial Sequence
  Description of Artificial Sequence: Synthetic oligonucleotide
cucaagguccaugucuuug

SEQ ID NO: 2037430 - RNA, 19 nt, Artificial Sequence
  Description of Artificial Sequence: Synthetic oligonucleotide
ggguaguaacuguugacac

SEQ ID NO: 2037431 - RNA, 19 nt, Artificial Sequence
  Description of Artificial Sequence: Synthetic oligonucleotide
agacugccacaggacagcc

SEQ ID NO: 2037432 - RNA, 19 nt, Artificial Sequence
  Description of Artificial Sequence: Synthetic oligonucleotide
uugcauuggcguugggaac

SEQ ID NO: 2037433 - RNA, 19 nt, Artificial Sequence
  Description of Artificial Sequence: Synthetic oligonucleotide
uggagagguaaauggggua

SEQ ID NO: 2037434 - RNA, 19 nt, Artificial Sequence
  Description of Artificial Sequence: Synthetic oligonucleotide
auggcuggcuggccaaguc

SEQ ID NO: 2037435 - RNA, 19 nt, Artificial Sequence
  Description of Artificial Sequence: Synthetic oligonucleotide
ugaagcgcucaccgaguga

SEQ ID NO: 2037436 - RNA, 19 nt, Artificial Sequence
  Description of Artificial Sequence: Synthetic oligonucleotide
gguuuguuacuguuuugac

SEQ ID NO: 2037437 - RNA, 19 nt, Artificial Sequence
  Description of Artificial Sequence: Synthetic oligonucleotide
uuuuaccgccgcccgcgcc

SEQ ID NO: 2037438 - RNA, 19 nt, Artificial Sequence
  Description of Artificial Sequence: Synthetic oligonucleotide
aacggucaucuugcugugg

SEQ ID NO: 2037439 - RNA, 19 nt, Artificial Sequence
  Description of Artificial Sequence: Synthetic oligonucleotide
uugggcaggcaagaagccc

SEQ ID NO: 2037440 - RNA, 19 nt, Artificial Sequence
  Description of Artificial Sequence: Synthetic oligonucleotide
uccgggccuguaaugaguc

SEQ ID NO: 2037441 - RNA, 19 nt, Artificial Sequence
  Description of Artificial Sequence: Synthetic oligonucleotide
cuguuuugacacccuuccc

SEQ ID NO: 2037442 - RNA, 19 nt, Artificial Sequence
  Description of Artificial Sequence: Synthetic oligonucleotide
gagggcgccggcauuguag

SEQ ID NO: 2037443 - RNA, 19 nt, Artificial Sequence
  Description of Artificial Sequence: Synthetic oligonucleotide
uaguaugaaggaggauuca

SEQ ID NO: 2037444 - RNA, 19 nt, Artificial Sequence
  Description of Artificial Sequence: Synthetic oligonucleotide
ugucgagccgugaggucug

SEQ ID NO: 2037445 - RNA, 19 nt, Artificial Sequence
  Description of Artificial Sequence: Synthetic oligonucleotide
auacacugucugcacggca

SEQ ID NO: 2037446 - RNA, 19 nt, Artificial Sequence
  Description of Artificial Sequence: Synthetic oligonucleotide
gcaacggucaucuugcugu

SEQ ID NO: 2037447 - RNA, 19 nt, Artificial Sequence
  Description of Artificial Sequence: Synthetic oligonucleotide
augcccgugggcucccaac

SEQ ID NO: 2037448 - RNA, 19 nt, Artificial Sequence
  Description of Artificial Sequence: Synthetic oligonucleotide
ugccacucguuagcaacgg

SEQ ID NO: 2037449 - RNA, 19 nt, Artificial Sequence
  Description of Artificial Sequence: Synthetic oligonucleotide
ugcccgugggcucccaaca

SEQ ID NO: 2037450 - RNA, 19 nt, Artificial Sequence
  Description of Artificial Sequence: Synthetic oligonucleotide
cuccccuauggcuggcugg

SEQ ID NO: 2037451 - RNA, 19 nt, Artificial Sequence
  Description of Artificial Sequence: Synthetic oligonucleotide
gagguaaaugggguaacaa

SEQ ID NO: 2037452 - RNA, 19 nt, Artificial Sequence
  Description of Artificial Sequence: Synthetic oligonucleotide
acggucauaaaaggagaca

SEQ ID NO: 2037453 - RNA, 19 nt, Artificial Sequence
  Description of Artificial Sequence: Synthetic oligonucleotide
uccuggagccgacauuuua

SEQ ID NO: 2037454 - RNA, 19 nt, Artificial Sequence
  Description of Artificial Sequence: Synthetic oligonucleotide
cagaagggccugcagccgc

SEQ ID NO: 2037455 - RNA, 19 nt, Artificial Sequence
  Description of Artificial Sequence: Synthetic oligonucleotide
accgagugaccaaagauuu

SEQ ID NO: 2037456 - RNA, 19 nt, Artificial Sequence
  Description of Artificial Sequence: Synthetic oligonucleotide
cagccgccugguaaggucc

SEQ ID NO: 2037457 - RNA, 19 nt, Artificial Sequence
  Description of Artificial Sequence: Synthetic oligonucleotide
caggacggucauaaaagga

SEQ ID NO: 2037458 - RNA, 19 nt, Artificial Sequence
  Description of Artificial Sequence: Synthetic oligonucleotide
cuucgaaugccacucguua

SEQ ID NO: 2037459 - RNA, 19 nt, Artificial Sequence
  Description of Artificial Sequence: Synthetic oligonucleotide
cccaugaagagaugaaauc

SEQ ID NO: 2037460 - RNA, 19 nt, Artificial Sequence
  Description of Artificial Sequence: Synthetic oligonucleotide
caucuggacaggacgguca

SEQ ID NO: 2037461 - RNA, 19 nt, Artificial Sequence
  Description of Artificial Sequence: Synthetic oligonucleotide
ugggaugaagcagcagcca

SEQ ID NO: 2037462 - RNA, 19 nt, Artificial Sequence
  Description of Artificial Sequence: Synthetic oligonucleotide
agcagcaacuucugggguu

SEQ ID NO: 2037463 - RNA, 19 nt, Artificial Sequence
  Description of Artificial Sequence: Synthetic oligonucleotide
cuacaagcgcuuguaggug

SEQ ID NO: 2037464 - RNA, 19 nt, Artificial Sequence
  Description of Artificial Sequence: Synthetic oligonucleotide
agcgcuuguaggugcccag

SEQ ID NO: 2037465 - RNA, 19 nt, Artificial Sequence
  Description of Artificial Sequence: Synthetic oligonucleotide
uccccuauggcuggcuggc

SEQ ID NO: 2037466 - RNA, 19 nt, Artificial Sequence
  Description of Artificial Sequence: Synthetic oligonucleotide
cauccgggccuguaaugag

SEQ ID NO: 2037467 - RNA, 19 nt, Artificial Sequence
  Description of Artificial Sequence: Synthetic oligonucleotide
aggaggauucaugcccuuc

SEQ ID NO: 2037468 - RNA, 19 nt, Artificial Sequence
  Description of Artificial Sequence: Synthetic oligonucleotide
cauacacugucugcacggc

SEQ ID NO: 2037469 - RNA, 19 nt, Artificial Sequence
  Description of Artificial Sequence: Synthetic oligonucleotide
gagagguaaaugggguaac

SEQ ID NO: 2037470 - RNA, 19 nt, Artificial Sequence
  Description of Artificial Sequence: Synthetic oligonucleotide
uuugcaguuggggcaguaa

SEQ ID NO: 2037471 - RNA, 19 nt, Artificial Sequence
  Description of Artificial Sequence: Synthetic oligonucleotide
gaacugaagcgcucaccga

SEQ ID NO: 2037472 - RNA, 19 nt, Artificial Sequence
  Description of Artificial Sequence: Synthetic oligonucleotide
agcaacuucugggguuugg

SEQ ID NO: 2037473 - RNA, 19 nt, Artificial Sequence
  Description of Artificial Sequence: Synthetic oligonucleotide
gugaacugaagcgcucacc

SEQ ID NO: 2037474 - RNA, 19 nt, Artificial Sequence
  Description of Artificial Sequence: Synthetic oligonucleotide
gacacccacugucucuuca

SEQ ID NO: 2037475 - RNA, 19 nt, Artificial Sequence
  Description of Artificial Sequence: Synthetic oligonucleotide
ggcaauugcauuggcguug

SEQ ID NO: 2037476 - RNA, 19 nt, Artificial Sequence
  Description of Artificial Sequence: Synthetic oligonucleotide
ccaugaagagaugaaauca

SEQ ID NO: 2037477 - RNA, 19 nt, Artificial Sequence
  Description of Artificial Sequence: Synthetic oligonucleotide
aagcaguggagagguaaau

SEQ ID NO: 2037478 - RNA, 19 nt, Artificial Sequence
  Description of Artificial Sequence: Synthetic oligonucleotide
ggccaaguccuacaagcgc

SEQ ID NO: 2037479 - RNA, 19 nt, Artificial Sequence
  Description of Artificial Sequence: Synthetic oligonucleotide
cugaagcgcucaccgagug

SEQ ID NO: 2037480 - RNA, 19 nt, Artificial Sequence
  Description of Artificial Sequence: Synthetic oligonucleotide
ggacaggacggucauaaaa

SEQ ID NO: 2037481 - RNA, 19 nt, Artificial Sequence
  Description of Artificial Sequence: Synthetic oligonucleotide
ucugcacggcaauugcauu

SEQ ID NO: 2037482 - RNA, 19 nt, Artificial Sequence
  Description of Artificial Sequence: Synthetic oligonucleotide
cuugcagggcaucuacgca

SEQ ID NO: 2037483 - RNA, 19 nt, Artificial Sequence
  Description of Artificial Sequence: Synthetic oligonucleotide
uugcaugugcagggcauga

SEQ ID NO: 2037484 - RNA, 19 nt, Artificial Sequence
  Description of Artificial Sequence: Synthetic oligonucleotide
uugacacccacugucucuu

SEQ ID NO: 2037485 - RNA, 19 nt, Artificial Sequence
  Description of Artificial Sequence: Synthetic oligonucleotide
cggucauaaaaggagacag

SEQ ID NO: 2037486 - RNA, 19 nt, Artificial Sequence
  Description of Artificial Sequence: Synthetic oligonucleotide
cucguuagcaacggucauc

SEQ ID NO: 2037487 - RNA, 19 nt, Artificial Sequence
  Description of Artificial Sequence: Synthetic oligonucleotide
aagcgcuuguaggugccca

SEQ ID NO: 2037488 - RNA, 19 nt, Artificial Sequence
  Description of Artificial Sequence: Synthetic oligonucleotide
gcaauugcauuggcguugg

SEQ ID NO: 2037489 - RNA, 19 nt, Artificial Sequence
  Description of Artificial Sequence: Synthetic oligonucleotide
augggguaacaaucacagu

SEQ ID NO: 2037490 - RNA, 19 nt, Artificial Sequence
  Description of Artificial Sequence: Synthetic oligonucleotide
aggugaacugaagcgcuca

SEQ ID NO: 2037491 - RNA, 19 nt, Artificial Sequence
  Description of Artificial Sequence: Synthetic oligonucleotide
aggagacaggcugcugcac

SEQ ID NO: 2037492 - RNA, 19 nt, Artificial Sequence
  Description of Artificial Sequence: Synthetic oligonucleotide
agcccaugaagagaugaaa

SEQ ID NO: 2037493 - RNA, 19 nt, Artificial Sequence
  Description of Artificial Sequence: Synthetic oligonucleotide
gaauugcagaagggccugc

SEQ ID NO: 2037494 - RNA, 19 nt, Artificial Sequence
  Description of Artificial Sequence: Synthetic oligonucleotide
acucguuagcaacggucau

SEQ ID NO: 2037495 - RNA, 19 nt, Artificial Sequence
  Description of Artificial Sequence: Synthetic oligonucleotide
guugacacccacugucucu

SEQ ID NO: 2037496 - RNA, 19 nt, Artificial Sequence
  Description of Artificial Sequence: Synthetic oligonucleotide
aguccuacaagcgcuugua

SEQ ID NO: 2037497 - RNA, 19 nt, Artificial Sequence
  Description of Artificial Sequence: Synthetic oligonucleotide
caacggucaucuugcugug

SEQ ID NO: 2037498 - RNA, 19 nt, Artificial Sequence
  Description of Artificial Sequence: Synthetic oligonucleotide
gggcaugacuccaagcagc

SEQ ID NO: 2037499 - RNA, 19 nt, Artificial Sequence
  Description of Artificial Sequence: Synthetic oligonucleotide
ccacucguuagcaacgguc

SEQ ID NO: 2037500 - RNA, 19 nt, Artificial Sequence
  Description of Artificial Sequence: Synthetic oligonucleotide
cugcugcacauacacuguc

SEQ ID NO: 2037501 - RNA, 19 nt, Artificial Sequence
  Description of Artificial Sequence: Synthetic oligonucleotide
gaaggaggauucaugcccu

SEQ ID NO: 2037502 - RNA, 19 nt, Artificial Sequence
  Description of Artificial Sequence: Synthetic oligonucleotide
ggacagccaggugagggcg

SEQ ID NO: 2037503 - RNA, 19 nt, Artificial Sequence
  Description of Artificial Sequence: Synthetic oligonucleotide
cuauagcaggugaacugaa

SEQ ID NO: 2037504 - RNA, 19 nt, Artificial Sequence
  Description of Artificial Sequence: Synthetic oligonucleotide
uaaaagcaguggagaggua

SEQ ID NO: 2037505 - RNA, 19 nt, Artificial Sequence
  Description of Artificial Sequence: Synthetic oligonucleotide
ggucacgaucaucuugcug

SEQ ID NO: 2037506 - RNA, 19 nt, Artificial Sequence
  Description of Artificial Sequence: Synthetic oligonucleotide
ugaaacacucaagguccau

SEQ ID NO: 2037507 - RNA, 19 nt, Artificial Sequence
  Description of Artificial Sequence: Synthetic oligonucleotide
gucuuugcaugugcagggc

SEQ ID NO: 2037508 - RNA, 19 nt, Artificial Sequence
  Description of Artificial Sequence: Synthetic oligonucleotide
guaacuguugacacccacu

SEQ ID NO: 2037509 - RNA, 19 nt, Artificial Sequence
  Description of Artificial Sequence: Synthetic oligonucleotide
gcaucuaccaucuccccua

SEQ ID NO: 2037510 - RNA, 19 nt, Artificial Sequence
  Description of Artificial Sequence: Synthetic oligonucleotide
caggugaacugaagcgcuc

SEQ ID NO: 2037511 - RNA, 19 nt, Artificial Sequence
  Description of Artificial Sequence: Synthetic oligonucleotide
ggagagguaaaugggguaa

SEQ ID NO: 2037512 - RNA, 19 nt, Artificial Sequence
  Description of Artificial Sequence: Synthetic oligonucleotide
ugcaugugcagggcaugac

SEQ ID NO: 2037513 - RNA, 19 nt, Artificial Sequence
  Description of Artificial Sequence: Synthetic oligonucleotide
cucaccgagugaccaaaga

SEQ ID NO: 2037514 - RNA, 19 nt, Artificial Sequence
  Description of Artificial Sequence: Synthetic oligonucleotide
gcaucuacgcagaauggga

SEQ ID NO: 2037515 - RNA, 19 nt, Artificial Sequence
  Description of Artificial Sequence: Synthetic oligonucleotide
uuggggcaguaauggucca

SEQ ID NO: 2037516 - RNA, 19 nt, Artificial Sequence
  Description of Artificial Sequence: Synthetic oligonucleotide
cacagguuguguauaguau

SEQ ID NO: 2037517 - RNA, 19 nt, Artificial Sequence
  Description of Artificial Sequence: Synthetic oligonucleotide
caacagccaaaucuucgaa

SEQ ID NO: 2037518 - RNA, 19 nt, Artificial Sequence
  Description of Artificial Sequence: Synthetic oligonucleotide
gccgacauuuuaccgccgc

SEQ ID NO: 2037519 - RNA, 19 nt, Artificial Sequence
  Description of Artificial Sequence: Synthetic oligonucleotide
gcacagguuguguauagua

SEQ ID NO: 2037520 - RNA, 19 nt, Artificial Sequence
  Description of Artificial Sequence: Synthetic oligonucleotide
ugacuuccgguagcaugca

SEQ ID NO: 2037521 - RNA, 19 nt, Artificial Sequence
  Description of Artificial Sequence: Synthetic oligonucleotide
ggagguuuguuacuguuuu

SEQ ID NO: 2037522 - RNA, 19 nt, Artificial Sequence
  Description of Artificial Sequence: Synthetic oligonucleotide
ccgugggcucccaacagcc

SEQ ID NO: 2037523 - RNA, 19 nt, Artificial Sequence
  Description of Artificial Sequence: Synthetic oligonucleotide
ccuacaagcgcuuguaggu

SEQ ID NO: 2037524 - RNA, 19 nt, Artificial Sequence
  Description of Artificial Sequence: Synthetic oligonucleotide
ggacggucauaaaaggaga

SEQ ID NO: 2037525 - RNA, 19 nt, Artificial Sequence
  Description of Artificial Sequence: Synthetic oligonucleotide
caccgagugaccaaagauu

SEQ ID NO: 2037526 - RNA, 19 nt, Artificial Sequence
  Description of Artificial Sequence: Synthetic oligonucleotide
ccaucuccccuauggcugg

SEQ ID NO: 2037527 - RNA, 19 nt, Artificial Sequence
  Description of Artificial Sequence: Synthetic oligonucleotide
uagcaacggucaucuugcu

SEQ ID NO: 2037528 - RNA, 19 nt, Artificial Sequence
  Description of Artificial Sequence: Synthetic oligonucleotide
ugacuugggcaggcaagaa

SEQ ID NO: 2037529 - RNA, 19 nt, Artificial Sequence
  Description of Artificial Sequence: Synthetic oligonucleotide
gcaagggucaggugacuuc

SEQ ID NO: 2037530 - RNA, 19 nt, Artificial Sequence
  Description of Artificial Sequence: Synthetic oligonucleotide
gggcaucuacgcagaaugg

SEQ ID NO: 2037531 - RNA, 19 nt, Artificial Sequence
  Description of Artificial Sequence: Synthetic oligonucleotide
caucuacgcagaaugggau

SEQ ID NO: 2037532 - RNA, 19 nt, Artificial Sequence
  Description of Artificial Sequence: Synthetic oligonucleotide
aggacagcugggucacgau

SEQ ID NO: 2037533 - RNA, 19 nt, Artificial Sequence
  Description of Artificial Sequence: Synthetic oligonucleotide
augaugcccgugggcuccc

SEQ ID NO: 2037534 - RNA, 19 nt, Artificial Sequence
  Description of Artificial Sequence: Synthetic oligonucleotide
ccgguagcaugcaucuacc

SEQ ID NO: 2037535 - RNA, 19 nt, Artificial Sequence
  Description of Artificial Sequence: Synthetic oligonucleotide
gcugaagccugaggugugg

SEQ ID NO: 2037536 - RNA, 19 nt, Artificial Sequence
  Description of Artificial Sequence: Synthetic oligonucleotide
ggauucaugcccuucccau

SEQ ID NO: 2037537 - RNA, 19 nt, Artificial Sequence
  Description of Artificial Sequence: Synthetic oligonucleotide
cuguugacacccacugucu

SEQ ID NO: 2037538 - RNA, 19 nt, Artificial Sequence
  Description of Artificial Sequence: Synthetic oligonucleotide
cagccagcgaugcacccca

SEQ ID NO: 2037539 - RNA, 19 nt, Artificial Sequence
  Description of Artificial Sequence: Synthetic oligonucleotide
gagcccaugaagagaugaa

SEQ ID NO: 2037540 - RNA, 19 nt, Artificial Sequence
  Description of Artificial Sequence: Synthetic oligonucleotide
gggguaacaaucacaguua

SEQ ID NO: 2037541 - RNA, 19 nt, Artificial Sequence
  Description of Artificial Sequence: Synthetic oligonucleotide
caauugcauuggcguuggg

SEQ ID NO: 2037542 - RNA, 19 nt, Artificial Sequence
  Description of Artificial Sequence: Synthetic oligonucleotide
cgcagaaugggaugaagca

SEQ ID NO: 2037543 - RNA, 19 nt, Artificial Sequence
  Description of Artificial Sequence: Synthetic oligonucleotide
uaggugcccaggagggcuu

SEQ ID NO: 2037544 - RNA, 19 nt, Artificial Sequence
  Description of Artificial Sequence: Synthetic oligonucleotide
cgacauuuuaccgccgccc

SEQ ID NO: 2037545 - RNA, 19 nt, Artificial Sequence
  Description of Artificial Sequence: Synthetic oligonucleotide
guuacuguuuugacacccu

SEQ ID NO: 2037546 - RNA, 19 nt, Artificial Sequence
  Description of Artificial Sequence: Synthetic oligonucleotide
guaggugcccaggagggcu

SEQ ID NO: 2037547 - RNA, 19 nt, Artificial Sequence
  Description of Artificial Sequence: Synthetic oligonucleotide
cacucaagguccaugucuu

SEQ ID NO: 2037548 - RNA, 19 nt, Artificial Sequence
  Description of Artificial Sequence: Synthetic oligonucleotide
ggucacgaaggauuuucua

SEQ ID NO: 2037549 - RNA, 19 nt, Artificial Sequence
  Description of Artificial Sequence: Synthetic oligonucleotide
cacgaucaucuugcugcag

SEQ ID NO: 2037550 - RNA, 19 nt, Artificial Sequence
  Description of Artificial Sequence: Synthetic oligonucleotide
cacgaagauggagcccaug

SEQ ID NO: 2037551 - RNA, 19 nt, Artificial Sequence
  Description of Artificial Sequence: Synthetic oligonucleotide
cauuggcguugggaacagg

SEQ ID NO: 2037552 - RNA, 19 nt, Artificial Sequence
  Description of Artificial Sequence: Synthetic oligonucleotide
ccgacauuuuaccgccgcc

SEQ ID NO: 2037553 - RNA, 19 nt, Artificial Sequence
  Description of Artificial Sequence: Synthetic oligonucleotide
ugcagccgccugguaaggu

SEQ ID NO: 2037554 - RNA, 19 nt, Artificial Sequence
  Description of Artificial Sequence: Synthetic oligonucleotide
ggggcaguaaugguccaca

SEQ ID NO: 2037555 - RNA, 19 nt, Artificial Sequence
  Description of Artificial Sequence: Synthetic oligonucleotide
cugucgagccgugaggucu

SEQ ID NO: 2037556 - RNA, 19 nt, Artificial Sequence
  Description of Artificial Sequence: Synthetic oligonucleotide
ccaugucuuugcaugugca

SEQ ID NO: 2037557 - RNA, 19 nt, Artificial Sequence
  Description of Artificial Sequence: Synthetic oligonucleotide
gagugaccaaagauuuuau

SEQ ID NO: 2037558 - RNA, 19 nt, Artificial Sequence
  Description of Artificial Sequence: Synthetic oligonucleotide
ggcgccggcauuguaggac

SEQ ID NO: 2037559 - RNA, 19 nt, Artificial Sequence
  Description of Artificial Sequence: Synthetic oligonucleotide
gcagccgccugguaagguc

SEQ ID NO: 2037560 - RNA, 19 nt, Artificial Sequence
  Description of Artificial Sequence: Synthetic oligonucleotide
gcaacuucugggguuugga

SEQ ID NO: 2037561 - RNA, 19 nt, Artificial Sequence
  Description of Artificial Sequence: Synthetic oligonucleotide
gguuuggagguuuguuacu

SEQ ID NO: 2037562 - RNA, 19 nt, Artificial Sequence
  Description of Artificial Sequence: Synthetic oligonucleotide
ggcguugggaacaggcaca

SEQ ID NO: 2037563 - RNA, 19 nt, Artificial Sequence
  Description of Artificial Sequence: Synthetic oligonucleotide
guaggacagcugggucacg

SEQ ID NO: 2037564 - RNA, 19 nt, Artificial Sequence
  Description of Artificial Sequence: Synthetic oligonucleotide
gucugcacggcaauugcau

SEQ ID NO: 2037565 - RNA, 19 nt, Artificial Sequence
  Description of Artificial Sequence: Synthetic oligonucleotide
agccgacauuuuaccgccg

SEQ ID NO: 2037566 - RNA, 19 nt, Artificial Sequence
  Description of Artificial Sequence: Synthetic oligonucleotide
ggccugcugccaucgauga

SEQ ID NO: 2037567 - RNA, 19 nt, Artificial Sequence
  Description of Artificial Sequence: Synthetic oligonucleotide
ugccaucgaugaugcccgu

SEQ ID NO: 2037568 - RNA, 19 nt, Artificial Sequence
  Description of Artificial Sequence: Synthetic oligonucleotide
gaugcccgugggcucccaa

SEQ ID NO: 2037569 - RNA, 19 nt, Artificial Sequence
  Description of Artificial Sequence: Synthetic oligonucleotide
gggccuguaaugaguccug

SEQ ID NO: 2037570 - RNA, 19 nt, Artificial Sequence
  Description of Artificial Sequence: Synthetic oligonucleotide
gggcgcuggguaguaacug

SEQ ID NO: 2037571 - RNA, 19 nt, Artificial Sequence
  Description of Artificial Sequence: Synthetic oligonucleotide
cgagccgugaggucugcac

SEQ ID NO: 2037572 - RNA, 19 nt, Artificial Sequence
  Description of Artificial Sequence: Synthetic oligonucleotide
cccgugggcucccaacagc

SEQ ID NO: 2037573 - RNA, 19 nt, Artificial Sequence
  Description of Artificial Sequence: Synthetic oligonucleotide
ucgagccgugaggucugca

SEQ ID NO: 2037574 - RNA, 19 nt, Artificial Sequence
  Description of Artificial Sequence: Synthetic oligonucleotide
cccauccgggccuguaaug

SEQ ID NO: 2037575 - RNA, 19 nt, Artificial Sequence
  Description of Artificial Sequence: Synthetic oligonucleotide
aucuccccuauggcuggcu

SEQ ID NO: 2037576 - RNA, 19 nt, Artificial Sequence
  Description of Artificial Sequence: Synthetic oligonucleotide
gguccuggagccgacauuu

SEQ ID NO: 2037577 - RNA, 19 nt, Artificial Sequence
  Description of Artificial Sequence: Synthetic oligonucleotide
caucuccccuauggcuggc

SEQ ID NO: 2037578 - RNA, 19 nt, Artificial Sequence
  Description of Artificial Sequence: Synthetic oligonucleotide
gcccgugggcucccaacag

SEQ ID NO: 2037579 - RNA, 19 nt, Artificial Sequence
  Description of Artificial Sequence: Synthetic oligonucleotide
gcgccggcauuguaggaca

SEQ ID NO: 2037580 - RNA, 19 nt, Artificial Sequence
  Description of Artificial Sequence: Synthetic oligonucleotide
gcacggcaauugcauuggc

SEQ ID NO: 2037581 - RNA, 19 nt, Artificial Sequence
  Description of Artificial Sequence: Synthetic oligonucleotide
cgagugaccaaagauuuua

SEQ ID NO: 2037582 - RNA, 19 nt, Artificial Sequence
  Description of Artificial Sequence: Synthetic oligonucleotide
ggcgcuggguaguaacugu

SEQ ID NO: 2037583 - RNA, 19 nt, Artificial Sequence
  Description of Artificial Sequence: Synthetic oligonucleotide
uuccgguagcaugcaucua

SEQ ID NO: 2037584 - RNA, 19 nt, Artificial Sequence
  Description of Artificial Sequence: Synthetic oligonucleotide
cugaggugugggucacgaa

SEQ ID NO: 2037585 - RNA, 19 nt, Artificial Sequence
  Description of Artificial Sequence: Synthetic oligonucleotide
ccgccugucgagccgugag

SEQ ID NO: 2037586 - RNA, 19 nt, Artificial Sequence
  Description of Artificial Sequence: Synthetic oligonucleotide
augcaccccagcagacaca

SEQ ID NO: 2037587 - RNA, 19 nt, Artificial Sequence
  Description of Artificial Sequence: Synthetic oligonucleotide
caguuggggcaguaauggu

SEQ ID NO: 2037588 - RNA, 19 nt, Artificial Sequence
  Description of Artificial Sequence: Synthetic oligonucleotide
gcccaugaagagaugaaau

SEQ ID NO: 2037589 - RNA, 19 nt, Artificial Sequence
  Description of Artificial Sequence: Synthetic oligonucleotide
gcucaccgagugaccaaag

SEQ ID NO: 2037590 - RNA, 19 nt, Artificial Sequence
  Description of Artificial Sequence: Synthetic oligonucleotide
guggccugcugccaucgau

SEQ ID NO: 2037591 - RNA, 19 nt, Artificial Sequence
  Description of Artificial Sequence: Synthetic oligonucleotide
cuacgcagaaugggaugaa

SEQ ID NO: 2037592 - RNA, 19 nt, Artificial Sequence
  Description of Artificial Sequence: Synthetic oligonucleotide
ccauccgggccuguaauga

SEQ ID NO: 2037593 - RNA, 19 nt, Artificial Sequence
  Description of Artificial Sequence: Synthetic oligonucleotide
ccgccugguaagguccugg

SEQ ID NO: 2037594 - RNA, 19 nt, Artificial Sequence
  Description of Artificial Sequence: Synthetic oligonucleotide
aggugacuuccgguagcau

SEQ ID NO: 2037595 - RNA, 19 nt, Artificial Sequence
  Description of Artificial Sequence: Synthetic oligonucleotide
cagccaggugagggcgccg

SEQ ID NO: 2037596 - RNA, 19 nt, Artificial Sequence
  Description of Artificial Sequence: Synthetic oligonucleotide
ccgggccuguaaugagucc

SEQ ID NO: 2037597 - RNA, 19 nt, Artificial Sequence
  Description of Artificial Sequence: Synthetic oligonucleotide
gccggcauuguaggacagc

SEQ ID NO: 2037598 - RNA, 19 nt, Artificial Sequence
  Description of Artificial Sequence: Synthetic oligonucleotide
cagcaacuucugggguuug

SEQ ID NO: 2037599 - RNA, 19 nt, Artificial Sequence
  Description of Artificial Sequence: Synthetic oligonucleotide
ccgugaggucugcacuggc

SEQ ID NO: 2037600 - RNA, 19 nt, Artificial Sequence
  Description of Artificial Sequence: Synthetic oligonucleotide
cccuauggcuggcuggcca

SEQ ID NO: 2037601 - RNA, 19 nt, Artificial Sequence
  Description of Artificial Sequence: Synthetic oligonucleotide
ccuauggcuggcuggccaa

SEQ ID NO: 2037602 - RNA, 19 nt, Artificial Sequence
  Description of Artificial Sequence: Synthetic oligonucleotide
cgccugucgagccgugagg

SEQ ID NO: 2037603 - RNA, 19 nt, Artificial Sequence
  Description of Artificial Sequence: Synthetic oligonucleotide
gucgagccgugaggucugc

SEQ ID NO: 2037604 - RNA, 19 nt, Artificial Sequence
  Description of Artificial Sequence: Synthetic oligonucleotide
agccgccugguaagguccu

SEQ ID NO: 2037605 - RNA, 19 nt, Artificial Sequence
  Description of Artificial Sequence: Synthetic oligonucleotide
gcgaugcaccccagcagac

SEQ ID NO: 2037606 - RNA, 19 nt, Artificial Sequence
  Description of Artificial Sequence: Synthetic oligonucleotide
gcccgcgccgccugucgag

SEQ ID NO: 2037607 - RNA, 19 nt, Artificial Sequence
  Description of Artificial Sequence: Synthetic oligonucleotide
gugcagggcaugacuccaa

SEQ ID NO: 2037608 - RNA, 19 nt, Artificial Sequence
  Description of Artificial Sequence: Synthetic oligonucleotide
gccaggugagggcgccggc

SEQ ID NO: 2037609 - RNA, 19 nt, Artificial Sequence
  Description of Artificial Sequence: Synthetic oligonucleotide
cgaaugccacucguuagca

SEQ ID NO: 2037610 - RNA, 19 nt, Artificial Sequence
  Description of Artificial Sequence: Synthetic oligonucleotide
caggugagggcgccggcau

SEQ ID NO: 2037611 - RNA, 19 nt, Artificial Sequence
  Description of Artificial Sequence: Synthetic oligonucleotide
cuucccauccgggccugua

SEQ ID NO: 2037612 - RNA, 19 nt, Artificial Sequence
  Description of Artificial Sequence: Synthetic oligonucleotide
gccugucgagccgugaggu

SEQ ID NO: 2037613 - RNA, 19 nt, Artificial Sequence
  Description of Artificial Sequence: Synthetic oligonucleotide
agccagcgaugcaccccag

SEQ ID NO: 2037614 - RNA, 19 nt, Artificial Sequence
  Description of Artificial Sequence: Synthetic oligonucleotide
ccggcauuguaggacagcu

SEQ ID NO: 2037615 - RNA, 19 nt, Artificial Sequence
  Description of Artificial Sequence: Synthetic oligonucleotide
cagggcaucuacgcagaau

SEQ ID NO: 2037616 - RNA, 19 nt, Artificial Sequence
  Description of Artificial Sequence: Synthetic oligonucleotide
ggcacagguuguguauagu

SEQ ID NO: 2037617 - RNA, 19 nt, Artificial Sequence
  Description of Artificial Sequence: Synthetic oligonucleotide
cgguagcaugcaucuacca

SEQ ID NO: 2037618 - RNA, 19 nt, Artificial Sequence
  Description of Artificial Sequence: Synthetic oligonucleotide
gccguggccugcugccauc

SEQ ID NO: 2037619 - RNA, 19 nt, Artificial Sequence
  Description of Artificial Sequence: Synthetic oligonucleotide
aggugcccaggagggcuuu

SEQ ID NO: 2037620 - RNA, 19 nt, Artificial Sequence
  Description of Artificial Sequence: Synthetic oligonucleotide
gggucacgaucaucuugcu

SEQ ID NO: 2037621 - RNA, 19 nt, Artificial Sequence
  Description of Artificial Sequence: Synthetic oligonucleotide
gcaugacuccaagcagcaa

SEQ ID NO: 2037622 - RNA, 19 nt, Artificial Sequence
  Description of Artificial Sequence: Synthetic oligonucleotide
gcgcucaccgagugaccaa

SEQ ID NO: 2037623 - RNA, 19 nt, Artificial Sequence
  Description of Artificial Sequence: Synthetic oligonucleotide
gccacucguuagcaacggu

SEQ ID NO: 2037624 - RNA, 19 nt, Artificial Sequence
  Description of Artificial Sequence: Synthetic oligonucleotide
ggcaagggucaggugacuu

SEQ ID NO: 2037625 - RNA, 19 nt, Artificial Sequence
  Description of Artificial Sequence: Synthetic oligonucleotide
ggggugacuugggcaggca

SEQ ID NO: 2037626 - RNA, 19 nt, Artificial Sequence
  Description of Artificial Sequence: Synthetic oligonucleotide
ggccuguaaugaguccugu

SEQ ID NO: 2037627 - RNA, 19 nt, Artificial Sequence
  Description of Artificial Sequence: Synthetic oligonucleotide
gggcgccggcauuguagga

SEQ ID NO: 2037628 - RNA, 19 nt, Artificial Sequence
  Description of Artificial Sequence: Synthetic oligonucleotide
ggggcgcuggguaguaacu

SEQ ID NO: 2037629 - RNA, 19 nt, Artificial Sequence
  Description of Artificial Sequence: Synthetic oligonucleotide
cgccggcauuguaggacag

SEQ ID NO: 2037630 - RNA, 19 nt, Artificial Sequence
  Description of Artificial Sequence: Synthetic oligonucleotide
ccccuauggcuggcuggcc

SEQ ID NO: 2037631 - RNA, 19 nt, Artificial Sequence
  Description of Artificial Sequence: Synthetic oligonucleotide
cgccugguaagguccugga

SEQ ID NO: 2037632 - RNA, 19 nt, Artificial Sequence
  Description of Artificial Sequence: Synthetic oligonucleotide
gccgccugguaagguccug

SEQ ID NO: 2037633 - RNA, 19 nt, Artificial Sequence
  Description of Artificial Sequence: Synthetic oligonucleotide
cgaugcaccccagcagaca

SEQ ID NO: 2037634 - RNA, 19 nt, Artificial Sequence
  Description of Artificial Sequence: Synthetic oligonucleotide
cgcucaccgagugaccaaa

SEQ ID NO: 2037635 - RNA, 19 nt, Artificial Sequence
  Description of Artificial Sequence: Synthetic oligonucleotide
ccgagugaccaaagauuuu

SEQ ID NO: 2037636 - RNA, 19 nt, Artificial Sequence
  Description of Artificial Sequence: Synthetic oligonucleotide
gcgcuggguaguaacuguu

SEQ ID NO: 2037637 - RNA, 19 nt, Artificial Sequence
  Description of Artificial Sequence: Synthetic oligonucleotide
cccuucccauccgggccug

SEQ ID NO: 2037638 - RNA, 19 nt, Artificial Sequence
  Description of Artificial Sequence: Synthetic oligonucleotide
gccgccugucgagccguga

SEQ ID NO: 2037639 - RNA, 19 nt, Artificial Sequence
  Description of Artificial Sequence: Synthetic oligonucleotide
gccugcugccaucgaugau

SEQ ID NO: 2037640 - RNA, 19 nt, Artificial Sequence
  Description of Artificial Sequence: Synthetic oligonucleotide
cggcaauugcauuggcguu

SEQ ID NO: 2037641 - RNA, 19 nt, Artificial Sequence
  Description of Artificial Sequence: Synthetic oligonucleotide
cguggccugcugccaucga

SEQ ID NO: 2037642 - RNA, 19 nt, Artificial Sequence
  Description of Artificial Sequence: Synthetic oligonucleotide
gcgccgccugucgagccgu

SEQ ID NO: 2037643 - RNA, 19 nt, Artificial Sequence
  Description of Artificial Sequence: Synthetic oligonucleotide
gccgcccgcgccgccuguc

SEQ ID NO: 2037644 - RNA, 19 nt, Artificial Sequence
  Description of Artificial Sequence: Synthetic oligonucleotide
ccuucccauccgggccugu

SEQ ID NO: 2037645 - RNA, 19 nt, Artificial Sequence
  Description of Artificial Sequence: Synthetic oligonucleotide
aauuauacagccuacagga

SEQ ID NO: 2037646 - RNA, 19 nt, Artificial Sequence
  Description of Artificial Sequence: Synthetic oligonucleotide
aauccagccguccugaucc

SEQ ID NO: 2037647 - RNA, 19 nt, Artificial Sequence
  Description of Artificial Sequence: Synthetic oligonucleotide
aaaagaacaugauaguuug

SEQ ID NO: 2037648 - RNA, 19 nt, Artificial Sequence
  Description of Artificial Sequence: Synthetic oligonucleotide
uguaucauuacuuuauugc

SEQ ID NO: 2037649 - RNA, 19 nt, Artificial Sequence
  Description of Artificial Sequence: Synthetic oligonucleotide
aacaugauaguuugagagc

SEQ ID NO: 2037650 - RNA, 19 nt, Artificial Sequence
  Description of Artificial Sequence: Synthetic oligonucleotide
aaaugauugaccuaacagu

SEQ ID NO: 2037651 - RNA, 19 nt, Artificial Sequence
  Description of Artificial Sequence: Synthetic oligonucleotide
uguauuauaacaguguagc

SEQ ID NO: 2037652 - RNA, 19 nt, Artificial Sequence
  Description of Artificial Sequence: Synthetic oligonucleotide
gaaaugauugaccuaacag

SEQ ID NO: 2037653 - RNA, 19 nt, Artificial Sequence
  Description of Artificial Sequence: Synthetic oligonucleotide
aauguuuguauuauaacag

SEQ ID NO: 2037654 - RNA, 19 nt, Artificial Sequence
  Description of Artificial Sequence: Synthetic oligonucleotide
acaauuagucagcaaaccc

SEQ ID NO: 2037655 - RNA, 19 nt, Artificial Sequence
  Description of Artificial Sequence: Synthetic oligonucleotide
cauauguacagccaggucc

SEQ ID NO: 2037656 - RNA, 19 nt, Artificial Sequence
  Description of Artificial Sequence: Synthetic oligonucleotide
aacauagaaaugauugacc

SEQ ID NO: 2037657 - RNA, 19 nt, Artificial Sequence
  Description of Artificial Sequence: Synthetic oligonucleotide
ucauaagacaccugaaucc

SEQ ID NO: 2037658 - RNA, 19 nt, Artificial Sequence
  Description of Artificial Sequence: Synthetic oligonucleotide
uuuucaacuacagaauuag

SEQ ID NO: 2037659 - RNA, 19 nt, Artificial Sequence
  Description of Artificial Sequence: Synthetic oligonucleotide
uuuaucaacccgcuggaag

SEQ ID NO: 2037660 - RNA, 19 nt, Artificial Sequence
  Description of Artificial Sequence: Synthetic oligonucleotide
uauucgguuccccucaugg

SEQ ID NO: 2037661 - RNA, 19 nt, Artificial Sequence
  Description of Artificial Sequence: Synthetic oligonucleotide
aacaguguagcuagggugc

SEQ ID NO: 2037662 - RNA, 19 nt, Artificial Sequence
  Description of Artificial Sequence: Synthetic oligonucleotide
aagaacaugauaguuugag

SEQ ID NO: 2037663 - RNA, 19 nt, Artificial Sequence
  Description of Artificial Sequence: Synthetic oligonucleotide
aucacuaaccagcuuauuc

SEQ ID NO: 2037664 - RNA, 19 nt, Artificial Sequence
  Description of Artificial Sequence: Synthetic oligonucleotide
uccauauuauuuuaaaauc

SEQ ID NO: 2037665 - RNA, 19 nt, Artificial Sequence
  Description of Artificial Sequence: Synthetic oligonucleotide
ugaaccaauauucgguucc

SEQ ID NO: 2037666 - RNA, 19 nt, Artificial Sequence
  Description of Artificial Sequence: Synthetic oligonucleotide
cagaauuagagacagcuag

SEQ ID NO: 2037667 - RNA, 19 nt, Artificial Sequence
  Description of Artificial Sequence: Synthetic oligonucleotide
uauucacauauguacagcc

SEQ ID NO: 2037668 - RNA, 19 nt, Artificial Sequence
  Description of Artificial Sequence: Synthetic oligonucleotide
aaauuugcggaugaggaug

SEQ ID NO: 2037669 - RNA, 19 nt, Artificial Sequence
  Description of Artificial Sequence: Synthetic oligonucleotide
uaaacggaguccaaguacc

SEQ ID NO: 2037670 - RNA, 19 nt, Artificial Sequence
  Description of Artificial Sequence: Synthetic oligonucleotide
acauagaaaugauugaccu

SEQ ID NO: 2037671 - RNA, 19 nt, Artificial Sequence
  Description of Artificial Sequence: Synthetic oligonucleotide
aucuaacuguacuugugcc

SEQ ID NO: 2037672 - RNA, 19 nt, Artificial Sequence
  Description of Artificial Sequence: Synthetic oligonucleotide
uuuguauuauaacagugua

SEQ ID NO: 2037673 - RNA, 19 nt, Artificial Sequence
  Description of Artificial Sequence: Synthetic oligonucleotide
cugaauaugucugucaacc

SEQ ID NO: 2037674 - RNA, 19 nt, Artificial Sequence
  Description of Artificial Sequence: Synthetic oligonucleotide
uuaaacggaguccaaguac

SEQ ID NO: 2037675 - RNA, 19 nt, Artificial Sequence
  Description of Artificial Sequence: Synthetic oligonucleotide
aagacguuccacaggaagc

SEQ ID NO: 2037676 - RNA, 19 nt, Artificial Sequence
  Description of Artificial Sequence: Synthetic oligonucleotide
ucacuaaccagcuuauuca

SEQ ID NO: 2037677 - RNA, 19 nt, Artificial Sequence
  Description of Artificial Sequence: Synthetic oligonucleotide
uucucggucaaacauagaa

SEQ ID NO: 2037678 - RNA, 19 nt, Artificial Sequence
  Description of Artificial Sequence: Synthetic oligonucleotide
uccuauuggcuaauaaaag

SEQ ID NO: 2037679 - RNA, 19 nt, Artificial Sequence
  Description of Artificial Sequence: Synthetic oligonucleotide
uauacagccuacaggaaga

SEQ ID NO: 2037680 - RNA, 19 nt, Artificial Sequence
  Description of Artificial Sequence: Synthetic oligonucleotide
gguaaagcgaaccagcucc

SEQ ID NO: 2037681 - RNA, 19 nt, Artificial Sequence
  Description of Artificial Sequence: Synthetic oligonucleotide
ugugauguacuuccacacg

SEQ ID NO: 2037682 - RNA, 19 nt, Artificial Sequence
  Description of Artificial Sequence: Synthetic oligonucleotide
auucacugaaguucacgcc

SEQ ID NO: 2037683 - RNA, 19 nt, Artificial Sequence
  Description of Artificial Sequence: Synthetic oligonucleotide
uauaacaguguagcuaggg

SEQ ID NO: 2037684 - RNA, 19 nt, Artificial Sequence
  Description of Artificial Sequence: Synthetic oligonucleotide
gaagacguuccacaggaag

SEQ ID NO: 2037685 - RNA, 19 nt, Artificial Sequence
  Description of Artificial Sequence: Synthetic oligonucleotide
ugucugucaaauuugcgga

SEQ ID NO: 2037686 - RNA, 19 nt, Artificial Sequence
  Description of Artificial Sequence: Synthetic oligonucleotide
auagaaaugauugaccuaa

SEQ ID NO: 2037687 - RNA, 19 nt, Artificial Sequence
  Description of Artificial Sequence: Synthetic oligonucleotide
uguacuugugcccuguuuc

SEQ ID NO: 2037688 - RNA, 19 nt, Artificial Sequence
  Description of Artificial Sequence: Synthetic oligonucleotide
uuaucaacccgcuggaaga

SEQ ID NO: 2037689 - RNA, 19 nt, Artificial Sequence
  Description of Artificial Sequence: Synthetic oligonucleotide
agaaucacuaaccagcuua

SEQ ID NO: 2037690 - RNA, 19 nt, Artificial Sequence
  Description of Artificial Sequence: Synthetic oligonucleotide
gaugcacaccgguaaagcg

SEQ ID NO: 2037691 - RNA, 19 nt, Artificial Sequence
  Description of Artificial Sequence: Synthetic oligonucleotide
aaugcgaucugcccucguc

SEQ ID NO: 2037692 - RNA, 19 nt, Artificial Sequence
  Description of Artificial Sequence: Synthetic oligonucleotide
ucaucaaaugcgaucugcc

SEQ ID NO: 2037693 - RNA, 19 nt, Artificial Sequence
  Description of Artificial Sequence: Synthetic oligonucleotide
uauuauaacaguguagcua

SEQ ID NO: 2037694 - RNA, 19 nt, Artificial Sequence
  Description of Artificial Sequence: Synthetic oligonucleotide
acuggauuaaacggagucc

SEQ ID NO: 2037695 - RNA, 19 nt, Artificial Sequence
  Description of Artificial Sequence: Synthetic oligonucleotide
ugauugaccuaacagucac

SEQ ID NO: 2037696 - RNA, 19 nt, Artificial Sequence
  Description of Artificial Sequence: Synthetic oligonucleotide
ucacauauguacagccagg

SEQ ID NO: 2037697 - RNA, 19 nt, Artificial Sequence
  Description of Artificial Sequence: Synthetic oligonucleotide
aaccucugcaagacgaugc

SEQ ID NO: 2037698 - RNA, 19 nt, Artificial Sequence
  Description of Artificial Sequence: Synthetic oligonucleotide
ucuaacuguacuugugccc

SEQ ID NO: 2037699 - RNA, 19 nt, Artificial Sequence
  Description of Artificial Sequence: Synthetic oligonucleotide
aauaugucugucaaccucu

SEQ ID NO: 2037700 - RNA, 19 nt, Artificial Sequence
  Description of Artificial Sequence: Synthetic oligonucleotide
uauuaauuauacagccuac

SEQ ID NO: 2037701 - RNA, 19 nt, Artificial Sequence
  Description of Artificial Sequence: Synthetic oligonucleotide
uauuggcuaauaaaaguau

SEQ ID NO: 2037702 - RNA, 19 nt, Artificial Sequence
  Description of Artificial Sequence: Synthetic oligonucleotide
gguuauacgaugcugaaga

SEQ ID NO: 2037703 - RNA, 19 nt, Artificial Sequence
  Description of Artificial Sequence: Synthetic oligonucleotide
auuggauaaugcuugcuga

SEQ ID NO: 2037704 - RNA, 19 nt, Artificial Sequence
  Description of Artificial Sequence: Synthetic oligonucleotide
uauguuacauauuccaauu

SEQ ID NO: 2037705 - RNA, 19 nt, Artificial Sequence
  Description of Artificial Sequence: Synthetic oligonucleotide
cucauaagacaccugaauc

SEQ ID NO: 2037706 - RNA, 19 nt, Artificial Sequence
  Description of Artificial Sequence: Synthetic oligonucleotide
auagcgucugaauaugucu

SEQ ID NO: 2037707 - RNA, 19 nt, Artificial Sequence
  Description of Artificial Sequence: Synthetic oligonucleotide
gaauaugucugucaaccuc

SEQ ID NO: 2037708 - RNA, 19 nt, Artificial Sequence
  Description of Artificial Sequence: Synthetic oligonucleotide
aucaaaugcgaucugcccu

SEQ ID NO: 2037709 - RNA, 19 nt, Artificial Sequence
  Description of Artificial Sequence: Synthetic oligonucleotide
gaacuggucagagagccgg

SEQ ID NO: 2037710 - RNA, 19 nt, Artificial Sequence
  Description of Artificial Sequence: Synthetic oligonucleotide
uuggcuaauaaaaguauuu

SEQ ID NO: 2037711 - RNA, 19 nt, Artificial Sequence
  Description of Artificial Sequence: Synthetic oligonucleotide
uagccaaaaccugagagug

SEQ ID NO: 2037712 - RNA, 19 nt, Artificial Sequence
  Description of Artificial Sequence: Synthetic oligonucleotide
uuauacgaugcugaagacc

SEQ ID NO: 2037713 - RNA, 19 nt, Artificial Sequence
  Description of Artificial Sequence: Synthetic oligonucleotide
caucuaacuguacuugugc

SEQ ID NO: 2037714 - RNA, 19 nt, Artificial Sequence
  Description of Artificial Sequence: Synthetic oligonucleotide
aucaucccagaguuguccc

SEQ ID NO: 2037715 - RNA, 19 nt, Artificial Sequence
  Description of Artificial Sequence: Synthetic oligonucleotide
cauuggauaaugcuugcug

SEQ ID NO: 2037716 - RNA, 19 nt, Artificial Sequence
  Description of Artificial Sequence: Synthetic oligonucleotide
guacggaagacauucugcc

SEQ ID NO: 2037717 - RNA, 19 nt, Artificial Sequence
  Description of Artificial Sequence: Synthetic oligonucleotide
caauuagucagcaaaccca

SEQ ID NO: 2037718 - RNA, 19 nt, Artificial Sequence
  Description of Artificial Sequence: Synthetic oligonucleotide
cucugcaagacgaugcagc

SEQ ID NO: 2037719 - RNA, 19 nt, Artificial Sequence
  Description of Artificial Sequence: Synthetic oligonucleotide
augcgaucugcccucgucc

SEQ ID NO: 2037720 - RNA, 19 nt, Artificial Sequence
  Description of Artificial Sequence: Synthetic oligonucleotide
uucgguuccccucauggca

SEQ ID NO: 2037721 - RNA, 19 nt, Artificial Sequence
  Description of Artificial Sequence: Synthetic oligonucleotide
aaacccaauguuuguauua

SEQ ID NO: 2037722 - RNA, 19 nt, Artificial Sequence
  Description of Artificial Sequence: Synthetic oligonucleotide
aauuagagacagcuagaaa

SEQ ID NO: 2037723 - RNA, 19 nt, Artificial Sequence
  Description of Artificial Sequence: Synthetic oligonucleotide
caugggcugaugcacaccg

SEQ ID NO: 2037724 - RNA, 19 nt, Artificial Sequence
  Description of Artificial Sequence: Synthetic oligonucleotide
ugucauagcgucugaauau

SEQ ID NO: 2037725 - RNA, 19 nt, Artificial Sequence
  Description of Artificial Sequence: Synthetic oligonucleotide
agauacugcucauaagaca

SEQ ID NO: 2037726 - RNA, 19 nt, Artificial Sequence
  Description of Artificial Sequence: Synthetic oligonucleotide
uccuugucugucaaauuug

SEQ ID NO: 2037727 - RNA, 19 nt, Artificial Sequence
  Description of Artificial Sequence: Synthetic oligonucleotide
ugcuuauguuacauauucc

SEQ ID NO: 2037728 - RNA, 19 nt, Artificial Sequence
  Description of Artificial Sequence: Synthetic oligonucleotide
auugaccuaacagucacug

SEQ ID NO: 2037729 - RNA, 19 nt, Artificial Sequence
  Description of Artificial Sequence: Synthetic oligonucleotide
auaacaguguagcuagggu

SEQ ID NO: 2037730 - RNA, 19 nt, Artificial Sequence
  Description of Artificial Sequence: Synthetic oligonucleotide
accauuggauaaugcuugc

SEQ ID NO: 2037731 - RNA, 19 nt, Artificial Sequence
  Description of Artificial Sequence: Synthetic oligonucleotide
cauggcacaauuagucagc

SEQ ID NO: 2037732 - RNA, 19 nt, Artificial Sequence
  Description of Artificial Sequence: Synthetic oligonucleotide
gcuaauaaaaguauuuuca

SEQ ID NO: 2037733 - RNA, 19 nt, Artificial Sequence
  Description of Artificial Sequence: Synthetic oligonucleotide
guaaauucacugaaguuca

SEQ ID NO: 2037734 - RNA, 19 nt, Artificial Sequence
  Description of Artificial Sequence: Synthetic oligonucleotide
aauuagucagcaaacccaa

SEQ ID NO: 2037735 - RNA, 19 nt, Artificial Sequence
  Description of Artificial Sequence: Synthetic oligonucleotide
uccugucuuuaucaacccg

SEQ ID NO: 2037736 - RNA, 19 nt, Artificial Sequence
  Description of Artificial Sequence: Synthetic oligonucleotide
caucaaaugcgaucugccc

SEQ ID NO: 2037737 - RNA, 19 nt, Artificial Sequence
  Description of Artificial Sequence: Synthetic oligonucleotide
ugauccgugucauagcguc

SEQ ID NO: 2037738 - RNA, 19 nt, Artificial Sequence
  Description of Artificial Sequence: Synthetic oligonucleotide
acagccuacaggaagaaca

SEQ ID NO: 2037739 - RNA, 19 nt, Artificial Sequence
  Description of Artificial Sequence: Synthetic oligonucleotide
uuauaacaguguagcuagg

SEQ ID NO: 2037740 - RNA, 19 nt, Artificial Sequence
  Description of Artificial Sequence: Synthetic oligonucleotide
ucaaaugcgaucugcccuc

SEQ ID NO: 2037741 - RNA, 19 nt, Artificial Sequence
  Description of Artificial Sequence: Synthetic oligonucleotide
aaccaauauucgguucccc

SEQ ID NO: 2037742 - RNA, 19 nt, Artificial Sequence
  Description of Artificial Sequence: Synthetic oligonucleotide
accgguaaagcgaaccagc

SEQ ID NO: 2037743 - RNA, 19 nt, Artificial Sequence
  Description of Artificial Sequence: Synthetic oligonucleotide
acauauguacagccagguc

SEQ ID NO: 2037744 - RNA, 19 nt, Artificial Sequence
  Description of Artificial Sequence: Synthetic oligonucleotide
ugauaguuugagagcagaa

SEQ ID NO: 2037745 - RNA, 19 nt, Artificial Sequence
  Description of Artificial Sequence: Synthetic oligonucleotide
gauuaaacggaguccaagu

SEQ ID NO: 2037746 - RNA, 19 nt, Artificial Sequence
  Description of Artificial Sequence: Synthetic oligonucleotide
cacgccuguaaauucacug

SEQ ID NO: 2037747 - RNA, 19 nt, Artificial Sequence
  Description of Artificial Sequence: Synthetic oligonucleotide
ggauaaugcuugcugaagc

SEQ ID NO: 2037748 - RNA, 19 nt, Artificial Sequence
  Description of Artificial Sequence: Synthetic oligonucleotide
cugugauguacuuccacac

SEQ ID NO: 2037749 - RNA, 19 nt, Artificial Sequence
  Description of Artificial Sequence: Synthetic oligonucleotide
uuuugcaugcugugcuugc

SEQ ID NO: 2037750 - RNA, 19 nt, Artificial Sequence
  Description of Artificial Sequence: Synthetic oligonucleotide
cauggagagauacugcuca

SEQ ID NO: 2037751 - RNA, 19 nt, Artificial Sequence
  Description of Artificial Sequence: Synthetic oligonucleotide
aguguagcuagggugccac

SEQ ID NO: 2037752 - RNA, 19 nt, Artificial Sequence
  Description of Artificial Sequence: Synthetic oligonucleotide
acuugugcccuguuucauc

SEQ ID NO: 2037753 - RNA, 19 nt, Artificial Sequence
  Description of Artificial Sequence: Synthetic oligonucleotide
auuaaacggaguccaagua

SEQ ID NO: 2037754 - RNA, 19 nt, Artificial Sequence
  Description of Artificial Sequence: Synthetic oligonucleotide
ugucaaccucugcaagacg

SEQ ID NO: 2037755 - RNA, 19 nt, Artificial Sequence
  Description of Artificial Sequence: Synthetic oligonucleotide
aaagcgaaccagcuccaaa

SEQ ID NO: 2037756 - RNA, 19 nt, Artificial Sequence
  Description of Artificial Sequence: Synthetic oligonucleotide
ucugcccucguccuugucu

SEQ ID NO: 2037757 - RNA, 19 nt, Artificial Sequence
  Description of Artificial Sequence: Synthetic oligonucleotide
cacuggauuaaacggaguc

SEQ ID NO: 2037758 - RNA, 19 nt, Artificial Sequence
  Description of Artificial Sequence: Synthetic oligonucleotide
uccccaaguauuaauuaua

SEQ ID NO: 2037759 - RNA, 19 nt, Artificial Sequence
  Description of Artificial Sequence: Synthetic oligonucleotide
auccuauuggcuaauaaaa

SEQ ID NO: 2037760 - RNA, 19 nt, Artificial Sequence
  Description of Artificial Sequence: Synthetic oligonucleotide
agggugccacuacagaauc

SEQ ID NO: 2037761 - RNA, 19 nt, Artificial Sequence
  Description of Artificial Sequence: Synthetic oligonucleotide
ugaugcacaccgguaaagc

SEQ ID NO: 2037762 - RNA, 19 nt, Artificial Sequence
  Description of Artificial Sequence: Synthetic oligonucleotide
caaaaccugagagugcuug

SEQ ID NO: 2037763 - RNA, 19 nt, Artificial Sequence
  Description of Artificial Sequence: Synthetic oligonucleotide
ucaucccagaguugucccg

SEQ ID NO: 2037764 - RNA, 19 nt, Artificial Sequence
  Description of Artificial Sequence: Synthetic oligonucleotide
gaagggauuuggcauuuuc

SEQ ID NO: 2037765 - RNA, 19 nt, Artificial Sequence
  Description of Artificial Sequence: Synthetic oligonucleotide
ggcuaauaaaaguauuuuc

SEQ ID NO: 2037766 - RNA, 19 nt, Artificial Sequence
  Description of Artificial Sequence: Synthetic oligonucleotide
agcaucuaacuguacuugu

SEQ ID NO: 2037767 - RNA, 19 nt, Artificial Sequence
  Description of Artificial Sequence: Synthetic oligonucleotide
gaauuagagacagcuagaa

SEQ ID NO: 2037768 - RNA, 19 nt, Artificial Sequence
  Description of Artificial Sequence: Synthetic oligonucleotide
ugcacaccgguaaagcgaa

SEQ ID NO: 2037769 - RNA, 19 nt, Artificial Sequence
  Description of Artificial Sequence: Synthetic oligonucleotide
gauaaugcuugcugaagcu

SEQ ID NO: 2037770 - RNA, 19 nt, Artificial Sequence
  Description of Artificial Sequence: Synthetic oligonucleotide
cacuaaccagcuuauucac

SEQ ID NO: 2037771 - RNA, 19 nt, Artificial Sequence
  Description of Artificial Sequence: Synthetic oligonucleotide
aauuugcggaugaggaugu

SEQ ID NO: 2037772 - RNA, 19 nt, Artificial Sequence
  Description of Artificial Sequence: Synthetic oligonucleotide
gucaucaaaugcgaucugc

SEQ ID NO: 2037773 - RNA, 19 nt, Artificial Sequence
  Description of Artificial Sequence: Synthetic oligonucleotide
uagggugccacuacagaau

SEQ ID NO: 2037774 - RNA, 19 nt, Artificial Sequence
  Description of Artificial Sequence: Synthetic oligonucleotide
acgccuguaaauucacuga

SEQ ID NO: 2037775 - RNA, 19 nt, Artificial Sequence
  Description of Artificial Sequence: Synthetic oligonucleotide
ugguuauacgaugcugaag

SEQ ID NO: 2037776 - RNA, 19 nt, Artificial Sequence
  Description of Artificial Sequence: Synthetic oligonucleotide
ugggcugaugcacaccggu

SEQ ID NO: 2037777 - RNA, 19 nt, Artificial Sequence
  Description of Artificial Sequence: Synthetic oligonucleotide
uuauugcuuauguuacaua

SEQ ID NO: 2037778 - RNA, 19 nt, Artificial Sequence
  Description of Artificial Sequence: Synthetic oligonucleotide
guccugauccgugucauag

SEQ ID NO: 2037779 - RNA, 19 nt, Artificial Sequence
  Description of Artificial Sequence: Synthetic oligonucleotide
uggcuaauaaaaguauuuu

SEQ ID NO: 2037780 - RNA, 19 nt, Artificial Sequence
  Description of Artificial Sequence: Synthetic oligonucleotide
ggugcuuccgccuccgucc

SEQ ID NO: 2037781 - RNA, 19 nt, Artificial Sequence
  Description of Artificial Sequence: Synthetic oligonucleotide
cugcucauaagacaccuga

SEQ ID NO: 2037782 - RNA, 19 nt, Artificial Sequence
  Description of Artificial Sequence: Synthetic oligonucleotide
cauaagacaccugaaucca

SEQ ID NO: 2037783 - RNA, 19 nt, Artificial Sequence
  Description of Artificial Sequence: Synthetic oligonucleotide
auacugcucauaagacacc

SEQ ID NO: 2037784 - RNA, 19 nt, Artificial Sequence
  Description of Artificial Sequence: Synthetic oligonucleotide
cuggauuaaacggagucca

SEQ ID NO: 2037785 - RNA, 19 nt, Artificial Sequence
  Description of Artificial Sequence: Synthetic oligonucleotide
aauauucgguuccccucau

SEQ ID NO: 2037786 - RNA, 19 nt, Artificial Sequence
  Description of Artificial Sequence: Synthetic oligonucleotide
guuauacgaugcugaagac

SEQ ID NO: 2037787 - RNA, 19 nt, Artificial Sequence
  Description of Artificial Sequence: Synthetic oligonucleotide
augauaguuugagagcaga

SEQ ID NO: 2037788 - RNA, 19 nt, Artificial Sequence
  Description of Artificial Sequence: Synthetic oligonucleotide
uugucccggucauagguac

SEQ ID NO: 2037789 - RNA, 19 nt, Artificial Sequence
  Description of Artificial Sequence: Synthetic oligonucleotide
ugucaaauuugcggaugag

SEQ ID NO: 2037790 - RNA, 19 nt, Artificial Sequence
  Description of Artificial Sequence: Synthetic oligonucleotide
gaaaucacuccacuccugu

SEQ ID NO: 2037791 - RNA, 19 nt, Artificial Sequence
  Description of Artificial Sequence: Synthetic oligonucleotide
gaaccaauauucgguuccc

SEQ ID NO: 2037792 - RNA, 19 nt, Artificial Sequence
  Description of Artificial Sequence: Synthetic oligonucleotide
agccuuguuuucucgguca

SEQ ID NO: 2037793 - RNA, 19 nt, Artificial Sequence
  Description of Artificial Sequence: Synthetic oligonucleotide
acaguguagcuagggugcc

SEQ ID NO: 2037794 - RNA, 19 nt, Artificial Sequence
  Description of Artificial Sequence: Synthetic oligonucleotide
cacaccgguaaagcgaacc

SEQ ID NO: 2037795 - RNA, 19 nt, Artificial Sequence
  Description of Artificial Sequence: Synthetic oligonucleotide
caauauucgguuccccuca

SEQ ID NO: 2037796 - RNA, 19 nt, Artificial Sequence
  Description of Artificial Sequence: Synthetic oligonucleotide
ccugauccgugucauagcg

SEQ ID NO: 2037797 - RNA, 19 nt, Artificial Sequence
  Description of Artificial Sequence: Synthetic oligonucleotide
acaccgguaaagcgaacca

SEQ ID NO: 2037798 - RNA, 19 nt, Artificial Sequence
  Description of Artificial Sequence: Synthetic oligonucleotide
ccaauguuuguauuauaac

SEQ ID NO: 2037799 - RNA, 19 nt, Artificial Sequence
  Description of Artificial Sequence: Synthetic oligonucleotide
agggccugguuauacgaug

SEQ ID NO: 2037800 - RNA, 19 nt, Artificial Sequence
  Description of Artificial Sequence: Synthetic oligonucleotide
acagaaucacuaaccagcu

SEQ ID NO: 2037801 - RNA, 19 nt, Artificial Sequence
  Description of Artificial Sequence: Synthetic oligonucleotide
ggauuaaacggaguccaag

SEQ ID NO: 2037802 - RNA, 19 nt, Artificial Sequence
  Description of Artificial Sequence: Synthetic oligonucleotide
aguccaaguaccauuggau

SEQ ID NO: 2037803 - RNA, 19 nt, Artificial Sequence
  Description of Artificial Sequence: Synthetic oligonucleotide
gucauagcgucugaauaug

SEQ ID NO: 2037804 - RNA, 19 nt, Artificial Sequence
  Description of Artificial Sequence: Synthetic oligonucleotide
aaacgcggugcuuccgccu

SEQ ID NO: 2037805 - RNA, 19 nt, Artificial Sequence
  Description of Artificial Sequence: Synthetic oligonucleotide
auggaacuggucagagagc

SEQ ID NO: 2037806 - RNA, 19 nt, Artificial Sequence
  Description of Artificial Sequence: Synthetic oligonucleotide
ucgguuccccucauggcac

SEQ ID NO: 2037807 - RNA, 19 nt, Artificial Sequence
  Description of Artificial Sequence: Synthetic oligonucleotide
ugccagucugugauguacu

SEQ ID NO: 2037808 - RNA, 19 nt, Artificial Sequence
  Description of Artificial Sequence: Synthetic oligonucleotide
aggcacaugaaaagccuuc

SEQ ID NO: 2037809 - RNA, 19 nt, Artificial Sequence
  Description of Artificial Sequence: Synthetic oligonucleotide
ggaagaacagcaucuaacu

SEQ ID NO: 2037810 - RNA, 19 nt, Artificial Sequence
  Description of Artificial Sequence: Synthetic oligonucleotide
uccugauccgugucauagc

SEQ ID NO: 2037811 - RNA, 19 nt, Artificial Sequence
  Description of Artificial Sequence: Synthetic oligonucleotide
agcgucugaauaugucugu

SEQ ID NO: 2037812 - RNA, 19 nt, Artificial Sequence
  Description of Artificial Sequence: Synthetic oligonucleotide
ggagagauacugcucauaa

SEQ ID NO: 2037813 - RNA, 19 nt, Artificial Sequence
  Description of Artificial Sequence: Synthetic oligonucleotide
ucacuggauuaaacggagu

SEQ ID NO: 2037814 - RNA, 19 nt, Artificial Sequence
  Description of Artificial Sequence: Synthetic oligonucleotide
guagcuagggugccacuac

SEQ ID NO: 2037815 - RNA, 19 nt, Artificial Sequence
  Description of Artificial Sequence: Synthetic oligonucleotide
uagcuagggugccacuaca

SEQ ID NO: 2037816 - RNA, 19 nt, Artificial Sequence
  Description of Artificial Sequence: Synthetic oligonucleotide
gaguugucccggucauagg

SEQ ID NO: 2037817 - RNA, 19 nt, Artificial Sequence
  Description of Artificial Sequence: Synthetic oligonucleotide
uggauuaaacggaguccaa

SEQ ID NO: 2037818 - RNA, 19 nt, Artificial Sequence
  Description of Artificial Sequence: Synthetic oligonucleotide
auuggcuaauaaaaguauu

SEQ ID NO: 2037819 - RNA, 19 nt, Artificial Sequence
  Description of Artificial Sequence: Synthetic oligonucleotide
gacauucugccagucugug

SEQ ID NO: 2037820 - RNA, 19 nt, Artificial Sequence
  Description of Artificial Sequence: Synthetic oligonucleotide
acggaguccaaguaccauu

SEQ ID NO: 2037821 - RNA, 19 nt, Artificial Sequence
  Description of Artificial Sequence: Synthetic oligonucleotide
uguagcuagggugccacua

SEQ ID NO: 2037822 - RNA, 19 nt, Artificial Sequence
  Description of Artificial Sequence: Synthetic oligonucleotide
cugugcaaguuccauauua

SEQ ID NO: 2037823 - RNA, 19 nt, Artificial Sequence
  Description of Artificial Sequence: Synthetic oligonucleotide
gaagcucauugucugaaau

SEQ ID NO: 2037824 - RNA, 19 nt, Artificial Sequence
  Description of Artificial Sequence: Synthetic oligonucleotide
caaguaccauuggauaaug

SEQ ID NO: 2037825 - RNA, 19 nt, Artificial Sequence
  Description of Artificial Sequence: Synthetic oligonucleotide
cgaaccagcuccaaacgcg

SEQ ID NO: 2037826 - RNA, 19 nt, Artificial Sequence
  Description of Artificial Sequence: Synthetic oligonucleotide
ugcgaucugcccucguccu

SEQ ID NO: 2037827 - RNA, 19 nt, Artificial Sequence
  Description of Artificial Sequence: Synthetic oligonucleotide
guacuugugcccuguuuca

SEQ ID NO: 2037828 - RNA, 19 nt, Artificial Sequence
  Description of Artificial Sequence: Synthetic oligonucleotide
caaacgcggugcuuccgcc

SEQ ID NO: 2037829 - RNA, 19 nt, Artificial Sequence
  Description of Artificial Sequence: Synthetic oligonucleotide
accucugcaagacgaugca

SEQ ID NO: 2037830 - RNA, 19 nt, Artificial Sequence
  Description of Artificial Sequence: Synthetic oligonucleotide
augauugaccuaacaguca

SEQ ID NO: 2037831 - RNA, 19 nt, Artificial Sequence
  Description of Artificial Sequence: Synthetic oligonucleotide
uaucaacccgcuggaagac

SEQ ID NO: 2037832 - RNA, 19 nt, Artificial Sequence
  Description of Artificial Sequence: Synthetic oligonucleotide
guaggaguaggccgccaug

SEQ ID NO: 2037833 - RNA, 19 nt, Artificial Sequence
  Description of Artificial Sequence: Synthetic oligonucleotide
augcacaccgguaaagcga

SEQ ID NO: 2037834 - RNA, 19 nt, Artificial Sequence
  Description of Artificial Sequence: Synthetic oligonucleotide
aaacggaguccaaguacca

SEQ ID NO: 2037835 - RNA, 19 nt, Artificial Sequence
  Description of Artificial Sequence: Synthetic oligonucleotide
cugucaaauuugcggauga

SEQ ID NO: 2037836 - RNA, 19 nt, Artificial Sequence
  Description of Artificial Sequence: Synthetic oligonucleotide
uuccacacgccuguaaauu

SEQ ID NO: 2037837 - RNA, 19 nt, Artificial Sequence
  Description of Artificial Sequence: Synthetic oligonucleotide
gucauagguacggaagaca

SEQ ID NO: 2037838 - RNA, 19 nt, Artificial Sequence
  Description of Artificial Sequence: Synthetic oligonucleotide
ggugccacuacagaaucac

SEQ ID NO: 2037839 - RNA, 19 nt, Artificial Sequence
  Description of Artificial Sequence: Synthetic oligonucleotide
cacacgccuguaaauucac

SEQ ID NO: 2037840 - RNA, 19 nt, Artificial Sequence
  Description of Artificial Sequence: Synthetic oligonucleotide
cugcccucguccuugucug

SEQ ID NO: 2037841 - RNA, 19 nt, Artificial Sequence
  Description of Artificial Sequence: Synthetic oligonucleotide
uuccccucauggcacaauu

SEQ ID NO: 2037842 - RNA, 19 nt, Artificial Sequence
  Description of Artificial Sequence: Synthetic oligonucleotide
uacuuccacacgccuguaa

SEQ ID NO: 2037843 - RNA, 19 nt, Artificial Sequence
  Description of Artificial Sequence: Synthetic oligonucleotide
agggaagggauuuggcauu

SEQ ID NO: 2037844 - RNA, 19 nt, Artificial Sequence
  Description of Artificial Sequence: Synthetic oligonucleotide
auauucgguuccccucaug

SEQ ID NO: 2037845 - RNA, 19 nt, Artificial Sequence
  Description of Artificial Sequence: Synthetic oligonucleotide
uaacuguacuugugcccug

SEQ ID NO: 2037846 - RNA, 19 nt, Artificial Sequence
  Description of Artificial Sequence: Synthetic oligonucleotide
aaaugcgaucugcccucgu

SEQ ID NO: 2037847 - RNA, 19 nt, Artificial Sequence
  Description of Artificial Sequence: Synthetic oligonucleotide
agcagaauccugaaccaau

SEQ ID NO: 2037848 - RNA, 19 nt, Artificial Sequence
  Description of Artificial Sequence: Synthetic oligonucleotide
aucaacccgcuggaagacg

SEQ ID NO: 2037849 - RNA, 19 nt, Artificial Sequence
  Description of Artificial Sequence: Synthetic oligonucleotide
agacgaugcagcccuggau

SEQ ID NO: 2037850 - RNA, 19 nt, Artificial Sequence
  Description of Artificial Sequence: Synthetic oligonucleotide
cuccaaacgcggugcuucc

SEQ ID NO: 2037851 - RNA, 19 nt, Artificial Sequence
  Description of Artificial Sequence: Synthetic oligonucleotide
ccugguuauacgaugcuga

SEQ ID NO: 2037852 - RNA, 19 nt, Artificial Sequence
  Description of Artificial Sequence: Synthetic oligonucleotide
uccaaacgcggugcuuccg

SEQ ID NO: 2037853 - RNA, 19 nt, Artificial Sequence
  Description of Artificial Sequence: Synthetic oligonucleotide
ccaauauucgguuccccuc

SEQ ID NO: 2037854 - RNA, 19 nt, Artificial Sequence
  Description of Artificial Sequence: Synthetic oligonucleotide
aaugcuugcugaagcucau

SEQ ID NO: 2037855 - RNA, 19 nt, Artificial Sequence
  Description of Artificial Sequence: Synthetic oligonucleotide
acuaaccagcuuauucaca

SEQ ID NO: 2037856 - RNA, 19 nt, Artificial Sequence
  Description of Artificial Sequence: Synthetic oligonucleotide
cccaauguuuguauuauaa

SEQ ID NO: 2037857 - RNA, 19 nt, Artificial Sequence
  Description of Artificial Sequence: Synthetic oligonucleotide
gagccgguagccaaaaccu

SEQ ID NO: 2037858 - RNA, 19 nt, Artificial Sequence
  Description of Artificial Sequence: Synthetic oligonucleotide
caaucaucccagaguuguc

SEQ ID NO: 2037859 - RNA, 19 nt, Artificial Sequence
  Description of Artificial Sequence: Synthetic oligonucleotide
gcacaauuagucagcaaac

SEQ ID NO: 2037860 - RNA, 19 nt, Artificial Sequence
  Description of Artificial Sequence: Synthetic oligonucleotide
guccuugucugucaaauuu

SEQ ID NO: 2037861 - RNA, 19 nt, Artificial Sequence
  Description of Artificial Sequence: Synthetic oligonucleotide
agcuagggugccacuacag

SEQ ID NO: 2037862 - RNA, 19 nt, Artificial Sequence
  Description of Artificial Sequence: Synthetic oligonucleotide
ggaguccaaguaccauugg

SEQ ID NO: 2037863 - RNA, 19 nt, Artificial Sequence
  Description of Artificial Sequence: Synthetic oligonucleotide
agcaaacccaauguuugua

SEQ ID NO: 2037864 - RNA, 19 nt, Artificial Sequence
  Description of Artificial Sequence: Synthetic oligonucleotide
gcaaguuccauauuauuuu

SEQ ID NO: 2037865 - RNA, 19 nt, Artificial Sequence
  Description of Artificial Sequence: Synthetic oligonucleotide
aaucacuaaccagcuuauu

SEQ ID NO: 2037866 - RNA, 19 nt, Artificial Sequence
  Description of Artificial Sequence: Synthetic oligonucleotide
acagaauuagagacagcua

SEQ ID NO: 2037867 - RNA, 19 nt, Artificial Sequence
  Description of Artificial Sequence: Synthetic oligonucleotide
gacagcuagaaaagaacau

SEQ ID NO: 2037868 - RNA, 19 nt, Artificial Sequence
  Description of Artificial Sequence: Synthetic oligonucleotide
cugcaagacgaugcagccc

SEQ ID NO: 2037869 - RNA, 19 nt, Artificial Sequence
  Description of Artificial Sequence: Synthetic oligonucleotide
caaaugcgaucugcccucg

SEQ ID NO: 2037870 - RNA, 19 nt, Artificial Sequence
  Description of Artificial Sequence: Synthetic oligonucleotide
cugguuauacgaugcugaa

SEQ ID NO: 2037871 - RNA, 19 nt, Artificial Sequence
  Description of Artificial Sequence: Synthetic oligonucleotide
accagcuuauucacauaug

SEQ ID NO: 2037872 - RNA, 19 nt, Artificial Sequence
  Description of Artificial Sequence: Synthetic oligonucleotide
cagcuuauucacauaugua

SEQ ID NO: 2037873 - RNA, 19 nt, Artificial Sequence
  Description of Artificial Sequence: Synthetic oligonucleotide
gcgaaccagcuccaaacgc

SEQ ID NO: 2037874 - RNA, 19 nt, Artificial Sequence
  Description of Artificial Sequence: Synthetic oligonucleotide
acguuccacaggaagcucu

SEQ ID NO: 2037875 - RNA, 19 nt, Artificial Sequence
  Description of Artificial Sequence: Synthetic oligonucleotide
uggagagauacugcucaua

SEQ ID NO: 2037876 - RNA, 19 nt, Artificial Sequence
  Description of Artificial Sequence: Synthetic oligonucleotide
acaccugaauccagccguc

SEQ ID NO: 2037877 - RNA, 19 nt, Artificial Sequence
  Description of Artificial Sequence: Synthetic oligonucleotide
auccagccguccugauccg

SEQ ID NO: 2037878 - RNA, 19 nt, Artificial Sequence
  Description of Artificial Sequence: Synthetic oligonucleotide
cagggaagggauuuggcau

SEQ ID NO: 2037879 - RNA, 19 nt, Artificial Sequence
  Description of Artificial Sequence: Synthetic oligonucleotide
uacuugugcccuguuucau

SEQ ID NO: 2037880 - RNA, 19 nt, Artificial Sequence
  Description of Artificial Sequence: Synthetic oligonucleotide
gaaucacuaaccagcuuau

SEQ ID NO: 2037881 - RNA, 19 nt, Artificial Sequence
  Description of Artificial Sequence: Synthetic oligonucleotide
guccccaaguauuaauuau

SEQ ID NO: 2037882 - RNA, 19 nt, Artificial Sequence
  Description of Artificial Sequence: Synthetic oligonucleotide
caaauuugcggaugaggau

SEQ ID NO: 2037883 - RNA, 19 nt, Artificial Sequence
  Description of Artificial Sequence: Synthetic oligonucleotide
cuccguccggggcaagacc

SEQ ID NO: 2037884 - RNA, 19 nt, Artificial Sequence
  Description of Artificial Sequence: Synthetic oligonucleotide
guaaagcgaaccagcucca

SEQ ID NO: 2037885 - RNA, 19 nt, Artificial Sequence
  Description of Artificial Sequence: Synthetic oligonucleotide
guucacgccagccuuguuu

SEQ ID NO: 2037886 - RNA, 19 nt, Artificial Sequence
  Description of Artificial Sequence: Synthetic oligonucleotide
ggcgguaggaguaggccgc

SEQ ID NO: 2037887 - RNA, 19 nt, Artificial Sequence
  Description of Artificial Sequence: Synthetic oligonucleotide
ccaaacgcggugcuuccgc

SEQ ID NO: 2037888 - RNA, 19 nt, Artificial Sequence
  Description of Artificial Sequence: Synthetic oligonucleotide
aacuggucagagagccggu

SEQ ID NO: 2037889 - RNA, 19 nt, Artificial Sequence
  Description of Artificial Sequence: Synthetic oligonucleotide
cccuguuucaucacaggga

SEQ ID NO: 2037890 - RNA, 19 nt, Artificial Sequence
  Description of Artificial Sequence: Synthetic oligonucleotide
ccgguagccaaaaccugag

SEQ ID NO: 2037891 - RNA, 19 nt, Artificial Sequence
  Description of Artificial Sequence: Synthetic oligonucleotide
ugcuuccgccuccguccgg

SEQ ID NO: 2037892 - RNA, 19 nt, Artificial Sequence
  Description of Artificial Sequence: Synthetic oligonucleotide
ggaacuggucagagagccg

SEQ ID NO: 2037893 - RNA, 19 nt, Artificial Sequence
  Description of Artificial Sequence: Synthetic oligonucleotide
auacagccuacaggaagaa

SEQ ID NO: 2037894 - RNA, 19 nt, Artificial Sequence
  Description of Artificial Sequence: Synthetic oligonucleotide
cacauauguacagccaggu

SEQ ID NO: 2037895 - RNA, 19 nt, Artificial Sequence
  Description of Artificial Sequence: Synthetic oligonucleotide
auuagucagcaaacccaau

SEQ ID NO: 2037896 - RNA, 19 nt, Artificial Sequence
  Description of Artificial Sequence: Synthetic oligonucleotide
cggaguccaaguaccauug

SEQ ID NO: 2037897 - RNA, 19 nt, Artificial Sequence
  Description of Artificial Sequence: Synthetic oligonucleotide
gggccugguuauacgaugc

SEQ ID NO: 2037898 - RNA, 19 nt, Artificial Sequence
  Description of Artificial Sequence: Synthetic oligonucleotide
gacguuccacaggaagcuc

SEQ ID NO: 2037899 - RNA, 19 nt, Artificial Sequence
  Description of Artificial Sequence: Synthetic oligonucleotide
agccgguagccaaaaccug

SEQ ID NO: 2037900 - RNA, 19 nt, Artificial Sequence
  Description of Artificial Sequence: Synthetic oligonucleotide
augggcugaugcacaccgg

SEQ ID NO: 2037901 - RNA, 19 nt, Artificial Sequence
  Description of Artificial Sequence: Synthetic oligonucleotide
aucugcccucguccuuguc

SEQ ID NO: 2037902 - RNA, 19 nt, Artificial Sequence
  Description of Artificial Sequence: Synthetic oligonucleotide
cccaaguauuaauuauaca

SEQ ID NO: 2037903 - RNA, 19 nt, Artificial Sequence
  Description of Artificial Sequence: Synthetic oligonucleotide
gauugaccuaacagucacu

SEQ ID NO: 2037904 - RNA, 19 nt, Artificial Sequence
  Description of Artificial Sequence: Synthetic oligonucleotide
agagagccgguagccaaaa

SEQ ID NO: 2037905 - RNA, 19 nt, Artificial Sequence
  Description of Artificial Sequence: Synthetic oligonucleotide
gaccuaacagucacuggau

SEQ ID NO: 2037906 - RNA, 19 nt, Artificial Sequence
  Description of Artificial Sequence: Synthetic oligonucleotide
uucacagggccugguuaua

SEQ ID NO: 2037907 - RNA, 19 nt, Artificial Sequence
  Description of Artificial Sequence: Synthetic oligonucleotide
gcaaacccaauguuuguau

SEQ ID NO: 2037908 - RNA, 19 nt, Artificial Sequence
  Description of Artificial Sequence: Synthetic oligonucleotide
gucugucaaauuugcggau

SEQ ID NO: 2037909 - RNA, 19 nt, Artificial Sequence
  Description of Artificial Sequence: Synthetic oligonucleotide
acacgccuguaaauucacu

SEQ ID NO: 2037910 - RNA, 19 nt, Artificial Sequence
  Description of Artificial Sequence: Synthetic oligonucleotide
cuuccacacgccuguaaau

SEQ ID NO: 2037911 - RNA, 19 nt, Artificial Sequence
  Description of Artificial Sequence: Synthetic oligonucleotide
ucccggucauagguacgga

SEQ ID NO: 2037912 - RNA, 19 nt, Artificial Sequence
  Description of Artificial Sequence: Synthetic oligonucleotide
cagcaaacccaauguuugu

SEQ ID NO: 2037913 - RNA, 19 nt, Artificial Sequence
  Description of Artificial Sequence: Synthetic oligonucleotide
cccagaguugucccgguca

SEQ ID NO: 2037914 - RNA, 19 nt, Artificial Sequence
  Description of Artificial Sequence: Synthetic oligonucleotide
cugauccgugucauagcgu

SEQ ID NO: 2037915 - RNA, 19 nt, Artificial Sequence
  Description of Artificial Sequence: Synthetic oligonucleotide
gauccgugucauagcgucu

SEQ ID NO: 2037916 - RNA, 19 nt, Artificial Sequence
  Description of Artificial Sequence: Synthetic oligonucleotide
guccggggcaagaccagga

SEQ ID NO: 2037917 - RNA, 19 nt, Artificial Sequence
  Description of Artificial Sequence: Synthetic oligonucleotide
aguucacgccagccuuguu

SEQ ID NO: 2037918 - RNA, 19 nt, Artificial Sequence
  Description of Artificial Sequence: Synthetic oligonucleotide
cgguaaagcgaaccagcuc

SEQ ID NO: 2037919 - RNA, 19 nt, Artificial Sequence
  Description of Artificial Sequence: Synthetic oligonucleotide
agcuccaaacgcggugcuu

SEQ ID NO: 2037920 - RNA, 19 nt, Artificial Sequence
  Description of Artificial Sequence: Synthetic oligonucleotide
cacgccagccuuguuuucu

SEQ ID NO: 2037921 - RNA, 19 nt, Artificial Sequence
  Description of Artificial Sequence: Synthetic oligonucleotide
caguguagcuagggugcca

SEQ ID NO: 2037922 - RNA, 19 nt, Artificial Sequence
  Description of Artificial Sequence: Synthetic oligonucleotide
ccgccaugggcugaugcac

SEQ ID NO: 2037923 - RNA, 19 nt, Artificial Sequence
  Description of Artificial Sequence: Synthetic oligonucleotide
cgaucugcccucguccuug

SEQ ID NO: 2037924 - RNA, 19 nt, Artificial Sequence
  Description of Artificial Sequence: Synthetic oligonucleotide
cgccuguaaauucacugaa

SEQ ID NO: 2037925 - RNA, 19 nt, Artificial Sequence
  Description of Artificial Sequence: Synthetic oligonucleotide
ccgguaaagcgaaccagcu

SEQ ID NO: 2037926 - RNA, 19 nt, Artificial Sequence
  Description of Artificial Sequence: Synthetic oligonucleotide
cccggucauagguacggaa

SEQ ID NO: 2037927 - RNA, 19 nt, Artificial Sequence
  Description of Artificial Sequence: Synthetic oligonucleotide
guaggccgccaugggcuga

SEQ ID NO: 2037928 - RNA, 19 nt, Artificial Sequence
  Description of Artificial Sequence: Synthetic oligonucleotide
cagaaucacuaaccagcuu

SEQ ID NO: 2037929 - RNA, 19 nt, Artificial Sequence
  Description of Artificial Sequence: Synthetic oligonucleotide
gccugggcgguaggaguag

SEQ ID NO: 2037930 - RNA, 19 nt, Artificial Sequence
  Description of Artificial Sequence: Synthetic oligonucleotide
ggccugguuauacgaugcu

SEQ ID NO: 2037931 - RNA, 19 nt, Artificial Sequence
  Description of Artificial Sequence: Synthetic oligonucleotide
ccguccggggcaagaccag

SEQ ID NO: 2037932 - RNA, 19 nt, Artificial Sequence
  Description of Artificial Sequence: Synthetic oligonucleotide
ccagccuuguuuucucggu

SEQ ID NO: 2037933 - RNA, 19 nt, Artificial Sequence
  Description of Artificial Sequence: Synthetic oligonucleotide
cccucguccuugucuguca

SEQ ID NO: 2037934 - RNA, 19 nt, Artificial Sequence
  Description of Artificial Sequence: Synthetic oligonucleotide
gcgguaggaguaggccgcc

SEQ ID NO: 2037935 - RNA, 19 nt, Artificial Sequence
  Description of Artificial Sequence: Synthetic oligonucleotide
cgugucauagcgucugaau

SEQ ID NO: 2037936 - RNA, 19 nt, Artificial Sequence
  Description of Artificial Sequence: Synthetic oligonucleotide
ccgcuggaagacguuccac

SEQ ID NO: 2037937 - RNA, 19 nt, Artificial Sequence
  Description of Artificial Sequence: Synthetic oligonucleotide
cguccggggcaagaccagg

SEQ ID NO: 2037938 - RNA, 19 nt, Artificial Sequence
  Description of Artificial Sequence: Synthetic oligonucleotide
cagcuccaaacgcggugcu

SEQ ID NO: 2037939 - RNA, 19 nt, Artificial Sequence
  Description of Artificial Sequence: Synthetic oligonucleotide
ccauuggauaaugcuugcu

SEQ ID NO: 2037940 - RNA, 19 nt, Artificial Sequence
  Description of Artificial Sequence: Synthetic oligonucleotide
gucuggcagcgcagcucca

SEQ ID NO: 2037941 - RNA, 19 nt, Artificial Sequence
  Description of Artificial Sequence: Synthetic oligonucleotide
cgguagccaaaaccugaga

SEQ ID NO: 2037942 - RNA, 19 nt, Artificial Sequence
  Description of Artificial Sequence: Synthetic oligonucleotide
gcacaccgguaaagcgaac

SEQ ID NO: 2037943 - RNA, 19 nt, Artificial Sequence
  Description of Artificial Sequence: Synthetic oligonucleotide
ccaaaaccugagagugcuu

SEQ ID NO: 2037944 - RNA, 19 nt, Artificial Sequence
  Description of Artificial Sequence: Synthetic oligonucleotide
gcgaucugcccucguccuu

SEQ ID NO: 2037945 - RNA, 19 nt, Artificial Sequence
  Description of Artificial Sequence: Synthetic oligonucleotide
gugcuugcuugagcucguu

SEQ ID NO: 2037946 - RNA, 19 nt, Artificial Sequence
  Description of Artificial Sequence: Synthetic oligonucleotide
cguccugauccgugucaua

SEQ ID NO: 2037947 - RNA, 19 nt, Artificial Sequence
  Description of Artificial Sequence: Synthetic oligonucleotide
ccgccuccguccggggcaa

SEQ ID NO: 2037948 - RNA, 19 nt, Artificial Sequence
  Description of Artificial Sequence: Synthetic oligonucleotide
ucauauuucauucuuagag

SEQ ID NO: 2037949 - RNA, 19 nt, Artificial Sequence
  Description of Artificial Sequence: Synthetic oligonucleotide
aauuauuuuacugaguggg

SEQ ID NO: 2037950 - RNA, 19 nt, Artificial Sequence
  Description of Artificial Sequence: Synthetic oligonucleotide
ugaauuauuuuacugagug

SEQ ID NO: 2037951 - RNA, 19 nt, Artificial Sequence
  Description of Artificial Sequence: Synthetic oligonucleotide
aacacuaggaucuuacagg

SEQ ID NO: 2037952 - RNA, 19 nt, Artificial Sequence
  Description of Artificial Sequence: Synthetic oligonucleotide
aagauucccauuucuaacc

SEQ ID NO: 2037953 - RNA, 19 nt, Artificial Sequence
  Description of Artificial Sequence: Synthetic oligonucleotide
auacacuucaaccugaggg

SEQ ID NO: 2037954 - RNA, 19 nt, Artificial Sequence
  Description of Artificial Sequence: Synthetic oligonucleotide
auaauauuucuacagcuac

SEQ ID NO: 2037955 - RNA, 19 nt, Artificial Sequence
  Description of Artificial Sequence: Synthetic oligonucleotide
aggcaaaaucccuagaagc

SEQ ID NO: 2037956 - RNA, 19 nt, Artificial Sequence
  Description of Artificial Sequence: Synthetic oligonucleotide
uuucuaaccaguuagugac

SEQ ID NO: 2037957 - RNA, 19 nt, Artificial Sequence
  Description of Artificial Sequence: Synthetic oligonucleotide
auugaauuauuuuacugag

SEQ ID NO: 2037958 - RNA, 19 nt, Artificial Sequence
  Description of Artificial Sequence: Synthetic oligonucleotide
aucauaaggaaguuuggac

SEQ ID NO: 2037959 - RNA, 19 nt, Artificial Sequence
  Description of Artificial Sequence: Synthetic oligonucleotide
gauugaauuauuuuacuga

SEQ ID NO: 2037960 - RNA, 19 nt, Artificial Sequence
  Description of Artificial Sequence: Synthetic oligonucleotide
cauauuucauucuuagagg

SEQ ID NO: 2037961 - RNA, 19 nt, Artificial Sequence
  Description of Artificial Sequence: Synthetic oligonucleotide
aacugcuucacgaagcacc

SEQ ID NO: 2037962 - RNA, 19 nt, Artificial Sequence
  Description of Artificial Sequence: Synthetic oligonucleotide
uuuggcgauggcaagaaag

SEQ ID NO: 2037963 - RNA, 19 nt, Artificial Sequence
  Description of Artificial Sequence: Synthetic oligonucleotide
uacagcuacaaacacuagg

SEQ ID NO: 2037964 - RNA, 19 nt, Artificial Sequence
  Description of Artificial Sequence: Synthetic oligonucleotide
uuugcgauaggccaucacc

SEQ ID NO: 2037965 - RNA, 19 nt, Artificial Sequence
  Description of Artificial Sequence: Synthetic oligonucleotide
aaucccuagaagcaccuuc

SEQ ID NO: 2037966 - RNA, 19 nt, Artificial Sequence
  Description of Artificial Sequence: Synthetic oligonucleotide
ucauaaggaaguuuggaca

SEQ ID NO: 2037967 - RNA, 19 nt, Artificial Sequence
  Description of Artificial Sequence: Synthetic oligonucleotide
aagucgauggccuugcuca

SEQ ID NO: 2037968 - RNA, 19 nt, Artificial Sequence
  Description of Artificial Sequence: Synthetic oligonucleotide
uguucgaaagccuugggca

SEQ ID NO: 2037969 - RNA, 19 nt, Artificial Sequence
  Description of Artificial Sequence: Synthetic oligonucleotide
caugacuuuuauuuuaaag

SEQ ID NO: 2037970 - RNA, 19 nt, Artificial Sequence
  Description of Artificial Sequence: Synthetic oligonucleotide
gaauuauuuuacugagugg

SEQ ID NO: 2037971 - RNA, 19 nt, Artificial Sequence
  Description of Artificial Sequence: Synthetic oligonucleotide
ugaucuuugcgauaggcca

SEQ ID NO: 2037972 - RNA, 19 nt, Artificial Sequence
  Description of Artificial Sequence: Synthetic oligonucleotide
caaagggucaucuuucagg

SEQ ID NO: 2037973 - RNA, 19 nt, Artificial Sequence
  Description of Artificial Sequence: Synthetic oligonucleotide
ugucagggcaugaaggacg

SEQ ID NO: 2037974 - RNA, 19 nt, Artificial Sequence
  Description of Artificial Sequence: Synthetic oligonucleotide
gaagauacacuucaaccug

SEQ ID NO: 2037975 - RNA, 19 nt, Artificial Sequence
  Description of Artificial Sequence: Synthetic oligonucleotide
agcuacaaacacuaggauc

SEQ ID NO: 2037976 - RNA, 19 nt, Artificial Sequence
  Description of Artificial Sequence: Synthetic oligonucleotide
gagaucauaaggaaguuug

SEQ ID NO: 2037977 - RNA, 19 nt, Artificial Sequence
  Description of Artificial Sequence: Synthetic oligonucleotide
ucuuacaggauccacugac

SEQ ID NO: 2037978 - RNA, 19 nt, Artificial Sequence
  Description of Artificial Sequence: Synthetic oligonucleotide
accaaugcacgguacaugg

SEQ ID NO: 2037979 - RNA, 19 nt, Artificial Sequence
  Description of Artificial Sequence: Synthetic oligonucleotide
gaagucacaaguugucagg

SEQ ID NO: 2037980 - RNA, 19 nt, Artificial Sequence
  Description of Artificial Sequence: Synthetic oligonucleotide
gaccaagugacauggacag

SEQ ID NO: 2037981 - RNA, 19 nt, Artificial Sequence
  Description of Artificial Sequence: Synthetic oligonucleotide
guaacagucaaugcuaucc

SEQ ID NO: 2037982 - RNA, 19 nt, Artificial Sequence
  Description of Artificial Sequence: Synthetic oligonucleotide
acuuucucauaguagacug

SEQ ID NO: 2037983 - RNA, 19 nt, Artificial Sequence
  Description of Artificial Sequence: Synthetic oligonucleotide
aagucacaaguugucaggc

SEQ ID NO: 2037984 - RNA, 19 nt, Artificial Sequence
  Description of Artificial Sequence: Synthetic oligonucleotide
uucaacuccacgaaaccca

SEQ ID NO: 2037985 - RNA, 19 nt, Artificial Sequence
  Description of Artificial Sequence: Synthetic oligonucleotide
ucacaauagcgucugagcu

SEQ ID NO: 2037986 - RNA, 19 nt, Artificial Sequence
  Description of Artificial Sequence: Synthetic oligonucleotide
gaucuuacaggauccacug

SEQ ID NO: 2037987 - RNA, 19 nt, Artificial Sequence
  Description of Artificial Sequence: Synthetic oligonucleotide
aaaccagagaucauaagga

SEQ ID NO: 2037988 - RNA, 19 nt, Artificial Sequence
  Description of Artificial Sequence: Synthetic oligonucleotide
ucagacuaagagauccggg

SEQ ID NO: 2037989 - RNA, 19 nt, Artificial Sequence
  Description of Artificial Sequence: Synthetic oligonucleotide
gauacaugcgaagauacac

SEQ ID NO: 2037990 - RNA, 19 nt, Artificial Sequence
  Description of Artificial Sequence: Synthetic oligonucleotide
aauagcgucugagcugucc

SEQ ID NO: 2037991 - RNA, 19 nt, Artificial Sequence
  Description of Artificial Sequence: Synthetic oligonucleotide
cagacuaagagauccgggg

SEQ ID NO: 2037992 - RNA, 19 nt, Artificial Sequence
  Description of Artificial Sequence: Synthetic oligonucleotide
ucuuccagauucaaguacu

SEQ ID NO: 2037993 - RNA, 19 nt, Artificial Sequence
  Description of Artificial Sequence: Synthetic oligonucleotide
uauuuuacugaguggggug

SEQ ID NO: 2037994 - RNA, 19 nt, Artificial Sequence
  Description of Artificial Sequence: Synthetic oligonucleotide
aagugacauggacagagug

SEQ ID NO: 2037995 - RNA, 19 nt, Artificial Sequence
  Description of Artificial Sequence: Synthetic oligonucleotide
aagcggacuacugucaggg

SEQ ID NO: 2037996 - RNA, 19 nt, Artificial Sequence
  Description of Artificial Sequence: Synthetic oligonucleotide
uuucucauaguagacugag

SEQ ID NO: 2037997 - RNA, 19 nt, Artificial Sequence
  Description of Artificial Sequence: Synthetic oligonucleotide
ccuacuaucuuccagauuc

SEQ ID NO: 2037998 - RNA, 19 nt, Artificial Sequence
  Description of Artificial Sequence: Synthetic oligonucleotide
ugaccaagugacauggaca

SEQ ID NO: 2037999 - RNA, 19 nt, Artificial Sequence
  Description of Artificial Sequence: Synthetic oligonucleotide
ucuucaacuccacgaaacc

SEQ ID NO: 2038000 - RNA, 19 nt, Artificial Sequence
  Description of Artificial Sequence: Synthetic oligonucleotide
cuugcuaugcaacugcuuc

SEQ ID NO: 2038001 - RNA, 19 nt, Artificial Sequence
  Description of Artificial Sequence: Synthetic oligonucleotide
uaaggaaguuuggacaccg

SEQ ID NO: 2038002 - RNA, 19 nt, Artificial Sequence
  Description of Artificial Sequence: Synthetic oligonucleotide
cuaggaucuuacaggaucc

SEQ ID NO: 2038003 - RNA, 19 nt, Artificial Sequence
  Description of Artificial Sequence: Synthetic oligonucleotide
ugauuucuuuucuucaacu

SEQ ID NO: 2038004 - RNA, 19 nt, Artificial Sequence
  Description of Artificial Sequence: Synthetic oligonucleotide
acaaacacuaggaucuuac

SEQ ID NO: 2038005 - RNA, 19 nt, Artificial Sequence
  Description of Artificial Sequence: Synthetic oligonucleotide
cagaguacugaucuuugcg

SEQ ID NO: 2038006 - RNA, 19 nt, Artificial Sequence
  Description of Artificial Sequence: Synthetic oligonucleotide
gaugaagcggacuacuguc

SEQ ID NO: 2038007 - RNA, 19 nt, Artificial Sequence
  Description of Artificial Sequence: Synthetic oligonucleotide
aagacuucauccuccggcu

SEQ ID NO: 2038008 - RNA, 19 nt, Artificial Sequence
  Description of Artificial Sequence: Synthetic oligonucleotide
ugcaacugcuucacgaagc

SEQ ID NO: 2038009 - RNA, 19 nt, Artificial Sequence
  Description of Artificial Sequence: Synthetic oligonucleotide
aauaauauuucuacagcua

SEQ ID NO: 2038010 - RNA, 19 nt, Artificial Sequence
  Description of Artificial Sequence: Synthetic oligonucleotide
cugauacaugcgaagauac

SEQ ID NO: 2038011 - RNA, 19 nt, Artificial Sequence
  Description of Artificial Sequence: Synthetic oligonucleotide
ucauaguagacugagcgaa

SEQ ID NO: 2038012 - RNA, 19 nt, Artificial Sequence
  Description of Artificial Sequence: Synthetic oligonucleotide
cucacaauagcgucugagc

SEQ ID NO: 2038013 - RNA, 19 nt, Artificial Sequence
  Description of Artificial Sequence: Synthetic oligonucleotide
uugugccacaagucgaugg

SEQ ID NO: 2038014 - RNA, 19 nt, Artificial Sequence
  Description of Artificial Sequence: Synthetic oligonucleotide
gaggcaacuucccagacuc

SEQ ID NO: 2038015 - RNA, 19 nt, Artificial Sequence
  Description of Artificial Sequence: Synthetic oligonucleotide
cagauucaaguacuguucg

SEQ ID NO: 2038016 - RNA, 19 nt, Artificial Sequence
  Description of Artificial Sequence: Synthetic oligonucleotide
cuagaagcaccuuccauac

SEQ ID NO: 2038017 - RNA, 19 nt, Artificial Sequence
  Description of Artificial Sequence: Synthetic oligonucleotide
uucagacuaagagauccgg

SEQ ID NO: 2038018 - RNA, 19 nt, Artificial Sequence
  Description of Artificial Sequence: Synthetic oligonucleotide
agaguacugaucuuugcga

SEQ ID NO: 2038019 - RNA, 19 nt, Artificial Sequence
  Description of Artificial Sequence: Synthetic oligonucleotide
caagauucccauuucuaac

SEQ ID NO: 2038020 - RNA, 19 nt, Artificial Sequence
  Description of Artificial Sequence: Synthetic oligonucleotide
ucaucagucauauuucauu

SEQ ID NO: 2038021 - RNA, 19 nt, Artificial Sequence
  Description of Artificial Sequence: Synthetic oligonucleotide
gucaaugcuauccuccacc

SEQ ID NO: 2038022 - RNA, 19 nt, Artificial Sequence
  Description of Artificial Sequence: Synthetic oligonucleotide
caucagucauauuucauuc

SEQ ID NO: 2038023 - RNA, 19 nt, Artificial Sequence
  Description of Artificial Sequence: Synthetic oligonucleotide
uuggcgauggcaagaaaga

SEQ ID NO: 2038024 - RNA, 19 nt, Artificial Sequence
  Description of Artificial Sequence: Synthetic oligonucleotide
augcacgguacauggaugg

SEQ ID NO: 2038025 - RNA, 19 nt, Artificial Sequence
  Description of Artificial Sequence: Synthetic oligonucleotide
auuuuacugaguggggugg

SEQ ID NO: 2038026 - RNA, 19 nt, Artificial Sequence
  Description of Artificial Sequence: Synthetic oligonucleotide
uucuacagcuacaaacacu

SEQ ID NO: 2038027 - RNA, 19 nt, Artificial Sequence
  Description of Artificial Sequence: Synthetic oligonucleotide
uugaauuauuuuacugagu

SEQ ID NO: 2038028 - RNA, 19 nt, Artificial Sequence
  Description of Artificial Sequence: Synthetic oligonucleotide
uguccacgaagucacaagu

SEQ ID NO: 2038029 - RNA, 19 nt, Artificial Sequence
  Description of Artificial Sequence: Synthetic oligonucleotide
uugcgauaggccaucaccu

SEQ ID NO: 2038030 - RNA, 19 nt, Artificial Sequence
  Description of Artificial Sequence: Synthetic oligonucleotide
uuagugaccaagugacaug

SEQ ID NO: 2038031 - RNA, 19 nt, Artificial Sequence
  Description of Artificial Sequence: Synthetic oligonucleotide
cugaucuuugcgauaggcc

SEQ ID NO: 2038032 - RNA, 19 nt, Artificial Sequence
  Description of Artificial Sequence: Synthetic oligonucleotide
auuauuuuacugagugggg

SEQ ID NO: 2038033 - RNA, 19 nt, Artificial Sequence
  Description of Artificial Sequence: Synthetic oligonucleotide
ugagcgaaaguuucucuga

SEQ ID NO: 2038034 - RNA, 19 nt, Artificial Sequence
  Description of Artificial Sequence: Synthetic oligonucleotide
ugcgaagauacacuucaac

SEQ ID NO: 2038035 - RNA, 19 nt, Artificial Sequence
  Description of Artificial Sequence: Synthetic oligonucleotide
uccacgaaacccaacuuuc

SEQ ID NO: 2038036 - RNA, 19 nt, Artificial Sequence
  Description of Artificial Sequence: Synthetic oligonucleotide
cuuccauaccaaugcacgg

SEQ ID NO: 2038037 - RNA, 19 nt, Artificial Sequence
  Description of Artificial Sequence: Synthetic oligonucleotide
uaggccaucaccugggcgu

SEQ ID NO: 2038038 - RNA, 19 nt, Artificial Sequence
  Description of Artificial Sequence: Synthetic oligonucleotide
uaacagucaaugcuauccu

SEQ ID NO: 2038039 - RNA, 19 nt, Artificial Sequence
  Description of Artificial Sequence: Synthetic oligonucleotide
ugaagcggacuacugucag

SEQ ID NO: 2038040 - RNA, 19 nt, Artificial Sequence
  Description of Artificial Sequence: Synthetic oligonucleotide
uaaggaaucccggaacuug

SEQ ID NO: 2038041 - RNA, 19 nt, Artificial Sequence
  Description of Artificial Sequence: Synthetic oligonucleotide
ucucaauguccaaaggguc

SEQ ID NO: 2038042 - RNA, 19 nt, Artificial Sequence
  Description of Artificial Sequence: Synthetic oligonucleotide
uccaucggaaaagaggggc

SEQ ID NO: 2038043 - RNA, 19 nt, Artificial Sequence
  Description of Artificial Sequence: Synthetic oligonucleotide
caugcgaagauacacuuca

SEQ ID NO: 2038044 - RNA, 19 nt, Artificial Sequence
  Description of Artificial Sequence: Synthetic oligonucleotide
uuacaggauccacugacaa

SEQ ID NO: 2038045 - RNA, 19 nt, Artificial Sequence
  Description of Artificial Sequence: Synthetic oligonucleotide
guuuggacaccgcagaaca

SEQ ID NO: 2038046 - RNA, 19 nt, Artificial Sequence
  Description of Artificial Sequence: Synthetic oligonucleotide
aaucccggaacuugcuaug

SEQ ID NO: 2038047 - RNA, 19 nt, Artificial Sequence
  Description of Artificial Sequence: Synthetic oligonucleotide
agccaguaacagucaaugc

SEQ ID NO: 2038048 - RNA, 19 nt, Artificial Sequence
  Description of Artificial Sequence: Synthetic oligonucleotide
gaaggugcaaagcuucuca

SEQ ID NO: 2038049 - RNA, 19 nt, Artificial Sequence
  Description of Artificial Sequence: Synthetic oligonucleotide
guacugaucuuugcgauag

SEQ ID NO: 2038050 - RNA, 19 nt, Artificial Sequence
  Description of Artificial Sequence: Synthetic oligonucleotide
caagcugauacaugcgaag

SEQ ID NO: 2038051 - RNA, 19 nt, Artificial Sequence
  Description of Artificial Sequence: Synthetic oligonucleotide
gcgaagauacacuucaacc

SEQ ID NO: 2038052 - RNA, 19 nt, Artificial Sequence
  Description of Artificial Sequence: Synthetic oligonucleotide
uacuguucgaaagccuugg

SEQ ID NO: 2038053 - RNA, 19 nt, Artificial Sequence
  Description of Artificial Sequence: Synthetic oligonucleotide
acgaaacccaacuuucuca

SEQ ID NO: 2038054 - RNA, 19 nt, Artificial Sequence
  Description of Artificial Sequence: Synthetic oligonucleotide
ucaagcugauacaugcgaa

SEQ ID NO: 2038055 - RNA, 19 nt, Artificial Sequence
  Description of Artificial Sequence: Synthetic oligonucleotide
auaaggaaguuuggacacc

SEQ ID NO: 2038056 - RNA, 19 nt, Artificial Sequence
  Description of Artificial Sequence: Synthetic oligonucleotide
ugauacaugcgaagauaca

SEQ ID NO: 2038057 - RNA, 19 nt, Artificial Sequence
  Description of Artificial Sequence: Synthetic oligonucleotide
acagcaagauucccauuuc

SEQ ID NO: 2038058 - RNA, 19 nt, Artificial Sequence
  Description of Artificial Sequence: Synthetic oligonucleotide
ugaaggacgucagaguacu

SEQ ID NO: 2038059 - RNA, 19 nt, Artificial Sequence
  Description of Artificial Sequence: Synthetic oligonucleotide
ucacaaguugucaggcuga

SEQ ID NO: 2038060 - RNA, 19 nt, Artificial Sequence
  Description of Artificial Sequence: Synthetic oligonucleotide
ucuaaccaguuagugacca

SEQ ID NO: 2038061 - RNA, 19 nt, Artificial Sequence
  Description of Artificial Sequence: Synthetic oligonucleotide
cuucgaggcaacuucccag

SEQ ID NO: 2038062 - RNA, 19 nt, Artificial Sequence
  Description of Artificial Sequence: Synthetic oligonucleotide
gcuccaucggaaaagaggg

SEQ ID NO: 2038063 - RNA, 19 nt, Artificial Sequence
  Description of Artificial Sequence: Synthetic oligonucleotide
uuuuagugugcccggguuc

SEQ ID NO: 2038064 - RNA, 19 nt, Artificial Sequence
  Description of Artificial Sequence: Synthetic oligonucleotide
guacauggaugggagaggg

SEQ ID NO: 2038065 - RNA, 19 nt, Artificial Sequence
  Description of Artificial Sequence: Synthetic oligonucleotide
aaggacgucagaguacuga

SEQ ID NO: 2038066 - RNA, 19 nt, Artificial Sequence
  Description of Artificial Sequence: Synthetic oligonucleotide
aacuucccagacucaagcu

SEQ ID NO: 2038067 - RNA, 19 nt, Artificial Sequence
  Description of Artificial Sequence: Synthetic oligonucleotide
gauucccauuucuaaccag

SEQ ID NO: 2038068 - RNA, 19 nt, Artificial Sequence
  Description of Artificial Sequence: Synthetic oligonucleotide
gacgucagaguacugaucu

SEQ ID NO: 2038069 - RNA, 19 nt, Artificial Sequence
  Description of Artificial Sequence: Synthetic oligonucleotide
agucaucagucauauuuca

SEQ ID NO: 2038070 - RNA, 19 nt, Artificial Sequence
  Description of Artificial Sequence: Synthetic oligonucleotide
auaguagacugagcgaaag

SEQ ID NO: 2038071 - RNA, 19 nt, Artificial Sequence
  Description of Artificial Sequence: Synthetic oligonucleotide
cuguucgaaagccuugggc

SEQ ID NO: 2038072 - RNA, 19 nt, Artificial Sequence
  Description of Artificial Sequence: Synthetic oligonucleotide
aguuuggacaccgcagaac

SEQ ID NO: 2038073 - RNA, 19 nt, Artificial Sequence
  Description of Artificial Sequence: Synthetic oligonucleotide
ugacucagcagccuacuau

SEQ ID NO: 2038074 - RNA, 19 nt, Artificial Sequence
  Description of Artificial Sequence: Synthetic oligonucleotide
cugagcgaaaguuucucug

SEQ ID NO: 2038075 - RNA, 19 nt, Artificial Sequence
  Description of Artificial Sequence: Synthetic oligonucleotide
gacucagcagccuacuauc

SEQ ID NO: 2038076 - RNA, 19 nt, Artificial Sequence
  Description of Artificial Sequence: Synthetic oligonucleotide
cacaauagcgucugagcug

SEQ ID NO: 2038077 - RNA, 19 nt, Artificial Sequence
  Description of Artificial Sequence: Synthetic oligonucleotide
gaucauaaggaaguuugga

SEQ ID NO: 2038078 - RNA, 19 nt, Artificial Sequence
  Description of Artificial Sequence: Synthetic oligonucleotide
cugggcgugagagucaugg

SEQ ID NO: 2038079 - RNA, 19 nt, Artificial Sequence
  Description of Artificial Sequence: Synthetic oligonucleotide
acaauagcgucugagcugu

SEQ ID NO: 2038080 - RNA, 19 nt, Artificial Sequence
  Description of Artificial Sequence: Synthetic oligonucleotide
aggaaguuuggacaccgca

SEQ ID NO: 2038081 - RNA, 19 nt, Artificial Sequence
  Description of Artificial Sequence: Synthetic oligonucleotide
agacuaagagauccgggga

SEQ ID NO: 2038082 - RNA, 19 nt, Artificial Sequence
  Description of Artificial Sequence: Synthetic oligonucleotide
cacgguacauggaugggag

SEQ ID NO: 2038083 - RNA, 19 nt, Artificial Sequence
  Description of Artificial Sequence: Synthetic oligonucleotide
agucaaugcuauccuccac

SEQ ID NO: 2038084 - RNA, 19 nt, Artificial Sequence
  Description of Artificial Sequence: Synthetic oligonucleotide
agcaccacagcaagauucc

SEQ ID NO: 2038085 - RNA, 19 nt, Artificial Sequence
  Description of Artificial Sequence: Synthetic oligonucleotide
aagcugauacaugcgaaga

SEQ ID NO: 2038086 - RNA, 19 nt, Artificial Sequence
  Description of Artificial Sequence: Synthetic oligonucleotide
cuucaacuccacgaaaccc

SEQ ID NO: 2038087 - RNA, 19 nt, Artificial Sequence
  Description of Artificial Sequence: Synthetic oligonucleotide
ugcagacuguccacgaagu

SEQ ID NO: 2038088 - RNA, 19 nt, Artificial Sequence
  Description of Artificial Sequence: Synthetic oligonucleotide
uucuaaccaguuagugacc

SEQ ID NO: 2038089 - RNA, 19 nt, Artificial Sequence
  Description of Artificial Sequence: Synthetic oligonucleotide
uacaugcgaagauacacuu

SEQ ID NO: 2038090 - RNA, 19 nt, Artificial Sequence
  Description of Artificial Sequence: Synthetic oligonucleotide
uuggacaccgcagaacaug

SEQ ID NO: 2038091 - RNA, 19 nt, Artificial Sequence
  Description of Artificial Sequence: Synthetic oligonucleotide
gaagcggacuacugucagg

SEQ ID NO: 2038092 - RNA, 19 nt, Artificial Sequence
  Description of Artificial Sequence: Synthetic oligonucleotide
gauucaaguacuguucgaa

SEQ ID NO: 2038093 - RNA, 19 nt, Artificial Sequence
  Description of Artificial Sequence: Synthetic oligonucleotide
accaguuagugaccaagug

SEQ ID NO: 2038094 - RNA, 19 nt, Artificial Sequence
  Description of Artificial Sequence: Synthetic oligonucleotide
auaggccaucaccugggcg

SEQ ID NO: 2038095 - RNA, 19 nt, Artificial Sequence
  Description of Artificial Sequence: Synthetic oligonucleotide
aaugcacgguacauggaug

SEQ ID NO: 2038096 - RNA, 19 nt, Artificial Sequence
  Description of Artificial Sequence: Synthetic oligonucleotide
uuuuacugagugggguggg

SEQ ID NO: 2038097 - RNA, 19 nt, Artificial Sequence
  Description of Artificial Sequence: Synthetic oligonucleotide
agaucauaaggaaguuugg

SEQ ID NO: 2038098 - RNA, 19 nt, Artificial Sequence
  Description of Artificial Sequence: Synthetic oligonucleotide
aguagacugagcgaaaguu

SEQ ID NO: 2038099 - RNA, 19 nt, Artificial Sequence
  Description of Artificial Sequence: Synthetic oligonucleotide
acuguucaaugccaugacu

SEQ ID NO: 2038100 - RNA, 19 nt, Artificial Sequence
  Description of Artificial Sequence: Synthetic oligonucleotide
agauucccauuucuaacca

SEQ ID NO: 2038101 - RNA, 19 nt, Artificial Sequence
  Description of Artificial Sequence: Synthetic oligonucleotide
ugugcccggguucagacua

SEQ ID NO: 2038102 - RNA, 19 nt, Artificial Sequence
  Description of Artificial Sequence: Synthetic oligonucleotide
ucggaaaagaggggcuucg

SEQ ID NO: 2038103 - RNA, 19 nt, Artificial Sequence
  Description of Artificial Sequence: Synthetic oligonucleotide
uggacaccgcagaacaugu

SEQ ID NO: 2038104 - RNA, 19 nt, Artificial Sequence
  Description of Artificial Sequence: Synthetic oligonucleotide
uuuacugaguggggugggg

SEQ ID NO: 2038105 - RNA, 19 nt, Artificial Sequence
  Description of Artificial Sequence: Synthetic oligonucleotide
acacuguucaaugccauga

SEQ ID NO: 2038106 - RNA, 19 nt, Artificial Sequence
  Description of Artificial Sequence: Synthetic oligonucleotide
cucaauguccaaaggguca

SEQ ID NO: 2038107 - RNA, 19 nt, Artificial Sequence
  Description of Artificial Sequence: Synthetic oligonucleotide
gugaccaagugacauggac

SEQ ID NO: 2038108 - RNA, 19 nt, Artificial Sequence
  Description of Artificial Sequence: Synthetic oligonucleotide
acuaucuuccagauucaag

SEQ ID NO: 2038109 - RNA, 19 nt, Artificial Sequence
  Description of Artificial Sequence: Synthetic oligonucleotide
acuguucgaaagccuuggg

SEQ ID NO: 2038110 - RNA, 19 nt, Artificial Sequence
  Description of Artificial Sequence: Synthetic oligonucleotide
uugagcaccacagcaagau

SEQ ID NO: 2038111 - RNA, 19 nt, Artificial Sequence
  Description of Artificial Sequence: Synthetic oligonucleotide
aacccaacuuucucauagu

SEQ ID NO: 2038112 - RNA, 19 nt, Artificial Sequence
  Description of Artificial Sequence: Synthetic oligonucleotide
uaguagacugagcgaaagu

SEQ ID NO: 2038113 - RNA, 19 nt, Artificial Sequence
  Description of Artificial Sequence: Synthetic oligonucleotide
acugcuucacgaagcaccg

SEQ ID NO: 2038114 - RNA, 19 nt, Artificial Sequence
  Description of Artificial Sequence: Synthetic oligonucleotide
auagcgucugagcuguccu

SEQ ID NO: 2038115 - RNA, 19 nt, Artificial Sequence
  Description of Artificial Sequence: Synthetic oligonucleotide
aaggaaguuuggacaccgc

SEQ ID NO: 2038116 - RNA, 19 nt, Artificial Sequence
  Description of Artificial Sequence: Synthetic oligonucleotide
ucaacuccacgaaacccaa

SEQ ID NO: 2038117 - RNA, 19 nt, Artificial Sequence
  Description of Artificial Sequence: Synthetic oligonucleotide
agcugagguaaggaauccc

SEQ ID NO: 2038118 - RNA, 19 nt, Artificial Sequence
  Description of Artificial Sequence: Synthetic oligonucleotide
ccacugacaacuuuauccc

SEQ ID NO: 2038119 - RNA, 19 nt, Artificial Sequence
  Description of Artificial Sequence: Synthetic oligonucleotide
uuucucugagagucaucag

SEQ ID NO: 2038120 - RNA, 19 nt, Artificial Sequence
  Description of Artificial Sequence: Synthetic oligonucleotide
aaguuuggacaccgcagaa

SEQ ID NO: 2038121 - RNA, 19 nt, Artificial Sequence
  Description of Artificial Sequence: Synthetic oligonucleotide
augaaggacgucagaguac

SEQ ID NO: 2038122 - RNA, 19 nt, Artificial Sequence
  Description of Artificial Sequence: Synthetic oligonucleotide
uccauaccaaugcacggua

SEQ ID NO: 2038123 - RNA, 19 nt, Artificial Sequence
  Description of Artificial Sequence: Synthetic oligonucleotide
cacgaagucacaaguuguc

SEQ ID NO: 2038124 - RNA, 19 nt, Artificial Sequence
  Description of Artificial Sequence: Synthetic oligonucleotide
ggcuccaucggaaaagagg

SEQ ID NO: 2038125 - RNA, 19 nt, Artificial Sequence
  Description of Artificial Sequence: Synthetic oligonucleotide
agauucaaguacuguucga

SEQ ID NO: 2038126 - RNA, 19 nt, Artificial Sequence
  Description of Artificial Sequence: Synthetic oligonucleotide
acugagcgaaaguuucucu

SEQ ID NO: 2038127 - RNA, 19 nt, Artificial Sequence
  Description of Artificial Sequence: Synthetic oligonucleotide
gaagcaccgggugagccag

SEQ ID NO: 2038128 - RNA, 19 nt, Artificial Sequence
  Description of Artificial Sequence: Synthetic oligonucleotide
ugcgauaggccaucaccug

SEQ ID NO: 2038129 - RNA, 19 nt, Artificial Sequence
  Description of Artificial Sequence: Synthetic oligonucleotide
caugaaggacgucagagua

SEQ ID NO: 2038130 - RNA, 19 nt, Artificial Sequence
  Description of Artificial Sequence: Synthetic oligonucleotide
gauggccuugcucacaaua

SEQ ID NO: 2038131 - RNA, 19 nt, Artificial Sequence
  Description of Artificial Sequence: Synthetic oligonucleotide
gcugagguaaggaaucccg

SEQ ID NO: 2038132 - RNA, 19 nt, Artificial Sequence
  Description of Artificial Sequence: Synthetic oligonucleotide
auacaugcgaagauacacu

SEQ ID NO: 2038133 - RNA, 19 nt, Artificial Sequence
  Description of Artificial Sequence: Synthetic oligonucleotide
cucaagcugauacaugcga

SEQ ID NO: 2038134 - RNA, 19 nt, Artificial Sequence
  Description of Artificial Sequence: Synthetic oligonucleotide
acccucuguaaacuggacu

SEQ ID NO: 2038135 - RNA, 19 nt, Artificial Sequence
  Description of Artificial Sequence: Synthetic oligonucleotide
guucagacuaagagauccg

SEQ ID NO: 2038136 - RNA, 19 nt, Artificial Sequence
  Description of Artificial Sequence: Synthetic oligonucleotide
aaccaguuagugaccaagu

SEQ ID NO: 2038137 - RNA, 19 nt, Artificial Sequence
  Description of Artificial Sequence: Synthetic oligonucleotide
acaguguuugugccacaag

SEQ ID NO: 2038138 - RNA, 19 nt, Artificial Sequence
  Description of Artificial Sequence: Synthetic oligonucleotide
cuuuaucccagacccucug

SEQ ID NO: 2038139 - RNA, 19 nt, Artificial Sequence
  Description of Artificial Sequence: Synthetic oligonucleotide
ggaaguuuggacaccgcag

SEQ ID NO: 2038140 - RNA, 19 nt, Artificial Sequence
  Description of Artificial Sequence: Synthetic oligonucleotide
ucgauggccuugcucacaa

SEQ ID NO: 2038141 - RNA, 19 nt, Artificial Sequence
  Description of Artificial Sequence: Synthetic oligonucleotide
uccggcuccaucggaaaag

SEQ ID NO: 2038142 - RNA, 19 nt, Artificial Sequence
  Description of Artificial Sequence: Synthetic oligonucleotide
aaguuucucugagagucau

SEQ ID NO: 2038143 - RNA, 19 nt, Artificial Sequence
  Description of Artificial Sequence: Synthetic oligonucleotide
ugcuaugcaacugcuucac

SEQ ID NO: 2038144 - RNA, 19 nt, Artificial Sequence
  Description of Artificial Sequence: Synthetic oligonucleotide
acucaggcaggcaucccgc

SEQ ID NO: 2038145 - RNA, 19 nt, Artificial Sequence
  Description of Artificial Sequence: Synthetic oligonucleotide
cucauaguagacugagcga

SEQ ID NO: 2038146 - RNA, 19 nt, Artificial Sequence
  Description of Artificial Sequence: Synthetic oligonucleotide
ucaccugggcgugagaguc

SEQ ID NO: 2038147 - RNA, 19 nt, Artificial Sequence
  Description of Artificial Sequence: Synthetic oligonucleotide
cacgaaacccaacuuucuc

SEQ ID NO: 2038148 - RNA, 19 nt, Artificial Sequence
  Description of Artificial Sequence: Synthetic oligonucleotide
caccgggugagccaguaac

SEQ ID NO: 2038149 - RNA, 19 nt, Artificial Sequence
  Description of Artificial Sequence: Synthetic oligonucleotide
uucaaccugagggguggcg

SEQ ID NO: 2038150 - RNA, 19 nt, Artificial Sequence
  Description of Artificial Sequence: Synthetic oligonucleotide
aggacgucagaguacugau

SEQ ID NO: 2038151 - RNA, 19 nt, Artificial Sequence
  Description of Artificial Sequence: Synthetic oligonucleotide
ucaaugccaugacuuuuau

SEQ ID NO: 2038152 - RNA, 19 nt, Artificial Sequence
  Description of Artificial Sequence: Synthetic oligonucleotide
agcgaaaguuucucugaga

SEQ ID NO: 2038153 - RNA, 19 nt, Artificial Sequence
  Description of Artificial Sequence: Synthetic oligonucleotide
ccagauucaaguacuguuc

SEQ ID NO: 2038154 - RNA, 19 nt, Artificial Sequence
  Description of Artificial Sequence: Synthetic oligonucleotide
cuuacaggauccacugaca

SEQ ID NO: 2038155 - RNA, 19 nt, Artificial Sequence
  Description of Artificial Sequence: Synthetic oligonucleotide
cagcagccuacuaucuucc

SEQ ID NO: 2038156 - RNA, 19 nt, Artificial Sequence
  Description of Artificial Sequence: Synthetic oligonucleotide
uucgaaagccuugggcagc

SEQ ID NO: 2038157 - RNA, 19 nt, Artificial Sequence
  Description of Artificial Sequence: Synthetic oligonucleotide
cagccuacuaucuuccaga

SEQ ID NO: 2038158 - RNA, 19 nt, Artificial Sequence
  Description of Artificial Sequence: Synthetic oligonucleotide
acucaagcugauacaugcg

SEQ ID NO: 2038159 - RNA, 19 nt, Artificial Sequence
  Description of Artificial Sequence: Synthetic oligonucleotide
aaguacuguucgaaagccu

SEQ ID NO: 2038160 - RNA, 19 nt, Artificial Sequence
  Description of Artificial Sequence: Synthetic oligonucleotide
cuaagagauccggggaggc

SEQ ID NO: 2038161 - RNA, 19 nt, Artificial Sequence
  Description of Artificial Sequence: Synthetic oligonucleotide
aucggaaaagaggggcuuc

SEQ ID NO: 2038162 - RNA, 19 nt, Artificial Sequence
  Description of Artificial Sequence: Synthetic oligonucleotide
ucaaccugagggguggcgu

SEQ ID NO: 2038163 - RNA, 19 nt, Artificial Sequence
  Description of Artificial Sequence: Synthetic oligonucleotide
aucuuugcgauaggccauc

SEQ ID NO: 2038164 - RNA, 19 nt, Artificial Sequence
  Description of Artificial Sequence: Synthetic oligonucleotide
agcggacuacugucagggc

SEQ ID NO: 2038165 - RNA, 19 nt, Artificial Sequence
  Description of Artificial Sequence: Synthetic oligonucleotide
aacuugcuaugcaacugcu

SEQ ID NO: 2038166 - RNA, 19 nt, Artificial Sequence
  Description of Artificial Sequence: Synthetic oligonucleotide
aguacugaucuuugcgaua

SEQ ID NO: 2038167 - RNA, 19 nt, Artificial Sequence
  Description of Artificial Sequence: Synthetic oligonucleotide
cccucuguaaacuggacuc

SEQ ID NO: 2038168 - RNA, 19 nt, Artificial Sequence
  Description of Artificial Sequence: Synthetic oligonucleotide
guggcgucacugaugaagc

SEQ ID NO: 2038169 - RNA, 19 nt, Artificial Sequence
  Description of Artificial Sequence: Synthetic oligonucleotide
acaugcgaagauacacuuc

SEQ ID NO: 2038170 - RNA, 19 nt, Artificial Sequence
  Description of Artificial Sequence: Synthetic oligonucleotide
cccagacucaagcugauac

SEQ ID NO: 2038171 - RNA, 19 nt, Artificial Sequence
  Description of Artificial Sequence: Synthetic oligonucleotide
ggcaaaaucccuagaagca

SEQ ID NO: 2038172 - RNA, 19 nt, Artificial Sequence
  Description of Artificial Sequence: Synthetic oligonucleotide
gucagaguacugaucuuug

SEQ ID NO: 2038173 - RNA, 19 nt, Artificial Sequence
  Description of Artificial Sequence: Synthetic oligonucleotide
aggugucccacaguguuug

SEQ ID NO: 2038174 - RNA, 19 nt, Artificial Sequence
  Description of Artificial Sequence: Synthetic oligonucleotide
gcgauaggccaucaccugg

SEQ ID NO: 2038175 - RNA, 19 nt, Artificial Sequence
  Description of Artificial Sequence: Synthetic oligonucleotide
ggccuugcucacaauagcg

SEQ ID NO: 2038176 - RNA, 19 nt, Artificial Sequence
  Description of Artificial Sequence: Synthetic oligonucleotide
ggaggcaaaaucccuagaa

SEQ ID NO: 2038177 - RNA, 19 nt, Artificial Sequence
  Description of Artificial Sequence: Synthetic oligonucleotide
ugcacgguacauggauggg

SEQ ID NO: 2038178 - RNA, 19 nt, Artificial Sequence
  Description of Artificial Sequence: Synthetic oligonucleotide
caaacacuaggaucuuaca

SEQ ID NO: 2038179 - RNA, 19 nt, Artificial Sequence
  Description of Artificial Sequence: Synthetic oligonucleotide
cuuucucauaguagacuga

SEQ ID NO: 2038180 - RNA, 19 nt, Artificial Sequence
  Description of Artificial Sequence: Synthetic oligonucleotide
cccggguucagacuaagag

SEQ ID NO: 2038181 - RNA, 19 nt, Artificial Sequence
  Description of Artificial Sequence: Synthetic oligonucleotide
cacacuguucaaugccaug

SEQ ID NO: 2038182 - RNA, 19 nt, Artificial Sequence
  Description of Artificial Sequence: Synthetic oligonucleotide
acagagugcucagggagug

SEQ ID NO: 2038183 - RNA, 19 nt, Artificial Sequence
  Description of Artificial Sequence: Synthetic oligonucleotide
gacugagcgaaaguuucuc

SEQ ID NO: 2038184 - RNA, 19 nt, Artificial Sequence
  Description of Artificial Sequence: Synthetic oligonucleotide
caagucgauggccuugcuc

SEQ ID NO: 2038185 - RNA, 19 nt, Artificial Sequence
  Description of Artificial Sequence: Synthetic oligonucleotide
acgaagucacaaguuguca

SEQ ID NO: 2038186 - RNA, 19 nt, Artificial Sequence
  Description of Artificial Sequence: Synthetic oligonucleotide
uuugugccacaagucgaug

SEQ ID NO: 2038187 - RNA, 19 nt, Artificial Sequence
  Description of Artificial Sequence: Synthetic oligonucleotide
aucuuacaggauccacuga

SEQ ID NO: 2038188 - RNA, 19 nt, Artificial Sequence
  Description of Artificial Sequence: Synthetic oligonucleotide
acccaacuuucucauagua

SEQ ID NO: 2038189 - RNA, 19 nt, Artificial Sequence
  Description of Artificial Sequence: Synthetic oligonucleotide
gaaucccggaacuugcuau

SEQ ID NO: 2038190 - RNA, 19 nt, Artificial Sequence
  Description of Artificial Sequence: Synthetic oligonucleotide
agagaucauaaggaaguuu

SEQ ID NO: 2038191 - RNA, 19 nt, Artificial Sequence
  Description of Artificial Sequence: Synthetic oligonucleotide
ugaaggugcaaagcuucuc

SEQ ID NO: 2038192 - RNA, 19 nt, Artificial Sequence
  Description of Artificial Sequence: Synthetic oligonucleotide
gucccacaguguuugugcc

SEQ ID NO: 2038193 - RNA, 19 nt, Artificial Sequence
  Description of Artificial Sequence: Synthetic oligonucleotide
acuacugucagggcaugaa

SEQ ID NO: 2038194 - RNA, 19 nt, Artificial Sequence
  Description of Artificial Sequence: Synthetic oligonucleotide
guuagugaccaagugacau

SEQ ID NO: 2038195 - RNA, 19 nt, Artificial Sequence
  Description of Artificial Sequence: Synthetic oligonucleotide
gggcgugagagucauggug

SEQ ID NO: 2038196 - RNA, 19 nt, Artificial Sequence
  Description of Artificial Sequence: Synthetic oligonucleotide
gccaguaacagucaaugcu

SEQ ID NO: 2038197 - RNA, 19 nt, Artificial Sequence
  Description of Artificial Sequence: Synthetic oligonucleotide
acacuucaaccugaggggu

SEQ ID NO: 2038198 - RNA, 19 nt, Artificial Sequence
  Description of Artificial Sequence: Synthetic oligonucleotide
uggcgauggcaagaaagac

SEQ ID NO: 2038199 - RNA, 19 nt, Artificial Sequence
  Description of Artificial Sequence: Synthetic oligonucleotide
guacuguucgaaagccuug

SEQ ID NO: 2038200 - RNA, 19 nt, Artificial Sequence
  Description of Artificial Sequence: Synthetic oligonucleotide
ucgaggcaacuucccagac

SEQ ID NO: 2038201 - RNA, 19 nt, Artificial Sequence
  Description of Artificial Sequence: Synthetic oligonucleotide
gaguacugaucuuugcgau

SEQ ID NO: 2038202 - RNA, 19 nt, Artificial Sequence
  Description of Artificial Sequence: Synthetic oligonucleotide
gcagccuacuaucuuccag

SEQ ID NO: 2038203 - RNA, 19 nt, Artificial Sequence
  Description of Artificial Sequence: Synthetic oligonucleotide
uccuccggcuccaucggaa

SEQ ID NO: 2038204 - RNA, 19 nt, Artificial Sequence
  Description of Artificial Sequence: Synthetic oligonucleotide
uagcgucugagcuguccug

SEQ ID NO: 2038205 - RNA, 19 nt, Artificial Sequence
  Description of Artificial Sequence: Synthetic oligonucleotide
caguguuugugccacaagu

SEQ ID NO: 2038206 - RNA, 19 nt, Artificial Sequence
  Description of Artificial Sequence: Synthetic oligonucleotide
cauccuccggcuccaucgg

SEQ ID NO: 2038207 - RNA, 19 nt, Artificial Sequence
  Description of Artificial Sequence: Synthetic oligonucleotide
gggcaggugucccacagug

SEQ ID NO: 2038208 - RNA, 19 nt, Artificial Sequence
  Description of Artificial Sequence: Synthetic oligonucleotide
agccuacuaucuuccagau

SEQ ID NO: 2038209 - RNA, 19 nt, Artificial Sequence
  Description of Artificial Sequence: Synthetic oligonucleotide
ugagcaccacagcaagauu

SEQ ID NO: 2038210 - RNA, 19 nt, Artificial Sequence
  Description of Artificial Sequence: Synthetic oligonucleotide
cuuugcgauaggccaucac

SEQ ID NO: 2038211 - RNA, 19 nt, Artificial Sequence
  Description of Artificial Sequence: Synthetic oligonucleotide
ucaggugacucagcagccu

SEQ ID NO: 2038212 - RNA, 19 nt, Artificial Sequence
  Description of Artificial Sequence: Synthetic oligonucleotide
cucuguuaucuucuccaca

SEQ ID NO: 2038213 - RNA, 19 nt, Artificial Sequence
  Description of Artificial Sequence: Synthetic oligonucleotide
cuugcucacaauagcgucu

SEQ ID NO: 2038214 - RNA, 19 nt, Artificial Sequence
  Description of Artificial Sequence: Synthetic oligonucleotide
cuacuaucuuccagauuca

SEQ ID NO: 2038215 - RNA, 19 nt, Artificial Sequence
  Description of Artificial Sequence: Synthetic oligonucleotide
caccgcagaacaugucuuc

SEQ ID NO: 2038216 - RNA, 19 nt, Artificial Sequence
  Description of Artificial Sequence: Synthetic oligonucleotide
augaagcggacuacuguca

SEQ ID NO: 2038217 - RNA, 19 nt, Artificial Sequence
  Description of Artificial Sequence: Synthetic oligonucleotide
acuccacgaaacccaacuu

SEQ ID NO: 2038218 - RNA, 19 nt, Artificial Sequence
  Description of Artificial Sequence: Synthetic oligonucleotide
ucgaaagccuugggcagcu

SEQ ID NO: 2038219 - RNA, 19 nt, Artificial Sequence
  Description of Artificial Sequence: Synthetic oligonucleotide
cauaguagacugagcgaaa

SEQ ID NO: 2038220 - RNA, 19 nt, Artificial Sequence
  Description of Artificial Sequence: Synthetic oligonucleotide
gaugggagagggaaccucu

SEQ ID NO: 2038221 - RNA, 19 nt, Artificial Sequence
  Description of Artificial Sequence: Synthetic oligonucleotide
ggggcuucgaggcaacuuc

SEQ ID NO: 2038222 - RNA, 19 nt, Artificial Sequence
  Description of Artificial Sequence: Synthetic oligonucleotide
aaccugagggguggcguca

SEQ ID NO: 2038223 - RNA, 19 nt, Artificial Sequence
  Description of Artificial Sequence: Synthetic oligonucleotide
gguaaggaaucccggaacu

SEQ ID NO: 2038224 - RNA, 19 nt, Artificial Sequence
  Description of Artificial Sequence: Synthetic oligonucleotide
accgcagaacaugucuuca

SEQ ID NO: 2038225 - RNA, 19 nt, Artificial Sequence
  Description of Artificial Sequence: Synthetic oligonucleotide
gggguggcgucacugauga

SEQ ID NO: 2038226 - RNA, 19 nt, Artificial Sequence
  Description of Artificial Sequence: Synthetic oligonucleotide
aguuagugaccaagugaca

SEQ ID NO: 2038227 - RNA, 19 nt, Artificial Sequence
  Description of Artificial Sequence: Synthetic oligonucleotide
agcgucugagcuguccuga

SEQ ID NO: 2038228 - RNA, 19 nt, Artificial Sequence
  Description of Artificial Sequence: Synthetic oligonucleotide
ccaguaacagucaaugcua

SEQ ID NO: 2038229 - RNA, 19 nt, Artificial Sequence
  Description of Artificial Sequence: Synthetic oligonucleotide
caaccugagggguggcguc

SEQ ID NO: 2038230 - RNA, 19 nt, Artificial Sequence
  Description of Artificial Sequence: Synthetic oligonucleotide
cagucauauuucauucuua

SEQ ID NO: 2038231 - RNA, 19 nt, Artificial Sequence
  Description of Artificial Sequence: Synthetic oligonucleotide
cagcugagguaaggaaucc

SEQ ID NO: 2038232 - RNA, 19 nt, Artificial Sequence
  Description of Artificial Sequence: Synthetic oligonucleotide
caaugcacgguacauggau

SEQ ID NO: 2038233 - RNA, 19 nt, Artificial Sequence
  Description of Artificial Sequence: Synthetic oligonucleotide
caggcaucccgcgaagcac

SEQ ID NO: 2038234 - RNA, 19 nt, Artificial Sequence
  Description of Artificial Sequence: Synthetic oligonucleotide
gaaacccaacuuucucaua

SEQ ID NO: 2038235 - RNA, 19 nt, Artificial Sequence
  Description of Artificial Sequence: Synthetic oligonucleotide
uucccagacucaagcugau

SEQ ID NO: 2038236 - RNA, 19 nt, Artificial Sequence
  Description of Artificial Sequence: Synthetic oligonucleotide
ucuuugcgauaggccauca

SEQ ID NO: 2038237 - RNA, 19 nt, Artificial Sequence
  Description of Artificial Sequence: Synthetic oligonucleotide
gcaacugcuucacgaagca

SEQ ID NO: 2038238 - RNA, 19 nt, Artificial Sequence
  Description of Artificial Sequence: Synthetic oligonucleotide
agacugagcgaaaguuucu

SEQ ID NO: 2038239 - RNA, 19 nt, Artificial Sequence
  Description of Artificial Sequence: Synthetic oligonucleotide
acgguacauggaugggaga

SEQ ID NO: 2038240 - RNA, 19 nt, Artificial Sequence
  Description of Artificial Sequence: Synthetic oligonucleotide
agcagccuacuaucuucca

SEQ ID NO: 2038241 - RNA, 19 nt, Artificial Sequence
  Description of Artificial Sequence: Synthetic oligonucleotide
gcggacuacugucagggca

SEQ ID NO: 2038242 - RNA, 19 nt, Artificial Sequence
  Description of Artificial Sequence: Synthetic oligonucleotide
auggcaagaaagacuucau

SEQ ID NO: 2038243 - RNA, 19 nt, Artificial Sequence
  Description of Artificial Sequence: Synthetic oligonucleotide
ugggcgugagagucauggu

SEQ ID NO: 2038244 - RNA, 19 nt, Artificial Sequence
  Description of Artificial Sequence: Synthetic oligonucleotide
gugucccacaguguuugug

SEQ ID NO: 2038245 - RNA, 19 nt, Artificial Sequence
  Description of Artificial Sequence: Synthetic oligonucleotide
ccggaacuugcuaugcaac

SEQ ID NO: 2038246 - RNA, 19 nt, Artificial Sequence
  Description of Artificial Sequence: Synthetic oligonucleotide
ugcucacaauagcgucuga

SEQ ID NO: 2038247 - RNA, 19 nt, Artificial Sequence
  Description of Artificial Sequence: Synthetic oligonucleotide
caacuccacgaaacccaac

SEQ ID NO: 2038248 - RNA, 19 nt, Artificial Sequence
  Description of Artificial Sequence: Synthetic oligonucleotide
uggaugggagagggaaccu

SEQ ID NO: 2038249 - RNA, 19 nt, Artificial Sequence
  Description of Artificial Sequence: Synthetic oligonucleotide
gguuggcacuuugagcacc

SEQ ID NO: 2038250 - RNA, 19 nt, Artificial Sequence
  Description of Artificial Sequence: Synthetic oligonucleotide
guuggcacuuugagcacca

SEQ ID NO: 2038251 - RNA, 19 nt, Artificial Sequence
  Description of Artificial Sequence: Synthetic oligonucleotide
cgaagauacacuucaaccu

SEQ ID NO: 2038252 - RNA, 19 nt, Artificial Sequence
  Description of Artificial Sequence: Synthetic oligonucleotide
ggauccacugacaacuuua

SEQ ID NO: 2038253 - RNA, 19 nt, Artificial Sequence
  Description of Artificial Sequence: Synthetic oligonucleotide
gugagccaguaacagucaa

SEQ ID NO: 2038254 - RNA, 19 nt, Artificial Sequence
  Description of Artificial Sequence: Synthetic oligonucleotide
acaagucgauggccuugcu

SEQ ID NO: 2038255 - RNA, 19 nt, Artificial Sequence
  Description of Artificial Sequence: Synthetic oligonucleotide
ccggguucagacuaagaga

SEQ ID NO: 2038256 - RNA, 19 nt, Artificial Sequence
  Description of Artificial Sequence: Synthetic oligonucleotide
agaggggcuucgaggcaac

SEQ ID NO: 2038257 - RNA, 19 nt, Artificial Sequence
  Description of Artificial Sequence: Synthetic oligonucleotide
caacugcuucacgaagcac

SEQ ID NO: 2038258 - RNA, 19 nt, Artificial Sequence
  Description of Artificial Sequence: Synthetic oligonucleotide
gaucuuugcgauaggccau

SEQ ID NO: 2038259 - RNA, 19 nt, Artificial Sequence
  Description of Artificial Sequence: Synthetic oligonucleotide
ugcccggguucagacuaag

SEQ ID NO: 2038260 - RNA, 19 nt, Artificial Sequence
  Description of Artificial Sequence: Synthetic oligonucleotide
accgggugagccaguaaca

SEQ ID NO: 2038261 - RNA, 19 nt, Artificial Sequence
  Description of Artificial Sequence: Synthetic oligonucleotide
cuaaccaguuagugaccaa

SEQ ID NO: 2038262 - RNA, 19 nt, Artificial Sequence
  Description of Artificial Sequence: Synthetic oligonucleotide
guagacugagcgaaaguuu

SEQ ID NO: 2038263 - RNA, 19 nt, Artificial Sequence
  Description of Artificial Sequence: Synthetic oligonucleotide
ucccgcgaagcaccuuuua

SEQ ID NO: 2038264 - RNA, 19 nt, Artificial Sequence
  Description of Artificial Sequence: Synthetic oligonucleotide
cagacucaagcugauacau

SEQ ID NO: 2038265 - RNA, 19 nt, Artificial Sequence
  Description of Artificial Sequence: Synthetic oligonucleotide
ccgcagaacaugucuucag

SEQ ID NO: 2038266 - RNA, 19 nt, Artificial Sequence
  Description of Artificial Sequence: Synthetic oligonucleotide
acgucagaguacugaucuu

SEQ ID NO: 2038267 - RNA, 19 nt, Artificial Sequence
  Description of Artificial Sequence: Synthetic oligonucleotide
ccauaccaaugcacgguac

SEQ ID NO: 2038268 - RNA, 19 nt, Artificial Sequence
  Description of Artificial Sequence: Synthetic oligonucleotide
acaccgcagaacaugucuu

SEQ ID NO: 2038269 - RNA, 19 nt, Artificial Sequence
  Description of Artificial Sequence: Synthetic oligonucleotide
acuugcuaugcaacugcuu

SEQ ID NO: 2038270 - RNA, 19 nt, Artificial Sequence
  Description of Artificial Sequence: Synthetic oligonucleotide
ccagacucaagcugauaca

SEQ ID NO: 2038271 - RNA, 19 nt, Artificial Sequence
  Description of Artificial Sequence: Synthetic oligonucleotide
gacuacugucagggcauga

SEQ ID NO: 2038272 - RNA, 19 nt, Artificial Sequence
  Description of Artificial Sequence: Synthetic oligonucleotide
caggcaggcaucccgcgaa

SEQ ID NO: 2038273 - RNA, 19 nt, Artificial Sequence
  Description of Artificial Sequence: Synthetic oligonucleotide
cugcuucacgaagcaccgg

SEQ ID NO: 2038274 - RNA, 19 nt, Artificial Sequence
  Description of Artificial Sequence: Synthetic oligonucleotide
ggaggauuuccagugauuu

SEQ ID NO: 2038275 - RNA, 19 nt, Artificial Sequence
  Description of Artificial Sequence: Synthetic oligonucleotide
cuccacgaaacccaacuuu

SEQ ID NO: 2038276 - RNA, 19 nt, Artificial Sequence
  Description of Artificial Sequence: Synthetic oligonucleotide
cagcaagauucccauuucu

SEQ ID NO: 2038277 - RNA, 19 nt, Artificial Sequence
  Description of Artificial Sequence: Synthetic oligonucleotide
caguaacagucaaugcuau

SEQ ID NO: 2038278 - RNA, 19 nt, Artificial Sequence
  Description of Artificial Sequence: Synthetic oligonucleotide
acaaguugucaggcugaau

SEQ ID NO: 2038279 - RNA, 19 nt, Artificial Sequence
  Description of Artificial Sequence: Synthetic oligonucleotide
ggcaacuucccagacucaa

SEQ ID NO: 2038280 - RNA, 19 nt, Artificial Sequence
  Description of Artificial Sequence: Synthetic oligonucleotide
accaagugacauggacaga

SEQ ID NO: 2038281 - RNA, 19 nt, Artificial Sequence
  Description of Artificial Sequence: Synthetic oligonucleotide
gcgugagagucauggugug

SEQ ID NO: 2038282 - RNA, 19 nt, Artificial Sequence
  Description of Artificial Sequence: Synthetic oligonucleotide
aggaggauuuccagugauu

SEQ ID NO: 2038283 - RNA, 19 nt, Artificial Sequence
  Description of Artificial Sequence: Synthetic oligonucleotide
gcuauccuccaccaucucu

SEQ ID NO: 2038284 - RNA, 19 nt, Artificial Sequence
  Description of Artificial Sequence: Synthetic oligonucleotide
cacgaagcaccgggugagc

SEQ ID NO: 2038285 - RNA, 19 nt, Artificial Sequence
  Description of Artificial Sequence: Synthetic oligonucleotide
ggcgauggcaagaaagacu

SEQ ID NO: 2038286 - RNA, 19 nt, Artificial Sequence
  Description of Artificial Sequence: Synthetic oligonucleotide
ggcgugagagucauggugu

SEQ ID NO: 2038287 - RNA, 19 nt, Artificial Sequence
  Description of Artificial Sequence: Synthetic oligonucleotide
gcgauggcaagaaagacuu

SEQ ID NO: 2038288 - RNA, 19 nt, Artificial Sequence
  Description of Artificial Sequence: Synthetic oligonucleotide
ggaaucccggaacuugcua

SEQ ID NO: 2038289 - RNA, 19 nt, Artificial Sequence
  Description of Artificial Sequence: Synthetic oligonucleotide
caggugacucagcagccua

SEQ ID NO: 2038290 - RNA, 19 nt, Artificial Sequence
  Description of Artificial Sequence: Synthetic oligonucleotide
ggcuucgaggcaacuuccc

SEQ ID NO: 2038291 - RNA, 19 nt, Artificial Sequence
  Description of Artificial Sequence: Synthetic oligonucleotide
ggaugggagagggaaccuc

SEQ ID NO: 2038292 - RNA, 19 nt, Artificial Sequence
  Description of Artificial Sequence: Synthetic oligonucleotide
gucaucagucauauuucau

SEQ ID NO: 2038293 - RNA, 19 nt, Artificial Sequence
  Description of Artificial Sequence: Synthetic oligonucleotide
accugggcgugagagucau

SEQ ID NO: 2038294 - RNA, 19 nt, Artificial Sequence
  Description of Artificial Sequence: Synthetic oligonucleotide
gucaucuuucaggaggauu

SEQ ID NO: 2038295 - RNA, 19 nt, Artificial Sequence
  Description of Artificial Sequence: Synthetic oligonucleotide
ggguuggcacuuugagcac

SEQ ID NO: 2038296 - RNA, 19 nt, Artificial Sequence
  Description of Artificial Sequence: Synthetic oligonucleotide
aggggcuucgaggcaacuu

SEQ ID NO: 2038297 - RNA, 19 nt, Artificial Sequence
  Description of Artificial Sequence: Synthetic oligonucleotide
gcgucugagcuguccugag

SEQ ID NO: 2038298 - RNA, 19 nt, Artificial Sequence
  Description of Artificial Sequence: Synthetic oligonucleotide
gcaggugucccacaguguu

SEQ ID NO: 2038299 - RNA, 19 nt, Artificial Sequence
  Description of Artificial Sequence: Synthetic oligonucleotide
gucgauggccuugcucaca

SEQ ID NO: 2038300 - RNA, 19 nt, Artificial Sequence
  Description of Artificial Sequence: Synthetic oligonucleotide
augcgaagauacacuucaa

SEQ ID NO: 2038301 - RNA, 19 nt, Artificial Sequence
  Description of Artificial Sequence: Synthetic oligonucleotide
cuuuggcgauggcaagaaa

SEQ ID NO: 2038302 - RNA, 19 nt, Artificial Sequence
  Description of Artificial Sequence: Synthetic oligonucleotide
guguggaggcaaaaucccu

SEQ ID NO: 2038303 - RNA, 19 nt, Artificial Sequence
  Description of Artificial Sequence: Synthetic oligonucleotide
ccgcgaagcaccuuuuaaa

SEQ ID NO: 2038304 - RNA, 19 nt, Artificial Sequence
  Description of Artificial Sequence: Synthetic oligonucleotide
cacaaguugucaggcugaa

SEQ ID NO: 2038305 - RNA, 19 nt, Artificial Sequence
  Description of Artificial Sequence: Synthetic oligonucleotide
ggacgucagaguacugauc

SEQ ID NO: 2038306 - RNA, 19 nt, Artificial Sequence
  Description of Artificial Sequence: Synthetic oligonucleotide
cggguucagacuaagagau

SEQ ID NO: 2038307 - RNA, 19 nt, Artificial Sequence
  Description of Artificial Sequence: Synthetic oligonucleotide
ucccagacucaagcugaua

SEQ ID NO: 2038308 - RNA, 19 nt, Artificial Sequence
  Description of Artificial Sequence: Synthetic oligonucleotide
guaaggaaucccggaacuu

SEQ ID NO: 2038309 - RNA, 19 nt, Artificial Sequence
  Description of Artificial Sequence: Synthetic oligonucleotide
gcuuuggcgauggcaagaa

SEQ ID NO: 2038310 - RNA, 19 nt, Artificial Sequence
  Description of Artificial Sequence: Synthetic oligonucleotide
caucccgcgaagcaccuuu

SEQ ID NO: 2038311 - RNA, 19 nt, Artificial Sequence
  Description of Artificial Sequence: Synthetic oligonucleotide
caauagcgucugagcuguc

SEQ ID NO: 2038312 - RNA, 19 nt, Artificial Sequence
  Description of Artificial Sequence: Synthetic oligonucleotide
ccacgaagucacaaguugu

SEQ ID NO: 2038313 - RNA, 19 nt, Artificial Sequence
  Description of Artificial Sequence: Synthetic oligonucleotide
agcaccgggugagccagua

SEQ ID NO: 2038314 - RNA, 19 nt, Artificial Sequence
  Description of Artificial Sequence: Synthetic oligonucleotide
ggcaggcaucccgcgaagc

SEQ ID NO: 2038315 - RNA, 19 nt, Artificial Sequence
  Description of Artificial Sequence: Synthetic oligonucleotide
cuccggcuccaucggaaaa

SEQ ID NO: 2038316 - RNA, 19 nt, Artificial Sequence
  Description of Artificial Sequence: Synthetic oligonucleotide
ucagggcaugaaggacguc

SEQ ID NO: 2038317 - RNA, 19 nt, Artificial Sequence
  Description of Artificial Sequence: Synthetic oligonucleotide
ccaugacuuuuauuuuaaa

SEQ ID NO: 2038318 - RNA, 19 nt, Artificial Sequence
  Description of Artificial Sequence: Synthetic oligonucleotide
aggcaacuucccagacuca

SEQ ID NO: 2038319 - RNA, 19 nt, Artificial Sequence
  Description of Artificial Sequence: Synthetic oligonucleotide
ggagugccugcagacuguc

SEQ ID NO: 2038320 - RNA, 19 nt, Artificial Sequence
  Description of Artificial Sequence: Synthetic oligonucleotide
ccaaugcacgguacaugga

SEQ ID NO: 2038321 - RNA, 19 nt, Artificial Sequence
  Description of Artificial Sequence: Synthetic oligonucleotide
ggguucagacuaagagauc

SEQ ID NO: 2038322 - RNA, 19 nt, Artificial Sequence
  Description of Artificial Sequence: Synthetic oligonucleotide
ccaucggaaaagaggggcu

SEQ ID NO: 2038323 - RNA, 19 nt, Artificial Sequence
  Description of Artificial Sequence: Synthetic oligonucleotide
gccuugcucacaauagcgu

SEQ ID NO: 2038324 - RNA, 19 nt, Artificial Sequence
  Description of Artificial Sequence: Synthetic oligonucleotide
caaugcuauccuccaccau

SEQ ID NO: 2038325 - RNA, 19 nt, Artificial Sequence
  Description of Artificial Sequence: Synthetic oligonucleotide
ggacucaggcaggcauccc

SEQ ID NO: 2038326 - RNA, 19 nt, Artificial Sequence
  Description of Artificial Sequence: Synthetic oligonucleotide
aagcaccgggugagccagu

SEQ ID NO: 2038327 - RNA, 19 nt, Artificial Sequence
  Description of Artificial Sequence: Synthetic oligonucleotide
ccacgaaacccaacuuucu

SEQ ID NO: 2038328 - RNA, 19 nt, Artificial Sequence
  Description of Artificial Sequence: Synthetic oligonucleotide
caggugucccacaguguuu

SEQ ID NO: 2038329 - RNA, 19 nt, Artificial Sequence
  Description of Artificial Sequence: Synthetic oligonucleotide
cggcuccaucggaaaagag

SEQ ID NO: 2038330 - RNA, 19 nt, Artificial Sequence
  Description of Artificial Sequence: Synthetic oligonucleotide
ccugcagacuguccacgaa

SEQ ID NO: 2038331 - RNA, 19 nt, Artificial Sequence
  Description of Artificial Sequence: Synthetic oligonucleotide
aucccgcgaagcaccuuuu

SEQ ID NO: 2038332 - RNA, 19 nt, Artificial Sequence
  Description of Artificial Sequence: Synthetic oligonucleotide
gcuucacgaagcaccgggu

SEQ ID NO: 2038333 - RNA, 19 nt, Artificial Sequence
  Description of Artificial Sequence: Synthetic oligonucleotide
ccuccggcuccaucggaaa

SEQ ID NO: 2038334 - RNA, 19 nt, Artificial Sequence
  Description of Artificial Sequence: Synthetic oligonucleotide
ccacacuguucaaugccau

SEQ ID NO: 2038335 - RNA, 19 nt, Artificial Sequence
  Description of Artificial Sequence: Synthetic oligonucleotide
cggacuacugucagggcau

SEQ ID NO: 2038336 - RNA, 19 nt, Artificial Sequence
  Description of Artificial Sequence: Synthetic oligonucleotide
gggagugccugcagacugu

SEQ ID NO: 2038337 - RNA, 19 nt, Artificial Sequence
  Description of Artificial Sequence: Synthetic oligonucleotide
cccuagaagcaccuuccau

SEQ ID NO: 2038338 - RNA, 19 nt, Artificial Sequence
  Description of Artificial Sequence: Synthetic oligonucleotide
ggcaggugucccacagugu

SEQ ID NO: 2038339 - RNA, 19 nt, Artificial Sequence
  Description of Artificial Sequence: Synthetic oligonucleotide
gcaccgggugagccaguaa

SEQ ID NO: 2038340 - RNA, 19 nt, Artificial Sequence
  Description of Artificial Sequence: Synthetic oligonucleotide
gccuacuaucuuccagauu

SEQ ID NO: 2038341 - RNA, 19 nt, Artificial Sequence
  Description of Artificial Sequence: Synthetic oligonucleotide
ccugggcgugagagucaug

SEQ ID NO: 2038342 - RNA, 19 nt, Artificial Sequence
  Description of Artificial Sequence: Synthetic oligonucleotide
gcccggguucagacuaaga

SEQ ID NO: 2038343 - RNA, 19 nt, Artificial Sequence
  Description of Artificial Sequence: Synthetic oligonucleotide
cgaggcaacuucccagacu

SEQ ID NO: 2038344 - RNA, 19 nt, Artificial Sequence
  Description of Artificial Sequence: Synthetic oligonucleotide
ggcaucccgcgaagcaccu

SEQ ID NO: 2038345 - RNA, 19 nt, Artificial Sequence
  Description of Artificial Sequence: Synthetic oligonucleotide
ccacagcaagauucccauu

SEQ ID NO: 2038346 - RNA, 19 nt, Artificial Sequence
  Description of Artificial Sequence: Synthetic oligonucleotide
ccugagggguggcgucacu

SEQ ID NO: 2038347 - RNA, 19 nt, Artificial Sequence
  Description of Artificial Sequence: Synthetic oligonucleotide
gcaucccgcgaagcaccuu

SEQ ID NO: 2038348 - RNA, 19 nt, Artificial Sequence
  Description of Artificial Sequence: Synthetic oligonucleotide
uaagcuuguacaaugggcg

SEQ ID NO: 2038349 - RNA, 19 nt, Artificial Sequence
  Description of Artificial Sequence: Synthetic oligonucleotide
aagugaacaucuuuccugc

SEQ ID NO: 2038350 - RNA, 19 nt, Artificial Sequence
  Description of Artificial Sequence: Synthetic oligonucleotide
uggaagaaggcacugaccc

SEQ ID NO: 2038351 - RNA, 19 nt, Artificial Sequence
  Description of Artificial Sequence: Synthetic oligonucleotide
uuauuguucacagugaaga

SEQ ID NO: 2038352 - RNA, 19 nt, Artificial Sequence
  Description of Artificial Sequence: Synthetic oligonucleotide
aagauaaggccccugaaga

SEQ ID NO: 2038353 - RNA, 19 nt, Artificial Sequence
  Description of Artificial Sequence: Synthetic oligonucleotide
aagcauuccaccaacuccc

SEQ ID NO: 2038354 - RNA, 19 nt, Artificial Sequence
  Description of Artificial Sequence: Synthetic oligonucleotide
acaaugggcgaccacaugg

SEQ ID NO: 2038355 - RNA, 19 nt, Artificial Sequence
  Description of Artificial Sequence: Synthetic oligonucleotide
gaagugaacaucuuuccug

SEQ ID NO: 2038356 - RNA, 19 nt, Artificial Sequence
  Description of Artificial Sequence: Synthetic oligonucleotide
uaagucguaagcuuguaca

SEQ ID NO: 2038357 - RNA, 19 nt, Artificial Sequence
  Description of Artificial Sequence: Synthetic oligonucleotide
accaacucccuccagaagg

SEQ ID NO: 2038358 - RNA, 19 nt, Artificial Sequence
  Description of Artificial Sequence: Synthetic oligonucleotide
uggaauuugcugaugaggu

SEQ ID NO: 2038359 - RNA, 19 nt, Artificial Sequence
  Description of Artificial Sequence: Synthetic oligonucleotide
uggauggcagcaaucaccg

SEQ ID NO: 2038360 - RNA, 19 nt, Artificial Sequence
  Description of Artificial Sequence: Synthetic oligonucleotide
gaugaggucacggagauac

SEQ ID NO: 2038361 - RNA, 19 nt, Artificial Sequence
  Description of Artificial Sequence: Synthetic oligonucleotide
uuguucacagugaagauaa

SEQ ID NO: 2038362 - RNA, 19 nt, Artificial Sequence
  Description of Artificial Sequence: Synthetic oligonucleotide
ugaagaacuaagucguaag

SEQ ID NO: 2038363 - RNA, 19 nt, Artificial Sequence
  Description of Artificial Sequence: Synthetic oligonucleotide
aacauguuguccuuaucug

SEQ ID NO: 2038364 - RNA, 19 nt, Artificial Sequence
  Description of Artificial Sequence: Synthetic oligonucleotide
gaagcauuccaccaacucc

SEQ ID NO: 2038365 - RNA, 19 nt, Artificial Sequence
  Description of Artificial Sequence: Synthetic oligonucleotide
cacagugaagauaaggccc

SEQ ID NO: 2038366 - RNA, 19 nt, Artificial Sequence
  Description of Artificial Sequence: Synthetic oligonucleotide
gaagauaaggccccugaag

SEQ ID NO: 2038367 - RNA, 19 nt, Artificial Sequence
  Description of Artificial Sequence: Synthetic oligonucleotide
uuuauuguucacagugaag

SEQ ID NO: 2038368 - RNA, 19 nt, Artificial Sequence
  Description of Artificial Sequence: Synthetic oligonucleotide
ucgggaguagauuagguug

SEQ ID NO: 2038369 - RNA, 19 nt, Artificial Sequence
  Description of Artificial Sequence: Synthetic oligonucleotide
agacucauaguuguggccc

SEQ ID NO: 2038370 - RNA, 19 nt, Artificial Sequence
  Description of Artificial Sequence: Synthetic oligonucleotide
ugcgccauguccaugaugu

SEQ ID NO: 2038371 - RNA, 19 nt, Artificial Sequence
  Description of Artificial Sequence: Synthetic oligonucleotide
ugaacaucuuuccugcgcc

SEQ ID NO: 2038372 - RNA, 19 nt, Artificial Sequence
  Description of Artificial Sequence: Synthetic oligonucleotide
ucuuuccugcgccagagag

SEQ ID NO: 2038373 - RNA, 19 nt, Artificial Sequence
  Description of Artificial Sequence: Synthetic oligonucleotide
uugggaaaucuucuggaag

SEQ ID NO: 2038374 - RNA, 19 nt, Artificial Sequence
  Description of Artificial Sequence: Synthetic oligonucleotide
aaggucagcucguugacca

SEQ ID NO: 2038375 - RNA, 19 nt, Artificial Sequence
  Description of Artificial Sequence: Synthetic oligonucleotide
aagaacuaagucguaagcu

SEQ ID NO: 2038376 - RNA, 19 nt, Artificial Sequence
  Description of Artificial Sequence: Synthetic oligonucleotide
gaugucgauaccugaagug

SEQ ID NO: 2038377 - RNA, 19 nt, Artificial Sequence
  Description of Artificial Sequence: Synthetic oligonucleotide
guagucaaggcucucgucc

SEQ ID NO: 2038378 - RNA, 19 nt, Artificial Sequence
  Description of Artificial Sequence: Synthetic oligonucleotide
uguacaaugggcgaccaca

SEQ ID NO: 2038379 - RNA, 19 nt, Artificial Sequence
  Description of Artificial Sequence: Synthetic oligonucleotide
acaacagcccgacagucgg

SEQ ID NO: 2038380 - RNA, 19 nt, Artificial Sequence
  Description of Artificial Sequence: Synthetic oligonucleotide
cauuccaccaacucccucc

SEQ ID NO: 2038381 - RNA, 19 nt, Artificial Sequence
  Description of Artificial Sequence: Synthetic oligonucleotide
uuaucugggaacacacggc

SEQ ID NO: 2038382 - RNA, 19 nt, Artificial Sequence
  Description of Artificial Sequence: Synthetic oligonucleotide
gacuugauuauguccuggg

SEQ ID NO: 2038383 - RNA, 19 nt, Artificial Sequence
  Description of Artificial Sequence: Synthetic oligonucleotide
ucguaagcuuguacaaugg

SEQ ID NO: 2038384 - RNA, 19 nt, Artificial Sequence
  Description of Artificial Sequence: Synthetic oligonucleotide
auggauggcagcaaucacc

SEQ ID NO: 2038385 - RNA, 19 nt, Artificial Sequence
  Description of Artificial Sequence: Synthetic oligonucleotide
ugcuggaaaucucagccgc

SEQ ID NO: 2038386 - RNA, 19 nt, Artificial Sequence
  Description of Artificial Sequence: Synthetic oligonucleotide
ucugggaacacacggcuga

SEQ ID NO: 2038387 - RNA, 19 nt, Artificial Sequence
  Description of Artificial Sequence: Synthetic oligonucleotide
ugaagugaacaucuuuccu

SEQ ID NO: 2038388 - RNA, 19 nt, Artificial Sequence
  Description of Artificial Sequence: Synthetic oligonucleotide
acagugaagauaaggcccc

SEQ ID NO: 2038389 - RNA, 19 nt, Artificial Sequence
  Description of Artificial Sequence: Synthetic oligonucleotide
cugaagugaacaucuuucc

SEQ ID NO: 2038390 - RNA, 19 nt, Artificial Sequence
  Description of Artificial Sequence: Synthetic oligonucleotide
gacggacuugauuaugucc

SEQ ID NO: 2038391 - RNA, 19 nt, Artificial Sequence
  Description of Artificial Sequence: Synthetic oligonucleotide
cauaguuguggcccgagag

SEQ ID NO: 2038392 - RNA, 19 nt, Artificial Sequence
  Description of Artificial Sequence: Synthetic oligonucleotide
uuuugaccccugcacagcc

SEQ ID NO: 2038393 - RNA, 19 nt, Artificial Sequence
  Description of Artificial Sequence: Synthetic oligonucleotide
aaggcugcauucaacaugu

SEQ ID NO: 2038394 - RNA, 19 nt, Artificial Sequence
  Description of Artificial Sequence: Synthetic oligonucleotide
agaacuaagucguaagcuu

SEQ ID NO: 2038395 - RNA, 19 nt, Artificial Sequence
  Description of Artificial Sequence: Synthetic oligonucleotide
augagguccacaccugcac

SEQ ID NO: 2038396 - RNA, 19 nt, Artificial Sequence
  Description of Artificial Sequence: Synthetic oligonucleotide
gucguaagcuuguacaaug

SEQ ID NO: 2038397 - RNA, 19 nt, Artificial Sequence
  Description of Artificial Sequence: Synthetic oligonucleotide
guaagcuuguacaaugggc

SEQ ID NO: 2038398 - RNA, 19 nt, Artificial Sequence
  Description of Artificial Sequence: Synthetic oligonucleotide
ugaugucgauaccugaagu

SEQ ID NO: 2038399 - RNA, 19 nt, Artificial Sequence
  Description of Artificial Sequence: Synthetic oligonucleotide
aagucguaagcuuguacaa

SEQ ID NO: 2038400 - RNA, 19 nt, Artificial Sequence
  Description of Artificial Sequence: Synthetic oligonucleotide
uugcuggaaaucucagccg

SEQ ID NO: 2038401 - RNA, 19 nt, Artificial Sequence
  Description of Artificial Sequence: Synthetic oligonucleotide
ugcgccagagagcacaaca

SEQ ID NO: 2038402 - RNA, 19 nt, Artificial Sequence
  Description of Artificial Sequence: Synthetic oligonucleotide
gaacuaagucguaagcuug

SEQ ID NO: 2038403 - RNA, 19 nt, Artificial Sequence
  Description of Artificial Sequence: Synthetic oligonucleotide
cacggaauggucucgggag

SEQ ID NO: 2038404 - RNA, 19 nt, Artificial Sequence
  Description of Artificial Sequence: Synthetic oligonucleotide
ggagauaccaggccgugcg

SEQ ID NO: 2038405 - RNA, 19 nt, Artificial Sequence
  Description of Artificial Sequence: Synthetic oligonucleotide
cucaaugacagugaagguc

SEQ ID NO: 2038406 - RNA, 19 nt, Artificial Sequence
  Description of Artificial Sequence: Synthetic oligonucleotide
gauaccugaagugaacauc

SEQ ID NO: 2038407 - RNA, 19 nt, Artificial Sequence
  Description of Artificial Sequence: Synthetic oligonucleotide
aggacaugcuucugggccg

SEQ ID NO: 2038408 - RNA, 19 nt, Artificial Sequence
  Description of Artificial Sequence: Synthetic oligonucleotide
uggacggacuugauuaugu

SEQ ID NO: 2038409 - RNA, 19 nt, Artificial Sequence
  Description of Artificial Sequence: Synthetic oligonucleotide
uucauggcauuccucuucu

SEQ ID NO: 2038410 - RNA, 19 nt, Artificial Sequence
  Description of Artificial Sequence: Synthetic oligonucleotide
cagagagcacaacagcccg

SEQ ID NO: 2038411 - RNA, 19 nt, Artificial Sequence
  Description of Artificial Sequence: Synthetic oligonucleotide
aaggcucucguccacggaa

SEQ ID NO: 2038412 - RNA, 19 nt, Artificial Sequence
  Description of Artificial Sequence: Synthetic oligonucleotide
ucgucagccaucauccuuc

SEQ ID NO: 2038413 - RNA, 19 nt, Artificial Sequence
  Description of Artificial Sequence: Synthetic oligonucleotide
aagcuuguacaaugggcga

SEQ ID NO: 2038414 - RNA, 19 nt, Artificial Sequence
  Description of Artificial Sequence: Synthetic oligonucleotide
ucaaggcucucguccacgg

SEQ ID NO: 2038415 - RNA, 19 nt, Artificial Sequence
  Description of Artificial Sequence: Synthetic oligonucleotide
ugcaucagcacgccgugga

SEQ ID NO: 2038416 - RNA, 19 nt, Artificial Sequence
  Description of Artificial Sequence: Synthetic oligonucleotide
gagacucauaguuguggcc

SEQ ID NO: 2038417 - RNA, 19 nt, Artificial Sequence
  Description of Artificial Sequence: Synthetic oligonucleotide
auaguuguggcccgagagu

SEQ ID NO: 2038418 - RNA, 19 nt, Artificial Sequence
  Description of Artificial Sequence: Synthetic oligonucleotide
gacucauaguuguggcccg

SEQ ID NO: 2038419 - RNA, 19 nt, Artificial Sequence
  Description of Artificial Sequence: Synthetic oligonucleotide
aguagauuagguugauuuu

SEQ ID NO: 2038420 - RNA, 19 nt, Artificial Sequence
  Description of Artificial Sequence: Synthetic oligonucleotide
gaacacacggcugaccagc

SEQ ID NO: 2038421 - RNA, 19 nt, Artificial Sequence
  Description of Artificial Sequence: Synthetic oligonucleotide
gugaacaucuuuccugcgc

SEQ ID NO: 2038422 - RNA, 19 nt, Artificial Sequence
  Description of Artificial Sequence: Synthetic oligonucleotide
cauguagucaaggcucucg

SEQ ID NO: 2038423 - RNA, 19 nt, Artificial Sequence
  Description of Artificial Sequence: Synthetic oligonucleotide
acugacccuccacggagcc

SEQ ID NO: 2038424 - RNA, 19 nt, Artificial Sequence
  Description of Artificial Sequence: Synthetic oligonucleotide
gaugaccuugggcagucgc

SEQ ID NO: 2038425 - RNA, 19 nt, Artificial Sequence
  Description of Artificial Sequence: Synthetic oligonucleotide
aggucacggagauaccagg

SEQ ID NO: 2038426 - RNA, 19 nt, Artificial Sequence
  Description of Artificial Sequence: Synthetic oligonucleotide
ugucgauaccugaagugaa

SEQ ID NO: 2038427 - RNA, 19 nt, Artificial Sequence
  Description of Artificial Sequence: Synthetic oligonucleotide
gaagaaggcacugacccuc

SEQ ID NO: 2038428 - RNA, 19 nt, Artificial Sequence
  Description of Artificial Sequence: Synthetic oligonucleotide
ugaagauaaggccccugaa

SEQ ID NO: 2038429 - RNA, 19 nt, Artificial Sequence
  Description of Artificial Sequence: Synthetic oligonucleotide
uauuguucacagugaagau

SEQ ID NO: 2038430 - RNA, 19 nt, Artificial Sequence
  Description of Artificial Sequence: Synthetic oligonucleotide
gccgaugucaccugaagag

SEQ ID NO: 2038431 - RNA, 19 nt, Artificial Sequence
  Description of Artificial Sequence: Synthetic oligonucleotide
auggaagaaggcacugacc

SEQ ID NO: 2038432 - RNA, 19 nt, Artificial Sequence
  Description of Artificial Sequence: Synthetic oligonucleotide
agugaacaucuuuccugcg

SEQ ID NO: 2038433 - RNA, 19 nt, Artificial Sequence
  Description of Artificial Sequence: Synthetic oligonucleotide
ugaccggagccucucagcu

SEQ ID NO: 2038434 - RNA, 19 nt, Artificial Sequence
  Description of Artificial Sequence: Synthetic oligonucleotide
agggcgcgcaggcugacgc

SEQ ID NO: 2038435 - RNA, 19 nt, Artificial Sequence
  Description of Artificial Sequence: Synthetic oligonucleotide
guuccagguggccauguag

SEQ ID NO: 2038436 - RNA, 19 nt, Artificial Sequence
  Description of Artificial Sequence: Synthetic oligonucleotide
uucucuggccgguuuagcu

SEQ ID NO: 2038437 - RNA, 19 nt, Artificial Sequence
  Description of Artificial Sequence: Synthetic oligonucleotide
cuaagucguaagcuuguac

SEQ ID NO: 2038438 - RNA, 19 nt, Artificial Sequence
  Description of Artificial Sequence: Synthetic oligonucleotide
acuugauuauguccugggu

SEQ ID NO: 2038439 - RNA, 19 nt, Artificial Sequence
  Description of Artificial Sequence: Synthetic oligonucleotide
ugaggucacggagauacca

SEQ ID NO: 2038440 - RNA, 19 nt, Artificial Sequence
  Description of Artificial Sequence: Synthetic oligonucleotide
cuuggggcacuucucaaug

SEQ ID NO: 2038441 - RNA, 19 nt, Artificial Sequence
  Description of Artificial Sequence: Synthetic oligonucleotide
acggacuugauuauguccu

SEQ ID NO: 2038442 - RNA, 19 nt, Artificial Sequence
  Description of Artificial Sequence: Synthetic oligonucleotide
ugcaccaaugcaaccucca

SEQ ID NO: 2038443 - RNA, 19 nt, Artificial Sequence
  Description of Artificial Sequence: Synthetic oligonucleotide
cacaacagcccgacagucg

SEQ ID NO: 2038444 - RNA, 19 nt, Artificial Sequence
  Description of Artificial Sequence: Synthetic oligonucleotide
uucaacauguuguccuuau

SEQ ID NO: 2038445 - RNA, 19 nt, Artificial Sequence
  Description of Artificial Sequence: Synthetic oligonucleotide
ucguugaccaggcucuggu

SEQ ID NO: 2038446 - RNA, 19 nt, Artificial Sequence
  Description of Artificial Sequence: Synthetic oligonucleotide
ugcauucaacauguugucc

SEQ ID NO: 2038447 - RNA, 19 nt, Artificial Sequence
  Description of Artificial Sequence: Synthetic oligonucleotide
ucgauaccugaagugaaca

SEQ ID NO: 2038448 - RNA, 19 nt, Artificial Sequence
  Description of Artificial Sequence: Synthetic oligonucleotide
aacagcccgacagucggag

SEQ ID NO: 2038449 - RNA, 19 nt, Artificial Sequence
  Description of Artificial Sequence: Synthetic oligonucleotide
agcuuguacaaugggcgac

SEQ ID NO: 2038450 - RNA, 19 nt, Artificial Sequence
  Description of Artificial Sequence: Synthetic oligonucleotide
aacuaagucguaagcuugu

SEQ ID NO: 2038451 - RNA, 19 nt, Artificial Sequence
  Description of Artificial Sequence: Synthetic oligonucleotide
uagucaaggcucucgucca

SEQ ID NO: 2038452 - RNA, 19 nt, Artificial Sequence
  Description of Artificial Sequence: Synthetic oligonucleotide
guuuagcugcacguggagg

SEQ ID NO: 2038453 - RNA, 19 nt, Artificial Sequence
  Description of Artificial Sequence: Synthetic oligonucleotide
ccugaagugaacaucuuuc

SEQ ID NO: 2038454 - RNA, 19 nt, Artificial Sequence
  Description of Artificial Sequence: Synthetic oligonucleotide
aacacacggcugaccagcc

SEQ ID NO: 2038455 - RNA, 19 nt, Artificial Sequence
  Description of Artificial Sequence: Synthetic oligonucleotide
acagucggagucuugggaa

SEQ ID NO: 2038456 - RNA, 19 nt, Artificial Sequence
  Description of Artificial Sequence: Synthetic oligonucleotide
cucuggccgguuuagcugc

SEQ ID NO: 2038457 - RNA, 19 nt, Artificial Sequence
  Description of Artificial Sequence: Synthetic oligonucleotide
ggaaaucucagccgccagg

SEQ ID NO: 2038458 - RNA, 19 nt, Artificial Sequence
  Description of Artificial Sequence: Synthetic oligonucleotide
guuguccuuaucugggaac

SEQ ID NO: 2038459 - RNA, 19 nt, Artificial Sequence
  Description of Artificial Sequence: Synthetic oligonucleotide
uggucucgggaguagauua

SEQ ID NO: 2038460 - RNA, 19 nt, Artificial Sequence
  Description of Artificial Sequence: Synthetic oligonucleotide
gucacggagauaccaggcc

SEQ ID NO: 2038461 - RNA, 19 nt, Artificial Sequence
  Description of Artificial Sequence: Synthetic oligonucleotide
agauaaggccccugaagaa

SEQ ID NO: 2038462 - RNA, 19 nt, Artificial Sequence
  Description of Artificial Sequence: Synthetic oligonucleotide
uugaccccugcacagccac

SEQ ID NO: 2038463 - RNA, 19 nt, Artificial Sequence
  Description of Artificial Sequence: Synthetic oligonucleotide
acuuuauuguucacaguga

SEQ ID NO: 2038464 - RNA, 19 nt, Artificial Sequence
  Description of Artificial Sequence: Synthetic oligonucleotide
ggaagaaagcauccugggc

SEQ ID NO: 2038465 - RNA, 19 nt, Artificial Sequence
  Description of Artificial Sequence: Synthetic oligonucleotide
auccuucgggccgugaagg

SEQ ID NO: 2038466 - RNA, 19 nt, Artificial Sequence
  Description of Artificial Sequence: Synthetic oligonucleotide
agauaccaggccgugcggg

SEQ ID NO: 2038467 - RNA, 19 nt, Artificial Sequence
  Description of Artificial Sequence: Synthetic oligonucleotide
uacaaugggcgaccacaug

SEQ ID NO: 2038468 - RNA, 19 nt, Artificial Sequence
  Description of Artificial Sequence: Synthetic oligonucleotide
gugaagauaaggccccuga

SEQ ID NO: 2038469 - RNA, 19 nt, Artificial Sequence
  Description of Artificial Sequence: Synthetic oligonucleotide
caccaaugcaaccuccaug

SEQ ID NO: 2038470 - RNA, 19 nt, Artificial Sequence
  Description of Artificial Sequence: Synthetic oligonucleotide
uggccgguuuagcugcacg

SEQ ID NO: 2038471 - RNA, 19 nt, Artificial Sequence
  Description of Artificial Sequence: Synthetic oligonucleotide
cacguggaggacaugcuuc

SEQ ID NO: 2038472 - RNA, 19 nt, Artificial Sequence
  Description of Artificial Sequence: Synthetic oligonucleotide
caacauguuguccuuaucu

SEQ ID NO: 2038473 - RNA, 19 nt, Artificial Sequence
  Description of Artificial Sequence: Synthetic oligonucleotide
gauuauguccugggucugc

SEQ ID NO: 2038474 - RNA, 19 nt, Artificial Sequence
  Description of Artificial Sequence: Synthetic oligonucleotide
aaugggcgaccacauggaa

SEQ ID NO: 2038475 - RNA, 19 nt, Artificial Sequence
  Description of Artificial Sequence: Synthetic oligonucleotide
gagauaccaggccgugcgg

SEQ ID NO: 2038476 - RNA, 19 nt, Artificial Sequence
  Description of Artificial Sequence: Synthetic oligonucleotide
cuggaagcauuccaccaac

SEQ ID NO: 2038477 - RNA, 19 nt, Artificial Sequence
  Description of Artificial Sequence: Synthetic oligonucleotide
caugaugucgauaccugaa

SEQ ID NO: 2038478 - RNA, 19 nt, Artificial Sequence
  Description of Artificial Sequence: Synthetic oligonucleotide
cucuugcuggaaaucucag

SEQ ID NO: 2038479 - RNA, 19 nt, Artificial Sequence
  Description of Artificial Sequence: Synthetic oligonucleotide
gaggucacggagauaccag

SEQ ID NO: 2038480 - RNA, 19 nt, Artificial Sequence
  Description of Artificial Sequence: Synthetic oligonucleotide
guuguggcccgagaguucc

SEQ ID NO: 2038481 - RNA, 19 nt, Artificial Sequence
  Description of Artificial Sequence: Synthetic oligonucleotide
cugcacguggaggacaugc

SEQ ID NO: 2038482 - RNA, 19 nt, Artificial Sequence
  Description of Artificial Sequence: Synthetic oligonucleotide
ugucaccugaagagacuca

SEQ ID NO: 2038483 - RNA, 19 nt, Artificial Sequence
  Description of Artificial Sequence: Synthetic oligonucleotide
uguagucaaggcucucguc

SEQ ID NO: 2038484 - RNA, 19 nt, Artificial Sequence
  Description of Artificial Sequence: Synthetic oligonucleotide
uggcccgagaguuccucgg

SEQ ID NO: 2038485 - RNA, 19 nt, Artificial Sequence
  Description of Artificial Sequence: Synthetic oligonucleotide
uccauggauggcagcaauc

SEQ ID NO: 2038486 - RNA, 19 nt, Artificial Sequence
  Description of Artificial Sequence: Synthetic oligonucleotide
cugcaguguccccacgucg

SEQ ID NO: 2038487 - RNA, 19 nt, Artificial Sequence
  Description of Artificial Sequence: Synthetic oligonucleotide
aggugcgccauguccauga

SEQ ID NO: 2038488 - RNA, 19 nt, Artificial Sequence
  Description of Artificial Sequence: Synthetic oligonucleotide
auaaggccccugaagaacu

SEQ ID NO: 2038489 - RNA, 19 nt, Artificial Sequence
  Description of Artificial Sequence: Synthetic oligonucleotide
uggaagcauuccaccaacu

SEQ ID NO: 2038490 - RNA, 19 nt, Artificial Sequence
  Description of Artificial Sequence: Synthetic oligonucleotide
uccugcgccagagagcaca

SEQ ID NO: 2038491 - RNA, 19 nt, Artificial Sequence
  Description of Artificial Sequence: Synthetic oligonucleotide
gaaggcacugacccuccac

SEQ ID NO: 2038492 - RNA, 19 nt, Artificial Sequence
  Description of Artificial Sequence: Synthetic oligonucleotide
gccaucauccuucgggccg

SEQ ID NO: 2038493 - RNA, 19 nt, Artificial Sequence
  Description of Artificial Sequence: Synthetic oligonucleotide
uuugaccccugcacagcca

SEQ ID NO: 2038494 - RNA, 19 nt, Artificial Sequence
  Description of Artificial Sequence: Synthetic oligonucleotide
uccacggaauggucucggg

SEQ ID NO: 2038495 - RNA, 19 nt, Artificial Sequence
  Description of Artificial Sequence: Synthetic oligonucleotide
ggcugcauucaacauguug

SEQ ID NO: 2038496 - RNA, 19 nt, Artificial Sequence
  Description of Artificial Sequence: Synthetic oligonucleotide
cauggauggcagcaaucac

SEQ ID NO: 2038497 - RNA, 19 nt, Artificial Sequence
  Description of Artificial Sequence: Synthetic oligonucleotide
ugcacguggaggacaugcu

SEQ ID NO: 2038498 - RNA, 19 nt, Artificial Sequence
  Description of Artificial Sequence: Synthetic oligonucleotide
acguggaggacaugcuucu

SEQ ID NO: 2038499 - RNA, 19 nt, Artificial Sequence
  Description of Artificial Sequence: Synthetic oligonucleotide
cuucgggccgugaagguca

SEQ ID NO: 2038500 - RNA, 19 nt, Artificial Sequence
  Description of Artificial Sequence: Synthetic oligonucleotide
ggagccuuccucucucagg

SEQ ID NO: 2038501 - RNA, 19 nt, Artificial Sequence
  Description of Artificial Sequence: Synthetic oligonucleotide
ucccgaugaccuugggcag

SEQ ID NO: 2038502 - RNA, 19 nt, Artificial Sequence
  Description of Artificial Sequence: Synthetic oligonucleotide
cauccuucgggccgugaag

SEQ ID NO: 2038503 - RNA, 19 nt, Artificial Sequence
  Description of Artificial Sequence: Synthetic oligonucleotide
uaguuguggcccgagaguu

SEQ ID NO: 2038504 - RNA, 19 nt, Artificial Sequence
  Description of Artificial Sequence: Synthetic oligonucleotide
gagagcacaacagcccgac

SEQ ID NO: 2038505 - RNA, 19 nt, Artificial Sequence
  Description of Artificial Sequence: Synthetic oligonucleotide
caaccuccauggauggcag

SEQ ID NO: 2038506 - RNA, 19 nt, Artificial Sequence
  Description of Artificial Sequence: Synthetic oligonucleotide
ucggagucuugggaaaucu

SEQ ID NO: 2038507 - RNA, 19 nt, Artificial Sequence
  Description of Artificial Sequence: Synthetic oligonucleotide
aauggucucgggaguagau

SEQ ID NO: 2038508 - RNA, 19 nt, Artificial Sequence
  Description of Artificial Sequence: Synthetic oligonucleotide
acgccguggagucggcugg

SEQ ID NO: 2038509 - RNA, 19 nt, Artificial Sequence
  Description of Artificial Sequence: Synthetic oligonucleotide
cugaccggagccucucagc

SEQ ID NO: 2038510 - RNA, 19 nt, Artificial Sequence
  Description of Artificial Sequence: Synthetic oligonucleotide
accggcuuggggcacuucu

SEQ ID NO: 2038511 - RNA, 19 nt, Artificial Sequence
  Description of Artificial Sequence: Synthetic oligonucleotide
gaaugucacaggcagugau

SEQ ID NO: 2038512 - RNA, 19 nt, Artificial Sequence
  Description of Artificial Sequence: Synthetic oligonucleotide
ucggcagccaggcccaaau

SEQ ID NO: 2038513 - RNA, 19 nt, Artificial Sequence
  Description of Artificial Sequence: Synthetic oligonucleotide
ucguccacggaauggucuc

SEQ ID NO: 2038514 - RNA, 19 nt, Artificial Sequence
  Description of Artificial Sequence: Synthetic oligonucleotide
cugggcacaguagcgaaug

SEQ ID NO: 2038515 - RNA, 19 nt, Artificial Sequence
  Description of Artificial Sequence: Synthetic oligonucleotide
ggaagcauuccaccaacuc

SEQ ID NO: 2038516 - RNA, 19 nt, Artificial Sequence
  Description of Artificial Sequence: Synthetic oligonucleotide
aaucaccggcuuggggcac

SEQ ID NO: 2038517 - RNA, 19 nt, Artificial Sequence
  Description of Artificial Sequence: Synthetic oligonucleotide
uuguacaaugggcgaccac

SEQ ID NO: 2038518 - RNA, 19 nt, Artificial Sequence
  Description of Artificial Sequence: Synthetic oligonucleotide
gcgaaugucacaggcagug

SEQ ID NO: 2038519 - RNA, 19 nt, Artificial Sequence
  Description of Artificial Sequence: Synthetic oligonucleotide
uguucauggcauuccucuu

SEQ ID NO: 2038520 - RNA, 19 nt, Artificial Sequence
  Description of Artificial Sequence: Synthetic oligonucleotide
acggaauggucucgggagu

SEQ ID NO: 2038521 - RNA, 19 nt, Artificial Sequence
  Description of Artificial Sequence: Synthetic oligonucleotide
uccagguggccauguaguc

SEQ ID NO: 2038522 - RNA, 19 nt, Artificial Sequence
  Description of Artificial Sequence: Synthetic oligonucleotide
cagugaugagguccacacc

SEQ ID NO: 2038523 - RNA, 19 nt, Artificial Sequence
  Description of Artificial Sequence: Synthetic oligonucleotide
gguuuagcugcacguggag

SEQ ID NO: 2038524 - RNA, 19 nt, Artificial Sequence
  Description of Artificial Sequence: Synthetic oligonucleotide
ggagucuugggaaaucuuc

SEQ ID NO: 2038525 - RNA, 19 nt, Artificial Sequence
  Description of Artificial Sequence: Synthetic oligonucleotide
gucaaggcucucguccacg

SEQ ID NO: 2038526 - RNA, 19 nt, Artificial Sequence
  Description of Artificial Sequence: Synthetic oligonucleotide
gaccuugggcagucgcugc

SEQ ID NO: 2038527 - RNA, 19 nt, Artificial Sequence
  Description of Artificial Sequence: Synthetic oligonucleotide
ugggcagucgcugcagugu

SEQ ID NO: 2038528 - RNA, 19 nt, Artificial Sequence
  Description of Artificial Sequence: Synthetic oligonucleotide
uccugggcacaguagcgaa

SEQ ID NO: 2038529 - RNA, 19 nt, Artificial Sequence
  Description of Artificial Sequence: Synthetic oligonucleotide
agggcucuugcuggaaauc

SEQ ID NO: 2038530 - RNA, 19 nt, Artificial Sequence
  Description of Artificial Sequence: Synthetic oligonucleotide
ccuuaucugggaacacacg

SEQ ID NO: 2038531 - RNA, 19 nt, Artificial Sequence
  Description of Artificial Sequence: Synthetic oligonucleotide
uuagcugcacguggaggac

SEQ ID NO: 2038532 - RNA, 19 nt, Artificial Sequence
  Description of Artificial Sequence: Synthetic oligonucleotide
gcacugacccuccacggag

SEQ ID NO: 2038533 - RNA, 19 nt, Artificial Sequence
  Description of Artificial Sequence: Synthetic oligonucleotide
auuugcugaugaggucacg

SEQ ID NO: 2038534 - RNA, 19 nt, Artificial Sequence
  Description of Artificial Sequence: Synthetic oligonucleotide
agucguaagcuuguacaau

SEQ ID NO: 2038535 - RNA, 19 nt, Artificial Sequence
  Description of Artificial Sequence: Synthetic oligonucleotide
guagcgaaugucacaggca

SEQ ID NO: 2038536 - RNA, 19 nt, Artificial Sequence
  Description of Artificial Sequence: Synthetic oligonucleotide
caaugggcgaccacaugga

SEQ ID NO: 2038537 - RNA, 19 nt, Artificial Sequence
  Description of Artificial Sequence: Synthetic oligonucleotide
ggccauguagucaaggcuc

SEQ ID NO: 2038538 - RNA, 19 nt, Artificial Sequence
  Description of Artificial Sequence: Synthetic oligonucleotide
caaucaccggcuuggggca

SEQ ID NO: 2038539 - RNA, 19 nt, Artificial Sequence
  Description of Artificial Sequence: Synthetic oligonucleotide
gucgauaccugaagugaac

SEQ ID NO: 2038540 - RNA, 19 nt, Artificial Sequence
  Description of Artificial Sequence: Synthetic oligonucleotide
aggaggugcgccaugucca

SEQ ID NO: 2038541 - RNA, 19 nt, Artificial Sequence
  Description of Artificial Sequence: Synthetic oligonucleotide
ggaauuugcugaugagguc

SEQ ID NO: 2038542 - RNA, 19 nt, Artificial Sequence
  Description of Artificial Sequence: Synthetic oligonucleotide
cugaagaacuaagucguaa

SEQ ID NO: 2038543 - RNA, 19 nt, Artificial Sequence
  Description of Artificial Sequence: Synthetic oligonucleotide
cagcccgacagucggaguc

SEQ ID NO: 2038544 - RNA, 19 nt, Artificial Sequence
  Description of Artificial Sequence: Synthetic oligonucleotide
cacacggcugaccagccca

SEQ ID NO: 2038545 - RNA, 19 nt, Artificial Sequence
  Description of Artificial Sequence: Synthetic oligonucleotide
ugacccuccacggagccuu

SEQ ID NO: 2038546 - RNA, 19 nt, Artificial Sequence
  Description of Artificial Sequence: Synthetic oligonucleotide
cacauggaagaaggcacug

SEQ ID NO: 2038547 - RNA, 19 nt, Artificial Sequence
  Description of Artificial Sequence: Synthetic oligonucleotide
ucugggccgaugucaccug

SEQ ID NO: 2038548 - RNA, 19 nt, Artificial Sequence
  Description of Artificial Sequence: Synthetic oligonucleotide
gccuggacggacuugauua

SEQ ID NO: 2038549 - RNA, 19 nt, Artificial Sequence
  Description of Artificial Sequence: Synthetic oligonucleotide
cguaagcuuguacaauggg

SEQ ID NO: 2038550 - RNA, 19 nt, Artificial Sequence
  Description of Artificial Sequence: Synthetic oligonucleotide
augaggucacggagauacc

SEQ ID NO: 2038551 - RNA, 19 nt, Artificial Sequence
  Description of Artificial Sequence: Synthetic oligonucleotide
uguccuuaucugggaacac

SEQ ID NO: 2038552 - RNA, 19 nt, Artificial Sequence
  Description of Artificial Sequence: Synthetic oligonucleotide
aggaucaggaaggcacuca

SEQ ID NO: 2038553 - RNA, 19 nt, Artificial Sequence
  Description of Artificial Sequence: Synthetic oligonucleotide
aguuguggcccgagaguuc

SEQ ID NO: 2038554 - RNA, 19 nt, Artificial Sequence
  Description of Artificial Sequence: Synthetic oligonucleotide
ccgguuuagcugcacgugg

SEQ ID NO: 2038555 - RNA, 19 nt, Artificial Sequence
  Description of Artificial Sequence: Synthetic oligonucleotide
cugcagcaugcucauguuc

SEQ ID NO: 2038556 - RNA, 19 nt, Artificial Sequence
  Description of Artificial Sequence: Synthetic oligonucleotide
ccaacucccuccagaaggc

SEQ ID NO: 2038557 - RNA, 19 nt, Artificial Sequence
  Description of Artificial Sequence: Synthetic oligonucleotide
ugggcacaguagcgaaugu

SEQ ID NO: 2038558 - RNA, 19 nt, Artificial Sequence
  Description of Artificial Sequence: Synthetic oligonucleotide
cucauguuccagguggcca

SEQ ID NO: 2038559 - RNA, 19 nt, Artificial Sequence
  Description of Artificial Sequence: Synthetic oligonucleotide
cucauaguuguggcccgag

SEQ ID NO: 2038560 - RNA, 19 nt, Artificial Sequence
  Description of Artificial Sequence: Synthetic oligonucleotide
ggucagcucguugaccagg

SEQ ID NO: 2038561 - RNA, 19 nt, Artificial Sequence
  Description of Artificial Sequence: Synthetic oligonucleotide
guccuuaucugggaacaca

SEQ ID NO: 2038562 - RNA, 19 nt, Artificial Sequence
  Description of Artificial Sequence: Synthetic oligonucleotide
cagaggagcucagggcgcg

SEQ ID NO: 2038563 - RNA, 19 nt, Artificial Sequence
  Description of Artificial Sequence: Synthetic oligonucleotide
ugccuggacggacuugauu

SEQ ID NO: 2038564 - RNA, 19 nt, Artificial Sequence
  Description of Artificial Sequence: Synthetic oligonucleotide
caggcugacgccggggccc

SEQ ID NO: 2038565 - RNA, 19 nt, Artificial Sequence
  Description of Artificial Sequence: Synthetic oligonucleotide
uaaggccccugaagaacua

SEQ ID NO: 2038566 - RNA, 19 nt, Artificial Sequence
  Description of Artificial Sequence: Synthetic oligonucleotide
gcaaccuccauggauggca

SEQ ID NO: 2038567 - RNA, 19 nt, Artificial Sequence
  Description of Artificial Sequence: Synthetic oligonucleotide
gugaugagguccacaccug

SEQ ID NO: 2038568 - RNA, 19 nt, Artificial Sequence
  Description of Artificial Sequence: Synthetic oligonucleotide
augaccuugggcagucgcu

SEQ ID NO: 2038569 - RNA, 19 nt, Artificial Sequence
  Description of Artificial Sequence: Synthetic oligonucleotide
uucgggccgugaaggucag

SEQ ID NO: 2038570 - RNA, 19 nt, Artificial Sequence
  Description of Artificial Sequence: Synthetic oligonucleotide
cucguugaccaggcucugg

SEQ ID NO: 2038571 - RNA, 19 nt, Artificial Sequence
  Description of Artificial Sequence: Synthetic oligonucleotide
ggucacggagauaccaggc

SEQ ID NO: 2038572 - RNA, 19 nt, Artificial Sequence
  Description of Artificial Sequence: Synthetic oligonucleotide
caccugcaccaaugcaacc

SEQ ID NO: 2038573 - RNA, 19 nt, Artificial Sequence
  Description of Artificial Sequence: Synthetic oligonucleotide
cuggacggacuugauuaug

SEQ ID NO: 2038574 - RNA, 19 nt, Artificial Sequence
  Description of Artificial Sequence: Synthetic oligonucleotide
uccuucgggccgugaaggu

SEQ ID NO: 2038575 - RNA, 19 nt, Artificial Sequence
  Description of Artificial Sequence: Synthetic oligonucleotide
guccaugaugucgauaccu

SEQ ID NO: 2038576 - RNA, 19 nt, Artificial Sequence
  Description of Artificial Sequence: Synthetic oligonucleotide
uaccugaagugaacaucuu

SEQ ID NO: 2038577 - RNA, 19 nt, Artificial Sequence
  Description of Artificial Sequence: Synthetic oligonucleotide
uagcugcacguggaggaca

SEQ ID NO: 2038578 - RNA, 19 nt, Artificial Sequence
  Description of Artificial Sequence: Synthetic oligonucleotide
cgaugucaccugaagagac

SEQ ID NO: 2038579 - RNA, 19 nt, Artificial Sequence
  Description of Artificial Sequence: Synthetic oligonucleotide
cagccgccagggcaaaggc

SEQ ID NO: 2038580 - RNA, 19 nt, Artificial Sequence
  Description of Artificial Sequence: Synthetic oligonucleotide
aaggccccugaagaacuaa

SEQ ID NO: 2038581 - RNA, 19 nt, Artificial Sequence
  Description of Artificial Sequence: Synthetic oligonucleotide
aucuuuccugcgccagaga

SEQ ID NO: 2038582 - RNA, 19 nt, Artificial Sequence
  Description of Artificial Sequence: Synthetic oligonucleotide
ccgacagucggagucuugg

SEQ ID NO: 2038583 - RNA, 19 nt, Artificial Sequence
  Description of Artificial Sequence: Synthetic oligonucleotide
cacggagccuuccucucuc

SEQ ID NO: 2038584 - RNA, 19 nt, Artificial Sequence
  Description of Artificial Sequence: Synthetic oligonucleotide
aggccccugaagaacuaag

SEQ ID NO: 2038585 - RNA, 19 nt, Artificial Sequence
  Description of Artificial Sequence: Synthetic oligonucleotide
gaugucaccugaagagacu

SEQ ID NO: 2038586 - RNA, 19 nt, Artificial Sequence
  Description of Artificial Sequence: Synthetic oligonucleotide
agagcacaacagcccgaca

SEQ ID NO: 2038587 - RNA, 19 nt, Artificial Sequence
  Description of Artificial Sequence: Synthetic oligonucleotide
ugcaaccuccauggauggc

SEQ ID NO: 2038588 - RNA, 19 nt, Artificial Sequence
  Description of Artificial Sequence: Synthetic oligonucleotide
agaggagcucagggcgcgc

SEQ ID NO: 2038589 - RNA, 19 nt, Artificial Sequence
  Description of Artificial Sequence: Synthetic oligonucleotide
ggcagcaaucaccggcuug

SEQ ID NO: 2038590 - RNA, 19 nt, Artificial Sequence
  Description of Artificial Sequence: Synthetic oligonucleotide
gcugaccggagccucucag

SEQ ID NO: 2038591 - RNA, 19 nt, Artificial Sequence
  Description of Artificial Sequence: Synthetic oligonucleotide
ugaccccugcacagccaca

SEQ ID NO: 2038592 - RNA, 19 nt, Artificial Sequence
  Description of Artificial Sequence: Synthetic oligonucleotide
gcucucguccacggaaugg

SEQ ID NO: 2038593 - RNA, 19 nt, Artificial Sequence
  Description of Artificial Sequence: Synthetic oligonucleotide
uguggcccgagaguuccuc

SEQ ID NO: 2038594 - RNA, 19 nt, Artificial Sequence
  Description of Artificial Sequence: Synthetic oligonucleotide
cccugaagaacuaagucgu

SEQ ID NO: 2038595 - RNA, 19 nt, Artificial Sequence
  Description of Artificial Sequence: Synthetic oligonucleotide
gcucagggcgcgcaggcug

SEQ ID NO: 2038596 - RNA, 19 nt, Artificial Sequence
  Description of Artificial Sequence: Synthetic oligonucleotide
acuaagucguaagcuugua

SEQ ID NO: 2038597 - RNA, 19 nt, Artificial Sequence
  Description of Artificial Sequence: Synthetic oligonucleotide
gccggggccccgcugaccg

SEQ ID NO: 2038598 - RNA, 19 nt, Artificial Sequence
  Description of Artificial Sequence: Synthetic oligonucleotide
caacucccuccagaaggcc

SEQ ID NO: 2038599 - RNA, 19 nt, Artificial Sequence
  Description of Artificial Sequence: Synthetic oligonucleotide
acggagauaccaggccgug

SEQ ID NO: 2038600 - RNA, 19 nt, Artificial Sequence
  Description of Artificial Sequence: Synthetic oligonucleotide
agagagcacaacagcccga

SEQ ID NO: 2038601 - RNA, 19 nt, Artificial Sequence
  Description of Artificial Sequence: Synthetic oligonucleotide
acaugcuucugggccgaug

SEQ ID NO: 2038602 - RNA, 19 nt, Artificial Sequence
  Description of Artificial Sequence: Synthetic oligonucleotide
agaaagcauccugggcaca

SEQ ID NO: 2038603 - RNA, 19 nt, Artificial Sequence
  Description of Artificial Sequence: Synthetic oligonucleotide
ggccgaugucaccugaaga

SEQ ID NO: 2038604 - RNA, 19 nt, Artificial Sequence
  Description of Artificial Sequence: Synthetic oligonucleotide
ggcccgagaguuccucggg

SEQ ID NO: 2038605 - RNA, 19 nt, Artificial Sequence
  Description of Artificial Sequence: Synthetic oligonucleotide
agucggagucuugggaaau

SEQ ID NO: 2038606 - RNA, 19 nt, Artificial Sequence
  Description of Artificial Sequence: Synthetic oligonucleotide
ccuugaccuggaagaaagc

SEQ ID NO: 2038607 - RNA, 19 nt, Artificial Sequence
  Description of Artificial Sequence: Synthetic oligonucleotide
ggacggacuugauuauguc

SEQ ID NO: 2038608 - RNA, 19 nt, Artificial Sequence
  Description of Artificial Sequence: Synthetic oligonucleotide
gcccgagaguuccucgggg

SEQ ID NO: 2038609 - RNA, 19 nt, Artificial Sequence
  Description of Artificial Sequence: Synthetic oligonucleotide
gccuuccucucucaggauc

SEQ ID NO: 2038610 - RNA, 19 nt, Artificial Sequence
  Description of Artificial Sequence: Synthetic oligonucleotide
guccugggucugcagcaug

SEQ ID NO: 2038611 - RNA, 19 nt, Artificial Sequence
  Description of Artificial Sequence: Synthetic oligonucleotide
cucguccacggaauggucu

SEQ ID NO: 2038612 - RNA, 19 nt, Artificial Sequence
  Description of Artificial Sequence: Synthetic oligonucleotide
gcagucgcugcaguguccc

SEQ ID NO: 2038613 - RNA, 19 nt, Artificial Sequence
  Description of Artificial Sequence: Synthetic oligonucleotide
auggucucgggaguagauu

SEQ ID NO: 2038614 - RNA, 19 nt, Artificial Sequence
  Description of Artificial Sequence: Synthetic oligonucleotide
gcgccagagagcacaacag

SEQ ID NO: 2038615 - RNA, 19 nt, Artificial Sequence
  Description of Artificial Sequence: Synthetic oligonucleotide
ggauggcagcaaucaccgg

SEQ ID NO: 2038616 - RNA, 19 nt, Artificial Sequence
  Description of Artificial Sequence: Synthetic oligonucleotide
acucauaguuguggcccga

SEQ ID NO: 2038617 - RNA, 19 nt, Artificial Sequence
  Description of Artificial Sequence: Synthetic oligonucleotide
gcaucagcacgccguggag

SEQ ID NO: 2038618 - RNA, 19 nt, Artificial Sequence
  Description of Artificial Sequence: Synthetic oligonucleotide
aggcugacgccggggcccc

SEQ ID NO: 2038619 - RNA, 19 nt, Artificial Sequence
  Description of Artificial Sequence: Synthetic oligonucleotide
acagcccgacagucggagu

SEQ ID NO: 2038620 - RNA, 19 nt, Artificial Sequence
  Description of Artificial Sequence: Synthetic oligonucleotide
cugaugaggucacggagau

SEQ ID NO: 2038621 - RNA, 19 nt, Artificial Sequence
  Description of Artificial Sequence: Synthetic oligonucleotide
caggaucaggaaggcacuc

SEQ ID NO: 2038622 - RNA, 19 nt, Artificial Sequence
  Description of Artificial Sequence: Synthetic oligonucleotide
gugcgggcugcaucauccc

SEQ ID NO: 2038623 - RNA, 19 nt, Artificial Sequence
  Description of Artificial Sequence: Synthetic oligonucleotide
ggagcucagggcgcgcagg

SEQ ID NO: 2038624 - RNA, 19 nt, Artificial Sequence
  Description of Artificial Sequence: Synthetic oligonucleotide
ccauggauggcagcaauca

SEQ ID NO: 2038625 - RNA, 19 nt, Artificial Sequence
  Description of Artificial Sequence: Synthetic oligonucleotide
agcccgacagucggagucu

SEQ ID NO: 2038626 - RNA, 19 nt, Artificial Sequence
  Description of Artificial Sequence: Synthetic oligonucleotide
uuguggcccgagaguuccu

SEQ ID NO: 2038627 - RNA, 19 nt, Artificial Sequence
  Description of Artificial Sequence: Synthetic oligonucleotide
acggagccuuccucucuca

SEQ ID NO: 2038628 - RNA, 19 nt, Artificial Sequence
  Description of Artificial Sequence: Synthetic oligonucleotide
cucgggaguagauuagguu

SEQ ID NO: 2038629 - RNA, 19 nt, Artificial Sequence
  Description of Artificial Sequence: Synthetic oligonucleotide
agcauuccaccaacucccu

SEQ ID NO: 2038630 - RNA, 19 nt, Artificial Sequence
  Description of Artificial Sequence: Synthetic oligonucleotide
cugcgcagaggagcucagg

SEQ ID NO: 2038631 - RNA, 19 nt, Artificial Sequence
  Description of Artificial Sequence: Synthetic oligonucleotide
ggcacugacccuccacgga

SEQ ID NO: 2038632 - RNA, 19 nt, Artificial Sequence
  Description of Artificial Sequence: Synthetic oligonucleotide
gucaccugaagagacucau

SEQ ID NO: 2038633 - RNA, 19 nt, Artificial Sequence
  Description of Artificial Sequence: Synthetic oligonucleotide
gucggagucuugggaaauc

SEQ ID NO: 2038634 - RNA, 19 nt, Artificial Sequence
  Description of Artificial Sequence: Synthetic oligonucleotide
ccaugaugucgauaccuga

SEQ ID NO: 2038635 - RNA, 19 nt, Artificial Sequence
  Description of Artificial Sequence: Synthetic oligonucleotide
gcugcaguguccccacguc

SEQ ID NO: 2038636 - RNA, 19 nt, Artificial Sequence
  Description of Artificial Sequence: Synthetic oligonucleotide
agcugcacguggaggacau

SEQ ID NO: 2038637 - RNA, 19 nt, Artificial Sequence
  Description of Artificial Sequence: Synthetic oligonucleotide
ggcucucguccacggaaug

SEQ ID NO: 2038638 - RNA, 19 nt, Artificial Sequence
  Description of Artificial Sequence: Synthetic oligonucleotide
cagucgcugcagugucccc

SEQ ID NO: 2038639 - RNA, 19 nt, Artificial Sequence
  Description of Artificial Sequence: Synthetic oligonucleotide
gaggugcgccauguccaug

SEQ ID NO: 2038640 - RNA, 19 nt, Artificial Sequence
  Description of Artificial Sequence: Synthetic oligonucleotide
cgccagagagcacaacagc

SEQ ID NO: 2038641 - RNA, 19 nt, Artificial Sequence
  Description of Artificial Sequence: Synthetic oligonucleotide
ggaagaaggcacugacccu

SEQ ID NO: 2038642 - RNA, 19 nt, Artificial Sequence
  Description of Artificial Sequence: Synthetic oligonucleotide
uggcagcaaucaccggcuu

SEQ ID NO: 2038643 - RNA, 19 nt, Artificial Sequence
  Description of Artificial Sequence: Synthetic oligonucleotide
ugaugaggucacggagaua

SEQ ID NO: 2038644 - RNA, 19 nt, Artificial Sequence
  Description of Artificial Sequence: Synthetic oligonucleotide
gcucauguuccagguggcc

SEQ ID NO: 2038645 - RNA, 19 nt, Artificial Sequence
  Description of Artificial Sequence: Synthetic oligonucleotide
gcagaggagcucagggcgc

SEQ ID NO: 2038646 - RNA, 19 nt, Artificial Sequence
  Description of Artificial Sequence: Synthetic oligonucleotide
gcacuuuugguguccuucu

SEQ ID NO: 2038647 - RNA, 19 nt, Artificial Sequence
  Description of Artificial Sequence: Synthetic oligonucleotide
cucucguccacggaauggu

SEQ ID NO: 2038648 - RNA, 19 nt, Artificial Sequence
  Description of Artificial Sequence: Synthetic oligonucleotide
agccuuccucucucaggau

SEQ ID NO: 2038649 - RNA, 19 nt, Artificial Sequence
  Description of Artificial Sequence: Synthetic oligonucleotide
gcacaacagcccgacaguc

SEQ ID NO: 2038650 - RNA, 19 nt, Artificial Sequence
  Description of Artificial Sequence: Synthetic oligonucleotide
guacaaugggcgaccacau

SEQ ID NO: 2038651 - RNA, 19 nt, Artificial Sequence
  Description of Artificial Sequence: Synthetic oligonucleotide
caaggcucucguccacgga

SEQ ID NO: 2038652 - RNA, 19 nt, Artificial Sequence
  Description of Artificial Sequence: Synthetic oligonucleotide
ccagaaggccuuguucaug

SEQ ID NO: 2038653 - RNA, 19 nt, Artificial Sequence
  Description of Artificial Sequence: Synthetic oligonucleotide
cgacagucggagucuuggg

SEQ ID NO: 2038654 - RNA, 19 nt, Artificial Sequence
  Description of Artificial Sequence: Synthetic oligonucleotide
gggcagucgcugcaguguc

SEQ ID NO: 2038655 - RNA, 19 nt, Artificial Sequence
  Description of Artificial Sequence: Synthetic oligonucleotide
agcacgccguggagucggc

SEQ ID NO: 2038656 - RNA, 19 nt, Artificial Sequence
  Description of Artificial Sequence: Synthetic oligonucleotide
cgggaguagauuagguuga

SEQ ID NO: 2038657 - RNA, 19 nt, Artificial Sequence
  Description of Artificial Sequence: Synthetic oligonucleotide
caacagcccgacagucgga

SEQ ID NO: 2038658 - RNA, 19 nt, Artificial Sequence
  Description of Artificial Sequence: Synthetic oligonucleotide
gcugaccagcccacugucc

SEQ ID NO: 2038659 - RNA, 19 nt, Artificial Sequence
  Description of Artificial Sequence: Synthetic oligonucleotide
aucaccggcuuggggcacu

SEQ ID NO: 2038660 - RNA, 19 nt, Artificial Sequence
  Description of Artificial Sequence: Synthetic oligonucleotide
agccgccagggcaaaggcu

SEQ ID NO: 2038661 - RNA, 19 nt, Artificial Sequence
  Description of Artificial Sequence: Synthetic oligonucleotide
aggcucucguccacggaau

SEQ ID NO: 2038662 - RNA, 19 nt, Artificial Sequence
  Description of Artificial Sequence: Synthetic oligonucleotide
uggcacuuuugguguccuu

SEQ ID NO: 2038663 - RNA, 19 nt, Artificial Sequence
  Description of Artificial Sequence: Synthetic oligonucleotide
ggccuuguucauggcauuc

SEQ ID NO: 2038664 - RNA, 19 nt, Artificial Sequence
  Description of Artificial Sequence: Synthetic oligonucleotide
cugggccgaugucaccuga

SEQ ID NO: 2038665 - RNA, 19 nt, Artificial Sequence
  Description of Artificial Sequence: Synthetic oligonucleotide
agcccacuguccagggccu

SEQ ID NO: 2038666 - RNA, 19 nt, Artificial Sequence
  Description of Artificial Sequence: Synthetic oligonucleotide
cucgucagccaucauccuu

SEQ ID NO: 2038667 - RNA, 19 nt, Artificial Sequence
  Description of Artificial Sequence: Synthetic oligonucleotide
aucauccuucgggccguga

SEQ ID NO: 2038668 - RNA, 19 nt, Artificial Sequence
  Description of Artificial Sequence: Synthetic oligonucleotide
uuccugcgccagagagcac

SEQ ID NO: 2038669 - RNA, 19 nt, Artificial Sequence
  Description of Artificial Sequence: Synthetic oligonucleotide
gcauuccaccaacucccuc

SEQ ID NO: 2038670 - RNA, 19 nt, Artificial Sequence
  Description of Artificial Sequence: Synthetic oligonucleotide
ccacggaauggucucggga

SEQ ID NO: 2038671 - RNA, 19 nt, Artificial Sequence
  Description of Artificial Sequence: Synthetic oligonucleotide
ccccacgucggcagccagg

SEQ ID NO: 2038672 - RNA, 19 nt, Artificial Sequence
  Description of Artificial Sequence: Synthetic oligonucleotide
ggccgguuuagcugcacgu

SEQ ID NO: 2038673 - RNA, 19 nt, Artificial Sequence
  Description of Artificial Sequence: Synthetic oligonucleotide
cgucagccaucauccuucg

SEQ ID NO: 2038674 - RNA, 19 nt, Artificial Sequence
  Description of Artificial Sequence: Synthetic oligonucleotide
cccacuguccagggccucg

SEQ ID NO: 2038675 - RNA, 19 nt, Artificial Sequence
  Description of Artificial Sequence: Synthetic oligonucleotide
ggcagucgcugcagugucc

SEQ ID NO: 2038676 - RNA, 19 nt, Artificial Sequence
  Description of Artificial Sequence: Synthetic oligonucleotide
ccgaugucaccugaagaga

SEQ ID NO: 2038677 - RNA, 19 nt, Artificial Sequence
  Description of Artificial Sequence: Synthetic oligonucleotide
caguguccccacgucggca

SEQ ID NO: 2038678 - RNA, 19 nt, Artificial Sequence
  Description of Artificial Sequence: Synthetic oligonucleotide
ccugcgcagaggagcucag

SEQ ID NO: 2038679 - RNA, 19 nt, Artificial Sequence
  Description of Artificial Sequence: Synthetic oligonucleotide
ggacaugcuucugggccga

SEQ ID NO: 2038680 - RNA, 19 nt, Artificial Sequence
  Description of Artificial Sequence: Synthetic oligonucleotide
ccggcuuggggcacuucuc

SEQ ID NO: 2038681 - RNA, 19 nt, Artificial Sequence
  Description of Artificial Sequence: Synthetic oligonucleotide
ccuucgggccgugaagguc

SEQ ID NO: 2038682 - RNA, 19 nt, Artificial Sequence
  Description of Artificial Sequence: Synthetic oligonucleotide
ccacauggaagaaggcacu

SEQ ID NO: 2038683 - RNA, 19 nt, Artificial Sequence
  Description of Artificial Sequence: Synthetic oligonucleotide
caucauccuucgggccgug

SEQ ID NO: 2038684 - RNA, 19 nt, Artificial Sequence
  Description of Artificial Sequence: Synthetic oligonucleotide
ggccccugaagaacuaagu

SEQ ID NO: 2038685 - RNA, 19 nt, Artificial Sequence
  Description of Artificial Sequence: Synthetic oligonucleotide
ccgaugaccuugggcaguc

SEQ ID NO: 2038686 - RNA, 19 nt, Artificial Sequence
  Description of Artificial Sequence: Synthetic oligonucleotide
guggcacuuuugguguccu

SEQ ID NO: 2038687 - RNA, 19 nt, Artificial Sequence
  Description of Artificial Sequence: Synthetic oligonucleotide
gccauguagucaaggcucu

SEQ ID NO: 2038688 - RNA, 19 nt, Artificial Sequence
  Description of Artificial Sequence: Synthetic oligonucleotide
ucgggccgugaaggucagc

SEQ ID NO: 2038689 - RNA, 19 nt, Artificial Sequence
  Description of Artificial Sequence: Synthetic oligonucleotide
ucaccggcuuggggcacuu

SEQ ID NO: 2038690 - RNA, 19 nt, Artificial Sequence
  Description of Artificial Sequence: Synthetic oligonucleotide
cguccacggaauggucucg

SEQ ID NO: 2038691 - RNA, 19 nt, Artificial Sequence
  Description of Artificial Sequence: Synthetic oligonucleotide
ccaaugcaaccuccaugga

SEQ ID NO: 2038692 - RNA, 19 nt, Artificial Sequence
  Description of Artificial Sequence: Synthetic oligonucleotide
cacuuuugguguccuucuu

SEQ ID NO: 2038693 - RNA, 19 nt, Artificial Sequence
  Description of Artificial Sequence: Synthetic oligonucleotide
gcucguugaccaggcucug

SEQ ID NO: 2038694 - RNA, 19 nt, Artificial Sequence
  Description of Artificial Sequence: Synthetic oligonucleotide
gggucugcagcaugcucau

SEQ ID NO: 2038695 - RNA, 19 nt, Artificial Sequence
  Description of Artificial Sequence: Synthetic oligonucleotide
cccgacagucggagucuug

SEQ ID NO: 2038696 - RNA, 19 nt, Artificial Sequence
  Description of Artificial Sequence: Synthetic oligonucleotide
ccauguagucaaggcucuc

SEQ ID NO: 2038697 - RNA, 19 nt, Artificial Sequence
  Description of Artificial Sequence: Synthetic oligonucleotide
ggaggugcgccauguccau

SEQ ID NO: 2038698 - RNA, 19 nt, Artificial Sequence
  Description of Artificial Sequence: Synthetic oligonucleotide
cggagauaccaggccgugc

SEQ ID NO: 2038699 - RNA, 19 nt, Artificial Sequence
  Description of Artificial Sequence: Synthetic oligonucleotide
gcugacgccggggccccgc

SEQ ID NO: 2038700 - RNA, 19 nt, Artificial Sequence
  Description of Artificial Sequence: Synthetic oligonucleotide
ccuccugcgcagaggagcu

SEQ ID NO: 2038701 - RNA, 19 nt, Artificial Sequence
  Description of Artificial Sequence: Synthetic oligonucleotide
cagccacagggcucuugcu

SEQ ID NO: 2038702 - RNA, 19 nt, Artificial Sequence
  Description of Artificial Sequence: Synthetic oligonucleotide
gcgccauguccaugauguc

SEQ ID NO: 2038703 - RNA, 19 nt, Artificial Sequence
  Description of Artificial Sequence: Synthetic oligonucleotide
ggaguagauuagguugauu

SEQ ID NO: 2038704 - RNA, 19 nt, Artificial Sequence
  Description of Artificial Sequence: Synthetic oligonucleotide
cgauaccugaagugaacau

SEQ ID NO: 2038705 - RNA, 19 nt, Artificial Sequence
  Description of Artificial Sequence: Synthetic oligonucleotide
gggaguagauuagguugau

SEQ ID NO: 2038706 - RNA, 19 nt, Artificial Sequence
  Description of Artificial Sequence: Synthetic oligonucleotide
ccuggacggacuugauuau

SEQ ID NO: 2038707 - RNA, 19 nt, Artificial Sequence
  Description of Artificial Sequence: Synthetic oligonucleotide
ccgugcgggcugcaucauc

SEQ ID NO: 2038708 - RNA, 19 nt, Artificial Sequence
  Description of Artificial Sequence: Synthetic oligonucleotide
gccgugaaggucagcucgu

SEQ ID NO: 2038709 - RNA, 19 nt, Artificial Sequence
  Description of Artificial Sequence: Synthetic oligonucleotide
cgaugaccuugggcagucg

SEQ ID NO: 2038710 - RNA, 19 nt, Artificial Sequence
  Description of Artificial Sequence: Synthetic oligonucleotide
cugacccuccacggagccu

SEQ ID NO: 2038711 - RNA, 19 nt, Artificial Sequence
  Description of Artificial Sequence: Synthetic oligonucleotide
cugccuggacggacuugau

SEQ ID NO: 2038712 - RNA, 19 nt, Artificial Sequence
  Description of Artificial Sequence: Synthetic oligonucleotide
ggugcgccauguccaugau

SEQ ID NO: 2038713 - RNA, 19 nt, Artificial Sequence
  Description of Artificial Sequence: Synthetic oligonucleotide
ggggccccgcugaccggag

SEQ ID NO: 2038714 - RNA, 19 nt, Artificial Sequence
  Description of Artificial Sequence: Synthetic oligonucleotide
gacaugcuucugggccgau

SEQ ID NO: 2038715 - RNA, 19 nt, Artificial Sequence
  Description of Artificial Sequence: Synthetic oligonucleotide
ccggggccccgcugaccgg

SEQ ID NO: 2038716 - RNA, 19 nt, Artificial Sequence
  Description of Artificial Sequence: Synthetic oligonucleotide
ccugggcacaguagcgaau

SEQ ID NO: 2038717 - RNA, 19 nt, Artificial Sequence
  Description of Artificial Sequence: Synthetic oligonucleotide
cggcagccaggcccaaauc

SEQ ID NO: 2038718 - RNA, 19 nt, Artificial Sequence
  Description of Artificial Sequence: Synthetic oligonucleotide
ccgcugaccggagccucuc

SEQ ID NO: 2038719 - RNA, 19 nt, Artificial Sequence
  Description of Artificial Sequence: Synthetic oligonucleotide
cacggcugaccagcccacu

SEQ ID NO: 2038720 - RNA, 19 nt, Artificial Sequence
  Description of Artificial Sequence: Synthetic oligonucleotide
ccccgcugaccggagccuc

SEQ ID NO: 2038721 - RNA, 19 nt, Artificial Sequence
  Description of Artificial Sequence: Synthetic oligonucleotide
ccucgucagccaucauccu

SEQ ID NO: 2038722 - RNA, 19 nt, Artificial Sequence
  Description of Artificial Sequence: Synthetic oligonucleotide
cgcugcaguguccccacgu

SEQ ID NO: 2038723 - RNA, 19 nt, Artificial Sequence
  Description of Artificial Sequence: Synthetic oligonucleotide
cccgaugaccuugggcagu

SEQ ID NO: 2038724 - RNA, 19 nt, Artificial Sequence
  Description of Artificial Sequence: Synthetic oligonucleotide
cggcugaccagcccacugu

SEQ ID NO: 2038725 - RNA, 19 nt, Artificial Sequence
  Description of Artificial Sequence: Synthetic oligonucleotide
ccucuucucuggccgguuu

SEQ ID NO: 2038726 - RNA, 19 nt, Artificial Sequence
  Description of Artificial Sequence: Synthetic oligonucleotide
ccauggcugccuggacgga

SEQ ID NO: 2038727 - RNA, 19 nt, Artificial Sequence
  Description of Artificial Sequence: Synthetic oligonucleotide
cccgcugaccggagccucu

SEQ ID NO: 2038728 - RNA, 19 nt, Artificial Sequence
  Description of Artificial Sequence: Synthetic oligonucleotide
cguugaccaggcucugguu

SEQ ID NO: 2038729 - RNA, 19 nt, Artificial Sequence
  Description of Artificial Sequence: Synthetic oligonucleotide
caggccgugcgggcugcau

SEQ ID NO: 2038730 - RNA, 19 nt, Artificial Sequence
  Description of Artificial Sequence: Synthetic oligonucleotide
cgccggggccccgcugacc

SEQ ID NO: 2038731 - RNA, 19 nt, Artificial Sequence
  Description of Artificial Sequence: Synthetic oligonucleotide
cggggccccgcugaccgga

SEQ ID NO: 2038732 - RNA, 19 nt, Artificial Sequence
  Description of Artificial Sequence: Synthetic oligonucleotide
gcccgacagucggagucuu

SEQ ID NO: 2038733 - RNA, 19 nt, Artificial Sequence
  Description of Artificial Sequence: Synthetic oligonucleotide
ccgugaaggucagcucguu

SEQ ID NO: 2038734 - RNA, 19 nt, Artificial Sequence
  Description of Artificial Sequence: Synthetic oligonucleotide
cgccguggagucggcugga

SEQ ID NO: 2038735 - RNA, 19 nt, Artificial Sequence
  Description of Artificial Sequence: Synthetic oligonucleotide
gccgugcgggcugcaucau

SEQ ID NO: 2038736 - RNA, 19 nt, Artificial Sequence
  Description of Artificial Sequence: Synthetic oligonucleotide
cgucggcagccaggcccaa

SEQ ID NO: 2038737 - RNA, 19 nt, Artificial Sequence
  Description of Artificial Sequence: Synthetic oligonucleotide
aagaggaagagagaucugc

SEQ ID NO: 2038738 - RNA, 19 nt, Artificial Sequence
  Description of Artificial Sequence: Synthetic oligonucleotide
auugaguacacaauggcgc

SEQ ID NO: 2038739 - RNA, 19 nt, Artificial Sequence
  Description of Artificial Sequence: Synthetic oligonucleotide
cauauacaacccaagaggg

SEQ ID NO: 2038740 - RNA, 19 nt, Artificial Sequence
  Description of Artificial Sequence: Synthetic oligonucleotide
gauaguuggucccauauac

SEQ ID NO: 2038741 - RNA, 19 nt, Artificial Sequence
  Description of Artificial Sequence: Synthetic oligonucleotide
aaggcugugagguucuagg

SEQ ID NO: 2038742 - RNA, 19 nt, Artificial Sequence
  Description of Artificial Sequence: Synthetic oligonucleotide
ugaggguuguccaacacag

SEQ ID NO: 2038743 - RNA, 19 nt, Artificial Sequence
  Description of Artificial Sequence: Synthetic oligonucleotide
ucuuguacugcucaaugug

SEQ ID NO: 2038744 - RNA, 19 nt, Artificial Sequence
  Description of Artificial Sequence: Synthetic oligonucleotide
uacacaauggcgcacguga

SEQ ID NO: 2038745 - RNA, 19 nt, Artificial Sequence
  Description of Artificial Sequence: Synthetic oligonucleotide
ucauugaguacacaauggc

SEQ ID NO: 2038746 - RNA, 19 nt, Artificial Sequence
  Description of Artificial Sequence: Synthetic oligonucleotide
augaaaauggcuuugcgau

SEQ ID NO: 2038747 - RNA, 19 nt, Artificial Sequence
  Description of Artificial Sequence: Synthetic oligonucleotide
uauacaacccaagaggggc

SEQ ID NO: 2038748 - RNA, 19 nt, Artificial Sequence
  Description of Artificial Sequence: Synthetic oligonucleotide
ugccagacaggaaagagcc

SEQ ID NO: 2038749 - RNA, 19 nt, Artificial Sequence
  Description of Artificial Sequence: Synthetic oligonucleotide
agugagguuccccuggacc

SEQ ID NO: 2038750 - RNA, 19 nt, Artificial Sequence
  Description of Artificial Sequence: Synthetic oligonucleotide
cauugaguacacaauggcg

SEQ ID NO: 2038751 - RNA, 19 nt, Artificial Sequence
  Description of Artificial Sequence: Synthetic oligonucleotide
guuggucccauauacaacc

SEQ ID NO: 2038752 - RNA, 19 nt, Artificial Sequence
  Description of Artificial Sequence: Synthetic oligonucleotide
accaguauugcugauaaag

SEQ ID NO: 2038753 - RNA, 19 nt, Artificial Sequence
  Description of Artificial Sequence: Synthetic oligonucleotide
cucauugaguacacaaugg

SEQ ID NO: 2038754 - RNA, 19 nt, Artificial Sequence
  Description of Artificial Sequence: Synthetic oligonucleotide
augccagaccgccagaagc

SEQ ID NO: 2038755 - RNA, 19 nt, Artificial Sequence
  Description of Artificial Sequence: Synthetic oligonucleotide
gaugaaaauggcuuugcga

SEQ ID NO: 2038756 - RNA, 19 nt, Artificial Sequence
  Description of Artificial Sequence: Synthetic oligonucleotide
uuugcguggggccagcucc

SEQ ID NO: 2038757 - RNA, 19 nt, Artificial Sequence
  Description of Artificial Sequence: Synthetic oligonucleotide
ccauauacaacccaagagg

SEQ ID NO: 2038758 - RNA, 19 nt, Artificial Sequence
  Description of Artificial Sequence: Synthetic oligonucleotide
gaaguggugcacgugaggg

SEQ ID NO: 2038759 - RNA, 19 nt, Artificial Sequence
  Description of Artificial Sequence: Synthetic oligonucleotide
aagacuuccauuaggccag

SEQ ID NO: 2038760 - RNA, 19 nt, Artificial Sequence
  Description of Artificial Sequence: Synthetic oligonucleotide
aaguaggugguacugucca

SEQ ID NO: 2038761 - RNA, 19 nt, Artificial Sequence
  Description of Artificial Sequence: Synthetic oligonucleotide
agcucugugcucugggucc

SEQ ID NO: 2038762 - RNA, 19 nt, Artificial Sequence
  Description of Artificial Sequence: Synthetic oligonucleotide
gaaguggccuuccaagccg

SEQ ID NO: 2038763 - RNA, 19 nt, Artificial Sequence
  Description of Artificial Sequence: Synthetic oligonucleotide
aaguggugcacgugagggc

SEQ ID NO: 2038764 - RNA, 19 nt, Artificial Sequence
  Description of Artificial Sequence: Synthetic oligonucleotide
aggguccuuggccaaaugc

SEQ ID NO: 2038765 - RNA, 19 nt, Artificial Sequence
  Description of Artificial Sequence: Synthetic oligonucleotide
ggaugugggaaauggaugg

SEQ ID NO: 2038766 - RNA, 19 nt, Artificial Sequence
  Description of Artificial Sequence: Synthetic oligonucleotide
uacaaaggccuucagugac

SEQ ID NO: 2038767 - RNA, 19 nt, Artificial Sequence
  Description of Artificial Sequence: Synthetic oligonucleotide
cucaccaccaguauugcug

SEQ ID NO: 2038768 - RNA, 19 nt, Artificial Sequence
  Description of Artificial Sequence: Synthetic oligonucleotide
gguuguccaacacagcucg

SEQ ID NO: 2038769 - RNA, 19 nt, Artificial Sequence
  Description of Artificial Sequence: Synthetic oligonucleotide
guauugcugauaaagauga

SEQ ID NO: 2038770 - RNA, 19 nt, Artificial Sequence
  Description of Artificial Sequence: Synthetic oligonucleotide
acuuccauuaggccagggg

SEQ ID NO: 2038771 - RNA, 19 nt, Artificial Sequence
  Description of Artificial Sequence: Synthetic oligonucleotide
aguauugcugauaaagaug

SEQ ID NO: 2038772 - RNA, 19 nt, Artificial Sequence
  Description of Artificial Sequence: Synthetic oligonucleotide
ugagccagcucauugagua

SEQ ID NO: 2038773 - RNA, 19 nt, Artificial Sequence
  Description of Artificial Sequence: Synthetic oligonucleotide
agugacuucaccaccgagg

SEQ ID NO: 2038774 - RNA, 19 nt, Artificial Sequence
  Description of Artificial Sequence: Synthetic oligonucleotide
uuuggccuggccaacacuc

SEQ ID NO: 2038775 - RNA, 19 nt, Artificial Sequence
  Description of Artificial Sequence: Synthetic oligonucleotide
aagaggggcccagaaaagg

SEQ ID NO: 2038776 - RNA, 19 nt, Artificial Sequence
  Description of Artificial Sequence: Synthetic oligonucleotide
aggaccaaugguuugcgug

SEQ ID NO: 2038777 - RNA, 19 nt, Artificial Sequence
  Description of Artificial Sequence: Synthetic oligonucleotide
ucccauauacaacccaaga

SEQ ID NO: 2038778 - RNA, 19 nt, Artificial Sequence
  Description of Artificial Sequence: Synthetic oligonucleotide
aggguuguccaacacagcu

SEQ ID NO: 2038779 - RNA, 19 nt, Artificial Sequence
  Description of Artificial Sequence: Synthetic oligonucleotide
aucaaagaggaagagagau

SEQ ID NO: 2038780 - RNA, 19 nt, Artificial Sequence
  Description of Artificial Sequence: Synthetic oligonucleotide
aaaggaccaaugguuugcg

SEQ ID NO: 2038781 - RNA, 19 nt, Artificial Sequence
  Description of Artificial Sequence: Synthetic oligonucleotide
gguacuguccagcacagcc

SEQ ID NO: 2038782 - RNA, 19 nt, Artificial Sequence
  Description of Artificial Sequence: Synthetic oligonucleotide
aauggcgcacgugaugccg

SEQ ID NO: 2038783 - RNA, 19 nt, Artificial Sequence
  Description of Artificial Sequence: Synthetic oligonucleotide
gaaaggaccaaugguuugc

SEQ ID NO: 2038784 - RNA, 19 nt, Artificial Sequence
  Description of Artificial Sequence: Synthetic oligonucleotide
uagacguccaggcuuuccc

SEQ ID NO: 2038785 - RNA, 19 nt, Artificial Sequence
  Description of Artificial Sequence: Synthetic oligonucleotide
ucuugcagccauuggacga

SEQ ID NO: 2038786 - RNA, 19 nt, Artificial Sequence
  Description of Artificial Sequence: Synthetic oligonucleotide
ggucccaucugccagacag

SEQ ID NO: 2038787 - RNA, 19 nt, Artificial Sequence
  Description of Artificial Sequence: Synthetic oligonucleotide
uugaguacacaauggcgca

SEQ ID NO: 2038788 - RNA, 19 nt, Artificial Sequence
  Description of Artificial Sequence: Synthetic oligonucleotide
ugcgccaugccuccaaggc

SEQ ID NO: 2038789 - RNA, 19 nt, Artificial Sequence
  Description of Artificial Sequence: Synthetic oligonucleotide
gacuucaccaccgaggguc

SEQ ID NO: 2038790 - RNA, 19 nt, Artificial Sequence
  Description of Artificial Sequence: Synthetic oligonucleotide
ucaaagaggaagagagauc

SEQ ID NO: 2038791 - RNA, 19 nt, Artificial Sequence
  Description of Artificial Sequence: Synthetic oligonucleotide
aagucgcauucgcaguacg

SEQ ID NO: 2038792 - RNA, 19 nt, Artificial Sequence
  Description of Artificial Sequence: Synthetic oligonucleotide
cuuugcgauaguugguccc

SEQ ID NO: 2038793 - RNA, 19 nt, Artificial Sequence
  Description of Artificial Sequence: Synthetic oligonucleotide
agagauacugugccagcag

SEQ ID NO: 2038794 - RNA, 19 nt, Artificial Sequence
  Description of Artificial Sequence: Synthetic oligonucleotide
ggugaaguggccuuccaag

SEQ ID NO: 2038795 - RNA, 19 nt, Artificial Sequence
  Description of Artificial Sequence: Synthetic oligonucleotide
gcugauaucuucccggucc

SEQ ID NO: 2038796 - RNA, 19 nt, Artificial Sequence
  Description of Artificial Sequence: Synthetic oligonucleotide
uucuuguacugcucaaugu

SEQ ID NO: 2038797 - RNA, 19 nt, Artificial Sequence
  Description of Artificial Sequence: Synthetic oligonucleotide
ugcagggaaaggaccaaug

SEQ ID NO: 2038798 - RNA, 19 nt, Artificial Sequence
  Description of Artificial Sequence: Synthetic oligonucleotide
accgccagaagccauggug

SEQ ID NO: 2038799 - RNA, 19 nt, Artificial Sequence
  Description of Artificial Sequence: Synthetic oligonucleotide
ugccagaccgccagaagcc

SEQ ID NO: 2038800 - RNA, 19 nt, Artificial Sequence
  Description of Artificial Sequence: Synthetic oligonucleotide
gaguacacaauggcgcacg

SEQ ID NO: 2038801 - RNA, 19 nt, Artificial Sequence
  Description of Artificial Sequence: Synthetic oligonucleotide
gaagagauacugugccagc

SEQ ID NO: 2038802 - RNA, 19 nt, Artificial Sequence
  Description of Artificial Sequence: Synthetic oligonucleotide
ggaccaaugguuugcgugg

SEQ ID NO: 2038803 - RNA, 19 nt, Artificial Sequence
  Description of Artificial Sequence: Synthetic oligonucleotide
aaagagcccucugguagac

SEQ ID NO: 2038804 - RNA, 19 nt, Artificial Sequence
  Description of Artificial Sequence: Synthetic oligonucleotide
aaaggugauucgggaggcc

SEQ ID NO: 2038805 - RNA, 19 nt, Artificial Sequence
  Description of Artificial Sequence: Synthetic oligonucleotide
cugacguaggacuucccag

SEQ ID NO: 2038806 - RNA, 19 nt, Artificial Sequence
  Description of Artificial Sequence: Synthetic oligonucleotide
auugcugauaaagaugaaa

SEQ ID NO: 2038807 - RNA, 19 nt, Artificial Sequence
  Description of Artificial Sequence: Synthetic oligonucleotide
ugacguaggacuucccagu

SEQ ID NO: 2038808 - RNA, 19 nt, Artificial Sequence
  Description of Artificial Sequence: Synthetic oligonucleotide
gugagguuccccuggaccc

SEQ ID NO: 2038809 - RNA, 19 nt, Artificial Sequence
  Description of Artificial Sequence: Synthetic oligonucleotide
uccaugaugccagaccgcc

SEQ ID NO: 2038810 - RNA, 19 nt, Artificial Sequence
  Description of Artificial Sequence: Synthetic oligonucleotide
gcagugauggcccugggag

SEQ ID NO: 2038811 - RNA, 19 nt, Artificial Sequence
  Description of Artificial Sequence: Synthetic oligonucleotide
ugaucugcucaccaccagu

SEQ ID NO: 2038812 - RNA, 19 nt, Artificial Sequence
  Description of Artificial Sequence: Synthetic oligonucleotide
auauacaacccaagagggg

SEQ ID NO: 2038813 - RNA, 19 nt, Artificial Sequence
  Description of Artificial Sequence: Synthetic oligonucleotide
agaggggcccagaaaaggc

SEQ ID NO: 2038814 - RNA, 19 nt, Artificial Sequence
  Description of Artificial Sequence: Synthetic oligonucleotide
aaugguuugcguggggcca

SEQ ID NO: 2038815 - RNA, 19 nt, Artificial Sequence
  Description of Artificial Sequence: Synthetic oligonucleotide
uguucauccucugggaagu

SEQ ID NO: 2038816 - RNA, 19 nt, Artificial Sequence
  Description of Artificial Sequence: Synthetic oligonucleotide
ugcucaauguggcugggau

SEQ ID NO: 2038817 - RNA, 19 nt, Artificial Sequence
  Description of Artificial Sequence: Synthetic oligonucleotide
aagagauacugugccagca

SEQ ID NO: 2038818 - RNA, 19 nt, Artificial Sequence
  Description of Artificial Sequence: Synthetic oligonucleotide
cugccagacaggaaagagc

SEQ ID NO: 2038819 - RNA, 19 nt, Artificial Sequence
  Description of Artificial Sequence: Synthetic oligonucleotide
gcucauugaguacacaaug

SEQ ID NO: 2038820 - RNA, 19 nt, Artificial Sequence
  Description of Artificial Sequence: Synthetic oligonucleotide
acguaggacuucccagugc

SEQ ID NO: 2038821 - RNA, 19 nt, Artificial Sequence
  Description of Artificial Sequence: Synthetic oligonucleotide
agcuccugcaggcugauau

SEQ ID NO: 2038822 - RNA, 19 nt, Artificial Sequence
  Description of Artificial Sequence: Synthetic oligonucleotide
caaugguuugcguggggcc

SEQ ID NO: 2038823 - RNA, 19 nt, Artificial Sequence
  Description of Artificial Sequence: Synthetic oligonucleotide
agagcccucugguagacgu

SEQ ID NO: 2038824 - RNA, 19 nt, Artificial Sequence
  Description of Artificial Sequence: Synthetic oligonucleotide
cauuggacgagaagagcug

SEQ ID NO: 2038825 - RNA, 19 nt, Artificial Sequence
  Description of Artificial Sequence: Synthetic oligonucleotide
agccguucaucuuuggccu

SEQ ID NO: 2038826 - RNA, 19 nt, Artificial Sequence
  Description of Artificial Sequence: Synthetic oligonucleotide
gugaaguggccuuccaagc

SEQ ID NO: 2038827 - RNA, 19 nt, Artificial Sequence
  Description of Artificial Sequence: Synthetic oligonucleotide
agacagaggaggcagugau

SEQ ID NO: 2038828 - RNA, 19 nt, Artificial Sequence
  Description of Artificial Sequence: Synthetic oligonucleotide
uuugcgauaguugguccca

SEQ ID NO: 2038829 - RNA, 19 nt, Artificial Sequence
  Description of Artificial Sequence: Synthetic oligonucleotide
uuggccaaaugcuggccag

SEQ ID NO: 2038830 - RNA, 19 nt, Artificial Sequence
  Description of Artificial Sequence: Synthetic oligonucleotide
ucgcauucgcaguacgagc

SEQ ID NO: 2038831 - RNA, 19 nt, Artificial Sequence
  Description of Artificial Sequence: Synthetic oligonucleotide
aguuggucccauauacaac

SEQ ID NO: 2038832 - RNA, 19 nt, Artificial Sequence
  Description of Artificial Sequence: Synthetic oligonucleotide
auacaacccaagaggggcc

SEQ ID NO: 2038833 - RNA, 19 nt, Artificial Sequence
  Description of Artificial Sequence: Synthetic oligonucleotide
gguugaucugcucaccacc

SEQ ID NO: 2038834 - RNA, 19 nt, Artificial Sequence
  Description of Artificial Sequence: Synthetic oligonucleotide
aggaguuuccuggugaagu

SEQ ID NO: 2038835 - RNA, 19 nt, Artificial Sequence
  Description of Artificial Sequence: Synthetic oligonucleotide
ugagguucuagggugccca

SEQ ID NO: 2038836 - RNA, 19 nt, Artificial Sequence
  Description of Artificial Sequence: Synthetic oligonucleotide
gaaguaggugguacugucc

SEQ ID NO: 2038837 - RNA, 19 nt, Artificial Sequence
  Description of Artificial Sequence: Synthetic oligonucleotide
gauaucuucccggucccug

SEQ ID NO: 2038838 - RNA, 19 nt, Artificial Sequence
  Description of Artificial Sequence: Synthetic oligonucleotide
uugaucugcucaccaccag

SEQ ID NO: 2038839 - RNA, 19 nt, Artificial Sequence
  Description of Artificial Sequence: Synthetic oligonucleotide
aaggugauucgggaggcca

SEQ ID NO: 2038840 - RNA, 19 nt, Artificial Sequence
  Description of Artificial Sequence: Synthetic oligonucleotide
gaaagagcccucugguaga

SEQ ID NO: 2038841 - RNA, 19 nt, Artificial Sequence
  Description of Artificial Sequence: Synthetic oligonucleotide
ugaaaauggcuuugcgaua

SEQ ID NO: 2038842 - RNA, 19 nt, Artificial Sequence
  Description of Artificial Sequence: Synthetic oligonucleotide
cccauauacaacccaagag

SEQ ID NO: 2038843 - RNA, 19 nt, Artificial Sequence
  Description of Artificial Sequence: Synthetic oligonucleotide
gacguaggacuucccagug

SEQ ID NO: 2038844 - RNA, 19 nt, Artificial Sequence
  Description of Artificial Sequence: Synthetic oligonucleotide
ugcgacugcgccaugccuc

SEQ ID NO: 2038845 - RNA, 19 nt, Artificial Sequence
  Description of Artificial Sequence: Synthetic oligonucleotide
auggugaggguuguccaac

SEQ ID NO: 2038846 - RNA, 19 nt, Artificial Sequence
  Description of Artificial Sequence: Synthetic oligonucleotide
gaugccagaccgccagaag

SEQ ID NO: 2038847 - RNA, 19 nt, Artificial Sequence
  Description of Artificial Sequence: Synthetic oligonucleotide
gauucgggaggccacuguc

SEQ ID NO: 2038848 - RNA, 19 nt, Artificial Sequence
  Description of Artificial Sequence: Synthetic oligonucleotide
cagguguuccuccaugaug

SEQ ID NO: 2038849 - RNA, 19 nt, Artificial Sequence
  Description of Artificial Sequence: Synthetic oligonucleotide
ugggaaguaggugguacug

SEQ ID NO: 2038850 - RNA, 19 nt, Artificial Sequence
  Description of Artificial Sequence: Synthetic oligonucleotide
uccuuggccaaaugcuggc

SEQ ID NO: 2038851 - RNA, 19 nt, Artificial Sequence
  Description of Artificial Sequence: Synthetic oligonucleotide
gucgcauucgcaguacgag

SEQ ID NO: 2038852 - RNA, 19 nt, Artificial Sequence
  Description of Artificial Sequence: Synthetic oligonucleotide
aguaggugguacuguccag

SEQ ID NO: 2038853 - RNA, 19 nt, Artificial Sequence
  Description of Artificial Sequence: Synthetic oligonucleotide
guugggccaggucacauuc

SEQ ID NO: 2038854 - RNA, 19 nt, Artificial Sequence
  Description of Artificial Sequence: Synthetic oligonucleotide
caagaggggcccagaaaag

SEQ ID NO: 2038855 - RNA, 19 nt, Artificial Sequence
  Description of Artificial Sequence: Synthetic oligonucleotide
aguggugcacgugagggcu

SEQ ID NO: 2038856 - RNA, 19 nt, Artificial Sequence
  Description of Artificial Sequence: Synthetic oligonucleotide
guacaaaggccuucaguga

SEQ ID NO: 2038857 - RNA, 19 nt, Artificial Sequence
  Description of Artificial Sequence: Synthetic oligonucleotide
agggaaaggaccaaugguu

SEQ ID NO: 2038858 - RNA, 19 nt, Artificial Sequence
  Description of Artificial Sequence: Synthetic oligonucleotide
gugagggcugcgaaggccg

SEQ ID NO: 2038859 - RNA, 19 nt, Artificial Sequence
  Description of Artificial Sequence: Synthetic oligonucleotide
ugguaggggagaaguggug

SEQ ID NO: 2038860 - RNA, 19 nt, Artificial Sequence
  Description of Artificial Sequence: Synthetic oligonucleotide
ucuuuggccuggccaacac

SEQ ID NO: 2038861 - RNA, 19 nt, Artificial Sequence
  Description of Artificial Sequence: Synthetic oligonucleotide
ugguugaucugcucaccac

SEQ ID NO: 2038862 - RNA, 19 nt, Artificial Sequence
  Description of Artificial Sequence: Synthetic oligonucleotide
gauacugugccagcaggga

SEQ ID NO: 2038863 - RNA, 19 nt, Artificial Sequence
  Description of Artificial Sequence: Synthetic oligonucleotide
aauggaugguaggggagaa

SEQ ID NO: 2038864 - RNA, 19 nt, Artificial Sequence
  Description of Artificial Sequence: Synthetic oligonucleotide
aaggaccaaugguuugcgu

SEQ ID NO: 2038865 - RNA, 19 nt, Artificial Sequence
  Description of Artificial Sequence: Synthetic oligonucleotide
aggugguacuguccagcac

SEQ ID NO: 2038866 - RNA, 19 nt, Artificial Sequence
  Description of Artificial Sequence: Synthetic oligonucleotide
cagccauuggacgagaaga

SEQ ID NO: 2038867 - RNA, 19 nt, Artificial Sequence
  Description of Artificial Sequence: Synthetic oligonucleotide
uggugaaguggccuuccaa

SEQ ID NO: 2038868 - RNA, 19 nt, Artificial Sequence
  Description of Artificial Sequence: Synthetic oligonucleotide
ccuggaagagauacugugc

SEQ ID NO: 2038869 - RNA, 19 nt, Artificial Sequence
  Description of Artificial Sequence: Synthetic oligonucleotide
ugcacgugagggcugcgaa

SEQ ID NO: 2038870 - RNA, 19 nt, Artificial Sequence
  Description of Artificial Sequence: Synthetic oligonucleotide
ugauucgggaggccacugu

SEQ ID NO: 2038871 - RNA, 19 nt, Artificial Sequence
  Description of Artificial Sequence: Synthetic oligonucleotide
auuggacgagaagagcugu

SEQ ID NO: 2038872 - RNA, 19 nt, Artificial Sequence
  Description of Artificial Sequence: Synthetic oligonucleotide
gaccaaugguuugcguggg

SEQ ID NO: 2038873 - RNA, 19 nt, Artificial Sequence
  Description of Artificial Sequence: Synthetic oligonucleotide
ucgggagacugcuggcucc

SEQ ID NO: 2038874 - RNA, 19 nt, Artificial Sequence
  Description of Artificial Sequence: Synthetic oligonucleotide
agccauuggacgagaagag

SEQ ID NO: 2038875 - RNA, 19 nt, Artificial Sequence
  Description of Artificial Sequence: Synthetic oligonucleotide
aggggagaaguggugcacg

SEQ ID NO: 2038876 - RNA, 19 nt, Artificial Sequence
  Description of Artificial Sequence: Synthetic oligonucleotide
cuggacccagcucuugagc

SEQ ID NO: 2038877 - RNA, 19 nt, Artificial Sequence
  Description of Artificial Sequence: Synthetic oligonucleotide
gugaggguuguccaacaca

SEQ ID NO: 2038878 - RNA, 19 nt, Artificial Sequence
  Description of Artificial Sequence: Synthetic oligonucleotide
cacaauggcgcacgugaug

SEQ ID NO: 2038879 - RNA, 19 nt, Artificial Sequence
  Description of Artificial Sequence: Synthetic oligonucleotide
acgugagggcugcgaaggc

SEQ ID NO: 2038880 - RNA, 19 nt, Artificial Sequence
  Description of Artificial Sequence: Synthetic oligonucleotide
cagcucauugaguacacaa

SEQ ID NO: 2038881 - RNA, 19 nt, Artificial Sequence
  Description of Artificial Sequence: Synthetic oligonucleotide
ucuucccggucccugcgac

SEQ ID NO: 2038882 - RNA, 19 nt, Artificial Sequence
  Description of Artificial Sequence: Synthetic oligonucleotide
ggaaguaggugguacuguc

SEQ ID NO: 2038883 - RNA, 19 nt, Artificial Sequence
  Description of Artificial Sequence: Synthetic oligonucleotide
ggaguuuccuggugaagug

SEQ ID NO: 2038884 - RNA, 19 nt, Artificial Sequence
  Description of Artificial Sequence: Synthetic oligonucleotide
gaagagagaucugccacaa

SEQ ID NO: 2038885 - RNA, 19 nt, Artificial Sequence
  Description of Artificial Sequence: Synthetic oligonucleotide
auuccagacccggcaaguc

SEQ ID NO: 2038886 - RNA, 19 nt, Artificial Sequence
  Description of Artificial Sequence: Synthetic oligonucleotide
auaguuggucccauauaca

SEQ ID NO: 2038887 - RNA, 19 nt, Artificial Sequence
  Description of Artificial Sequence: Synthetic oligonucleotide
cuucccagugccuguccag

SEQ ID NO: 2038888 - RNA, 19 nt, Artificial Sequence
  Description of Artificial Sequence: Synthetic oligonucleotide
uggcuuugcgauaguuggu

SEQ ID NO: 2038889 - RNA, 19 nt, Artificial Sequence
  Description of Artificial Sequence: Synthetic oligonucleotide
gcaagacuuccauuaggcc

SEQ ID NO: 2038890 - RNA, 19 nt, Artificial Sequence
  Description of Artificial Sequence: Synthetic oligonucleotide
ugguagacguccaggcuuu

SEQ ID NO: 2038891 - RNA, 19 nt, Artificial Sequence
  Description of Artificial Sequence: Synthetic oligonucleotide
uggacgagaagagcuguuc

SEQ ID NO: 2038892 - RNA, 19 nt, Artificial Sequence
  Description of Artificial Sequence: Synthetic oligonucleotide
ggucacauuccagacccgg

SEQ ID NO: 2038893 - RNA, 19 nt, Artificial Sequence
  Description of Artificial Sequence: Synthetic oligonucleotide
ugaguacacaauggcgcac

SEQ ID NO: 2038894 - RNA, 19 nt, Artificial Sequence
  Description of Artificial Sequence: Synthetic oligonucleotide
aguacacaauggcgcacgu

SEQ ID NO: 2038895 - RNA, 19 nt, Artificial Sequence
  Description of Artificial Sequence: Synthetic oligonucleotide
gguaggggagaaguggugc

SEQ ID NO: 2038896 - RNA, 19 nt, Artificial Sequence
  Description of Artificial Sequence: Synthetic oligonucleotide
cuccaugaugccagaccgc

SEQ ID NO: 2038897 - RNA, 19 nt, Artificial Sequence
  Description of Artificial Sequence: Synthetic oligonucleotide
gcgaaggccgcccuggaag

SEQ ID NO: 2038898 - RNA, 19 nt, Artificial Sequence
  Description of Artificial Sequence: Synthetic oligonucleotide
agguguugggccaggucac

SEQ ID NO: 2038899 - RNA, 19 nt, Artificial Sequence
  Description of Artificial Sequence: Synthetic oligonucleotide
guaggggagaaguggugca

SEQ ID NO: 2038900 - RNA, 19 nt, Artificial Sequence
  Description of Artificial Sequence: Synthetic oligonucleotide
uucgggaggccacugucuu

SEQ ID NO: 2038901 - RNA, 19 nt, Artificial Sequence
  Description of Artificial Sequence: Synthetic oligonucleotide
guugaucugcucaccacca

SEQ ID NO: 2038902 - RNA, 19 nt, Artificial Sequence
  Description of Artificial Sequence: Synthetic oligonucleotide
uggugaggguuguccaaca

SEQ ID NO: 2038903 - RNA, 19 nt, Artificial Sequence
  Description of Artificial Sequence: Synthetic oligonucleotide
gcugcaagacuuccauuag

SEQ ID NO: 2038904 - RNA, 19 nt, Artificial Sequence
  Description of Artificial Sequence: Synthetic oligonucleotide
uucccggucccugcgacug

SEQ ID NO: 2038905 - RNA, 19 nt, Artificial Sequence
  Description of Artificial Sequence: Synthetic oligonucleotide
gucccauauacaacccaag

SEQ ID NO: 2038906 - RNA, 19 nt, Artificial Sequence
  Description of Artificial Sequence: Synthetic oligonucleotide
caguauugcugauaaagau

SEQ ID NO: 2038907 - RNA, 19 nt, Artificial Sequence
  Description of Artificial Sequence: Synthetic oligonucleotide
gagguucuagggugcccag

SEQ ID NO: 2038908 - RNA, 19 nt, Artificial Sequence
  Description of Artificial Sequence: Synthetic oligonucleotide
guucuagggugcccaggag

SEQ ID NO: 2038909 - RNA, 19 nt, Artificial Sequence
  Description of Artificial Sequence: Synthetic oligonucleotide
gcaggcugauaucuucccg

SEQ ID NO: 2038910 - RNA, 19 nt, Artificial Sequence
  Description of Artificial Sequence: Synthetic oligonucleotide
gaagucgcauucgcaguac

SEQ ID NO: 2038911 - RNA, 19 nt, Artificial Sequence
  Description of Artificial Sequence: Synthetic oligonucleotide
ccaguauugcugauaaaga

SEQ ID NO: 2038912 - RNA, 19 nt, Artificial Sequence
  Description of Artificial Sequence: Synthetic oligonucleotide
gaucugcucaccaccagua

SEQ ID NO: 2038913 - RNA, 19 nt, Artificial Sequence
  Description of Artificial Sequence: Synthetic oligonucleotide
agaccgccagaagccaugg

SEQ ID NO: 2038914 - RNA, 19 nt, Artificial Sequence
  Description of Artificial Sequence: Synthetic oligonucleotide
cgcauucgcaguacgagcc

SEQ ID NO: 2038915 - RNA, 19 nt, Artificial Sequence
  Description of Artificial Sequence: Synthetic oligonucleotide
cugguugaucugcucacca

SEQ ID NO: 2038916 - RNA, 19 nt, Artificial Sequence
  Description of Artificial Sequence: Synthetic oligonucleotide
agugauggcccugggagua

SEQ ID NO: 2038917 - RNA, 19 nt, Artificial Sequence
  Description of Artificial Sequence: Synthetic oligonucleotide
caauggcgcacgugaugcc

SEQ ID NO: 2038918 - RNA, 19 nt, Artificial Sequence
  Description of Artificial Sequence: Synthetic oligonucleotide
ugacuucaccaccgagggu

SEQ ID NO: 2038919 - RNA, 19 nt, Artificial Sequence
  Description of Artificial Sequence: Synthetic oligonucleotide
ugagggcugcgaaggccgc

SEQ ID NO: 2038920 - RNA, 19 nt, Artificial Sequence
  Description of Artificial Sequence: Synthetic oligonucleotide
uggggccagcuccuguaca

SEQ ID NO: 2038921 - RNA, 19 nt, Artificial Sequence
  Description of Artificial Sequence: Synthetic oligonucleotide
agguucuagggugcccagg

SEQ ID NO: 2038922 - RNA, 19 nt, Artificial Sequence
  Description of Artificial Sequence: Synthetic oligonucleotide
gacgagaagagcuguucau

SEQ ID NO: 2038923 - RNA, 19 nt, Artificial Sequence
  Description of Artificial Sequence: Synthetic oligonucleotide
gcauucgcaguacgagccg

SEQ ID NO: 2038924 - RNA, 19 nt, Artificial Sequence
  Description of Artificial Sequence: Synthetic oligonucleotide
cugcgccaugccuccaagg

SEQ ID NO: 2038925 - RNA, 19 nt, Artificial Sequence
  Description of Artificial Sequence: Synthetic oligonucleotide
cagacaggaaagagcccuc

SEQ ID NO: 2038926 - RNA, 19 nt, Artificial Sequence
  Description of Artificial Sequence: Synthetic oligonucleotide
gcuuugcgauaguuggucc

SEQ ID NO: 2038927 - RNA, 19 nt, Artificial Sequence
  Description of Artificial Sequence: Synthetic oligonucleotide
aaggccgcccuggaagaga

SEQ ID NO: 2038928 - RNA, 19 nt, Artificial Sequence
  Description of Artificial Sequence: Synthetic oligonucleotide
guagacguccaggcuuucc

SEQ ID NO: 2038929 - RNA, 19 nt, Artificial Sequence
  Description of Artificial Sequence: Synthetic oligonucleotide
aucugcucaccaccaguau

SEQ ID NO: 2038930 - RNA, 19 nt, Artificial Sequence
  Description of Artificial Sequence: Synthetic oligonucleotide
aaguggccuuccaagccgu

SEQ ID NO: 2038931 - RNA, 19 nt, Artificial Sequence
  Description of Artificial Sequence: Synthetic oligonucleotide
ggacgagaagagcuguuca

SEQ ID NO: 2038932 - RNA, 19 nt, Artificial Sequence
  Description of Artificial Sequence: Synthetic oligonucleotide
ucaccaccgaggguccuug

SEQ ID NO: 2038933 - RNA, 19 nt, Artificial Sequence
  Description of Artificial Sequence: Synthetic oligonucleotide
ggccagcuccuguacaaag

SEQ ID NO: 2038934 - RNA, 19 nt, Artificial Sequence
  Description of Artificial Sequence: Synthetic oligonucleotide
ugcagccauuggacgagaa

SEQ ID NO: 2038935 - RNA, 19 nt, Artificial Sequence
  Description of Artificial Sequence: Synthetic oligonucleotide
cagcagguguuccuccaug

SEQ ID NO: 2038936 - RNA, 19 nt, Artificial Sequence
  Description of Artificial Sequence: Synthetic oligonucleotide
cucgggagacugcuggcuc

SEQ ID NO: 2038937 - RNA, 19 nt, Artificial Sequence
  Description of Artificial Sequence: Synthetic oligonucleotide
gugaugccgcuggaguggg

SEQ ID NO: 2038938 - RNA, 19 nt, Artificial Sequence
  Description of Artificial Sequence: Synthetic oligonucleotide
uggccaaaugcuggccagc

SEQ ID NO: 2038939 - RNA, 19 nt, Artificial Sequence
  Description of Artificial Sequence: Synthetic oligonucleotide
augguuugcguggggccag

SEQ ID NO: 2038940 - RNA, 19 nt, Artificial Sequence
  Description of Artificial Sequence: Synthetic oligonucleotide
gaggguuguccaacacagc

SEQ ID NO: 2038941 - RNA, 19 nt, Artificial Sequence
  Description of Artificial Sequence: Synthetic oligonucleotide
agucgcauucgcaguacga

SEQ ID NO: 2038942 - RNA, 19 nt, Artificial Sequence
  Description of Artificial Sequence: Synthetic oligonucleotide
gacuuccauuaggccaggg

SEQ ID NO: 2038943 - RNA, 19 nt, Artificial Sequence
  Description of Artificial Sequence: Synthetic oligonucleotide
auucgggaggccacugucu

SEQ ID NO: 2038944 - RNA, 19 nt, Artificial Sequence
  Description of Artificial Sequence: Synthetic oligonucleotide
ugcgaaggccgcccuggaa

SEQ ID NO: 2038945 - RNA, 19 nt, Artificial Sequence
  Description of Artificial Sequence: Synthetic oligonucleotide
gucccaucugccagacagg

SEQ ID NO: 2038946 - RNA, 19 nt, Artificial Sequence
  Description of Artificial Sequence: Synthetic oligonucleotide
agaagccauggugaggguu

SEQ ID NO: 2038947 - RNA, 19 nt, Artificial Sequence
  Description of Artificial Sequence: Synthetic oligonucleotide
uugcguggggccagcuccu

SEQ ID NO: 2038948 - RNA, 19 nt, Artificial Sequence
  Description of Artificial Sequence: Synthetic oligonucleotide
ccaaugguuugcguggggc

SEQ ID NO: 2038949 - RNA, 19 nt, Artificial Sequence
  Description of Artificial Sequence: Synthetic oligonucleotide
augugggaaauggauggua

SEQ ID NO: 2038950 - RNA, 19 nt, Artificial Sequence
  Description of Artificial Sequence: Synthetic oligonucleotide
ggcuuugcgauaguugguc

SEQ ID NO: 2038951 - RNA, 19 nt, Artificial Sequence
  Description of Artificial Sequence: Synthetic oligonucleotide
ugauaucuucccggucccu

SEQ ID NO: 2038952 - RNA, 19 nt, Artificial Sequence
  Description of Artificial Sequence: Synthetic oligonucleotide
cagccaugcagggaaagga

SEQ ID NO: 2038953 - RNA, 19 nt, Artificial Sequence
  Description of Artificial Sequence: Synthetic oligonucleotide
guuguccaacacagcucgg

SEQ ID NO: 2038954 - RNA, 19 nt, Artificial Sequence
  Description of Artificial Sequence: Synthetic oligonucleotide
aagccauggugaggguugu

SEQ ID NO: 2038955 - RNA, 19 nt, Artificial Sequence
  Description of Artificial Sequence: Synthetic oligonucleotide
cauggugaggguuguccaa

SEQ ID NO: 2038956 - RNA, 19 nt, Artificial Sequence
  Description of Artificial Sequence: Synthetic oligonucleotide
cuguacaaaggccuucagu

SEQ ID NO: 2038957 - RNA, 19 nt, Artificial Sequence
  Description of Artificial Sequence: Synthetic oligonucleotide
gagugggaggaagggcacc

SEQ ID NO: 2038958 - RNA, 19 nt, Artificial Sequence
  Description of Artificial Sequence: Synthetic oligonucleotide
ugcgauaguuggucccaua

SEQ ID NO: 2038959 - RNA, 19 nt, Artificial Sequence
  Description of Artificial Sequence: Synthetic oligonucleotide
ucaauguggcugggaugug

SEQ ID NO: 2038960 - RNA, 19 nt, Artificial Sequence
  Description of Artificial Sequence: Synthetic oligonucleotide
ccacaagcagugagguucc

SEQ ID NO: 2038961 - RNA, 19 nt, Artificial Sequence
  Description of Artificial Sequence: Synthetic oligonucleotide
gaggguccuuggccaaaug

SEQ ID NO: 2038962 - RNA, 19 nt, Artificial Sequence
  Description of Artificial Sequence: Synthetic oligonucleotide
agggugcccaggaguuucc

SEQ ID NO: 2038963 - RNA, 19 nt, Artificial Sequence
  Description of Artificial Sequence: Synthetic oligonucleotide
guuugcguggggccagcuc

SEQ ID NO: 2038964 - RNA, 19 nt, Artificial Sequence
  Description of Artificial Sequence: Synthetic oligonucleotide
caggaguuuccuggugaag

SEQ ID NO: 2038965 - RNA, 19 nt, Artificial Sequence
  Description of Artificial Sequence: Synthetic oligonucleotide
cccagaaaaggcugcaaga

SEQ ID NO: 2038966 - RNA, 19 nt, Artificial Sequence
  Description of Artificial Sequence: Synthetic oligonucleotide
ggugaggguuguccaacac

SEQ ID NO: 2038967 - RNA, 19 nt, Artificial Sequence
  Description of Artificial Sequence: Synthetic oligonucleotide
aggaagggcaccacagcau

SEQ ID NO: 2038968 - RNA, 19 nt, Artificial Sequence
  Description of Artificial Sequence: Synthetic oligonucleotide
acccaagaggggcccagaa

SEQ ID NO: 2038969 - RNA, 19 nt, Artificial Sequence
  Description of Artificial Sequence: Synthetic oligonucleotide
gccaacacucuucuucauc

SEQ ID NO: 2038970 - RNA, 19 nt, Artificial Sequence
  Description of Artificial Sequence: Synthetic oligonucleotide
auggcccugggaguaguca

SEQ ID NO: 2038971 - RNA, 19 nt, Artificial Sequence
  Description of Artificial Sequence: Synthetic oligonucleotide
agcugacguaggacuuccc

SEQ ID NO: 2038972 - RNA, 19 nt, Artificial Sequence
  Description of Artificial Sequence: Synthetic oligonucleotide
accaccaguauugcugaua

SEQ ID NO: 2038973 - RNA, 19 nt, Artificial Sequence
  Description of Artificial Sequence: Synthetic oligonucleotide
ccauuggacgagaagagcu

SEQ ID NO: 2038974 - RNA, 19 nt, Artificial Sequence
  Description of Artificial Sequence: Synthetic oligonucleotide
aucuucccggucccugcga

SEQ ID NO: 2038975 - RNA, 19 nt, Artificial Sequence
  Description of Artificial Sequence: Synthetic oligonucleotide
cucugggucccaucugcca

SEQ ID NO: 2038976 - RNA, 19 nt, Artificial Sequence
  Description of Artificial Sequence: Synthetic oligonucleotide
cacauuccagacccggcaa

SEQ ID NO: 2038977 - RNA, 19 nt, Artificial Sequence
  Description of Artificial Sequence: Synthetic oligonucleotide
ggucccauauacaacccaa

SEQ ID NO: 2038978 - RNA, 19 nt, Artificial Sequence
  Description of Artificial Sequence: Synthetic oligonucleotide
ugauggcccugggaguagu

SEQ ID NO: 2038979 - RNA, 19 nt, Artificial Sequence
  Description of Artificial Sequence: Synthetic oligonucleotide
ccaugcagggaaaggacca

SEQ ID NO: 2038980 - RNA, 19 nt, Artificial Sequence
  Description of Artificial Sequence: Synthetic oligonucleotide
agacuuccauuaggccagg

SEQ ID NO: 2038981 - RNA, 19 nt, Artificial Sequence
  Description of Artificial Sequence: Synthetic oligonucleotide
gccauuggacgagaagagc

SEQ ID NO: 2038982 - RNA, 19 nt, Artificial Sequence
  Description of Artificial Sequence: Synthetic oligonucleotide
gaugugggaaauggauggu

SEQ ID NO: 2038983 - RNA, 19 nt, Artificial Sequence
  Description of Artificial Sequence: Synthetic oligonucleotide
gccgcccuggaagagauac

SEQ ID NO: 2038984 - RNA, 19 nt, Artificial Sequence
  Description of Artificial Sequence: Synthetic oligonucleotide
gcacgugagggcugcgaag

SEQ ID NO: 2038985 - RNA, 19 nt, Artificial Sequence
  Description of Artificial Sequence: Synthetic oligonucleotide
ggccaaaugcuggccagcc

SEQ ID NO: 2038986 - RNA, 19 nt, Artificial Sequence
  Description of Artificial Sequence: Synthetic oligonucleotide
cacgugaugccgcuggagu

SEQ ID NO: 2038987 - RNA, 19 nt, Artificial Sequence
  Description of Artificial Sequence: Synthetic oligonucleotide
caucuuuggccuggccaac

SEQ ID NO: 2038988 - RNA, 19 nt, Artificial Sequence
  Description of Artificial Sequence: Synthetic oligonucleotide
ugguacuguccagcacagc

SEQ ID NO: 2038989 - RNA, 19 nt, Artificial Sequence
  Description of Artificial Sequence: Synthetic oligonucleotide
cagaagucgcauucgcagu

SEQ ID NO: 2038990 - RNA, 19 nt, Artificial Sequence
  Description of Artificial Sequence: Synthetic oligonucleotide
ccucugguagacguccagg

SEQ ID NO: 2038991 - RNA, 19 nt, Artificial Sequence
  Description of Artificial Sequence: Synthetic oligonucleotide
ccaccaguauugcugauaa

SEQ ID NO: 2038992 - RNA, 19 nt, Artificial Sequence
  Description of Artificial Sequence: Synthetic oligonucleotide
cauucgcaguacgagccga

SEQ ID NO: 2038993 - RNA, 19 nt, Artificial Sequence
  Description of Artificial Sequence: Synthetic oligonucleotide
gugcucugggucccaucug

SEQ ID NO: 2038994 - RNA, 19 nt, Artificial Sequence
  Description of Artificial Sequence: Synthetic oligonucleotide
gcgccaugccuccaaggcc

SEQ ID NO: 2038995 - RNA, 19 nt, Artificial Sequence
  Description of Artificial Sequence: Synthetic oligonucleotide
augcagggaaaggaccaau

SEQ ID NO: 2038996 - RNA, 19 nt, Artificial Sequence
  Description of Artificial Sequence: Synthetic oligonucleotide
gcgacugcgccaugccucc

SEQ ID NO: 2038997 - RNA, 19 nt, Artificial Sequence
  Description of Artificial Sequence: Synthetic oligonucleotide
ugccacaagcagugagguu

SEQ ID NO: 2038998 - RNA, 19 nt, Artificial Sequence
  Description of Artificial Sequence: Synthetic oligonucleotide
gacugcgccaugccuccaa

SEQ ID NO: 2038999 - RNA, 19 nt, Artificial Sequence
  Description of Artificial Sequence: Synthetic oligonucleotide
guuccccuggacccagcuc

SEQ ID NO: 2039000 - RNA, 19 nt, Artificial Sequence
  Description of Artificial Sequence: Synthetic oligonucleotide
ugaugccgcuggaguggga

SEQ ID NO: 2039001 - RNA, 19 nt, Artificial Sequence
  Description of Artificial Sequence: Synthetic oligonucleotide
aggucacauuccagacccg

SEQ ID NO: 2039002 - RNA, 19 nt, Artificial Sequence
  Description of Artificial Sequence: Synthetic oligonucleotide
guacuguccagcacagccu

SEQ ID NO: 2039003 - RNA, 19 nt, Artificial Sequence
  Description of Artificial Sequence: Synthetic oligonucleotide
acacaauggcgcacgugau

SEQ ID NO: 2039004 - RNA, 19 nt, Artificial Sequence
  Description of Artificial Sequence: Synthetic oligonucleotide
caccaccgaggguccuugg

SEQ ID NO: 2039005 - RNA, 19 nt, Artificial Sequence
  Description of Artificial Sequence: Synthetic oligonucleotide
ucccggucccugcgacugc

SEQ ID NO: 2039006 - RNA, 19 nt, Artificial Sequence
  Description of Artificial Sequence: Synthetic oligonucleotide
ggguuguccaacacagcuc

SEQ ID NO: 2039007 - RNA, 19 nt, Artificial Sequence
  Description of Artificial Sequence: Synthetic oligonucleotide
uugcgauaguuggucccau

SEQ ID NO: 2039008 - RNA, 19 nt, Artificial Sequence
  Description of Artificial Sequence: Synthetic oligonucleotide
ccgccagaagccaugguga

SEQ ID NO: 2039009 - RNA, 19 nt, Artificial Sequence
  Description of Artificial Sequence: Synthetic oligonucleotide
gauggcccugggaguaguc

SEQ ID NO: 2039010 - RNA, 19 nt, Artificial Sequence
  Description of Artificial Sequence: Synthetic oligonucleotide
ccugcgacugcgccaugcc

SEQ ID NO: 2039011 - RNA, 19 nt, Artificial Sequence
  Description of Artificial Sequence: Synthetic oligonucleotide
acaacccaagaggggccca

SEQ ID NO: 2039012 - RNA, 19 nt, Artificial Sequence
  Description of Artificial Sequence: Synthetic oligonucleotide
ugguuugcguggggccagc

SEQ ID NO: 2039013 - RNA, 19 nt, Artificial Sequence
  Description of Artificial Sequence: Synthetic oligonucleotide
ccaagccguucaucuuugg

SEQ ID NO: 2039014 - RNA, 19 nt, Artificial Sequence
  Description of Artificial Sequence: Synthetic oligonucleotide
acagcucgggagacugcug

SEQ ID NO: 2039015 - RNA, 19 nt, Artificial Sequence
  Description of Artificial Sequence: Synthetic oligonucleotide
ccguucaucuuuggccugg

SEQ ID NO: 2039016 - RNA, 19 nt, Artificial Sequence
  Description of Artificial Sequence: Synthetic oligonucleotide
gcgauaguuggucccauau

SEQ ID NO: 2039017 - RNA, 19 nt, Artificial Sequence
  Description of Artificial Sequence: Synthetic oligonucleotide
ggcugauaucuucccgguc

SEQ ID NO: 2039018 - RNA, 19 nt, Artificial Sequence
  Description of Artificial Sequence: Synthetic oligonucleotide
ggguccuuggccaaaugcu

SEQ ID NO: 2039019 - RNA, 19 nt, Artificial Sequence
  Description of Artificial Sequence: Synthetic oligonucleotide
gaucugccacaagcaguga

SEQ ID NO: 2039020 - RNA, 19 nt, Artificial Sequence
  Description of Artificial Sequence: Synthetic oligonucleotide
ccagacccggcaagucagg

SEQ ID NO: 2039021 - RNA, 19 nt, Artificial Sequence
  Description of Artificial Sequence: Synthetic oligonucleotide
cccaggaguuuccugguga

SEQ ID NO: 2039022 - RNA, 19 nt, Artificial Sequence
  Description of Artificial Sequence: Synthetic oligonucleotide
ccauggugaggguugucca

SEQ ID NO: 2039023 - RNA, 19 nt, Artificial Sequence
  Description of Artificial Sequence: Synthetic oligonucleotide
gggaguagucagaggaaaa

SEQ ID NO: 2039024 - RNA, 19 nt, Artificial Sequence
  Description of Artificial Sequence: Synthetic oligonucleotide
cuuuggccuggccaacacu

SEQ ID NO: 2039025 - RNA, 19 nt, Artificial Sequence
  Description of Artificial Sequence: Synthetic oligonucleotide
cauuccagacccggcaagu

SEQ ID NO: 2039026 - RNA, 19 nt, Artificial Sequence
  Description of Artificial Sequence: Synthetic oligonucleotide
gcacgugaugccgcuggag

SEQ ID NO: 2039027 - RNA, 19 nt, Artificial Sequence
  Description of Artificial Sequence: Synthetic oligonucleotide
guggugcacgugagggcug

SEQ ID NO: 2039028 - RNA, 19 nt, Artificial Sequence
  Description of Artificial Sequence: Synthetic oligonucleotide
cagugauggcccugggagu

SEQ ID NO: 2039029 - RNA, 19 nt, Artificial Sequence
  Description of Artificial Sequence: Synthetic oligonucleotide
cgccaugccuccaaggcca

SEQ ID NO: 2039030 - RNA, 19 nt, Artificial Sequence
  Description of Artificial Sequence: Synthetic oligonucleotide
cacagcucgggagacugcu

SEQ ID NO: 2039031 - RNA, 19 nt, Artificial Sequence
  Description of Artificial Sequence: Synthetic oligonucleotide
gugcacgugagggcugcga

SEQ ID NO: 2039032 - RNA, 19 nt, Artificial Sequence
  Description of Artificial Sequence: Synthetic oligonucleotide
caccaguauugcugauaaa

SEQ ID NO: 2039033 - RNA, 19 nt, Artificial Sequence
  Description of Artificial Sequence: Synthetic oligonucleotide
gcccaggaguuuccuggug

SEQ ID NO: 2039034 - RNA, 19 nt, Artificial Sequence
  Description of Artificial Sequence: Synthetic oligonucleotide
cggcaagucaggccagaag

SEQ ID NO: 2039035 - RNA, 19 nt, Artificial Sequence
  Description of Artificial Sequence: Synthetic oligonucleotide
ccaggaguuuccuggugaa

SEQ ID NO: 2039036 - RNA, 19 nt, Artificial Sequence
  Description of Artificial Sequence: Synthetic oligonucleotide
gggaaguaggugguacugu

SEQ ID NO: 2039037 - RNA, 19 nt, Artificial Sequence
  Description of Artificial Sequence: Synthetic oligonucleotide
cugcucaauguggcuggga

SEQ ID NO: 2039038 - RNA, 19 nt, Artificial Sequence
  Description of Artificial Sequence: Synthetic oligonucleotide
acccggcaagucaggccag

SEQ ID NO: 2039039 - RNA, 19 nt, Artificial Sequence
  Description of Artificial Sequence: Synthetic oligonucleotide
cugcgaaggccgcccugga

SEQ ID NO: 2039040 - RNA, 19 nt, Artificial Sequence
  Description of Artificial Sequence: Synthetic oligonucleotide
cugcgacugcgccaugccu

SEQ ID NO: 2039041 - RNA, 19 nt, Artificial Sequence
  Description of Artificial Sequence: Synthetic oligonucleotide
gguuccccuggacccagcu

SEQ ID NO: 2039042 - RNA, 19 nt, Artificial Sequence
  Description of Artificial Sequence: Synthetic oligonucleotide
cccggucccugcgacugcg

SEQ ID NO: 2039043 - RNA, 19 nt, Artificial Sequence
  Description of Artificial Sequence: Synthetic oligonucleotide
gaccgccagaagccauggu

SEQ ID NO: 2039044 - RNA, 19 nt, Artificial Sequence
  Description of Artificial Sequence: Synthetic oligonucleotide
gccagaccgccagaagcca

SEQ ID NO: 2039045 - RNA, 19 nt, Artificial Sequence
  Description of Artificial Sequence: Synthetic oligonucleotide
cuucccggucccugcgacu

SEQ ID NO: 2039046 - RNA, 19 nt, Artificial Sequence
  Description of Artificial Sequence: Synthetic oligonucleotide
gcucaccaccaguauugcu

SEQ ID NO: 2039047 - RNA, 19 nt, Artificial Sequence
  Description of Artificial Sequence: Synthetic oligonucleotide
cucugggaaguagguggua

SEQ ID NO: 2039048 - RNA, 19 nt, Artificial Sequence
  Description of Artificial Sequence: Synthetic oligonucleotide
cgauaguuggucccauaua

SEQ ID NO: 2039049 - RNA, 19 nt, Artificial Sequence
  Description of Artificial Sequence: Synthetic oligonucleotide
cgaaggccgcccuggaaga

SEQ ID NO: 2039050 - RNA, 19 nt, Artificial Sequence
  Description of Artificial Sequence: Synthetic oligonucleotide
aguggccuuccaagccguu

SEQ ID NO: 2039051 - RNA, 19 nt, Artificial Sequence
  Description of Artificial Sequence: Synthetic oligonucleotide
gguagacguccaggcuuuc

SEQ ID NO: 2039052 - RNA, 19 nt, Artificial Sequence
  Description of Artificial Sequence: Synthetic oligonucleotide
guccagccaugcagggaaa

SEQ ID NO: 2039053 - RNA, 19 nt, Artificial Sequence
  Description of Artificial Sequence: Synthetic oligonucleotide
ggcgcacgugaugccgcug

SEQ ID NO: 2039054 - RNA, 19 nt, Artificial Sequence
  Description of Artificial Sequence: Synthetic oligonucleotide
ccggucccugcgacugcgc

SEQ ID NO: 2039055 - RNA, 19 nt, Artificial Sequence
  Description of Artificial Sequence: Synthetic oligonucleotide
ccagcucauugaguacaca

SEQ ID NO: 2039056 - RNA, 19 nt, Artificial Sequence
  Description of Artificial Sequence: Synthetic oligonucleotide
cguggggccagcuccugua

SEQ ID NO: 2039057 - RNA, 19 nt, Artificial Sequence
  Description of Artificial Sequence: Synthetic oligonucleotide
ccccuggacccagcucuug

SEQ ID NO: 2039058 - RNA, 19 nt, Artificial Sequence
  Description of Artificial Sequence: Synthetic oligonucleotide
gguuugcguggggccagcu

SEQ ID NO: 2039059 - RNA, 19 nt, Artificial Sequence
  Description of Artificial Sequence: Synthetic oligonucleotide
gcguggggccagcuccugu

SEQ ID NO: 2039060 - RNA, 19 nt, Artificial Sequence
  Description of Artificial Sequence: Synthetic oligonucleotide
gggugcccaggaguuuccu

SEQ ID NO: 2039061 - RNA, 19 nt, Artificial Sequence
  Description of Artificial Sequence: Synthetic oligonucleotide
gcaaggcugugagguucua

SEQ ID NO: 2039062 - RNA, 19 nt, Artificial Sequence
  Description of Artificial Sequence: Synthetic oligonucleotide
cgcacgugaugccgcugga

SEQ ID NO: 2039063 - RNA, 19 nt, Artificial Sequence
  Description of Artificial Sequence: Synthetic oligonucleotide
cccggcaagucaggccaga

SEQ ID NO: 2039064 - RNA, 19 nt, Artificial Sequence
  Description of Artificial Sequence: Synthetic oligonucleotide
gggcugcgaaggccgcccu

SEQ ID NO: 2039065 - RNA, 19 nt, Artificial Sequence
  Description of Artificial Sequence: Synthetic oligonucleotide
ccgcccuggaagagauacu

SEQ ID NO: 2039066 - RNA, 19 nt, Artificial Sequence
  Description of Artificial Sequence: Synthetic oligonucleotide
cguccaggcuuucccugcu

SEQ ID NO: 2039067 - RNA, 19 nt, Artificial Sequence
  Description of Artificial Sequence: Synthetic oligonucleotide
ggccgcccuggaagagaua

SEQ ID NO: 2039068 - RNA, 19 nt, Artificial Sequence
  Description of Artificial Sequence: Synthetic oligonucleotide
agcaauaucaaaccucugc

SEQ ID NO: 2039069 - RNA, 19 nt, Artificial Sequence
  Description of Artificial Sequence: Synthetic oligonucleotide
aauagcuucagcuguuaac

SEQ ID NO: 2039070 - RNA, 19 nt, Artificial Sequence
  Description of Artificial Sequence: Synthetic oligonucleotide
ugugaugucuacaucagcc

SEQ ID NO: 2039071 - RNA, 19 nt, Artificial Sequence
  Description of Artificial Sequence: Synthetic oligonucleotide
aaggaggcgagcuugcggc

SEQ ID NO: 2039072 - RNA, 19 nt, Artificial Sequence
  Description of Artificial Sequence: Synthetic oligonucleotide
ucuaguagaucgaagauuc

SEQ ID NO: 2039073 - RNA, 19 nt, Artificial Sequence
  Description of Artificial Sequence: Synthetic oligonucleotide
aaaaucauggcuuaaccuu

SEQ ID NO: 2039074 - RNA, 19 nt, Artificial Sequence
  Description of Artificial Sequence: Synthetic oligonucleotide
aaaucugcucucuggcugc

SEQ ID NO: 2039075 - RNA, 19 nt, Artificial Sequence
  Description of Artificial Sequence: Synthetic oligonucleotide
aagccaauucaucucgcgc

SEQ ID NO: 2039076 - RNA, 19 nt, Artificial Sequence
  Description of Artificial Sequence: Synthetic oligonucleotide
cuuaauguuuccuaggguc

SEQ ID NO: 2039077 - RNA, 19 nt, Artificial Sequence
  Description of Artificial Sequence: Synthetic oligonucleotide
uggugucacaaaaucaugg

SEQ ID NO: 2039078 - RNA, 19 nt, Artificial Sequence
  Description of Artificial Sequence: Synthetic oligonucleotide
caucuuuugacucuaguag

SEQ ID NO: 2039079 - RNA, 19 nt, Artificial Sequence
  Description of Artificial Sequence: Synthetic oligonucleotide
ugagcaauaucaaaccucu

SEQ ID NO: 2039080 - RNA, 19 nt, Artificial Sequence
  Description of Artificial Sequence: Synthetic oligonucleotide
agaucgaagauucuuagga

SEQ ID NO: 2039081 - RNA, 19 nt, Artificial Sequence
  Description of Artificial Sequence: Synthetic oligonucleotide
aagggcaaaguagucaagc

SEQ ID NO: 2039082 - RNA, 19 nt, Artificial Sequence
  Description of Artificial Sequence: Synthetic oligonucleotide
uggaaucaaaccuaggugu

SEQ ID NO: 2039083 - RNA, 19 nt, Artificial Sequence
  Description of Artificial Sequence: Synthetic oligonucleotide
aaguagucaagccaauuca

SEQ ID NO: 2039084 - RNA, 19 nt, Artificial Sequence
  Description of Artificial Sequence: Synthetic oligonucleotide
ugacagauuucaaaggugu

SEQ ID NO: 2039085 - RNA, 19 nt, Artificial Sequence
  Description of Artificial Sequence: Synthetic oligonucleotide
aacuuguuuauuucuguga

SEQ ID NO: 2039086 - RNA, 19 nt, Artificial Sequence
  Description of Artificial Sequence: Synthetic oligonucleotide
ugucugaauagcuucagcu

SEQ ID NO: 2039087 - RNA, 19 nt, Artificial Sequence
  Description of Artificial Sequence: Synthetic oligonucleotide
agcgcguuagcucuggcgc

SEQ ID NO: 2039088 - RNA, 19 nt, Artificial Sequence
  Description of Artificial Sequence: Synthetic oligonucleotide
aaucaaaccuaggugucac

SEQ ID NO: 2039089 - RNA, 19 nt, Artificial Sequence
  Description of Artificial Sequence: Synthetic oligonucleotide
gauucgaauuugcaccucg

SEQ ID NO: 2039090 - RNA, 19 nt, Artificial Sequence
  Description of Artificial Sequence: Synthetic oligonucleotide
guuucuuaauguuuccuag

SEQ ID NO: 2039091 - RNA, 19 nt, Artificial Sequence
  Description of Artificial Sequence: Synthetic oligonucleotide
ucagcuguuaacuuguuua

SEQ ID NO: 2039092 - RNA, 19 nt, Artificial Sequence
  Description of Artificial Sequence: Synthetic oligonucleotide
ucgaaguccuuaaggaagg

SEQ ID NO: 2039093 - RNA, 19 nt, Artificial Sequence
  Description of Artificial Sequence: Synthetic oligonucleotide
aauagccgcaagcucgcac

SEQ ID NO: 2039094 - RNA, 19 nt, Artificial Sequence
  Description of Artificial Sequence: Synthetic oligonucleotide
uuaauguuuccuagggucu

SEQ ID NO: 2039095 - RNA, 19 nt, Artificial Sequence
  Description of Artificial Sequence: Synthetic oligonucleotide
aagucugcggacguguccc

SEQ ID NO: 2039096 - RNA, 19 nt, Artificial Sequence
  Description of Artificial Sequence: Synthetic oligonucleotide
cuucucauuuaccaguccg

SEQ ID NO: 2039097 - RNA, 19 nt, Artificial Sequence
  Description of Artificial Sequence: Synthetic oligonucleotide
uuaccaguccguaugcugc

SEQ ID NO: 2039098 - RNA, 19 nt, Artificial Sequence
  Description of Artificial Sequence: Synthetic oligonucleotide
ucugguacccagaagucug

SEQ ID NO: 2039099 - RNA, 19 nt, Artificial Sequence
  Description of Artificial Sequence: Synthetic oligonucleotide
gacucgauuugauugauuc

SEQ ID NO: 2039100 - RNA, 19 nt, Artificial Sequence
  Description of Artificial Sequence: Synthetic oligonucleotide
uucgaauuugcaccucgcg

SEQ ID NO: 2039101 - RNA, 19 nt, Artificial Sequence
  Description of Artificial Sequence: Synthetic oligonucleotide
aaaccuaggugucacgccu

SEQ ID NO: 2039102 - RNA, 19 nt, Artificial Sequence
  Description of Artificial Sequence: Synthetic oligonucleotide
cucgauguuguauagguuc

SEQ ID NO: 2039103 - RNA, 19 nt, Artificial Sequence
  Description of Artificial Sequence: Synthetic oligonucleotide
aacacagacccaggaaacc

SEQ ID NO: 2039104 - RNA, 19 nt, Artificial Sequence
  Description of Artificial Sequence: Synthetic oligonucleotide
agggcaaaguagucaagcc

SEQ ID NO: 2039105 - RNA, 19 nt, Artificial Sequence
  Description of Artificial Sequence: Synthetic oligonucleotide
uuaacuuguuuauuucugu

SEQ ID NO: 2039106 - RNA, 19 nt, Artificial Sequence
  Description of Artificial Sequence: Synthetic oligonucleotide
uagucaagccaauucaucu

SEQ ID NO: 2039107 - RNA, 19 nt, Artificial Sequence
  Description of Artificial Sequence: Synthetic oligonucleotide
uggcuuaaccuuuugcucc

SEQ ID NO: 2039108 - RNA, 19 nt, Artificial Sequence
  Description of Artificial Sequence: Synthetic oligonucleotide
auuaucacuucauccaccu

SEQ ID NO: 2039109 - RNA, 19 nt, Artificial Sequence
  Description of Artificial Sequence: Synthetic oligonucleotide
gucaagccaauucaucucg

SEQ ID NO: 2039110 - RNA, 19 nt, Artificial Sequence
  Description of Artificial Sequence: Synthetic oligonucleotide
gacucuaguagaucgaaga

SEQ ID NO: 2039111 - RNA, 19 nt, Artificial Sequence
  Description of Artificial Sequence: Synthetic oligonucleotide
uguuguauagguucuccac

SEQ ID NO: 2039112 - RNA, 19 nt, Artificial Sequence
  Description of Artificial Sequence: Synthetic oligonucleotide
aucgagacguuguaaaucu

SEQ ID NO: 2039113 - RNA, 19 nt, Artificial Sequence
  Description of Artificial Sequence: Synthetic oligonucleotide
uuuaccaguccguaugcug

SEQ ID NO: 2039114 - RNA, 19 nt, Artificial Sequence
  Description of Artificial Sequence: Synthetic oligonucleotide
auggagggcaucuuuugac

SEQ ID NO: 2039115 - RNA, 19 nt, Artificial Sequence
  Description of Artificial Sequence: Synthetic oligonucleotide
ucgaagauucuuaggauuc

SEQ ID NO: 2039116 - RNA, 19 nt, Artificial Sequence
  Description of Artificial Sequence: Synthetic oligonucleotide
ugcagaucugggcaaggcg

SEQ ID NO: 2039117 - RNA, 19 nt, Artificial Sequence
  Description of Artificial Sequence: Synthetic oligonucleotide
aucucgauguuguauaggu

SEQ ID NO: 2039118 - RNA, 19 nt, Artificial Sequence
  Description of Artificial Sequence: Synthetic oligonucleotide
aguccuuaaggaaggaggc

SEQ ID NO: 2039119 - RNA, 19 nt, Artificial Sequence
  Description of Artificial Sequence: Synthetic oligonucleotide
gauucuuaggauucuuuuc

SEQ ID NO: 2039120 - RNA, 19 nt, Artificial Sequence
  Description of Artificial Sequence: Synthetic oligonucleotide
uucgagaguuucuuaaugu

SEQ ID NO: 2039121 - RNA, 19 nt, Artificial Sequence
  Description of Artificial Sequence: Synthetic oligonucleotide
auaucaaaccucugcaagu

SEQ ID NO: 2039122 - RNA, 19 nt, Artificial Sequence
  Description of Artificial Sequence: Synthetic oligonucleotide
agucaagccaauucaucuc

SEQ ID NO: 2039123 - RNA, 19 nt, Artificial Sequence
  Description of Artificial Sequence: Synthetic oligonucleotide
uagaucgaagauucuuagg

SEQ ID NO: 2039124 - RNA, 19 nt, Artificial Sequence
  Description of Artificial Sequence: Synthetic oligonucleotide
gucggacucgauuugauug

SEQ ID NO: 2039125 - RNA, 19 nt, Artificial Sequence
  Description of Artificial Sequence: Synthetic oligonucleotide
guagaucgaagauucuuag

SEQ ID NO: 2039126 - RNA, 19 nt, Artificial Sequence
  Description of Artificial Sequence: Synthetic oligonucleotide
agggagaucucuuugcugu

SEQ ID NO: 2039127 - RNA, 19 nt, Artificial Sequence
  Description of Artificial Sequence: Synthetic oligonucleotide
gacgugagcgcucacggag

SEQ ID NO: 2039128 - RNA, 19 nt, Artificial Sequence
  Description of Artificial Sequence: Synthetic oligonucleotide
acucgauuugauugauucg

SEQ ID NO: 2039129 - RNA, 19 nt, Artificial Sequence
  Description of Artificial Sequence: Synthetic oligonucleotide
gaacgaaggaccgagcagc

SEQ ID NO: 2039130 - RNA, 19 nt, Artificial Sequence
  Description of Artificial Sequence: Synthetic oligonucleotide
aucuuuugacucuaguaga

SEQ ID NO: 2039131 - RNA, 19 nt, Artificial Sequence
  Description of Artificial Sequence: Synthetic oligonucleotide
uuguauagguucuccaccu

SEQ ID NO: 2039132 - RNA, 19 nt, Artificial Sequence
  Description of Artificial Sequence: Synthetic oligonucleotide
gacguuguaaaucugcucu

SEQ ID NO: 2039133 - RNA, 19 nt, Artificial Sequence
  Description of Artificial Sequence: Synthetic oligonucleotide
ucuuaauguuuccuagggu

SEQ ID NO: 2039134 - RNA, 19 nt, Artificial Sequence
  Description of Artificial Sequence: Synthetic oligonucleotide
aauucaucucgcgcagcgc

SEQ ID NO: 2039135 - RNA, 19 nt, Artificial Sequence
  Description of Artificial Sequence: Synthetic oligonucleotide
uuugacucuaguagaucga

SEQ ID NO: 2039136 - RNA, 19 nt, Artificial Sequence
  Description of Artificial Sequence: Synthetic oligonucleotide
uugaucgagacguuguaaa

SEQ ID NO: 2039137 - RNA, 19 nt, Artificial Sequence
  Description of Artificial Sequence: Synthetic oligonucleotide
ucgaacgaaggaccgagca

SEQ ID NO: 2039138 - RNA, 19 nt, Artificial Sequence
  Description of Artificial Sequence: Synthetic oligonucleotide
guuaacuuguuuauuucug

SEQ ID NO: 2039139 - RNA, 19 nt, Artificial Sequence
  Description of Artificial Sequence: Synthetic oligonucleotide
ugaugucuacaucagccgu

SEQ ID NO: 2039140 - RNA, 19 nt, Artificial Sequence
  Description of Artificial Sequence: Synthetic oligonucleotide
ucaaaccuaggugucacgc

SEQ ID NO: 2039141 - RNA, 19 nt, Artificial Sequence
  Description of Artificial Sequence: Synthetic oligonucleotide
uugauucgaauuugcaccu

SEQ ID NO: 2039142 - RNA, 19 nt, Artificial Sequence
  Description of Artificial Sequence: Synthetic oligonucleotide
agccgaaggaucucgaugu

SEQ ID NO: 2039143 - RNA, 19 nt, Artificial Sequence
  Description of Artificial Sequence: Synthetic oligonucleotide
caggaaaccucgcagcucc

SEQ ID NO: 2039144 - RNA, 19 nt, Artificial Sequence
  Description of Artificial Sequence: Synthetic oligonucleotide
cuaggugucacgccugggg

SEQ ID NO: 2039145 - RNA, 19 nt, Artificial Sequence
  Description of Artificial Sequence: Synthetic oligonucleotide
gagaguuucuuaauguuuc

SEQ ID NO: 2039146 - RNA, 19 nt, Artificial Sequence
  Description of Artificial Sequence: Synthetic oligonucleotide
gauguuguauagguucucc

SEQ ID NO: 2039147 - RNA, 19 nt, Artificial Sequence
  Description of Artificial Sequence: Synthetic oligonucleotide
aggacgugagcgcucacgg

SEQ ID NO: 2039148 - RNA, 19 nt, Artificial Sequence
  Description of Artificial Sequence: Synthetic oligonucleotide
guauagguucuccaccucc

SEQ ID NO: 2039149 - RNA, 19 nt, Artificial Sequence
  Description of Artificial Sequence: Synthetic oligonucleotide
agccaauucaucucgcgca

SEQ ID NO: 2039150 - RNA, 19 nt, Artificial Sequence
  Description of Artificial Sequence: Synthetic oligonucleotide
gaaggaggcgagcuugcgg

SEQ ID NO: 2039151 - RNA, 19 nt, Artificial Sequence
  Description of Artificial Sequence: Synthetic oligonucleotide
ugcgucgaacgaaggaccg

SEQ ID NO: 2039152 - RNA, 19 nt, Artificial Sequence
  Description of Artificial Sequence: Synthetic oligonucleotide
cuugaggagguucugucug

SEQ ID NO: 2039153 - RNA, 19 nt, Artificial Sequence
  Description of Artificial Sequence: Synthetic oligonucleotide
ucgauguuguauagguucu

SEQ ID NO: 2039154 - RNA, 19 nt, Artificial Sequence
  Description of Artificial Sequence: Synthetic oligonucleotide
guucgagaguuucuuaaug

SEQ ID NO: 2039155 - RNA, 19 nt, Artificial Sequence
  Description of Artificial Sequence: Synthetic oligonucleotide
acagauuucaaaggugucu

SEQ ID NO: 2039156 - RNA, 19 nt, Artificial Sequence
  Description of Artificial Sequence: Synthetic oligonucleotide
caagcucgcaccaccaccc

SEQ ID NO: 2039157 - RNA, 19 nt, Artificial Sequence
  Description of Artificial Sequence: Synthetic oligonucleotide
ugacucuaguagaucgaag

SEQ ID NO: 2039158 - RNA, 19 nt, Artificial Sequence
  Description of Artificial Sequence: Synthetic oligonucleotide
gucacuggccaauagccgc

SEQ ID NO: 2039159 - RNA, 19 nt, Artificial Sequence
  Description of Artificial Sequence: Synthetic oligonucleotide
ggcgccgaaacacagaccc

SEQ ID NO: 2039160 - RNA, 19 nt, Artificial Sequence
  Description of Artificial Sequence: Synthetic oligonucleotide
ucagcugagcaauaucaaa

SEQ ID NO: 2039161 - RNA, 19 nt, Artificial Sequence
  Description of Artificial Sequence: Synthetic oligonucleotide
aacgaaggaccgagcagcc

SEQ ID NO: 2039162 - RNA, 19 nt, Artificial Sequence
  Description of Artificial Sequence: Synthetic oligonucleotide
aucgaagauucuuaggauu

SEQ ID NO: 2039163 - RNA, 19 nt, Artificial Sequence
  Description of Artificial Sequence: Synthetic oligonucleotide
aaggcgguucgagaguuuc

SEQ ID NO: 2039164 - RNA, 19 nt, Artificial Sequence
  Description of Artificial Sequence: Synthetic oligonucleotide
cauuuaccaguccguaugc

SEQ ID NO: 2039165 - RNA, 19 nt, Artificial Sequence
  Description of Artificial Sequence: Synthetic oligonucleotide
acguuguaaaucugcucuc

SEQ ID NO: 2039166 - RNA, 19 nt, Artificial Sequence
  Description of Artificial Sequence: Synthetic oligonucleotide
uucuuccuuguauggacug

SEQ ID NO: 2039167 - RNA, 19 nt, Artificial Sequence
  Description of Artificial Sequence: Synthetic oligonucleotide
ggugucacaaaaucauggc

SEQ ID NO: 2039168 - RNA, 19 nt, Artificial Sequence
  Description of Artificial Sequence: Synthetic oligonucleotide
ucuuccuuguauggacugg

SEQ ID NO: 2039169 - RNA, 19 nt, Artificial Sequence
  Description of Artificial Sequence: Synthetic oligonucleotide
ugucugucggacucgauuu

SEQ ID NO: 2039170 - RNA, 19 nt, Artificial Sequence
  Description of Artificial Sequence: Synthetic oligonucleotide
uuucaccauagacggcucc

SEQ ID NO: 2039171 - RNA, 19 nt, Artificial Sequence
  Description of Artificial Sequence: Synthetic oligonucleotide
ucaagccaauucaucucgc

SEQ ID NO: 2039172 - RNA, 19 nt, Artificial Sequence
  Description of Artificial Sequence: Synthetic oligonucleotide
gaucucgauguuguauagg

SEQ ID NO: 2039173 - RNA, 19 nt, Artificial Sequence
  Description of Artificial Sequence: Synthetic oligonucleotide
caaaccuaggugucacgcc

SEQ ID NO: 2039174 - RNA, 19 nt, Artificial Sequence
  Description of Artificial Sequence: Synthetic oligonucleotide
ucggacucgauuugauuga

SEQ ID NO: 2039175 - RNA, 19 nt, Artificial Sequence
  Description of Artificial Sequence: Synthetic oligonucleotide
uccgcagcgcguuagcucu

SEQ ID NO: 2039176 - RNA, 19 nt, Artificial Sequence
  Description of Artificial Sequence: Synthetic oligonucleotide
cucgauuugauugauucga

SEQ ID NO: 2039177 - RNA, 19 nt, Artificial Sequence
  Description of Artificial Sequence: Synthetic oligonucleotide
cuuccuuguauggacuggg

SEQ ID NO: 2039178 - RNA, 19 nt, Artificial Sequence
  Description of Artificial Sequence: Synthetic oligonucleotide
gaucgagacguuguaaauc

SEQ ID NO: 2039179 - RNA, 19 nt, Artificial Sequence
  Description of Artificial Sequence: Synthetic oligonucleotide
cuacaucagccguugcugc

SEQ ID NO: 2039180 - RNA, 19 nt, Artificial Sequence
  Description of Artificial Sequence: Synthetic oligonucleotide
gccaauagccgcaagcucg

SEQ ID NO: 2039181 - RNA, 19 nt, Artificial Sequence
  Description of Artificial Sequence: Synthetic oligonucleotide
aaggaucucgauguuguau

SEQ ID NO: 2039182 - RNA, 19 nt, Artificial Sequence
  Description of Artificial Sequence: Synthetic oligonucleotide
aaggcugcgucgaacgaag

SEQ ID NO: 2039183 - RNA, 19 nt, Artificial Sequence
  Description of Artificial Sequence: Synthetic oligonucleotide
ucuuugcugucagcaaggg

SEQ ID NO: 2039184 - RNA, 19 nt, Artificial Sequence
  Description of Artificial Sequence: Synthetic oligonucleotide
aucaaaccuaggugucacg

SEQ ID NO: 2039185 - RNA, 19 nt, Artificial Sequence
  Description of Artificial Sequence: Synthetic oligonucleotide
cacaaaaucauggcuuaac

SEQ ID NO: 2039186 - RNA, 19 nt, Artificial Sequence
  Description of Artificial Sequence: Synthetic oligonucleotide
auguuguauagguucucca

SEQ ID NO: 2039187 - RNA, 19 nt, Artificial Sequence
  Description of Artificial Sequence: Synthetic oligonucleotide
uuauuucugugaugucuac

SEQ ID NO: 2039188 - RNA, 19 nt, Artificial Sequence
  Description of Artificial Sequence: Synthetic oligonucleotide
gguugguuucaccauagac

SEQ ID NO: 2039189 - RNA, 19 nt, Artificial Sequence
  Description of Artificial Sequence: Synthetic oligonucleotide
guacccagaagucugcgga

SEQ ID NO: 2039190 - RNA, 19 nt, Artificial Sequence
  Description of Artificial Sequence: Synthetic oligonucleotide
uggagggcaucuuuugacu

SEQ ID NO: 2039191 - RNA, 19 nt, Artificial Sequence
  Description of Artificial Sequence: Synthetic oligonucleotide
gacgugucccugcaggcgc

SEQ ID NO: 2039192 - RNA, 19 nt, Artificial Sequence
  Description of Artificial Sequence: Synthetic oligonucleotide
ucgauuugauugauucgaa

SEQ ID NO: 2039193 - RNA, 19 nt, Artificial Sequence
  Description of Artificial Sequence: Synthetic oligonucleotide
ucgagaguuucuuaauguu

SEQ ID NO: 2039194 - RNA, 19 nt, Artificial Sequence
  Description of Artificial Sequence: Synthetic oligonucleotide
cuuaaccuuuugcuccugc

SEQ ID NO: 2039195 - RNA, 19 nt, Artificial Sequence
  Description of Artificial Sequence: Synthetic oligonucleotide
uaggugucacgccuggggu

SEQ ID NO: 2039196 - RNA, 19 nt, Artificial Sequence
  Description of Artificial Sequence: Synthetic oligonucleotide
cuuugcugucagcaagggg

SEQ ID NO: 2039197 - RNA, 19 nt, Artificial Sequence
  Description of Artificial Sequence: Synthetic oligonucleotide
uaaccuuuugcuccugcuu

SEQ ID NO: 2039198 - RNA, 19 nt, Artificial Sequence
  Description of Artificial Sequence: Synthetic oligonucleotide
aucugggcaaggcgguucg

SEQ ID NO: 2039199 - RNA, 19 nt, Artificial Sequence
  Description of Artificial Sequence: Synthetic oligonucleotide
uccugcuucuuccuuguau

SEQ ID NO: 2039200 - RNA, 19 nt, Artificial Sequence
  Description of Artificial Sequence: Synthetic oligonucleotide
aaaggugucugaauagcuu

SEQ ID NO: 2039201 - RNA, 19 nt, Artificial Sequence
  Description of Artificial Sequence: Synthetic oligonucleotide
ugagcgcucacggagcagc

SEQ ID NO: 2039202 - RNA, 19 nt, Artificial Sequence
  Description of Artificial Sequence: Synthetic oligonucleotide
ucuuggauggagggcaucu

SEQ ID NO: 2039203 - RNA, 19 nt, Artificial Sequence
  Description of Artificial Sequence: Synthetic oligonucleotide
cugcgucgaacgaaggacc

SEQ ID NO: 2039204 - RNA, 19 nt, Artificial Sequence
  Description of Artificial Sequence: Synthetic oligonucleotide
ugaucgagacguuguaaau

SEQ ID NO: 2039205 - RNA, 19 nt, Artificial Sequence
  Description of Artificial Sequence: Synthetic oligonucleotide
ggcucagcggcugagacgg

SEQ ID NO: 2039206 - RNA, 19 nt, Artificial Sequence
  Description of Artificial Sequence: Synthetic oligonucleotide
aaagaggacgugagcgcuc

SEQ ID NO: 2039207 - RNA, 19 nt, Artificial Sequence
  Description of Artificial Sequence: Synthetic oligonucleotide
gauggagggcaucuuuuga

SEQ ID NO: 2039208 - RNA, 19 nt, Artificial Sequence
  Description of Artificial Sequence: Synthetic oligonucleotide
cauggcuuaaccuuuugcu

SEQ ID NO: 2039209 - RNA, 19 nt, Artificial Sequence
  Description of Artificial Sequence: Synthetic oligonucleotide
aggccuggggucuugaaaa

SEQ ID NO: 2039210 - RNA, 19 nt, Artificial Sequence
  Description of Artificial Sequence: Synthetic oligonucleotide
cuugcggcuccgcagcgcg

SEQ ID NO: 2039211 - RNA, 19 nt, Artificial Sequence
  Description of Artificial Sequence: Synthetic oligonucleotide
cuggugucacaaaaucaug

SEQ ID NO: 2039212 - RNA, 19 nt, Artificial Sequence
  Description of Artificial Sequence: Synthetic oligonucleotide
uaguagaucgaagauucuu

SEQ ID NO: 2039213 - RNA, 19 nt, Artificial Sequence
  Description of Artificial Sequence: Synthetic oligonucleotide
ggaaagaggacgugagcgc

SEQ ID NO: 2039214 - RNA, 19 nt, Artificial Sequence
  Description of Artificial Sequence: Synthetic oligonucleotide
cauggcgccggggugaagg

SEQ ID NO: 2039215 - RNA, 19 nt, Artificial Sequence
  Description of Artificial Sequence: Synthetic oligonucleotide
uccuugaggagguucuguc

SEQ ID NO: 2039216 - RNA, 19 nt, Artificial Sequence
  Description of Artificial Sequence: Synthetic oligonucleotide
uggccaauagccgcaagcu

SEQ ID NO: 2039217 - RNA, 19 nt, Artificial Sequence
  Description of Artificial Sequence: Synthetic oligonucleotide
uugacucuaguagaucgaa

SEQ ID NO: 2039218 - RNA, 19 nt, Artificial Sequence
  Description of Artificial Sequence: Synthetic oligonucleotide
gaggacgugagcgcucacg

SEQ ID NO: 2039219 - RNA, 19 nt, Artificial Sequence
  Description of Artificial Sequence: Synthetic oligonucleotide
gucguuggagucugguacc

SEQ ID NO: 2039220 - RNA, 19 nt, Artificial Sequence
  Description of Artificial Sequence: Synthetic oligonucleotide
caaaaucauggcuuaaccu

SEQ ID NO: 2039221 - RNA, 19 nt, Artificial Sequence
  Description of Artificial Sequence: Synthetic oligonucleotide
uguauagguucuccaccuc

SEQ ID NO: 2039222 - RNA, 19 nt, Artificial Sequence
  Description of Artificial Sequence: Synthetic oligonucleotide
gaauuugcaccucgcgguc

SEQ ID NO: 2039223 - RNA, 19 nt, Artificial Sequence
  Description of Artificial Sequence: Synthetic oligonucleotide
aguagaucgaagauucuua

SEQ ID NO: 2039224 - RNA, 19 nt, Artificial Sequence
  Description of Artificial Sequence: Synthetic oligonucleotide
uuagcucuggcgccccggc

SEQ ID NO: 2039225 - RNA, 19 nt, Artificial Sequence
  Description of Artificial Sequence: Synthetic oligonucleotide
ucgcgcagcgccuugggga

SEQ ID NO: 2039226 - RNA, 19 nt, Artificial Sequence
  Description of Artificial Sequence: Synthetic oligonucleotide
uucaccauagacggcucca

SEQ ID NO: 2039227 - RNA, 19 nt, Artificial Sequence
  Description of Artificial Sequence: Synthetic oligonucleotide
gucuugaaaacccuggaau

SEQ ID NO: 2039228 - RNA, 19 nt, Artificial Sequence
  Description of Artificial Sequence: Synthetic oligonucleotide
ccuuguauggacuggguuc

SEQ ID NO: 2039229 - RNA, 19 nt, Artificial Sequence
  Description of Artificial Sequence: Synthetic oligonucleotide
uccuuguauggacuggguu

SEQ ID NO: 2039230 - RNA, 19 nt, Artificial Sequence
  Description of Artificial Sequence: Synthetic oligonucleotide
cugagacggggaaagagga

SEQ ID NO: 2039231 - RNA, 19 nt, Artificial Sequence
  Description of Artificial Sequence: Synthetic oligonucleotide
gaaucaaaccuagguguca

SEQ ID NO: 2039232 - RNA, 19 nt, Artificial Sequence
  Description of Artificial Sequence: Synthetic oligonucleotide
caggcgccgaaacacagac

SEQ ID NO: 2039233 - RNA, 19 nt, Artificial Sequence
  Description of Artificial Sequence: Synthetic oligonucleotide
ucugcggacgugucccugc

SEQ ID NO: 2039234 - RNA, 19 nt, Artificial Sequence
  Description of Artificial Sequence: Synthetic oligonucleotide
cucuggauucagcugagca

SEQ ID NO: 2039235 - RNA, 19 nt, Artificial Sequence
  Description of Artificial Sequence: Synthetic oligonucleotide
gcggucgaaguccuuaagg

SEQ ID NO: 2039236 - RNA, 19 nt, Artificial Sequence
  Description of Artificial Sequence: Synthetic oligonucleotide
ugcaccucgcggucgaagu

SEQ ID NO: 2039237 - RNA, 19 nt, Artificial Sequence
  Description of Artificial Sequence: Synthetic oligonucleotide
uggauggagggcaucuuuu

SEQ ID NO: 2039238 - RNA, 19 nt, Artificial Sequence
  Description of Artificial Sequence: Synthetic oligonucleotide
cugugaugucuacaucagc

SEQ ID NO: 2039239 - RNA, 19 nt, Artificial Sequence
  Description of Artificial Sequence: Synthetic oligonucleotide
accuaggugucacgccugg

SEQ ID NO: 2039240 - RNA, 19 nt, Artificial Sequence
  Description of Artificial Sequence: Synthetic oligonucleotide
auagacggcuccagccugc

SEQ ID NO: 2039241 - RNA, 19 nt, Artificial Sequence
  Description of Artificial Sequence: Synthetic oligonucleotide
cuuaaggaaggaggcgagc

SEQ ID NO: 2039242 - RNA, 19 nt, Artificial Sequence
  Description of Artificial Sequence: Synthetic oligonucleotide
ucucauuuaccaguccgua

SEQ ID NO: 2039243 - RNA, 19 nt, Artificial Sequence
  Description of Artificial Sequence: Synthetic oligonucleotide
cauagacggcuccagccug

SEQ ID NO: 2039244 - RNA, 19 nt, Artificial Sequence
  Description of Artificial Sequence: Synthetic oligonucleotide
ucugucggacucgauuuga

SEQ ID NO: 2039245 - RNA, 19 nt, Artificial Sequence
  Description of Artificial Sequence: Synthetic oligonucleotide
ucgagacguuguaaaucug

SEQ ID NO: 2039246 - RNA, 19 nt, Artificial Sequence
  Description of Artificial Sequence: Synthetic oligonucleotide
agacccaggaaaccucgca

SEQ ID NO: 2039247 - RNA, 19 nt, Artificial Sequence
  Description of Artificial Sequence: Synthetic oligonucleotide
agucugguacccagaaguc

SEQ ID NO: 2039248 - RNA, 19 nt, Artificial Sequence
  Description of Artificial Sequence: Synthetic oligonucleotide
uucuuaggauucuuuucuu

SEQ ID NO: 2039249 - RNA, 19 nt, Artificial Sequence
  Description of Artificial Sequence: Synthetic oligonucleotide
uugaggagguucugucugu

SEQ ID NO: 2039250 - RNA, 19 nt, Artificial Sequence
  Description of Artificial Sequence: Synthetic oligonucleotide
guccuuaaggaaggaggcg

SEQ ID NO: 2039251 - RNA, 19 nt, Artificial Sequence
  Description of Artificial Sequence: Synthetic oligonucleotide
aacccuggaaucaaaccua

SEQ ID NO: 2039252 - RNA, 19 nt, Artificial Sequence
  Description of Artificial Sequence: Synthetic oligonucleotide
ucaccauagacggcuccag

SEQ ID NO: 2039253 - RNA, 19 nt, Artificial Sequence
  Description of Artificial Sequence: Synthetic oligonucleotide
aguagucaagccaauucau

SEQ ID NO: 2039254 - RNA, 19 nt, Artificial Sequence
  Description of Artificial Sequence: Synthetic oligonucleotide
uguauggacuggguucucu

SEQ ID NO: 2039255 - RNA, 19 nt, Artificial Sequence
  Description of Artificial Sequence: Synthetic oligonucleotide
augucuacaucagccguug

SEQ ID NO: 2039256 - RNA, 19 nt, Artificial Sequence
  Description of Artificial Sequence: Synthetic oligonucleotide
cagcgcguuagcucuggcg

SEQ ID NO: 2039257 - RNA, 19 nt, Artificial Sequence
  Description of Artificial Sequence: Synthetic oligonucleotide
uucaucucgcgcagcgccu

SEQ ID NO: 2039258 - RNA, 19 nt, Artificial Sequence
  Description of Artificial Sequence: Synthetic oligonucleotide
guagucaagccaauucauc

SEQ ID NO: 2039259 - RNA, 19 nt, Artificial Sequence
  Description of Artificial Sequence: Synthetic oligonucleotide
gguacccagaagucugcgg

SEQ ID NO: 2039260 - RNA, 19 nt, Artificial Sequence
  Description of Artificial Sequence: Synthetic oligonucleotide
uuccuuguauggacugggu

SEQ ID NO: 2039261 - RNA, 19 nt, Artificial Sequence
  Description of Artificial Sequence: Synthetic oligonucleotide
auuugcaccucgcggucga

SEQ ID NO: 2039262 - RNA, 19 nt, Artificial Sequence
  Description of Artificial Sequence: Synthetic oligonucleotide
ugggguugguuucaccaua

SEQ ID NO: 2039263 - RNA, 19 nt, Artificial Sequence
  Description of Artificial Sequence: Synthetic oligonucleotide
auugaucgagacguuguaa

SEQ ID NO: 2039264 - RNA, 19 nt, Artificial Sequence
  Description of Artificial Sequence: Synthetic oligonucleotide
gaucgaagauucuuaggau

SEQ ID NO: 2039265 - RNA, 19 nt, Artificial Sequence
  Description of Artificial Sequence: Synthetic oligonucleotide
uccuagggucucuggauuc

SEQ ID NO: 2039266 - RNA, 19 nt, Artificial Sequence
  Description of Artificial Sequence: Synthetic oligonucleotide
ggaucucgauguuguauag

SEQ ID NO: 2039267 - RNA, 19 nt, Artificial Sequence
  Description of Artificial Sequence: Synthetic oligonucleotide
ugguacccagaagucugcg

SEQ ID NO: 2039268 - RNA, 19 nt, Artificial Sequence
  Description of Artificial Sequence: Synthetic oligonucleotide
auggcgccggggugaaggc

SEQ ID NO: 2039269 - RNA, 19 nt, Artificial Sequence
  Description of Artificial Sequence: Synthetic oligonucleotide
agcucgcaccaccacccac

SEQ ID NO: 2039270 - RNA, 19 nt, Artificial Sequence
  Description of Artificial Sequence: Synthetic oligonucleotide
caagggcaaaguagucaag

SEQ ID NO: 2039271 - RNA, 19 nt, Artificial Sequence
  Description of Artificial Sequence: Synthetic oligonucleotide
gaauagcuucagcuguuaa

SEQ ID NO: 2039272 - RNA, 19 nt, Artificial Sequence
  Description of Artificial Sequence: Synthetic oligonucleotide
ucggccaucuucucauuua

SEQ ID NO: 2039273 - RNA, 19 nt, Artificial Sequence
  Description of Artificial Sequence: Synthetic oligonucleotide
ugguuucaccauagacggc

SEQ ID NO: 2039274 - RNA, 19 nt, Artificial Sequence
  Description of Artificial Sequence: Synthetic oligonucleotide
cugccauugaucgagacgu

SEQ ID NO: 2039275 - RNA, 19 nt, Artificial Sequence
  Description of Artificial Sequence: Synthetic oligonucleotide
guucccuccaagggcaaag

SEQ ID NO: 2039276 - RNA, 19 nt, Artificial Sequence
  Description of Artificial Sequence: Synthetic oligonucleotide
ugucuacaucagccguugc

SEQ ID NO: 2039277 - RNA, 19 nt, Artificial Sequence
  Description of Artificial Sequence: Synthetic oligonucleotide
uucagucguuggagucugg

SEQ ID NO: 2039278 - RNA, 19 nt, Artificial Sequence
  Description of Artificial Sequence: Synthetic oligonucleotide
uccguaugcugcugcagau

SEQ ID NO: 2039279 - RNA, 19 nt, Artificial Sequence
  Description of Artificial Sequence: Synthetic oligonucleotide
ggauggagggcaucuuuug

SEQ ID NO: 2039280 - RNA, 19 nt, Artificial Sequence
  Description of Artificial Sequence: Synthetic oligonucleotide
acgugagcgcucacggagc

SEQ ID NO: 2039281 - RNA, 19 nt, Artificial Sequence
  Description of Artificial Sequence: Synthetic oligonucleotide
ggggcugccauugaucgag

SEQ ID NO: 2039282 - RNA, 19 nt, Artificial Sequence
  Description of Artificial Sequence: Synthetic oligonucleotide
guucagucguuggagucug

SEQ ID NO: 2039283 - RNA, 19 nt, Artificial Sequence
  Description of Artificial Sequence: Synthetic oligonucleotide
uaccaguccguaugcugcu

SEQ ID NO: 2039284 - RNA, 19 nt, Artificial Sequence
  Description of Artificial Sequence: Synthetic oligonucleotide
ugucggacucgauuugauu

SEQ ID NO: 2039285 - RNA, 19 nt, Artificial Sequence
  Description of Artificial Sequence: Synthetic oligonucleotide
caccauagacggcuccagc

SEQ ID NO: 2039286 - RNA, 19 nt, Artificial Sequence
  Description of Artificial Sequence: Synthetic oligonucleotide
ucguuggagucugguaccc

SEQ ID NO: 2039287 - RNA, 19 nt, Artificial Sequence
  Description of Artificial Sequence: Synthetic oligonucleotide
gaggcgagcuugcggcucc

SEQ ID NO: 2039288 - RNA, 19 nt, Artificial Sequence
  Description of Artificial Sequence: Synthetic oligonucleotide
gcaagcucgcaccaccacc

SEQ ID NO: 2039289 - RNA, 19 nt, Artificial Sequence
  Description of Artificial Sequence: Synthetic oligonucleotide
cugcugcccuucuugggag

SEQ ID NO: 2039290 - RNA, 19 nt, Artificial Sequence
  Description of Artificial Sequence: Synthetic oligonucleotide
auuuaccaguccguaugcu

SEQ ID NO: 2039291 - RNA, 19 nt, Artificial Sequence
  Description of Artificial Sequence: Synthetic oligonucleotide
gccaauucaucucgcgcag

SEQ ID NO: 2039292 - RNA, 19 nt, Artificial Sequence
  Description of Artificial Sequence: Synthetic oligonucleotide
ucacaaaaucauggcuuaa

SEQ ID NO: 2039293 - RNA, 19 nt, Artificial Sequence
  Description of Artificial Sequence: Synthetic oligonucleotide
guucugucugucggacucg

SEQ ID NO: 2039294 - RNA, 19 nt, Artificial Sequence
  Description of Artificial Sequence: Synthetic oligonucleotide
agaagucugcggacguguc

SEQ ID NO: 2039295 - RNA, 19 nt, Artificial Sequence
  Description of Artificial Sequence: Synthetic oligonucleotide
aaccuaggugucacgccug

SEQ ID NO: 2039296 - RNA, 19 nt, Artificial Sequence
  Description of Artificial Sequence: Synthetic oligonucleotide
cgaaggaccgagcagccgg

SEQ ID NO: 2039297 - RNA, 19 nt, Artificial Sequence
  Description of Artificial Sequence: Synthetic oligonucleotide
caccucgcggucgaagucc

SEQ ID NO: 2039298 - RNA, 19 nt, Artificial Sequence
  Description of Artificial Sequence: Synthetic oligonucleotide
gucuacaucagccguugcu

SEQ ID NO: 2039299 - RNA, 19 nt, Artificial Sequence
  Description of Artificial Sequence: Synthetic oligonucleotide
gucugucggacucgauuug

SEQ ID NO: 2039300 - RNA, 19 nt, Artificial Sequence
  Description of Artificial Sequence: Synthetic oligonucleotide
uagccgcaagcucgcacca

SEQ ID NO: 2039301 - RNA, 19 nt, Artificial Sequence
  Description of Artificial Sequence: Synthetic oligonucleotide
acccuggaaucaaaccuag

SEQ ID NO: 2039302 - RNA, 19 nt, Artificial Sequence
  Description of Artificial Sequence: Synthetic oligonucleotide
aguccguaugcugcugcag

SEQ ID NO: 2039303 - RNA, 19 nt, Artificial Sequence
  Description of Artificial Sequence: Synthetic oligonucleotide
gaaggaccgagcagccggc

SEQ ID NO: 2039304 - RNA, 19 nt, Artificial Sequence
  Description of Artificial Sequence: Synthetic oligonucleotide
acggggaaagaggacguga

SEQ ID NO: 2039305 - RNA, 19 nt, Artificial Sequence
  Description of Artificial Sequence: Synthetic oligonucleotide
gcugcgucgaacgaaggac

SEQ ID NO: 2039306 - RNA, 19 nt, Artificial Sequence
  Description of Artificial Sequence: Synthetic oligonucleotide
uggauucagcugagcaaua

SEQ ID NO: 2039307 - RNA, 19 nt, Artificial Sequence
  Description of Artificial Sequence: Synthetic oligonucleotide
gaaggcugcgucgaacgaa

SEQ ID NO: 2039308 - RNA, 19 nt, Artificial Sequence
  Description of Artificial Sequence: Synthetic oligonucleotide
ccaauagccgcaagcucgc

SEQ ID NO: 2039309 - RNA, 19 nt, Artificial Sequence
  Description of Artificial Sequence: Synthetic oligonucleotide
ggucgaaguccuuaaggaa

SEQ ID NO: 2039310 - RNA, 19 nt, Artificial Sequence
  Description of Artificial Sequence: Synthetic oligonucleotide
acagcuggugucacaaaau

SEQ ID NO: 2039311 - RNA, 19 nt, Artificial Sequence
  Description of Artificial Sequence: Synthetic oligonucleotide
ucccuccaagggcaaagua

SEQ ID NO: 2039312 - RNA, 19 nt, Artificial Sequence
  Description of Artificial Sequence: Synthetic oligonucleotide
ggucuugaaaacccuggaa

SEQ ID NO: 2039313 - RNA, 19 nt, Artificial Sequence
  Description of Artificial Sequence: Synthetic oligonucleotide
auagguucuccaccuccuu

SEQ ID NO: 2039314 - RNA, 19 nt, Artificial Sequence
  Description of Artificial Sequence: Synthetic oligonucleotide
cagacccaggaaaccucgc

SEQ ID NO: 2039315 - RNA, 19 nt, Artificial Sequence
  Description of Artificial Sequence: Synthetic oligonucleotide
gagcaauaucaaaccucug

SEQ ID NO: 2039316 - RNA, 19 nt, Artificial Sequence
  Description of Artificial Sequence: Synthetic oligonucleotide
ucacgccugggguugguuu

SEQ ID NO: 2039317 - RNA, 19 nt, Artificial Sequence
  Description of Artificial Sequence: Synthetic oligonucleotide
cuuguauggacuggguucu

SEQ ID NO: 2039318 - RNA, 19 nt, Artificial Sequence
  Description of Artificial Sequence: Synthetic oligonucleotide
cuccgcagcgcguuagcuc

SEQ ID NO: 2039319 - RNA, 19 nt, Artificial Sequence
  Description of Artificial Sequence: Synthetic oligonucleotide
acgaaggaccgagcagccg

SEQ ID NO: 2039320 - RNA, 19 nt, Artificial Sequence
  Description of Artificial Sequence: Synthetic oligonucleotide
ucccugcaggcgccgaaac

SEQ ID NO: 2039321 - RNA, 19 nt, Artificial Sequence
  Description of Artificial Sequence: Synthetic oligonucleotide
cucacagcuggugucacaa

SEQ ID NO: 2039322 - RNA, 19 nt, Artificial Sequence
  Description of Artificial Sequence: Synthetic oligonucleotide
ugauucgaauuugcaccuc

SEQ ID NO: 2039323 - RNA, 19 nt, Artificial Sequence
  Description of Artificial Sequence: Synthetic oligonucleotide
ugcugcccuucuugggagc

SEQ ID NO: 2039324 - RNA, 19 nt, Artificial Sequence
  Description of Artificial Sequence: Synthetic oligonucleotide
caccuggaccaccuuccgc

SEQ ID NO: 2039325 - RNA, 19 nt, Artificial Sequence
  Description of Artificial Sequence: Synthetic oligonucleotide
uggacuggguucucuucuu

SEQ ID NO: 2039326 - RNA, 19 nt, Artificial Sequence
  Description of Artificial Sequence: Synthetic oligonucleotide
cauugaucgagacguugua

SEQ ID NO: 2039327 - RNA, 19 nt, Artificial Sequence
  Description of Artificial Sequence: Synthetic oligonucleotide
agaggacgugagcgcucac

SEQ ID NO: 2039328 - RNA, 19 nt, Artificial Sequence
  Description of Artificial Sequence: Synthetic oligonucleotide
gagccauggcgccggggug

SEQ ID NO: 2039329 - RNA, 19 nt, Artificial Sequence
  Description of Artificial Sequence: Synthetic oligonucleotide
ucgcggucgaaguccuuaa

SEQ ID NO: 2039330 - RNA, 19 nt, Artificial Sequence
  Description of Artificial Sequence: Synthetic oligonucleotide
agacggggaaagaggacgu

SEQ ID NO: 2039331 - RNA, 19 nt, Artificial Sequence
  Description of Artificial Sequence: Synthetic oligonucleotide
ggugucacgccugggguug

SEQ ID NO: 2039332 - RNA, 19 nt, Artificial Sequence
  Description of Artificial Sequence: Synthetic oligonucleotide
agcuguuaacuuguuuauu

SEQ ID NO: 2039333 - RNA, 19 nt, Artificial Sequence
  Description of Artificial Sequence: Synthetic oligonucleotide
ccaagggcaaaguagucaa

SEQ ID NO: 2039334 - RNA, 19 nt, Artificial Sequence
  Description of Artificial Sequence: Synthetic oligonucleotide
gagcgcucacggagcagcg

SEQ ID NO: 2039335 - RNA, 19 nt, Artificial Sequence
  Description of Artificial Sequence: Synthetic oligonucleotide
ugcaagucacuggccaaua

SEQ ID NO: 2039336 - RNA, 19 nt, Artificial Sequence
  Description of Artificial Sequence: Synthetic oligonucleotide
ccuccauuaucacuucauc

SEQ ID NO: 2039337 - RNA, 19 nt, Artificial Sequence
  Description of Artificial Sequence: Synthetic oligonucleotide
ggacgugucccugcaggcg

SEQ ID NO: 2039338 - RNA, 19 nt, Artificial Sequence
  Description of Artificial Sequence: Synthetic oligonucleotide
cuggauucagcugagcaau

SEQ ID NO: 2039339 - RNA, 19 nt, Artificial Sequence
  Description of Artificial Sequence: Synthetic oligonucleotide
gccauugaucgagacguug

SEQ ID NO: 2039340 - RNA, 19 nt, Artificial Sequence
  Description of Artificial Sequence: Synthetic oligonucleotide
ggguucagucguuggaguc

SEQ ID NO: 2039341 - RNA, 19 nt, Artificial Sequence
  Description of Artificial Sequence: Synthetic oligonucleotide
aggcgccgaaacacagacc

SEQ ID NO: 2039342 - RNA, 19 nt, Artificial Sequence
  Description of Artificial Sequence: Synthetic oligonucleotide
ucugucugucggacucgau

SEQ ID NO: 2039343 - RNA, 19 nt, Artificial Sequence
  Description of Artificial Sequence: Synthetic oligonucleotide
ggacuggguucucuucuug

SEQ ID NO: 2039344 - RNA, 19 nt, Artificial Sequence
  Description of Artificial Sequence: Synthetic oligonucleotide
acgugucccugcaggcgcc

SEQ ID NO: 2039345 - RNA, 19 nt, Artificial Sequence
  Description of Artificial Sequence: Synthetic oligonucleotide
ggggagccgaaggaucucg

SEQ ID NO: 2039346 - RNA, 19 nt, Artificial Sequence
  Description of Artificial Sequence: Synthetic oligonucleotide
ggaaggaggcgagcuugcg

SEQ ID NO: 2039347 - RNA, 19 nt, Artificial Sequence
  Description of Artificial Sequence: Synthetic oligonucleotide
aggaggcgagcuugcggcu

SEQ ID NO: 2039348 - RNA, 19 nt, Artificial Sequence
  Description of Artificial Sequence: Synthetic oligonucleotide
gucgaacgaaggaccgagc

SEQ ID NO: 2039349 - RNA, 19 nt, Artificial Sequence
  Description of Artificial Sequence: Synthetic oligonucleotide
gggccuguuuguucccucc

SEQ ID NO: 2039350 - RNA, 19 nt, Artificial Sequence
  Description of Artificial Sequence: Synthetic oligonucleotide
aaggaccgagcagccggcu

SEQ ID NO: 2039351 - RNA, 19 nt, Artificial Sequence
  Description of Artificial Sequence: Synthetic oligonucleotide
uucuuggauggagggcauc

SEQ ID NO: 2039352 - RNA, 19 nt, Artificial Sequence
  Description of Artificial Sequence: Synthetic oligonucleotide
agucugcggacgugucccu

SEQ ID NO: 2039353 - RNA, 19 nt, Artificial Sequence
  Description of Artificial Sequence: Synthetic oligonucleotide
ccaccugugcugcucggcc

SEQ ID NO: 2039354 - RNA, 19 nt, Artificial Sequence
  Description of Artificial Sequence: Synthetic oligonucleotide
ugccauugaucgagacguu

SEQ ID NO: 2039355 - RNA, 19 nt, Artificial Sequence
  Description of Artificial Sequence: Synthetic oligonucleotide
agggcaucuuuugacucua

SEQ ID NO: 2039356 - RNA, 19 nt, Artificial Sequence
  Description of Artificial Sequence: Synthetic oligonucleotide
ggccaauagccgcaagcuc

SEQ ID NO: 2039357 - RNA, 19 nt, Artificial Sequence
  Description of Artificial Sequence: Synthetic oligonucleotide
ccaguccguaugcugcugc

SEQ ID NO: 2039358 - RNA, 19 nt, Artificial Sequence
  Description of Artificial Sequence: Synthetic oligonucleotide
agccgcaagcucgcaccac

SEQ ID NO: 2039359 - RNA, 19 nt, Artificial Sequence
  Description of Artificial Sequence: Synthetic oligonucleotide
ggcugcgucgaacgaagga

SEQ ID NO: 2039360 - RNA, 19 nt, Artificial Sequence
  Description of Artificial Sequence: Synthetic oligonucleotide
cuaguagaucgaagauucu

SEQ ID NO: 2039361 - RNA, 19 nt, Artificial Sequence
  Description of Artificial Sequence: Synthetic oligonucleotide
ugggagccauggcgccggg

SEQ ID NO: 2039362 - RNA, 19 nt, Artificial Sequence
  Description of Artificial Sequence: Synthetic oligonucleotide
gccgaaacacagacccagg

SEQ ID NO: 2039363 - RNA, 19 nt, Artificial Sequence
  Description of Artificial Sequence: Synthetic oligonucleotide
caggccuggggucuugaaa

SEQ ID NO: 2039364 - RNA, 19 nt, Artificial Sequence
  Description of Artificial Sequence: Synthetic oligonucleotide
caguccguaugcugcugca

SEQ ID NO: 2039365 - RNA, 19 nt, Artificial Sequence
  Description of Artificial Sequence: Synthetic oligonucleotide
gucugguacccagaagucu

SEQ ID NO: 2039366 - RNA, 19 nt, Artificial Sequence
  Description of Artificial Sequence: Synthetic oligonucleotide
cccuggaaucaaaccuagg

SEQ ID NO: 2039367 - RNA, 19 nt, Artificial Sequence
  Description of Artificial Sequence: Synthetic oligonucleotide
cggucgaaguccuuaagga

SEQ ID NO: 2039368 - RNA, 19 nt, Artificial Sequence
  Description of Artificial Sequence: Synthetic oligonucleotide
cagucguuggagucuggua

SEQ ID NO: 2039369 - RNA, 19 nt, Artificial Sequence
  Description of Artificial Sequence: Synthetic oligonucleotide
guauggacuggguucucuu

SEQ ID NO: 2039370 - RNA, 19 nt, Artificial Sequence
  Description of Artificial Sequence: Synthetic oligonucleotide
cgucgaacgaaggaccgag

SEQ ID NO: 2039371 - RNA, 19 nt, Artificial Sequence
  Description of Artificial Sequence: Synthetic oligonucleotide
cugucugucggacucgauu

SEQ ID NO: 2039372 - RNA, 19 nt, Artificial Sequence
  Description of Artificial Sequence: Synthetic oligonucleotide
cugcucggccaucuucuca

SEQ ID NO: 2039373 - RNA, 19 nt, Artificial Sequence
  Description of Artificial Sequence: Synthetic oligonucleotide
ucuggcgccccggcugcug

SEQ ID NO: 2039374 - RNA, 19 nt, Artificial Sequence
  Description of Artificial Sequence: Synthetic oligonucleotide
cugaauagcuucagcuguu

SEQ ID NO: 2039375 - RNA, 19 nt, Artificial Sequence
  Description of Artificial Sequence: Synthetic oligonucleotide
aucagccguugcugccucu

SEQ ID NO: 2039376 - RNA, 19 nt, Artificial Sequence
  Description of Artificial Sequence: Synthetic oligonucleotide
ggagccauggcgccggggu

SEQ ID NO: 2039377 - RNA, 19 nt, Artificial Sequence
  Description of Artificial Sequence: Synthetic oligonucleotide
ggcugccauugaucgagac

SEQ ID NO: 2039378 - RNA, 19 nt, Artificial Sequence
  Description of Artificial Sequence: Synthetic oligonucleotide
ccgaaacacagacccagga

SEQ ID NO: 2039379 - RNA, 19 nt, Artificial Sequence
  Description of Artificial Sequence: Synthetic oligonucleotide
cggggugaaggcugcgucg

SEQ ID NO: 2039380 - RNA, 19 nt, Artificial Sequence
  Description of Artificial Sequence: Synthetic oligonucleotide
cgccgaaacacagacccag

SEQ ID NO: 2039381 - RNA, 19 nt, Artificial Sequence
  Description of Artificial Sequence: Synthetic oligonucleotide
gcgcguuagcucuggcgcc

SEQ ID NO: 2039382 - RNA, 19 nt, Artificial Sequence
  Description of Artificial Sequence: Synthetic oligonucleotide
aggcugcgucgaacgaagg

SEQ ID NO: 2039383 - RNA, 19 nt, Artificial Sequence
  Description of Artificial Sequence: Synthetic oligonucleotide
ccgaaggaucucgauguug

SEQ ID NO: 2039384 - RNA, 19 nt, Artificial Sequence
  Description of Artificial Sequence: Synthetic oligonucleotide
ggcuuaaccuuuugcuccu

SEQ ID NO: 2039385 - RNA, 19 nt, Artificial Sequence
  Description of Artificial Sequence: Synthetic oligonucleotide
uggggagccgaaggaucuc

SEQ ID NO: 2039386 - RNA, 19 nt, Artificial Sequence
  Description of Artificial Sequence: Synthetic oligonucleotide
ccaccuggaccaccuuccg

SEQ ID NO: 2039387 - RNA, 19 nt, Artificial Sequence
  Description of Artificial Sequence: Synthetic oligonucleotide
cugcuggagugcgcaggcc

SEQ ID NO: 2039388 - RNA, 19 nt, Artificial Sequence
  Description of Artificial Sequence: Synthetic oligonucleotide
cucgcggucgaaguccuua

SEQ ID NO: 2039389 - RNA, 19 nt, Artificial Sequence
  Description of Artificial Sequence: Synthetic oligonucleotide
gugagcgcucacggagcag

SEQ ID NO: 2039390 - RNA, 19 nt, Artificial Sequence
  Description of Artificial Sequence: Synthetic oligonucleotide
ugcggcuccgcagcgcguu

SEQ ID NO: 2039391 - RNA, 19 nt, Artificial Sequence
  Description of Artificial Sequence: Synthetic oligonucleotide
uugcggcuccgcagcgcgu

SEQ ID NO: 2039392 - RNA, 19 nt, Artificial Sequence
  Description of Artificial Sequence: Synthetic oligonucleotide
gugucacgccugggguugg

SEQ ID NO: 2039393 - RNA, 19 nt, Artificial Sequence
  Description of Artificial Sequence: Synthetic oligonucleotide
aggcgguucgagaguuucu

SEQ ID NO: 2039394 - RNA, 19 nt, Artificial Sequence
  Description of Artificial Sequence: Synthetic oligonucleotide
ccaauucaucucgcgcagc

SEQ ID NO: 2039395 - RNA, 19 nt, Artificial Sequence
  Description of Artificial Sequence: Synthetic oligonucleotide
gcucgcaccaccacccaca

SEQ ID NO: 2039396 - RNA, 19 nt, Artificial Sequence
  Description of Artificial Sequence: Synthetic oligonucleotide
agcggcugagacggggaaa

SEQ ID NO: 2039397 - RNA, 19 nt, Artificial Sequence
  Description of Artificial Sequence: Synthetic oligonucleotide
agaucugggcaaggcgguu

SEQ ID NO: 2039398 - RNA, 19 nt, Artificial Sequence
  Description of Artificial Sequence: Synthetic oligonucleotide
acgccugggguugguuuca

SEQ ID NO: 2039399 - RNA, 19 nt, Artificial Sequence
  Description of Artificial Sequence: Synthetic oligonucleotide
gcucuggcgccccggcugc

SEQ ID NO: 2039400 - RNA, 19 nt, Artificial Sequence
  Description of Artificial Sequence: Synthetic oligonucleotide
cgccuuggggagccgaagg

SEQ ID NO: 2039401 - RNA, 19 nt, Artificial Sequence
  Description of Artificial Sequence: Synthetic oligonucleotide
ugucacgccugggguuggu

SEQ ID NO: 2039402 - RNA, 19 nt, Artificial Sequence
  Description of Artificial Sequence: Synthetic oligonucleotide
ggacgugagcgcucacgga

SEQ ID NO: 2039403 - RNA, 19 nt, Artificial Sequence
  Description of Artificial Sequence: Synthetic oligonucleotide
cggccaucuucucauuuac

SEQ ID NO: 2039404 - RNA, 19 nt, Artificial Sequence
  Description of Artificial Sequence: Synthetic oligonucleotide
accucgcggucgaaguccu

SEQ ID NO: 2039405 - RNA, 19 nt, Artificial Sequence
  Description of Artificial Sequence: Synthetic oligonucleotide
ggguugguuucaccauaga

SEQ ID NO: 2039406 - RNA, 19 nt, Artificial Sequence
  Description of Artificial Sequence: Synthetic oligonucleotide
cggacgugucccugcaggc

SEQ ID NO: 2039407 - RNA, 19 nt, Artificial Sequence
  Description of Artificial Sequence: Synthetic oligonucleotide
ggcuccgcagcgcguuagc

SEQ ID NO: 2039408 - RNA, 19 nt, Artificial Sequence
  Description of Artificial Sequence: Synthetic oligonucleotide
cgguucgagaguuucuuaa

SEQ ID NO: 2039409 - RNA, 19 nt, Artificial Sequence
  Description of Artificial Sequence: Synthetic oligonucleotide
aggaaaccucgcagcucca

SEQ ID NO: 2039410 - RNA, 19 nt, Artificial Sequence
  Description of Artificial Sequence: Synthetic oligonucleotide
cuucuuggauggagggcau

SEQ ID NO: 2039411 - RNA, 19 nt, Artificial Sequence
  Description of Artificial Sequence: Synthetic oligonucleotide
cugucggacucgauuugau

SEQ ID NO: 2039412 - RNA, 19 nt, Artificial Sequence
  Description of Artificial Sequence: Synthetic oligonucleotide
gcaccucgcggucgaaguc

SEQ ID NO: 2039413 - RNA, 19 nt, Artificial Sequence
  Description of Artificial Sequence: Synthetic oligonucleotide
gcgagcuugcggcuccgca

SEQ ID NO: 2039414 - RNA, 19 nt, Artificial Sequence
  Description of Artificial Sequence: Synthetic oligonucleotide
ccuaggugucacgccuggg

SEQ ID NO: 2039415 - RNA, 19 nt, Artificial Sequence
  Description of Artificial Sequence: Synthetic oligonucleotide
ccggggugaaggcugcguc

SEQ ID NO: 2039416 - RNA, 19 nt, Artificial Sequence
  Description of Artificial Sequence: Synthetic oligonucleotide
gcuuaaccuuuugcuccug

SEQ ID NO: 2039417 - RNA, 19 nt, Artificial Sequence
  Description of Artificial Sequence: Synthetic oligonucleotide
ggcaaggcgguucgagagu

SEQ ID NO: 2039418 - RNA, 19 nt, Artificial Sequence
  Description of Artificial Sequence: Synthetic oligonucleotide
gggcaucuuuugacucuag

SEQ ID NO: 2039419 - RNA, 19 nt, Artificial Sequence
  Description of Artificial Sequence: Synthetic oligonucleotide
ccauagacggcuccagccu

SEQ ID NO: 2039420 - RNA, 19 nt, Artificial Sequence
  Description of Artificial Sequence: Synthetic oligonucleotide
gcugcucggccaucuucuc

SEQ ID NO: 2039421 - RNA, 19 nt, Artificial Sequence
  Description of Artificial Sequence: Synthetic oligonucleotide
gccaccugugcugcucggc

SEQ ID NO: 2039422 - RNA, 19 nt, Artificial Sequence
  Description of Artificial Sequence: Synthetic oligonucleotide
ggaggcgagcuugcggcuc

SEQ ID NO: 2039423 - RNA, 19 nt, Artificial Sequence
  Description of Artificial Sequence: Synthetic oligonucleotide
caauagccgcaagcucgca

SEQ ID NO: 2039424 - RNA, 19 nt, Artificial Sequence
  Description of Artificial Sequence: Synthetic oligonucleotide
cgagaguuucuuaauguuu

SEQ ID NO: 2039425 - RNA, 19 nt, Artificial Sequence
  Description of Artificial Sequence: Synthetic oligonucleotide
cgcucacggagcagcgggg

SEQ ID NO: 2039426 - RNA, 19 nt, Artificial Sequence
  Description of Artificial Sequence: Synthetic oligonucleotide
ggagccgaaggaucucgau

SEQ ID NO: 2039427 - RNA, 19 nt, Artificial Sequence
  Description of Artificial Sequence: Synthetic oligonucleotide
gcagccggcucagcggcug

SEQ ID NO: 2039428 - RNA, 19 nt, Artificial Sequence
  Description of Artificial Sequence: Synthetic oligonucleotide
gcagcgcguuagcucuggc

SEQ ID NO: 2039429 - RNA, 19 nt, Artificial Sequence
  Description of Artificial Sequence: Synthetic oligonucleotide
cucggccaucuucucauuu

SEQ ID NO: 2039430 - RNA, 19 nt, Artificial Sequence
  Description of Artificial Sequence: Synthetic oligonucleotide
gcuugcggcuccgcagcgc

SEQ ID NO: 2039431 - RNA, 19 nt, Artificial Sequence
  Description of Artificial Sequence: Synthetic oligonucleotide
gcgguucgagaguuucuua

SEQ ID NO: 2039432 - RNA, 19 nt, Artificial Sequence
  Description of Artificial Sequence: Synthetic oligonucleotide
cgcguuagcucuggcgccc

SEQ ID NO: 2039433 - RNA, 19 nt, Artificial Sequence
  Description of Artificial Sequence: Synthetic oligonucleotide
cgcggucgaaguccuuaag

SEQ ID NO: 2039434 - RNA, 19 nt, Artificial Sequence
  Description of Artificial Sequence: Synthetic oligonucleotide
gcgccuuggggagccgaag

SEQ ID NO: 2039435 - RNA, 19 nt, Artificial Sequence
  Description of Artificial Sequence: Synthetic oligonucleotide
gggagccgaaggaucucga

SEQ ID NO: 2039436 - RNA, 19 nt, Artificial Sequence
  Description of Artificial Sequence: Synthetic oligonucleotide
ggcgguucgagaguuucuu

SEQ ID NO: 2039437 - RNA, 19 nt, Artificial Sequence
  Description of Artificial Sequence: Synthetic oligonucleotide
gcgucgaacgaaggaccga

SEQ ID NO: 2039438 - RNA, 19 nt, Artificial Sequence
  Description of Artificial Sequence: Synthetic oligonucleotide
ccgcaagcucgcaccacca

SEQ ID NO: 2039439 - RNA, 19 nt, Artificial Sequence
  Description of Artificial Sequence: Synthetic oligonucleotide
gcguuagcucuggcgcccc

SEQ ID NO: 2039440 - RNA, 19 nt, Artificial Sequence
  Description of Artificial Sequence: Synthetic oligonucleotide
gcaaggcgguucgagaguu

SEQ ID NO: 2039441 - RNA, 19 nt, Artificial Sequence
  Description of Artificial Sequence: Synthetic oligonucleotide
cgugagcgcucacggagca

SEQ ID NO: 2039442 - RNA, 19 nt, Artificial Sequence
  Description of Artificial Sequence: Synthetic oligonucleotide
gugucccugcaggcgccga

SEQ ID NO: 2039443 - RNA, 19 nt, Artificial Sequence
  Description of Artificial Sequence: Synthetic oligonucleotide
cgcagcgcguuagcucugg

SEQ ID NO: 2039444 - RNA, 19 nt, Artificial Sequence
  Description of Artificial Sequence: Synthetic oligonucleotide
ggcgagcuugcggcuccgc

SEQ ID NO: 2039445 - RNA, 19 nt, Artificial Sequence
  Description of Artificial Sequence: Synthetic oligonucleotide
cccagaagucugcggacgu

SEQ ID NO: 2039446 - RNA, 19 nt, Artificial Sequence
  Description of Artificial Sequence: Synthetic oligonucleotide
caaggcgguucgagaguuu

SEQ ID NO: 2039447 - RNA, 19 nt, Artificial Sequence
  Description of Artificial Sequence: Synthetic oligonucleotide
gcgccgaaacacagaccca

SEQ ID NO: 2039448 - RNA, 19 nt, Artificial Sequence
  Description of Artificial Sequence: Synthetic oligonucleotide
cgaagauucuuaggauucu

SEQ ID NO: 2039449 - RNA, 19 nt, Artificial Sequence
  Description of Artificial Sequence: Synthetic oligonucleotide
gcgccggggugaaggcugc

SEQ ID NO: 2039450 - RNA, 19 nt, Artificial Sequence
  Description of Artificial Sequence: Synthetic oligonucleotide
ggacucgauuugauugauu

SEQ ID NO: 2039451 - RNA, 19 nt, Artificial Sequence
  Description of Artificial Sequence: Synthetic oligonucleotide
gcuccgcagcgcguuagcu

SEQ ID NO: 2039452 - RNA, 19 nt, Artificial Sequence
  Description of Artificial Sequence: Synthetic oligonucleotide
ccgcagcgcguuagcucug

SEQ ID NO: 2039453 - RNA, 19 nt, Artificial Sequence
  Description of Artificial Sequence: Synthetic oligonucleotide
gccgaaggaucucgauguu

SEQ ID NO: 2039454 - RNA, 19 nt, Artificial Sequence
  Description of Artificial Sequence: Synthetic oligonucleotide
gccauggcgccggggugaa

SEQ ID NO: 2039455 - RNA, 19 nt, Artificial Sequence
  Description of Artificial Sequence: Synthetic oligonucleotide
gcggcuccgcagcgcguua

SEQ ID NO: 2039456 - RNA, 19 nt, Artificial Sequence
  Description of Artificial Sequence: Synthetic oligonucleotide
ccauggcgccggggugaag

SEQ ID NO: 2039457 - RNA, 19 nt, Artificial Sequence
  Description of Artificial Sequence: Synthetic oligonucleotide
cgccggggugaaggcugcg

SEQ ID NO: 2039458 - RNA, 19 nt, Artificial Sequence
  Description of Artificial Sequence: Synthetic oligonucleotide
cggacucgauuugauugau

SEQ ID NO: 2039459 - RNA, 19 nt, Artificial Sequence
  Description of Artificial Sequence: Synthetic oligonucleotide
ccucgcggucgaaguccuu

SEQ ID NO: 2039460 - RNA, 19 nt, Artificial Sequence
  Description of Artificial Sequence: Synthetic oligonucleotide
ccccggcugcugcccuucu

SEQ ID NO: 2039461 - RNA, 19 nt, Artificial Sequence
  Description of Artificial Sequence: Synthetic oligonucleotide
cgccccggcugcugcccuu

SEQ ID NO: 2039462 - RNA, 19 nt, Artificial Sequence
  Description of Artificial Sequence: Synthetic oligonucleotide
uugucaaaagcuuugaagg

SEQ ID NO: 2039463 - RNA, 19 nt, Artificial Sequence
  Description of Artificial Sequence: Synthetic oligonucleotide
uaagaguuuauuauaaacc

SEQ ID NO: 2039464 - RNA, 19 nt, Artificial Sequence
  Description of Artificial Sequence: Synthetic oligonucleotide
ugaaaggaaaaccagacga

SEQ ID NO: 2039465 - RNA, 19 nt, Artificial Sequence
  Description of Artificial Sequence: Synthetic oligonucleotide
aagaguuuauuauaaacca

SEQ ID NO: 2039466 - RNA, 19 nt, Artificial Sequence
  Description of Artificial Sequence: Synthetic oligonucleotide
uccaugaacaacaaacagg

SEQ ID NO: 2039467 - RNA, 19 nt, Artificial Sequence
  Description of Artificial Sequence: Synthetic oligonucleotide
acugccauaaugcuguucg

SEQ ID NO: 2039468 - RNA, 19 nt, Artificial Sequence
  Description of Artificial Sequence: Synthetic oligonucleotide
aaccagacgauccagggag

SEQ ID NO: 2039469 - RNA, 19 nt, Artificial Sequence
  Description of Artificial Sequence: Synthetic oligonucleotide
aaaaccagacgauccaggg

SEQ ID NO: 2039470 - RNA, 19 nt, Artificial Sequence
  Description of Artificial Sequence: Synthetic oligonucleotide
auaaaccagcuucauaggc

SEQ ID NO: 2039471 - RNA, 19 nt, Artificial Sequence
  Description of Artificial Sequence: Synthetic oligonucleotide
uguucgaggaucaaagcag

SEQ ID NO: 2039472 - RNA, 19 nt, Artificial Sequence
  Description of Artificial Sequence: Synthetic oligonucleotide
acuauguacagccuuuugg

SEQ ID NO: 2039473 - RNA, 19 nt, Artificial Sequence
  Description of Artificial Sequence: Synthetic oligonucleotide
aaggaaaaccagacgaucc

SEQ ID NO: 2039474 - RNA, 19 nt, Artificial Sequence
  Description of Artificial Sequence: Synthetic oligonucleotide
ugaacaacaaacaggucug

SEQ ID NO: 2039475 - RNA, 19 nt, Artificial Sequence
  Description of Artificial Sequence: Synthetic oligonucleotide
cuugucaaaagcuuugaag

SEQ ID NO: 2039476 - RNA, 19 nt, Artificial Sequence
  Description of Artificial Sequence: Synthetic oligonucleotide
cuauguacagccuuuuggg

SEQ ID NO: 2039477 - RNA, 19 nt, Artificial Sequence
  Description of Artificial Sequence: Synthetic oligonucleotide
ucaaaagcuuugaaggucc

SEQ ID NO: 2039478 - RNA, 19 nt, Artificial Sequence
  Description of Artificial Sequence: Synthetic oligonucleotide
ucauaugcuugucaaaagc

SEQ ID NO: 2039479 - RNA, 19 nt, Artificial Sequence
  Description of Artificial Sequence: Synthetic oligonucleotide
aaauucauaugcuugucaa

SEQ ID NO: 2039480 - RNA, 19 nt, Artificial Sequence
  Description of Artificial Sequence: Synthetic oligonucleotide
uuauuauaaaccagcuuca

SEQ ID NO: 2039481 - RNA, 19 nt, Artificial Sequence
  Description of Artificial Sequence: Synthetic oligonucleotide
uauuaacucggcccaaggg

SEQ ID NO: 2039482 - RNA, 19 nt, Artificial Sequence
  Description of Artificial Sequence: Synthetic oligonucleotide
ucuguauuaacucggccca

SEQ ID NO: 2039483 - RNA, 19 nt, Artificial Sequence
  Description of Artificial Sequence: Synthetic oligonucleotide
aaaggaaaaccagacgauc

SEQ ID NO: 2039484 - RNA, 19 nt, Artificial Sequence
  Description of Artificial Sequence: Synthetic oligonucleotide
gaguuuauuauaaaccagc

SEQ ID NO: 2039485 - RNA, 19 nt, Artificial Sequence
  Description of Artificial Sequence: Synthetic oligonucleotide
ugcaggaugcaccucaucc

SEQ ID NO: 2039486 - RNA, 19 nt, Artificial Sequence
  Description of Artificial Sequence: Synthetic oligonucleotide
cauccuguagucaaugugc

SEQ ID NO: 2039487 - RNA, 19 nt, Artificial Sequence
  Description of Artificial Sequence: Synthetic oligonucleotide
ucgaagcaacaccagaccg

SEQ ID NO: 2039488 - RNA, 19 nt, Artificial Sequence
  Description of Artificial Sequence: Synthetic oligonucleotide
gauccggccaucuugcagg

SEQ ID NO: 2039489 - RNA, 19 nt, Artificial Sequence
  Description of Artificial Sequence: Synthetic oligonucleotide
ucucuuaagaguuuauuau

SEQ ID NO: 2039490 - RNA, 19 nt, Artificial Sequence
  Description of Artificial Sequence: Synthetic oligonucleotide
uucaucacagucacauagg

SEQ ID NO: 2039491 - RNA, 19 nt, Artificial Sequence
  Description of Artificial Sequence: Synthetic oligonucleotide
aggagaaccaagaugaguc

SEQ ID NO: 2039492 - RNA, 19 nt, Artificial Sequence
  Description of Artificial Sequence: Synthetic oligonucleotide
auuaacucggcccaaggga

SEQ ID NO: 2039493 - RNA, 19 nt, Artificial Sequence
  Description of Artificial Sequence: Synthetic oligonucleotide
gaucaaauucauaugcuug

SEQ ID NO: 2039494 - RNA, 19 nt, Artificial Sequence
  Description of Artificial Sequence: Synthetic oligonucleotide
gucacauaggaucaaauuc

SEQ ID NO: 2039495 - RNA, 19 nt, Artificial Sequence
  Description of Artificial Sequence: Synthetic oligonucleotide
gucuguauuaacucggccc

SEQ ID NO: 2039496 - RNA, 19 nt, Artificial Sequence
  Description of Artificial Sequence: Synthetic oligonucleotide
aaccaagaugagucuaggg

SEQ ID NO: 2039497 - RNA, 19 nt, Artificial Sequence
  Description of Artificial Sequence: Synthetic oligonucleotide
cuuuugggaaacagcaagg

SEQ ID NO: 2039498 - RNA, 19 nt, Artificial Sequence
  Description of Artificial Sequence: Synthetic oligonucleotide
ugggaaacagcaaggagcu

SEQ ID NO: 2039499 - RNA, 19 nt, Artificial Sequence
  Description of Artificial Sequence: Synthetic oligonucleotide
gauucgcuuccacagaggc

SEQ ID NO: 2039500 - RNA, 19 nt, Artificial Sequence
  Description of Artificial Sequence: Synthetic oligonucleotide
ugucauggagaccagguuc

SEQ ID NO: 2039501 - RNA, 19 nt, Artificial Sequence
  Description of Artificial Sequence: Synthetic oligonucleotide
gagggauccccauuggagg

SEQ ID NO: 2039502 - RNA, 19 nt, Artificial Sequence
  Description of Artificial Sequence: Synthetic oligonucleotide
ucauccuguagucaaugug

SEQ ID NO: 2039503 - RNA, 19 nt, Artificial Sequence
  Description of Artificial Sequence: Synthetic oligonucleotide
ugagucuagggccuuggag

SEQ ID NO: 2039504 - RNA, 19 nt, Artificial Sequence
  Description of Artificial Sequence: Synthetic oligonucleotide
aaagcuuugaaggucccga

SEQ ID NO: 2039505 - RNA, 19 nt, Artificial Sequence
  Description of Artificial Sequence: Synthetic oligonucleotide
gaggaggucgcauuccagg

SEQ ID NO: 2039506 - RNA, 19 nt, Artificial Sequence
  Description of Artificial Sequence: Synthetic oligonucleotide
uucauaugcuugucaaaag

SEQ ID NO: 2039507 - RNA, 19 nt, Artificial Sequence
  Description of Artificial Sequence: Synthetic oligonucleotide
uucgcuuccacagaggccu

SEQ ID NO: 2039508 - RNA, 19 nt, Artificial Sequence
  Description of Artificial Sequence: Synthetic oligonucleotide
cuagucgccagccagcagc

SEQ ID NO: 2039509 - RNA, 19 nt, Artificial Sequence
  Description of Artificial Sequence: Synthetic oligonucleotide
ugucaaaagcuuugaaggu

SEQ ID NO: 2039510 - RNA, 19 nt, Artificial Sequence
  Description of Artificial Sequence: Synthetic oligonucleotide
uaucuuugggaggaggucc

SEQ ID NO: 2039511 - RNA, 19 nt, Artificial Sequence
  Description of Artificial Sequence: Synthetic oligonucleotide
aaacaggucuguauuaacu

SEQ ID NO: 2039512 - RNA, 19 nt, Artificial Sequence
  Description of Artificial Sequence: Synthetic oligonucleotide
uguggagucaucaccugcu

SEQ ID NO: 2039513 - RNA, 19 nt, Artificial Sequence
  Description of Artificial Sequence: Synthetic oligonucleotide
uuaacucggcccaagggaa

SEQ ID NO: 2039514 - RNA, 19 nt, Artificial Sequence
  Description of Artificial Sequence: Synthetic oligonucleotide
cauagguggaggaggaccc

SEQ ID NO: 2039515 - RNA, 19 nt, Artificial Sequence
  Description of Artificial Sequence: Synthetic oligonucleotide
agacgauccagggagacuc

SEQ ID NO: 2039516 - RNA, 19 nt, Artificial Sequence
  Description of Artificial Sequence: Synthetic oligonucleotide
aaaagcuuugaaggucccg

SEQ ID NO: 2039517 - RNA, 19 nt, Artificial Sequence
  Description of Artificial Sequence: Synthetic oligonucleotide
cauuggaggacccauagga

SEQ ID NO: 2039518 - RNA, 19 nt, Artificial Sequence
  Description of Artificial Sequence: Synthetic oligonucleotide
caucauaccuggaggaggc

SEQ ID NO: 2039519 - RNA, 19 nt, Artificial Sequence
  Description of Artificial Sequence: Synthetic oligonucleotide
ggagggacuauguacagcc

SEQ ID NO: 2039520 - RNA, 19 nt, Artificial Sequence
  Description of Artificial Sequence: Synthetic oligonucleotide
gagaacucgcuucucuucc

SEQ ID NO: 2039521 - RNA, 19 nt, Artificial Sequence
  Description of Artificial Sequence: Synthetic oligonucleotide
gcuccgaugucucagaugc

SEQ ID NO: 2039522 - RNA, 19 nt, Artificial Sequence
  Description of Artificial Sequence: Synthetic oligonucleotide
aacagugccucuuccuugu

SEQ ID NO: 2039523 - RNA, 19 nt, Artificial Sequence
  Description of Artificial Sequence: Synthetic oligonucleotide
ucgggcaauaccaguaucu

SEQ ID NO: 2039524 - RNA, 19 nt, Artificial Sequence
  Description of Artificial Sequence: Synthetic oligonucleotide
auucauaugcuugucaaaa

SEQ ID NO: 2039525 - RNA, 19 nt, Artificial Sequence
  Description of Artificial Sequence: Synthetic oligonucleotide
auaaugcuguucgaggauc

SEQ ID NO: 2039526 - RNA, 19 nt, Artificial Sequence
  Description of Artificial Sequence: Synthetic oligonucleotide
uauguacagccuuuuggga

SEQ ID NO: 2039527 - RNA, 19 nt, Artificial Sequence
  Description of Artificial Sequence: Synthetic oligonucleotide
gaguucuuuggcuugaucu

SEQ ID NO: 2039528 - RNA, 19 nt, Artificial Sequence
  Description of Artificial Sequence: Synthetic oligonucleotide
ucaccugcugugaugggcc

SEQ ID NO: 2039529 - RNA, 19 nt, Artificial Sequence
  Description of Artificial Sequence: Synthetic oligonucleotide
agaacucgcuucucuuccc

SEQ ID NO: 2039530 - RNA, 19 nt, Artificial Sequence
  Description of Artificial Sequence: Synthetic oligonucleotide
aaaccagacgauccaggga

SEQ ID NO: 2039531 - RNA, 19 nt, Artificial Sequence
  Description of Artificial Sequence: Synthetic oligonucleotide
uggcacucgggcaauacca

SEQ ID NO: 2039532 - RNA, 19 nt, Artificial Sequence
  Description of Artificial Sequence: Synthetic oligonucleotide
cucuuacccacagucaugg

SEQ ID NO: 2039533 - RNA, 19 nt, Artificial Sequence
  Description of Artificial Sequence: Synthetic oligonucleotide
agaguuuauuauaaaccag

SEQ ID NO: 2039534 - RNA, 19 nt, Artificial Sequence
  Description of Artificial Sequence: Synthetic oligonucleotide
aggagguccuucuacuguc

SEQ ID NO: 2039535 - RNA, 19 nt, Artificial Sequence
  Description of Artificial Sequence: Synthetic oligonucleotide
agcaaguccugcaggagcc

SEQ ID NO: 2039536 - RNA, 19 nt, Artificial Sequence
  Description of Artificial Sequence: Synthetic oligonucleotide
ugcaauacuggcuguggcu

SEQ ID NO: 2039537 - RNA, 19 nt, Artificial Sequence
  Description of Artificial Sequence: Synthetic oligonucleotide
uguacagccuuuugggaaa

SEQ ID NO: 2039538 - RNA, 19 nt, Artificial Sequence
  Description of Artificial Sequence: Synthetic oligonucleotide
ucagaugcccgccggauuc

SEQ ID NO: 2039539 - RNA, 19 nt, Artificial Sequence
  Description of Artificial Sequence: Synthetic oligonucleotide
aucaccugcugugaugggc

SEQ ID NO: 2039540 - RNA, 19 nt, Artificial Sequence
  Description of Artificial Sequence: Synthetic oligonucleotide
ugcucuuacccacagucau

SEQ ID NO: 2039541 - RNA, 19 nt, Artificial Sequence
  Description of Artificial Sequence: Synthetic oligonucleotide
uaaugcuguucgaggauca

SEQ ID NO: 2039542 - RNA, 19 nt, Artificial Sequence
  Description of Artificial Sequence: Synthetic oligonucleotide
uuguggagucaucaccugc

SEQ ID NO: 2039543 - RNA, 19 nt, Artificial Sequence
  Description of Artificial Sequence: Synthetic oligonucleotide
uguauuaacucggcccaag

SEQ ID NO: 2039544 - RNA, 19 nt, Artificial Sequence
  Description of Artificial Sequence: Synthetic oligonucleotide
guggguacugaguuggggc

SEQ ID NO: 2039545 - RNA, 19 nt, Artificial Sequence
  Description of Artificial Sequence: Synthetic oligonucleotide
ucgaggaucaaagcagacc

SEQ ID NO: 2039546 - RNA, 19 nt, Artificial Sequence
  Description of Artificial Sequence: Synthetic oligonucleotide
cucgaagcaacaccagacc

SEQ ID NO: 2039547 - RNA, 19 nt, Artificial Sequence
  Description of Artificial Sequence: Synthetic oligonucleotide
uuggagggcacauucccca

SEQ ID NO: 2039548 - RNA, 19 nt, Artificial Sequence
  Description of Artificial Sequence: Synthetic oligonucleotide
gaagauccggccaucuugc

SEQ ID NO: 2039549 - RNA, 19 nt, Artificial Sequence
  Description of Artificial Sequence: Synthetic oligonucleotide
cugugaugggccuccaacc

SEQ ID NO: 2039550 - RNA, 19 nt, Artificial Sequence
  Description of Artificial Sequence: Synthetic oligonucleotide
ugucucagaugcccgccgg

SEQ ID NO: 2039551 - RNA, 19 nt, Artificial Sequence
  Description of Artificial Sequence: Synthetic oligonucleotide
ucaaagcagaccucgcauc

SEQ ID NO: 2039552 - RNA, 19 nt, Artificial Sequence
  Description of Artificial Sequence: Synthetic oligonucleotide
uaccaguaucuuugggagg

SEQ ID NO: 2039553 - RNA, 19 nt, Artificial Sequence
  Description of Artificial Sequence: Synthetic oligonucleotide
gaccucgcaucccuggagg

SEQ ID NO: 2039554 - RNA, 19 nt, Artificial Sequence
  Description of Artificial Sequence: Synthetic oligonucleotide
cauaccuggaggaggcgcc

SEQ ID NO: 2039555 - RNA, 19 nt, Artificial Sequence
  Description of Artificial Sequence: Synthetic oligonucleotide
gaaccaagaugagucuagg

SEQ ID NO: 2039556 - RNA, 19 nt, Artificial Sequence
  Description of Artificial Sequence: Synthetic oligonucleotide
cuucuacugucauggagac

SEQ ID NO: 2039557 - RNA, 19 nt, Artificial Sequence
  Description of Artificial Sequence: Synthetic oligonucleotide
cagguucuccccucgaagc

SEQ ID NO: 2039558 - RNA, 19 nt, Artificial Sequence
  Description of Artificial Sequence: Synthetic oligonucleotide
agggagacuccaugaacuc

SEQ ID NO: 2039559 - RNA, 19 nt, Artificial Sequence
  Description of Artificial Sequence: Synthetic oligonucleotide
agcagcgcgauucccgccg

SEQ ID NO: 2039560 - RNA, 19 nt, Artificial Sequence
  Description of Artificial Sequence: Synthetic oligonucleotide
gucucuuaagaguuuauua

SEQ ID NO: 2039561 - RNA, 19 nt, Artificial Sequence
  Description of Artificial Sequence: Synthetic oligonucleotide
aacaccagaccgagaacuc

SEQ ID NO: 2039562 - RNA, 19 nt, Artificial Sequence
  Description of Artificial Sequence: Synthetic oligonucleotide
agaaccaagaugagucuag

SEQ ID NO: 2039563 - RNA, 19 nt, Artificial Sequence
  Description of Artificial Sequence: Synthetic oligonucleotide
accaguaucuuugggagga

SEQ ID NO: 2039564 - RNA, 19 nt, Artificial Sequence
  Description of Artificial Sequence: Synthetic oligonucleotide
ugaacuccaugaacaacaa

SEQ ID NO: 2039565 - RNA, 19 nt, Artificial Sequence
  Description of Artificial Sequence: Synthetic oligonucleotide
uagucgccagccagcagcg

SEQ ID NO: 2039566 - RNA, 19 nt, Artificial Sequence
  Description of Artificial Sequence: Synthetic oligonucleotide
gucaaugugcugcagcauc

SEQ ID NO: 2039567 - RNA, 19 nt, Artificial Sequence
  Description of Artificial Sequence: Synthetic oligonucleotide
acccacaccucaguggagc

SEQ ID NO: 2039568 - RNA, 19 nt, Artificial Sequence
  Description of Artificial Sequence: Synthetic oligonucleotide
caauaccaguaucuuuggg

SEQ ID NO: 2039569 - RNA, 19 nt, Artificial Sequence
  Description of Artificial Sequence: Synthetic oligonucleotide
gaugagucuagggccuugg

SEQ ID NO: 2039570 - RNA, 19 nt, Artificial Sequence
  Description of Artificial Sequence: Synthetic oligonucleotide
cuuggagggcacauucccc

SEQ ID NO: 2039571 - RNA, 19 nt, Artificial Sequence
  Description of Artificial Sequence: Synthetic oligonucleotide
caaacaggucuguauuaac

SEQ ID NO: 2039572 - RNA, 19 nt, Artificial Sequence
  Description of Artificial Sequence: Synthetic oligonucleotide
aauucaucacagucacaua

SEQ ID NO: 2039573 - RNA, 19 nt, Artificial Sequence
  Description of Artificial Sequence: Synthetic oligonucleotide
gacuauguacagccuuuug

SEQ ID NO: 2039574 - RNA, 19 nt, Artificial Sequence
  Description of Artificial Sequence: Synthetic oligonucleotide
agauccggccaucuugcag

SEQ ID NO: 2039575 - RNA, 19 nt, Artificial Sequence
  Description of Artificial Sequence: Synthetic oligonucleotide
auucccauuggaguuccuc

SEQ ID NO: 2039576 - RNA, 19 nt, Artificial Sequence
  Description of Artificial Sequence: Synthetic oligonucleotide
cuguucgaggaucaaagca

SEQ ID NO: 2039577 - RNA, 19 nt, Artificial Sequence
  Description of Artificial Sequence: Synthetic oligonucleotide
aaugggacccacaccucag

SEQ ID NO: 2039578 - RNA, 19 nt, Artificial Sequence
  Description of Artificial Sequence: Synthetic oligonucleotide
cagaccgagaacucgcuuc

SEQ ID NO: 2039579 - RNA, 19 nt, Artificial Sequence
  Description of Artificial Sequence: Synthetic oligonucleotide
cagcaaguggcacucgggc

SEQ ID NO: 2039580 - RNA, 19 nt, Artificial Sequence
  Description of Artificial Sequence: Synthetic oligonucleotide
ugcaacagugccucuuccu

SEQ ID NO: 2039581 - RNA, 19 nt, Artificial Sequence
  Description of Artificial Sequence: Synthetic oligonucleotide
ugaguuggggcuccugcaa

SEQ ID NO: 2039582 - RNA, 19 nt, Artificial Sequence
  Description of Artificial Sequence: Synthetic oligonucleotide
cagcaaguccugcaggagc

SEQ ID NO: 2039583 - RNA, 19 nt, Artificial Sequence
  Description of Artificial Sequence: Synthetic oligonucleotide
agaggccuagucgccagcc

SEQ ID NO: 2039584 - RNA, 19 nt, Artificial Sequence
  Description of Artificial Sequence: Synthetic oligonucleotide
cauaugcuugucaaaagcu

SEQ ID NO: 2039585 - RNA, 19 nt, Artificial Sequence
  Description of Artificial Sequence: Synthetic oligonucleotide
caccagaccgagaacucgc

SEQ ID NO: 2039586 - RNA, 19 nt, Artificial Sequence
  Description of Artificial Sequence: Synthetic oligonucleotide
augucucagaugcccgccg

SEQ ID NO: 2039587 - RNA, 19 nt, Artificial Sequence
  Description of Artificial Sequence: Synthetic oligonucleotide
ugcaccucauccuguaguc

SEQ ID NO: 2039588 - RNA, 19 nt, Artificial Sequence
  Description of Artificial Sequence: Synthetic oligonucleotide
agcuuugaaggucccgaug

SEQ ID NO: 2039589 - RNA, 19 nt, Artificial Sequence
  Description of Artificial Sequence: Synthetic oligonucleotide
auucgcuuccacagaggcc

SEQ ID NO: 2039590 - RNA, 19 nt, Artificial Sequence
  Description of Artificial Sequence: Synthetic oligonucleotide
cauaggaggccucaugcca

SEQ ID NO: 2039591 - RNA, 19 nt, Artificial Sequence
  Description of Artificial Sequence: Synthetic oligonucleotide
gaugcaccucauccuguag

SEQ ID NO: 2039592 - RNA, 19 nt, Artificial Sequence
  Description of Artificial Sequence: Synthetic oligonucleotide
auuggaggacccauaggag

SEQ ID NO: 2039593 - RNA, 19 nt, Artificial Sequence
  Description of Artificial Sequence: Synthetic oligonucleotide
ucuagggccuuggagggca

SEQ ID NO: 2039594 - RNA, 19 nt, Artificial Sequence
  Description of Artificial Sequence: Synthetic oligonucleotide
caaaagcuuugaagguccc

SEQ ID NO: 2039595 - RNA, 19 nt, Artificial Sequence
  Description of Artificial Sequence: Synthetic oligonucleotide
ugaaggucccgaugaagau

SEQ ID NO: 2039596 - RNA, 19 nt, Artificial Sequence
  Description of Artificial Sequence: Synthetic oligonucleotide
aggugggcccaucauaccu

SEQ ID NO: 2039597 - RNA, 19 nt, Artificial Sequence
  Description of Artificial Sequence: Synthetic oligonucleotide
uucgaggaucaaagcagac

SEQ ID NO: 2039598 - RNA, 19 nt, Artificial Sequence
  Description of Artificial Sequence: Synthetic oligonucleotide
uggagucaucaccugcugu

SEQ ID NO: 2039599 - RNA, 19 nt, Artificial Sequence
  Description of Artificial Sequence: Synthetic oligonucleotide
auucccgccgccgcuaacg

SEQ ID NO: 2039600 - RNA, 19 nt, Artificial Sequence
  Description of Artificial Sequence: Synthetic oligonucleotide
agcccugaaaggaaaacca

SEQ ID NO: 2039601 - RNA, 19 nt, Artificial Sequence
  Description of Artificial Sequence: Synthetic oligonucleotide
aggccuagucgccagccag

SEQ ID NO: 2039602 - RNA, 19 nt, Artificial Sequence
  Description of Artificial Sequence: Synthetic oligonucleotide
ugggacccacaccucagug

SEQ ID NO: 2039603 - RNA, 19 nt, Artificial Sequence
  Description of Artificial Sequence: Synthetic oligonucleotide
caggaugcaccucauccug

SEQ ID NO: 2039604 - RNA, 19 nt, Artificial Sequence
  Description of Artificial Sequence: Synthetic oligonucleotide
ggaaacagcaaggagcuga

SEQ ID NO: 2039605 - RNA, 19 nt, Artificial Sequence
  Description of Artificial Sequence: Synthetic oligonucleotide
aagcuuugaaggucccgau

SEQ ID NO: 2039606 - RNA, 19 nt, Artificial Sequence
  Description of Artificial Sequence: Synthetic oligonucleotide
acaccagaccgagaacucg

SEQ ID NO: 2039607 - RNA, 19 nt, Artificial Sequence
  Description of Artificial Sequence: Synthetic oligonucleotide
agcaaguggcacucgggca

SEQ ID NO: 2039608 - RNA, 19 nt, Artificial Sequence
  Description of Artificial Sequence: Synthetic oligonucleotide
cucgcaucccuggaggagg

SEQ ID NO: 2039609 - RNA, 19 nt, Artificial Sequence
  Description of Artificial Sequence: Synthetic oligonucleotide
accgagaacucgcuucucu

SEQ ID NO: 2039610 - RNA, 19 nt, Artificial Sequence
  Description of Artificial Sequence: Synthetic oligonucleotide
cugcaauacuggcuguggc

SEQ ID NO: 2039611 - RNA, 19 nt, Artificial Sequence
  Description of Artificial Sequence: Synthetic oligonucleotide
aggaggucgcauuccagga

SEQ ID NO: 2039612 - RNA, 19 nt, Artificial Sequence
  Description of Artificial Sequence: Synthetic oligonucleotide
aguggagcuacugccauaa

SEQ ID NO: 2039613 - RNA, 19 nt, Artificial Sequence
  Description of Artificial Sequence: Synthetic oligonucleotide
gccggauucgcuuccacag

SEQ ID NO: 2039614 - RNA, 19 nt, Artificial Sequence
  Description of Artificial Sequence: Synthetic oligonucleotide
auagguggaggaggacccc

SEQ ID NO: 2039615 - RNA, 19 nt, Artificial Sequence
  Description of Artificial Sequence: Synthetic oligonucleotide
ugcuugucaaaagcuuuga

SEQ ID NO: 2039616 - RNA, 19 nt, Artificial Sequence
  Description of Artificial Sequence: Synthetic oligonucleotide
aacucggcccaagggaaug

SEQ ID NO: 2039617 - RNA, 19 nt, Artificial Sequence
  Description of Artificial Sequence: Synthetic oligonucleotide
agaccucgcaucccuggag

SEQ ID NO: 2039618 - RNA, 19 nt, Artificial Sequence
  Description of Artificial Sequence: Synthetic oligonucleotide
agggauccccauuggagga

SEQ ID NO: 2039619 - RNA, 19 nt, Artificial Sequence
  Description of Artificial Sequence: Synthetic oligonucleotide
uccuguagucaaugugcug

SEQ ID NO: 2039620 - RNA, 19 nt, Artificial Sequence
  Description of Artificial Sequence: Synthetic oligonucleotide
gaggaggcgccccucggcc

SEQ ID NO: 2039621 - RNA, 19 nt, Artificial Sequence
  Description of Artificial Sequence: Synthetic oligonucleotide
aguggcacucgggcaauac

SEQ ID NO: 2039622 - RNA, 19 nt, Artificial Sequence
  Description of Artificial Sequence: Synthetic oligonucleotide
uggggcauggggacaccag

SEQ ID NO: 2039623 - RNA, 19 nt, Artificial Sequence
  Description of Artificial Sequence: Synthetic oligonucleotide
cuuguggagucaucaccug

SEQ ID NO: 2039624 - RNA, 19 nt, Artificial Sequence
  Description of Artificial Sequence: Synthetic oligonucleotide
cacaccucaguggagcuac

SEQ ID NO: 2039625 - RNA, 19 nt, Artificial Sequence
  Description of Artificial Sequence: Synthetic oligonucleotide
agggacuauguacagccuu

SEQ ID NO: 2039626 - RNA, 19 nt, Artificial Sequence
  Description of Artificial Sequence: Synthetic oligonucleotide
caugguggcggcuccgaug

SEQ ID NO: 2039627 - RNA, 19 nt, Artificial Sequence
  Description of Artificial Sequence: Synthetic oligonucleotide
augcuugucaaaagcuuug

SEQ ID NO: 2039628 - RNA, 19 nt, Artificial Sequence
  Description of Artificial Sequence: Synthetic oligonucleotide
caguaucuuugggaggagg

SEQ ID NO: 2039629 - RNA, 19 nt, Artificial Sequence
  Description of Artificial Sequence: Synthetic oligonucleotide
ccuucuacugucauggaga

SEQ ID NO: 2039630 - RNA, 19 nt, Artificial Sequence
  Description of Artificial Sequence: Synthetic oligonucleotide
ccugccaauaccuggcccc

SEQ ID NO: 2039631 - RNA, 19 nt, Artificial Sequence
  Description of Artificial Sequence: Synthetic oligonucleotide
agguucuccccucgaagca

SEQ ID NO: 2039632 - RNA, 19 nt, Artificial Sequence
  Description of Artificial Sequence: Synthetic oligonucleotide
auaccuggaggaggcgccc

SEQ ID NO: 2039633 - RNA, 19 nt, Artificial Sequence
  Description of Artificial Sequence: Synthetic oligonucleotide
cccauaggaggccucaugc

SEQ ID NO: 2039634 - RNA, 19 nt, Artificial Sequence
  Description of Artificial Sequence: Synthetic oligonucleotide
uuggaguuccucggccagg

SEQ ID NO: 2039635 - RNA, 19 nt, Artificial Sequence
  Description of Artificial Sequence: Synthetic oligonucleotide
ccucgaagcaacaccagac

SEQ ID NO: 2039636 - RNA, 19 nt, Artificial Sequence
  Description of Artificial Sequence: Synthetic oligonucleotide
ggaaaaccagacgauccag

SEQ ID NO: 2039637 - RNA, 19 nt, Artificial Sequence
  Description of Artificial Sequence: Synthetic oligonucleotide
aagauccggccaucuugca

SEQ ID NO: 2039638 - RNA, 19 nt, Artificial Sequence
  Description of Artificial Sequence: Synthetic oligonucleotide
uccugcaauacuggcugug

SEQ ID NO: 2039639 - RNA, 19 nt, Artificial Sequence
  Description of Artificial Sequence: Synthetic oligonucleotide
guggcacucgggcaauacc

SEQ ID NO: 2039640 - RNA, 19 nt, Artificial Sequence
  Description of Artificial Sequence: Synthetic oligonucleotide
gcugugaugggccuccaac

SEQ ID NO: 2039641 - RNA, 19 nt, Artificial Sequence
  Description of Artificial Sequence: Synthetic oligonucleotide
cauuggaguuccucggcca

SEQ ID NO: 2039642 - RNA, 19 nt, Artificial Sequence
  Description of Artificial Sequence: Synthetic oligonucleotide
cucaguggagcuacugcca

SEQ ID NO: 2039643 - RNA, 19 nt, Artificial Sequence
  Description of Artificial Sequence: Synthetic oligonucleotide
ggucuguauuaacucggcc

SEQ ID NO: 2039644 - RNA, 19 nt, Artificial Sequence
  Description of Artificial Sequence: Synthetic oligonucleotide
acucgggcaauaccaguau

SEQ ID NO: 2039645 - RNA, 19 nt, Artificial Sequence
  Description of Artificial Sequence: Synthetic oligonucleotide
cagggagacuccaugaacu

SEQ ID NO: 2039646 - RNA, 19 nt, Artificial Sequence
  Description of Artificial Sequence: Synthetic oligonucleotide
guaucuuugggaggagguc

SEQ ID NO: 2039647 - RNA, 19 nt, Artificial Sequence
  Description of Artificial Sequence: Synthetic oligonucleotide
gaggugggcccaucauacc

SEQ ID NO: 2039648 - RNA, 19 nt, Artificial Sequence
  Description of Artificial Sequence: Synthetic oligonucleotide
cuuccacagaggccuaguc

SEQ ID NO: 2039649 - RNA, 19 nt, Artificial Sequence
  Description of Artificial Sequence: Synthetic oligonucleotide
ucggcccauagguggagga

SEQ ID NO: 2039650 - RNA, 19 nt, Artificial Sequence
  Description of Artificial Sequence: Synthetic oligonucleotide
guucgaggaucaaagcaga

SEQ ID NO: 2039651 - RNA, 19 nt, Artificial Sequence
  Description of Artificial Sequence: Synthetic oligonucleotide
agucaucaccugcugugau

SEQ ID NO: 2039652 - RNA, 19 nt, Artificial Sequence
  Description of Artificial Sequence: Synthetic oligonucleotide
acagucucuuaagaguuua

SEQ ID NO: 2039653 - RNA, 19 nt, Artificial Sequence
  Description of Artificial Sequence: Synthetic oligonucleotide
ccaucauaccuggaggagg

SEQ ID NO: 2039654 - RNA, 19 nt, Artificial Sequence
  Description of Artificial Sequence: Synthetic oligonucleotide
auccuguagucaaugugcu

SEQ ID NO: 2039655 - RNA, 19 nt, Artificial Sequence
  Description of Artificial Sequence: Synthetic oligonucleotide
guggagucaucaccugcug

SEQ ID NO: 2039656 - RNA, 19 nt, Artificial Sequence
  Description of Artificial Sequence: Synthetic oligonucleotide
aggaggugggcccaucaua

SEQ ID NO: 2039657 - RNA, 19 nt, Artificial Sequence
  Description of Artificial Sequence: Synthetic oligonucleotide
uaacucggcccaagggaau

SEQ ID NO: 2039658 - RNA, 19 nt, Artificial Sequence
  Description of Artificial Sequence: Synthetic oligonucleotide
cauuccccagggagggagc

SEQ ID NO: 2039659 - RNA, 19 nt, Artificial Sequence
  Description of Artificial Sequence: Synthetic oligonucleotide
auguaugaacagucucuua

SEQ ID NO: 2039660 - RNA, 19 nt, Artificial Sequence
  Description of Artificial Sequence: Synthetic oligonucleotide
ggaggugggcccaucauac

SEQ ID NO: 2039661 - RNA, 19 nt, Artificial Sequence
  Description of Artificial Sequence: Synthetic oligonucleotide
ccauagguggaggaggacc

SEQ ID NO: 2039662 - RNA, 19 nt, Artificial Sequence
  Description of Artificial Sequence: Synthetic oligonucleotide
gcagaccucgcaucccugg

SEQ ID NO: 2039663 - RNA, 19 nt, Artificial Sequence
  Description of Artificial Sequence: Synthetic oligonucleotide
gaggagguccuucuacugu

SEQ ID NO: 2039664 - RNA, 19 nt, Artificial Sequence
  Description of Artificial Sequence: Synthetic oligonucleotide
ggaggucgcauuccaggag

SEQ ID NO: 2039665 - RNA, 19 nt, Artificial Sequence
  Description of Artificial Sequence: Synthetic oligonucleotide
caagaugagucuagggccu

SEQ ID NO: 2039666 - RNA, 19 nt, Artificial Sequence
  Description of Artificial Sequence: Synthetic oligonucleotide
agcagcccugccaauaccu

SEQ ID NO: 2039667 - RNA, 19 nt, Artificial Sequence
  Description of Artificial Sequence: Synthetic oligonucleotide
uucuacugucauggagacc

SEQ ID NO: 2039668 - RNA, 19 nt, Artificial Sequence
  Description of Artificial Sequence: Synthetic oligonucleotide
ccucaugccaggagguggg

SEQ ID NO: 2039669 - RNA, 19 nt, Artificial Sequence
  Description of Artificial Sequence: Synthetic oligonucleotide
cuguagucaaugugcugca

SEQ ID NO: 2039670 - RNA, 19 nt, Artificial Sequence
  Description of Artificial Sequence: Synthetic oligonucleotide
acucgcuucucuucccuuu

SEQ ID NO: 2039671 - RNA, 19 nt, Artificial Sequence
  Description of Artificial Sequence: Synthetic oligonucleotide
aucauaccuggaggaggcg

SEQ ID NO: 2039672 - RNA, 19 nt, Artificial Sequence
  Description of Artificial Sequence: Synthetic oligonucleotide
gagaaccaagaugagucua

SEQ ID NO: 2039673 - RNA, 19 nt, Artificial Sequence
  Description of Artificial Sequence: Synthetic oligonucleotide
ucgcaucccuggaggagga

SEQ ID NO: 2039674 - RNA, 19 nt, Artificial Sequence
  Description of Artificial Sequence: Synthetic oligonucleotide
agaugcccgccggauucgc

SEQ ID NO: 2039675 - RNA, 19 nt, Artificial Sequence
  Description of Artificial Sequence: Synthetic oligonucleotide
cccauuggaggacccauag

SEQ ID NO: 2039676 - RNA, 19 nt, Artificial Sequence
  Description of Artificial Sequence: Synthetic oligonucleotide
augaagauccggccaucuu

SEQ ID NO: 2039677 - RNA, 19 nt, Artificial Sequence
  Description of Artificial Sequence: Synthetic oligonucleotide
ggcccaagggaaugggacc

SEQ ID NO: 2039678 - RNA, 19 nt, Artificial Sequence
  Description of Artificial Sequence: Synthetic oligonucleotide
ccauaggaggccucaugcc

SEQ ID NO: 2039679 - RNA, 19 nt, Artificial Sequence
  Description of Artificial Sequence: Synthetic oligonucleotide
augggacccacaccucagu

SEQ ID NO: 2039680 - RNA, 19 nt, Artificial Sequence
  Description of Artificial Sequence: Synthetic oligonucleotide
ucucagaugcccgccggau

SEQ ID NO: 2039681 - RNA, 19 nt, Artificial Sequence
  Description of Artificial Sequence: Synthetic oligonucleotide
caucaccugcugugauggg

SEQ ID NO: 2039682 - RNA, 19 nt, Artificial Sequence
  Description of Artificial Sequence: Synthetic oligonucleotide
ucuuacccacagucauggu

SEQ ID NO: 2039683 - RNA, 19 nt, Artificial Sequence
  Description of Artificial Sequence: Synthetic oligonucleotide
acucggcccaagggaaugg

SEQ ID NO: 2039684 - RNA, 19 nt, Artificial Sequence
  Description of Artificial Sequence: Synthetic oligonucleotide
caacaccagaccgagaacu

SEQ ID NO: 2039685 - RNA, 19 nt, Artificial Sequence
  Description of Artificial Sequence: Synthetic oligonucleotide
cuacugucauggagaccag

SEQ ID NO: 2039686 - RNA, 19 nt, Artificial Sequence
  Description of Artificial Sequence: Synthetic oligonucleotide
cugcucuuacccacaguca

SEQ ID NO: 2039687 - RNA, 19 nt, Artificial Sequence
  Description of Artificial Sequence: Synthetic oligonucleotide
agucaugguggcggcuccg

SEQ ID NO: 2039688 - RNA, 19 nt, Artificial Sequence
  Description of Artificial Sequence: Synthetic oligonucleotide
ggacuggcccagcaagucc

SEQ ID NO: 2039689 - RNA, 19 nt, Artificial Sequence
  Description of Artificial Sequence: Synthetic oligonucleotide
cagucaugguggcggcucc

SEQ ID NO: 2039690 - RNA, 19 nt, Artificial Sequence
  Description of Artificial Sequence: Synthetic oligonucleotide
cccacgaccagguggguac

SEQ ID NO: 2039691 - RNA, 19 nt, Artificial Sequence
  Description of Artificial Sequence: Synthetic oligonucleotide
agcugggauuccucugcca

SEQ ID NO: 2039692 - RNA, 19 nt, Artificial Sequence
  Description of Artificial Sequence: Synthetic oligonucleotide
aggucgcauuccaggaggg

SEQ ID NO: 2039693 - RNA, 19 nt, Artificial Sequence
  Description of Artificial Sequence: Synthetic oligonucleotide
ccuccaaccccucggacug

SEQ ID NO: 2039694 - RNA, 19 nt, Artificial Sequence
  Description of Artificial Sequence: Synthetic oligonucleotide
uccaaccccucggacuggc

SEQ ID NO: 2039695 - RNA, 19 nt, Artificial Sequence
  Description of Artificial Sequence: Synthetic oligonucleotide
accucgcaucccuggagga

SEQ ID NO: 2039696 - RNA, 19 nt, Artificial Sequence
  Description of Artificial Sequence: Synthetic oligonucleotide
ggucccgaugaagauccgg

SEQ ID NO: 2039697 - RNA, 19 nt, Artificial Sequence
  Description of Artificial Sequence: Synthetic oligonucleotide
ggcuugaucuuccugaauu

SEQ ID NO: 2039698 - RNA, 19 nt, Artificial Sequence
  Description of Artificial Sequence: Synthetic oligonucleotide
ccgaugucucagaugcccg

SEQ ID NO: 2039699 - RNA, 19 nt, Artificial Sequence
  Description of Artificial Sequence: Synthetic oligonucleotide
ccugcaauacuggcugugg

SEQ ID NO: 2039700 - RNA, 19 nt, Artificial Sequence
  Description of Artificial Sequence: Synthetic oligonucleotide
gcaaguggcacucgggcaa

SEQ ID NO: 2039701 - RNA, 19 nt, Artificial Sequence
  Description of Artificial Sequence: Synthetic oligonucleotide
gguacugaguuggggcucc

SEQ ID NO: 2039702 - RNA, 19 nt, Artificial Sequence
  Description of Artificial Sequence: Synthetic oligonucleotide
gacgauccagggagacucc

SEQ ID NO: 2039703 - RNA, 19 nt, Artificial Sequence
  Description of Artificial Sequence: Synthetic oligonucleotide
ggauucgcuuccacagagg

SEQ ID NO: 2039704 - RNA, 19 nt, Artificial Sequence
  Description of Artificial Sequence: Synthetic oligonucleotide
uccccauuggaggacccau

SEQ ID NO: 2039705 - RNA, 19 nt, Artificial Sequence
  Description of Artificial Sequence: Synthetic oligonucleotide
cucggcccaagggaauggg

SEQ ID NO: 2039706 - RNA, 19 nt, Artificial Sequence
  Description of Artificial Sequence: Synthetic oligonucleotide
ggggcauucccauuggagu

SEQ ID NO: 2039707 - RNA, 19 nt, Artificial Sequence
  Description of Artificial Sequence: Synthetic oligonucleotide
gauccccauuggaggaccc

SEQ ID NO: 2039708 - RNA, 19 nt, Artificial Sequence
  Description of Artificial Sequence: Synthetic oligonucleotide
ccagggagacuccaugaac

SEQ ID NO: 2039709 - RNA, 19 nt, Artificial Sequence
  Description of Artificial Sequence: Synthetic oligonucleotide
ccggccaucuugcaggaug

SEQ ID NO: 2039710 - RNA, 19 nt, Artificial Sequence
  Description of Artificial Sequence: Synthetic oligonucleotide
ccauuggaggacccauagg

SEQ ID NO: 2039711 - RNA, 19 nt, Artificial Sequence
  Description of Artificial Sequence: Synthetic oligonucleotide
gcccugaaaggaaaaccag

SEQ ID NO: 2039712 - RNA, 19 nt, Artificial Sequence
  Description of Artificial Sequence: Synthetic oligonucleotide
cauaaugcuguucgaggau

SEQ ID NO: 2039713 - RNA, 19 nt, Artificial Sequence
  Description of Artificial Sequence: Synthetic oligonucleotide
ggaucaaagcagaccucgc

SEQ ID NO: 2039714 - RNA, 19 nt, Artificial Sequence
  Description of Artificial Sequence: Synthetic oligonucleotide
uacugaguuggggcuccug

SEQ ID NO: 2039715 - RNA, 19 nt, Artificial Sequence
  Description of Artificial Sequence: Synthetic oligonucleotide
guucuccccucgaagcaac

SEQ ID NO: 2039716 - RNA, 19 nt, Artificial Sequence
  Description of Artificial Sequence: Synthetic oligonucleotide
gcccaucauaccuggagga

SEQ ID NO: 2039717 - RNA, 19 nt, Artificial Sequence
  Description of Artificial Sequence: Synthetic oligonucleotide
augcccgccggauucgcuu

SEQ ID NO: 2039718 - RNA, 19 nt, Artificial Sequence
  Description of Artificial Sequence: Synthetic oligonucleotide
ggcuccgaugucucagaug

SEQ ID NO: 2039719 - RNA, 19 nt, Artificial Sequence
  Description of Artificial Sequence: Synthetic oligonucleotide
cccauuggaguuccucggc

SEQ ID NO: 2039720 - RNA, 19 nt, Artificial Sequence
  Description of Artificial Sequence: Synthetic oligonucleotide
ggcacucgggcaauaccag

SEQ ID NO: 2039721 - RNA, 19 nt, Artificial Sequence
  Description of Artificial Sequence: Synthetic oligonucleotide
acgauccagggagacucca

SEQ ID NO: 2039722 - RNA, 19 nt, Artificial Sequence
  Description of Artificial Sequence: Synthetic oligonucleotide
ggaguucuuuggcuugauc

SEQ ID NO: 2039723 - RNA, 19 nt, Artificial Sequence
  Description of Artificial Sequence: Synthetic oligonucleotide
cucggcccauagguggagg

SEQ ID NO: 2039724 - RNA, 19 nt, Artificial Sequence
  Description of Artificial Sequence: Synthetic oligonucleotide
cggauucgcuuccacagag

SEQ ID NO: 2039725 - RNA, 19 nt, Artificial Sequence
  Description of Artificial Sequence: Synthetic oligonucleotide
ugcaggagccuggggcaug

SEQ ID NO: 2039726 - RNA, 19 nt, Artificial Sequence
  Description of Artificial Sequence: Synthetic oligonucleotide
cugccagcagcccugccaa

SEQ ID NO: 2039727 - RNA, 19 nt, Artificial Sequence
  Description of Artificial Sequence: Synthetic oligonucleotide
acgaccagguggguacuga

SEQ ID NO: 2039728 - RNA, 19 nt, Artificial Sequence
  Description of Artificial Sequence: Synthetic oligonucleotide
ggagaaccaagaugagucu

SEQ ID NO: 2039729 - RNA, 19 nt, Artificial Sequence
  Description of Artificial Sequence: Synthetic oligonucleotide
gucucagaugcccgccgga

SEQ ID NO: 2039730 - RNA, 19 nt, Artificial Sequence
  Description of Artificial Sequence: Synthetic oligonucleotide
ugggcccaucauaccugga

SEQ ID NO: 2039731 - RNA, 19 nt, Artificial Sequence
  Description of Artificial Sequence: Synthetic oligonucleotide
cucauccuguagucaaugu

SEQ ID NO: 2039732 - RNA, 19 nt, Artificial Sequence
  Description of Artificial Sequence: Synthetic oligonucleotide
ggucgcauuccaggagggg

SEQ ID NO: 2039733 - RNA, 19 nt, Artificial Sequence
  Description of Artificial Sequence: Synthetic oligonucleotide
ugcccgccggauucgcuuc

SEQ ID NO: 2039734 - RNA, 19 nt, Artificial Sequence
  Description of Artificial Sequence: Synthetic oligonucleotide
gacccacaccucaguggag

SEQ ID NO: 2039735 - RNA, 19 nt, Artificial Sequence
  Description of Artificial Sequence: Synthetic oligonucleotide
ggauccccauuggaggacc

SEQ ID NO: 2039736 - RNA, 19 nt, Artificial Sequence
  Description of Artificial Sequence: Synthetic oligonucleotide
ccuuguggagucaucaccu

SEQ ID NO: 2039737 - RNA, 19 nt, Artificial Sequence
  Description of Artificial Sequence: Synthetic oligonucleotide
aggacccauaggaggccuc

SEQ ID NO: 2039738 - RNA, 19 nt, Artificial Sequence
  Description of Artificial Sequence: Synthetic oligonucleotide
agggcacauuccccaggga

SEQ ID NO: 2039739 - RNA, 19 nt, Artificial Sequence
  Description of Artificial Sequence: Synthetic oligonucleotide
uuccccagggagggagccc

SEQ ID NO: 2039740 - RNA, 19 nt, Artificial Sequence
  Description of Artificial Sequence: Synthetic oligonucleotide
accagaccgagaacucgcu

SEQ ID NO: 2039741 - RNA, 19 nt, Artificial Sequence
  Description of Artificial Sequence: Synthetic oligonucleotide
cugccauaaugcuguucga

SEQ ID NO: 2039742 - RNA, 19 nt, Artificial Sequence
  Description of Artificial Sequence: Synthetic oligonucleotide
uuccucggccaggagggau

SEQ ID NO: 2039743 - RNA, 19 nt, Artificial Sequence
  Description of Artificial Sequence: Synthetic oligonucleotide
ggaggaggucgcauuccag

SEQ ID NO: 2039744 - RNA, 19 nt, Artificial Sequence
  Description of Artificial Sequence: Synthetic oligonucleotide
gggagggacuauguacagc

SEQ ID NO: 2039745 - RNA, 19 nt, Artificial Sequence
  Description of Artificial Sequence: Synthetic oligonucleotide
gauucccgccgccgcuaac

SEQ ID NO: 2039746 - RNA, 19 nt, Artificial Sequence
  Description of Artificial Sequence: Synthetic oligonucleotide
agggagcccugaaaggaaa

SEQ ID NO: 2039747 - RNA, 19 nt, Artificial Sequence
  Description of Artificial Sequence: Synthetic oligonucleotide
ggcggcuccgaugucucag

SEQ ID NO: 2039748 - RNA, 19 nt, Artificial Sequence
  Description of Artificial Sequence: Synthetic oligonucleotide
cgaugucucagaugcccgc

SEQ ID NO: 2039749 - RNA, 19 nt, Artificial Sequence
  Description of Artificial Sequence: Synthetic oligonucleotide
gggacaccagcugggauuc

SEQ ID NO: 2039750 - RNA, 19 nt, Artificial Sequence
  Description of Artificial Sequence: Synthetic oligonucleotide
cagaccucgcaucccugga

SEQ ID NO: 2039751 - RNA, 19 nt, Artificial Sequence
  Description of Artificial Sequence: Synthetic oligonucleotide
cgagaacucgcuucucuuc

SEQ ID NO: 2039752 - RNA, 19 nt, Artificial Sequence
  Description of Artificial Sequence: Synthetic oligonucleotide
ggaggacccauaggaggcc

SEQ ID NO: 2039753 - RNA, 19 nt, Artificial Sequence
  Description of Artificial Sequence: Synthetic oligonucleotide
ccgccgcuaacggaaaugc

SEQ ID NO: 2039754 - RNA, 19 nt, Artificial Sequence
  Description of Artificial Sequence: Synthetic oligonucleotide
ccucauccuguagucaaug

SEQ ID NO: 2039755 - RNA, 19 nt, Artificial Sequence
  Description of Artificial Sequence: Synthetic oligonucleotide
gucuagggccuuggagggc

SEQ ID NO: 2039756 - RNA, 19 nt, Artificial Sequence
  Description of Artificial Sequence: Synthetic oligonucleotide
cccgaugaagauccggcca

SEQ ID NO: 2039757 - RNA, 19 nt, Artificial Sequence
  Description of Artificial Sequence: Synthetic oligonucleotide
ggaugcaccucauccugua

SEQ ID NO: 2039758 - RNA, 19 nt, Artificial Sequence
  Description of Artificial Sequence: Synthetic oligonucleotide
agcagaccucgcaucccug

SEQ ID NO: 2039759 - RNA, 19 nt, Artificial Sequence
  Description of Artificial Sequence: Synthetic oligonucleotide
gagguccuucuacugucau

SEQ ID NO: 2039760 - RNA, 19 nt, Artificial Sequence
  Description of Artificial Sequence: Synthetic oligonucleotide
uggcggcuccgaugucuca

SEQ ID NO: 2039761 - RNA, 19 nt, Artificial Sequence
  Description of Artificial Sequence: Synthetic oligonucleotide
accucauccuguagucaau

SEQ ID NO: 2039762 - RNA, 19 nt, Artificial Sequence
  Description of Artificial Sequence: Synthetic oligonucleotide
cuccaaccccucggacugg

SEQ ID NO: 2039763 - RNA, 19 nt, Artificial Sequence
  Description of Artificial Sequence: Synthetic oligonucleotide
ggccuagucgccagccagc

SEQ ID NO: 2039764 - RNA, 19 nt, Artificial Sequence
  Description of Artificial Sequence: Synthetic oligonucleotide
ccagacgauccagggagac

SEQ ID NO: 2039765 - RNA, 19 nt, Artificial Sequence
  Description of Artificial Sequence: Synthetic oligonucleotide
cacgaccagguggguacug

SEQ ID NO: 2039766 - RNA, 19 nt, Artificial Sequence
  Description of Artificial Sequence: Synthetic oligonucleotide
cuguauuaacucggcccaa

SEQ ID NO: 2039767 - RNA, 19 nt, Artificial Sequence
  Description of Artificial Sequence: Synthetic oligonucleotide
gaccgagaacucgcuucuc

SEQ ID NO: 2039768 - RNA, 19 nt, Artificial Sequence
  Description of Artificial Sequence: Synthetic oligonucleotide
ggggacaccagcugggauu

SEQ ID NO: 2039769 - RNA, 19 nt, Artificial Sequence
  Description of Artificial Sequence: Synthetic oligonucleotide
gguucuccccucgaagcaa

SEQ ID NO: 2039770 - RNA, 19 nt, Artificial Sequence
  Description of Artificial Sequence: Synthetic oligonucleotide
gccgccgcuaacggaaaug

SEQ ID NO: 2039771 - RNA, 19 nt, Artificial Sequence
  Description of Artificial Sequence: Synthetic oligonucleotide
guggcggcuccgaugucuc

SEQ ID NO: 2039772 - RNA, 19 nt, Artificial Sequence
  Description of Artificial Sequence: Synthetic oligonucleotide
gaggacccauaggaggccu

SEQ ID NO: 2039773 - RNA, 19 nt, Artificial Sequence
  Description of Artificial Sequence: Synthetic oligonucleotide
gggcauucccauuggaguu

SEQ ID NO: 2039774 - RNA, 19 nt, Artificial Sequence
  Description of Artificial Sequence: Synthetic oligonucleotide
ucgcuuccacagaggccua

SEQ ID NO: 2039775 - RNA, 19 nt, Artificial Sequence
  Description of Artificial Sequence: Synthetic oligonucleotide
cacagucacauaggaucaa

SEQ ID NO: 2039776 - RNA, 19 nt, Artificial Sequence
  Description of Artificial Sequence: Synthetic oligonucleotide
aaguggcacucgggcaaua

SEQ ID NO: 2039777 - RNA, 19 nt, Artificial Sequence
  Description of Artificial Sequence: Synthetic oligonucleotide
ggagguccuucuacuguca

SEQ ID NO: 2039778 - RNA, 19 nt, Artificial Sequence
  Description of Artificial Sequence: Synthetic oligonucleotide
gagggacuauguacagccu

SEQ ID NO: 2039779 - RNA, 19 nt, Artificial Sequence
  Description of Artificial Sequence: Synthetic oligonucleotide
cuugcaggaugcaccucau

SEQ ID NO: 2039780 - RNA, 19 nt, Artificial Sequence
  Description of Artificial Sequence: Synthetic oligonucleotide
cccucgaagcaacaccaga

SEQ ID NO: 2039781 - RNA, 19 nt, Artificial Sequence
  Description of Artificial Sequence: Synthetic oligonucleotide
gccuccaaccccucggacu

SEQ ID NO: 2039782 - RNA, 19 nt, Artificial Sequence
  Description of Artificial Sequence: Synthetic oligonucleotide
gcccugccaauaccuggcc

SEQ ID NO: 2039783 - RNA, 19 nt, Artificial Sequence
  Description of Artificial Sequence: Synthetic oligonucleotide
aggucccgaugaagauccg

SEQ ID NO: 2039784 - RNA, 19 nt, Artificial Sequence
  Description of Artificial Sequence: Synthetic oligonucleotide
cugucauggagaccagguu

SEQ ID NO: 2039785 - RNA, 19 nt, Artificial Sequence
  Description of Artificial Sequence: Synthetic oligonucleotide
gaugggccuccaaccccuc

SEQ ID NO: 2039786 - RNA, 19 nt, Artificial Sequence
  Description of Artificial Sequence: Synthetic oligonucleotide
cagucucuuaagaguuuau

SEQ ID NO: 2039787 - RNA, 19 nt, Artificial Sequence
  Description of Artificial Sequence: Synthetic oligonucleotide
ccucgcaucccuggaggag

SEQ ID NO: 2039788 - RNA, 19 nt, Artificial Sequence
  Description of Artificial Sequence: Synthetic oligonucleotide
ggccucaugccaggaggug

SEQ ID NO: 2039789 - RNA, 19 nt, Artificial Sequence
  Description of Artificial Sequence: Synthetic oligonucleotide
gcccauagguggaggagga

SEQ ID NO: 2039790 - RNA, 19 nt, Artificial Sequence
  Description of Artificial Sequence: Synthetic oligonucleotide
cuggggcauggggacacca

SEQ ID NO: 2039791 - RNA, 19 nt, Artificial Sequence
  Description of Artificial Sequence: Synthetic oligonucleotide
ccaagggaaugggacccac

SEQ ID NO: 2039792 - RNA, 19 nt, Artificial Sequence
  Description of Artificial Sequence: Synthetic oligonucleotide
gggcaauaccaguaucuuu

SEQ ID NO: 2039793 - RNA, 19 nt, Artificial Sequence
  Description of Artificial Sequence: Synthetic oligonucleotide
gcgcgauucccgccgccgc

SEQ ID NO: 2039794 - RNA, 19 nt, Artificial Sequence
  Description of Artificial Sequence: Synthetic oligonucleotide
cccgccgccgcuaacggaa

SEQ ID NO: 2039795 - RNA, 19 nt, Artificial Sequence
  Description of Artificial Sequence: Synthetic oligonucleotide
ccuagucgccagccagcag

SEQ ID NO: 2039796 - RNA, 19 nt, Artificial Sequence
  Description of Artificial Sequence: Synthetic oligonucleotide
gcaccucauccuguaguca

SEQ ID NO: 2039797 - RNA, 19 nt, Artificial Sequence
  Description of Artificial Sequence: Synthetic oligonucleotide
gcagcgcgauucccgccgc

SEQ ID NO: 2039798 - RNA, 19 nt, Artificial Sequence
  Description of Artificial Sequence: Synthetic oligonucleotide
gccuagucgccagccagca

SEQ ID NO: 2039799 - RNA, 19 nt, Artificial Sequence
  Description of Artificial Sequence: Synthetic oligonucleotide
gggacuauguacagccuuu

SEQ ID NO: 2039800 - RNA, 19 nt, Artificial Sequence
  Description of Artificial Sequence: Synthetic oligonucleotide
gccuggggcauggggacac

SEQ ID NO: 2039801 - RNA, 19 nt, Artificial Sequence
  Description of Artificial Sequence: Synthetic oligonucleotide
gcggcuccgaugucucaga

SEQ ID NO: 2039802 - RNA, 19 nt, Artificial Sequence
  Description of Artificial Sequence: Synthetic oligonucleotide
gaugcccgccggauucgcu

SEQ ID NO: 2039803 - RNA, 19 nt, Artificial Sequence
  Description of Artificial Sequence: Synthetic oligonucleotide
gcgccccucggcccauagg

SEQ ID NO: 2039804 - RNA, 19 nt, Artificial Sequence
  Description of Artificial Sequence: Synthetic oligonucleotide
ggcgccccucggcccauag

SEQ ID NO: 2039805 - RNA, 19 nt, Artificial Sequence
  Description of Artificial Sequence: Synthetic oligonucleotide
cucggccaggagggauccc

SEQ ID NO: 2039806 - RNA, 19 nt, Artificial Sequence
  Description of Artificial Sequence: Synthetic oligonucleotide
cagacgauccagggagacu

SEQ ID NO: 2039807 - RNA, 19 nt, Artificial Sequence
  Description of Artificial Sequence: Synthetic oligonucleotide
cucagaugcccgccggauu

SEQ ID NO: 2039808 - RNA, 19 nt, Artificial Sequence
  Description of Artificial Sequence: Synthetic oligonucleotide
gggagcccugaaaggaaaa

SEQ ID NO: 2039809 - RNA, 19 nt, Artificial Sequence
  Description of Artificial Sequence: Synthetic oligonucleotide
ccggauucgcuuccacaga

SEQ ID NO: 2039810 - RNA, 19 nt, Artificial Sequence
  Description of Artificial Sequence: Synthetic oligonucleotide
gggcauggggacaccagcu

SEQ ID NO: 2039811 - RNA, 19 nt, Artificial Sequence
  Description of Artificial Sequence: Synthetic oligonucleotide
uccggccaucuugcaggau

SEQ ID NO: 2039812 - RNA, 19 nt, Artificial Sequence
  Description of Artificial Sequence: Synthetic oligonucleotide
ccgaugaagauccggccau

SEQ ID NO: 2039813 - RNA, 19 nt, Artificial Sequence
  Description of Artificial Sequence: Synthetic oligonucleotide
ugccaggaggugggcccau

SEQ ID NO: 2039814 - RNA, 19 nt, Artificial Sequence
  Description of Artificial Sequence: Synthetic oligonucleotide
cccauagguggaggaggac

SEQ ID NO: 2039815 - RNA, 19 nt, Artificial Sequence
  Description of Artificial Sequence: Synthetic oligonucleotide
gacccauaggaggccucau

SEQ ID NO: 2039816 - RNA, 19 nt, Artificial Sequence
  Description of Artificial Sequence: Synthetic oligonucleotide
gccagcagcccugccaaua

SEQ ID NO: 2039817 - RNA, 19 nt, Artificial Sequence
  Description of Artificial Sequence: Synthetic oligonucleotide
gccccucggcccauaggug

SEQ ID NO: 2039818 - RNA, 19 nt, Artificial Sequence
  Description of Artificial Sequence: Synthetic oligonucleotide
ggacuauguacagccuuuu

SEQ ID NO: 2039819 - RNA, 19 nt, Artificial Sequence
  Description of Artificial Sequence: Synthetic oligonucleotide
ggccaucuugcaggaugca

SEQ ID NO: 2039820 - RNA, 19 nt, Artificial Sequence
  Description of Artificial Sequence: Synthetic oligonucleotide
ggacaccagcugggauucc

SEQ ID NO: 2039821 - RNA, 19 nt, Artificial Sequence
  Description of Artificial Sequence: Synthetic oligonucleotide
caaguggcacucgggcaau

SEQ ID NO: 2039822 - RNA, 19 nt, Artificial Sequence
  Description of Artificial Sequence: Synthetic oligonucleotide
cacagucaugguggcggcu

SEQ ID NO: 2039823 - RNA, 19 nt, Artificial Sequence
  Description of Artificial Sequence: Synthetic oligonucleotide
cgccggauucgcuuccaca

SEQ ID NO: 2039824 - RNA, 19 nt, Artificial Sequence
  Description of Artificial Sequence: Synthetic oligonucleotide
guggagcuacugccauaau

SEQ ID NO: 2039825 - RNA, 19 nt, Artificial Sequence
  Description of Artificial Sequence: Synthetic oligonucleotide
cccucggacuggcccagca

SEQ ID NO: 2039826 - RNA, 19 nt, Artificial Sequence
  Description of Artificial Sequence: Synthetic oligonucleotide
cuacugccauaaugcuguu

SEQ ID NO: 2039827 - RNA, 19 nt, Artificial Sequence
  Description of Artificial Sequence: Synthetic oligonucleotide
ccucggacuggcccagcaa

SEQ ID NO: 2039828 - RNA, 19 nt, Artificial Sequence
  Description of Artificial Sequence: Synthetic oligonucleotide
ccccauuggaggacccaua

SEQ ID NO: 2039829 - RNA, 19 nt, Artificial Sequence
  Description of Artificial Sequence: Synthetic oligonucleotide
ccgccggauucgcuuccac

SEQ ID NO: 2039830 - RNA, 19 nt, Artificial Sequence
  Description of Artificial Sequence: Synthetic oligonucleotide
ccuggggcauggggacacc

SEQ ID NO: 2039831 - RNA, 19 nt, Artificial Sequence
  Description of Artificial Sequence: Synthetic oligonucleotide
guacugaguuggggcuccu

SEQ ID NO: 2039832 - RNA, 19 nt, Artificial Sequence
  Description of Artificial Sequence: Synthetic oligonucleotide
cgcuuccacagaggccuag

SEQ ID NO: 2039833 - RNA, 19 nt, Artificial Sequence
  Description of Artificial Sequence: Synthetic oligonucleotide
ggccaggagggauccccau

SEQ ID NO: 2039834 - RNA, 19 nt, Artificial Sequence
  Description of Artificial Sequence: Synthetic oligonucleotide
gcgauucccgccgccgcua

SEQ ID NO: 2039835 - RNA, 19 nt, Artificial Sequence
  Description of Artificial Sequence: Synthetic oligonucleotide
ccccacgaccaggugggua

SEQ ID NO: 2039836 - RNA, 19 nt, Artificial Sequence
  Description of Artificial Sequence: Synthetic oligonucleotide
cgccgcuaacggaaaugcu

SEQ ID NO: 2039837 - RNA, 19 nt, Artificial Sequence
  Description of Artificial Sequence: Synthetic oligonucleotide
cgauucccgccgccgcuaa

SEQ ID NO: 2039838 - RNA, 19 nt, Artificial Sequence
  Description of Artificial Sequence: Synthetic oligonucleotide
ccccucggacuggcccagc

SEQ ID NO: 2039839 - RNA, 19 nt, Artificial Sequence
  Description of Artificial Sequence: Synthetic oligonucleotide
gaggcgccccucggcccau

SEQ ID NO: 2039840 - RNA, 19 nt, Artificial Sequence
  Description of Artificial Sequence: Synthetic oligonucleotide
cccgccggauucgcuucca

SEQ ID NO: 2039841 - RNA, 19 nt, Artificial Sequence
  Description of Artificial Sequence: Synthetic oligonucleotide
ccgccgccgcuaacggaaa

SEQ ID NO: 2039842 - RNA, 19 nt, Artificial Sequence
  Description of Artificial Sequence: Synthetic oligonucleotide
cgcgauucccgccgccgcu

SEQ ID NO: 2039843 - RNA, 19 nt, Artificial Sequence
  Description of Artificial Sequence: Synthetic oligonucleotide
ccacgaccagguggguacu

SEQ ID NO: 2039844 - RNA, 19 nt, Artificial Sequence
  Description of Artificial Sequence: Synthetic oligonucleotide
cggcuccgaugucucagau

SEQ ID NO: 2039845 - RNA, 19 nt, Artificial Sequence
  Description of Artificial Sequence: Synthetic oligonucleotide
gccagccagcagcgcgauu

SEQ ID NO: 2039846 - RNA, 19 nt, Artificial Sequence
  Description of Artificial Sequence: Synthetic oligonucleotide
cgccgccgcuaacggaaau

SEQ ID NO: 2039847 - RNA, 19 nt, Artificial Sequence
  Description of Artificial Sequence: Synthetic oligonucleotide
uauauuuugaaccaaagcc

SEQ ID NO: 2039848 - RNA, 19 nt, Artificial Sequence
  Description of Artificial Sequence: Synthetic oligonucleotide
ugaaaaguaaguaaacggg

SEQ ID NO: 2039849 - RNA, 19 nt, Artificial Sequence
  Description of Artificial Sequence: Synthetic oligonucleotide
aaaguaaguaaacgggacc

SEQ ID NO: 2039850 - RNA, 19 nt, Artificial Sequence
  Description of Artificial Sequence: Synthetic oligonucleotide
uguuauacuuaauggaacg

SEQ ID NO: 2039851 - RNA, 19 nt, Artificial Sequence
  Description of Artificial Sequence: Synthetic oligonucleotide
uauaguuauuaauggaccg

SEQ ID NO: 2039852 - RNA, 19 nt, Artificial Sequence
  Description of Artificial Sequence: Synthetic oligonucleotide
cugaaaaguaaguaaacgg

SEQ ID NO: 2039853 - RNA, 19 nt, Artificial Sequence
  Description of Artificial Sequence: Synthetic oligonucleotide
uguguuguaguccacagca

SEQ ID NO: 2039854 - RNA, 19 nt, Artificial Sequence
  Description of Artificial Sequence: Synthetic oligonucleotide
uuauaguuauuaauggacc

SEQ ID NO: 2039855 - RNA, 19 nt, Artificial Sequence
  Description of Artificial Sequence: Synthetic oligonucleotide
cugaccuauauuuugaacc

SEQ ID NO: 2039856 - RNA, 19 nt, Artificial Sequence
  Description of Artificial Sequence: Synthetic oligonucleotide
acugcuagaagccacaaug

SEQ ID NO: 2039857 - RNA, 19 nt, Artificial Sequence
  Description of Artificial Sequence: Synthetic oligonucleotide
aaaaguaaguaaacgggac

SEQ ID NO: 2039858 - RNA, 19 nt, Artificial Sequence
  Description of Artificial Sequence: Synthetic oligonucleotide
uaugauuuucaacaccugc

SEQ ID NO: 2039859 - RNA, 19 nt, Artificial Sequence
  Description of Artificial Sequence: Synthetic oligonucleotide
uauuuugaaccaaagccug

SEQ ID NO: 2039860 - RNA, 19 nt, Artificial Sequence
  Description of Artificial Sequence: Synthetic oligonucleotide
guuauuaauggaccgaagc

SEQ ID NO: 2039861 - RNA, 19 nt, Artificial Sequence
  Description of Artificial Sequence: Synthetic oligonucleotide
uauacuuaauggaacggug

SEQ ID NO: 2039862 - RNA, 19 nt, Artificial Sequence
  Description of Artificial Sequence: Synthetic oligonucleotide
caauaucagcccaagaugc

SEQ ID NO: 2039863 - RNA, 19 nt, Artificial Sequence
  Description of Artificial Sequence: Synthetic oligonucleotide
acugguuuuauucucguug

SEQ ID NO: 2039864 - RNA, 19 nt, Artificial Sequence
  Description of Artificial Sequence: Synthetic oligonucleotide
acugaaaaguaaguaaacg

SEQ ID NO: 2039865 - RNA, 19 nt, Artificial Sequence
  Description of Artificial Sequence: Synthetic oligonucleotide
cuauauuuugaaccaaagc

SEQ ID NO: 2039866 - RNA, 19 nt, Artificial Sequence
  Description of Artificial Sequence: Synthetic oligonucleotide
cuggcuaugauuuucaaca

SEQ ID NO: 2039867 - RNA, 19 nt, Artificial Sequence
  Description of Artificial Sequence: Synthetic oligonucleotide
guaaacgggaccuuucccg

SEQ ID NO: 2039868 - RNA, 19 nt, Artificial Sequence
  Description of Artificial Sequence: Synthetic oligonucleotide
acgaaugugucgcaguugg

SEQ ID NO: 2039869 - RNA, 19 nt, Artificial Sequence
  Description of Artificial Sequence: Synthetic oligonucleotide
agcaauaucagcccaagau

SEQ ID NO: 2039870 - RNA, 19 nt, Artificial Sequence
  Description of Artificial Sequence: Synthetic oligonucleotide
auacgcagcauccagucuc

SEQ ID NO: 2039871 - RNA, 19 nt, Artificial Sequence
  Description of Artificial Sequence: Synthetic oligonucleotide
uuuggaggugcaauaguag

SEQ ID NO: 2039872 - RNA, 19 nt, Artificial Sequence
  Description of Artificial Sequence: Synthetic oligonucleotide
auuaugaccgaacccacug

SEQ ID NO: 2039873 - RNA, 19 nt, Artificial Sequence
  Description of Artificial Sequence: Synthetic oligonucleotide
aguaaacgggaccuuuccc

SEQ ID NO: 2039874 - RNA, 19 nt, Artificial Sequence
  Description of Artificial Sequence: Synthetic oligonucleotide
cacaggacccuuauuaucc

SEQ ID NO: 2039875 - RNA, 19 nt, Artificial Sequence
  Description of Artificial Sequence: Synthetic oligonucleotide
aaguaaguaaacgggaccu

SEQ ID NO: 2039876 - RNA, 19 nt, Artificial Sequence
  Description of Artificial Sequence: Synthetic oligonucleotide
uguuucagauuccagucga

SEQ ID NO: 2039877 - RNA, 19 nt, Artificial Sequence
  Description of Artificial Sequence: Synthetic oligonucleotide
ugaccuauauuuugaacca

SEQ ID NO: 2039878 - RNA, 19 nt, Artificial Sequence
  Description of Artificial Sequence: Synthetic oligonucleotide
uugaaccaaagccugugag

SEQ ID NO: 2039879 - RNA, 19 nt, Artificial Sequence
  Description of Artificial Sequence: Synthetic oligonucleotide
ccaucugacaucaaaacgg

SEQ ID NO: 2039880 - RNA, 19 nt, Artificial Sequence
  Description of Artificial Sequence: Synthetic oligonucleotide
uagcucuuaaugaugaaaa

SEQ ID NO: 2039881 - RNA, 19 nt, Artificial Sequence
  Description of Artificial Sequence: Synthetic oligonucleotide
agcgaguuggcugagcugc

SEQ ID NO: 2039882 - RNA, 19 nt, Artificial Sequence
  Description of Artificial Sequence: Synthetic oligonucleotide
uuguaacuggcuaugauuu

SEQ ID NO: 2039883 - RNA, 19 nt, Artificial Sequence
  Description of Artificial Sequence: Synthetic oligonucleotide
uguuguaguccacagcaga

SEQ ID NO: 2039884 - RNA, 19 nt, Artificial Sequence
  Description of Artificial Sequence: Synthetic oligonucleotide
aggguuauaguuauuaaug

SEQ ID NO: 2039885 - RNA, 19 nt, Artificial Sequence
  Description of Artificial Sequence: Synthetic oligonucleotide
auauuuugaaccaaagccu

SEQ ID NO: 2039886 - RNA, 19 nt, Artificial Sequence
  Description of Artificial Sequence: Synthetic oligonucleotide
acuggcuaugauuuucaac

SEQ ID NO: 2039887 - RNA, 19 nt, Artificial Sequence
  Description of Artificial Sequence: Synthetic oligonucleotide
uuagguuguuguuuugcag

SEQ ID NO: 2039888 - RNA, 19 nt, Artificial Sequence
  Description of Artificial Sequence: Synthetic oligonucleotide
auuaauggaccgaagcuuc

SEQ ID NO: 2039889 - RNA, 19 nt, Artificial Sequence
  Description of Artificial Sequence: Synthetic oligonucleotide
gauguuauacuuaauggaa

SEQ ID NO: 2039890 - RNA, 19 nt, Artificial Sequence
  Description of Artificial Sequence: Synthetic oligonucleotide
accccauuaugaccgaacc

SEQ ID NO: 2039891 - RNA, 19 nt, Artificial Sequence
  Description of Artificial Sequence: Synthetic oligonucleotide
uaugaccgaacccacugcc

SEQ ID NO: 2039892 - RNA, 19 nt, Artificial Sequence
  Description of Artificial Sequence: Synthetic oligonucleotide
uuuagguuguuguuuugca

SEQ ID NO: 2039893 - RNA, 19 nt, Artificial Sequence
  Description of Artificial Sequence: Synthetic oligonucleotide
ucauggaacgauacgcagc

SEQ ID NO: 2039894 - RNA, 19 nt, Artificial Sequence
  Description of Artificial Sequence: Synthetic oligonucleotide
ucucuagacgaaugugucg

SEQ ID NO: 2039895 - RNA, 19 nt, Artificial Sequence
  Description of Artificial Sequence: Synthetic oligonucleotide
uuuuggaggugcaauagua

SEQ ID NO: 2039896 - RNA, 19 nt, Artificial Sequence
  Description of Artificial Sequence: Synthetic oligonucleotide
uuauacuuaauggaacggu

SEQ ID NO: 2039897 - RNA, 19 nt, Artificial Sequence
  Description of Artificial Sequence: Synthetic oligonucleotide
uuggaggugcaauaguagc

SEQ ID NO: 2039898 - RNA, 19 nt, Artificial Sequence
  Description of Artificial Sequence: Synthetic oligonucleotide
ggguuauaguuauuaaugg

SEQ ID NO: 2039899 - RNA, 19 nt, Artificial Sequence
  Description of Artificial Sequence: Synthetic oligonucleotide
uucauggaacgauacgcag

SEQ ID NO: 2039900 - RNA, 19 nt, Artificial Sequence
  Description of Artificial Sequence: Synthetic oligonucleotide
guuauacuuaauggaacgg

SEQ ID NO: 2039901 - RNA, 19 nt, Artificial Sequence
  Description of Artificial Sequence: Synthetic oligonucleotide
auguuucagauuccagucg

SEQ ID NO: 2039902 - RNA, 19 nt, Artificial Sequence
  Description of Artificial Sequence: Synthetic oligonucleotide
uucaacaccugcuuagccu

SEQ ID NO: 2039903 - RNA, 19 nt, Artificial Sequence
  Description of Artificial Sequence: Synthetic oligonucleotide
auguuauacuuaauggaac

SEQ ID NO: 2039904 - RNA, 19 nt, Artificial Sequence
  Description of Artificial Sequence: Synthetic oligonucleotide
auacuuaauggaacggugg

SEQ ID NO: 2039905 - RNA, 19 nt, Artificial Sequence
  Description of Artificial Sequence: Synthetic oligonucleotide
uggcuauucgggaacgucc

SEQ ID NO: 2039906 - RNA, 19 nt, Artificial Sequence
  Description of Artificial Sequence: Synthetic oligonucleotide
aaaacggcccuuccauuug

SEQ ID NO: 2039907 - RNA, 19 nt, Artificial Sequence
  Description of Artificial Sequence: Synthetic oligonucleotide
cuuggcguuucucauagug

SEQ ID NO: 2039908 - RNA, 19 nt, Artificial Sequence
  Description of Artificial Sequence: Synthetic oligonucleotide
caucugacaucaaaacggc

SEQ ID NO: 2039909 - RNA, 19 nt, Artificial Sequence
  Description of Artificial Sequence: Synthetic oligonucleotide
ggaccuuucccguucaugg

SEQ ID NO: 2039910 - RNA, 19 nt, Artificial Sequence
  Description of Artificial Sequence: Synthetic oligonucleotide
uuuugaaccaaagccugug

SEQ ID NO: 2039911 - RNA, 19 nt, Artificial Sequence
  Description of Artificial Sequence: Synthetic oligonucleotide
uccugcaaggccauucuug

SEQ ID NO: 2039912 - RNA, 19 nt, Artificial Sequence
  Description of Artificial Sequence: Synthetic oligonucleotide
gucgcaguuggcuauucgg

SEQ ID NO: 2039913 - RNA, 19 nt, Artificial Sequence
  Description of Artificial Sequence: Synthetic oligonucleotide
cucuagacgaaugugucgc

SEQ ID NO: 2039914 - RNA, 19 nt, Artificial Sequence
  Description of Artificial Sequence: Synthetic oligonucleotide
ugccacaggacccuuauua

SEQ ID NO: 2039915 - RNA, 19 nt, Artificial Sequence
  Description of Artificial Sequence: Synthetic oligonucleotide
accgaagcuucuccaauac

SEQ ID NO: 2039916 - RNA, 19 nt, Artificial Sequence
  Description of Artificial Sequence: Synthetic oligonucleotide
uucucuagacgaauguguc

SEQ ID NO: 2039917 - RNA, 19 nt, Artificial Sequence
  Description of Artificial Sequence: Synthetic oligonucleotide
uccauuacccauccacccc

SEQ ID NO: 2039918 - RNA, 19 nt, Artificial Sequence
  Description of Artificial Sequence: Synthetic oligonucleotide
uuaacacuuuccuucuuuc

SEQ ID NO: 2039919 - RNA, 19 nt, Artificial Sequence
  Description of Artificial Sequence: Synthetic oligonucleotide
uuugaaccaaagccuguga

SEQ ID NO: 2039920 - RNA, 19 nt, Artificial Sequence
  Description of Artificial Sequence: Synthetic oligonucleotide
uuggucuucaguuuagguu

SEQ ID NO: 2039921 - RNA, 19 nt, Artificial Sequence
  Description of Artificial Sequence: Synthetic oligonucleotide
ugauuuucaacaccugcuu

SEQ ID NO: 2039922 - RNA, 19 nt, Artificial Sequence
  Description of Artificial Sequence: Synthetic oligonucleotide
ugugagggagccuuugcca

SEQ ID NO: 2039923 - RNA, 19 nt, Artificial Sequence
  Description of Artificial Sequence: Synthetic oligonucleotide
uucagauuccagucgaaau

SEQ ID NO: 2039924 - RNA, 19 nt, Artificial Sequence
  Description of Artificial Sequence: Synthetic oligonucleotide
cucguuguucucuagacga

SEQ ID NO: 2039925 - RNA, 19 nt, Artificial Sequence
  Description of Artificial Sequence: Synthetic oligonucleotide
aucaaaacggcccuuccau

SEQ ID NO: 2039926 - RNA, 19 nt, Artificial Sequence
  Description of Artificial Sequence: Synthetic oligonucleotide
uccgaggugcuacccagcg

SEQ ID NO: 2039927 - RNA, 19 nt, Artificial Sequence
  Description of Artificial Sequence: Synthetic oligonucleotide
auuauuggccugcuguccu

SEQ ID NO: 2039928 - RNA, 19 nt, Artificial Sequence
  Description of Artificial Sequence: Synthetic oligonucleotide
uggaacgauacgcagcauc

SEQ ID NO: 2039929 - RNA, 19 nt, Artificial Sequence
  Description of Artificial Sequence: Synthetic oligonucleotide
uuaugaccgaacccacugc

SEQ ID NO: 2039930 - RNA, 19 nt, Artificial Sequence
  Description of Artificial Sequence: Synthetic oligonucleotide
uucgggaacguccuucaca

SEQ ID NO: 2039931 - RNA, 19 nt, Artificial Sequence
  Description of Artificial Sequence: Synthetic oligonucleotide
uucucguuguucucuagac

SEQ ID NO: 2039932 - RNA, 19 nt, Artificial Sequence
  Description of Artificial Sequence: Synthetic oligonucleotide
uauuauuggccugcugucc

SEQ ID NO: 2039933 - RNA, 19 nt, Artificial Sequence
  Description of Artificial Sequence: Synthetic oligonucleotide
cuuguugccaugcucugug

SEQ ID NO: 2039934 - RNA, 19 nt, Artificial Sequence
  Description of Artificial Sequence: Synthetic oligonucleotide
ugugcuuguaacuggcuau

SEQ ID NO: 2039935 - RNA, 19 nt, Artificial Sequence
  Description of Artificial Sequence: Synthetic oligonucleotide
uaaguaaacgggaccuuuc

SEQ ID NO: 2039936 - RNA, 19 nt, Artificial Sequence
  Description of Artificial Sequence: Synthetic oligonucleotide
ugcaccagauguuauacuu

SEQ ID NO: 2039937 - RNA, 19 nt, Artificial Sequence
  Description of Artificial Sequence: Synthetic oligonucleotide
cauguguuguaguccacag

SEQ ID NO: 2039938 - RNA, 19 nt, Artificial Sequence
  Description of Artificial Sequence: Synthetic oligonucleotide
uuaggguuauaguuauuaa

SEQ ID NO: 2039939 - RNA, 19 nt, Artificial Sequence
  Description of Artificial Sequence: Synthetic oligonucleotide
auccaccccauuaugaccg

SEQ ID NO: 2039940 - RNA, 19 nt, Artificial Sequence
  Description of Artificial Sequence: Synthetic oligonucleotide
uguucucuagacgaaugug

SEQ ID NO: 2039941 - RNA, 19 nt, Artificial Sequence
  Description of Artificial Sequence: Synthetic oligonucleotide
ugaaaacccggccauguuu

SEQ ID NO: 2039942 - RNA, 19 nt, Artificial Sequence
  Description of Artificial Sequence: Synthetic oligonucleotide
uuaauggaacgguggauau

SEQ ID NO: 2039943 - RNA, 19 nt, Artificial Sequence
  Description of Artificial Sequence: Synthetic oligonucleotide
gcaauaucagcccaagaug

SEQ ID NO: 2039944 - RNA, 19 nt, Artificial Sequence
  Description of Artificial Sequence: Synthetic oligonucleotide
gaggugcaauaguagcugg

SEQ ID NO: 2039945 - RNA, 19 nt, Artificial Sequence
  Description of Artificial Sequence: Synthetic oligonucleotide
cuccauuacccauccaccc

SEQ ID NO: 2039946 - RNA, 19 nt, Artificial Sequence
  Description of Artificial Sequence: Synthetic oligonucleotide
ccagauguuauacuuaaug

SEQ ID NO: 2039947 - RNA, 19 nt, Artificial Sequence
  Description of Artificial Sequence: Synthetic oligonucleotide
auagugugagaagucauca

SEQ ID NO: 2039948 - RNA, 19 nt, Artificial Sequence
  Description of Artificial Sequence: Synthetic oligonucleotide
gaugucugagccacugggg

SEQ ID NO: 2039949 - RNA, 19 nt, Artificial Sequence
  Description of Artificial Sequence: Synthetic oligonucleotide
uuagccuuuuccagaggca

SEQ ID NO: 2039950 - RNA, 19 nt, Artificial Sequence
  Description of Artificial Sequence: Synthetic oligonucleotide
ucgggaacguccuucacaa

SEQ ID NO: 2039951 - RNA, 19 nt, Artificial Sequence
  Description of Artificial Sequence: Synthetic oligonucleotide
auaguuauuaauggaccga

SEQ ID NO: 2039952 - RNA, 19 nt, Artificial Sequence
  Description of Artificial Sequence: Synthetic oligonucleotide
cuauuauuggccugcuguc

SEQ ID NO: 2039953 - RNA, 19 nt, Artificial Sequence
  Description of Artificial Sequence: Synthetic oligonucleotide
ugcacauguguuguagucc

SEQ ID NO: 2039954 - RNA, 19 nt, Artificial Sequence
  Description of Artificial Sequence: Synthetic oligonucleotide
uuacccauccaccccauua

SEQ ID NO: 2039955 - RNA, 19 nt, Artificial Sequence
  Description of Artificial Sequence: Synthetic oligonucleotide
uuggcguuucucauagugu

SEQ ID NO: 2039956 - RNA, 19 nt, Artificial Sequence
  Description of Artificial Sequence: Synthetic oligonucleotide
cucuuggcguuucucauag

SEQ ID NO: 2039957 - RNA, 19 nt, Artificial Sequence
  Description of Artificial Sequence: Synthetic oligonucleotide
uaguuauuaauggaccgaa

SEQ ID NO: 2039958 - RNA, 19 nt, Artificial Sequence
  Description of Artificial Sequence: Synthetic oligonucleotide
uauucgggaacguccuuca

SEQ ID NO: 2039959 - RNA, 19 nt, Artificial Sequence
  Description of Artificial Sequence: Synthetic oligonucleotide
augaugaaaacccggccau

SEQ ID NO: 2039960 - RNA, 19 nt, Artificial Sequence
  Description of Artificial Sequence: Synthetic oligonucleotide
gugcaauaguagcuggagg

SEQ ID NO: 2039961 - RNA, 19 nt, Artificial Sequence
  Description of Artificial Sequence: Synthetic oligonucleotide
gaaguguccacugccguug

SEQ ID NO: 2039962 - RNA, 19 nt, Artificial Sequence
  Description of Artificial Sequence: Synthetic oligonucleotide
agacuugauccugcaaggc

SEQ ID NO: 2039963 - RNA, 19 nt, Artificial Sequence
  Description of Artificial Sequence: Synthetic oligonucleotide
ucucauagugugagaaguc

SEQ ID NO: 2039964 - RNA, 19 nt, Artificial Sequence
  Description of Artificial Sequence: Synthetic oligonucleotide
ugaccgaacccacugccac

SEQ ID NO: 2039965 - RNA, 19 nt, Artificial Sequence
  Description of Artificial Sequence: Synthetic oligonucleotide
uaaacgggaccuuucccgu

SEQ ID NO: 2039966 - RNA, 19 nt, Artificial Sequence
  Description of Artificial Sequence: Synthetic oligonucleotide
gguuauaguuauuaaugga

SEQ ID NO: 2039967 - RNA, 19 nt, Artificial Sequence
  Description of Artificial Sequence: Synthetic oligonucleotide
cauggaacgauacgcagca

SEQ ID NO: 2039968 - RNA, 19 nt, Artificial Sequence
  Description of Artificial Sequence: Synthetic oligonucleotide
uggugugcuuguaacuggc

SEQ ID NO: 2039969 - RNA, 19 nt, Artificial Sequence
  Description of Artificial Sequence: Synthetic oligonucleotide
ucaacaccugcuuagccuu

SEQ ID NO: 2039970 - RNA, 19 nt, Artificial Sequence
  Description of Artificial Sequence: Synthetic oligonucleotide
uuaauggaccgaagcuucu

SEQ ID NO: 2039971 - RNA, 19 nt, Artificial Sequence
  Description of Artificial Sequence: Synthetic oligonucleotide
ucaguuuagguuguuguuu

SEQ ID NO: 2039972 - RNA, 19 nt, Artificial Sequence
  Description of Artificial Sequence: Synthetic oligonucleotide
ccuucuuucccucuuggcg

SEQ ID NO: 2039973 - RNA, 19 nt, Artificial Sequence
  Description of Artificial Sequence: Synthetic oligonucleotide
cauccaccccauuaugacc

SEQ ID NO: 2039974 - RNA, 19 nt, Artificial Sequence
  Description of Artificial Sequence: Synthetic oligonucleotide
ugugucuguugcccuacug

SEQ ID NO: 2039975 - RNA, 19 nt, Artificial Sequence
  Description of Artificial Sequence: Synthetic oligonucleotide
auucucguuguucucuaga

SEQ ID NO: 2039976 - RNA, 19 nt, Artificial Sequence
  Description of Artificial Sequence: Synthetic oligonucleotide
auaguagcuggaggcaaac

SEQ ID NO: 2039977 - RNA, 19 nt, Artificial Sequence
  Description of Artificial Sequence: Synthetic oligonucleotide
aacgguggauaucguccuc

SEQ ID NO: 2039978 - RNA, 19 nt, Artificial Sequence
  Description of Artificial Sequence: Synthetic oligonucleotide
cuuucccguucauggaacg

SEQ ID NO: 2039979 - RNA, 19 nt, Artificial Sequence
  Description of Artificial Sequence: Synthetic oligonucleotide
cuacccagcgaguuggcug

SEQ ID NO: 2039980 - RNA, 19 nt, Artificial Sequence
  Description of Artificial Sequence: Synthetic oligonucleotide
aacccggccauguuucaga

SEQ ID NO: 2039981 - RNA, 19 nt, Artificial Sequence
  Description of Artificial Sequence: Synthetic oligonucleotide
gaaaacccggccauguuuc

SEQ ID NO: 2039982 - RNA, 19 nt, Artificial Sequence
  Description of Artificial Sequence: Synthetic oligonucleotide
cuaugauuuucaacaccug

SEQ ID NO: 2039983 - RNA, 19 nt, Artificial Sequence
  Description of Artificial Sequence: Synthetic oligonucleotide
uggauaucguccucagagu

SEQ ID NO: 2039984 - RNA, 19 nt, Artificial Sequence
  Description of Artificial Sequence: Synthetic oligonucleotide
cugagugucccuagaguug

SEQ ID NO: 2039985 - RNA, 19 nt, Artificial Sequence
  Description of Artificial Sequence: Synthetic oligonucleotide
guugccaugcucugugcug

SEQ ID NO: 2039986 - RNA, 19 nt, Artificial Sequence
  Description of Artificial Sequence: Synthetic oligonucleotide
uauucucguuguucucuag

SEQ ID NO: 2039987 - RNA, 19 nt, Artificial Sequence
  Description of Artificial Sequence: Synthetic oligonucleotide
acuugauccugcaaggcca

SEQ ID NO: 2039988 - RNA, 19 nt, Artificial Sequence
  Description of Artificial Sequence: Synthetic oligonucleotide
guuccgaggugcuacccag

SEQ ID NO: 2039989 - RNA, 19 nt, Artificial Sequence
  Description of Artificial Sequence: Synthetic oligonucleotide
uagacgaaugugucgcagu

SEQ ID NO: 2039990 - RNA, 19 nt, Artificial Sequence
  Description of Artificial Sequence: Synthetic oligonucleotide
auaucagcccaagaugcug

SEQ ID NO: 2039991 - RNA, 19 nt, Artificial Sequence
  Description of Artificial Sequence: Synthetic oligonucleotide
uacccagcgaguuggcuga

SEQ ID NO: 2039992 - RNA, 19 nt, Artificial Sequence
  Description of Artificial Sequence: Synthetic oligonucleotide
cugugagggagccuuugcc

SEQ ID NO: 2039993 - RNA, 19 nt, Artificial Sequence
  Description of Artificial Sequence: Synthetic oligonucleotide
uguugcccuacugaugucu

SEQ ID NO: 2039994 - RNA, 19 nt, Artificial Sequence
  Description of Artificial Sequence: Synthetic oligonucleotide
agccuuugccacaggaccc

SEQ ID NO: 2039995 - RNA, 19 nt, Artificial Sequence
  Description of Artificial Sequence: Synthetic oligonucleotide
ugccguugacacugaaaag

SEQ ID NO: 2039996 - RNA, 19 nt, Artificial Sequence
  Description of Artificial Sequence: Synthetic oligonucleotide
cugagcugccuguugcugc

SEQ ID NO: 2039997 - RNA, 19 nt, Artificial Sequence
  Description of Artificial Sequence: Synthetic oligonucleotide
uccuacaggcugaggagac

SEQ ID NO: 2039998 - RNA, 19 nt, Artificial Sequence
  Description of Artificial Sequence: Synthetic oligonucleotide
cugccguugacacugaaaa

SEQ ID NO: 2039999 - RNA, 19 nt, Artificial Sequence
  Description of Artificial Sequence: Synthetic oligonucleotide
aucugacaucaaaacggcc

SEQ ID NO: 2040000 - RNA, 19 nt, Artificial Sequence
  Description of Artificial Sequence: Synthetic oligonucleotide
ugcccuacugaugucugag

SEQ ID NO: 2040001 - RNA, 19 nt, Artificial Sequence
  Description of Artificial Sequence: Synthetic oligonucleotide
uggcuaugauuuucaacac

SEQ ID NO: 2040002 - RNA, 19 nt, Artificial Sequence
  Description of Artificial Sequence: Synthetic oligonucleotide
guaacuggcuaugauuuuc

SEQ ID NO: 2040003 - RNA, 19 nt, Artificial Sequence
  Description of Artificial Sequence: Synthetic oligonucleotide
aguuuagguuguuguuuug

SEQ ID NO: 2040004 - RNA, 19 nt, Artificial Sequence
  Description of Artificial Sequence: Synthetic oligonucleotide
aaaacccggccauguuuca

SEQ ID NO: 2040005 - RNA, 19 nt, Artificial Sequence
  Description of Artificial Sequence: Synthetic oligonucleotide
agauuucaucucugcaacu

SEQ ID NO: 2040006 - RNA, 19 nt, Artificial Sequence
  Description of Artificial Sequence: Synthetic oligonucleotide
aguuauuaauggaccgaag

SEQ ID NO: 2040007 - RNA, 19 nt, Artificial Sequence
  Description of Artificial Sequence: Synthetic oligonucleotide
gaccgaacccacugccacg

SEQ ID NO: 2040008 - RNA, 19 nt, Artificial Sequence
  Description of Artificial Sequence: Synthetic oligonucleotide
cagaaccugccugagacug

SEQ ID NO: 2040009 - RNA, 19 nt, Artificial Sequence
  Description of Artificial Sequence: Synthetic oligonucleotide
uuauucucguuguucucua

SEQ ID NO: 2040010 - RNA, 19 nt, Artificial Sequence
  Description of Artificial Sequence: Synthetic oligonucleotide
uccuucuuucccucuuggc

SEQ ID NO: 2040011 - RNA, 19 nt, Artificial Sequence
  Description of Artificial Sequence: Synthetic oligonucleotide
aacugcuagaagccacaau

SEQ ID NO: 2040012 - RNA, 19 nt, Artificial Sequence
  Description of Artificial Sequence: Synthetic oligonucleotide
cugcacauguguuguaguc

SEQ ID NO: 2040013 - RNA, 19 nt, Artificial Sequence
  Description of Artificial Sequence: Synthetic oligonucleotide
ucuagacgaaugugucgca

SEQ ID NO: 2040014 - RNA, 19 nt, Artificial Sequence
  Description of Artificial Sequence: Synthetic oligonucleotide
gcuauuauuggccugcugu

SEQ ID NO: 2040015 - RNA, 19 nt, Artificial Sequence
  Description of Artificial Sequence: Synthetic oligonucleotide
cuuaauggaacgguggaua

SEQ ID NO: 2040016 - RNA, 19 nt, Artificial Sequence
  Description of Artificial Sequence: Synthetic oligonucleotide
ggcuaugauuuucaacacc

SEQ ID NO: 2040017 - RNA, 19 nt, Artificial Sequence
  Description of Artificial Sequence: Synthetic oligonucleotide
gugcuacccagcgaguugg

SEQ ID NO: 2040018 - RNA, 19 nt, Artificial Sequence
  Description of Artificial Sequence: Synthetic oligonucleotide
aauacugggugaggcucug

SEQ ID NO: 2040019 - RNA, 19 nt, Artificial Sequence
  Description of Artificial Sequence: Synthetic oligonucleotide
uuccaauauccauguuaug

SEQ ID NO: 2040020 - RNA, 19 nt, Artificial Sequence
  Description of Artificial Sequence: Synthetic oligonucleotide
acgguuccgaggugcuacc

SEQ ID NO: 2040021 - RNA, 19 nt, Artificial Sequence
  Description of Artificial Sequence: Synthetic oligonucleotide
aaauggaaguggugugcuu

SEQ ID NO: 2040022 - RNA, 19 nt, Artificial Sequence
  Description of Artificial Sequence: Synthetic oligonucleotide
uagugugagaagucaucaa

SEQ ID NO: 2040023 - RNA, 19 nt, Artificial Sequence
  Description of Artificial Sequence: Synthetic oligonucleotide
cuagacgaaugugucgcag

SEQ ID NO: 2040024 - RNA, 19 nt, Artificial Sequence
  Description of Artificial Sequence: Synthetic oligonucleotide
ggugcaauaguagcuggag

SEQ ID NO: 2040025 - RNA, 19 nt, Artificial Sequence
  Description of Artificial Sequence: Synthetic oligonucleotide
ugauccugcaaggccauuc

SEQ ID NO: 2040026 - RNA, 19 nt, Artificial Sequence
  Description of Artificial Sequence: Synthetic oligonucleotide
aaacccggccauguuucag

SEQ ID NO: 2040027 - RNA, 19 nt, Artificial Sequence
  Description of Artificial Sequence: Synthetic oligonucleotide
aacuggcuaugauuuucaa

SEQ ID NO: 2040028 - RNA, 19 nt, Artificial Sequence
  Description of Artificial Sequence: Synthetic oligonucleotide
caaacugcuagaagccaca

SEQ ID NO: 2040029 - RNA, 19 nt, Artificial Sequence
  Description of Artificial Sequence: Synthetic oligonucleotide
gguuuuauucucguuguuc

SEQ ID NO: 2040030 - RNA, 19 nt, Artificial Sequence
  Description of Artificial Sequence: Synthetic oligonucleotide
gacaucaaaacggcccuuc

SEQ ID NO: 2040031 - RNA, 19 nt, Artificial Sequence
  Description of Artificial Sequence: Synthetic oligonucleotide
cucauagugugagaaguca

SEQ ID NO: 2040032 - RNA, 19 nt, Artificial Sequence
  Description of Artificial Sequence: Synthetic oligonucleotide
ccggccauguuucagauuc

SEQ ID NO: 2040033 - RNA, 19 nt, Artificial Sequence
  Description of Artificial Sequence: Synthetic oligonucleotide
agacgaaugugucgcaguu

SEQ ID NO: 2040034 - RNA, 19 nt, Artificial Sequence
  Description of Artificial Sequence: Synthetic oligonucleotide
acauguguuguaguccaca

SEQ ID NO: 2040035 - RNA, 19 nt, Artificial Sequence
  Description of Artificial Sequence: Synthetic oligonucleotide
cuagaguugguucacuggu

SEQ ID NO: 2040036 - RNA, 19 nt, Artificial Sequence
  Description of Artificial Sequence: Synthetic oligonucleotide
guucauggaacgauacgca

SEQ ID NO: 2040037 - RNA, 19 nt, Artificial Sequence
  Description of Artificial Sequence: Synthetic oligonucleotide
uguaacuggcuaugauuuu

SEQ ID NO: 2040038 - RNA, 19 nt, Artificial Sequence
  Description of Artificial Sequence: Synthetic oligonucleotide
ugaugaaaacccggccaug

SEQ ID NO: 2040039 - RNA, 19 nt, Artificial Sequence
  Description of Artificial Sequence: Synthetic oligonucleotide
uggguuggcugaccuauau

SEQ ID NO: 2040040 - RNA, 19 nt, Artificial Sequence
  Description of Artificial Sequence: Synthetic oligonucleotide
uccucagaguagcucuuaa

SEQ ID NO: 2040041 - RNA, 19 nt, Artificial Sequence
  Description of Artificial Sequence: Synthetic oligonucleotide
cuauucgggaacguccuuc

SEQ ID NO: 2040042 - RNA, 19 nt, Artificial Sequence
  Description of Artificial Sequence: Synthetic oligonucleotide
accugcacauguguuguag

SEQ ID NO: 2040043 - RNA, 19 nt, Artificial Sequence
  Description of Artificial Sequence: Synthetic oligonucleotide
gaacccacugccacgguuc

SEQ ID NO: 2040044 - RNA, 19 nt, Artificial Sequence
  Description of Artificial Sequence: Synthetic oligonucleotide
cguucauggaacgauacgc

SEQ ID NO: 2040045 - RNA, 19 nt, Artificial Sequence
  Description of Artificial Sequence: Synthetic oligonucleotide
auggaccgaagcuucucca

SEQ ID NO: 2040046 - RNA, 19 nt, Artificial Sequence
  Description of Artificial Sequence: Synthetic oligonucleotide
ucguuguucucuagacgaa

SEQ ID NO: 2040047 - RNA, 19 nt, Artificial Sequence
  Description of Artificial Sequence: Synthetic oligonucleotide
uagaguugguucacugguu

SEQ ID NO: 2040048 - RNA, 19 nt, Artificial Sequence
  Description of Artificial Sequence: Synthetic oligonucleotide
cuuguaacuggcuaugauu

SEQ ID NO: 2040049 - RNA, 19 nt, Artificial Sequence
  Description of Artificial Sequence: Synthetic oligonucleotide
agaaguguccacugccguu

SEQ ID NO: 2040050 - RNA, 19 nt, Artificial Sequence
  Description of Artificial Sequence: Synthetic oligonucleotide
uggaccgaagcuucuccaa

SEQ ID NO: 2040051 - RNA, 19 nt, Artificial Sequence
  Description of Artificial Sequence: Synthetic oligonucleotide
ucaaaacggcccuuccauu

SEQ ID NO: 2040052 - RNA, 19 nt, Artificial Sequence
  Description of Artificial Sequence: Synthetic oligonucleotide
caguuggcuauucgggaac

SEQ ID NO: 2040053 - RNA, 19 nt, Artificial Sequence
  Description of Artificial Sequence: Synthetic oligonucleotide
auuuugaaccaaagccugu

SEQ ID NO: 2040054 - RNA, 19 nt, Artificial Sequence
  Description of Artificial Sequence: Synthetic oligonucleotide
gggaacguccuucacaaaa

SEQ ID NO: 2040055 - RNA, 19 nt, Artificial Sequence
  Description of Artificial Sequence: Synthetic oligonucleotide
accuauauuuugaaccaaa

SEQ ID NO: 2040056 - RNA, 19 nt, Artificial Sequence
  Description of Artificial Sequence: Synthetic oligonucleotide
aguguccacugccguugac

SEQ ID NO: 2040057 - RNA, 19 nt, Artificial Sequence
  Description of Artificial Sequence: Synthetic oligonucleotide
agacuguccugcuccauua

SEQ ID NO: 2040058 - RNA, 19 nt, Artificial Sequence
  Description of Artificial Sequence: Synthetic oligonucleotide
aaacugcuagaagccacaa

SEQ ID NO: 2040059 - RNA, 19 nt, Artificial Sequence
  Description of Artificial Sequence: Synthetic oligonucleotide
acaccugcuuagccuuuuc

SEQ ID NO: 2040060 - RNA, 19 nt, Artificial Sequence
  Description of Artificial Sequence: Synthetic oligonucleotide
uuucccguucauggaacga

SEQ ID NO: 2040061 - RNA, 19 nt, Artificial Sequence
  Description of Artificial Sequence: Synthetic oligonucleotide
aguagcucuuaaugaugaa

SEQ ID NO: 2040062 - RNA, 19 nt, Artificial Sequence
  Description of Artificial Sequence: Synthetic oligonucleotide
uucccguucauggaacgau

SEQ ID NO: 2040063 - RNA, 19 nt, Artificial Sequence
  Description of Artificial Sequence: Synthetic oligonucleotide
gcuaugauuuucaacaccu

SEQ ID NO: 2040064 - RNA, 19 nt, Artificial Sequence
  Description of Artificial Sequence: Synthetic oligonucleotide
guucucuagacgaaugugu

SEQ ID NO: 2040065 - RNA, 19 nt, Artificial Sequence
  Description of Artificial Sequence: Synthetic oligonucleotide
uaauggaacgguggauauc

SEQ ID NO: 2040066 - RNA, 19 nt, Artificial Sequence
  Description of Artificial Sequence: Synthetic oligonucleotide
uaauggaccgaagcuucuc

SEQ ID NO: 2040067 - RNA, 19 nt, Artificial Sequence
  Description of Artificial Sequence: Synthetic oligonucleotide
uuccgaggugcuacccagc

SEQ ID NO: 2040068 - RNA, 19 nt, Artificial Sequence
  Description of Artificial Sequence: Synthetic oligonucleotide
gcacauguguuguagucca

SEQ ID NO: 2040069 - RNA, 19 nt, Artificial Sequence
  Description of Artificial Sequence: Synthetic oligonucleotide
acggccuugacgcuccuuu

SEQ ID NO: 2040070 - RNA, 19 nt, Artificial Sequence
  Description of Artificial Sequence: Synthetic oligonucleotide
ugccacgguuccgaggugc

SEQ ID NO: 2040071 - RNA, 19 nt, Artificial Sequence
  Description of Artificial Sequence: Synthetic oligonucleotide
gcugaccuauauuuugaac

SEQ ID NO: 2040072 - RNA, 19 nt, Artificial Sequence
  Description of Artificial Sequence: Synthetic oligonucleotide
cacgguuccgaggugcuac

SEQ ID NO: 2040073 - RNA, 19 nt, Artificial Sequence
  Description of Artificial Sequence: Synthetic oligonucleotide
ucccguucauggaacgaua

SEQ ID NO: 2040074 - RNA, 19 nt, Artificial Sequence
  Description of Artificial Sequence: Synthetic oligonucleotide
aaacgggaccuuucccguu

SEQ ID NO: 2040075 - RNA, 19 nt, Artificial Sequence
  Description of Artificial Sequence: Synthetic oligonucleotide
uuguaguccacagcagauu

SEQ ID NO: 2040076 - RNA, 19 nt, Artificial Sequence
  Description of Artificial Sequence: Synthetic oligonucleotide
uauuggccugcuguccuac

SEQ ID NO: 2040077 - RNA, 19 nt, Artificial Sequence
  Description of Artificial Sequence: Synthetic oligonucleotide
aacggcccuuccauuuguc

SEQ ID NO: 2040078 - RNA, 19 nt, Artificial Sequence
  Description of Artificial Sequence: Synthetic oligonucleotide
gacuguccugcuccauuac

SEQ ID NO: 2040079 - RNA, 19 nt, Artificial Sequence
  Description of Artificial Sequence: Synthetic oligonucleotide
gugcuuguaacuggcuaug

SEQ ID NO: 2040080 - RNA, 19 nt, Artificial Sequence
  Description of Artificial Sequence: Synthetic oligonucleotide
gguuggcugaccuauauuu

SEQ ID NO: 2040081 - RNA, 19 nt, Artificial Sequence
  Description of Artificial Sequence: Synthetic oligonucleotide
gaccgaagcuucuccaaua

SEQ ID NO: 2040082 - RNA, 19 nt, Artificial Sequence
  Description of Artificial Sequence: Synthetic oligonucleotide
ggugcuacccagcgaguug

SEQ ID NO: 2040083 - RNA, 19 nt, Artificial Sequence
  Description of Artificial Sequence: Synthetic oligonucleotide
ggcacuuccugaguguccc

SEQ ID NO: 2040084 - RNA, 19 nt, Artificial Sequence
  Description of Artificial Sequence: Synthetic oligonucleotide
ggacccuuauuaucccaag

SEQ ID NO: 2040085 - RNA, 19 nt, Artificial Sequence
  Description of Artificial Sequence: Synthetic oligonucleotide
uugcccuacugaugucuga

SEQ ID NO: 2040086 - RNA, 19 nt, Artificial Sequence
  Description of Artificial Sequence: Synthetic oligonucleotide
uuauuggccugcuguccua

SEQ ID NO: 2040087 - RNA, 19 nt, Artificial Sequence
  Description of Artificial Sequence: Synthetic oligonucleotide
augaaaacccggccauguu

SEQ ID NO: 2040088 - RNA, 19 nt, Artificial Sequence
  Description of Artificial Sequence: Synthetic oligonucleotide
guuuuggaggugcaauagu

SEQ ID NO: 2040089 - RNA, 19 nt, Artificial Sequence
  Description of Artificial Sequence: Synthetic oligonucleotide
ggccugcuguccuacaggc

SEQ ID NO: 2040090 - RNA, 19 nt, Artificial Sequence
  Description of Artificial Sequence: Synthetic oligonucleotide
guugcccuacugaugucug

SEQ ID NO: 2040091 - RNA, 19 nt, Artificial Sequence
  Description of Artificial Sequence: Synthetic oligonucleotide
uuucccucuuggcguuucu

SEQ ID NO: 2040092 - RNA, 19 nt, Artificial Sequence
  Description of Artificial Sequence: Synthetic oligonucleotide
agaccccuggguuggcuga

SEQ ID NO: 2040093 - RNA, 19 nt, Artificial Sequence
  Description of Artificial Sequence: Synthetic oligonucleotide
gacccuuauuaucccaagu

SEQ ID NO: 2040094 - RNA, 19 nt, Artificial Sequence
  Description of Artificial Sequence: Synthetic oligonucleotide
gcuccauuacccauccacc

SEQ ID NO: 2040095 - RNA, 19 nt, Artificial Sequence
  Description of Artificial Sequence: Synthetic oligonucleotide
gcaaacugcuagaagccac

SEQ ID NO: 2040096 - RNA, 19 nt, Artificial Sequence
  Description of Artificial Sequence: Synthetic oligonucleotide
cacauguguuguaguccac

SEQ ID NO: 2040097 - RNA, 19 nt, Artificial Sequence
  Description of Artificial Sequence: Synthetic oligonucleotide
ccauuaugaccgaacccac

SEQ ID NO: 2040098 - RNA, 19 nt, Artificial Sequence
  Description of Artificial Sequence: Synthetic oligonucleotide
gauacgcagcauccagucu

SEQ ID NO: 2040099 - RNA, 19 nt, Artificial Sequence
  Description of Artificial Sequence: Synthetic oligonucleotide
gaccuauauuuugaaccaa

SEQ ID NO: 2040100 - RNA, 19 nt, Artificial Sequence
  Description of Artificial Sequence: Synthetic oligonucleotide
acgauacgcagcauccagu

SEQ ID NO: 2040101 - RNA, 19 nt, Artificial Sequence
  Description of Artificial Sequence: Synthetic oligonucleotide
ggcgguggaagacuugauc

SEQ ID NO: 2040102 - RNA, 19 nt, Artificial Sequence
  Description of Artificial Sequence: Synthetic oligonucleotide
ccguucauggaacgauacg

SEQ ID NO: 2040103 - RNA, 19 nt, Artificial Sequence
  Description of Artificial Sequence: Synthetic oligonucleotide
ccugcuccauuacccaucc

SEQ ID NO: 2040104 - RNA, 19 nt, Artificial Sequence
  Description of Artificial Sequence: Synthetic oligonucleotide
gccguugacacugaaaagu

SEQ ID NO: 2040105 - RNA, 19 nt, Artificial Sequence
  Description of Artificial Sequence: Synthetic oligonucleotide
guggaggcggaggcgaaug

SEQ ID NO: 2040106 - RNA, 19 nt, Artificial Sequence
  Description of Artificial Sequence: Synthetic oligonucleotide
aggugcaauaguagcugga

SEQ ID NO: 2040107 - RNA, 19 nt, Artificial Sequence
  Description of Artificial Sequence: Synthetic oligonucleotide
ccccauuaugaccgaaccc

SEQ ID NO: 2040108 - RNA, 19 nt, Artificial Sequence
  Description of Artificial Sequence: Synthetic oligonucleotide
ccauguuucagauuccagu

SEQ ID NO: 2040109 - RNA, 19 nt, Artificial Sequence
  Description of Artificial Sequence: Synthetic oligonucleotide
cagcgaguuggcugagcug

SEQ ID NO: 2040110 - RNA, 19 nt, Artificial Sequence
  Description of Artificial Sequence: Synthetic oligonucleotide
caaaacggcccuuccauuu

SEQ ID NO: 2040111 - RNA, 19 nt, Artificial Sequence
  Description of Artificial Sequence: Synthetic oligonucleotide
cauuaugaccgaacccacu

SEQ ID NO: 2040112 - RNA, 19 nt, Artificial Sequence
  Description of Artificial Sequence: Synthetic oligonucleotide
ccuuucccguucauggaac

SEQ ID NO: 2040113 - RNA, 19 nt, Artificial Sequence
  Description of Artificial Sequence: Synthetic oligonucleotide
ggcuugcuagcaauaucag

SEQ ID NO: 2040114 - RNA, 19 nt, Artificial Sequence
  Description of Artificial Sequence: Synthetic oligonucleotide
augaccgaacccacugcca

SEQ ID NO: 2040115 - RNA, 19 nt, Artificial Sequence
  Description of Artificial Sequence: Synthetic oligonucleotide
acugccguugacacugaaa

SEQ ID NO: 2040116 - RNA, 19 nt, Artificial Sequence
  Description of Artificial Sequence: Synthetic oligonucleotide
uccaccccauuaugaccga

SEQ ID NO: 2040117 - RNA, 19 nt, Artificial Sequence
  Description of Artificial Sequence: Synthetic oligonucleotide
cccguucauggaacgauac

SEQ ID NO: 2040118 - RNA, 19 nt, Artificial Sequence
  Description of Artificial Sequence: Synthetic oligonucleotide
cuguugcugcaccgagagc

SEQ ID NO: 2040119 - RNA, 19 nt, Artificial Sequence
  Description of Artificial Sequence: Synthetic oligonucleotide
guuguaguccacagcagau

SEQ ID NO: 2040120 - RNA, 19 nt, Artificial Sequence
  Description of Artificial Sequence: Synthetic oligonucleotide
ucuuggcguuucucauagu

SEQ ID NO: 2040121 - RNA, 19 nt, Artificial Sequence
  Description of Artificial Sequence: Synthetic oligonucleotide
cccuagaguugguucacug

SEQ ID NO: 2040122 - RNA, 19 nt, Artificial Sequence
  Description of Artificial Sequence: Synthetic oligonucleotide
guaaguaaacgggaccuuu

SEQ ID NO: 2040123 - RNA, 19 nt, Artificial Sequence
  Description of Artificial Sequence: Synthetic oligonucleotide
gcaguuggcuauucgggaa

SEQ ID NO: 2040124 - RNA, 19 nt, Artificial Sequence
  Description of Artificial Sequence: Synthetic oligonucleotide
ucccuagaguugguucacu

SEQ ID NO: 2040125 - RNA, 19 nt, Artificial Sequence
  Description of Artificial Sequence: Synthetic oligonucleotide
gagacuguccugcuccauu

SEQ ID NO: 2040126 - RNA, 19 nt, Artificial Sequence
  Description of Artificial Sequence: Synthetic oligonucleotide
gguuccgaggugcuaccca

SEQ ID NO: 2040127 - RNA, 19 nt, Artificial Sequence
  Description of Artificial Sequence: Synthetic oligonucleotide
acccggccauguuucagau

SEQ ID NO: 2040128 - RNA, 19 nt, Artificial Sequence
  Description of Artificial Sequence: Synthetic oligonucleotide
cgauacgcagcauccaguc

SEQ ID NO: 2040129 - RNA, 19 nt, Artificial Sequence
  Description of Artificial Sequence: Synthetic oligonucleotide
gccauguuucagauuccag

SEQ ID NO: 2040130 - RNA, 19 nt, Artificial Sequence
  Description of Artificial Sequence: Synthetic oligonucleotide
agccuuuuccagaggcacu

SEQ ID NO: 2040131 - RNA, 19 nt, Artificial Sequence
  Description of Artificial Sequence: Synthetic oligonucleotide
ccugugagggagccuuugc

SEQ ID NO: 2040132 - RNA, 19 nt, Artificial Sequence
  Description of Artificial Sequence: Synthetic oligonucleotide
gucccuagaguugguucac

SEQ ID NO: 2040133 - RNA, 19 nt, Artificial Sequence
  Description of Artificial Sequence: Synthetic oligonucleotide
acgggaccuuucccguuca

SEQ ID NO: 2040134 - RNA, 19 nt, Artificial Sequence
  Description of Artificial Sequence: Synthetic oligonucleotide
ccauuacccauccacccca

SEQ ID NO: 2040135 - RNA, 19 nt, Artificial Sequence
  Description of Artificial Sequence: Synthetic oligonucleotide
guuucagauuccagucgaa

SEQ ID NO: 2040136 - RNA, 19 nt, Artificial Sequence
  Description of Artificial Sequence: Synthetic oligonucleotide
aggcggaggcgaauggcug

SEQ ID NO: 2040137 - RNA, 19 nt, Artificial Sequence
  Description of Artificial Sequence: Synthetic oligonucleotide
agaaccugccugagacugu

SEQ ID NO: 2040138 - RNA, 19 nt, Artificial Sequence
  Description of Artificial Sequence: Synthetic oligonucleotide
gaggcggaggcgaauggcu

SEQ ID NO: 2040139 - RNA, 19 nt, Artificial Sequence
  Description of Artificial Sequence: Synthetic oligonucleotide
ggaggcggaggcgaauggc

SEQ ID NO: 2040140 - RNA, 19 nt, Artificial Sequence
  Description of Artificial Sequence: Synthetic oligonucleotide
ggaggcgaauggcuguguc

SEQ ID NO: 2040141 - RNA, 19 nt, Artificial Sequence
  Description of Artificial Sequence: Synthetic oligonucleotide
ggcugaccuauauuuugaa

SEQ ID NO: 2040142 - RNA, 19 nt, Artificial Sequence
  Description of Artificial Sequence: Synthetic oligonucleotide
gcccuacugaugucugagc

SEQ ID NO: 2040143 - RNA, 19 nt, Artificial Sequence
  Description of Artificial Sequence: Synthetic oligonucleotide
cuguugcccuacugauguc

SEQ ID NO: 2040144 - RNA, 19 nt, Artificial Sequence
  Description of Artificial Sequence: Synthetic oligonucleotide
ccaagaugcugguuuugga

SEQ ID NO: 2040145 - RNA, 19 nt, Artificial Sequence
  Description of Artificial Sequence: Synthetic oligonucleotide
cagaaguguccacugccgu

SEQ ID NO: 2040146 - RNA, 19 nt, Artificial Sequence
  Description of Artificial Sequence: Synthetic oligonucleotide
ggccauguuucagauucca

SEQ ID NO: 2040147 - RNA, 19 nt, Artificial Sequence
  Description of Artificial Sequence: Synthetic oligonucleotide
cagcccaagaugcugguuu

SEQ ID NO: 2040148 - RNA, 19 nt, Artificial Sequence
  Description of Artificial Sequence: Synthetic oligonucleotide
guugguucacugguuuuau

SEQ ID NO: 2040149 - RNA, 19 nt, Artificial Sequence
  Description of Artificial Sequence: Synthetic oligonucleotide
cugaggagaccccuggguu

SEQ ID NO: 2040150 - RNA, 19 nt, Artificial Sequence
  Description of Artificial Sequence: Synthetic oligonucleotide
cccacggccuugacgcucc

SEQ ID NO: 2040151 - RNA, 19 nt, Artificial Sequence
  Description of Artificial Sequence: Synthetic oligonucleotide
ggggcgguggaagacuuga

SEQ ID NO: 2040152 - RNA, 19 nt, Artificial Sequence
  Description of Artificial Sequence: Synthetic oligonucleotide
ccguugacacugaaaagua

SEQ ID NO: 2040153 - RNA, 19 nt, Artificial Sequence
  Description of Artificial Sequence: Synthetic oligonucleotide
ggcguuucucauaguguga

SEQ ID NO: 2040154 - RNA, 19 nt, Artificial Sequence
  Description of Artificial Sequence: Synthetic oligonucleotide
ccugagugucccuagaguu

SEQ ID NO: 2040155 - RNA, 19 nt, Artificial Sequence
  Description of Artificial Sequence: Synthetic oligonucleotide
gcuuguaacuggcuaugau

SEQ ID NO: 2040156 - RNA, 19 nt, Artificial Sequence
  Description of Artificial Sequence: Synthetic oligonucleotide
cugcaccagauguuauacu

SEQ ID NO: 2040157 - RNA, 19 nt, Artificial Sequence
  Description of Artificial Sequence: Synthetic oligonucleotide
gaccccuggguuggcugac

SEQ ID NO: 2040158 - RNA, 19 nt, Artificial Sequence
  Description of Artificial Sequence: Synthetic oligonucleotide
ccuacaggcugaggagacc

SEQ ID NO: 2040159 - RNA, 19 nt, Artificial Sequence
  Description of Artificial Sequence: Synthetic oligonucleotide
ggaccacacaccugcacau

SEQ ID NO: 2040160 - RNA, 19 nt, Artificial Sequence
  Description of Artificial Sequence: Synthetic oligonucleotide
gccauucuuggucuucagu

SEQ ID NO: 2040161 - RNA, 19 nt, Artificial Sequence
  Description of Artificial Sequence: Synthetic oligonucleotide
cugccuguugcugcaccga

SEQ ID NO: 2040162 - RNA, 19 nt, Artificial Sequence
  Description of Artificial Sequence: Synthetic oligonucleotide
ggcuauucgggaacguccu

SEQ ID NO: 2040163 - RNA, 19 nt, Artificial Sequence
  Description of Artificial Sequence: Synthetic oligonucleotide
gcaccagauguuauacuua

SEQ ID NO: 2040164 - RNA, 19 nt, Artificial Sequence
  Description of Artificial Sequence: Synthetic oligonucleotide
auggaacgauacgcagcau

SEQ ID NO: 2040165 - RNA, 19 nt, Artificial Sequence
  Description of Artificial Sequence: Synthetic oligonucleotide
cgcaguuggcuauucggga

SEQ ID NO: 2040166 - RNA, 19 nt, Artificial Sequence
  Description of Artificial Sequence: Synthetic oligonucleotide
cguugacacugaaaaguaa

SEQ ID NO: 2040167 - RNA, 19 nt, Artificial Sequence
  Description of Artificial Sequence: Synthetic oligonucleotide
gugucgcaguuggcuauuc

SEQ ID NO: 2040168 - RNA, 19 nt, Artificial Sequence
  Description of Artificial Sequence: Synthetic oligonucleotide
gccugagacuguccugcuc

SEQ ID NO: 2040169 - RNA, 19 nt, Artificial Sequence
  Description of Artificial Sequence: Synthetic oligonucleotide
gcccaagaugcugguuuug

SEQ ID NO: 2040170 - RNA, 19 nt, Artificial Sequence
  Description of Artificial Sequence: Synthetic oligonucleotide
cugugcugcaccagauguu

SEQ ID NO: 2040171 - RNA, 19 nt, Artificial Sequence
  Description of Artificial Sequence: Synthetic oligonucleotide
gcggaggcgaauggcugug

SEQ ID NO: 2040172 - RNA, 19 nt, Artificial Sequence
  Description of Artificial Sequence: Synthetic oligonucleotide
cuggguuggcugaccuaua

SEQ ID NO: 2040173 - RNA, 19 nt, Artificial Sequence
  Description of Artificial Sequence: Synthetic oligonucleotide
ccagcgaguuggcugagcu

SEQ ID NO: 2040174 - RNA, 19 nt, Artificial Sequence
  Description of Artificial Sequence: Synthetic oligonucleotide
acccagcgaguuggcugag

SEQ ID NO: 2040175 - RNA, 19 nt, Artificial Sequence
  Description of Artificial Sequence: Synthetic oligonucleotide
cauuacccauccaccccau

SEQ ID NO: 2040176 - RNA, 19 nt, Artificial Sequence
  Description of Artificial Sequence: Synthetic oligonucleotide
gcgaguuggcugagcugcc

SEQ ID NO: 2040177 - RNA, 19 nt, Artificial Sequence
  Description of Artificial Sequence: Synthetic oligonucleotide
ccucuuggcguuucucaua

SEQ ID NO: 2040178 - RNA, 19 nt, Artificial Sequence
  Description of Artificial Sequence: Synthetic oligonucleotide
ggucuucaguuuagguugu

SEQ ID NO: 2040179 - RNA, 19 nt, Artificial Sequence
  Description of Artificial Sequence: Synthetic oligonucleotide
cggccauguuucagauucc

SEQ ID NO: 2040180 - RNA, 19 nt, Artificial Sequence
  Description of Artificial Sequence: Synthetic oligonucleotide
guuggcugagcugccuguu

SEQ ID NO: 2040181 - RNA, 19 nt, Artificial Sequence
  Description of Artificial Sequence: Synthetic oligonucleotide
cugcuccauuacccaucca

SEQ ID NO: 2040182 - RNA, 19 nt, Artificial Sequence
  Description of Artificial Sequence: Synthetic oligonucleotide
ggcgaauggcugugucugu

SEQ ID NO: 2040183 - RNA, 19 nt, Artificial Sequence
  Description of Artificial Sequence: Synthetic oligonucleotide
ccuggguuggcugaccuau

SEQ ID NO: 2040184 - RNA, 19 nt, Artificial Sequence
  Description of Artificial Sequence: Synthetic oligonucleotide
ggguuggcugaccuauauu

SEQ ID NO: 2040185 - RNA, 19 nt, Artificial Sequence
  Description of Artificial Sequence: Synthetic oligonucleotide
gagugucccuagaguuggu

SEQ ID NO: 2040186 - RNA, 19 nt, Artificial Sequence
  Description of Artificial Sequence: Synthetic oligonucleotide
cccagcgaguuggcugagc

SEQ ID NO: 2040187 - RNA, 19 nt, Artificial Sequence
  Description of Artificial Sequence: Synthetic oligonucleotide
ccagaaccugccugagacu

SEQ ID NO: 2040188 - RNA, 19 nt, Artificial Sequence
  Description of Artificial Sequence: Synthetic oligonucleotide
gcuacccagcgaguuggcu

SEQ ID NO: 2040189 - RNA, 19 nt, Artificial Sequence
  Description of Artificial Sequence: Synthetic oligonucleotide
gugcugcaccagauguuau

SEQ ID NO: 2040190 - RNA, 19 nt, Artificial Sequence
  Description of Artificial Sequence: Synthetic oligonucleotide
cggcccuuccauuuguccu

SEQ ID NO: 2040191 - RNA, 19 nt, Artificial Sequence
  Description of Artificial Sequence: Synthetic oligonucleotide
gcuauucgggaacguccuu

SEQ ID NO: 2040192 - RNA, 19 nt, Artificial Sequence
  Description of Artificial Sequence: Synthetic oligonucleotide
gcgaauggcugugucuguu

SEQ ID NO: 2040193 - RNA, 19 nt, Artificial Sequence
  Description of Artificial Sequence: Synthetic oligonucleotide
gccacgguuccgaggugcu

SEQ ID NO: 2040194 - RNA, 19 nt, Artificial Sequence
  Description of Artificial Sequence: Synthetic oligonucleotide
cccuggguuggcugaccua

SEQ ID NO: 2040195 - RNA, 19 nt, Artificial Sequence
  Description of Artificial Sequence: Synthetic oligonucleotide
ccaccccauuaugaccgaa

SEQ ID NO: 2040196 - RNA, 19 nt, Artificial Sequence
  Description of Artificial Sequence: Synthetic oligonucleotide
cgaacccacugccacgguu

SEQ ID NO: 2040197 - RNA, 19 nt, Artificial Sequence
  Description of Artificial Sequence: Synthetic oligonucleotide
gggcgguggaagacuugau

SEQ ID NO: 2040198 - RNA, 19 nt, Artificial Sequence
  Description of Artificial Sequence: Synthetic oligonucleotide
cgggaacguccuucacaaa

SEQ ID NO: 2040199 - RNA, 19 nt, Artificial Sequence
  Description of Artificial Sequence: Synthetic oligonucleotide
ccacgguuccgaggugcua

SEQ ID NO: 2040200 - RNA, 19 nt, Artificial Sequence
  Description of Artificial Sequence: Synthetic oligonucleotide
cacggccuugacgcuccuu

SEQ ID NO: 2040201 - RNA, 19 nt, Artificial Sequence
  Description of Artificial Sequence: Synthetic oligonucleotide
cccggccauguuucagauu

SEQ ID NO: 2040202 - RNA, 19 nt, Artificial Sequence
  Description of Artificial Sequence: Synthetic oligonucleotide
ccgaacccacugccacggu

SEQ ID NO: 2040203 - RNA, 19 nt, Artificial Sequence
  Description of Artificial Sequence: Synthetic oligonucleotide
cggaggcgaauggcugugu

SEQ ID NO: 2040204 - RNA, 19 nt, Artificial Sequence
  Description of Artificial Sequence: Synthetic oligonucleotide
ccacggccuugacgcuccu

SEQ ID NO: 2040205 - RNA, 19 nt, Artificial Sequence
  Description of Artificial Sequence: Synthetic oligonucleotide
cgggaccuuucccguucau

SEQ ID NO: 2040206 - RNA, 19 nt, Artificial Sequence
  Description of Artificial Sequence: Synthetic oligonucleotide
uauuguuacaaccugagcc

SEQ ID NO: 2040207 - RNA, 19 nt, Artificial Sequence
  Description of Artificial Sequence: Synthetic oligonucleotide
ugugguaucgcucauaagc

SEQ ID NO: 2040208 - RNA, 19 nt, Artificial Sequence
  Description of Artificial Sequence: Synthetic oligonucleotide
aaagucacgaggcucaugg

SEQ ID NO: 2040209 - RNA, 19 nt, Artificial Sequence
  Description of Artificial Sequence: Synthetic oligonucleotide
gaugcuuuuaauuagugug

SEQ ID NO: 2040210 - RNA, 19 nt, Artificial Sequence
  Description of Artificial Sequence: Synthetic oligonucleotide
guugguaugguucagagug

SEQ ID NO: 2040211 - RNA, 19 nt, Artificial Sequence
  Description of Artificial Sequence: Synthetic oligonucleotide
ucuaauggcagaagcaagg

SEQ ID NO: 2040212 - RNA, 19 nt, Artificial Sequence
  Description of Artificial Sequence: Synthetic oligonucleotide
uguauuacaguugguaugg

SEQ ID NO: 2040213 - RNA, 19 nt, Artificial Sequence
  Description of Artificial Sequence: Synthetic oligonucleotide
cuuuuaauuagugugacac

SEQ ID NO: 2040214 - RNA, 19 nt, Artificial Sequence
  Description of Artificial Sequence: Synthetic oligonucleotide
aaauucucaacgccucagc

SEQ ID NO: 2040215 - RNA, 19 nt, Artificial Sequence
  Description of Artificial Sequence: Synthetic oligonucleotide
aaguaaggccgccaguggc

SEQ ID NO: 2040216 - RNA, 19 nt, Artificial Sequence
  Description of Artificial Sequence: Synthetic oligonucleotide
uuuaauuagugugacaccu

SEQ ID NO: 2040217 - RNA, 19 nt, Artificial Sequence
  Description of Artificial Sequence: Synthetic oligonucleotide
aacgagaggucuuugccuc

SEQ ID NO: 2040218 - RNA, 19 nt, Artificial Sequence
  Description of Artificial Sequence: Synthetic oligonucleotide
aguagaugcuuuuaauuag

SEQ ID NO: 2040219 - RNA, 19 nt, Artificial Sequence
  Description of Artificial Sequence: Synthetic oligonucleotide
ucgcucauaagccucagag

SEQ ID NO: 2040220 - RNA, 19 nt, Artificial Sequence
  Description of Artificial Sequence: Synthetic oligonucleotide
auuacaguugguaugguuc

SEQ ID NO: 2040221 - RNA, 19 nt, Artificial Sequence
  Description of Artificial Sequence: Synthetic oligonucleotide
auucucaacgccucagccc

SEQ ID NO: 2040222 - RNA, 19 nt, Artificial Sequence
  Description of Artificial Sequence: Synthetic oligonucleotide
aggguugucugcuagggcg

SEQ ID NO: 2040223 - RNA, 19 nt, Artificial Sequence
  Description of Artificial Sequence: Synthetic oligonucleotide
auuguuacaaccugagcca

SEQ ID NO: 2040224 - RNA, 19 nt, Artificial Sequence
  Description of Artificial Sequence: Synthetic oligonucleotide
auaagccucagagaagucc

SEQ ID NO: 2040225 - RNA, 19 nt, Artificial Sequence
  Description of Artificial Sequence: Synthetic oligonucleotide
aauggggucucauccuugg

SEQ ID NO: 2040226 - RNA, 19 nt, Artificial Sequence
  Description of Artificial Sequence: Synthetic oligonucleotide
ugcaauaccuucaucuucu

SEQ ID NO: 2040227 - RNA, 19 nt, Artificial Sequence
  Description of Artificial Sequence: Synthetic oligonucleotide
cuuuucuaauggcagaagc

SEQ ID NO: 2040228 - RNA, 19 nt, Artificial Sequence
  Description of Artificial Sequence: Synthetic oligonucleotide
uaagccucagagaaguccc

SEQ ID NO: 2040229 - RNA, 19 nt, Artificial Sequence
  Description of Artificial Sequence: Synthetic oligonucleotide
uuuuaauuagugugacacc

SEQ ID NO: 2040230 - RNA, 19 nt, Artificial Sequence
  Description of Artificial Sequence: Synthetic oligonucleotide
auuagugugacaccucugu

SEQ ID NO: 2040231 - RNA, 19 nt, Artificial Sequence
  Description of Artificial Sequence: Synthetic oligonucleotide
ugguuuucaguccggagcc

SEQ ID NO: 2040232 - RNA, 19 nt, Artificial Sequence
  Description of Artificial Sequence: Synthetic oligonucleotide
ggcgcuugcgcuuugaugg

SEQ ID NO: 2040233 - RNA, 19 nt, Artificial Sequence
  Description of Artificial Sequence: Synthetic oligonucleotide
ucauucucaccacuggagc

SEQ ID NO: 2040234 - RNA, 19 nt, Artificial Sequence
  Description of Artificial Sequence: Synthetic oligonucleotide
cuuucaucugucaucugcc

SEQ ID NO: 2040235 - RNA, 19 nt, Artificial Sequence
  Description of Artificial Sequence: Synthetic oligonucleotide
accaccaaagucacgaggc

SEQ ID NO: 2040236 - RNA, 19 nt, Artificial Sequence
  Description of Artificial Sequence: Synthetic oligonucleotide
uucuaauggcagaagcaag

SEQ ID NO: 2040237 - RNA, 19 nt, Artificial Sequence
  Description of Artificial Sequence: Synthetic oligonucleotide
ucuguauuacaguugguau

SEQ ID NO: 2040238 - RNA, 19 nt, Artificial Sequence
  Description of Artificial Sequence: Synthetic oligonucleotide
uccaugaaauucucaacgc

SEQ ID NO: 2040239 - RNA, 19 nt, Artificial Sequence
  Description of Artificial Sequence: Synthetic oligonucleotide
cuacucucucaguagaugc

SEQ ID NO: 2040240 - RNA, 19 nt, Artificial Sequence
  Description of Artificial Sequence: Synthetic oligonucleotide
uucucaacgccucagcccu

SEQ ID NO: 2040241 - RNA, 19 nt, Artificial Sequence
  Description of Artificial Sequence: Synthetic oligonucleotide
uacaaccugagccaacccc

SEQ ID NO: 2040242 - RNA, 19 nt, Artificial Sequence
  Description of Artificial Sequence: Synthetic oligonucleotide
cugguuuucaguccggagc

SEQ ID NO: 2040243 - RNA, 19 nt, Artificial Sequence
  Description of Artificial Sequence: Synthetic oligonucleotide
guuagguuccuccagguca

SEQ ID NO: 2040244 - RNA, 19 nt, Artificial Sequence
  Description of Artificial Sequence: Synthetic oligonucleotide
uguuguagggugccagggg

SEQ ID NO: 2040245 - RNA, 19 nt, Artificial Sequence
  Description of Artificial Sequence: Synthetic oligonucleotide
agugugacaccucugugug

SEQ ID NO: 2040246 - RNA, 19 nt, Artificial Sequence
  Description of Artificial Sequence: Synthetic oligonucleotide
ugagucaccagcuuucauc

SEQ ID NO: 2040247 - RNA, 19 nt, Artificial Sequence
  Description of Artificial Sequence: Synthetic oligonucleotide
ucaguagaugcuuuuaauu

SEQ ID NO: 2040248 - RNA, 19 nt, Artificial Sequence
  Description of Artificial Sequence: Synthetic oligonucleotide
gaccucuauuguuacaacc

SEQ ID NO: 2040249 - RNA, 19 nt, Artificial Sequence
  Description of Artificial Sequence: Synthetic oligonucleotide
augcaauaccuucaucuuc

SEQ ID NO: 2040250 - RNA, 19 nt, Artificial Sequence
  Description of Artificial Sequence: Synthetic oligonucleotide
uuacaguugguaugguuca

SEQ ID NO: 2040251 - RNA, 19 nt, Artificial Sequence
  Description of Artificial Sequence: Synthetic oligonucleotide
cuguauuacaguugguaug

SEQ ID NO: 2040252 - RNA, 19 nt, Artificial Sequence
  Description of Artificial Sequence: Synthetic oligonucleotide
caaguuagguuccuccagg

SEQ ID NO: 2040253 - RNA, 19 nt, Artificial Sequence
  Description of Artificial Sequence: Synthetic oligonucleotide
uagaugcuuuuaauuagug

SEQ ID NO: 2040254 - RNA, 19 nt, Artificial Sequence
  Description of Artificial Sequence: Synthetic oligonucleotide
auggcagaagcaaggaacc

SEQ ID NO: 2040255 - RNA, 19 nt, Artificial Sequence
  Description of Artificial Sequence: Synthetic oligonucleotide
ugagugaaucuccuuuucu

SEQ ID NO: 2040256 - RNA, 19 nt, Artificial Sequence
  Description of Artificial Sequence: Synthetic oligonucleotide
ugucuuucuugugcgaccg

SEQ ID NO: 2040257 - RNA, 19 nt, Artificial Sequence
  Description of Artificial Sequence: Synthetic oligonucleotide
agaggucuuugccuccucc

SEQ ID NO: 2040258 - RNA, 19 nt, Artificial Sequence
  Description of Artificial Sequence: Synthetic oligonucleotide
guagucucgcaccagcucc

SEQ ID NO: 2040259 - RNA, 19 nt, Artificial Sequence
  Description of Artificial Sequence: Synthetic oligonucleotide
uugguaugguucagagugg

SEQ ID NO: 2040260 - RNA, 19 nt, Artificial Sequence
  Description of Artificial Sequence: Synthetic oligonucleotide
ucuccuacucucucaguag

SEQ ID NO: 2040261 - RNA, 19 nt, Artificial Sequence
  Description of Artificial Sequence: Synthetic oligonucleotide
agaugcuuuuaauuagugu

SEQ ID NO: 2040262 - RNA, 19 nt, Artificial Sequence
  Description of Artificial Sequence: Synthetic oligonucleotide
aagcaaggaaccaccaaag

SEQ ID NO: 2040263 - RNA, 19 nt, Artificial Sequence
  Description of Artificial Sequence: Synthetic oligonucleotide
uuagugugacaccucugug

SEQ ID NO: 2040264 - RNA, 19 nt, Artificial Sequence
  Description of Artificial Sequence: Synthetic oligonucleotide
gaaauucucaacgccucag

SEQ ID NO: 2040265 - RNA, 19 nt, Artificial Sequence
  Description of Artificial Sequence: Synthetic oligonucleotide
agaguggccaucuucuccu

SEQ ID NO: 2040266 - RNA, 19 nt, Artificial Sequence
  Description of Artificial Sequence: Synthetic oligonucleotide
guuguagggugccaggggc

SEQ ID NO: 2040267 - RNA, 19 nt, Artificial Sequence
  Description of Artificial Sequence: Synthetic oligonucleotide
aaguuagguuccuccaggu

SEQ ID NO: 2040268 - RNA, 19 nt, Artificial Sequence
  Description of Artificial Sequence: Synthetic oligonucleotide
uucuccuacucucucagua

SEQ ID NO: 2040269 - RNA, 19 nt, Artificial Sequence
  Description of Artificial Sequence: Synthetic oligonucleotide
gaggucuuugccuccuccg

SEQ ID NO: 2040270 - RNA, 19 nt, Artificial Sequence
  Description of Artificial Sequence: Synthetic oligonucleotide
uuugauggccgccuucggu

SEQ ID NO: 2040271 - RNA, 19 nt, Artificial Sequence
  Description of Artificial Sequence: Synthetic oligonucleotide
guuacaaccugagccaacc

SEQ ID NO: 2040272 - RNA, 19 nt, Artificial Sequence
  Description of Artificial Sequence: Synthetic oligonucleotide
uccaaguuagguuccucca

SEQ ID NO: 2040273 - RNA, 19 nt, Artificial Sequence
  Description of Artificial Sequence: Synthetic oligonucleotide
uucggugcuucuuucgggc

SEQ ID NO: 2040274 - RNA, 19 nt, Artificial Sequence
  Description of Artificial Sequence: Synthetic oligonucleotide
gagcccguggagcacaucc

SEQ ID NO: 2040275 - RNA, 19 nt, Artificial Sequence
  Description of Artificial Sequence: Synthetic oligonucleotide
aguuagguuccuccagguc

SEQ ID NO: 2040276 - RNA, 19 nt, Artificial Sequence
  Description of Artificial Sequence: Synthetic oligonucleotide
aaggcucucagugugguau

SEQ ID NO: 2040277 - RNA, 19 nt, Artificial Sequence
  Description of Artificial Sequence: Synthetic oligonucleotide
ucugguuuucaguccggag

SEQ ID NO: 2040278 - RNA, 19 nt, Artificial Sequence
  Description of Artificial Sequence: Synthetic oligonucleotide
aguccggagccucuccacc

SEQ ID NO: 2040279 - RNA, 19 nt, Artificial Sequence
  Description of Artificial Sequence: Synthetic oligonucleotide
cuagauccagguagucucg

SEQ ID NO: 2040280 - RNA, 19 nt, Artificial Sequence
  Description of Artificial Sequence: Synthetic oligonucleotide
uuucuugugcgaccgccug

SEQ ID NO: 2040281 - RNA, 19 nt, Artificial Sequence
  Description of Artificial Sequence: Synthetic oligonucleotide
ucuuucuugugcgaccgcc

SEQ ID NO: 2040282 - RNA, 19 nt, Artificial Sequence
  Description of Artificial Sequence: Synthetic oligonucleotide
agugugguaucgcucauaa

SEQ ID NO: 2040283 - RNA, 19 nt, Artificial Sequence
  Description of Artificial Sequence: Synthetic oligonucleotide
cuauuguuacaaccugagc

SEQ ID NO: 2040284 - RNA, 19 nt, Artificial Sequence
  Description of Artificial Sequence: Synthetic oligonucleotide
uccacugaacagcaccgug

SEQ ID NO: 2040285 - RNA, 19 nt, Artificial Sequence
  Description of Artificial Sequence: Synthetic oligonucleotide
uugugagucaccagcuuuc

SEQ ID NO: 2040286 - RNA, 19 nt, Artificial Sequence
  Description of Artificial Sequence: Synthetic oligonucleotide
cacugaacagcaccguggg

SEQ ID NO: 2040287 - RNA, 19 nt, Artificial Sequence
  Description of Artificial Sequence: Synthetic oligonucleotide
ugacaggguugucugcuag

SEQ ID NO: 2040288 - RNA, 19 nt, Artificial Sequence
  Description of Artificial Sequence: Synthetic oligonucleotide
acagccgccucucuagauc

SEQ ID NO: 2040289 - RNA, 19 nt, Artificial Sequence
  Description of Artificial Sequence: Synthetic oligonucleotide
ucugcuagggcgccccugc

SEQ ID NO: 2040290 - RNA, 19 nt, Artificial Sequence
  Description of Artificial Sequence: Synthetic oligonucleotide
uucucagcccagcucagcu

SEQ ID NO: 2040291 - RNA, 19 nt, Artificial Sequence
  Description of Artificial Sequence: Synthetic oligonucleotide
gucucgguuccacaucucg

SEQ ID NO: 2040292 - RNA, 19 nt, Artificial Sequence
  Description of Artificial Sequence: Synthetic oligonucleotide
aagucacgaggcucauggg

SEQ ID NO: 2040293 - RNA, 19 nt, Artificial Sequence
  Description of Artificial Sequence: Synthetic oligonucleotide
gagccuccgacuuuccugc

SEQ ID NO: 2040294 - RNA, 19 nt, Artificial Sequence
  Description of Artificial Sequence: Synthetic oligonucleotide
auaccuucaucuucugagu

SEQ ID NO: 2040295 - RNA, 19 nt, Artificial Sequence
  Description of Artificial Sequence: Synthetic oligonucleotide
uaauggcagaagcaaggaa

SEQ ID NO: 2040296 - RNA, 19 nt, Artificial Sequence
  Description of Artificial Sequence: Synthetic oligonucleotide
agcugcuggagccuccgac

SEQ ID NO: 2040297 - RNA, 19 nt, Artificial Sequence
  Description of Artificial Sequence: Synthetic oligonucleotide
cucauaagccucagagaag

SEQ ID NO: 2040298 - RNA, 19 nt, Artificial Sequence
  Description of Artificial Sequence: Synthetic oligonucleotide
agccucugguuuucagucc

SEQ ID NO: 2040299 - RNA, 19 nt, Artificial Sequence
  Description of Artificial Sequence: Synthetic oligonucleotide
ugcuuuuaauuagugugac

SEQ ID NO: 2040300 - RNA, 19 nt, Artificial Sequence
  Description of Artificial Sequence: Synthetic oligonucleotide
uggcgaacaucuccucacg

SEQ ID NO: 2040301 - RNA, 19 nt, Artificial Sequence
  Description of Artificial Sequence: Synthetic oligonucleotide
gugguaucgcucauaagcc

SEQ ID NO: 2040302 - RNA, 19 nt, Artificial Sequence
  Description of Artificial Sequence: Synthetic oligonucleotide
uauuacaguugguaugguu

SEQ ID NO: 2040303 - RNA, 19 nt, Artificial Sequence
  Description of Artificial Sequence: Synthetic oligonucleotide
ugugucuuucuugugcgac

SEQ ID NO: 2040304 - RNA, 19 nt, Artificial Sequence
  Description of Artificial Sequence: Synthetic oligonucleotide
gcucauaagccucagagaa

SEQ ID NO: 2040305 - RNA, 19 nt, Artificial Sequence
  Description of Artificial Sequence: Synthetic oligonucleotide
ucagcccuaccucuugcug

SEQ ID NO: 2040306 - RNA, 19 nt, Artificial Sequence
  Description of Artificial Sequence: Synthetic oligonucleotide
cagcucagcuccaaguaag

SEQ ID NO: 2040307 - RNA, 19 nt, Artificial Sequence
  Description of Artificial Sequence: Synthetic oligonucleotide
caugaaauucucaacgccu

SEQ ID NO: 2040308 - RNA, 19 nt, Artificial Sequence
  Description of Artificial Sequence: Synthetic oligonucleotide
ucugagugaaucuccuuuu

SEQ ID NO: 2040309 - RNA, 19 nt, Artificial Sequence
  Description of Artificial Sequence: Synthetic oligonucleotide
gguccgaggaccucuauug

SEQ ID NO: 2040310 - RNA, 19 nt, Artificial Sequence
  Description of Artificial Sequence: Synthetic oligonucleotide
cuucggugcuucuuucggg

SEQ ID NO: 2040311 - RNA, 19 nt, Artificial Sequence
  Description of Artificial Sequence: Synthetic oligonucleotide
gucuuugccuccuccgggg

SEQ ID NO: 2040312 - RNA, 19 nt, Artificial Sequence
  Description of Artificial Sequence: Synthetic oligonucleotide
accucuauuguuacaaccu

SEQ ID NO: 2040313 - RNA, 19 nt, Artificial Sequence
  Description of Artificial Sequence: Synthetic oligonucleotide
ccucucuagauccagguag

SEQ ID NO: 2040314 - RNA, 19 nt, Artificial Sequence
  Description of Artificial Sequence: Synthetic oligonucleotide
uuacaaccugagccaaccc

SEQ ID NO: 2040315 - RNA, 19 nt, Artificial Sequence
  Description of Artificial Sequence: Synthetic oligonucleotide
caaguaaggccgccagugg

SEQ ID NO: 2040316 - RNA, 19 nt, Artificial Sequence
  Description of Artificial Sequence: Synthetic oligonucleotide
gugacagccgccucucuag

SEQ ID NO: 2040317 - RNA, 19 nt, Artificial Sequence
  Description of Artificial Sequence: Synthetic oligonucleotide
ucggcgggcaacgagaggu

SEQ ID NO: 2040318 - RNA, 19 nt, Artificial Sequence
  Description of Artificial Sequence: Synthetic oligonucleotide
ggaauuccccaugagcucg

SEQ ID NO: 2040319 - RNA, 19 nt, Artificial Sequence
  Description of Artificial Sequence: Synthetic oligonucleotide
aggcucaugggcugucugg

SEQ ID NO: 2040320 - RNA, 19 nt, Artificial Sequence
  Description of Artificial Sequence: Synthetic oligonucleotide
uucuuucgggccagcacug

SEQ ID NO: 2040321 - RNA, 19 nt, Artificial Sequence
  Description of Artificial Sequence: Synthetic oligonucleotide
ucucgguuccacaucucgu

SEQ ID NO: 2040322 - RNA, 19 nt, Artificial Sequence
  Description of Artificial Sequence: Synthetic oligonucleotide
cugcaugggcacagaaugg

SEQ ID NO: 2040323 - RNA, 19 nt, Artificial Sequence
  Description of Artificial Sequence: Synthetic oligonucleotide
cagaguggccaucuucucc

SEQ ID NO: 2040324 - RNA, 19 nt, Artificial Sequence
  Description of Artificial Sequence: Synthetic oligonucleotide
accuucaucuucugaguga

SEQ ID NO: 2040325 - RNA, 19 nt, Artificial Sequence
  Description of Artificial Sequence: Synthetic oligonucleotide
ugguaugguucagaguggc

SEQ ID NO: 2040326 - RNA, 19 nt, Artificial Sequence
  Description of Artificial Sequence: Synthetic oligonucleotide
ugguaucgcucauaagccu

SEQ ID NO: 2040327 - RNA, 19 nt, Artificial Sequence
  Description of Artificial Sequence: Synthetic oligonucleotide
agcaaggaaccaccaaagu

SEQ ID NO: 2040328 - RNA, 19 nt, Artificial Sequence
  Description of Artificial Sequence: Synthetic oligonucleotide
gcaaggaaccaccaaaguc

SEQ ID NO: 2040329 - RNA, 19 nt, Artificial Sequence
  Description of Artificial Sequence: Synthetic oligonucleotide
cucuauuguuacaaccuga

SEQ ID NO: 2040330 - RNA, 19 nt, Artificial Sequence
  Description of Artificial Sequence: Synthetic oligonucleotide
caggucacggucauccaug

SEQ ID NO: 2040331 - RNA, 19 nt, Artificial Sequence
  Description of Artificial Sequence: Synthetic oligonucleotide
gagucaccagcuuucaucu

SEQ ID NO: 2040332 - RNA, 19 nt, Artificial Sequence
  Description of Artificial Sequence: Synthetic oligonucleotide
uggaauuccccaugagcuc

SEQ ID NO: 2040333 - RNA, 19 nt, Artificial Sequence
  Description of Artificial Sequence: Synthetic oligonucleotide
cagcccuaccucuugcugc

SEQ ID NO: 2040334 - RNA, 19 nt, Artificial Sequence
  Description of Artificial Sequence: Synthetic oligonucleotide
ugggagagcccguggagca

SEQ ID NO: 2040335 - RNA, 19 nt, Artificial Sequence
  Description of Artificial Sequence: Synthetic oligonucleotide
guucagaguggccaucuuc

SEQ ID NO: 2040336 - RNA, 19 nt, Artificial Sequence
  Description of Artificial Sequence: Synthetic oligonucleotide
cacaucucguucuccugcc

SEQ ID NO: 2040337 - RNA, 19 nt, Artificial Sequence
  Description of Artificial Sequence: Synthetic oligonucleotide
uugugcgaccgccugucca

SEQ ID NO: 2040338 - RNA, 19 nt, Artificial Sequence
  Description of Artificial Sequence: Synthetic oligonucleotide
gcaacgagaggucuuugcc

SEQ ID NO: 2040339 - RNA, 19 nt, Artificial Sequence
  Description of Artificial Sequence: Synthetic oligonucleotide
ccaugaaauucucaacgcc

SEQ ID NO: 2040340 - RNA, 19 nt, Artificial Sequence
  Description of Artificial Sequence: Synthetic oligonucleotide
agaagcaaggaaccaccaa

SEQ ID NO: 2040341 - RNA, 19 nt, Artificial Sequence
  Description of Artificial Sequence: Synthetic oligonucleotide
gugucuuucuugugcgacc

SEQ ID NO: 2040342 - RNA, 19 nt, Artificial Sequence
  Description of Artificial Sequence: Synthetic oligonucleotide
ugugacagccgccucucua

SEQ ID NO: 2040343 - RNA, 19 nt, Artificial Sequence
  Description of Artificial Sequence: Synthetic oligonucleotide
cagccgccucucuagaucc

SEQ ID NO: 2040344 - RNA, 19 nt, Artificial Sequence
  Description of Artificial Sequence: Synthetic oligonucleotide
acaaccugagccaacccca

SEQ ID NO: 2040345 - RNA, 19 nt, Artificial Sequence
  Description of Artificial Sequence: Synthetic oligonucleotide
cagccgaugcaauaccuuc

SEQ ID NO: 2040346 - RNA, 19 nt, Artificial Sequence
  Description of Artificial Sequence: Synthetic oligonucleotide
cuccaaguaaggccgccag

SEQ ID NO: 2040347 - RNA, 19 nt, Artificial Sequence
  Description of Artificial Sequence: Synthetic oligonucleotide
accagcuuucaucugucau

SEQ ID NO: 2040348 - RNA, 19 nt, Artificial Sequence
  Description of Artificial Sequence: Synthetic oligonucleotide
uuguagggugccaggggcu

SEQ ID NO: 2040349 - RNA, 19 nt, Artificial Sequence
  Description of Artificial Sequence: Synthetic oligonucleotide
ugauggccgccuucggugc

SEQ ID NO: 2040350 - RNA, 19 nt, Artificial Sequence
  Description of Artificial Sequence: Synthetic oligonucleotide
uccaaguaaggccgccagu

SEQ ID NO: 2040351 - RNA, 19 nt, Artificial Sequence
  Description of Artificial Sequence: Synthetic oligonucleotide
ucagccugugacagccgcc

SEQ ID NO: 2040352 - RNA, 19 nt, Artificial Sequence
  Description of Artificial Sequence: Synthetic oligonucleotide
acccgggaggcccucuggc

SEQ ID NO: 2040353 - RNA, 19 nt, Artificial Sequence
  Description of Artificial Sequence: Synthetic oligonucleotide
ugcuagggcgccccugcag

SEQ ID NO: 2040354 - RNA, 19 nt, Artificial Sequence
  Description of Artificial Sequence: Synthetic oligonucleotide
uucaguccggagccucucc

SEQ ID NO: 2040355 - RNA, 19 nt, Artificial Sequence
  Description of Artificial Sequence: Synthetic oligonucleotide
aagucccucugcuggaauu

SEQ ID NO: 2040356 - RNA, 19 nt, Artificial Sequence
  Description of Artificial Sequence: Synthetic oligonucleotide
cuuucgggccagcacugcc

SEQ ID NO: 2040357 - RNA, 19 nt, Artificial Sequence
  Description of Artificial Sequence: Synthetic oligonucleotide
ucaccagcuuucaucuguc

SEQ ID NO: 2040358 - RNA, 19 nt, Artificial Sequence
  Description of Artificial Sequence: Synthetic oligonucleotide
gaugccucuguauuacagu

SEQ ID NO: 2040359 - RNA, 19 nt, Artificial Sequence
  Description of Artificial Sequence: Synthetic oligonucleotide
ggggucucauccuugggcc

SEQ ID NO: 2040360 - RNA, 19 nt, Artificial Sequence
  Description of Artificial Sequence: Synthetic oligonucleotide
cucagccugugacagccgc

SEQ ID NO: 2040361 - RNA, 19 nt, Artificial Sequence
  Description of Artificial Sequence: Synthetic oligonucleotide
ugugcgaccgccuguccau

SEQ ID NO: 2040362 - RNA, 19 nt, Artificial Sequence
  Description of Artificial Sequence: Synthetic oligonucleotide
uggcgcuugcgcuuugaug

SEQ ID NO: 2040363 - RNA, 19 nt, Artificial Sequence
  Description of Artificial Sequence: Synthetic oligonucleotide
agggcgccccugcagcugc

SEQ ID NO: 2040364 - RNA, 19 nt, Artificial Sequence
  Description of Artificial Sequence: Synthetic oligonucleotide
ugaaggcucucaguguggu

SEQ ID NO: 2040365 - RNA, 19 nt, Artificial Sequence
  Description of Artificial Sequence: Synthetic oligonucleotide
ugugagucaccagcuuuca

SEQ ID NO: 2040366 - RNA, 19 nt, Artificial Sequence
  Description of Artificial Sequence: Synthetic oligonucleotide
uucuugugcgaccgccugu

SEQ ID NO: 2040367 - RNA, 19 nt, Artificial Sequence
  Description of Artificial Sequence: Synthetic oligonucleotide
uguugcuucucagcccagc

SEQ ID NO: 2040368 - RNA, 19 nt, Artificial Sequence
  Description of Artificial Sequence: Synthetic oligonucleotide
uccuacucucucaguagau

SEQ ID NO: 2040369 - RNA, 19 nt, Artificial Sequence
  Description of Artificial Sequence: Synthetic oligonucleotide
uguagggugccaggggcug

SEQ ID NO: 2040370 - RNA, 19 nt, Artificial Sequence
  Description of Artificial Sequence: Synthetic oligonucleotide
ggagccuccgacuuuccug

SEQ ID NO: 2040371 - RNA, 19 nt, Artificial Sequence
  Description of Artificial Sequence: Synthetic oligonucleotide
gaauuccccaugagcucgg

SEQ ID NO: 2040372 - RNA, 19 nt, Artificial Sequence
  Description of Artificial Sequence: Synthetic oligonucleotide
gccucugguuuucaguccg

SEQ ID NO: 2040373 - RNA, 19 nt, Artificial Sequence
  Description of Artificial Sequence: Synthetic oligonucleotide
gcuuugauggccgccuucg

SEQ ID NO: 2040374 - RNA, 19 nt, Artificial Sequence
  Description of Artificial Sequence: Synthetic oligonucleotide
ugcgcuuugauggccgccu

SEQ ID NO: 2040375 - RNA, 19 nt, Artificial Sequence
  Description of Artificial Sequence: Synthetic oligonucleotide
cucuguauuacaguuggua

SEQ ID NO: 2040376 - RNA, 19 nt, Artificial Sequence
  Description of Artificial Sequence: Synthetic oligonucleotide
uagucucgcaccagcuccu

SEQ ID NO: 2040377 - RNA, 19 nt, Artificial Sequence
  Description of Artificial Sequence: Synthetic oligonucleotide
ucuugugcgaccgccuguc

SEQ ID NO: 2040378 - RNA, 19 nt, Artificial Sequence
  Description of Artificial Sequence: Synthetic oligonucleotide
ugagccaaccccagccgau

SEQ ID NO: 2040379 - RNA, 19 nt, Artificial Sequence
  Description of Artificial Sequence: Synthetic oligonucleotide
uuguuacaaccugagccaa

SEQ ID NO: 2040380 - RNA, 19 nt, Artificial Sequence
  Description of Artificial Sequence: Synthetic oligonucleotide
gcagaagcaaggaaccacc

SEQ ID NO: 2040381 - RNA, 19 nt, Artificial Sequence
  Description of Artificial Sequence: Synthetic oligonucleotide
gccuuuggcgaacaucucc

SEQ ID NO: 2040382 - RNA, 19 nt, Artificial Sequence
  Description of Artificial Sequence: Synthetic oligonucleotide
ucucucaguagaugcuuuu

SEQ ID NO: 2040383 - RNA, 19 nt, Artificial Sequence
  Description of Artificial Sequence: Synthetic oligonucleotide
uccgaggaccucuauuguu

SEQ ID NO: 2040384 - RNA, 19 nt, Artificial Sequence
  Description of Artificial Sequence: Synthetic oligonucleotide
agauccagguagucucgca

SEQ ID NO: 2040385 - RNA, 19 nt, Artificial Sequence
  Description of Artificial Sequence: Synthetic oligonucleotide
ucggugcuucuuucgggcc

SEQ ID NO: 2040386 - RNA, 19 nt, Artificial Sequence
  Description of Artificial Sequence: Synthetic oligonucleotide
ggcgaacaucuccucacgg

SEQ ID NO: 2040387 - RNA, 19 nt, Artificial Sequence
  Description of Artificial Sequence: Synthetic oligonucleotide
ucacggacccgggaggccc

SEQ ID NO: 2040388 - RNA, 19 nt, Artificial Sequence
  Description of Artificial Sequence: Synthetic oligonucleotide
cuaauggcagaagcaagga

SEQ ID NO: 2040389 - RNA, 19 nt, Artificial Sequence
  Description of Artificial Sequence: Synthetic oligonucleotide
acaccucugugugucuuuc

SEQ ID NO: 2040390 - RNA, 19 nt, Artificial Sequence
  Description of Artificial Sequence: Synthetic oligonucleotide
uugucugcuagggcgcccc

SEQ ID NO: 2040391 - RNA, 19 nt, Artificial Sequence
  Description of Artificial Sequence: Synthetic oligonucleotide
gaggcucaugggcugucug

SEQ ID NO: 2040392 - RNA, 19 nt, Artificial Sequence
  Description of Artificial Sequence: Synthetic oligonucleotide
ucagaguggccaucuucuc

SEQ ID NO: 2040393 - RNA, 19 nt, Artificial Sequence
  Description of Artificial Sequence: Synthetic oligonucleotide
gagaagucccucugcugga

SEQ ID NO: 2040394 - RNA, 19 nt, Artificial Sequence
  Description of Artificial Sequence: Synthetic oligonucleotide
uccccugcuucauucucac

SEQ ID NO: 2040395 - RNA, 19 nt, Artificial Sequence
  Description of Artificial Sequence: Synthetic oligonucleotide
uagauccagguagucucgc

SEQ ID NO: 2040396 - RNA, 19 nt, Artificial Sequence
  Description of Artificial Sequence: Synthetic oligonucleotide
ggcaacgagaggucuuugc

SEQ ID NO: 2040397 - RNA, 19 nt, Artificial Sequence
  Description of Artificial Sequence: Synthetic oligonucleotide
ugacagccgccucucuaga

SEQ ID NO: 2040398 - RNA, 19 nt, Artificial Sequence
  Description of Artificial Sequence: Synthetic oligonucleotide
cuccuuuucuaauggcaga

SEQ ID NO: 2040399 - RNA, 19 nt, Artificial Sequence
  Description of Artificial Sequence: Synthetic oligonucleotide
uccccaugagcucggcccu

SEQ ID NO: 2040400 - RNA, 19 nt, Artificial Sequence
  Description of Artificial Sequence: Synthetic oligonucleotide
ucgcaccagcuccugcuug

SEQ ID NO: 2040401 - RNA, 19 nt, Artificial Sequence
  Description of Artificial Sequence: Synthetic oligonucleotide
ucucaccacuggagccugg

SEQ ID NO: 2040402 - RNA, 19 nt, Artificial Sequence
  Description of Artificial Sequence: Synthetic oligonucleotide
cuuuggcgaacaucuccuc

SEQ ID NO: 2040403 - RNA, 19 nt, Artificial Sequence
  Description of Artificial Sequence: Synthetic oligonucleotide
ccaaguuagguuccuccag

SEQ ID NO: 2040404 - RNA, 19 nt, Artificial Sequence
  Description of Artificial Sequence: Synthetic oligonucleotide
uaucgcucauaagccucag

SEQ ID NO: 2040405 - RNA, 19 nt, Artificial Sequence
  Description of Artificial Sequence: Synthetic oligonucleotide
cuccuacucucucaguaga

SEQ ID NO: 2040406 - RNA, 19 nt, Artificial Sequence
  Description of Artificial Sequence: Synthetic oligonucleotide
agguuccuccaggucacgg

SEQ ID NO: 2040407 - RNA, 19 nt, Artificial Sequence
  Description of Artificial Sequence: Synthetic oligonucleotide
caggguugucugcuagggc

SEQ ID NO: 2040408 - RNA, 19 nt, Artificial Sequence
  Description of Artificial Sequence: Synthetic oligonucleotide
caccaaagucacgaggcuc

SEQ ID NO: 2040409 - RNA, 19 nt, Artificial Sequence
  Description of Artificial Sequence: Synthetic oligonucleotide
ucagugugguaucgcucau

SEQ ID NO: 2040410 - RNA, 19 nt, Artificial Sequence
  Description of Artificial Sequence: Synthetic oligonucleotide
ugccgucucgguuccacau

SEQ ID NO: 2040411 - RNA, 19 nt, Artificial Sequence
  Description of Artificial Sequence: Synthetic oligonucleotide
guuuucaguccggagccuc

SEQ ID NO: 2040412 - RNA, 19 nt, Artificial Sequence
  Description of Artificial Sequence: Synthetic oligonucleotide
uccgacuuuccugcucagc

SEQ ID NO: 2040413 - RNA, 19 nt, Artificial Sequence
  Description of Artificial Sequence: Synthetic oligonucleotide
ccacaucucguucuccugc

SEQ ID NO: 2040414 - RNA, 19 nt, Artificial Sequence
  Description of Artificial Sequence: Synthetic oligonucleotide
gguaucgcucauaagccuc

SEQ ID NO: 2040415 - RNA, 19 nt, Artificial Sequence
  Description of Artificial Sequence: Synthetic oligonucleotide
uggucacagcagcugccgu

SEQ ID NO: 2040416 - RNA, 19 nt, Artificial Sequence
  Description of Artificial Sequence: Synthetic oligonucleotide
cucauccuugggccugggg

SEQ ID NO: 2040417 - RNA, 19 nt, Artificial Sequence
  Description of Artificial Sequence: Synthetic oligonucleotide
ggcagaagcaaggaaccac

SEQ ID NO: 2040418 - RNA, 19 nt, Artificial Sequence
  Description of Artificial Sequence: Synthetic oligonucleotide
ggcucaugggcugucuggg

SEQ ID NO: 2040419 - RNA, 19 nt, Artificial Sequence
  Description of Artificial Sequence: Synthetic oligonucleotide
aucgcucauaagccucaga

SEQ ID NO: 2040420 - RNA, 19 nt, Artificial Sequence
  Description of Artificial Sequence: Synthetic oligonucleotide
gcuuuuaauuagugugaca

SEQ ID NO: 2040421 - RNA, 19 nt, Artificial Sequence
  Description of Artificial Sequence: Synthetic oligonucleotide
ugugacccagcuggccugc

SEQ ID NO: 2040422 - RNA, 19 nt, Artificial Sequence
  Description of Artificial Sequence: Synthetic oligonucleotide
cugucucucaucucgcugu

SEQ ID NO: 2040423 - RNA, 19 nt, Artificial Sequence
  Description of Artificial Sequence: Synthetic oligonucleotide
guaaggccgccaguggcgc

SEQ ID NO: 2040424 - RNA, 19 nt, Artificial Sequence
  Description of Artificial Sequence: Synthetic oligonucleotide
gcuagggcgccccugcagc

SEQ ID NO: 2040425 - RNA, 19 nt, Artificial Sequence
  Description of Artificial Sequence: Synthetic oligonucleotide
gcugaugccucuguauuac

SEQ ID NO: 2040426 - RNA, 19 nt, Artificial Sequence
  Description of Artificial Sequence: Synthetic oligonucleotide
ucaacgccucagcccuacc

SEQ ID NO: 2040427 - RNA, 19 nt, Artificial Sequence
  Description of Artificial Sequence: Synthetic oligonucleotide
guaucgcucauaagccuca

SEQ ID NO: 2040428 - RNA, 19 nt, Artificial Sequence
  Description of Artificial Sequence: Synthetic oligonucleotide
gugaaucuccuuuucuaau

SEQ ID NO: 2040429 - RNA, 19 nt, Artificial Sequence
  Description of Artificial Sequence: Synthetic oligonucleotide
guugacaggguugucugcu

SEQ ID NO: 2040430 - RNA, 19 nt, Artificial Sequence
  Description of Artificial Sequence: Synthetic oligonucleotide
ccaccuguugacaggguug

SEQ ID NO: 2040431 - RNA, 19 nt, Artificial Sequence
  Description of Artificial Sequence: Synthetic oligonucleotide
agccgaugcaauaccuuca

SEQ ID NO: 2040432 - RNA, 19 nt, Artificial Sequence
  Description of Artificial Sequence: Synthetic oligonucleotide
caacgagaggucuuugccu

SEQ ID NO: 2040433 - RNA, 19 nt, Artificial Sequence
  Description of Artificial Sequence: Synthetic oligonucleotide
aggcccucuggcucugucu

SEQ ID NO: 2040434 - RNA, 19 nt, Artificial Sequence
  Description of Artificial Sequence: Synthetic oligonucleotide
cgaugcaauaccuucaucu

SEQ ID NO: 2040435 - RNA, 19 nt, Artificial Sequence
  Description of Artificial Sequence: Synthetic oligonucleotide
cuugugcgaccgccugucc

SEQ ID NO: 2040436 - RNA, 19 nt, Artificial Sequence
  Description of Artificial Sequence: Synthetic oligonucleotide
ugcgaccgccuguccauga

SEQ ID NO: 2040437 - RNA, 19 nt, Artificial Sequence
  Description of Artificial Sequence: Synthetic oligonucleotide
uccggagccucuccaccuc

SEQ ID NO: 2040438 - RNA, 19 nt, Artificial Sequence
  Description of Artificial Sequence: Synthetic oligonucleotide
uugcugcggcccugaaggc

SEQ ID NO: 2040439 - RNA, 19 nt, Artificial Sequence
  Description of Artificial Sequence: Synthetic oligonucleotide
gcgaacaucuccucacgga

SEQ ID NO: 2040440 - RNA, 19 nt, Artificial Sequence
  Description of Artificial Sequence: Synthetic oligonucleotide
agcuuucaucugucaucug

SEQ ID NO: 2040441 - RNA, 19 nt, Artificial Sequence
  Description of Artificial Sequence: Synthetic oligonucleotide
ggaccucuauuguuacaac

SEQ ID NO: 2040442 - RNA, 19 nt, Artificial Sequence
  Description of Artificial Sequence: Synthetic oligonucleotide
cucucuagauccagguagu

SEQ ID NO: 2040443 - RNA, 19 nt, Artificial Sequence
  Description of Artificial Sequence: Synthetic oligonucleotide
cccucugcuggaauucccc

SEQ ID NO: 2040444 - RNA, 19 nt, Artificial Sequence
  Description of Artificial Sequence: Synthetic oligonucleotide
cucucagugugguaucgcu

SEQ ID NO: 2040445 - RNA, 19 nt, Artificial Sequence
  Description of Artificial Sequence: Synthetic oligonucleotide
cucaacgccucagcccuac

SEQ ID NO: 2040446 - RNA, 19 nt, Artificial Sequence
  Description of Artificial Sequence: Synthetic oligonucleotide
agguagucucgcaccagcu

SEQ ID NO: 2040447 - RNA, 19 nt, Artificial Sequence
  Description of Artificial Sequence: Synthetic oligonucleotide
cagcuccaaguaaggccgc

SEQ ID NO: 2040448 - RNA, 19 nt, Artificial Sequence
  Description of Artificial Sequence: Synthetic oligonucleotide
ccuacucucucaguagaug

SEQ ID NO: 2040449 - RNA, 19 nt, Artificial Sequence
  Description of Artificial Sequence: Synthetic oligonucleotide
cagcuuucaucugucaucu

SEQ ID NO: 2040450 - RNA, 19 nt, Artificial Sequence
  Description of Artificial Sequence: Synthetic oligonucleotide
cugagccaaccccagccga

SEQ ID NO: 2040451 - RNA, 19 nt, Artificial Sequence
  Description of Artificial Sequence: Synthetic oligonucleotide
gugugucuuucuugugcga

SEQ ID NO: 2040452 - RNA, 19 nt, Artificial Sequence
  Description of Artificial Sequence: Synthetic oligonucleotide
ugacccagcuggccugcau

SEQ ID NO: 2040453 - RNA, 19 nt, Artificial Sequence
  Description of Artificial Sequence: Synthetic oligonucleotide
cuuucuugugcgaccgccu

SEQ ID NO: 2040454 - RNA, 19 nt, Artificial Sequence
  Description of Artificial Sequence: Synthetic oligonucleotide
ugacaccucugugugucuu

SEQ ID NO: 2040455 - RNA, 19 nt, Artificial Sequence
  Description of Artificial Sequence: Synthetic oligonucleotide
gucucgcaccagcuccugc

SEQ ID NO: 2040456 - RNA, 19 nt, Artificial Sequence
  Description of Artificial Sequence: Synthetic oligonucleotide
acaucuccucacggacccg

SEQ ID NO: 2040457 - RNA, 19 nt, Artificial Sequence
  Description of Artificial Sequence: Synthetic oligonucleotide
cuguugcuucucagcccag

SEQ ID NO: 2040458 - RNA, 19 nt, Artificial Sequence
  Description of Artificial Sequence: Synthetic oligonucleotide
cucggcgggcaacgagagg

SEQ ID NO: 2040459 - RNA, 19 nt, Artificial Sequence
  Description of Artificial Sequence: Synthetic oligonucleotide
ugucugcuagggcgccccu

SEQ ID NO: 2040460 - RNA, 19 nt, Artificial Sequence
  Description of Artificial Sequence: Synthetic oligonucleotide
accgccuguccaugaaauu

SEQ ID NO: 2040461 - RNA, 19 nt, Artificial Sequence
  Description of Artificial Sequence: Synthetic oligonucleotide
aaggccgccaguggcgcuu

SEQ ID NO: 2040462 - RNA, 19 nt, Artificial Sequence
  Description of Artificial Sequence: Synthetic oligonucleotide
gcucagcuccaaguaaggc

SEQ ID NO: 2040463 - RNA, 19 nt, Artificial Sequence
  Description of Artificial Sequence: Synthetic oligonucleotide
ggucucauccuugggccug

SEQ ID NO: 2040464 - RNA, 19 nt, Artificial Sequence
  Description of Artificial Sequence: Synthetic oligonucleotide
cuccgacuuuccugcucag

SEQ ID NO: 2040465 - RNA, 19 nt, Artificial Sequence
  Description of Artificial Sequence: Synthetic oligonucleotide
uaaggccgccaguggcgcu

SEQ ID NO: 2040466 - RNA, 19 nt, Artificial Sequence
  Description of Artificial Sequence: Synthetic oligonucleotide
ggguugucugcuagggcgc

SEQ ID NO: 2040467 - RNA, 19 nt, Artificial Sequence
  Description of Artificial Sequence: Synthetic oligonucleotide
gaaggcucucaguguggua

SEQ ID NO: 2040468 - RNA, 19 nt, Artificial Sequence
  Description of Artificial Sequence: Synthetic oligonucleotide
ggcccucuggcucugucuc

SEQ ID NO: 2040469 - RNA, 19 nt, Artificial Sequence
  Description of Artificial Sequence: Synthetic oligonucleotide
ccgccuguccaugaaauuc

SEQ ID NO: 2040470 - RNA, 19 nt, Artificial Sequence
  Description of Artificial Sequence: Synthetic oligonucleotide
acgaggcucaugggcuguc

SEQ ID NO: 2040471 - RNA, 19 nt, Artificial Sequence
  Description of Artificial Sequence: Synthetic oligonucleotide
ugagcucggcccugcccau

SEQ ID NO: 2040472 - RNA, 19 nt, Artificial Sequence
  Description of Artificial Sequence: Synthetic oligonucleotide
gaggcccucuggcucuguc

SEQ ID NO: 2040473 - RNA, 19 nt, Artificial Sequence
  Description of Artificial Sequence: Synthetic oligonucleotide
acagcaccgugggcucugg

SEQ ID NO: 2040474 - RNA, 19 nt, Artificial Sequence
  Description of Artificial Sequence: Synthetic oligonucleotide
cucgguuccacaucucguu

SEQ ID NO: 2040475 - RNA, 19 nt, Artificial Sequence
  Description of Artificial Sequence: Synthetic oligonucleotide
cucacggacccgggaggcc

SEQ ID NO: 2040476 - RNA, 19 nt, Artificial Sequence
  Description of Artificial Sequence: Synthetic oligonucleotide
ccucugguuuucaguccgg

SEQ ID NO: 2040477 - RNA, 19 nt, Artificial Sequence
  Description of Artificial Sequence: Synthetic oligonucleotide
ucucaacgccucagcccua

SEQ ID NO: 2040478 - RNA, 19 nt, Artificial Sequence
  Description of Artificial Sequence: Synthetic oligonucleotide
gcuggagccuccgacuuuc

SEQ ID NO: 2040479 - RNA, 19 nt, Artificial Sequence
  Description of Artificial Sequence: Synthetic oligonucleotide
cccguggagcacauccaag

SEQ ID NO: 2040480 - RNA, 19 nt, Artificial Sequence
  Description of Artificial Sequence: Synthetic oligonucleotide
uggguccgaggaccucuau

SEQ ID NO: 2040481 - RNA, 19 nt, Artificial Sequence
  Description of Artificial Sequence: Synthetic oligonucleotide
gguugucugcuagggcgcc

SEQ ID NO: 2040482 - RNA, 19 nt, Artificial Sequence
  Description of Artificial Sequence: Synthetic oligonucleotide
gaccgccuguccaugaaau

SEQ ID NO: 2040483 - RNA, 19 nt, Artificial Sequence
  Description of Artificial Sequence: Synthetic oligonucleotide
gggucccuucuguggcugg

SEQ ID NO: 2040484 - RNA, 19 nt, Artificial Sequence
  Description of Artificial Sequence: Synthetic oligonucleotide
ccuuuggcgaacaucuccu

SEQ ID NO: 2040485 - RNA, 19 nt, Artificial Sequence
  Description of Artificial Sequence: Synthetic oligonucleotide
ccgaggaccucuauuguua

SEQ ID NO: 2040486 - RNA, 19 nt, Artificial Sequence
  Description of Artificial Sequence: Synthetic oligonucleotide
gucugcuagggcgccccug

SEQ ID NO: 2040487 - RNA, 19 nt, Artificial Sequence
  Description of Artificial Sequence: Synthetic oligonucleotide
guccgaggaccucuauugu

SEQ ID NO: 2040488 - RNA, 19 nt, Artificial Sequence
  Description of Artificial Sequence: Synthetic oligonucleotide
agcccguggagcacaucca

SEQ ID NO: 2040489 - RNA, 19 nt, Artificial Sequence
  Description of Artificial Sequence: Synthetic oligonucleotide
cagcaccgugggcucuggg

SEQ ID NO: 2040490 - RNA, 19 nt, Artificial Sequence
  Description of Artificial Sequence: Synthetic oligonucleotide
agagcccguggagcacauc

SEQ ID NO: 2040491 - RNA, 19 nt, Artificial Sequence
  Description of Artificial Sequence: Synthetic oligonucleotide
gacagccgccucucuagau

SEQ ID NO: 2040492 - RNA, 19 nt, Artificial Sequence
  Description of Artificial Sequence: Synthetic oligonucleotide
guccggagccucuccaccu

SEQ ID NO: 2040493 - RNA, 19 nt, Artificial Sequence
  Description of Artificial Sequence: Synthetic oligonucleotide
ccgccaguggcgcuugcgc

SEQ ID NO: 2040494 - RNA, 19 nt, Artificial Sequence
  Description of Artificial Sequence: Synthetic oligonucleotide
gcucucagugugguaucgc

SEQ ID NO: 2040495 - RNA, 19 nt, Artificial Sequence
  Description of Artificial Sequence: Synthetic oligonucleotide
cucugcuggaauuccccau

SEQ ID NO: 2040496 - RNA, 19 nt, Artificial Sequence
  Description of Artificial Sequence: Synthetic oligonucleotide
gcagcugaugccucuguau

SEQ ID NO: 2040497 - RNA, 19 nt, Artificial Sequence
  Description of Artificial Sequence: Synthetic oligonucleotide
cucagcccuaccucuugcu

SEQ ID NO: 2040498 - RNA, 19 nt, Artificial Sequence
  Description of Artificial Sequence: Synthetic oligonucleotide
ggcucggcgggcaacgaga

SEQ ID NO: 2040499 - RNA, 19 nt, Artificial Sequence
  Description of Artificial Sequence: Synthetic oligonucleotide
gcgcuugcgcuuugauggc

SEQ ID NO: 2040500 - RNA, 19 nt, Artificial Sequence
  Description of Artificial Sequence: Synthetic oligonucleotide
ccccagccgaugcaauacc

SEQ ID NO: 2040501 - RNA, 19 nt, Artificial Sequence
  Description of Artificial Sequence: Synthetic oligonucleotide
caccuguugacaggguugu

SEQ ID NO: 2040502 - RNA, 19 nt, Artificial Sequence
  Description of Artificial Sequence: Synthetic oligonucleotide
gggugguguuguagggugc

SEQ ID NO: 2040503 - RNA, 19 nt, Artificial Sequence
  Description of Artificial Sequence: Synthetic oligonucleotide
guggcuggcuucuccuggu

SEQ ID NO: 2040504 - RNA, 19 nt, Artificial Sequence
  Description of Artificial Sequence: Synthetic oligonucleotide
gcucggcgggcaacgagag

SEQ ID NO: 2040505 - RNA, 19 nt, Artificial Sequence
  Description of Artificial Sequence: Synthetic oligonucleotide
cugccgucucgguuccaca

SEQ ID NO: 2040506 - RNA, 19 nt, Artificial Sequence
  Description of Artificial Sequence: Synthetic oligonucleotide
cucucaucucgcuguugcu

SEQ ID NO: 2040507 - RNA, 19 nt, Artificial Sequence
  Description of Artificial Sequence: Synthetic oligonucleotide
gauggccgccuucggugcu

SEQ ID NO: 2040508 - RNA, 19 nt, Artificial Sequence
  Description of Artificial Sequence: Synthetic oligonucleotide
guauuacaguugguauggu

SEQ ID NO: 2040509 - RNA, 19 nt, Artificial Sequence
  Description of Artificial Sequence: Synthetic oligonucleotide
gugguguuguagggugcca

SEQ ID NO: 2040510 - RNA, 19 nt, Artificial Sequence
  Description of Artificial Sequence: Synthetic oligonucleotide
gccgccucucuagauccag

SEQ ID NO: 2040511 - RNA, 19 nt, Artificial Sequence
  Description of Artificial Sequence: Synthetic oligonucleotide
cuucuccuacucucucagu

SEQ ID NO: 2040512 - RNA, 19 nt, Artificial Sequence
  Description of Artificial Sequence: Synthetic oligonucleotide
ccucacggacccgggaggc

SEQ ID NO: 2040513 - RNA, 19 nt, Artificial Sequence
  Description of Artificial Sequence: Synthetic oligonucleotide
gccgucucgguuccacauc

SEQ ID NO: 2040514 - RNA, 19 nt, Artificial Sequence
  Description of Artificial Sequence: Synthetic oligonucleotide
ggacccgggaggcccucug

SEQ ID NO: 2040515 - RNA, 19 nt, Artificial Sequence
  Description of Artificial Sequence: Synthetic oligonucleotide
ggcagcugaugccucugua

SEQ ID NO: 2040516 - RNA, 19 nt, Artificial Sequence
  Description of Artificial Sequence: Synthetic oligonucleotide
cacggucauccaugaggaa

SEQ ID NO: 2040517 - RNA, 19 nt, Artificial Sequence
  Description of Artificial Sequence: Synthetic oligonucleotide
aucugucaucugccuccuu

SEQ ID NO: 2040518 - RNA, 19 nt, Artificial Sequence
  Description of Artificial Sequence: Synthetic oligonucleotide
gugagucaccagcuuucau

SEQ ID NO: 2040519 - RNA, 19 nt, Artificial Sequence
  Description of Artificial Sequence: Synthetic oligonucleotide
gugcgaccgccuguccaug

SEQ ID NO: 2040520 - RNA, 19 nt, Artificial Sequence
  Description of Artificial Sequence: Synthetic oligonucleotide
ccgaugcaauaccuucauc

SEQ ID NO: 2040521 - RNA, 19 nt, Artificial Sequence
  Description of Artificial Sequence: Synthetic oligonucleotide
gccgccaguggcgcuugcg

SEQ ID NO: 2040522 - RNA, 19 nt, Artificial Sequence
  Description of Artificial Sequence: Synthetic oligonucleotide
ggggcuggccuuuggcgaa

SEQ ID NO: 2040523 - RNA, 19 nt, Artificial Sequence
  Description of Artificial Sequence: Synthetic oligonucleotide
gccuccuugugacccagcu

SEQ ID NO: 2040524 - RNA, 19 nt, Artificial Sequence
  Description of Artificial Sequence: Synthetic oligonucleotide
gugacaccucugugugucu

SEQ ID NO: 2040525 - RNA, 19 nt, Artificial Sequence
  Description of Artificial Sequence: Synthetic oligonucleotide
gccucucuagauccaggua

SEQ ID NO: 2040526 - RNA, 19 nt, Artificial Sequence
  Description of Artificial Sequence: Synthetic oligonucleotide
gcccguggagcacauccaa

SEQ ID NO: 2040527 - RNA, 19 nt, Artificial Sequence
  Description of Artificial Sequence: Synthetic oligonucleotide
gggcucuggguccgaggac

SEQ ID NO: 2040528 - RNA, 19 nt, Artificial Sequence
  Description of Artificial Sequence: Synthetic oligonucleotide
gaacagcaccgugggcucu

SEQ ID NO: 2040529 - RNA, 19 nt, Artificial Sequence
  Description of Artificial Sequence: Synthetic oligonucleotide
cugccggagccucugguuu

SEQ ID NO: 2040530 - RNA, 19 nt, Artificial Sequence
  Description of Artificial Sequence: Synthetic oligonucleotide
gccugugacagccgccucu

SEQ ID NO: 2040531 - RNA, 19 nt, Artificial Sequence
  Description of Artificial Sequence: Synthetic oligonucleotide
cagugugguaucgcucaua

SEQ ID NO: 2040532 - RNA, 19 nt, Artificial Sequence
  Description of Artificial Sequence: Synthetic oligonucleotide
acggacccgggaggcccuc

SEQ ID NO: 2040533 - RNA, 19 nt, Artificial Sequence
  Description of Artificial Sequence: Synthetic oligonucleotide
cugcuagggcgccccugca

SEQ ID NO: 2040534 - RNA, 19 nt, Artificial Sequence
  Description of Artificial Sequence: Synthetic oligonucleotide
cucggcccugcccaucacu

SEQ ID NO: 2040535 - RNA, 19 nt, Artificial Sequence
  Description of Artificial Sequence: Synthetic oligonucleotide
gggcaacgagaggucuuug

SEQ ID NO: 2040536 - RNA, 19 nt, Artificial Sequence
  Description of Artificial Sequence: Synthetic oligonucleotide
uggccgccuucggugcuuc

SEQ ID NO: 2040537 - RNA, 19 nt, Artificial Sequence
  Description of Artificial Sequence: Synthetic oligonucleotide
caucugucaucugccuccu

SEQ ID NO: 2040538 - RNA, 19 nt, Artificial Sequence
  Description of Artificial Sequence: Synthetic oligonucleotide
caccucugugugucuuucu

SEQ ID NO: 2040539 - RNA, 19 nt, Artificial Sequence
  Description of Artificial Sequence: Synthetic oligonucleotide
gagcucggcccugcccauc

SEQ ID NO: 2040540 - RNA, 19 nt, Artificial Sequence
  Description of Artificial Sequence: Synthetic oligonucleotide
ggcccugaaggcucucagu

SEQ ID NO: 2040541 - RNA, 19 nt, Artificial Sequence
  Description of Artificial Sequence: Synthetic oligonucleotide
cuccacugaacagcaccgu

SEQ ID NO: 2040542 - RNA, 19 nt, Artificial Sequence
  Description of Artificial Sequence: Synthetic oligonucleotide
agccgccucucuagaucca

SEQ ID NO: 2040543 - RNA, 19 nt, Artificial Sequence
  Description of Artificial Sequence: Synthetic oligonucleotide
guggcgcuugcgcuuugau

SEQ ID NO: 2040544 - RNA, 19 nt, Artificial Sequence
  Description of Artificial Sequence: Synthetic oligonucleotide
caaccccagccgaugcaau

SEQ ID NO: 2040545 - RNA, 19 nt, Artificial Sequence
  Description of Artificial Sequence: Synthetic oligonucleotide
ccaaccccagccgaugcaa

SEQ ID NO: 2040546 - RNA, 19 nt, Artificial Sequence
  Description of Artificial Sequence: Synthetic oligonucleotide
ccgucucgguuccacaucu

SEQ ID NO: 2040547 - RNA, 19 nt, Artificial Sequence
  Description of Artificial Sequence: Synthetic oligonucleotide
ggguccgaggaccucuauu

SEQ ID NO: 2040548 - RNA, 19 nt, Artificial Sequence
  Description of Artificial Sequence: Synthetic oligonucleotide
gcgaccgccuguccaugaa

SEQ ID NO: 2040549 - RNA, 19 nt, Artificial Sequence
  Description of Artificial Sequence: Synthetic oligonucleotide
cccagccgaugcaauaccu

SEQ ID NO: 2040550 - RNA, 19 nt, Artificial Sequence
  Description of Artificial Sequence: Synthetic oligonucleotide
gguuuucaguccggagccu

SEQ ID NO: 2040551 - RNA, 19 nt, Artificial Sequence
  Description of Artificial Sequence: Synthetic oligonucleotide
ccaccaaagucacgaggcu

SEQ ID NO: 2040552 - RNA, 19 nt, Artificial Sequence
  Description of Artificial Sequence: Synthetic oligonucleotide
cccugaaggcucucagugu

SEQ ID NO: 2040553 - RNA, 19 nt, Artificial Sequence
  Description of Artificial Sequence: Synthetic oligonucleotide
ugcggcccugaaggcucuc

SEQ ID NO: 2040554 - RNA, 19 nt, Artificial Sequence
  Description of Artificial Sequence: Synthetic oligonucleotide
cucgcaccagcuccugcuu

SEQ ID NO: 2040555 - RNA, 19 nt, Artificial Sequence
  Description of Artificial Sequence: Synthetic oligonucleotide
gugacccagcuggccugca

SEQ ID NO: 2040556 - RNA, 19 nt, Artificial Sequence
  Description of Artificial Sequence: Synthetic oligonucleotide
gccaguggcgcuugcgcuu

SEQ ID NO: 2040557 - RNA, 19 nt, Artificial Sequence
  Description of Artificial Sequence: Synthetic oligonucleotide
cacgaggcucaugggcugu

SEQ ID NO: 2040558 - RNA, 19 nt, Artificial Sequence
  Description of Artificial Sequence: Synthetic oligonucleotide
ccaggucacggucauccau

SEQ ID NO: 2040559 - RNA, 19 nt, Artificial Sequence
  Description of Artificial Sequence: Synthetic oligonucleotide
ggcgggcaacgagaggucu

SEQ ID NO: 2040560 - RNA, 19 nt, Artificial Sequence
  Description of Artificial Sequence: Synthetic oligonucleotide
gagagcccguggagcacau

SEQ ID NO: 2040561 - RNA, 19 nt, Artificial Sequence
  Description of Artificial Sequence: Synthetic oligonucleotide
cgucucgguuccacaucuc

SEQ ID NO: 2040562 - RNA, 19 nt, Artificial Sequence
  Description of Artificial Sequence: Synthetic oligonucleotide
ccggagccucuccaccuca

SEQ ID NO: 2040563 - RNA, 19 nt, Artificial Sequence
  Description of Artificial Sequence: Synthetic oligonucleotide
cacggacccgggaggcccu

SEQ ID NO: 2040564 - RNA, 19 nt, Artificial Sequence
  Description of Artificial Sequence: Synthetic oligonucleotide
ccggggcagcugaugccuc

SEQ ID NO: 2040565 - RNA, 19 nt, Artificial Sequence
  Description of Artificial Sequence: Synthetic oligonucleotide
gggaggcccucuggcucug

SEQ ID NO: 2040566 - RNA, 19 nt, Artificial Sequence
  Description of Artificial Sequence: Synthetic oligonucleotide
cgccucucuagauccaggu

SEQ ID NO: 2040567 - RNA, 19 nt, Artificial Sequence
  Description of Artificial Sequence: Synthetic oligonucleotide
agcugccgucucgguucca

SEQ ID NO: 2040568 - RNA, 19 nt, Artificial Sequence
  Description of Artificial Sequence: Synthetic oligonucleotide
cgugggcucuggguccgag

SEQ ID NO: 2040569 - RNA, 19 nt, Artificial Sequence
  Description of Artificial Sequence: Synthetic oligonucleotide
cggcgggcaacgagagguc

SEQ ID NO: 2040570 - RNA, 19 nt, Artificial Sequence
  Description of Artificial Sequence: Synthetic oligonucleotide
ccccaugagcucggcccug

SEQ ID NO: 2040571 - RNA, 19 nt, Artificial Sequence
  Description of Artificial Sequence: Synthetic oligonucleotide
gcccucuggcucugucucu

SEQ ID NO: 2040572 - RNA, 19 nt, Artificial Sequence
  Description of Artificial Sequence: Synthetic oligonucleotide
cguggagcacauccaaguu

SEQ ID NO: 2040573 - RNA, 19 nt, Artificial Sequence
  Description of Artificial Sequence: Synthetic oligonucleotide
ccugccggagccucugguu

SEQ ID NO: 2040574 - RNA, 19 nt, Artificial Sequence
  Description of Artificial Sequence: Synthetic oligonucleotide
cgaccgccuguccaugaaa

SEQ ID NO: 2040575 - RNA, 19 nt, Artificial Sequence
  Description of Artificial Sequence: Synthetic oligonucleotide
gcgggcaacgagaggucuu

SEQ ID NO: 2040576 - RNA, 19 nt, Artificial Sequence
  Description of Artificial Sequence: Synthetic oligonucleotide
gcgcuuugauggccgccuu

SEQ ID NO: 2040577 - RNA, 19 nt, Artificial Sequence
  Description of Artificial Sequence: Synthetic oligonucleotide
ccaguggcgcuugcgcuuu

SEQ ID NO: 2040578 - RNA, 19 nt, Artificial Sequence
  Description of Artificial Sequence: Synthetic oligonucleotide
cgggcaacgagaggucuuu

SEQ ID NO: 2040579 - RNA, 19 nt, Artificial Sequence
  Description of Artificial Sequence: Synthetic oligonucleotide
ccgugggcucuggguccga

SEQ ID NO: 2040580 - RNA, 19 nt, Artificial Sequence
  Description of Artificial Sequence: Synthetic oligonucleotide
cggacccgggaggcccucu

SEQ ID NO: 2040581 - RNA, 19 nt, Artificial Sequence
  Description of Artificial Sequence: Synthetic oligonucleotide
aaaucuacuucuuaaaucc

SEQ ID NO: 2040582 - RNA, 19 nt, Artificial Sequence
  Description of Artificial Sequence: Synthetic oligonucleotide
auaacuacuucacagaucc

SEQ ID NO: 2040583 - RNA, 19 nt, Artificial Sequence
  Description of Artificial Sequence: Synthetic oligonucleotide
aaaauuuguaaaauguugc

SEQ ID NO: 2040584 - RNA, 19 nt, Artificial Sequence
  Description of Artificial Sequence: Synthetic oligonucleotide
gauaaaggcacauaagugg

SEQ ID NO: 2040585 - RNA, 19 nt, Artificial Sequence
  Description of Artificial Sequence: Synthetic oligonucleotide
uuaaaugucucuuauauga

SEQ ID NO: 2040586 - RNA, 19 nt, Artificial Sequence
  Description of Artificial Sequence: Synthetic oligonucleotide
auauuuaauauauugucac

SEQ ID NO: 2040587 - RNA, 19 nt, Artificial Sequence
  Description of Artificial Sequence: Synthetic oligonucleotide
auauaguuagcauuuauac

SEQ ID NO: 2040588 - RNA, 19 nt, Artificial Sequence
  Description of Artificial Sequence: Synthetic oligonucleotide
aaucggauuuuguugagcc

SEQ ID NO: 2040589 - RNA, 19 nt, Artificial Sequence
  Description of Artificial Sequence: Synthetic oligonucleotide
cauuaugacaaauaguugc

SEQ ID NO: 2040590 - RNA, 19 nt, Artificial Sequence
  Description of Artificial Sequence: Synthetic oligonucleotide
uacauuaugacaaauaguu

SEQ ID NO: 2040591 - RNA, 19 nt, Artificial Sequence
  Description of Artificial Sequence: Synthetic oligonucleotide
aguacauuaugacaaauag

SEQ ID NO: 2040592 - RNA, 19 nt, Artificial Sequence
  Description of Artificial Sequence: Synthetic oligonucleotide
uuauaugagaaccauauua

SEQ ID NO: 2040593 - RNA, 19 nt, Artificial Sequence
  Description of Artificial Sequence: Synthetic oligonucleotide
aaacuaguaccacauuagc

SEQ ID NO: 2040594 - RNA, 19 nt, Artificial Sequence
  Description of Artificial Sequence: Synthetic oligonucleotide
acaauuaucaacuuauaca

SEQ ID NO: 2040595 - RNA, 19 nt, Artificial Sequence
  Description of Artificial Sequence: Synthetic oligonucleotide
cuaaaacaaagauaaaggc

SEQ ID NO: 2040596 - RNA, 19 nt, Artificial Sequence
  Description of Artificial Sequence: Synthetic oligonucleotide
aaguugauuuaauaacuac

SEQ ID NO: 2040597 - RNA, 19 nt, Artificial Sequence
  Description of Artificial Sequence: Synthetic oligonucleotide
uaaaauguugccaggaagc

SEQ ID NO: 2040598 - RNA, 19 nt, Artificial Sequence
  Description of Artificial Sequence: Synthetic oligonucleotide
ucaggugugaauaaacuag

SEQ ID NO: 2040599 - RNA, 19 nt, Artificial Sequence
  Description of Artificial Sequence: Synthetic oligonucleotide
aaaugggcaaacuaucuag

SEQ ID NO: 2040600 - RNA, 19 nt, Artificial Sequence
  Description of Artificial Sequence: Synthetic oligonucleotide
uaauauauugucacuacug

SEQ ID NO: 2040601 - RNA, 19 nt, Artificial Sequence
  Description of Artificial Sequence: Synthetic oligonucleotide
uuuaaaauuaccagucucu

SEQ ID NO: 2040602 - RNA, 19 nt, Artificial Sequence
  Description of Artificial Sequence: Synthetic oligonucleotide
aagaauggaguuaaguagc

SEQ ID NO: 2040603 - RNA, 19 nt, Artificial Sequence
  Description of Artificial Sequence: Synthetic oligonucleotide
auaguuagcauuuauacau

SEQ ID NO: 2040604 - RNA, 19 nt, Artificial Sequence
  Description of Artificial Sequence: Synthetic oligonucleotide
auuuguaaaauguugccag

SEQ ID NO: 2040605 - RNA, 19 nt, Artificial Sequence
  Description of Artificial Sequence: Synthetic oligonucleotide
aacauaaaagcaaacugac

SEQ ID NO: 2040606 - RNA, 19 nt, Artificial Sequence
  Description of Artificial Sequence: Synthetic oligonucleotide
uuaaguugauuuaauaacu

SEQ ID NO: 2040607 - RNA, 19 nt, Artificial Sequence
  Description of Artificial Sequence: Synthetic oligonucleotide
aaccauauuaaguugauuu

SEQ ID NO: 2040608 - RNA, 19 nt, Artificial Sequence
  Description of Artificial Sequence: Synthetic oligonucleotide
uauauugucacuacuggga

SEQ ID NO: 2040609 - RNA, 19 nt, Artificial Sequence
  Description of Artificial Sequence: Synthetic oligonucleotide
ucuuauaugagaaccauau

SEQ ID NO: 2040610 - RNA, 19 nt, Artificial Sequence
  Description of Artificial Sequence: Synthetic oligonucleotide
uaaacuaguaccacauuag

SEQ ID NO: 2040611 - RNA, 19 nt, Artificial Sequence
  Description of Artificial Sequence: Synthetic oligonucleotide
uuguuaauauuuaauauau

SEQ ID NO: 2040612 - RNA, 19 nt, Artificial Sequence
  Description of Artificial Sequence: Synthetic oligonucleotide
ucaacuuauacaaaucacu

SEQ ID NO: 2040613 - RNA, 19 nt, Artificial Sequence
  Description of Artificial Sequence: Synthetic oligonucleotide
acuaguaccacauuagcug

SEQ ID NO: 2040614 - RNA, 19 nt, Artificial Sequence
  Description of Artificial Sequence: Synthetic oligonucleotide
ugagccguggcuuuaaccg

SEQ ID NO: 2040615 - RNA, 19 nt, Artificial Sequence
  Description of Artificial Sequence: Synthetic oligonucleotide
guugccuuaucuuaagugg

SEQ ID NO: 2040616 - RNA, 19 nt, Artificial Sequence
  Description of Artificial Sequence: Synthetic oligonucleotide
acuacugggagauauaacu

SEQ ID NO: 2040617 - RNA, 19 nt, Artificial Sequence
  Description of Artificial Sequence: Synthetic oligonucleotide
uaugagaaccauauuaagu

SEQ ID NO: 2040618 - RNA, 19 nt, Artificial Sequence
  Description of Artificial Sequence: Synthetic oligonucleotide
aauguuaccuuuacuguac

SEQ ID NO: 2040619 - RNA, 19 nt, Artificial Sequence
  Description of Artificial Sequence: Synthetic oligonucleotide
auuaucaacuuauacaaau

SEQ ID NO: 2040620 - RNA, 19 nt, Artificial Sequence
  Description of Artificial Sequence: Synthetic oligonucleotide
uuugaguguauacaaagaa

SEQ ID NO: 2040621 - RNA, 19 nt, Artificial Sequence
  Description of Artificial Sequence: Synthetic oligonucleotide
auuccaauauuucaggugu

SEQ ID NO: 2040622 - RNA, 19 nt, Artificial Sequence
  Description of Artificial Sequence: Synthetic oligonucleotide
uguucagcauccuugaaug

SEQ ID NO: 2040623 - RNA, 19 nt, Artificial Sequence
  Description of Artificial Sequence: Synthetic oligonucleotide
aauauuucaggugugaaua

SEQ ID NO: 2040624 - RNA, 19 nt, Artificial Sequence
  Description of Artificial Sequence: Synthetic oligonucleotide
ucuuaaguggaauuuaaaa

SEQ ID NO: 2040625 - RNA, 19 nt, Artificial Sequence
  Description of Artificial Sequence: Synthetic oligonucleotide
aaacuaucuagccuuucag

SEQ ID NO: 2040626 - RNA, 19 nt, Artificial Sequence
  Description of Artificial Sequence: Synthetic oligonucleotide
guggauaacaacuugugug

SEQ ID NO: 2040627 - RNA, 19 nt, Artificial Sequence
  Description of Artificial Sequence: Synthetic oligonucleotide
aguggaauuuaaaaguccc

SEQ ID NO: 2040628 - RNA, 19 nt, Artificial Sequence
  Description of Artificial Sequence: Synthetic oligonucleotide
auauauugucacuacuggg

SEQ ID NO: 2040629 - RNA, 19 nt, Artificial Sequence
  Description of Artificial Sequence: Synthetic oligonucleotide
uggaauuuaaaagucccgg

SEQ ID NO: 2040630 - RNA, 19 nt, Artificial Sequence
  Description of Artificial Sequence: Synthetic oligonucleotide
uuuucuacucuugauuugg

SEQ ID NO: 2040631 - RNA, 19 nt, Artificial Sequence
  Description of Artificial Sequence: Synthetic oligonucleotide
uuuaaaugggcaaacuauc

SEQ ID NO: 2040632 - RNA, 19 nt, Artificial Sequence
  Description of Artificial Sequence: Synthetic oligonucleotide
uagcauuuauacaugacac

SEQ ID NO: 2040633 - RNA, 19 nt, Artificial Sequence
  Description of Artificial Sequence: Synthetic oligonucleotide
uuaaauccuaaaacaaaga

SEQ ID NO: 2040634 - RNA, 19 nt, Artificial Sequence
  Description of Artificial Sequence: Synthetic oligonucleotide
aacugacauucauaguuac

SEQ ID NO: 2040635 - RNA, 19 nt, Artificial Sequence
  Description of Artificial Sequence: Synthetic oligonucleotide
uaagugaugaggugugacg

SEQ ID NO: 2040636 - RNA, 19 nt, Artificial Sequence
  Description of Artificial Sequence: Synthetic oligonucleotide
aaugaacaaacucauuuua

SEQ ID NO: 2040637 - RNA, 19 nt, Artificial Sequence
  Description of Artificial Sequence: Synthetic oligonucleotide
acaaauaguugccuuaucu

SEQ ID NO: 2040638 - RNA, 19 nt, Artificial Sequence
  Description of Artificial Sequence: Synthetic oligonucleotide
gaaaucuacuucuuaaauc

SEQ ID NO: 2040639 - RNA, 19 nt, Artificial Sequence
  Description of Artificial Sequence: Synthetic oligonucleotide
ugaauaaacuaguaccaca

SEQ ID NO: 2040640 - RNA, 19 nt, Artificial Sequence
  Description of Artificial Sequence: Synthetic oligonucleotide
aauuuguaaaauguugcca

SEQ ID NO: 2040641 - RNA, 19 nt, Artificial Sequence
  Description of Artificial Sequence: Synthetic oligonucleotide
uuuguaaaauguugccagg

SEQ ID NO: 2040642 - RNA, 19 nt, Artificial Sequence
  Description of Artificial Sequence: Synthetic oligonucleotide
aaagugaaagaagugaaaa

SEQ ID NO: 2040643 - RNA, 19 nt, Artificial Sequence
  Description of Artificial Sequence: Synthetic oligonucleotide
ucaguaacuaccccguagc

SEQ ID NO: 2040644 - RNA, 19 nt, Artificial Sequence
  Description of Artificial Sequence: Synthetic oligonucleotide
aaaugaacaaacucauuuu

SEQ ID NO: 2040645 - RNA, 19 nt, Artificial Sequence
  Description of Artificial Sequence: Synthetic oligonucleotide
uuaaaugggcaaacuaucu

SEQ ID NO: 2040646 - RNA, 19 nt, Artificial Sequence
  Description of Artificial Sequence: Synthetic oligonucleotide
aagcauacagacuaugaau

SEQ ID NO: 2040647 - RNA, 19 nt, Artificial Sequence
  Description of Artificial Sequence: Synthetic oligonucleotide
aaaugucucuuauaugaga

SEQ ID NO: 2040648 - RNA, 19 nt, Artificial Sequence
  Description of Artificial Sequence: Synthetic oligonucleotide
aaugggcaaacuaucuagc

SEQ ID NO: 2040649 - RNA, 19 nt, Artificial Sequence
  Description of Artificial Sequence: Synthetic oligonucleotide
guugccaggaagcauacag

SEQ ID NO: 2040650 - RNA, 19 nt, Artificial Sequence
  Description of Artificial Sequence: Synthetic oligonucleotide
guaaaauguugccaggaag

SEQ ID NO: 2040651 - RNA, 19 nt, Artificial Sequence
  Description of Artificial Sequence: Synthetic oligonucleotide
uuaccgauaauguaugaaa

SEQ ID NO: 2040652 - RNA, 19 nt, Artificial Sequence
  Description of Artificial Sequence: Synthetic oligonucleotide
aucacauuccaauauuuca

SEQ ID NO: 2040653 - RNA, 19 nt, Artificial Sequence
  Description of Artificial Sequence: Synthetic oligonucleotide
uauacaugacacauuugga

SEQ ID NO: 2040654 - RNA, 19 nt, Artificial Sequence
  Description of Artificial Sequence: Synthetic oligonucleotide
uucaguaacuaccccguag

SEQ ID NO: 2040655 - RNA, 19 nt, Artificial Sequence
  Description of Artificial Sequence: Synthetic oligonucleotide
auaaacuaguaccacauua

SEQ ID NO: 2040656 - RNA, 19 nt, Artificial Sequence
  Description of Artificial Sequence: Synthetic oligonucleotide
uggauaacaacuugugugu

SEQ ID NO: 2040657 - RNA, 19 nt, Artificial Sequence
  Description of Artificial Sequence: Synthetic oligonucleotide
uaauaacuacuucacagau

SEQ ID NO: 2040658 - RNA, 19 nt, Artificial Sequence
  Description of Artificial Sequence: Synthetic oligonucleotide
ugaacaaacucauuuuaaa

SEQ ID NO: 2040659 - RNA, 19 nt, Artificial Sequence
  Description of Artificial Sequence: Synthetic oligonucleotide
uguagugcagugcaggcac

SEQ ID NO: 2040660 - RNA, 19 nt, Artificial Sequence
  Description of Artificial Sequence: Synthetic oligonucleotide
auaugagaaccauauuaag

SEQ ID NO: 2040661 - RNA, 19 nt, Artificial Sequence
  Description of Artificial Sequence: Synthetic oligonucleotide
uucauaguuacaaguguac

SEQ ID NO: 2040662 - RNA, 19 nt, Artificial Sequence
  Description of Artificial Sequence: Synthetic oligonucleotide
acugaauauaguuagcauu

SEQ ID NO: 2040663 - RNA, 19 nt, Artificial Sequence
  Description of Artificial Sequence: Synthetic oligonucleotide
aauaacuacuucacagauc

SEQ ID NO: 2040664 - RNA, 19 nt, Artificial Sequence
  Description of Artificial Sequence: Synthetic oligonucleotide
auuaaaugucucuuauaug

SEQ ID NO: 2040665 - RNA, 19 nt, Artificial Sequence
  Description of Artificial Sequence: Synthetic oligonucleotide
uuaucaacuuauacaaauc

SEQ ID NO: 2040666 - RNA, 19 nt, Artificial Sequence
  Description of Artificial Sequence: Synthetic oligonucleotide
aacuaucuagccuuucagu

SEQ ID NO: 2040667 - RNA, 19 nt, Artificial Sequence
  Description of Artificial Sequence: Synthetic oligonucleotide
agacaaaugaacaaacuca

SEQ ID NO: 2040668 - RNA, 19 nt, Artificial Sequence
  Description of Artificial Sequence: Synthetic oligonucleotide
ucuacucuugauuuggaaa

SEQ ID NO: 2040669 - RNA, 19 nt, Artificial Sequence
  Description of Artificial Sequence: Synthetic oligonucleotide
auauugucacuacugggag

SEQ ID NO: 2040670 - RNA, 19 nt, Artificial Sequence
  Description of Artificial Sequence: Synthetic oligonucleotide
uuucaggugugaauaaacu

SEQ ID NO: 2040671 - RNA, 19 nt, Artificial Sequence
  Description of Artificial Sequence: Synthetic oligonucleotide
uuugcgaccugaaucuuug

SEQ ID NO: 2040672 - RNA, 19 nt, Artificial Sequence
  Description of Artificial Sequence: Synthetic oligonucleotide
acauaaguggauaacaacu

SEQ ID NO: 2040673 - RNA, 19 nt, Artificial Sequence
  Description of Artificial Sequence: Synthetic oligonucleotide
uuaaccguccacuggagcu

SEQ ID NO: 2040674 - RNA, 19 nt, Artificial Sequence
  Description of Artificial Sequence: Synthetic oligonucleotide
uugaguguauacaaagaaa

SEQ ID NO: 2040675 - RNA, 19 nt, Artificial Sequence
  Description of Artificial Sequence: Synthetic oligonucleotide
aguugccuuaucuuaagug

SEQ ID NO: 2040676 - RNA, 19 nt, Artificial Sequence
  Description of Artificial Sequence: Synthetic oligonucleotide
ucggaaucggauuuuguug

SEQ ID NO: 2040677 - RNA, 19 nt, Artificial Sequence
  Description of Artificial Sequence: Synthetic oligonucleotide
auacaugacacauuuggau

SEQ ID NO: 2040678 - RNA, 19 nt, Artificial Sequence
  Description of Artificial Sequence: Synthetic oligonucleotide
cacaauuaucaacuuauac

SEQ ID NO: 2040679 - RNA, 19 nt, Artificial Sequence
  Description of Artificial Sequence: Synthetic oligonucleotide
ugagaaccauauuaaguug

SEQ ID NO: 2040680 - RNA, 19 nt, Artificial Sequence
  Description of Artificial Sequence: Synthetic oligonucleotide
aggcuuugcgaccugaauc

SEQ ID NO: 2040681 - RNA, 19 nt, Artificial Sequence
  Description of Artificial Sequence: Synthetic oligonucleotide
ugaauguauuaauaaaauu

SEQ ID NO: 2040682 - RNA, 19 nt, Artificial Sequence
  Description of Artificial Sequence: Synthetic oligonucleotide
cacauuccaauauuucagg

SEQ ID NO: 2040683 - RNA, 19 nt, Artificial Sequence
  Description of Artificial Sequence: Synthetic oligonucleotide
aucaacuuauacaaaucac

SEQ ID NO: 2040684 - RNA, 19 nt, Artificial Sequence
  Description of Artificial Sequence: Synthetic oligonucleotide
uaucuagccuuucaguaac

SEQ ID NO: 2040685 - RNA, 19 nt, Artificial Sequence
  Description of Artificial Sequence: Synthetic oligonucleotide
auaguuacaaguguaccug

SEQ ID NO: 2040686 - RNA, 19 nt, Artificial Sequence
  Description of Artificial Sequence: Synthetic oligonucleotide
cuuguuaauauuuaauaua

SEQ ID NO: 2040687 - RNA, 19 nt, Artificial Sequence
  Description of Artificial Sequence: Synthetic oligonucleotide
cuaguaccacauuagcugc

SEQ ID NO: 2040688 - RNA, 19 nt, Artificial Sequence
  Description of Artificial Sequence: Synthetic oligonucleotide
aacuuauacaaaucacuuu

SEQ ID NO: 2040689 - RNA, 19 nt, Artificial Sequence
  Description of Artificial Sequence: Synthetic oligonucleotide
aacaacuugugugugugug

SEQ ID NO: 2040690 - RNA, 19 nt, Artificial Sequence
  Description of Artificial Sequence: Synthetic oligonucleotide
uaucuuaaguggaauuuaa

SEQ ID NO: 2040691 - RNA, 19 nt, Artificial Sequence
  Description of Artificial Sequence: Synthetic oligonucleotide
cauuccaauauuucaggug

SEQ ID NO: 2040692 - RNA, 19 nt, Artificial Sequence
  Description of Artificial Sequence: Synthetic oligonucleotide
uguaaaauguugccaggaa

SEQ ID NO: 2040693 - RNA, 19 nt, Artificial Sequence
  Description of Artificial Sequence: Synthetic oligonucleotide
uuguaagugaugaggugug

SEQ ID NO: 2040694 - RNA, 19 nt, Artificial Sequence
  Description of Artificial Sequence: Synthetic oligonucleotide
gagaguuuguaagugauga

SEQ ID NO: 2040695 - RNA, 19 nt, Artificial Sequence
  Description of Artificial Sequence: Synthetic oligonucleotide
uuaaaagucccggauggga

SEQ ID NO: 2040696 - RNA, 19 nt, Artificial Sequence
  Description of Artificial Sequence: Synthetic oligonucleotide
gauuuuguugagccguggc

SEQ ID NO: 2040697 - RNA, 19 nt, Artificial Sequence
  Description of Artificial Sequence: Synthetic oligonucleotide
ucauaguuacaaguguacc

SEQ ID NO: 2040698 - RNA, 19 nt, Artificial Sequence
  Description of Artificial Sequence: Synthetic oligonucleotide
aaaauguugccaggaagca

SEQ ID NO: 2040699 - RNA, 19 nt, Artificial Sequence
  Description of Artificial Sequence: Synthetic oligonucleotide
ugcuuaccgauaauguaug

SEQ ID NO: 2040700 - RNA, 19 nt, Artificial Sequence
  Description of Artificial Sequence: Synthetic oligonucleotide
agauaaaggcacauaagug

SEQ ID NO: 2040701 - RNA, 19 nt, Artificial Sequence
  Description of Artificial Sequence: Synthetic oligonucleotide
auuaccagucucuuguuaa

SEQ ID NO: 2040702 - RNA, 19 nt, Artificial Sequence
  Description of Artificial Sequence: Synthetic oligonucleotide
acuaucuagccuuucagua

SEQ ID NO: 2040703 - RNA, 19 nt, Artificial Sequence
  Description of Artificial Sequence: Synthetic oligonucleotide
uaaaagucccggaugggaa

SEQ ID NO: 2040704 - RNA, 19 nt, Artificial Sequence
  Description of Artificial Sequence: Synthetic oligonucleotide
aacuaguaccacauuagcu

SEQ ID NO: 2040705 - RNA, 19 nt, Artificial Sequence
  Description of Artificial Sequence: Synthetic oligonucleotide
auauaacauaaaagcaaac

SEQ ID NO: 2040706 - RNA, 19 nt, Artificial Sequence
  Description of Artificial Sequence: Synthetic oligonucleotide
uugccuuaucuuaagugga

SEQ ID NO: 2040707 - RNA, 19 nt, Artificial Sequence
  Description of Artificial Sequence: Synthetic oligonucleotide
auuagcugcauuuuauaua

SEQ ID NO: 2040708 - RNA, 19 nt, Artificial Sequence
  Description of Artificial Sequence: Synthetic oligonucleotide
aguuagcauuuauacauga

SEQ ID NO: 2040709 - RNA, 19 nt, Artificial Sequence
  Description of Artificial Sequence: Synthetic oligonucleotide
uuuaaccguccacuggagc

SEQ ID NO: 2040710 - RNA, 19 nt, Artificial Sequence
  Description of Artificial Sequence: Synthetic oligonucleotide
cacauaaguggauaacaac

SEQ ID NO: 2040711 - RNA, 19 nt, Artificial Sequence
  Description of Artificial Sequence: Synthetic oligonucleotide
guaagcuuauucugcacug

SEQ ID NO: 2040712 - RNA, 19 nt, Artificial Sequence
  Description of Artificial Sequence: Synthetic oligonucleotide
uaguuagcauuuauacaug

SEQ ID NO: 2040713 - RNA, 19 nt, Artificial Sequence
  Description of Artificial Sequence: Synthetic oligonucleotide
uacaugacacauuuggauu

SEQ ID NO: 2040714 - RNA, 19 nt, Artificial Sequence
  Description of Artificial Sequence: Synthetic oligonucleotide
uguguguguguguagugca

SEQ ID NO: 2040715 - RNA, 19 nt, Artificial Sequence
  Description of Artificial Sequence: Synthetic oligonucleotide
uaccgauaauguaugaaau

SEQ ID NO: 2040716 - RNA, 19 nt, Artificial Sequence
  Description of Artificial Sequence: Synthetic oligonucleotide
uugaaaguuuccagcgccc

SEQ ID NO: 2040717 - RNA, 19 nt, Artificial Sequence
  Description of Artificial Sequence: Synthetic oligonucleotide
aauaguugccuuaucuuaa

SEQ ID NO: 2040718 - RNA, 19 nt, Artificial Sequence
  Description of Artificial Sequence: Synthetic oligonucleotide
ugggcaaacuaucuagccu

SEQ ID NO: 2040719 - RNA, 19 nt, Artificial Sequence
  Description of Artificial Sequence: Synthetic oligonucleotide
aaguggauaacaacuugug

SEQ ID NO: 2040720 - RNA, 19 nt, Artificial Sequence
  Description of Artificial Sequence: Synthetic oligonucleotide
ugccaggaagcauacagac

SEQ ID NO: 2040721 - RNA, 19 nt, Artificial Sequence
  Description of Artificial Sequence: Synthetic oligonucleotide
auaguugccuuaucuuaag

SEQ ID NO: 2040722 - RNA, 19 nt, Artificial Sequence
  Description of Artificial Sequence: Synthetic oligonucleotide
aauaaacuaguaccacauu

SEQ ID NO: 2040723 - RNA, 19 nt, Artificial Sequence
  Description of Artificial Sequence: Synthetic oligonucleotide
aaguguaccuggaagacaa

SEQ ID NO: 2040724 - RNA, 19 nt, Artificial Sequence
  Description of Artificial Sequence: Synthetic oligonucleotide
ugcgaccugaaucuuuggc

SEQ ID NO: 2040725 - RNA, 19 nt, Artificial Sequence
  Description of Artificial Sequence: Synthetic oligonucleotide
uacugggagauauaacuuc

SEQ ID NO: 2040726 - RNA, 19 nt, Artificial Sequence
  Description of Artificial Sequence: Synthetic oligonucleotide
uucaggugugaauaaacua

SEQ ID NO: 2040727 - RNA, 19 nt, Artificial Sequence
  Description of Artificial Sequence: Synthetic oligonucleotide
augaaaucuacuucuuaaa

SEQ ID NO: 2040728 - RNA, 19 nt, Artificial Sequence
  Description of Artificial Sequence: Synthetic oligonucleotide
uaugacaaauaguugccuu

SEQ ID NO: 2040729 - RNA, 19 nt, Artificial Sequence
  Description of Artificial Sequence: Synthetic oligonucleotide
acgagaaguggguugggag

SEQ ID NO: 2040730 - RNA, 19 nt, Artificial Sequence
  Description of Artificial Sequence: Synthetic oligonucleotide
aguuuguaagugaugaggu

SEQ ID NO: 2040731 - RNA, 19 nt, Artificial Sequence
  Description of Artificial Sequence: Synthetic oligonucleotide
ugcaggcacgagaaguggg

SEQ ID NO: 2040732 - RNA, 19 nt, Artificial Sequence
  Description of Artificial Sequence: Synthetic oligonucleotide
aguaacuaccccguagcuc

SEQ ID NO: 2040733 - RNA, 19 nt, Artificial Sequence
  Description of Artificial Sequence: Synthetic oligonucleotide
aaaguuuccagcgcccacu

SEQ ID NO: 2040734 - RNA, 19 nt, Artificial Sequence
  Description of Artificial Sequence: Synthetic oligonucleotide
aaaagugaaagaagugaaa

SEQ ID NO: 2040735 - RNA, 19 nt, Artificial Sequence
  Description of Artificial Sequence: Synthetic oligonucleotide
ggugugaauaaacuaguac

SEQ ID NO: 2040736 - RNA, 19 nt, Artificial Sequence
  Description of Artificial Sequence: Synthetic oligonucleotide
uaccccguagcucuuugag

SEQ ID NO: 2040737 - RNA, 19 nt, Artificial Sequence
  Description of Artificial Sequence: Synthetic oligonucleotide
ugaucuggguucggaaucg

SEQ ID NO: 2040738 - RNA, 19 nt, Artificial Sequence
  Description of Artificial Sequence: Synthetic oligonucleotide
guaacuaccccguagcucu

SEQ ID NO: 2040739 - RNA, 19 nt, Artificial Sequence
  Description of Artificial Sequence: Synthetic oligonucleotide
auaaaggcacauaagugga

SEQ ID NO: 2040740 - RNA, 19 nt, Artificial Sequence
  Description of Artificial Sequence: Synthetic oligonucleotide
ucggauuuuguugagccgu

SEQ ID NO: 2040741 - RNA, 19 nt, Artificial Sequence
  Description of Artificial Sequence: Synthetic oligonucleotide
ugcacugaauauaguuagc

SEQ ID NO: 2040742 - RNA, 19 nt, Artificial Sequence
  Description of Artificial Sequence: Synthetic oligonucleotide
aucggauuuuguugagccg

SEQ ID NO: 2040743 - RNA, 19 nt, Artificial Sequence
  Description of Artificial Sequence: Synthetic oligonucleotide
agacuaugaauguauuaau

SEQ ID NO: 2040744 - RNA, 19 nt, Artificial Sequence
  Description of Artificial Sequence: Synthetic oligonucleotide
cuagccuuucaguaacuac

SEQ ID NO: 2040745 - RNA, 19 nt, Artificial Sequence
  Description of Artificial Sequence: Synthetic oligonucleotide
uguaugaaaucuacuucuu

SEQ ID NO: 2040746 - RNA, 19 nt, Artificial Sequence
  Description of Artificial Sequence: Synthetic oligonucleotide
uucggaaucggauuuuguu

SEQ ID NO: 2040747 - RNA, 19 nt, Artificial Sequence
  Description of Artificial Sequence: Synthetic oligonucleotide
aagugcuuaccgauaaugu

SEQ ID NO: 2040748 - RNA, 19 nt, Artificial Sequence
  Description of Artificial Sequence: Synthetic oligonucleotide
aagcuuauucugcacugaa

SEQ ID NO: 2040749 - RNA, 19 nt, Artificial Sequence
  Description of Artificial Sequence: Synthetic oligonucleotide
agacagacaucacauucca

SEQ ID NO: 2040750 - RNA, 19 nt, Artificial Sequence
  Description of Artificial Sequence: Synthetic oligonucleotide
accauauuaaguugauuua

SEQ ID NO: 2040751 - RNA, 19 nt, Artificial Sequence
  Description of Artificial Sequence: Synthetic oligonucleotide
auugucacuacugggagau

SEQ ID NO: 2040752 - RNA, 19 nt, Artificial Sequence
  Description of Artificial Sequence: Synthetic oligonucleotide
acaugacacauuuggauuu

SEQ ID NO: 2040753 - RNA, 19 nt, Artificial Sequence
  Description of Artificial Sequence: Synthetic oligonucleotide
uuaucuuaaguggaauuua

SEQ ID NO: 2040754 - RNA, 19 nt, Artificial Sequence
  Description of Artificial Sequence: Synthetic oligonucleotide
uuuccagcgcccacucccg

SEQ ID NO: 2040755 - RNA, 19 nt, Artificial Sequence
  Description of Artificial Sequence: Synthetic oligonucleotide
guggaauuuaaaagucccg

SEQ ID NO: 2040756 - RNA, 19 nt, Artificial Sequence
  Description of Artificial Sequence: Synthetic oligonucleotide
ggaauuguaagcuuauucu

SEQ ID NO: 2040757 - RNA, 19 nt, Artificial Sequence
  Description of Artificial Sequence: Synthetic oligonucleotide
cuuugaguguauacaaaga

SEQ ID NO: 2040758 - RNA, 19 nt, Artificial Sequence
  Description of Artificial Sequence: Synthetic oligonucleotide
uuaugacaaauaguugccu

SEQ ID NO: 2040759 - RNA, 19 nt, Artificial Sequence
  Description of Artificial Sequence: Synthetic oligonucleotide
caaacugacauucauaguu

SEQ ID NO: 2040760 - RNA, 19 nt, Artificial Sequence
  Description of Artificial Sequence: Synthetic oligonucleotide
agugcuuaccgauaaugua

SEQ ID NO: 2040761 - RNA, 19 nt, Artificial Sequence
  Description of Artificial Sequence: Synthetic oligonucleotide
uccaauauuucagguguga

SEQ ID NO: 2040762 - RNA, 19 nt, Artificial Sequence
  Description of Artificial Sequence: Synthetic oligonucleotide
caccuuugaaaguuuccag

SEQ ID NO: 2040763 - RNA, 19 nt, Artificial Sequence
  Description of Artificial Sequence: Synthetic oligonucleotide
aaacaaagauaaaggcaca

SEQ ID NO: 2040764 - RNA, 19 nt, Artificial Sequence
  Description of Artificial Sequence: Synthetic oligonucleotide
uugccaggaagcauacaga

SEQ ID NO: 2040765 - RNA, 19 nt, Artificial Sequence
  Description of Artificial Sequence: Synthetic oligonucleotide
augacaaauaguugccuua

SEQ ID NO: 2040766 - RNA, 19 nt, Artificial Sequence
  Description of Artificial Sequence: Synthetic oligonucleotide
uuucuacucuugauuugga

SEQ ID NO: 2040767 - RNA, 19 nt, Artificial Sequence
  Description of Artificial Sequence: Synthetic oligonucleotide
uugagccguggcuuuaacc

SEQ ID NO: 2040768 - RNA, 19 nt, Artificial Sequence
  Description of Artificial Sequence: Synthetic oligonucleotide
uacuucacagauccucuuc

SEQ ID NO: 2040769 - RNA, 19 nt, Artificial Sequence
  Description of Artificial Sequence: Synthetic oligonucleotide
gggaauuguaagcuuauuc

SEQ ID NO: 2040770 - RNA, 19 nt, Artificial Sequence
  Description of Artificial Sequence: Synthetic oligonucleotide
uguguguguguguguagug

SEQ ID NO: 2040771 - RNA, 19 nt, Artificial Sequence
  Description of Artificial Sequence: Synthetic oligonucleotide
uuccaauauuucaggugug

SEQ ID NO: 2040772 - RNA, 19 nt, Artificial Sequence
  Description of Artificial Sequence: Synthetic oligonucleotide
uucacagauccucuuccuc

SEQ ID NO: 2040773 - RNA, 19 nt, Artificial Sequence
  Description of Artificial Sequence: Synthetic oligonucleotide
gacgggagcaccuuugaaa

SEQ ID NO: 2040774 - RNA, 19 nt, Artificial Sequence
  Description of Artificial Sequence: Synthetic oligonucleotide
uugugugugugugugugug

SEQ ID NO: 2040775 - RNA, 19 nt, Artificial Sequence
  Description of Artificial Sequence: Synthetic oligonucleotide
ucucuuauaugagaaccau

SEQ ID NO: 2040776 - RNA, 19 nt, Artificial Sequence
  Description of Artificial Sequence: Synthetic oligonucleotide
uguguguguguguguguag

SEQ ID NO: 2040777 - RNA, 19 nt, Artificial Sequence
  Description of Artificial Sequence: Synthetic oligonucleotide
acuugugugugugugugug

SEQ ID NO: 2040778 - RNA, 19 nt, Artificial Sequence
  Description of Artificial Sequence: Synthetic oligonucleotide
gagauauaacuucacaauu

SEQ ID NO: 2040779 - RNA, 19 nt, Artificial Sequence
  Description of Artificial Sequence: Synthetic oligonucleotide
aaucuacuucuuaaauccu

SEQ ID NO: 2040780 - RNA, 19 nt, Artificial Sequence
  Description of Artificial Sequence: Synthetic oligonucleotide
guguguagugcagugcagg

SEQ ID NO: 2040781 - RNA, 19 nt, Artificial Sequence
  Description of Artificial Sequence: Synthetic oligonucleotide
uccgguccaucccucggcg

SEQ ID NO: 2040782 - RNA, 19 nt, Artificial Sequence
  Description of Artificial Sequence: Synthetic oligonucleotide
ugucacuacugggagauau

SEQ ID NO: 2040783 - RNA, 19 nt, Artificial Sequence
  Description of Artificial Sequence: Synthetic oligonucleotide
aaauuaccagucucuuguu

SEQ ID NO: 2040784 - RNA, 19 nt, Artificial Sequence
  Description of Artificial Sequence: Synthetic oligonucleotide
cauaguuacaaguguaccu

SEQ ID NO: 2040785 - RNA, 19 nt, Artificial Sequence
  Description of Artificial Sequence: Synthetic oligonucleotide
ucccggaugggaauuguaa

SEQ ID NO: 2040786 - RNA, 19 nt, Artificial Sequence
  Description of Artificial Sequence: Synthetic oligonucleotide
auauuucaggugugaauaa

SEQ ID NO: 2040787 - RNA, 19 nt, Artificial Sequence
  Description of Artificial Sequence: Synthetic oligonucleotide
ucacaauuaucaacuuaua

SEQ ID NO: 2040788 - RNA, 19 nt, Artificial Sequence
  Description of Artificial Sequence: Synthetic oligonucleotide
uucuacucuugauuuggaa

SEQ ID NO: 2040789 - RNA, 19 nt, Artificial Sequence
  Description of Artificial Sequence: Synthetic oligonucleotide
acaacuugugugugugugu

SEQ ID NO: 2040790 - RNA, 19 nt, Artificial Sequence
  Description of Artificial Sequence: Synthetic oligonucleotide
ucacuacugggagauauaa

SEQ ID NO: 2040791 - RNA, 19 nt, Artificial Sequence
  Description of Artificial Sequence: Synthetic oligonucleotide
aaggcuuugcgaccugaau

SEQ ID NO: 2040792 - RNA, 19 nt, Artificial Sequence
  Description of Artificial Sequence: Synthetic oligonucleotide
acucuugauuuggaaauug

SEQ ID NO: 2040793 - RNA, 19 nt, Artificial Sequence
  Description of Artificial Sequence: Synthetic oligonucleotide
accagucucuuguuaauau

SEQ ID NO: 2040794 - RNA, 19 nt, Artificial Sequence
  Description of Artificial Sequence: Synthetic oligonucleotide
cuuuaaccguccacuggag

SEQ ID NO: 2040795 - RNA, 19 nt, Artificial Sequence
  Description of Artificial Sequence: Synthetic oligonucleotide
ugacaaauaguugccuuau

SEQ ID NO: 2040796 - RNA, 19 nt, Artificial Sequence
  Description of Artificial Sequence: Synthetic oligonucleotide
gaaucggauuuuguugagc

SEQ ID NO: 2040797 - RNA, 19 nt, Artificial Sequence
  Description of Artificial Sequence: Synthetic oligonucleotide
gggagauauaacuucacaa

SEQ ID NO: 2040798 - RNA, 19 nt, Artificial Sequence
  Description of Artificial Sequence: Synthetic oligonucleotide
gaaaguuuccagcgcccac

SEQ ID NO: 2040799 - RNA, 19 nt, Artificial Sequence
  Description of Artificial Sequence: Synthetic oligonucleotide
ugaaaguuuccagcgccca

SEQ ID NO: 2040800 - RNA, 19 nt, Artificial Sequence
  Description of Artificial Sequence: Synthetic oligonucleotide
guguguguagugcagugca

SEQ ID NO: 2040801 - RNA, 19 nt, Artificial Sequence
  Description of Artificial Sequence: Synthetic oligonucleotide
ugccuuaucuuaaguggaa

SEQ ID NO: 2040802 - RNA, 19 nt, Artificial Sequence
  Description of Artificial Sequence: Synthetic oligonucleotide
gugaauaaacuaguaccac

SEQ ID NO: 2040803 - RNA, 19 nt, Artificial Sequence
  Description of Artificial Sequence: Synthetic oligonucleotide
gauaacaacuugugugugu

SEQ ID NO: 2040804 - RNA, 19 nt, Artificial Sequence
  Description of Artificial Sequence: Synthetic oligonucleotide
uaagcuuauucugcacuga
